United States Patent Application Publication US 2014/0004565 A1 - sequence listing, part 128

SEQ ID NO: 3211682 - RNA, 19 nt, Artificial Sequence
  Description of Artificial Sequence: Synthetic oligonucleotide
ugggucaucaaucuccugc

SEQ ID NO: 3211683 - RNA, 19 nt, Artificial Sequence
  Description of Artificial Sequence: Synthetic oligonucleotide
uuugaagcaguguugauua

SEQ ID NO: 3211684 - RNA, 19 nt, Artificial Sequence
  Description of Artificial Sequence: Synthetic oligonucleotide
ugugaucuggccaaaguga

SEQ ID NO: 3211685 - RNA, 19 nt, Artificial Sequence
  Description of Artificial Sequence: Synthetic oligonucleotide
uuauuagucgcuuuucuuc

SEQ ID NO: 3211686 - RNA, 19 nt, Artificial Sequence
  Description of Artificial Sequence: Synthetic oligonucleotide
gauuuucacauuucuauca

SEQ ID NO: 3211687 - RNA, 19 nt, Artificial Sequence
  Description of Artificial Sequence: Synthetic oligonucleotide
agauuuucacauuucuauc

SEQ ID NO: 3211688 - RNA, 19 nt, Artificial Sequence
  Description of Artificial Sequence: Synthetic oligonucleotide
uagugcuccaucaugggag

SEQ ID NO: 3211689 - RNA, 19 nt, Artificial Sequence
  Description of Artificial Sequence: Synthetic oligonucleotide
cacccuuugauuuucuugg

SEQ ID NO: 3211690 - RNA, 19 nt, Artificial Sequence
  Description of Artificial Sequence: Synthetic oligonucleotide
aucgugugcaaagagagac

SEQ ID NO: 3211691 - RNA, 19 nt, Artificial Sequence
  Description of Artificial Sequence: Synthetic oligonucleotide
uaguuucucuaucacaggc

SEQ ID NO: 3211692 - RNA, 19 nt, Artificial Sequence
  Description of Artificial Sequence: Synthetic oligonucleotide
agaaguucgaaucccuuag

SEQ ID NO: 3211693 - RNA, 19 nt, Artificial Sequence
  Description of Artificial Sequence: Synthetic oligonucleotide
uucaucugcuucaaggggc

SEQ ID NO: 3211694 - RNA, 19 nt, Artificial Sequence
  Description of Artificial Sequence: Synthetic oligonucleotide
ucuuccaagugacuaguag

SEQ ID NO: 3211695 - RNA, 19 nt, Artificial Sequence
  Description of Artificial Sequence: Synthetic oligonucleotide
aaaacauaacuucacucuu

SEQ ID NO: 3211696 - RNA, 19 nt, Artificial Sequence
  Description of Artificial Sequence: Synthetic oligonucleotide
aaucuucagaugcuucauc

SEQ ID NO: 3211697 - RNA, 19 nt, Artificial Sequence
  Description of Artificial Sequence: Synthetic oligonucleotide
ucucuugagauaaucgaga

SEQ ID NO: 3211698 - RNA, 19 nt, Artificial Sequence
  Description of Artificial Sequence: Synthetic oligonucleotide
aauaguuguuuccuuuagu

SEQ ID NO: 3211699 - RNA, 19 nt, Artificial Sequence
  Description of Artificial Sequence: Synthetic oligonucleotide
cuuccaagugacuaguagc

SEQ ID NO: 3211700 - RNA, 19 nt, Artificial Sequence
  Description of Artificial Sequence: Synthetic oligonucleotide
uuaggcacaaaccguaggu

SEQ ID NO: 3211701 - RNA, 19 nt, Artificial Sequence
  Description of Artificial Sequence: Synthetic oligonucleotide
uugugaucuggccaaagug

SEQ ID NO: 3211702 - RNA, 19 nt, Artificial Sequence
  Description of Artificial Sequence: Synthetic oligonucleotide
cugacuuuugaaauaguug

SEQ ID NO: 3211703 - RNA, 19 nt, Artificial Sequence
  Description of Artificial Sequence: Synthetic oligonucleotide
guucgaaucccuuaggcac

SEQ ID NO: 3211704 - RNA, 19 nt, Artificial Sequence
  Description of Artificial Sequence: Synthetic oligonucleotide
ucucucuugagauaaucga

SEQ ID NO: 3211705 - RNA, 19 nt, Artificial Sequence
  Description of Artificial Sequence: Synthetic oligonucleotide
guacaucacacugucaucg

SEQ ID NO: 3211706 - RNA, 19 nt, Artificial Sequence
  Description of Artificial Sequence: Synthetic oligonucleotide
aucgagaccugccauauug

SEQ ID NO: 3211707 - RNA, 19 nt, Artificial Sequence
  Description of Artificial Sequence: Synthetic oligonucleotide
cauauugaagccaaugaca

SEQ ID NO: 3211708 - RNA, 19 nt, Artificial Sequence
  Description of Artificial Sequence: Synthetic oligonucleotide
cauuucuaucagcagaacc

SEQ ID NO: 3211709 - RNA, 19 nt, Artificial Sequence
  Description of Artificial Sequence: Synthetic oligonucleotide
aaguccagaccccagauuu

SEQ ID NO: 3211710 - RNA, 19 nt, Artificial Sequence
  Description of Artificial Sequence: Synthetic oligonucleotide
uucugaaacuagaaccaag

SEQ ID NO: 3211711 - RNA, 19 nt, Artificial Sequence
  Description of Artificial Sequence: Synthetic oligonucleotide
aaaagaggcaccggcacag

SEQ ID NO: 3211712 - RNA, 19 nt, Artificial Sequence
  Description of Artificial Sequence: Synthetic oligonucleotide
accaguuacuauuagugcu

SEQ ID NO: 3211713 - RNA, 19 nt, Artificial Sequence
  Description of Artificial Sequence: Synthetic oligonucleotide
gugacuaguagcuucagca

SEQ ID NO: 3211714 - RNA, 19 nt, Artificial Sequence
  Description of Artificial Sequence: Synthetic oligonucleotide
gaagccaaugacauccugg

SEQ ID NO: 3211715 - RNA, 19 nt, Artificial Sequence
  Description of Artificial Sequence: Synthetic oligonucleotide
uacuauuagugcuccauca

SEQ ID NO: 3211716 - RNA, 19 nt, Artificial Sequence
  Description of Artificial Sequence: Synthetic oligonucleotide
uauaacaggcaguuugugu

SEQ ID NO: 3211717 - RNA, 19 nt, Artificial Sequence
  Description of Artificial Sequence: Synthetic oligonucleotide
uuaguuucucuaucacagg

SEQ ID NO: 3211718 - RNA, 19 nt, Artificial Sequence
  Description of Artificial Sequence: Synthetic oligonucleotide
agugacuaguagcuucagc

SEQ ID NO: 3211719 - RNA, 19 nt, Artificial Sequence
  Description of Artificial Sequence: Synthetic oligonucleotide
aguuuguguccauacagug

SEQ ID NO: 3211720 - RNA, 19 nt, Artificial Sequence
  Description of Artificial Sequence: Synthetic oligonucleotide
aaccguagguacaucacac

SEQ ID NO: 3211721 - RNA, 19 nt, Artificial Sequence
  Description of Artificial Sequence: Synthetic oligonucleotide
acugucaucgugugcaaag

SEQ ID NO: 3211722 - RNA, 19 nt, Artificial Sequence
  Description of Artificial Sequence: Synthetic oligonucleotide
ugcagauaggcgauguccc

SEQ ID NO: 3211723 - RNA, 19 nt, Artificial Sequence
  Description of Artificial Sequence: Synthetic oligonucleotide
uuguuuugaagcaguguug

SEQ ID NO: 3211724 - RNA, 19 nt, Artificial Sequence
  Description of Artificial Sequence: Synthetic oligonucleotide
aaaccguagguacaucaca

SEQ ID NO: 3211725 - RNA, 19 nt, Artificial Sequence
  Description of Artificial Sequence: Synthetic oligonucleotide
ugugcaaagagagaccugu

SEQ ID NO: 3211726 - RNA, 19 nt, Artificial Sequence
  Description of Artificial Sequence: Synthetic oligonucleotide
gcauauaacaggcaguuug

SEQ ID NO: 3211727 - RNA, 19 nt, Artificial Sequence
  Description of Artificial Sequence: Synthetic oligonucleotide
uguuuugaagcaguguuga

SEQ ID NO: 3211728 - RNA, 19 nt, Artificial Sequence
  Description of Artificial Sequence: Synthetic oligonucleotide
ucuugagauaaucgagacc

SEQ ID NO: 3211729 - RNA, 19 nt, Artificial Sequence
  Description of Artificial Sequence: Synthetic oligonucleotide
ucuaucagcagaaccaguu

SEQ ID NO: 3211730 - RNA, 19 nt, Artificial Sequence
  Description of Artificial Sequence: Synthetic oligonucleotide
cuuuugaaauaguuguuuc

SEQ ID NO: 3211731 - RNA, 19 nt, Artificial Sequence
  Description of Artificial Sequence: Synthetic oligonucleotide
gagauguccaugcauauaa

SEQ ID NO: 3211732 - RNA, 19 nt, Artificial Sequence
  Description of Artificial Sequence: Synthetic oligonucleotide
uguguccauacagugagag

SEQ ID NO: 3211733 - RNA, 19 nt, Artificial Sequence
  Description of Artificial Sequence: Synthetic oligonucleotide
ucaucaaucuccugcagau

SEQ ID NO: 3211734 - RNA, 19 nt, Artificial Sequence
  Description of Artificial Sequence: Synthetic oligonucleotide
uagaaccaagcccacaccu

SEQ ID NO: 3211735 - RNA, 19 nt, Artificial Sequence
  Description of Artificial Sequence: Synthetic oligonucleotide
agguacaucacacugucau

SEQ ID NO: 3211736 - RNA, 19 nt, Artificial Sequence
  Description of Artificial Sequence: Synthetic oligonucleotide
ugcuucaaggggccgaucc

SEQ ID NO: 3211737 - RNA, 19 nt, Artificial Sequence
  Description of Artificial Sequence: Synthetic oligonucleotide
agccccaguuauuagucgc

SEQ ID NO: 3211738 - RNA, 19 nt, Artificial Sequence
  Description of Artificial Sequence: Synthetic oligonucleotide
ucaugggagauguccaugc

SEQ ID NO: 3211739 - RNA, 19 nt, Artificial Sequence
  Description of Artificial Sequence: Synthetic oligonucleotide
acauaacuucacucuuugc

SEQ ID NO: 3211740 - RNA, 19 nt, Artificial Sequence
  Description of Artificial Sequence: Synthetic oligonucleotide
aguuauuagucgcuuuucu

SEQ ID NO: 3211741 - RNA, 19 nt, Artificial Sequence
  Description of Artificial Sequence: Synthetic oligonucleotide
cucuaucacaggcacaagc

SEQ ID NO: 3211742 - RNA, 19 nt, Artificial Sequence
  Description of Artificial Sequence: Synthetic oligonucleotide
uuuucacauuucuaucagc

SEQ ID NO: 3211743 - RNA, 19 nt, Artificial Sequence
  Description of Artificial Sequence: Synthetic oligonucleotide
cuugagauaaucgagaccu

SEQ ID NO: 3211744 - RNA, 19 nt, Artificial Sequence
  Description of Artificial Sequence: Synthetic oligonucleotide
gauguccaugcauauaaca

SEQ ID NO: 3211745 - RNA, 19 nt, Artificial Sequence
  Description of Artificial Sequence: Synthetic oligonucleotide
aucuccugcagauaggcga

SEQ ID NO: 3211746 - RNA, 19 nt, Artificial Sequence
  Description of Artificial Sequence: Synthetic oligonucleotide
ugagauaaucgagaccugc

SEQ ID NO: 3211747 - RNA, 19 nt, Artificial Sequence
  Description of Artificial Sequence: Synthetic oligonucleotide
ucaaucuccugcagauagg

SEQ ID NO: 3211748 - RNA, 19 nt, Artificial Sequence
  Description of Artificial Sequence: Synthetic oligonucleotide
agcagaaccaguuacuauu

SEQ ID NO: 3211749 - RNA, 19 nt, Artificial Sequence
  Description of Artificial Sequence: Synthetic oligonucleotide
ugucaucgugugcaaagag

SEQ ID NO: 3211750 - RNA, 19 nt, Artificial Sequence
  Description of Artificial Sequence: Synthetic oligonucleotide
gaaguucgaaucccuuagg

SEQ ID NO: 3211751 - RNA, 19 nt, Artificial Sequence
  Description of Artificial Sequence: Synthetic oligonucleotide
aucuggccaaagugaaucc

SEQ ID NO: 3211752 - RNA, 19 nt, Artificial Sequence
  Description of Artificial Sequence: Synthetic oligonucleotide
gaaucccuuaggcacaaac

SEQ ID NO: 3211753 - RNA, 19 nt, Artificial Sequence
  Description of Artificial Sequence: Synthetic oligonucleotide
agaaccaguuacuauuagu

SEQ ID NO: 3211754 - RNA, 19 nt, Artificial Sequence
  Description of Artificial Sequence: Synthetic oligonucleotide
uucacucuuugcuucacac

SEQ ID NO: 3211755 - RNA, 19 nt, Artificial Sequence
  Description of Artificial Sequence: Synthetic oligonucleotide
auaacuucacucuuugcuu

SEQ ID NO: 3211756 - RNA, 19 nt, Artificial Sequence
  Description of Artificial Sequence: Synthetic oligonucleotide
aguucgaaucccuuaggca

SEQ ID NO: 3211757 - RNA, 19 nt, Artificial Sequence
  Description of Artificial Sequence: Synthetic oligonucleotide
cugaaacuagaaccaagcc

SEQ ID NO: 3211758 - RNA, 19 nt, Artificial Sequence
  Description of Artificial Sequence: Synthetic oligonucleotide
aaucauaugaauaaagucc

SEQ ID NO: 3211759 - RNA, 19 nt, Artificial Sequence
  Description of Artificial Sequence: Synthetic oligonucleotide
aauaaugagaaucuuagca

SEQ ID NO: 3211760 - RNA, 19 nt, Artificial Sequence
  Description of Artificial Sequence: Synthetic oligonucleotide
aaggucauaacacucauac

SEQ ID NO: 3211761 - RNA, 19 nt, Artificial Sequence
  Description of Artificial Sequence: Synthetic oligonucleotide
uuuggagagaaucugaagg

SEQ ID NO: 3211762 - RNA, 19 nt, Artificial Sequence
  Description of Artificial Sequence: Synthetic oligonucleotide
ucuguuauguccauggugg

SEQ ID NO: 3211763 - RNA, 19 nt, Artificial Sequence
  Description of Artificial Sequence: Synthetic oligonucleotide
aacacucauacuuaauccc

SEQ ID NO: 3211764 - RNA, 19 nt, Artificial Sequence
  Description of Artificial Sequence: Synthetic oligonucleotide
uucuuugauauucagauga

SEQ ID NO: 3211765 - RNA, 19 nt, Artificial Sequence
  Description of Artificial Sequence: Synthetic oligonucleotide
uuugauauucagaugaugu

SEQ ID NO: 3211766 - RNA, 19 nt, Artificial Sequence
  Description of Artificial Sequence: Synthetic oligonucleotide
auaacacucauacuuaauc

SEQ ID NO: 3211767 - RNA, 19 nt, Artificial Sequence
  Description of Artificial Sequence: Synthetic oligonucleotide
acaacuucauugcugauac

SEQ ID NO: 3211768 - RNA, 19 nt, Artificial Sequence
  Description of Artificial Sequence: Synthetic oligonucleotide
ucauugcugauacagaugc

SEQ ID NO: 3211769 - RNA, 19 nt, Artificial Sequence
  Description of Artificial Sequence: Synthetic oligonucleotide
aauuuuacguucuccaugu

SEQ ID NO: 3211770 - RNA, 19 nt, Artificial Sequence
  Description of Artificial Sequence: Synthetic oligonucleotide
uuuacguucuccauguuug

SEQ ID NO: 3211771 - RNA, 19 nt, Artificial Sequence
  Description of Artificial Sequence: Synthetic oligonucleotide
aaauuuuacguucuccaug

SEQ ID NO: 3211772 - RNA, 19 nt, Artificial Sequence
  Description of Artificial Sequence: Synthetic oligonucleotide
agaaucuuagcauuggcag

SEQ ID NO: 3211773 - RNA, 19 nt, Artificial Sequence
  Description of Artificial Sequence: Synthetic oligonucleotide
uggacaaaaggucauaaca

SEQ ID NO: 3211774 - RNA, 19 nt, Artificial Sequence
  Description of Artificial Sequence: Synthetic oligonucleotide
aucauaugaauaaaguccc

SEQ ID NO: 3211775 - RNA, 19 nt, Artificial Sequence
  Description of Artificial Sequence: Synthetic oligonucleotide
ugaaucauaugaauaaagu

SEQ ID NO: 3211776 - RNA, 19 nt, Artificial Sequence
  Description of Artificial Sequence: Synthetic oligonucleotide
ucugagugagaucagagga

SEQ ID NO: 3211777 - RNA, 19 nt, Artificial Sequence
  Description of Artificial Sequence: Synthetic oligonucleotide
aacuucauugcugauacag

SEQ ID NO: 3211778 - RNA, 19 nt, Artificial Sequence
  Description of Artificial Sequence: Synthetic oligonucleotide
gaaucauaugaauaaaguc

SEQ ID NO: 3211779 - RNA, 19 nt, Artificial Sequence
  Description of Artificial Sequence: Synthetic oligonucleotide
gaugccuggguauugagcc

SEQ ID NO: 3211780 - RNA, 19 nt, Artificial Sequence
  Description of Artificial Sequence: Synthetic oligonucleotide
uaauuucugauuuuguuuc

SEQ ID NO: 3211781 - RNA, 19 nt, Artificial Sequence
  Description of Artificial Sequence: Synthetic oligonucleotide
auugccaucaauaaagcag

SEQ ID NO: 3211782 - RNA, 19 nt, Artificial Sequence
  Description of Artificial Sequence: Synthetic oligonucleotide
uauccucuacauaauacag

SEQ ID NO: 3211783 - RNA, 19 nt, Artificial Sequence
  Description of Artificial Sequence: Synthetic oligonucleotide
uaacacucauacuuaaucc

SEQ ID NO: 3211784 - RNA, 19 nt, Artificial Sequence
  Description of Artificial Sequence: Synthetic oligonucleotide
aauaaagcagucuguuaug

SEQ ID NO: 3211785 - RNA, 19 nt, Artificial Sequence
  Description of Artificial Sequence: Synthetic oligonucleotide
uccucuacauaauacagca

SEQ ID NO: 3211786 - RNA, 19 nt, Artificial Sequence
  Description of Artificial Sequence: Synthetic oligonucleotide
ucaacaacuucauugcuga

SEQ ID NO: 3211787 - RNA, 19 nt, Artificial Sequence
  Description of Artificial Sequence: Synthetic oligonucleotide
ucauacuuaauccccaggu

SEQ ID NO: 3211788 - RNA, 19 nt, Artificial Sequence
  Description of Artificial Sequence: Synthetic oligonucleotide
uuuguacuugacaauuugc

SEQ ID NO: 3211789 - RNA, 19 nt, Artificial Sequence
  Description of Artificial Sequence: Synthetic oligonucleotide
uaugaauaaagucccauuu

SEQ ID NO: 3211790 - RNA, 19 nt, Artificial Sequence
  Description of Artificial Sequence: Synthetic oligonucleotide
agaaucucaggguaucugg

SEQ ID NO: 3211791 - RNA, 19 nt, Artificial Sequence
  Description of Artificial Sequence: Synthetic oligonucleotide
uggcucaacaacuucauug

SEQ ID NO: 3211792 - RNA, 19 nt, Artificial Sequence
  Description of Artificial Sequence: Synthetic oligonucleotide
aucagaggaagugacauac

SEQ ID NO: 3211793 - RNA, 19 nt, Artificial Sequence
  Description of Artificial Sequence: Synthetic oligonucleotide
ugacaauuugcucagcacu

SEQ ID NO: 3211794 - RNA, 19 nt, Artificial Sequence
  Description of Artificial Sequence: Synthetic oligonucleotide
uacauaauacagcaucuga

SEQ ID NO: 3211795 - RNA, 19 nt, Artificial Sequence
  Description of Artificial Sequence: Synthetic oligonucleotide
ucuacauaauacagcaucu

SEQ ID NO: 3211796 - RNA, 19 nt, Artificial Sequence
  Description of Artificial Sequence: Synthetic oligonucleotide
uuaauuucugauuuuguuu

SEQ ID NO: 3211797 - RNA, 19 nt, Artificial Sequence
  Description of Artificial Sequence: Synthetic oligonucleotide
uuguacuugacaauuugcu

SEQ ID NO: 3211798 - RNA, 19 nt, Artificial Sequence
  Description of Artificial Sequence: Synthetic oligonucleotide
auaaugagaaucuuagcau

SEQ ID NO: 3211799 - RNA, 19 nt, Artificial Sequence
  Description of Artificial Sequence: Synthetic oligonucleotide
uccaugguggacaaaaggu

SEQ ID NO: 3211800 - RNA, 19 nt, Artificial Sequence
  Description of Artificial Sequence: Synthetic oligonucleotide
auacuuaauccccagguca

SEQ ID NO: 3211801 - RNA, 19 nt, Artificial Sequence
  Description of Artificial Sequence: Synthetic oligonucleotide
cugaaucauaugaauaaag

SEQ ID NO: 3211802 - RNA, 19 nt, Artificial Sequence
  Description of Artificial Sequence: Synthetic oligonucleotide
uggguauugagccuggacu

SEQ ID NO: 3211803 - RNA, 19 nt, Artificial Sequence
  Description of Artificial Sequence: Synthetic oligonucleotide
cucuacauaauacagcauc

SEQ ID NO: 3211804 - RNA, 19 nt, Artificial Sequence
  Description of Artificial Sequence: Synthetic oligonucleotide
ugagccuggacuuuggaga

SEQ ID NO: 3211805 - RNA, 19 nt, Artificial Sequence
  Description of Artificial Sequence: Synthetic oligonucleotide
ugauauucagaugaugucu

SEQ ID NO: 3211806 - RNA, 19 nt, Artificial Sequence
  Description of Artificial Sequence: Synthetic oligonucleotide
cacaagaauaaugagaauc

SEQ ID NO: 3211807 - RNA, 19 nt, Artificial Sequence
  Description of Artificial Sequence: Synthetic oligonucleotide
auauccucuacauaauaca

SEQ ID NO: 3211808 - RNA, 19 nt, Artificial Sequence
  Description of Artificial Sequence: Synthetic oligonucleotide
gacacaagaauaaugagaa

SEQ ID NO: 3211809 - RNA, 19 nt, Artificial Sequence
  Description of Artificial Sequence: Synthetic oligonucleotide
uaucugagugagaucagag

SEQ ID NO: 3211810 - RNA, 19 nt, Artificial Sequence
  Description of Artificial Sequence: Synthetic oligonucleotide
acuaguuccugacacaaga

SEQ ID NO: 3211811 - RNA, 19 nt, Artificial Sequence
  Description of Artificial Sequence: Synthetic oligonucleotide
ugaugucuuggcuacacgc

SEQ ID NO: 3211812 - RNA, 19 nt, Artificial Sequence
  Description of Artificial Sequence: Synthetic oligonucleotide
aucugaaucauaugaauaa

SEQ ID NO: 3211813 - RNA, 19 nt, Artificial Sequence
  Description of Artificial Sequence: Synthetic oligonucleotide
auauucagaugaugucucc

SEQ ID NO: 3211814 - RNA, 19 nt, Artificial Sequence
  Description of Artificial Sequence: Synthetic oligonucleotide
aaucuuagcauuggcagcu

SEQ ID NO: 3211815 - RNA, 19 nt, Artificial Sequence
  Description of Artificial Sequence: Synthetic oligonucleotide
uugccaucaauaaagcagu

SEQ ID NO: 3211816 - RNA, 19 nt, Artificial Sequence
  Description of Artificial Sequence: Synthetic oligonucleotide
ugccaagcaaauuuuacgu

SEQ ID NO: 3211817 - RNA, 19 nt, Artificial Sequence
  Description of Artificial Sequence: Synthetic oligonucleotide
uaugcucagaaucuuaauu

SEQ ID NO: 3211818 - RNA, 19 nt, Artificial Sequence
  Description of Artificial Sequence: Synthetic oligonucleotide
uauucguucuuugauauuc

SEQ ID NO: 3211819 - RNA, 19 nt, Artificial Sequence
  Description of Artificial Sequence: Synthetic oligonucleotide
aauuugcucagcacuuggc

SEQ ID NO: 3211820 - RNA, 19 nt, Artificial Sequence
  Description of Artificial Sequence: Synthetic oligonucleotide
uuuuccauagcuuguccca

SEQ ID NO: 3211821 - RNA, 19 nt, Artificial Sequence
  Description of Artificial Sequence: Synthetic oligonucleotide
gaaucugaaggucaauuuc

SEQ ID NO: 3211822 - RNA, 19 nt, Artificial Sequence
  Description of Artificial Sequence: Synthetic oligonucleotide
gaauaaugagaaucuuagc

SEQ ID NO: 3211823 - RNA, 19 nt, Artificial Sequence
  Description of Artificial Sequence: Synthetic oligonucleotide
cagucuguuauguccaugg

SEQ ID NO: 3211824 - RNA, 19 nt, Artificial Sequence
  Description of Artificial Sequence: Synthetic oligonucleotide
ugagaucagaggaagugac

SEQ ID NO: 3211825 - RNA, 19 nt, Artificial Sequence
  Description of Artificial Sequence: Synthetic oligonucleotide
aaucugaaggucaauuuca

SEQ ID NO: 3211826 - RNA, 19 nt, Artificial Sequence
  Description of Artificial Sequence: Synthetic oligonucleotide
ggaagugacauacuggcag

SEQ ID NO: 3211827 - RNA, 19 nt, Artificial Sequence
  Description of Artificial Sequence: Synthetic oligonucleotide
uuucugauuuuguuucucc

SEQ ID NO: 3211828 - RNA, 19 nt, Artificial Sequence
  Description of Artificial Sequence: Synthetic oligonucleotide
gugccaagcaaauuuuacg

SEQ ID NO: 3211829 - RNA, 19 nt, Artificial Sequence
  Description of Artificial Sequence: Synthetic oligonucleotide
agcauuggcagcuaagaga

SEQ ID NO: 3211830 - RNA, 19 nt, Artificial Sequence
  Description of Artificial Sequence: Synthetic oligonucleotide
uguuugaugucuuggcuac

SEQ ID NO: 3211831 - RNA, 19 nt, Artificial Sequence
  Description of Artificial Sequence: Synthetic oligonucleotide
aguauucguucuuugauau

SEQ ID NO: 3211832 - RNA, 19 nt, Artificial Sequence
  Description of Artificial Sequence: Synthetic oligonucleotide
ugucccagccacuaguucc

SEQ ID NO: 3211833 - RNA, 19 nt, Artificial Sequence
  Description of Artificial Sequence: Synthetic oligonucleotide
aaugagaaucuuagcauug

SEQ ID NO: 3211834 - RNA, 19 nt, Artificial Sequence
  Description of Artificial Sequence: Synthetic oligonucleotide
agccacuaguuccugacac

SEQ ID NO: 3211835 - RNA, 19 nt, Artificial Sequence
  Description of Artificial Sequence: Synthetic oligonucleotide
aaaaggucauaacacucau

SEQ ID NO: 3211836 - RNA, 19 nt, Artificial Sequence
  Description of Artificial Sequence: Synthetic oligonucleotide
uggacuuuggagagaaucu

SEQ ID NO: 3211837 - RNA, 19 nt, Artificial Sequence
  Description of Artificial Sequence: Synthetic oligonucleotide
uccugacacaagaauaaug

SEQ ID NO: 3211838 - RNA, 19 nt, Artificial Sequence
  Description of Artificial Sequence: Synthetic oligonucleotide
acaagaauaaugagaaucu

SEQ ID NO: 3211839 - RNA, 19 nt, Artificial Sequence
  Description of Artificial Sequence: Synthetic oligonucleotide
uacuugacaauuugcucag

SEQ ID NO: 3211840 - RNA, 19 nt, Artificial Sequence
  Description of Artificial Sequence: Synthetic oligonucleotide
ugaaggucaauuucaccug

SEQ ID NO: 3211841 - RNA, 19 nt, Artificial Sequence
  Description of Artificial Sequence: Synthetic oligonucleotide
acacucauacuuaaucccc

SEQ ID NO: 3211842 - RNA, 19 nt, Artificial Sequence
  Description of Artificial Sequence: Synthetic oligonucleotide
gauauccucuacauaauac

SEQ ID NO: 3211843 - RNA, 19 nt, Artificial Sequence
  Description of Artificial Sequence: Synthetic oligonucleotide
aauuucugauuuuguuucu

SEQ ID NO: 3211844 - RNA, 19 nt, Artificial Sequence
  Description of Artificial Sequence: Synthetic oligonucleotide
uuggagagaaucugaaggu

SEQ ID NO: 3211845 - RNA, 19 nt, Artificial Sequence
  Description of Artificial Sequence: Synthetic oligonucleotide
uguacuugacaauuugcuc

SEQ ID NO: 3211846 - RNA, 19 nt, Artificial Sequence
  Description of Artificial Sequence: Synthetic oligonucleotide
uccgccuaugcucagaauc

SEQ ID NO: 3211847 - RNA, 19 nt, Artificial Sequence
  Description of Artificial Sequence: Synthetic oligonucleotide
uccauguuugaugucuugg

SEQ ID NO: 3211848 - RNA, 19 nt, Artificial Sequence
  Description of Artificial Sequence: Synthetic oligonucleotide
ugagugagaucagaggaag

SEQ ID NO: 3211849 - RNA, 19 nt, Artificial Sequence
  Description of Artificial Sequence: Synthetic oligonucleotide
uucauugcugauacagaug

SEQ ID NO: 3211850 - RNA, 19 nt, Artificial Sequence
  Description of Artificial Sequence: Synthetic oligonucleotide
ugcugauacagaugccugg

SEQ ID NO: 3211851 - RNA, 19 nt, Artificial Sequence
  Description of Artificial Sequence: Synthetic oligonucleotide
ucuucuugcaguauucguu

SEQ ID NO: 3211852 - RNA, 19 nt, Artificial Sequence
  Description of Artificial Sequence: Synthetic oligonucleotide
agcuaagagaccauggaag

SEQ ID NO: 3211853 - RNA, 19 nt, Artificial Sequence
  Description of Artificial Sequence: Synthetic oligonucleotide
uugauauucagaugauguc

SEQ ID NO: 3211854 - RNA, 19 nt, Artificial Sequence
  Description of Artificial Sequence: Synthetic oligonucleotide
cuuuguacuugacaauuug

SEQ ID NO: 3211855 - RNA, 19 nt, Artificial Sequence
  Description of Artificial Sequence: Synthetic oligonucleotide
cucaacaacuucauugcug

SEQ ID NO: 3211856 - RNA, 19 nt, Artificial Sequence
  Description of Artificial Sequence: Synthetic oligonucleotide
cauagcuugucccagccac

SEQ ID NO: 3211857 - RNA, 19 nt, Artificial Sequence
  Description of Artificial Sequence: Synthetic oligonucleotide
uaaugagaaucuuagcauu

SEQ ID NO: 3211858 - RNA, 19 nt, Artificial Sequence
  Description of Artificial Sequence: Synthetic oligonucleotide
aauaauauaggccacaggg

SEQ ID NO: 3211859 - RNA, 19 nt, Artificial Sequence
  Description of Artificial Sequence: Synthetic oligonucleotide
cauacaacagaguauaagg

SEQ ID NO: 3211860 - RNA, 19 nt, Artificial Sequence
  Description of Artificial Sequence: Synthetic oligonucleotide
ugcucaauaauauaggcca

SEQ ID NO: 3211861 - RNA, 19 nt, Artificial Sequence
  Description of Artificial Sequence: Synthetic oligonucleotide
guugcauucauacaggagc

SEQ ID NO: 3211862 - RNA, 19 nt, Artificial Sequence
  Description of Artificial Sequence: Synthetic oligonucleotide
aaugaggggaacucgcugg

SEQ ID NO: 3211863 - RNA, 19 nt, Artificial Sequence
  Description of Artificial Sequence: Synthetic oligonucleotide
agucucaggcuucacaucc

SEQ ID NO: 3211864 - RNA, 19 nt, Artificial Sequence
  Description of Artificial Sequence: Synthetic oligonucleotide
cagaguauaaggcaaagag

SEQ ID NO: 3211865 - RNA, 19 nt, Artificial Sequence
  Description of Artificial Sequence: Synthetic oligonucleotide
uaauccuucauacaacaga

SEQ ID NO: 3211866 - RNA, 19 nt, Artificial Sequence
  Description of Artificial Sequence: Synthetic oligonucleotide
auucacuugccuuuccugc

SEQ ID NO: 3211867 - RNA, 19 nt, Artificial Sequence
  Description of Artificial Sequence: Synthetic oligonucleotide
uaaggcaaagagaagugag

SEQ ID NO: 3211868 - RNA, 19 nt, Artificial Sequence
  Description of Artificial Sequence: Synthetic oligonucleotide
gagguauucuuguacaucc

SEQ ID NO: 3211869 - RNA, 19 nt, Artificial Sequence
  Description of Artificial Sequence: Synthetic oligonucleotide
agagaagugagcuuaugag

SEQ ID NO: 3211870 - RNA, 19 nt, Artificial Sequence
  Description of Artificial Sequence: Synthetic oligonucleotide
uuucucugcacacagguga

SEQ ID NO: 3211871 - RNA, 19 nt, Artificial Sequence
  Description of Artificial Sequence: Synthetic oligonucleotide
aauccuucauacaacagag

SEQ ID NO: 3211872 - RNA, 19 nt, Artificial Sequence
  Description of Artificial Sequence: Synthetic oligonucleotide
uucuuguacauccucuggg

SEQ ID NO: 3211873 - RNA, 19 nt, Artificial Sequence
  Description of Artificial Sequence: Synthetic oligonucleotide
uaaaaugaggggaacucgc

SEQ ID NO: 3211874 - RNA, 19 nt, Artificial Sequence
  Description of Artificial Sequence: Synthetic oligonucleotide
uauaaggcaaagagaagug

SEQ ID NO: 3211875 - RNA, 19 nt, Artificial Sequence
  Description of Artificial Sequence: Synthetic oligonucleotide
uacaacagaguauaaggca

SEQ ID NO: 3211876 - RNA, 19 nt, Artificial Sequence
  Description of Artificial Sequence: Synthetic oligonucleotide
ugccugcucaauaauauag

SEQ ID NO: 3211877 - RNA, 19 nt, Artificial Sequence
  Description of Artificial Sequence: Synthetic oligonucleotide
aagagaagugagcuuauga

SEQ ID NO: 3211878 - RNA, 19 nt, Artificial Sequence
  Description of Artificial Sequence: Synthetic oligonucleotide
cuucacauccaguacaggc

SEQ ID NO: 3211879 - RNA, 19 nt, Artificial Sequence
  Description of Artificial Sequence: Synthetic oligonucleotide
uaaaccugcccuuagcagc

SEQ ID NO: 3211880 - RNA, 19 nt, Artificial Sequence
  Description of Artificial Sequence: Synthetic oligonucleotide
ucuuguacauccucugggg

SEQ ID NO: 3211881 - RNA, 19 nt, Artificial Sequence
  Description of Artificial Sequence: Synthetic oligonucleotide
auacaacagaguauaaggc

SEQ ID NO: 3211882 - RNA, 19 nt, Artificial Sequence
  Description of Artificial Sequence: Synthetic oligonucleotide
aauagucucaggcuucaca

SEQ ID NO: 3211883 - RNA, 19 nt, Artificial Sequence
  Description of Artificial Sequence: Synthetic oligonucleotide
ucuaaaccugcccuuagca

SEQ ID NO: 3211884 - RNA, 19 nt, Artificial Sequence
  Description of Artificial Sequence: Synthetic oligonucleotide
aaggcaaagagaagugagc

SEQ ID NO: 3211885 - RNA, 19 nt, Artificial Sequence
  Description of Artificial Sequence: Synthetic oligonucleotide
uuuccugccaucuccagug

SEQ ID NO: 3211886 - RNA, 19 nt, Artificial Sequence
  Description of Artificial Sequence: Synthetic oligonucleotide
agaagugagcuuaugaguc

SEQ ID NO: 3211887 - RNA, 19 nt, Artificial Sequence
  Description of Artificial Sequence: Synthetic oligonucleotide
gaguauaaggcaaagagaa

SEQ ID NO: 3211888 - RNA, 19 nt, Artificial Sequence
  Description of Artificial Sequence: Synthetic oligonucleotide
ucuggggacccuaaaauga

SEQ ID NO: 3211889 - RNA, 19 nt, Artificial Sequence
  Description of Artificial Sequence: Synthetic oligonucleotide
ucauacaggagccggagcu

SEQ ID NO: 3211890 - RNA, 19 nt, Artificial Sequence
  Description of Artificial Sequence: Synthetic oligonucleotide
uaauauaggccacaggguu

SEQ ID NO: 3211891 - RNA, 19 nt, Artificial Sequence
  Description of Artificial Sequence: Synthetic oligonucleotide
ucuccagugauccuucgcc

SEQ ID NO: 3211892 - RNA, 19 nt, Artificial Sequence
  Description of Artificial Sequence: Synthetic oligonucleotide
uccuucauacaacagagua

SEQ ID NO: 3211893 - RNA, 19 nt, Artificial Sequence
  Description of Artificial Sequence: Synthetic oligonucleotide
ucauacaacagaguauaag

SEQ ID NO: 3211894 - RNA, 19 nt, Artificial Sequence
  Description of Artificial Sequence: Synthetic oligonucleotide
agcuuaugaguccaggcuc

SEQ ID NO: 3211895 - RNA, 19 nt, Artificial Sequence
  Description of Artificial Sequence: Synthetic oligonucleotide
ucugaaagugaccuggcaa

SEQ ID NO: 3211896 - RNA, 19 nt, Artificial Sequence
  Description of Artificial Sequence: Synthetic oligonucleotide
ugauccuucgccuaauccu

SEQ ID NO: 3211897 - RNA, 19 nt, Artificial Sequence
  Description of Artificial Sequence: Synthetic oligonucleotide
caggguugcauucauacag

SEQ ID NO: 3211898 - RNA, 19 nt, Artificial Sequence
  Description of Artificial Sequence: Synthetic oligonucleotide
cuggugaauagucucaggc

SEQ ID NO: 3211899 - RNA, 19 nt, Artificial Sequence
  Description of Artificial Sequence: Synthetic oligonucleotide
ucaauaauauaggccacag

SEQ ID NO: 3211900 - RNA, 19 nt, Artificial Sequence
  Description of Artificial Sequence: Synthetic oligonucleotide
aaaugaggggaacucgcug

SEQ ID NO: 3211901 - RNA, 19 nt, Artificial Sequence
  Description of Artificial Sequence: Synthetic oligonucleotide
gcaaacuugauucacuugc

SEQ ID NO: 3211902 - RNA, 19 nt, Artificial Sequence
  Description of Artificial Sequence: Synthetic oligonucleotide
uucacauccaguacaggcu

SEQ ID NO: 3211903 - RNA, 19 nt, Artificial Sequence
  Description of Artificial Sequence: Synthetic oligonucleotide
uugcauucauacaggagcc

SEQ ID NO: 3211904 - RNA, 19 nt, Artificial Sequence
  Description of Artificial Sequence: Synthetic oligonucleotide
gaccuggcaaacuugauuc

SEQ ID NO: 3211905 - RNA, 19 nt, Artificial Sequence
  Description of Artificial Sequence: Synthetic oligonucleotide
uauucuuguacauccucug

SEQ ID NO: 3211906 - RNA, 19 nt, Artificial Sequence
  Description of Artificial Sequence: Synthetic oligonucleotide
ugaugucugaaagugaccu

SEQ ID NO: 3211907 - RNA, 19 nt, Artificial Sequence
  Description of Artificial Sequence: Synthetic oligonucleotide
uucgccuaauccuucauac

SEQ ID NO: 3211908 - RNA, 19 nt, Artificial Sequence
  Description of Artificial Sequence: Synthetic oligonucleotide
aggugagguauucuuguac

SEQ ID NO: 3211909 - RNA, 19 nt, Artificial Sequence
  Description of Artificial Sequence: Synthetic oligonucleotide
cugcucaauaauauaggcc

SEQ ID NO: 3211910 - RNA, 19 nt, Artificial Sequence
  Description of Artificial Sequence: Synthetic oligonucleotide
uccaguacaggcugggugc

SEQ ID NO: 3211911 - RNA, 19 nt, Artificial Sequence
  Description of Artificial Sequence: Synthetic oligonucleotide
aaagugaccuggcaaacuu

SEQ ID NO: 3211912 - RNA, 19 nt, Artificial Sequence
  Description of Artificial Sequence: Synthetic oligonucleotide
aaacuugauucacuugccu

SEQ ID NO: 3211913 - RNA, 19 nt, Artificial Sequence
  Description of Artificial Sequence: Synthetic oligonucleotide
auauaggccacaggguugc

SEQ ID NO: 3211914 - RNA, 19 nt, Artificial Sequence
  Description of Artificial Sequence: Synthetic oligonucleotide
auucuuguacauccucugg

SEQ ID NO: 3211915 - RNA, 19 nt, Artificial Sequence
  Description of Artificial Sequence: Synthetic oligonucleotide
uaugaguccaggcucacua

SEQ ID NO: 3211916 - RNA, 19 nt, Artificial Sequence
  Description of Artificial Sequence: Synthetic oligonucleotide
augucugaaagugaccugg

SEQ ID NO: 3211917 - RNA, 19 nt, Artificial Sequence
  Description of Artificial Sequence: Synthetic oligonucleotide
ugagcuuaugaguccaggc

SEQ ID NO: 3211918 - RNA, 19 nt, Artificial Sequence
  Description of Artificial Sequence: Synthetic oligonucleotide
cuaaaaugaggggaacucg

SEQ ID NO: 3211919 - RNA, 19 nt, Artificial Sequence
  Description of Artificial Sequence: Synthetic oligonucleotide
agcaggugaugucugaaag

SEQ ID NO: 3211920 - RNA, 19 nt, Artificial Sequence
  Description of Artificial Sequence: Synthetic oligonucleotide
ucacauccaguacaggcug

SEQ ID NO: 3211921 - RNA, 19 nt, Artificial Sequence
  Description of Artificial Sequence: Synthetic oligonucleotide
cacaggguugcauucauac

SEQ ID NO: 3211922 - RNA, 19 nt, Artificial Sequence
  Description of Artificial Sequence: Synthetic oligonucleotide
auagucucaggcuucacau

SEQ ID NO: 3211923 - RNA, 19 nt, Artificial Sequence
  Description of Artificial Sequence: Synthetic oligonucleotide
aacuugauucacuugccuu

SEQ ID NO: 3211924 - RNA, 19 nt, Artificial Sequence
  Description of Artificial Sequence: Synthetic oligonucleotide
gauucacuugccuuuccug

SEQ ID NO: 3211925 - RNA, 19 nt, Artificial Sequence
  Description of Artificial Sequence: Synthetic oligonucleotide
ucaggcuucacauccagua

SEQ ID NO: 3211926 - RNA, 19 nt, Artificial Sequence
  Description of Artificial Sequence: Synthetic oligonucleotide
aauauaggccacaggguug

SEQ ID NO: 3211927 - RNA, 19 nt, Artificial Sequence
  Description of Artificial Sequence: Synthetic oligonucleotide
aacagaguauaaggcaaag

SEQ ID NO: 3211928 - RNA, 19 nt, Artificial Sequence
  Description of Artificial Sequence: Synthetic oligonucleotide
caaacuugauucacuugcc

SEQ ID NO: 3211929 - RNA, 19 nt, Artificial Sequence
  Description of Artificial Sequence: Synthetic oligonucleotide
gaagugagcuuaugagucc

SEQ ID NO: 3211930 - RNA, 19 nt, Artificial Sequence
  Description of Artificial Sequence: Synthetic oligonucleotide
uuuaccucuggcuucuaaa

SEQ ID NO: 3211931 - RNA, 19 nt, Artificial Sequence
  Description of Artificial Sequence: Synthetic oligonucleotide
uuaccucuggcuucuaaac

SEQ ID NO: 3211932 - RNA, 19 nt, Artificial Sequence
  Description of Artificial Sequence: Synthetic oligonucleotide
uuagcagcaggugaugucu

SEQ ID NO: 3211933 - RNA, 19 nt, Artificial Sequence
  Description of Artificial Sequence: Synthetic oligonucleotide
cuaaaccugcccuuagcag

SEQ ID NO: 3211934 - RNA, 19 nt, Artificial Sequence
  Description of Artificial Sequence: Synthetic oligonucleotide
aacucgcuggugaauaguc

SEQ ID NO: 3211935 - RNA, 19 nt, Artificial Sequence
  Description of Artificial Sequence: Synthetic oligonucleotide
caauaauauaggccacagg

SEQ ID NO: 3211936 - RNA, 19 nt, Artificial Sequence
  Description of Artificial Sequence: Synthetic oligonucleotide
uucuaaaccugcccuuagc

SEQ ID NO: 3211937 - RNA, 19 nt, Artificial Sequence
  Description of Artificial Sequence: Synthetic oligonucleotide
uggugaauagucucaggcu

SEQ ID NO: 3211938 - RNA, 19 nt, Artificial Sequence
  Description of Artificial Sequence: Synthetic oligonucleotide
ugaguccaggcucacuacc

SEQ ID NO: 3211939 - RNA, 19 nt, Artificial Sequence
  Description of Artificial Sequence: Synthetic oligonucleotide
uuguacauccucuggggac

SEQ ID NO: 3211940 - RNA, 19 nt, Artificial Sequence
  Description of Artificial Sequence: Synthetic oligonucleotide
acaggugagguauucuugu

SEQ ID NO: 3211941 - RNA, 19 nt, Artificial Sequence
  Description of Artificial Sequence: Synthetic oligonucleotide
ugccuuuccugccaucucc

SEQ ID NO: 3211942 - RNA, 19 nt, Artificial Sequence
  Description of Artificial Sequence: Synthetic oligonucleotide
accucuggcuucuaaaccu

SEQ ID NO: 3211943 - RNA, 19 nt, Artificial Sequence
  Description of Artificial Sequence: Synthetic oligonucleotide
uaccucuggcuucuaaacc

SEQ ID NO: 3211944 - RNA, 19 nt, Artificial Sequence
  Description of Artificial Sequence: Synthetic oligonucleotide
uguacauccucuggggacc

SEQ ID NO: 3211945 - RNA, 19 nt, Artificial Sequence
  Description of Artificial Sequence: Synthetic oligonucleotide
aggcucacuaccugccugc

SEQ ID NO: 3211946 - RNA, 19 nt, Artificial Sequence
  Description of Artificial Sequence: Synthetic oligonucleotide
uucacuugccuuuccugcc

SEQ ID NO: 3211947 - RNA, 19 nt, Artificial Sequence
  Description of Artificial Sequence: Synthetic oligonucleotide
aucuccagugauccuucgc

SEQ ID NO: 3211948 - RNA, 19 nt, Artificial Sequence
  Description of Artificial Sequence: Synthetic oligonucleotide
cuaauccuucauacaacag

SEQ ID NO: 3211949 - RNA, 19 nt, Artificial Sequence
  Description of Artificial Sequence: Synthetic oligonucleotide
ucuggcuucuaaaccugcc

SEQ ID NO: 3211950 - RNA, 19 nt, Artificial Sequence
  Description of Artificial Sequence: Synthetic oligonucleotide
acuugauucacuugccuuu

SEQ ID NO: 3211951 - RNA, 19 nt, Artificial Sequence
  Description of Artificial Sequence: Synthetic oligonucleotide
ugauucacuugccuuuccu

SEQ ID NO: 3211952 - RNA, 19 nt, Artificial Sequence
  Description of Artificial Sequence: Synthetic oligonucleotide
cucacuaccugccugccug

SEQ ID NO: 3211953 - RNA, 19 nt, Artificial Sequence
  Description of Artificial Sequence: Synthetic oligonucleotide
uucucugcacacaggugag

SEQ ID NO: 3211954 - RNA, 19 nt, Artificial Sequence
  Description of Artificial Sequence: Synthetic oligonucleotide
uggcuucuaaaccugcccu

SEQ ID NO: 3211955 - RNA, 19 nt, Artificial Sequence
  Description of Artificial Sequence: Synthetic oligonucleotide
agaguauaaggcaaagaga

SEQ ID NO: 3211956 - RNA, 19 nt, Artificial Sequence
  Description of Artificial Sequence: Synthetic oligonucleotide
uggggacccuaaaaugagg

SEQ ID NO: 3211957 - RNA, 19 nt, Artificial Sequence
  Description of Artificial Sequence: Synthetic oligonucleotide
auccaguacaggcugggug

SEQ ID NO: 3211958 - RNA, 19 nt, Artificial Sequence
  Description of Artificial Sequence: Synthetic oligonucleotide
aauaauauagcacuugggg

SEQ ID NO: 3211959 - RNA, 19 nt, Artificial Sequence
  Description of Artificial Sequence: Synthetic oligonucleotide
uggauaaugguacagaugg

SEQ ID NO: 3211960 - RNA, 19 nt, Artificial Sequence
  Description of Artificial Sequence: Synthetic oligonucleotide
aaucugaguaaauaaaggg

SEQ ID NO: 3211961 - RNA, 19 nt, Artificial Sequence
  Description of Artificial Sequence: Synthetic oligonucleotide
aauaccaacaugcugaaug

SEQ ID NO: 3211962 - RNA, 19 nt, Artificial Sequence
  Description of Artificial Sequence: Synthetic oligonucleotide
auagagaagacuuccaugg

SEQ ID NO: 3211963 - RNA, 19 nt, Artificial Sequence
  Description of Artificial Sequence: Synthetic oligonucleotide
ucugaguaaauaaagggag

SEQ ID NO: 3211964 - RNA, 19 nt, Artificial Sequence
  Description of Artificial Sequence: Synthetic oligonucleotide
aacagugaagaauaccaac

SEQ ID NO: 3211965 - RNA, 19 nt, Artificial Sequence
  Description of Artificial Sequence: Synthetic oligonucleotide
cauacaaugaugauguggc

SEQ ID NO: 3211966 - RNA, 19 nt, Artificial Sequence
  Description of Artificial Sequence: Synthetic oligonucleotide
caaaaugcagccaagaaac

SEQ ID NO: 3211967 - RNA, 19 nt, Artificial Sequence
  Description of Artificial Sequence: Synthetic oligonucleotide
uaagccauaguauagcucc

SEQ ID NO: 3211968 - RNA, 19 nt, Artificial Sequence
  Description of Artificial Sequence: Synthetic oligonucleotide
ugacaaauaauauagcacu

SEQ ID NO: 3211969 - RNA, 19 nt, Artificial Sequence
  Description of Artificial Sequence: Synthetic oligonucleotide
acaauugagcccuuguugc

SEQ ID NO: 3211970 - RNA, 19 nt, Artificial Sequence
  Description of Artificial Sequence: Synthetic oligonucleotide
aaugacaagaacuuggcuu

SEQ ID NO: 3211971 - RNA, 19 nt, Artificial Sequence
  Description of Artificial Sequence: Synthetic oligonucleotide
aaaaucugaguaaauaaag

SEQ ID NO: 3211972 - RNA, 19 nt, Artificial Sequence
  Description of Artificial Sequence: Synthetic oligonucleotide
acaaauuggauaaugguac

SEQ ID NO: 3211973 - RNA, 19 nt, Artificial Sequence
  Description of Artificial Sequence: Synthetic oligonucleotide
uugcauacaaugaugaugu

SEQ ID NO: 3211974 - RNA, 19 nt, Artificial Sequence
  Description of Artificial Sequence: Synthetic oligonucleotide
auaaagggaggagagaugc

SEQ ID NO: 3211975 - RNA, 19 nt, Artificial Sequence
  Description of Artificial Sequence: Synthetic oligonucleotide
aacaauugagcccuuguug

SEQ ID NO: 3211976 - RNA, 19 nt, Artificial Sequence
  Description of Artificial Sequence: Synthetic oligonucleotide
aagaauaccaacaugcuga

SEQ ID NO: 3211977 - RNA, 19 nt, Artificial Sequence
  Description of Artificial Sequence: Synthetic oligonucleotide
aauagagaagacuuccaug

SEQ ID NO: 3211978 - RNA, 19 nt, Artificial Sequence
  Description of Artificial Sequence: Synthetic oligonucleotide
aaaugcagccaagaaaccc

SEQ ID NO: 3211979 - RNA, 19 nt, Artificial Sequence
  Description of Artificial Sequence: Synthetic oligonucleotide
aaaucugaguaaauaaagg

SEQ ID NO: 3211980 - RNA, 19 nt, Artificial Sequence
  Description of Artificial Sequence: Synthetic oligonucleotide
uugacaaauaauauagcac

SEQ ID NO: 3211981 - RNA, 19 nt, Artificial Sequence
  Description of Artificial Sequence: Synthetic oligonucleotide
uaauauagcacuuggggac

SEQ ID NO: 3211982 - RNA, 19 nt, Artificial Sequence
  Description of Artificial Sequence: Synthetic oligonucleotide
caaauaauauagcacuugg

SEQ ID NO: 3211983 - RNA, 19 nt, Artificial Sequence
  Description of Artificial Sequence: Synthetic oligonucleotide
ucagccaaauuccacagag

SEQ ID NO: 3211984 - RNA, 19 nt, Artificial Sequence
  Description of Artificial Sequence: Synthetic oligonucleotide
agagaagacuuccauggcc

SEQ ID NO: 3211985 - RNA, 19 nt, Artificial Sequence
  Description of Artificial Sequence: Synthetic oligonucleotide
uucagagugaaaaucugag

SEQ ID NO: 3211986 - RNA, 19 nt, Artificial Sequence
  Description of Artificial Sequence: Synthetic oligonucleotide
ugaaaaucugaguaaauaa

SEQ ID NO: 3211987 - RNA, 19 nt, Artificial Sequence
  Description of Artificial Sequence: Synthetic oligonucleotide
cugaaugacaagaacuugg

SEQ ID NO: 3211988 - RNA, 19 nt, Artificial Sequence
  Description of Artificial Sequence: Synthetic oligonucleotide
agaaggcaacaauugagcc

SEQ ID NO: 3211989 - RNA, 19 nt, Artificial Sequence
  Description of Artificial Sequence: Synthetic oligonucleotide
cauugaaugugucagguag

SEQ ID NO: 3211990 - RNA, 19 nt, Artificial Sequence
  Description of Artificial Sequence: Synthetic oligonucleotide
aggaagguuauccaaacag

SEQ ID NO: 3211991 - RNA, 19 nt, Artificial Sequence
  Description of Artificial Sequence: Synthetic oligonucleotide
gaaugugucagguagguuc

SEQ ID NO: 3211992 - RNA, 19 nt, Artificial Sequence
  Description of Artificial Sequence: Synthetic oligonucleotide
gucuugacaaauaauauag

SEQ ID NO: 3211993 - RNA, 19 nt, Artificial Sequence
  Description of Artificial Sequence: Synthetic oligonucleotide
augacaagaacuuggcuuc

SEQ ID NO: 3211994 - RNA, 19 nt, Artificial Sequence
  Description of Artificial Sequence: Synthetic oligonucleotide
aauuccacagagcacaaau

SEQ ID NO: 3211995 - RNA, 19 nt, Artificial Sequence
  Description of Artificial Sequence: Synthetic oligonucleotide
gugaagaauaccaacaugc

SEQ ID NO: 3211996 - RNA, 19 nt, Artificial Sequence
  Description of Artificial Sequence: Synthetic oligonucleotide
gauguggccauguucagag

SEQ ID NO: 3211997 - RNA, 19 nt, Artificial Sequence
  Description of Artificial Sequence: Synthetic oligonucleotide
auaauauagcacuugggga

SEQ ID NO: 3211998 - RNA, 19 nt, Artificial Sequence
  Description of Artificial Sequence: Synthetic oligonucleotide
uaguauagcucccaagugc

SEQ ID NO: 3211999 - RNA, 19 nt, Artificial Sequence
  Description of Artificial Sequence: Synthetic oligonucleotide
aaauaauauagcacuuggg

SEQ ID NO: 3212000 - RNA, 19 nt, Artificial Sequence
  Description of Artificial Sequence: Synthetic oligonucleotide
uaucccagaacacaguaga

SEQ ID NO: 3212001 - RNA, 19 nt, Artificial Sequence
  Description of Artificial Sequence: Synthetic oligonucleotide
gaagccaaaauagagaaga

SEQ ID NO: 3212002 - RNA, 19 nt, Artificial Sequence
  Description of Artificial Sequence: Synthetic oligonucleotide
aaauaaagggaggagagau

SEQ ID NO: 3212003 - RNA, 19 nt, Artificial Sequence
  Description of Artificial Sequence: Synthetic oligonucleotide
uagaaggcaacaauugagc

SEQ ID NO: 3212004 - RNA, 19 nt, Artificial Sequence
  Description of Artificial Sequence: Synthetic oligonucleotide
aaugugucagguagguucc

SEQ ID NO: 3212005 - RNA, 19 nt, Artificial Sequence
  Description of Artificial Sequence: Synthetic oligonucleotide
uuccacagagcacaaauug

SEQ ID NO: 3212006 - RNA, 19 nt, Artificial Sequence
  Description of Artificial Sequence: Synthetic oligonucleotide
aacuuggcuucauugaaug

SEQ ID NO: 3212007 - RNA, 19 nt, Artificial Sequence
  Description of Artificial Sequence: Synthetic oligonucleotide
ugaaugacaagaacuuggc

SEQ ID NO: 3212008 - RNA, 19 nt, Artificial Sequence
  Description of Artificial Sequence: Synthetic oligonucleotide
caaacagugaagaauacca

SEQ ID NO: 3212009 - RNA, 19 nt, Artificial Sequence
  Description of Artificial Sequence: Synthetic oligonucleotide
uccacagagcacaaauugg

SEQ ID NO: 3212010 - RNA, 19 nt, Artificial Sequence
  Description of Artificial Sequence: Synthetic oligonucleotide
caaaauagagaagacuucc

SEQ ID NO: 3212011 - RNA, 19 nt, Artificial Sequence
  Description of Artificial Sequence: Synthetic oligonucleotide
aaauagagaagacuuccau

SEQ ID NO: 3212012 - RNA, 19 nt, Artificial Sequence
  Description of Artificial Sequence: Synthetic oligonucleotide
cuugacaaauaauauagca

SEQ ID NO: 3212013 - RNA, 19 nt, Artificial Sequence
  Description of Artificial Sequence: Synthetic oligonucleotide
aagaacuuggcuucauuga

SEQ ID NO: 3212014 - RNA, 19 nt, Artificial Sequence
  Description of Artificial Sequence: Synthetic oligonucleotide
aaacccugcacuggaagcc

SEQ ID NO: 3212015 - RNA, 19 nt, Artificial Sequence
  Description of Artificial Sequence: Synthetic oligonucleotide
agauaagccauaguauagc

SEQ ID NO: 3212016 - RNA, 19 nt, Artificial Sequence
  Description of Artificial Sequence: Synthetic oligonucleotide
aguauagcucccaagugcc

SEQ ID NO: 3212017 - RNA, 19 nt, Artificial Sequence
  Description of Artificial Sequence: Synthetic oligonucleotide
aaggcaacaauugagcccu

SEQ ID NO: 3212018 - RNA, 19 nt, Artificial Sequence
  Description of Artificial Sequence: Synthetic oligonucleotide
gaagaauaccaacaugcug

SEQ ID NO: 3212019 - RNA, 19 nt, Artificial Sequence
  Description of Artificial Sequence: Synthetic oligonucleotide
guaaauaaagggaggagag

SEQ ID NO: 3212020 - RNA, 19 nt, Artificial Sequence
  Description of Artificial Sequence: Synthetic oligonucleotide
uuguugcauacaaugauga

SEQ ID NO: 3212021 - RNA, 19 nt, Artificial Sequence
  Description of Artificial Sequence: Synthetic oligonucleotide
aaagggaggagagaugcuc

SEQ ID NO: 3212022 - RNA, 19 nt, Artificial Sequence
  Description of Artificial Sequence: Synthetic oligonucleotide
uccauggccaccaugagau

SEQ ID NO: 3212023 - RNA, 19 nt, Artificial Sequence
  Description of Artificial Sequence: Synthetic oligonucleotide
gaaggcaacaauugagccc

SEQ ID NO: 3212024 - RNA, 19 nt, Artificial Sequence
  Description of Artificial Sequence: Synthetic oligonucleotide
acagggaggaagguuaucc

SEQ ID NO: 3212025 - RNA, 19 nt, Artificial Sequence
  Description of Artificial Sequence: Synthetic oligonucleotide
uggaagccaaaauagagaa

SEQ ID NO: 3212026 - RNA, 19 nt, Artificial Sequence
  Description of Artificial Sequence: Synthetic oligonucleotide
aguaaauaaagggaggaga

SEQ ID NO: 3212027 - RNA, 19 nt, Artificial Sequence
  Description of Artificial Sequence: Synthetic oligonucleotide
acaaaaugcagccaagaaa

SEQ ID NO: 3212028 - RNA, 19 nt, Artificial Sequence
  Description of Artificial Sequence: Synthetic oligonucleotide
cuuggggacaaaaugcagc

SEQ ID NO: 3212029 - RNA, 19 nt, Artificial Sequence
  Description of Artificial Sequence: Synthetic oligonucleotide
agccaaauuccacagagca

SEQ ID NO: 3212030 - RNA, 19 nt, Artificial Sequence
  Description of Artificial Sequence: Synthetic oligonucleotide
aacaugcugaaugacaaga

SEQ ID NO: 3212031 - RNA, 19 nt, Artificial Sequence
  Description of Artificial Sequence: Synthetic oligonucleotide
gaugauguggccauguuca

SEQ ID NO: 3212032 - RNA, 19 nt, Artificial Sequence
  Description of Artificial Sequence: Synthetic oligonucleotide
ugaguaaauaaagggagga

SEQ ID NO: 3212033 - RNA, 19 nt, Artificial Sequence
  Description of Artificial Sequence: Synthetic oligonucleotide
ucuugacaaauaauauagc

SEQ ID NO: 3212034 - RNA, 19 nt, Artificial Sequence
  Description of Artificial Sequence: Synthetic oligonucleotide
aaauuggauaaugguacag

SEQ ID NO: 3212035 - RNA, 19 nt, Artificial Sequence
  Description of Artificial Sequence: Synthetic oligonucleotide
agcacuuggggacaaaaug

SEQ ID NO: 3212036 - RNA, 19 nt, Artificial Sequence
  Description of Artificial Sequence: Synthetic oligonucleotide
ugcugugguagacagggag

SEQ ID NO: 3212037 - RNA, 19 nt, Artificial Sequence
  Description of Artificial Sequence: Synthetic oligonucleotide
ucagguagguuccuggaca

SEQ ID NO: 3212038 - RNA, 19 nt, Artificial Sequence
  Description of Artificial Sequence: Synthetic oligonucleotide
agaugcucagccaaauucc

SEQ ID NO: 3212039 - RNA, 19 nt, Artificial Sequence
  Description of Artificial Sequence: Synthetic oligonucleotide
ugcacuggaagccaaaaua

SEQ ID NO: 3212040 - RNA, 19 nt, Artificial Sequence
  Description of Artificial Sequence: Synthetic oligonucleotide
gaagguuauccaaacagug

SEQ ID NO: 3212041 - RNA, 19 nt, Artificial Sequence
  Description of Artificial Sequence: Synthetic oligonucleotide
cugaguaaauaaagggagg

SEQ ID NO: 3212042 - RNA, 19 nt, Artificial Sequence
  Description of Artificial Sequence: Synthetic oligonucleotide
ugaagaauaccaacaugcu

SEQ ID NO: 3212043 - RNA, 19 nt, Artificial Sequence
  Description of Artificial Sequence: Synthetic oligonucleotide
caugagauuuccugggugc

SEQ ID NO: 3212044 - RNA, 19 nt, Artificial Sequence
  Description of Artificial Sequence: Synthetic oligonucleotide
cuuguugcauacaaugaug

SEQ ID NO: 3212045 - RNA, 19 nt, Artificial Sequence
  Description of Artificial Sequence: Synthetic oligonucleotide
ugguagacagggaggaagg

SEQ ID NO: 3212046 - RNA, 19 nt, Artificial Sequence
  Description of Artificial Sequence: Synthetic oligonucleotide
aauuggauaaugguacaga

SEQ ID NO: 3212047 - RNA, 19 nt, Artificial Sequence
  Description of Artificial Sequence: Synthetic oligonucleotide
guugcauacaaugaugaug

SEQ ID NO: 3212048 - RNA, 19 nt, Artificial Sequence
  Description of Artificial Sequence: Synthetic oligonucleotide
uuggggacaaaaugcagcc

SEQ ID NO: 3212049 - RNA, 19 nt, Artificial Sequence
  Description of Artificial Sequence: Synthetic oligonucleotide
aaaaugcagccaagaaacc

SEQ ID NO: 3212050 - RNA, 19 nt, Artificial Sequence
  Description of Artificial Sequence: Synthetic oligonucleotide
uguggccauguucagagug

SEQ ID NO: 3212051 - RNA, 19 nt, Artificial Sequence
  Description of Artificial Sequence: Synthetic oligonucleotide
gagaugcucagccaaauuc

SEQ ID NO: 3212052 - RNA, 19 nt, Artificial Sequence
  Description of Artificial Sequence: Synthetic oligonucleotide
uuggauaaugguacagaug

SEQ ID NO: 3212053 - RNA, 19 nt, Artificial Sequence
  Description of Artificial Sequence: Synthetic oligonucleotide
uguucagagugaaaaucug

SEQ ID NO: 3212054 - RNA, 19 nt, Artificial Sequence
  Description of Artificial Sequence: Synthetic oligonucleotide
acagauaagccauaguaua

SEQ ID NO: 3212055 - RNA, 19 nt, Artificial Sequence
  Description of Artificial Sequence: Synthetic oligonucleotide
auacaaugaugauguggcc

SEQ ID NO: 3212056 - RNA, 19 nt, Artificial Sequence
  Description of Artificial Sequence: Synthetic oligonucleotide
aguagaaggcaacaauuga

SEQ ID NO: 3212057 - RNA, 19 nt, Artificial Sequence
  Description of Artificial Sequence: Synthetic oligonucleotide
caagaacuuggcuucauug

SEQ ID NO: 3212058 - RNA, 19 nt, Artificial Sequence
  Description of Artificial Sequence: Synthetic oligonucleotide
ucuuuggaaggucauaugg

SEQ ID NO: 3212059 - RNA, 19 nt, Artificial Sequence
  Description of Artificial Sequence: Synthetic oligonucleotide
gucauauggaucuugggag

SEQ ID NO: 3212060 - RNA, 19 nt, Artificial Sequence
  Description of Artificial Sequence: Synthetic oligonucleotide
uggaaggucauauggaucu

SEQ ID NO: 3212061 - RNA, 19 nt, Artificial Sequence
  Description of Artificial Sequence: Synthetic oligonucleotide
auuauugcugaauacuccu

SEQ ID NO: 3212062 - RNA, 19 nt, Artificial Sequence
  Description of Artificial Sequence: Synthetic oligonucleotide
uauugcugaauacuccuug

SEQ ID NO: 3212063 - RNA, 19 nt, Artificial Sequence
  Description of Artificial Sequence: Synthetic oligonucleotide
ugagcugucccuuacuggc

SEQ ID NO: 3212064 - RNA, 19 nt, Artificial Sequence
  Description of Artificial Sequence: Synthetic oligonucleotide
ugugacuguucuuuggaag

SEQ ID NO: 3212065 - RNA, 19 nt, Artificial Sequence
  Description of Artificial Sequence: Synthetic oligonucleotide
ucuugggagaggaugagcu

SEQ ID NO: 3212066 - RNA, 19 nt, Artificial Sequence
  Description of Artificial Sequence: Synthetic oligonucleotide
accaccaccaucuucucuc

SEQ ID NO: 3212067 - RNA, 19 nt, Artificial Sequence
  Description of Artificial Sequence: Synthetic oligonucleotide
cauuauugcugaauacucc

SEQ ID NO: 3212068 - RNA, 19 nt, Artificial Sequence
  Description of Artificial Sequence: Synthetic oligonucleotide
uacuccuuggacaacacuc

SEQ ID NO: 3212069 - RNA, 19 nt, Artificial Sequence
  Description of Artificial Sequence: Synthetic oligonucleotide
ggagagaugaccauuauug

SEQ ID NO: 3212070 - RNA, 19 nt, Artificial Sequence
  Description of Artificial Sequence: Synthetic oligonucleotide
uggaucuugggagagauga

SEQ ID NO: 3212071 - RNA, 19 nt, Artificial Sequence
  Description of Artificial Sequence: Synthetic oligonucleotide
gugacuguucuuuggaagg

SEQ ID NO: 3212072 - RNA, 19 nt, Artificial Sequence
  Description of Artificial Sequence: Synthetic oligonucleotide
auugcugaauacuccuugg

SEQ ID NO: 3212073 - RNA, 19 nt, Artificial Sequence
  Description of Artificial Sequence: Synthetic oligonucleotide
gagaugaccauuauugcug

SEQ ID NO: 3212074 - RNA, 19 nt, Artificial Sequence
  Description of Artificial Sequence: Synthetic oligonucleotide
uuggacaacacucacugua

SEQ ID NO: 3212075 - RNA, 19 nt, Artificial Sequence
  Description of Artificial Sequence: Synthetic oligonucleotide
agagaugaccauuauugcu

SEQ ID NO: 3212076 - RNA, 19 nt, Artificial Sequence
  Description of Artificial Sequence: Synthetic oligonucleotide
uuuggaaggucauauggau

SEQ ID NO: 3212077 - RNA, 19 nt, Artificial Sequence
  Description of Artificial Sequence: Synthetic oligonucleotide
uggacaacacucacuguag

SEQ ID NO: 3212078 - RNA, 19 nt, Artificial Sequence
  Description of Artificial Sequence: Synthetic oligonucleotide
aauggcaagggaugugacu

SEQ ID NO: 3212079 - RNA, 19 nt, Artificial Sequence
  Description of Artificial Sequence: Synthetic oligonucleotide
gagagaugaccauuauugc

SEQ ID NO: 3212080 - RNA, 19 nt, Artificial Sequence
  Description of Artificial Sequence: Synthetic oligonucleotide
gaugagcugucccuuacug

SEQ ID NO: 3212081 - RNA, 19 nt, Artificial Sequence
  Description of Artificial Sequence: Synthetic oligonucleotide
aaggucauauggaucuugg

SEQ ID NO: 3212082 - RNA, 19 nt, Artificial Sequence
  Description of Artificial Sequence: Synthetic oligonucleotide
ugcugaauacuccuuggac

SEQ ID NO: 3212083 - RNA, 19 nt, Artificial Sequence
  Description of Artificial Sequence: Synthetic oligonucleotide
ugaccauuauugcugaaua

SEQ ID NO: 3212084 - RNA, 19 nt, Artificial Sequence
  Description of Artificial Sequence: Synthetic oligonucleotide
uggcagcaggucauaaugg

SEQ ID NO: 3212085 - RNA, 19 nt, Artificial Sequence
  Description of Artificial Sequence: Synthetic oligonucleotide
gaucuugggagagaugacc

SEQ ID NO: 3212086 - RNA, 19 nt, Artificial Sequence
  Description of Artificial Sequence: Synthetic oligonucleotide
accauuauugcugaauacu

SEQ ID NO: 3212087 - RNA, 19 nt, Artificial Sequence
  Description of Artificial Sequence: Synthetic oligonucleotide
ucauauggaucuugggaga

SEQ ID NO: 3212088 - RNA, 19 nt, Artificial Sequence
  Description of Artificial Sequence: Synthetic oligonucleotide
gaugugacuguucuuugga

SEQ ID NO: 3212089 - RNA, 19 nt, Artificial Sequence
  Description of Artificial Sequence: Synthetic oligonucleotide
auggcaagggaugugacug

SEQ ID NO: 3212090 - RNA, 19 nt, Artificial Sequence
  Description of Artificial Sequence: Synthetic oligonucleotide
aauacuccuuggacaacac

SEQ ID NO: 3212091 - RNA, 19 nt, Artificial Sequence
  Description of Artificial Sequence: Synthetic oligonucleotide
ucacuguagguucaacuuc

SEQ ID NO: 3212092 - RNA, 19 nt, Artificial Sequence
  Description of Artificial Sequence: Synthetic oligonucleotide
ucucucuugggagaggaug

SEQ ID NO: 3212093 - RNA, 19 nt, Artificial Sequence
  Description of Artificial Sequence: Synthetic oligonucleotide
gucauaauggcaagggaug

SEQ ID NO: 3212094 - RNA, 19 nt, Artificial Sequence
  Description of Artificial Sequence: Synthetic oligonucleotide
cuggcagcaggucauaaug

SEQ ID NO: 3212095 - RNA, 19 nt, Artificial Sequence
  Description of Artificial Sequence: Synthetic oligonucleotide
acucacuguagguucaacu

SEQ ID NO: 3212096 - RNA, 19 nt, Artificial Sequence
  Description of Artificial Sequence: Synthetic oligonucleotide
augagcugucccuuacugg

SEQ ID NO: 3212097 - RNA, 19 nt, Artificial Sequence
  Description of Artificial Sequence: Synthetic oligonucleotide
accaucuucucucuuggga

SEQ ID NO: 3212098 - RNA, 19 nt, Artificial Sequence
  Description of Artificial Sequence: Synthetic oligonucleotide
auaauggcaagggauguga

SEQ ID NO: 3212099 - RNA, 19 nt, Artificial Sequence
  Description of Artificial Sequence: Synthetic oligonucleotide
caggucauaauggcaaggg

SEQ ID NO: 3212100 - RNA, 19 nt, Artificial Sequence
  Description of Artificial Sequence: Synthetic oligonucleotide
gaccauuauugcugaauac

SEQ ID NO: 3212101 - RNA, 19 nt, Artificial Sequence
  Description of Artificial Sequence: Synthetic oligonucleotide
accaccaucuucucucuug

SEQ ID NO: 3212102 - RNA, 19 nt, Artificial Sequence
  Description of Artificial Sequence: Synthetic oligonucleotide
uuggaaggucauauggauc

SEQ ID NO: 3212103 - RNA, 19 nt, Artificial Sequence
  Description of Artificial Sequence: Synthetic oligonucleotide
uugcugaauacuccuugga

SEQ ID NO: 3212104 - RNA, 19 nt, Artificial Sequence
  Description of Artificial Sequence: Synthetic oligonucleotide
ggucauauggaucuuggga

SEQ ID NO: 3212105 - RNA, 19 nt, Artificial Sequence
  Description of Artificial Sequence: Synthetic oligonucleotide
aggucauauggaucuuggg

SEQ ID NO: 3212106 - RNA, 19 nt, Artificial Sequence
  Description of Artificial Sequence: Synthetic oligonucleotide
aggaugagcugucccuuac

SEQ ID NO: 3212107 - RNA, 19 nt, Artificial Sequence
  Description of Artificial Sequence: Synthetic oligonucleotide
uucuuuggaaggucauaug

SEQ ID NO: 3212108 - RNA, 19 nt, Artificial Sequence
  Description of Artificial Sequence: Synthetic oligonucleotide
cuuuggaaggucauaugga

SEQ ID NO: 3212109 - RNA, 19 nt, Artificial Sequence
  Description of Artificial Sequence: Synthetic oligonucleotide
caacacucacuguagguuc

SEQ ID NO: 3212110 - RNA, 19 nt, Artificial Sequence
  Description of Artificial Sequence: Synthetic oligonucleotide
gaauacuccuuggacaaca

SEQ ID NO: 3212111 - RNA, 19 nt, Artificial Sequence
  Description of Artificial Sequence: Synthetic oligonucleotide
ucauaauggcaagggaugu

SEQ ID NO: 3212112 - RNA, 19 nt, Artificial Sequence
  Description of Artificial Sequence: Synthetic oligonucleotide
cugaauacuccuuggacaa

SEQ ID NO: 3212113 - RNA, 19 nt, Artificial Sequence
  Description of Artificial Sequence: Synthetic oligonucleotide
uugggagagaugaccauua

SEQ ID NO: 3212114 - RNA, 19 nt, Artificial Sequence
  Description of Artificial Sequence: Synthetic oligonucleotide
agaugaccauuauugcuga

SEQ ID NO: 3212115 - RNA, 19 nt, Artificial Sequence
  Description of Artificial Sequence: Synthetic oligonucleotide
uauggaucuugggagagau

SEQ ID NO: 3212116 - RNA, 19 nt, Artificial Sequence
  Description of Artificial Sequence: Synthetic oligonucleotide
uugggagaggaugagcugu

SEQ ID NO: 3212117 - RNA, 19 nt, Artificial Sequence
  Description of Artificial Sequence: Synthetic oligonucleotide
gucccuuacuggcagcagg

SEQ ID NO: 3212118 - RNA, 19 nt, Artificial Sequence
  Description of Artificial Sequence: Synthetic oligonucleotide
gcugaauacuccuuggaca

SEQ ID NO: 3212119 - RNA, 19 nt, Artificial Sequence
  Description of Artificial Sequence: Synthetic oligonucleotide
uccuuggacaacacucacu

SEQ ID NO: 3212120 - RNA, 19 nt, Artificial Sequence
  Description of Artificial Sequence: Synthetic oligonucleotide
ccuuggacaacacucacug

SEQ ID NO: 3212121 - RNA, 19 nt, Artificial Sequence
  Description of Artificial Sequence: Synthetic oligonucleotide
ucccuuacuggcagcaggu

SEQ ID NO: 3212122 - RNA, 19 nt, Artificial Sequence
  Description of Artificial Sequence: Synthetic oligonucleotide
gaaggucauauggaucuug

SEQ ID NO: 3212123 - RNA, 19 nt, Artificial Sequence
  Description of Artificial Sequence: Synthetic oligonucleotide
uaauggcaagggaugugac

SEQ ID NO: 3212124 - RNA, 19 nt, Artificial Sequence
  Description of Artificial Sequence: Synthetic oligonucleotide
cauauggaucuugggagag

SEQ ID NO: 3212125 - RNA, 19 nt, Artificial Sequence
  Description of Artificial Sequence: Synthetic oligonucleotide
uuauugcugaauacuccuu

SEQ ID NO: 3212126 - RNA, 19 nt, Artificial Sequence
  Description of Artificial Sequence: Synthetic oligonucleotide
cugcuauugcugcugcugc

SEQ ID NO: 3212127 - RNA, 19 nt, Artificial Sequence
  Description of Artificial Sequence: Synthetic oligonucleotide
ggaugugacuguucuuugg

SEQ ID NO: 3212128 - RNA, 19 nt, Artificial Sequence
  Description of Artificial Sequence: Synthetic oligonucleotide
agcaggucauaauggcaag

SEQ ID NO: 3212129 - RNA, 19 nt, Artificial Sequence
  Description of Artificial Sequence: Synthetic oligonucleotide
cacuguagguucaacuuca

SEQ ID NO: 3212130 - RNA, 19 nt, Artificial Sequence
  Description of Artificial Sequence: Synthetic oligonucleotide
cuauugcugcugcugcugc

SEQ ID NO: 3212131 - RNA, 19 nt, Artificial Sequence
  Description of Artificial Sequence: Synthetic oligonucleotide
aggucauaauggcaaggga

SEQ ID NO: 3212132 - RNA, 19 nt, Artificial Sequence
  Description of Artificial Sequence: Synthetic oligonucleotide
ccauuauugcugaauacuc

SEQ ID NO: 3212133 - RNA, 19 nt, Artificial Sequence
  Description of Artificial Sequence: Synthetic oligonucleotide
agcugucccuuacuggcag

SEQ ID NO: 3212134 - RNA, 19 nt, Artificial Sequence
  Description of Artificial Sequence: Synthetic oligonucleotide
ccaucuucucucuugggag

SEQ ID NO: 3212135 - RNA, 19 nt, Artificial Sequence
  Description of Artificial Sequence: Synthetic oligonucleotide
acaacacucacuguagguu

SEQ ID NO: 3212136 - RNA, 19 nt, Artificial Sequence
  Description of Artificial Sequence: Synthetic oligonucleotide
cuugggagaggaugagcug

SEQ ID NO: 3212137 - RNA, 19 nt, Artificial Sequence
  Description of Artificial Sequence: Synthetic oligonucleotide
agggaugugacuguucuuu

SEQ ID NO: 3212138 - RNA, 19 nt, Artificial Sequence
  Description of Artificial Sequence: Synthetic oligonucleotide
augaccauuauugcugaau

SEQ ID NO: 3212139 - RNA, 19 nt, Artificial Sequence
  Description of Artificial Sequence: Synthetic oligonucleotide
ugcugcugcugcuauugcu

SEQ ID NO: 3212140 - RNA, 19 nt, Artificial Sequence
  Description of Artificial Sequence: Synthetic oligonucleotide
aacacucacuguagguuca

SEQ ID NO: 3212141 - RNA, 19 nt, Artificial Sequence
  Description of Artificial Sequence: Synthetic oligonucleotide
cucucuugggagaggauga

SEQ ID NO: 3212142 - RNA, 19 nt, Artificial Sequence
  Description of Artificial Sequence: Synthetic oligonucleotide
ggacaacacucacuguagg

SEQ ID NO: 3212143 - RNA, 19 nt, Artificial Sequence
  Description of Artificial Sequence: Synthetic oligonucleotide
acuguucuuuggaagguca

SEQ ID NO: 3212144 - RNA, 19 nt, Artificial Sequence
  Description of Artificial Sequence: Synthetic oligonucleotide
auacuccuuggacaacacu

SEQ ID NO: 3212145 - RNA, 19 nt, Artificial Sequence
  Description of Artificial Sequence: Synthetic oligonucleotide
gacaacacucacuguaggu

SEQ ID NO: 3212146 - RNA, 19 nt, Artificial Sequence
  Description of Artificial Sequence: Synthetic oligonucleotide
ggcagcaggucauaauggc

SEQ ID NO: 3212147 - RNA, 19 nt, Artificial Sequence
  Description of Artificial Sequence: Synthetic oligonucleotide
aucuugggagagaugacca

SEQ ID NO: 3212148 - RNA, 19 nt, Artificial Sequence
  Description of Artificial Sequence: Synthetic oligonucleotide
ugacuguucuuuggaaggu

SEQ ID NO: 3212149 - RNA, 19 nt, Artificial Sequence
  Description of Artificial Sequence: Synthetic oligonucleotide
cauaauggcaagggaugug

SEQ ID NO: 3212150 - RNA, 19 nt, Artificial Sequence
  Description of Artificial Sequence: Synthetic oligonucleotide
ugcugcugccgccaccacc

SEQ ID NO: 3212151 - RNA, 19 nt, Artificial Sequence
  Description of Artificial Sequence: Synthetic oligonucleotide
aucuucucucuugggagag

SEQ ID NO: 3212152 - RNA, 19 nt, Artificial Sequence
  Description of Artificial Sequence: Synthetic oligonucleotide
cagcaggucauaauggcaa

SEQ ID NO: 3212153 - RNA, 19 nt, Artificial Sequence
  Description of Artificial Sequence: Synthetic oligonucleotide
ucucuugggagaggaugag

SEQ ID NO: 3212154 - RNA, 19 nt, Artificial Sequence
  Description of Artificial Sequence: Synthetic oligonucleotide
ugcuauugcugcugcugcu

SEQ ID NO: 3212155 - RNA, 19 nt, Artificial Sequence
  Description of Artificial Sequence: Synthetic oligonucleotide
cugcugcugcuauugcugc

SEQ ID NO: 3212156 - RNA, 19 nt, Artificial Sequence
  Description of Artificial Sequence: Synthetic oligonucleotide
auugcugcugcugcugcug

SEQ ID NO: 3212157 - RNA, 19 nt, Artificial Sequence
  Description of Artificial Sequence: Synthetic oligonucleotide
ucuucucucuugggagagg

SEQ ID NO: 3212158 - RNA, 19 nt, Artificial Sequence
  Description of Artificial Sequence: Synthetic oligonucleotide
ucuaacagcaucuucaggg

SEQ ID NO: 3212159 - RNA, 19 nt, Artificial Sequence
  Description of Artificial Sequence: Synthetic oligonucleotide
aaagcacacagcuaaauuc

SEQ ID NO: 3212160 - RNA, 19 nt, Artificial Sequence
  Description of Artificial Sequence: Synthetic oligonucleotide
acaucuuuggaaucuaucc

SEQ ID NO: 3212161 - RNA, 19 nt, Artificial Sequence
  Description of Artificial Sequence: Synthetic oligonucleotide
uuuucaaucucuauguuga

SEQ ID NO: 3212162 - RNA, 19 nt, Artificial Sequence
  Description of Artificial Sequence: Synthetic oligonucleotide
ugauucacggcuuuuaucc

SEQ ID NO: 3212163 - RNA, 19 nt, Artificial Sequence
  Description of Artificial Sequence: Synthetic oligonucleotide
cuuucaaucuccacgaugc

SEQ ID NO: 3212164 - RNA, 19 nt, Artificial Sequence
  Description of Artificial Sequence: Synthetic oligonucleotide
ugaucuaacagcaucuuca

SEQ ID NO: 3212165 - RNA, 19 nt, Artificial Sequence
  Description of Artificial Sequence: Synthetic oligonucleotide
ucaacaccaaacaugacug

SEQ ID NO: 3212166 - RNA, 19 nt, Artificial Sequence
  Description of Artificial Sequence: Synthetic oligonucleotide
aacaguggcaccauggagc

SEQ ID NO: 3212167 - RNA, 19 nt, Artificial Sequence
  Description of Artificial Sequence: Synthetic oligonucleotide
aaugauucagagaugacug

SEQ ID NO: 3212168 - RNA, 19 nt, Artificial Sequence
  Description of Artificial Sequence: Synthetic oligonucleotide
agauucaauacacacgguc

SEQ ID NO: 3212169 - RNA, 19 nt, Artificial Sequence
  Description of Artificial Sequence: Synthetic oligonucleotide
agaauucucccacugcucc

SEQ ID NO: 3212170 - RNA, 19 nt, Artificial Sequence
  Description of Artificial Sequence: Synthetic oligonucleotide
aaguuugacagccagcuga

SEQ ID NO: 3212171 - RNA, 19 nt, Artificial Sequence
  Description of Artificial Sequence: Synthetic oligonucleotide
uacguuuucuuucucuacg

SEQ ID NO: 3212172 - RNA, 19 nt, Artificial Sequence
  Description of Artificial Sequence: Synthetic oligonucleotide
cuggguucaaguuugacag

SEQ ID NO: 3212173 - RNA, 19 nt, Artificial Sequence
  Description of Artificial Sequence: Synthetic oligonucleotide
caccuugacauaaauaagg

SEQ ID NO: 3212174 - RNA, 19 nt, Artificial Sequence
  Description of Artificial Sequence: Synthetic oligonucleotide
ugaaugucaacaccaaaca

SEQ ID NO: 3212175 - RNA, 19 nt, Artificial Sequence
  Description of Artificial Sequence: Synthetic oligonucleotide
uuuggaaucuauccggggc

SEQ ID NO: 3212176 - RNA, 19 nt, Artificial Sequence
  Description of Artificial Sequence: Synthetic oligonucleotide
uuucaggugaucuaacagc

SEQ ID NO: 3212177 - RNA, 19 nt, Artificial Sequence
  Description of Artificial Sequence: Synthetic oligonucleotide
agagaugacugcuccaggc

SEQ ID NO: 3212178 - RNA, 19 nt, Artificial Sequence
  Description of Artificial Sequence: Synthetic oligonucleotide
ucucuuucgccucaaauga

SEQ ID NO: 3212179 - RNA, 19 nt, Artificial Sequence
  Description of Artificial Sequence: Synthetic oligonucleotide
gaauaaagcaggcaggaca

SEQ ID NO: 3212180 - RNA, 19 nt, Artificial Sequence
  Description of Artificial Sequence: Synthetic oligonucleotide
ucacucggaauaaagcagg

SEQ ID NO: 3212181 - RNA, 19 nt, Artificial Sequence
  Description of Artificial Sequence: Synthetic oligonucleotide
cugaaugucaacaccaaac

SEQ ID NO: 3212182 - RNA, 19 nt, Artificial Sequence
  Description of Artificial Sequence: Synthetic oligonucleotide
uuugacagccagcugaugu

SEQ ID NO: 3212183 - RNA, 19 nt, Artificial Sequence
  Description of Artificial Sequence: Synthetic oligonucleotide
agggcucccaacuaaacac

SEQ ID NO: 3212184 - RNA, 19 nt, Artificial Sequence
  Description of Artificial Sequence: Synthetic oligonucleotide
cucagauucaauacacacg

SEQ ID NO: 3212185 - RNA, 19 nt, Artificial Sequence
  Description of Artificial Sequence: Synthetic oligonucleotide
ugucacucggaauaaagca

SEQ ID NO: 3212186 - RNA, 19 nt, Artificial Sequence
  Description of Artificial Sequence: Synthetic oligonucleotide
aaugugcuucuugaagucc

SEQ ID NO: 3212187 - RNA, 19 nt, Artificial Sequence
  Description of Artificial Sequence: Synthetic oligonucleotide
acuaaacaccaccaguuuc

SEQ ID NO: 3212188 - RNA, 19 nt, Artificial Sequence
  Description of Artificial Sequence: Synthetic oligonucleotide
cucggaauaaagcaggcag

SEQ ID NO: 3212189 - RNA, 19 nt, Artificial Sequence
  Description of Artificial Sequence: Synthetic oligonucleotide
uucuuugacagcuaagcgu

SEQ ID NO: 3212190 - RNA, 19 nt, Artificial Sequence
  Description of Artificial Sequence: Synthetic oligonucleotide
gucaccuugacauaaauaa

SEQ ID NO: 3212191 - RNA, 19 nt, Artificial Sequence
  Description of Artificial Sequence: Synthetic oligonucleotide
uuauucacuucaugguacg

SEQ ID NO: 3212192 - RNA, 19 nt, Artificial Sequence
  Description of Artificial Sequence: Synthetic oligonucleotide
cuugacauaaauaaggccu

SEQ ID NO: 3212193 - RNA, 19 nt, Artificial Sequence
  Description of Artificial Sequence: Synthetic oligonucleotide
auggagagaauucucccac

SEQ ID NO: 3212194 - RNA, 19 nt, Artificial Sequence
  Description of Artificial Sequence: Synthetic oligonucleotide
ucggaauaaagcaggcagg

SEQ ID NO: 3212195 - RNA, 19 nt, Artificial Sequence
  Description of Artificial Sequence: Synthetic oligonucleotide
agcguuuucaaucucuaug

SEQ ID NO: 3212196 - RNA, 19 nt, Artificial Sequence
  Description of Artificial Sequence: Synthetic oligonucleotide
aagacucuguugcuguggg

SEQ ID NO: 3212197 - RNA, 19 nt, Artificial Sequence
  Description of Artificial Sequence: Synthetic oligonucleotide
ucuauguugaaaguguggu

SEQ ID NO: 3212198 - RNA, 19 nt, Artificial Sequence
  Description of Artificial Sequence: Synthetic oligonucleotide
uuuauccaggccauggaga

SEQ ID NO: 3212199 - RNA, 19 nt, Artificial Sequence
  Description of Artificial Sequence: Synthetic oligonucleotide
ugguccaaagcacacagcu

SEQ ID NO: 3212200 - RNA, 19 nt, Artificial Sequence
  Description of Artificial Sequence: Synthetic oligonucleotide
cuuauucacuucaugguac

SEQ ID NO: 3212201 - RNA, 19 nt, Artificial Sequence
  Description of Artificial Sequence: Synthetic oligonucleotide
ugaaguccaaagcacuugc

SEQ ID NO: 3212202 - RNA, 19 nt, Artificial Sequence
  Description of Artificial Sequence: Synthetic oligonucleotide
ucaacauccggcaagcaau

SEQ ID NO: 3212203 - RNA, 19 nt, Artificial Sequence
  Description of Artificial Sequence: Synthetic oligonucleotide
uuauccaggccauggagag

SEQ ID NO: 3212204 - RNA, 19 nt, Artificial Sequence
  Description of Artificial Sequence: Synthetic oligonucleotide
caucuuuggaaucuauccg

SEQ ID NO: 3212205 - RNA, 19 nt, Artificial Sequence
  Description of Artificial Sequence: Synthetic oligonucleotide
aaagcaggcaggacaaugg

SEQ ID NO: 3212206 - RNA, 19 nt, Artificial Sequence
  Description of Artificial Sequence: Synthetic oligonucleotide
guagugaaggaccucaaug

SEQ ID NO: 3212207 - RNA, 19 nt, Artificial Sequence
  Description of Artificial Sequence: Synthetic oligonucleotide
acagcuaaauucuggcagg

SEQ ID NO: 3212208 - RNA, 19 nt, Artificial Sequence
  Description of Artificial Sequence: Synthetic oligonucleotide
ucuuugacagcuaagcguu

SEQ ID NO: 3212209 - RNA, 19 nt, Artificial Sequence
  Description of Artificial Sequence: Synthetic oligonucleotide
ucuggguucaaguuugaca

SEQ ID NO: 3212210 - RNA, 19 nt, Artificial Sequence
  Description of Artificial Sequence: Synthetic oligonucleotide
uguuuacugagucuaccug

SEQ ID NO: 3212211 - RNA, 19 nt, Artificial Sequence
  Description of Artificial Sequence: Synthetic oligonucleotide
acugagucuaccugaauug

SEQ ID NO: 3212212 - RNA, 19 nt, Artificial Sequence
  Description of Artificial Sequence: Synthetic oligonucleotide
aaaacgucguccgacaggu

SEQ ID NO: 3212213 - RNA, 19 nt, Artificial Sequence
  Description of Artificial Sequence: Synthetic oligonucleotide
acaguggcaccauggagcc

SEQ ID NO: 3212214 - RNA, 19 nt, Artificial Sequence
  Description of Artificial Sequence: Synthetic oligonucleotide
ugcauuucuggaucaacag

SEQ ID NO: 3212215 - RNA, 19 nt, Artificial Sequence
  Description of Artificial Sequence: Synthetic oligonucleotide
caagcaauucagcaggacc

SEQ ID NO: 3212216 - RNA, 19 nt, Artificial Sequence
  Description of Artificial Sequence: Synthetic oligonucleotide
caguuucaaaugcugagcg

SEQ ID NO: 3212217 - RNA, 19 nt, Artificial Sequence
  Description of Artificial Sequence: Synthetic oligonucleotide
acggcuuuuauccaggcca

SEQ ID NO: 3212218 - RNA, 19 nt, Artificial Sequence
  Description of Artificial Sequence: Synthetic oligonucleotide
ucuuauucacuucauggua

SEQ ID NO: 3212219 - RNA, 19 nt, Artificial Sequence
  Description of Artificial Sequence: Synthetic oligonucleotide
uugucacucggaauaaagc

SEQ ID NO: 3212220 - RNA, 19 nt, Artificial Sequence
  Description of Artificial Sequence: Synthetic oligonucleotide
augcugagcguuuucaauc

SEQ ID NO: 3212221 - RNA, 19 nt, Artificial Sequence
  Description of Artificial Sequence: Synthetic oligonucleotide
ucaccuugacauaaauaag

SEQ ID NO: 3212222 - RNA, 19 nt, Artificial Sequence
  Description of Artificial Sequence: Synthetic oligonucleotide
cacagcuaaauucuggcag

SEQ ID NO: 3212223 - RNA, 19 nt, Artificial Sequence
  Description of Artificial Sequence: Synthetic oligonucleotide
gaucuaacagcaucuucag

SEQ ID NO: 3212224 - RNA, 19 nt, Artificial Sequence
  Description of Artificial Sequence: Synthetic oligonucleotide
guuucaggugaucuaacag

SEQ ID NO: 3212225 - RNA, 19 nt, Artificial Sequence
  Description of Artificial Sequence: Synthetic oligonucleotide
aucuuauucacuucauggu

SEQ ID NO: 3212226 - RNA, 19 nt, Artificial Sequence
  Description of Artificial Sequence: Synthetic oligonucleotide
aacgucguccgacagguga

SEQ ID NO: 3212227 - RNA, 19 nt, Artificial Sequence
  Description of Artificial Sequence: Synthetic oligonucleotide
aggacaauggugccauggc

SEQ ID NO: 3212228 - RNA, 19 nt, Artificial Sequence
  Description of Artificial Sequence: Synthetic oligonucleotide
aauacacacggucguucuc

SEQ ID NO: 3212229 - RNA, 19 nt, Artificial Sequence
  Description of Artificial Sequence: Synthetic oligonucleotide
accuugacauaaauaaggc

SEQ ID NO: 3212230 - RNA, 19 nt, Artificial Sequence
  Description of Artificial Sequence: Synthetic oligonucleotide
accaguuucaaaugcugag

SEQ ID NO: 3212231 - RNA, 19 nt, Artificial Sequence
  Description of Artificial Sequence: Synthetic oligonucleotide
uucuggaucaacaguggca

SEQ ID NO: 3212232 - RNA, 19 nt, Artificial Sequence
  Description of Artificial Sequence: Synthetic oligonucleotide
cucucuuucgccucaaaug

SEQ ID NO: 3212233 - RNA, 19 nt, Artificial Sequence
  Description of Artificial Sequence: Synthetic oligonucleotide
gaaagugugguccaugucu

SEQ ID NO: 3212234 - RNA, 19 nt, Artificial Sequence
  Description of Artificial Sequence: Synthetic oligonucleotide
ucaaucuccacgaugcauu

SEQ ID NO: 3212235 - RNA, 19 nt, Artificial Sequence
  Description of Artificial Sequence: Synthetic oligonucleotide
aauucagcaggaccuggca

SEQ ID NO: 3212236 - RNA, 19 nt, Artificial Sequence
  Description of Artificial Sequence: Synthetic oligonucleotide
ucuggaucaacaguggcac

SEQ ID NO: 3212237 - RNA, 19 nt, Artificial Sequence
  Description of Artificial Sequence: Synthetic oligonucleotide
cucuauguugaaagugugg

SEQ ID NO: 3212238 - RNA, 19 nt, Artificial Sequence
  Description of Artificial Sequence: Synthetic oligonucleotide
aauggugccauggcagcac

SEQ ID NO: 3212239 - RNA, 19 nt, Artificial Sequence
  Description of Artificial Sequence: Synthetic oligonucleotide
uucacggcuuuuauccagg

SEQ ID NO: 3212240 - RNA, 19 nt, Artificial Sequence
  Description of Artificial Sequence: Synthetic oligonucleotide
ucgguuucuccuuggagag

SEQ ID NO: 3212241 - RNA, 19 nt, Artificial Sequence
  Description of Artificial Sequence: Synthetic oligonucleotide
ugagcaaagcuguucuggc

SEQ ID NO: 3212242 - RNA, 19 nt, Artificial Sequence
  Description of Artificial Sequence: Synthetic oligonucleotide
uuuguuuacugagucuacc

SEQ ID NO: 3212243 - RNA, 19 nt, Artificial Sequence
  Description of Artificial Sequence: Synthetic oligonucleotide
cuucaugguacgaagccac

SEQ ID NO: 3212244 - RNA, 19 nt, Artificial Sequence
  Description of Artificial Sequence: Synthetic oligonucleotide
auucaauacacacggucgu

SEQ ID NO: 3212245 - RNA, 19 nt, Artificial Sequence
  Description of Artificial Sequence: Synthetic oligonucleotide
uacgacuuucugaauguca

SEQ ID NO: 3212246 - RNA, 19 nt, Artificial Sequence
  Description of Artificial Sequence: Synthetic oligonucleotide
uuguuuacugagucuaccu

SEQ ID NO: 3212247 - RNA, 19 nt, Artificial Sequence
  Description of Artificial Sequence: Synthetic oligonucleotide
uccacgaugcauuucugga

SEQ ID NO: 3212248 - RNA, 19 nt, Artificial Sequence
  Description of Artificial Sequence: Synthetic oligonucleotide
auucagcaggaccuggcac

SEQ ID NO: 3212249 - RNA, 19 nt, Artificial Sequence
  Description of Artificial Sequence: Synthetic oligonucleotide
acagcuaagcguugcacug

SEQ ID NO: 3212250 - RNA, 19 nt, Artificial Sequence
  Description of Artificial Sequence: Synthetic oligonucleotide
uacgaagccaccaguuuca

SEQ ID NO: 3212251 - RNA, 19 nt, Artificial Sequence
  Description of Artificial Sequence: Synthetic oligonucleotide
agcuaagcguugcacuggc

SEQ ID NO: 3212252 - RNA, 19 nt, Artificial Sequence
  Description of Artificial Sequence: Synthetic oligonucleotide
cucuacgacuuucugaaug

SEQ ID NO: 3212253 - RNA, 19 nt, Artificial Sequence
  Description of Artificial Sequence: Synthetic oligonucleotide
aacagcaucuucaggguug

SEQ ID NO: 3212254 - RNA, 19 nt, Artificial Sequence
  Description of Artificial Sequence: Synthetic oligonucleotide
ucacuucaugguacgaagc

SEQ ID NO: 3212255 - RNA, 19 nt, Artificial Sequence
  Description of Artificial Sequence: Synthetic oligonucleotide
gcacaaaagacaucuuugg

SEQ ID NO: 3212256 - RNA, 19 nt, Artificial Sequence
  Description of Artificial Sequence: Synthetic oligonucleotide
ucggagucggugaagacuc

SEQ ID NO: 3212257 - RNA, 19 nt, Artificial Sequence
  Description of Artificial Sequence: Synthetic oligonucleotide
ugagucuaccugaauugca

SEQ ID NO: 3212258 - RNA, 19 nt, Artificial Sequence
  Description of Artificial Sequence: Synthetic oligonucleotide
aaaauuauuuucuucccgg

SEQ ID NO: 3212259 - RNA, 19 nt, Artificial Sequence
  Description of Artificial Sequence: Synthetic oligonucleotide
aaugagaugauccgcuugc

SEQ ID NO: 3212260 - RNA, 19 nt, Artificial Sequence
  Description of Artificial Sequence: Synthetic oligonucleotide
aaugccucucuauugaucg

SEQ ID NO: 3212261 - RNA, 19 nt, Artificial Sequence
  Description of Artificial Sequence: Synthetic oligonucleotide
auuuacaacaucuacagcu

SEQ ID NO: 3212262 - RNA, 19 nt, Artificial Sequence
  Description of Artificial Sequence: Synthetic oligonucleotide
ucuuauguaguucucaaag

SEQ ID NO: 3212263 - RNA, 19 nt, Artificial Sequence
  Description of Artificial Sequence: Synthetic oligonucleotide
aagaaaaugagaugauccg

SEQ ID NO: 3212264 - RNA, 19 nt, Artificial Sequence
  Description of Artificial Sequence: Synthetic oligonucleotide
ugagaaacaagaaaaugag

SEQ ID NO: 3212265 - RNA, 19 nt, Artificial Sequence
  Description of Artificial Sequence: Synthetic oligonucleotide
cacaaaauuauuuucuucc

SEQ ID NO: 3212266 - RNA, 19 nt, Artificial Sequence
  Description of Artificial Sequence: Synthetic oligonucleotide
aaacaagaaaaugagauga

SEQ ID NO: 3212267 - RNA, 19 nt, Artificial Sequence
  Description of Artificial Sequence: Synthetic oligonucleotide
agauuuacaacaucuacag

SEQ ID NO: 3212268 - RNA, 19 nt, Artificial Sequence
  Description of Artificial Sequence: Synthetic oligonucleotide
caagaaaaugagaugaucc

SEQ ID NO: 3212269 - RNA, 19 nt, Artificial Sequence
  Description of Artificial Sequence: Synthetic oligonucleotide
uuuuggaaaacacacgucu

SEQ ID NO: 3212270 - RNA, 19 nt, Artificial Sequence
  Description of Artificial Sequence: Synthetic oligonucleotide
ucuguauccagccaucagg

SEQ ID NO: 3212271 - RNA, 19 nt, Artificial Sequence
  Description of Artificial Sequence: Synthetic oligonucleotide
acaaaauuauuuucuuccc

SEQ ID NO: 3212272 - RNA, 19 nt, Artificial Sequence
  Description of Artificial Sequence: Synthetic oligonucleotide
ucacaagacaccuucagag

SEQ ID NO: 3212273 - RNA, 19 nt, Artificial Sequence
  Description of Artificial Sequence: Synthetic oligonucleotide
aagaagaugagguaauggu

SEQ ID NO: 3212274 - RNA, 19 nt, Artificial Sequence
  Description of Artificial Sequence: Synthetic oligonucleotide
uagauuuacaacaucuaca

SEQ ID NO: 3212275 - RNA, 19 nt, Artificial Sequence
  Description of Artificial Sequence: Synthetic oligonucleotide
uagacaauaauucccgggc

SEQ ID NO: 3212276 - RNA, 19 nt, Artificial Sequence
  Description of Artificial Sequence: Synthetic oligonucleotide
ugcuguggagcccagaggg

SEQ ID NO: 3212277 - RNA, 19 nt, Artificial Sequence
  Description of Artificial Sequence: Synthetic oligonucleotide
ucagagagcacaacaagcc

SEQ ID NO: 3212278 - RNA, 19 nt, Artificial Sequence
  Description of Artificial Sequence: Synthetic oligonucleotide
uuggaaaacacacgucugg

SEQ ID NO: 3212279 - RNA, 19 nt, Artificial Sequence
  Description of Artificial Sequence: Synthetic oligonucleotide
gaggguugaauucuaaugc

SEQ ID NO: 3212280 - RNA, 19 nt, Artificial Sequence
  Description of Artificial Sequence: Synthetic oligonucleotide
aaugguugaguaccccagc

SEQ ID NO: 3212281 - RNA, 19 nt, Artificial Sequence
  Description of Artificial Sequence: Synthetic oligonucleotide
uuuucuucccggaaaagca

SEQ ID NO: 3212282 - RNA, 19 nt, Artificial Sequence
  Description of Artificial Sequence: Synthetic oligonucleotide
ugacacaaaauuauuuucu

SEQ ID NO: 3212283 - RNA, 19 nt, Artificial Sequence
  Description of Artificial Sequence: Synthetic oligonucleotide
  modified_base (14)..(14): a, c, u, g, unknown or other
caacaagccagganaaggg

SEQ ID NO: 3212284 - RNA, 19 nt, Artificial Sequence
  Description of Artificial Sequence: Synthetic oligonucleotide
aaaacacacgucuggucac

SEQ ID NO: 3212285 - RNA, 19 nt, Artificial Sequence
  Description of Artificial Sequence: Synthetic oligonucleotide
gaaacaagaaaaugagaug

SEQ ID NO: 3212286 - RNA, 19 nt, Artificial Sequence
  Description of Artificial Sequence: Synthetic oligonucleotide
uuauguaguucucaaaguc

SEQ ID NO: 3212287 - RNA, 19 nt, Artificial Sequence
  Description of Artificial Sequence: Synthetic oligonucleotide
uuuacaacaucuacagcug

SEQ ID NO: 3212288 - RNA, 19 nt, Artificial Sequence
  Description of Artificial Sequence: Synthetic oligonucleotide
acaucuacagcugaggagg

SEQ ID NO: 3212289 - RNA, 19 nt, Artificial Sequence
  Description of Artificial Sequence: Synthetic oligonucleotide
agaaaaugagaugauccgc

SEQ ID NO: 3212290 - RNA, 19 nt, Artificial Sequence
  Description of Artificial Sequence: Synthetic oligonucleotide
auuuucuucccggaaaagc

SEQ ID NO: 3212291 - RNA, 19 nt, Artificial Sequence
  Description of Artificial Sequence: Synthetic oligonucleotide
aacaucuacagcugaggag

SEQ ID NO: 3212292 - RNA, 19 nt, Artificial Sequence
  Description of Artificial Sequence: Synthetic oligonucleotide
uucagagagcacaacaagc

SEQ ID NO: 3212293 - RNA, 19 nt, Artificial Sequence
  Description of Artificial Sequence: Synthetic oligonucleotide
ucuaaugccucucuauuga

SEQ ID NO: 3212294 - RNA, 19 nt, Artificial Sequence
  Description of Artificial Sequence: Synthetic oligonucleotide
agaaacaagaaaaugagau

SEQ ID NO: 3212295 - RNA, 19 nt, Artificial Sequence
  Description of Artificial Sequence: Synthetic oligonucleotide
aggguugaauucuaaugcc

SEQ ID NO: 3212296 - RNA, 19 nt, Artificial Sequence
  Description of Artificial Sequence: Synthetic oligonucleotide
  modified_base (2)..(2): a, c, u, g, unknown or other
anaagggcaggauggagcu

SEQ ID NO: 3212297 - RNA, 19 nt, Artificial Sequence
  Description of Artificial Sequence: Synthetic oligonucleotide
caaaauuauuuucuucccg

SEQ ID NO: 3212298 - RNA, 19 nt, Artificial Sequence
  Description of Artificial Sequence: Synthetic oligonucleotide
gaaauuguggugguuacag

SEQ ID NO: 3212299 - RNA, 19 nt, Artificial Sequence
  Description of Artificial Sequence: Synthetic oligonucleotide
acugccauguucaaggggc

SEQ ID NO: 3212300 - RNA, 19 nt, Artificial Sequence
  Description of Artificial Sequence: Synthetic oligonucleotide
  modified_base (6)..(6): a, c, u, g, unknown or other
cagganaagggcaggaugg

SEQ ID NO: 3212301 - RNA, 19 nt, Artificial Sequence
  Description of Artificial Sequence: Synthetic oligonucleotide
aauucuaaugccucucuau

SEQ ID NO: 3212302 - RNA, 19 nt, Artificial Sequence
  Description of Artificial Sequence: Synthetic oligonucleotide
aauuguggugguuacaguu

SEQ ID NO: 3212303 - RNA, 19 nt, Artificial Sequence
  Description of Artificial Sequence: Synthetic oligonucleotide
uggagcuagacaauaauuc

SEQ ID NO: 3212304 - RNA, 19 nt, Artificial Sequence
  Description of Artificial Sequence: Synthetic oligonucleotide
gaaaacacacgucugguca

SEQ ID NO: 3212305 - RNA, 19 nt, Artificial Sequence
  Description of Artificial Sequence: Synthetic oligonucleotide
gaagaugagguaaugguug

SEQ ID NO: 3212306 - RNA, 19 nt, Artificial Sequence
  Description of Artificial Sequence: Synthetic oligonucleotide
agaggguugaauucuaaug

SEQ ID NO: 3212307 - RNA, 19 nt, Artificial Sequence
  Description of Artificial Sequence: Synthetic oligonucleotide
cuagacaauaauucccggg

SEQ ID NO: 3212308 - RNA, 19 nt, Artificial Sequence
  Description of Artificial Sequence: Synthetic oligonucleotide
uuaacugaugcuguggagc

SEQ ID NO: 3212309 - RNA, 19 nt, Artificial Sequence
  Description of Artificial Sequence: Synthetic oligonucleotide
acaagacaccuucagagag

SEQ ID NO: 3212310 - RNA, 19 nt, Artificial Sequence
  Description of Artificial Sequence: Synthetic oligonucleotide
acacaaaauuauuuucuuc

SEQ ID NO: 3212311 - RNA, 19 nt, Artificial Sequence
  Description of Artificial Sequence: Synthetic oligonucleotide
agacaauaauucccgggcc

SEQ ID NO: 3212312 - RNA, 19 nt, Artificial Sequence
  Description of Artificial Sequence: Synthetic oligonucleotide
gaagaagaugagguaaugg

SEQ ID NO: 3212313 - RNA, 19 nt, Artificial Sequence
  Description of Artificial Sequence: Synthetic oligonucleotide
aaauuauuuucuucccgga

SEQ ID NO: 3212314 - RNA, 19 nt, Artificial Sequence
  Description of Artificial Sequence: Synthetic oligonucleotide
cuagauuuacaacaucuac

SEQ ID NO: 3212315 - RNA, 19 nt, Artificial Sequence
  Description of Artificial Sequence: Synthetic oligonucleotide
augagaaacaagaaaauga

SEQ ID NO: 3212316 - RNA, 19 nt, Artificial Sequence
  Description of Artificial Sequence: Synthetic oligonucleotide
gacaugagaaacaagaaaa

SEQ ID NO: 3212317 - RNA, 19 nt, Artificial Sequence
  Description of Artificial Sequence: Synthetic oligonucleotide
aaaugagaugauccgcuug

SEQ ID NO: 3212318 - RNA, 19 nt, Artificial Sequence
  Description of Artificial Sequence: Synthetic oligonucleotide
gagguaaugguugaguacc

SEQ ID NO: 3212319 - RNA, 19 nt, Artificial Sequence
  Description of Artificial Sequence: Synthetic oligonucleotide
uauugaucggugaucggcc

SEQ ID NO: 3212320 - RNA, 19 nt, Artificial Sequence
  Description of Artificial Sequence: Synthetic oligonucleotide
  modified_base (13)..(13): a, c, u, g, unknown or other
aacaagccagganaagggc

SEQ ID NO: 3212321 - RNA, 19 nt, Artificial Sequence
  Description of Artificial Sequence: Synthetic oligonucleotide
uaaugguugaguaccccag

SEQ ID NO: 3212322 - RNA, 19 nt, Artificial Sequence
  Description of Artificial Sequence: Synthetic oligonucleotide
aauuauuuucuucccggaa

SEQ ID NO: 3212323 - RNA, 19 nt, Artificial Sequence
  Description of Artificial Sequence: Synthetic oligonucleotide
  modified_base (15)..(15): a, c, u, g, unknown or other
acaacaagccagganaagg

SEQ ID NO: 3212324 - RNA, 19 nt, Artificial Sequence
  Description of Artificial Sequence: Synthetic oligonucleotide
acaguucuuauguaguucu

SEQ ID NO: 3212325 - RNA, 19 nt, Artificial Sequence
  Description of Artificial Sequence: Synthetic oligonucleotide
auuauuuucuucccggaaa

SEQ ID NO: 3212326 - RNA, 19 nt, Artificial Sequence
  Description of Artificial Sequence: Synthetic oligonucleotide
ggggaugagaagcagaggg

SEQ ID NO: 3212327 - RNA, 19 nt, Artificial Sequence
  Description of Artificial Sequence: Synthetic oligonucleotide
ugagaugauccgcuugccg

SEQ ID NO: 3212328 - RNA, 19 nt, Artificial Sequence
  Description of Artificial Sequence: Synthetic oligonucleotide
uuauuuucuucccggaaaa

SEQ ID NO: 3212329 - RNA, 19 nt, Artificial Sequence
  Description of Artificial Sequence: Synthetic oligonucleotide
uacaacaucuacagcugag

SEQ ID NO: 3212330 - RNA, 19 nt, Artificial Sequence
  Description of Artificial Sequence: Synthetic oligonucleotide
ggaaaagcaagguuaacug

SEQ ID NO: 3212331 - RNA, 19 nt, Artificial Sequence
  Description of Artificial Sequence: Synthetic oligonucleotide
agaggggaaauuguggugg

SEQ ID NO: 3212332 - RNA, 19 nt, Artificial Sequence
  Description of Artificial Sequence: Synthetic oligonucleotide
cuguauccagccaucaggg

SEQ ID NO: 3212333 - RNA, 19 nt, Artificial Sequence
  Description of Artificial Sequence: Synthetic oligonucleotide
aaaagcaagguuaacugau

SEQ ID NO: 3212334 - RNA, 19 nt, Artificial Sequence
  Description of Artificial Sequence: Synthetic oligonucleotide
  modified_base (3)..(3): a, c, u, g, unknown or other
ganaagggcaggauggagc

SEQ ID NO: 3212335 - RNA, 19 nt, Artificial Sequence
  Description of Artificial Sequence: Synthetic oligonucleotide
acaagaaaaugagaugauc

SEQ ID NO: 3212336 - RNA, 19 nt, Artificial Sequence
  Description of Artificial Sequence: Synthetic oligonucleotide
uucuaaugccucucuauug

SEQ ID NO: 3212337 - RNA, 19 nt, Artificial Sequence
  Description of Artificial Sequence: Synthetic oligonucleotide
aguucucaaagucgcuccc

SEQ ID NO: 3212338 - RNA, 19 nt, Artificial Sequence
  Description of Artificial Sequence: Synthetic oligonucleotide
uaacugaugcuguggagcc

SEQ ID NO: 3212339 - RNA, 19 nt, Artificial Sequence
  Description of Artificial Sequence: Synthetic oligonucleotide
auugaucggugaucggccc

SEQ ID NO: 3212340 - RNA, 19 nt, Artificial Sequence
  Description of Artificial Sequence: Synthetic oligonucleotide
cucuauugaucggugaucg

SEQ ID NO: 3212341 - RNA, 19 nt, Artificial Sequence
  Description of Artificial Sequence: Synthetic oligonucleotide
agcaagggacaugagaaac

SEQ ID NO: 3212342 - RNA, 19 nt, Artificial Sequence
  Description of Artificial Sequence: Synthetic oligonucleotide
uugaguaccccagcaaggg

SEQ ID NO: 3212343 - RNA, 19 nt, Artificial Sequence
  Description of Artificial Sequence: Synthetic oligonucleotide
cugacacaaaauuauuuuc

SEQ ID NO: 3212344 - RNA, 19 nt, Artificial Sequence
  Description of Artificial Sequence: Synthetic oligonucleotide
cuauugaucggugaucggc

SEQ ID NO: 3212345 - RNA, 19 nt, Artificial Sequence
  Description of Artificial Sequence: Synthetic oligonucleotide
gaaaagcaagguuaacuga

SEQ ID NO: 3212346 - RNA, 19 nt, Artificial Sequence
  Description of Artificial Sequence: Synthetic oligonucleotide
aagaugagguaaugguuga

SEQ ID NO: 3212347 - RNA, 19 nt, Artificial Sequence
  Description of Artificial Sequence: Synthetic oligonucleotide
ugaauucuaaugccucucu

SEQ ID NO: 3212348 - RNA, 19 nt, Artificial Sequence
  Description of Artificial Sequence: Synthetic oligonucleotide
aauaauucccgggccacug

SEQ ID NO: 3212349 - RNA, 19 nt, Artificial Sequence
  Description of Artificial Sequence: Synthetic oligonucleotide
gguuacaguucuuauguag

SEQ ID NO: 3212350 - RNA, 19 nt, Artificial Sequence
  Description of Artificial Sequence: Synthetic oligonucleotide
caugagaaacaagaaaaug

SEQ ID NO: 3212351 - RNA, 19 nt, Artificial Sequence
  Description of Artificial Sequence: Synthetic oligonucleotide
ucuucccggaaaagcaagg

SEQ ID NO: 3212352 - RNA, 19 nt, Artificial Sequence
  Description of Artificial Sequence: Synthetic oligonucleotide
agcuagacaauaauucccg

SEQ ID NO: 3212353 - RNA, 19 nt, Artificial Sequence
  Description of Artificial Sequence: Synthetic oligonucleotide
aagguuaacugaugcugug

SEQ ID NO: 3212354 - RNA, 19 nt, Artificial Sequence
  Description of Artificial Sequence: Synthetic oligonucleotide
aagggcaggauggagcuag

SEQ ID NO: 3212355 - RNA, 19 nt, Artificial Sequence
  Description of Artificial Sequence: Synthetic oligonucleotide
  modified_base (11)..(11): a, c, u, g, unknown or other
caagccagganaagggcag

SEQ ID NO: 3212356 - RNA, 19 nt, Artificial Sequence
  Description of Artificial Sequence: Synthetic oligonucleotide
ugagguaaugguugaguac

SEQ ID NO: 3212357 - RNA, 19 nt, Artificial Sequence
  Description of Artificial Sequence: Synthetic oligonucleotide
auaauucccgggccacugc

SEQ ID NO: 3212358 - RNA, 19 nt, Artificial Sequence
  Description of Artificial Sequence: Synthetic oligonucleotide
guagaaaggccacaggucc

SEQ ID NO: 3212359 - RNA, 19 nt, Artificial Sequence
  Description of Artificial Sequence: Synthetic oligonucleotide
uuggucaugaccccguugc

SEQ ID NO: 3212360 - RNA, 19 nt, Artificial Sequence
  Description of Artificial Sequence: Synthetic oligonucleotide
aacuugagcuccaggaagc

SEQ ID NO: 3212361 - RNA, 19 nt, Artificial Sequence
  Description of Artificial Sequence: Synthetic oligonucleotide
aguuguuuggggccugugc

SEQ ID NO: 3212362 - RNA, 19 nt, Artificial Sequence
  Description of Artificial Sequence: Synthetic oligonucleotide
gaacuugagcuccaggaag

SEQ ID NO: 3212363 - RNA, 19 nt, Artificial Sequence
  Description of Artificial Sequence: Synthetic oligonucleotide
uugagcuccaggaagcggc

SEQ ID NO: 3212364 - RNA, 19 nt, Artificial Sequence
  Description of Artificial Sequence: Synthetic oligonucleotide
uucucgaugacgccgggcc

SEQ ID NO: 3212365 - RNA, 19 nt, Artificial Sequence
  Description of Artificial Sequence: Synthetic oligonucleotide
guuguuuggggccugugcc

SEQ ID NO: 3212366 - RNA, 19 nt, Artificial Sequence
  Description of Artificial Sequence: Synthetic oligonucleotide
uccggguucucgaugacgc

SEQ ID NO: 3212367 - RNA, 19 nt, Artificial Sequence
  Description of Artificial Sequence: Synthetic oligonucleotide
gucaugaccccguugcggg

SEQ ID NO: 3212368 - RNA, 19 nt, Artificial Sequence
  Description of Artificial Sequence: Synthetic oligonucleotide
ccugccaagcucaagaggg

SEQ ID NO: 3212369 - RNA, 19 nt, Artificial Sequence
  Description of Artificial Sequence: Synthetic oligonucleotide
ugugccaugaagcccgcga

SEQ ID NO: 3212370 - RNA, 19 nt, Artificial Sequence
  Description of Artificial Sequence: Synthetic oligonucleotide
guguccuuggucaugaccc

SEQ ID NO: 3212371 - RNA, 19 nt, Artificial Sequence
  Description of Artificial Sequence: Synthetic oligonucleotide
aagagggcaggguuggggu

SEQ ID NO: 3212372 - RNA, 19 nt, Artificial Sequence
  Description of Artificial Sequence: Synthetic oligonucleotide
aaaggccacagguccacgu

SEQ ID NO: 3212373 - RNA, 19 nt, Artificial Sequence
  Description of Artificial Sequence: Synthetic oligonucleotide
gaacuccacguccugccgg

SEQ ID NO: 3212374 - RNA, 19 nt, Artificial Sequence
  Description of Artificial Sequence: Synthetic oligonucleotide
aggccacagguccacgugc

SEQ ID NO: 3212375 - RNA, 19 nt, Artificial Sequence
  Description of Artificial Sequence: Synthetic oligonucleotide
aaggccacagguccacgug

SEQ ID NO: 3212376 - RNA, 19 nt, Artificial Sequence
  Description of Artificial Sequence: Synthetic oligonucleotide
ugagcuccaggaagcggcg

SEQ ID NO: 3212377 - RNA, 19 nt, Artificial Sequence
  Description of Artificial Sequence: Synthetic oligonucleotide
uacuccggguucucgauga

SEQ ID NO: 3212378 - RNA, 19 nt, Artificial Sequence
  Description of Artificial Sequence: Synthetic oligonucleotide
uugcgggguagaaaggcca

SEQ ID NO: 3212379 - RNA, 19 nt, Artificial Sequence
  Description of Artificial Sequence: Synthetic oligonucleotide
agccacguguccuugguca

SEQ ID NO: 3212380 - RNA, 19 nt, Artificial Sequence
  Description of Artificial Sequence: Synthetic oligonucleotide
aggguugggguacuccggg

SEQ ID NO: 3212381 - RNA, 19 nt, Artificial Sequence
  Description of Artificial Sequence: Synthetic oligonucleotide
agaaaggccacagguccac

SEQ ID NO: 3212382 - RNA, 19 nt, Artificial Sequence
  Description of Artificial Sequence: Synthetic oligonucleotide
uagaaaggccacaggucca

SEQ ID NO: 3212383 - RNA, 19 nt, Artificial Sequence
  Description of Artificial Sequence: Synthetic oligonucleotide
uccacgugcaggugguugc

SEQ ID NO: 3212384 - RNA, 19 nt, Artificial Sequence
  Description of Artificial Sequence: Synthetic oligonucleotide
guuucagccgccugccaag

SEQ ID NO: 3212385 - RNA, 19 nt, Artificial Sequence
  Description of Artificial Sequence: Synthetic oligonucleotide
caugaagcccgcgaaggcc

SEQ ID NO: 3212386 - RNA, 19 nt, Artificial Sequence
  Description of Artificial Sequence: Synthetic oligonucleotide
ugccaugaagcccgcgaag

SEQ ID NO: 3212387 - RNA, 19 nt, Artificial Sequence
  Description of Artificial Sequence: Synthetic oligonucleotide
uggucaugaccccguugcg

SEQ ID NO: 3212388 - RNA, 19 nt, Artificial Sequence
  Description of Artificial Sequence: Synthetic oligonucleotide
aacuccacguccugccggu

SEQ ID NO: 3212389 - RNA, 19 nt, Artificial Sequence
  Description of Artificial Sequence: Synthetic oligonucleotide
caggguuucagccgccugc

SEQ ID NO: 3212390 - RNA, 19 nt, Artificial Sequence
  Description of Artificial Sequence: Synthetic oligonucleotide
cucaagagggcaggguugg

SEQ ID NO: 3212391 - RNA, 19 nt, Artificial Sequence
  Description of Artificial Sequence: Synthetic oligonucleotide
aggguuucagccgccugcc

SEQ ID NO: 3212392 - RNA, 19 nt, Artificial Sequence
  Description of Artificial Sequence: Synthetic oligonucleotide
uuguuuggggccugugcca

SEQ ID NO: 3212393 - RNA, 19 nt, Artificial Sequence
  Description of Artificial Sequence: Synthetic oligonucleotide
ugcuccgggaacuccacgu

SEQ ID NO: 3212394 - RNA, 19 nt, Artificial Sequence
  Description of Artificial Sequence: Synthetic oligonucleotide
uguccuuggucaugacccc

SEQ ID NO: 3212395 - RNA, 19 nt, Artificial Sequence
  Description of Artificial Sequence: Synthetic oligonucleotide
cagguccacgugcaggugg

SEQ ID NO: 3212396 - RNA, 19 nt, Artificial Sequence
  Description of Artificial Sequence: Synthetic oligonucleotide
ugcaggaagugcuccggga

SEQ ID NO: 3212397 - RNA, 19 nt, Artificial Sequence
  Description of Artificial Sequence: Synthetic oligonucleotide
agcucaagagggcaggguu

SEQ ID NO: 3212398 - RNA, 19 nt, Artificial Sequence
  Description of Artificial Sequence: Synthetic oligonucleotide
ucagccgccugccaagcuc

SEQ ID NO: 3212399 - RNA, 19 nt, Artificial Sequence
  Description of Artificial Sequence: Synthetic oligonucleotide
aagcccgcgaaggccaggg

SEQ ID NO: 3212400 - RNA, 19 nt, Artificial Sequence
  Description of Artificial Sequence: Synthetic oligonucleotide
caagagggcaggguugggg

SEQ ID NO: 3212401 - RNA, 19 nt, Artificial Sequence
  Description of Artificial Sequence: Synthetic oligonucleotide
uccgggaacuccacguccu

SEQ ID NO: 3212402 - RNA, 19 nt, Artificial Sequence
  Description of Artificial Sequence: Synthetic oligonucleotide
ucaugaccccguugcgggg

SEQ ID NO: 3212403 - RNA, 19 nt, Artificial Sequence
  Description of Artificial Sequence: Synthetic oligonucleotide
agcggcgguaguuguuugg

SEQ ID NO: 3212404 - RNA, 19 nt, Artificial Sequence
  Description of Artificial Sequence: Synthetic oligonucleotide
acuugagcuccaggaagcg

SEQ ID NO: 3212405 - RNA, 19 nt, Artificial Sequence
  Description of Artificial Sequence: Synthetic oligonucleotide
ggcgguaguuguuuggggc

SEQ ID NO: 3212406 - RNA, 19 nt, Artificial Sequence
  Description of Artificial Sequence: Synthetic oligonucleotide
gcaggguugggguacuccg

SEQ ID NO: 3212407 - RNA, 19 nt, Artificial Sequence
  Description of Artificial Sequence: Synthetic oligonucleotide
uggggccugugccaugaag

SEQ ID NO: 3212408 - RNA, 19 nt, Artificial Sequence
  Description of Artificial Sequence: Synthetic oligonucleotide
ucucgaugacgccgggccc

SEQ ID NO: 3212409 - RNA, 19 nt, Artificial Sequence
  Description of Artificial Sequence: Synthetic oligonucleotide
uccuuggucaugaccccgu

SEQ ID NO: 3212410 - RNA, 19 nt, Artificial Sequence
  Description of Artificial Sequence: Synthetic oligonucleotide
cccguugcgggguagaaag

SEQ ID NO: 3212411 - RNA, 19 nt, Artificial Sequence
  Description of Artificial Sequence: Synthetic oligonucleotide
uuuggggccugugccauga

SEQ ID NO: 3212412 - RNA, 19 nt, Artificial Sequence
  Description of Artificial Sequence: Synthetic oligonucleotide
cuugagcuccaggaagcgg

SEQ ID NO: 3212413 - RNA, 19 nt, Artificial Sequence
  Description of Artificial Sequence: Synthetic oligonucleotide
caggguugggguacuccgg

SEQ ID NO: 3212414 - RNA, 19 nt, Artificial Sequence
  Description of Artificial Sequence: Synthetic oligonucleotide
ugcgggguagaaaggccac

SEQ ID NO: 3212415 - RNA, 19 nt, Artificial Sequence
  Description of Artificial Sequence: Synthetic oligonucleotide
uccagccacguguccuugg

SEQ ID NO: 3212416 - RNA, 19 nt, Artificial Sequence
  Description of Artificial Sequence: Synthetic oligonucleotide
cucgaugacgccgggcccg

SEQ ID NO: 3212417 - RNA, 19 nt, Artificial Sequence
  Description of Artificial Sequence: Synthetic oligonucleotide
ugccaagcucaagagggca

SEQ ID NO: 3212418 - RNA, 19 nt, Artificial Sequence
  Description of Artificial Sequence: Synthetic oligonucleotide
cuccgggaacuccacgucc

SEQ ID NO: 3212419 - RNA, 19 nt, Artificial Sequence
  Description of Artificial Sequence: Synthetic oligonucleotide
gccugugccaugaagcccg

SEQ ID NO: 3212420 - RNA, 19 nt, Artificial Sequence
  Description of Artificial Sequence: Synthetic oligonucleotide
aagugcuccgggaacucca

SEQ ID NO: 3212421 - RNA, 19 nt, Artificial Sequence
  Description of Artificial Sequence: Synthetic oligonucleotide
augacgccgggcccgaacu

SEQ ID NO: 3212422 - RNA, 19 nt, Artificial Sequence
  Description of Artificial Sequence: Synthetic oligonucleotide
cugccggugguccagccac

SEQ ID NO: 3212423 - RNA, 19 nt, Artificial Sequence
  Description of Artificial Sequence: Synthetic oligonucleotide
cugccaagcucaagagggc

SEQ ID NO: 3212424 - RNA, 19 nt, Artificial Sequence
  Description of Artificial Sequence: Synthetic oligonucleotide
acgugcaggugguugcucu

SEQ ID NO: 3212425 - RNA, 19 nt, Artificial Sequence
  Description of Artificial Sequence: Synthetic oligonucleotide
cuuggucaugaccccguug

SEQ ID NO: 3212426 - RNA, 19 nt, Artificial Sequence
  Description of Artificial Sequence: Synthetic oligonucleotide
caggaagugcuccgggaac

SEQ ID NO: 3212427 - RNA, 19 nt, Artificial Sequence
  Description of Artificial Sequence: Synthetic oligonucleotide
guugcgggguagaaaggcc

SEQ ID NO: 3212428 - RNA, 19 nt, Artificial Sequence
  Description of Artificial Sequence: Synthetic oligonucleotide
gaugacgccgggcccgaac

SEQ ID NO: 3212429 - RNA, 19 nt, Artificial Sequence
  Description of Artificial Sequence: Synthetic oligonucleotide
ugaagcccgcgaaggccag

SEQ ID NO: 3212430 - RNA, 19 nt, Artificial Sequence
  Description of Artificial Sequence: Synthetic oligonucleotide
gggaacuccacguccugcc

SEQ ID NO: 3212431 - RNA, 19 nt, Artificial Sequence
  Description of Artificial Sequence: Synthetic oligonucleotide
gaagugcuccgggaacucc

SEQ ID NO: 3212432 - RNA, 19 nt, Artificial Sequence
  Description of Artificial Sequence: Synthetic oligonucleotide
uccacguccugccgguggu

SEQ ID NO: 3212433 - RNA, 19 nt, Artificial Sequence
  Description of Artificial Sequence: Synthetic oligonucleotide
guugggguacuccggguuc

SEQ ID NO: 3212434 - RNA, 19 nt, Artificial Sequence
  Description of Artificial Sequence: Synthetic oligonucleotide
aagcggcgguaguuguuug

SEQ ID NO: 3212435 - RNA, 19 nt, Artificial Sequence
  Description of Artificial Sequence: Synthetic oligonucleotide
caagcucaagagggcaggg

SEQ ID NO: 3212436 - RNA, 19 nt, Artificial Sequence
  Description of Artificial Sequence: Synthetic oligonucleotide
gccaugaagcccgcgaagg

SEQ ID NO: 3212437 - RNA, 19 nt, Artificial Sequence
  Description of Artificial Sequence: Synthetic oligonucleotide
ggucaugaccccguugcgg

SEQ ID NO: 3212438 - RNA, 19 nt, Artificial Sequence
  Description of Artificial Sequence: Synthetic oligonucleotide
gaaaggccacagguccacg

SEQ ID NO: 3212439 - RNA, 19 nt, Artificial Sequence
  Description of Artificial Sequence: Synthetic oligonucleotide
gguagaaaggccacagguc

SEQ ID NO: 3212440 - RNA, 19 nt, Artificial Sequence
  Description of Artificial Sequence: Synthetic oligonucleotide
aagcucaagagggcagggu

SEQ ID NO: 3212441 - RNA, 19 nt, Artificial Sequence
  Description of Artificial Sequence: Synthetic oligonucleotide
cugcaggaagugcuccggg

SEQ ID NO: 3212442 - RNA, 19 nt, Artificial Sequence
  Description of Artificial Sequence: Synthetic oligonucleotide
cuccacguccugccggugg

SEQ ID NO: 3212443 - RNA, 19 nt, Artificial Sequence
  Description of Artificial Sequence: Synthetic oligonucleotide
aggaagugcuccgggaacu

SEQ ID NO: 3212444 - RNA, 19 nt, Artificial Sequence
  Description of Artificial Sequence: Synthetic oligonucleotide
ggaacuccacguccugccg

SEQ ID NO: 3212445 - RNA, 19 nt, Artificial Sequence
  Description of Artificial Sequence: Synthetic oligonucleotide
agcuccaggaagcggcggu

SEQ ID NO: 3212446 - RNA, 19 nt, Artificial Sequence
  Description of Artificial Sequence: Synthetic oligonucleotide
aggaagcggcgguaguugu

SEQ ID NO: 3212447 - RNA, 19 nt, Artificial Sequence
  Description of Artificial Sequence: Synthetic oligonucleotide
augaagcccgcgaaggcca

SEQ ID NO: 3212448 - RNA, 19 nt, Artificial Sequence
  Description of Artificial Sequence: Synthetic oligonucleotide
ugguccagccacguguccu

SEQ ID NO: 3212449 - RNA, 19 nt, Artificial Sequence
  Description of Artificial Sequence: Synthetic oligonucleotide
gcgguaguuguuuggggcc

SEQ ID NO: 3212450 - RNA, 19 nt, Artificial Sequence
  Description of Artificial Sequence: Synthetic oligonucleotide
uccaggaagcggcgguagu

SEQ ID NO: 3212451 - RNA, 19 nt, Artificial Sequence
  Description of Artificial Sequence: Synthetic oligonucleotide
ggguagaaaggccacaggu

SEQ ID NO: 3212452 - RNA, 19 nt, Artificial Sequence
  Description of Artificial Sequence: Synthetic oligonucleotide
uuucagccgccugccaagc

SEQ ID NO: 3212453 - RNA, 19 nt, Artificial Sequence
  Description of Artificial Sequence: Synthetic oligonucleotide
ucaagagggcaggguuggg

SEQ ID NO: 3212454 - RNA, 19 nt, Artificial Sequence
  Description of Artificial Sequence: Synthetic oligonucleotide
acuccggguucucgaugac

SEQ ID NO: 3212455 - RNA, 19 nt, Artificial Sequence
  Description of Artificial Sequence: Synthetic oligonucleotide
uguuuggggccugugccau

SEQ ID NO: 3212456 - RNA, 19 nt, Artificial Sequence
  Description of Artificial Sequence: Synthetic oligonucleotide
ggggccugugccaugaagc

SEQ ID NO: 3212457 - RNA, 19 nt, Artificial Sequence
  Description of Artificial Sequence: Synthetic oligonucleotide
agugcuccgggaacuccac

SEQ ID NO: 3212458 - RNA, 19 nt, Artificial Sequence
  Description of Artificial Sequence: Synthetic oligonucleotide
ucuauuacaacauacacuc

SEQ ID NO: 3212459 - RNA, 19 nt, Artificial Sequence
  Description of Artificial Sequence: Synthetic oligonucleotide
uuggaaauugccaaagucg

SEQ ID NO: 3212460 - RNA, 19 nt, Artificial Sequence
  Description of Artificial Sequence: Synthetic oligonucleotide
gaugauuucuuccauuucg

SEQ ID NO: 3212461 - RNA, 19 nt, Artificial Sequence
  Description of Artificial Sequence: Synthetic oligonucleotide
acuuaaauugcuuuuguuc

SEQ ID NO: 3212462 - RNA, 19 nt, Artificial Sequence
  Description of Artificial Sequence: Synthetic oligonucleotide
agaucuuuccuuuauaguc

SEQ ID NO: 3212463 - RNA, 19 nt, Artificial Sequence
  Description of Artificial Sequence: Synthetic oligonucleotide
acuuuuaacuccuucuugc

SEQ ID NO: 3212464 - RNA, 19 nt, Artificial Sequence
  Description of Artificial Sequence: Synthetic oligonucleotide
aaacuuuaauuucuauuac

SEQ ID NO: 3212465 - RNA, 19 nt, Artificial Sequence
  Description of Artificial Sequence: Synthetic oligonucleotide
aacuccuucuugcucaucc

SEQ ID NO: 3212466 - RNA, 19 nt, Artificial Sequence
  Description of Artificial Sequence: Synthetic oligonucleotide
aauuucuauuacaacauac

SEQ ID NO: 3212467 - RNA, 19 nt, Artificial Sequence
  Description of Artificial Sequence: Synthetic oligonucleotide
agucauuugguucuauugc

SEQ ID NO: 3212468 - RNA, 19 nt, Artificial Sequence
  Description of Artificial Sequence: Synthetic oligonucleotide
uuuucuuucgcacccaugc

SEQ ID NO: 3212469 - RNA, 19 nt, Artificial Sequence
  Description of Artificial Sequence: Synthetic oligonucleotide
uauuacaacauacacucca

SEQ ID NO: 3212470 - RNA, 19 nt, Artificial Sequence
  Description of Artificial Sequence: Synthetic oligonucleotide
aaauacaggaacgucuccc

SEQ ID NO: 3212471 - RNA, 19 nt, Artificial Sequence
  Description of Artificial Sequence: Synthetic oligonucleotide
uuuauagucauuugguucu

SEQ ID NO: 3212472 - RNA, 19 nt, Artificial Sequence
  Description of Artificial Sequence: Synthetic oligonucleotide
uucauaauucgucaucagg

SEQ ID NO: 3212473 - RNA, 19 nt, Artificial Sequence
  Description of Artificial Sequence: Synthetic oligonucleotide
gaaacuuuaauuucuauua

SEQ ID NO: 3212474 - RNA, 19 nt, Artificial Sequence
  Description of Artificial Sequence: Synthetic oligonucleotide
auccagagaacuuaaauug

SEQ ID NO: 3212475 - RNA, 19 nt, Artificial Sequence
  Description of Artificial Sequence: Synthetic oligonucleotide
aauccucucggucagcagg

SEQ ID NO: 3212476 - RNA, 19 nt, Artificial Sequence
  Description of Artificial Sequence: Synthetic oligonucleotide
aaagucgagcuuaaagucc

SEQ ID NO: 3212477 - RNA, 19 nt, Artificial Sequence
  Description of Artificial Sequence: Synthetic oligonucleotide
uuucuauuacaacauacac

SEQ ID NO: 3212478 - RNA, 19 nt, Artificial Sequence
  Description of Artificial Sequence: Synthetic oligonucleotide
aaaauacaggaacgucucc

SEQ ID NO: 3212479 - RNA, 19 nt, Artificial Sequence
  Description of Artificial Sequence: Synthetic oligonucleotide
aaaccguuuucuuucgcac

SEQ ID NO: 3212480 - RNA, 19 nt, Artificial Sequence
  Description of Artificial Sequence: Synthetic oligonucleotide
ugaguugaaacuuuaauuu

SEQ ID NO: 3212481 - RNA, 19 nt, Artificial Sequence
  Description of Artificial Sequence: Synthetic oligonucleotide
uuuaacuccuucuugcuca

SEQ ID NO: 3212482 - RNA, 19 nt, Artificial Sequence
  Description of Artificial Sequence: Synthetic oligonucleotide
aacuuuaauuucuauuaca

SEQ ID NO: 3212483 - RNA, 19 nt, Artificial Sequence
  Description of Artificial Sequence: Synthetic oligonucleotide
uuuuaacuucucuugauac

SEQ ID NO: 3212484 - RNA, 19 nt, Artificial Sequence
  Description of Artificial Sequence: Synthetic oligonucleotide
uucuauuacaacauacacu

SEQ ID NO: 3212485 - RNA, 19 nt, Artificial Sequence
  Description of Artificial Sequence: Synthetic oligonucleotide
auacacuccacuuuuaacu

SEQ ID NO: 3212486 - RNA, 19 nt, Artificial Sequence
  Description of Artificial Sequence: Synthetic oligonucleotide
aaaaugguagcuauaccuc

SEQ ID NO: 3212487 - RNA, 19 nt, Artificial Sequence
  Description of Artificial Sequence: Synthetic oligonucleotide
aaccuucuuauacuguggg

SEQ ID NO: 3212488 - RNA, 19 nt, Artificial Sequence
  Description of Artificial Sequence: Synthetic oligonucleotide
ucgucaucagguaacuucg

SEQ ID NO: 3212489 - RNA, 19 nt, Artificial Sequence
  Description of Artificial Sequence: Synthetic oligonucleotide
uaggcgaaaauacaggaac

SEQ ID NO: 3212490 - RNA, 19 nt, Artificial Sequence
  Description of Artificial Sequence: Synthetic oligonucleotide
aaccguuuucuuucgcacc

SEQ ID NO: 3212491 - RNA, 19 nt, Artificial Sequence
  Description of Artificial Sequence: Synthetic oligonucleotide
uggaaauugccaaagucga

SEQ ID NO: 3212492 - RNA, 19 nt, Artificial Sequence
  Description of Artificial Sequence: Synthetic oligonucleotide
agcuuaaaguccugcaggc

SEQ ID NO: 3212493 - RNA, 19 nt, Artificial Sequence
  Description of Artificial Sequence: Synthetic oligonucleotide
cuuuauagucauuugguuc

SEQ ID NO: 3212494 - RNA, 19 nt, Artificial Sequence
  Description of Artificial Sequence: Synthetic oligonucleotide
auaaccuucuuauacugug

SEQ ID NO: 3212495 - RNA, 19 nt, Artificial Sequence
  Description of Artificial Sequence: Synthetic oligonucleotide
uuuuguucauuuuccauac

SEQ ID NO: 3212496 - RNA, 19 nt, Artificial Sequence
  Description of Artificial Sequence: Synthetic oligonucleotide
uuugccuuggaaauugcca

SEQ ID NO: 3212497 - RNA, 19 nt, Artificial Sequence
  Description of Artificial Sequence: Synthetic oligonucleotide
gagcuuaaaguccugcagg

SEQ ID NO: 3212498 - RNA, 19 nt, Artificial Sequence
  Description of Artificial Sequence: Synthetic oligonucleotide
ucuuauacuguggggaugg

SEQ ID NO: 3212499 - RNA, 19 nt, Artificial Sequence
  Description of Artificial Sequence: Synthetic oligonucleotide
acuuucauaauucgucauc

SEQ ID NO: 3212500 - RNA, 19 nt, Artificial Sequence
  Description of Artificial Sequence: Synthetic oligonucleotide
uccuuuauagucauuuggu

SEQ ID NO: 3212501 - RNA, 19 nt, Artificial Sequence
  Description of Artificial Sequence: Synthetic oligonucleotide
gaaauugccaaagucgagc

SEQ ID NO: 3212502 - RNA, 19 nt, Artificial Sequence
  Description of Artificial Sequence: Synthetic oligonucleotide
uccauuucgucugagaucu

SEQ ID NO: 3212503 - RNA, 19 nt, Artificial Sequence
  Description of Artificial Sequence: Synthetic oligonucleotide
aaauugccaaagucgagcu

SEQ ID NO: 3212504 - RNA, 19 nt, Artificial Sequence
  Description of Artificial Sequence: Synthetic oligonucleotide
uucauuuuccauacuacuc

SEQ ID NO: 3212505 - RNA, 19 nt, Artificial Sequence
  Description of Artificial Sequence: Synthetic oligonucleotide
uguucauuuuccauacuac

SEQ ID NO: 3212506 - RNA, 19 nt, Artificial Sequence
  Description of Artificial Sequence: Synthetic oligonucleotide
aacuucggcagguuauuuc

SEQ ID NO: 3212507 - RNA, 19 nt, Artificial Sequence
  Description of Artificial Sequence: Synthetic oligonucleotide
aucgccaggacuuugaaaa

SEQ ID NO: 3212508 - RNA, 19 nt, Artificial Sequence
  Description of Artificial Sequence: Synthetic oligonucleotide
uuuuccauacuacucccca

SEQ ID NO: 3212509 - RNA, 19 nt, Artificial Sequence
  Description of Artificial Sequence: Synthetic oligonucleotide
uugcuuuuaacuucucuug

SEQ ID NO: 3212510 - RNA, 19 nt, Artificial Sequence
  Description of Artificial Sequence: Synthetic oligonucleotide
uagucauuugguucuauug

SEQ ID NO: 3212511 - RNA, 19 nt, Artificial Sequence
  Description of Artificial Sequence: Synthetic oligonucleotide
uaaccuucuuauacugugg

SEQ ID NO: 3212512 - RNA, 19 nt, Artificial Sequence
  Description of Artificial Sequence: Synthetic oligonucleotide
uucuuucgcacccaugcag

SEQ ID NO: 3212513 - RNA, 19 nt, Artificial Sequence
  Description of Artificial Sequence: Synthetic oligonucleotide
uaauucgucaucagguaac

SEQ ID NO: 3212514 - RNA, 19 nt, Artificial Sequence
  Description of Artificial Sequence: Synthetic oligonucleotide
agcacuuucauaauucguc

SEQ ID NO: 3212515 - RNA, 19 nt, Artificial Sequence
  Description of Artificial Sequence: Synthetic oligonucleotide
uccagagaacuuaaauugc

SEQ ID NO: 3212516 - RNA, 19 nt, Artificial Sequence
  Description of Artificial Sequence: Synthetic oligonucleotide
acuuguuuugccuuggaaa

SEQ ID NO: 3212517 - RNA, 19 nt, Artificial Sequence
  Description of Artificial Sequence: Synthetic oligonucleotide
uuuaacuucucuugauacu

SEQ ID NO: 3212518 - RNA, 19 nt, Artificial Sequence
  Description of Artificial Sequence: Synthetic oligonucleotide
auugcuuuuaacuucucuu

SEQ ID NO: 3212519 - RNA, 19 nt, Artificial Sequence
  Description of Artificial Sequence: Synthetic oligonucleotide
agauaaccuucuuauacug

SEQ ID NO: 3212520 - RNA, 19 nt, Artificial Sequence
  Description of Artificial Sequence: Synthetic oligonucleotide
uucgucaucagguaacuuc

SEQ ID NO: 3212521 - RNA, 19 nt, Artificial Sequence
  Description of Artificial Sequence: Synthetic oligonucleotide
uccacuuuuaacuccuucu

SEQ ID NO: 3212522 - RNA, 19 nt, Artificial Sequence
  Description of Artificial Sequence: Synthetic oligonucleotide
caucagguaacuucggcag

SEQ ID NO: 3212523 - RNA, 19 nt, Artificial Sequence
  Description of Artificial Sequence: Synthetic oligonucleotide
uuaacuucucuugauacuc

SEQ ID NO: 3212524 - RNA, 19 nt, Artificial Sequence
  Description of Artificial Sequence: Synthetic oligonucleotide
ucauccagagaacuuaaau

SEQ ID NO: 3212525 - RNA, 19 nt, Artificial Sequence
  Description of Artificial Sequence: Synthetic oligonucleotide
caaagucgagcuuaaaguc

SEQ ID NO: 3212526 - RNA, 19 nt, Artificial Sequence
  Description of Artificial Sequence: Synthetic oligonucleotide
uuguucauuuuccauacua

SEQ ID NO: 3212527 - RNA, 19 nt, Artificial Sequence
  Description of Artificial Sequence: Synthetic oligonucleotide
cucuugauacuccaguggc

SEQ ID NO: 3212528 - RNA, 19 nt, Artificial Sequence
  Description of Artificial Sequence: Synthetic oligonucleotide
uucgcacccaugcagauaa

SEQ ID NO: 3212529 - RNA, 19 nt, Artificial Sequence
  Description of Artificial Sequence: Synthetic oligonucleotide
uucuauugcuuuuaacuuc

SEQ ID NO: 3212530 - RNA, 19 nt, Artificial Sequence
  Description of Artificial Sequence: Synthetic oligonucleotide
cuuggaaauugccaaaguc

SEQ ID NO: 3212531 - RNA, 19 nt, Artificial Sequence
  Description of Artificial Sequence: Synthetic oligonucleotide
uguuuugccuuggaaauug

SEQ ID NO: 3212532 - RNA, 19 nt, Artificial Sequence
  Description of Artificial Sequence: Synthetic oligonucleotide
uauugcuuuuaacuucucu

SEQ ID NO: 3212533 - RNA, 19 nt, Artificial Sequence
  Description of Artificial Sequence: Synthetic oligonucleotide
ugcuuuuaacuucucuuga

SEQ ID NO: 3212534 - RNA, 19 nt, Artificial Sequence
  Description of Artificial Sequence: Synthetic oligonucleotide
agaacuuaaauugcuuuug

SEQ ID NO: 3212535 - RNA, 19 nt, Artificial Sequence
  Description of Artificial Sequence: Synthetic oligonucleotide
augcagauaaccuucuuau

SEQ ID NO: 3212536 - RNA, 19 nt, Artificial Sequence
  Description of Artificial Sequence: Synthetic oligonucleotide
gaaaauacaggaacgucuc

SEQ ID NO: 3212537 - RNA, 19 nt, Artificial Sequence
  Description of Artificial Sequence: Synthetic oligonucleotide
uacuccccacacuucaucg

SEQ ID NO: 3212538 - RNA, 19 nt, Artificial Sequence
  Description of Artificial Sequence: Synthetic oligonucleotide
uuuugccuuggaaauugcc

SEQ ID NO: 3212539 - RNA, 19 nt, Artificial Sequence
  Description of Artificial Sequence: Synthetic oligonucleotide
agcuauaccuccaugccac

SEQ ID NO: 3212540 - RNA, 19 nt, Artificial Sequence
  Description of Artificial Sequence: Synthetic oligonucleotide
gaguugaaacuuuaauuuc

SEQ ID NO: 3212541 - RNA, 19 nt, Artificial Sequence
  Description of Artificial Sequence: Synthetic oligonucleotide
uuucauaauucgucaucag

SEQ ID NO: 3212542 - RNA, 19 nt, Artificial Sequence
  Description of Artificial Sequence: Synthetic oligonucleotide
auuucuauuacaacauaca

SEQ ID NO: 3212543 - RNA, 19 nt, Artificial Sequence
  Description of Artificial Sequence: Synthetic oligonucleotide
gguagcuauaccuccaugc

SEQ ID NO: 3212544 - RNA, 19 nt, Artificial Sequence
  Description of Artificial Sequence: Synthetic oligonucleotide
guagcuauaccuccaugcc

SEQ ID NO: 3212545 - RNA, 19 nt, Artificial Sequence
  Description of Artificial Sequence: Synthetic oligonucleotide
uuuuaacuccuucuugcuc

SEQ ID NO: 3212546 - RNA, 19 nt, Artificial Sequence
  Description of Artificial Sequence: Synthetic oligonucleotide
uuccauacuacuccccaca

SEQ ID NO: 3212547 - RNA, 19 nt, Artificial Sequence
  Description of Artificial Sequence: Synthetic oligonucleotide
agcagaacacggccgaggg

SEQ ID NO: 3212548 - RNA, 19 nt, Artificial Sequence
  Description of Artificial Sequence: Synthetic oligonucleotide
uuuccuuuauagucauuug

SEQ ID NO: 3212549 - RNA, 19 nt, Artificial Sequence
  Description of Artificial Sequence: Synthetic oligonucleotide
acuuuaauuucuauuacaa

SEQ ID NO: 3212550 - RNA, 19 nt, Artificial Sequence
  Description of Artificial Sequence: Synthetic oligonucleotide
ucgcaggugaauccucucg

SEQ ID NO: 3212551 - RNA, 19 nt, Artificial Sequence
  Description of Artificial Sequence: Synthetic oligonucleotide
gcagauaaccuucuuauac

SEQ ID NO: 3212552 - RNA, 19 nt, Artificial Sequence
  Description of Artificial Sequence: Synthetic oligonucleotide
uacuacuccccacacuuca

SEQ ID NO: 3212553 - RNA, 19 nt, Artificial Sequence
  Description of Artificial Sequence: Synthetic oligonucleotide
ucggucagcagguugcugc

SEQ ID NO: 3212554 - RNA, 19 nt, Artificial Sequence
  Description of Artificial Sequence: Synthetic oligonucleotide
aguugaaacuuuaauuucu

SEQ ID NO: 3212555 - RNA, 19 nt, Artificial Sequence
  Description of Artificial Sequence: Synthetic oligonucleotide
aacuucucuugauacucca

SEQ ID NO: 3212556 - RNA, 19 nt, Artificial Sequence
  Description of Artificial Sequence: Synthetic oligonucleotide
acuucggcagguuauuucu

SEQ ID NO: 3212557 - RNA, 19 nt, Artificial Sequence
  Description of Artificial Sequence: Synthetic oligonucleotide
ucuuucgcacccaugcaga

SEQ ID NO: 3212558 - RNA, 19 nt, Artificial Sequence
  Description of Artificial Sequence: Synthetic oligonucleotide
aacaguugugagcagaggc

SEQ ID NO: 3212559 - RNA, 19 nt, Artificial Sequence
  Description of Artificial Sequence: Synthetic oligonucleotide
aaguguguuuccuucuccc

SEQ ID NO: 3212560 - RNA, 19 nt, Artificial Sequence
  Description of Artificial Sequence: Synthetic oligonucleotide
uuugucacauccuacaagu

SEQ ID NO: 3212561 - RNA, 19 nt, Artificial Sequence
  Description of Artificial Sequence: Synthetic oligonucleotide
ugucucuggagucaccugg

SEQ ID NO: 3212562 - RNA, 19 nt, Artificial Sequence
  Description of Artificial Sequence: Synthetic oligonucleotide
aaugaguucuugcuuggcu

SEQ ID NO: 3212563 - RNA, 19 nt, Artificial Sequence
  Description of Artificial Sequence: Synthetic oligonucleotide
ugagcagaggcaccaaucc

SEQ ID NO: 3212564 - RNA, 19 nt, Artificial Sequence
  Description of Artificial Sequence: Synthetic oligonucleotide
ugucacauccuacaagugu

SEQ ID NO: 3212565 - RNA, 19 nt, Artificial Sequence
  Description of Artificial Sequence: Synthetic oligonucleotide
agaggcaccaauccugagg

SEQ ID NO: 3212566 - RNA, 19 nt, Artificial Sequence
  Description of Artificial Sequence: Synthetic oligonucleotide
ugaguucuugcuuggcugg

SEQ ID NO: 3212567 - RNA, 19 nt, Artificial Sequence
  Description of Artificial Sequence: Synthetic oligonucleotide
uguguuuccuucucccagg

SEQ ID NO: 3212568 - RNA, 19 nt, Artificial Sequence
  Description of Artificial Sequence: Synthetic oligonucleotide
aauccugagguggacgccg

SEQ ID NO: 3212569 - RNA, 19 nt, Artificial Sequence
  Description of Artificial Sequence: Synthetic oligonucleotide
agagguuaucccugggagg

SEQ ID NO: 3212570 - RNA, 19 nt, Artificial Sequence
  Description of Artificial Sequence: Synthetic oligonucleotide
augaguucuugcuuggcug

SEQ ID NO: 3212571 - RNA, 19 nt, Artificial Sequence
  Description of Artificial Sequence: Synthetic oligonucleotide
acaaguguguuuccuucuc

SEQ ID NO: 3212572 - RNA, 19 nt, Artificial Sequence
  Description of Artificial Sequence: Synthetic oligonucleotide
cuuugucacauccuacaag

SEQ ID NO: 3212573 - RNA, 19 nt, Artificial Sequence
  Description of Artificial Sequence: Synthetic oligonucleotide
cauccuacaaguguguuuc

SEQ ID NO: 3212574 - RNA, 19 nt, Artificial Sequence
  Description of Artificial Sequence: Synthetic oligonucleotide
gaggagguagccuuggcca

SEQ ID NO: 3212575 - RNA, 19 nt, Artificial Sequence
  Description of Artificial Sequence: Synthetic oligonucleotide
cagagguuaucccugggag

SEQ ID NO: 3212576 - RNA, 19 nt, Artificial Sequence
  Description of Artificial Sequence: Synthetic oligonucleotide
ucuugcuuggcuggugugg

SEQ ID NO: 3212577 - RNA, 19 nt, Artificial Sequence
  Description of Artificial Sequence: Synthetic oligonucleotide
ugggcgaacaguugugagc

SEQ ID NO: 3212578 - RNA, 19 nt, Artificial Sequence
  Description of Artificial Sequence: Synthetic oligonucleotide
gucacauccuacaagugug

SEQ ID NO: 3212579 - RNA, 19 nt, Artificial Sequence
  Description of Artificial Sequence: Synthetic oligonucleotide
cuacaaguguguuuccuuc

SEQ ID NO: 3212580 - RNA, 19 nt, Artificial Sequence
  Description of Artificial Sequence: Synthetic oligonucleotide
guuuccuucucccaggcaa

SEQ ID NO: 3212581 - RNA, 19 nt, Artificial Sequence
  Description of Artificial Sequence: Synthetic oligonucleotide
ggcaaugaguucuugcuug

SEQ ID NO: 3212582 - RNA, 19 nt, Artificial Sequence
  Description of Artificial Sequence: Synthetic oligonucleotide
uaucccugggaggagguag

SEQ ID NO: 3212583 - RNA, 19 nt, Artificial Sequence
  Description of Artificial Sequence: Synthetic oligonucleotide
guguguuuccuucucccag

SEQ ID NO: 3212584 - RNA, 19 nt, Artificial Sequence
  Description of Artificial Sequence: Synthetic oligonucleotide
agucaccuggccuuuguca

SEQ ID NO: 3212585 - RNA, 19 nt, Artificial Sequence
  Description of Artificial Sequence: Synthetic oligonucleotide
uacaaguguguuuccuucu

SEQ ID NO: 3212586 - RNA, 19 nt, Artificial Sequence
  Description of Artificial Sequence: Synthetic oligonucleotide
ucuggagucaccuggccuu

SEQ ID NO: 3212587 - RNA, 19 nt, Artificial Sequence
  Description of Artificial Sequence: Synthetic oligonucleotide
ugggauccgguguaaugag

SEQ ID NO: 3212588 - RNA, 19 nt, Artificial Sequence
  Description of Artificial Sequence: Synthetic oligonucleotide
gguguaaugagccuuugaa

SEQ ID NO: 3212589 - RNA, 19 nt, Artificial Sequence
  Description of Artificial Sequence: Synthetic oligonucleotide
gagguuaucccugggagga

SEQ ID NO: 3212590 - RNA, 19 nt, Artificial Sequence
  Description of Artificial Sequence: Synthetic oligonucleotide
acugggauccgguguaaug

SEQ ID NO: 3212591 - RNA, 19 nt, Artificial Sequence
  Description of Artificial Sequence: Synthetic oligonucleotide
uucucccaggcaaugaguu

SEQ ID NO: 3212592 - RNA, 19 nt, Artificial Sequence
  Description of Artificial Sequence: Synthetic oligonucleotide
caaguguguuuccuucucc

SEQ ID NO: 3212593 - RNA, 19 nt, Artificial Sequence
  Description of Artificial Sequence: Synthetic oligonucleotide
ugcuuggcuggugugggcg

SEQ ID NO: 3212594 - RNA, 19 nt, Artificial Sequence
  Description of Artificial Sequence: Synthetic oligonucleotide
uugucacauccuacaagug

SEQ ID NO: 3212595 - RNA, 19 nt, Artificial Sequence
  Description of Artificial Sequence: Synthetic oligonucleotide
ucacauccuacaagugugu

SEQ ID NO: 3212596 - RNA, 19 nt, Artificial Sequence
  Description of Artificial Sequence: Synthetic oligonucleotide
ggcaccaauccugaggugg

SEQ ID NO: 3212597 - RNA, 19 nt, Artificial Sequence
  Description of Artificial Sequence: Synthetic oligonucleotide
aguguguuuccuucuccca

SEQ ID NO: 3212598 - RNA, 19 nt, Artificial Sequence
  Description of Artificial Sequence: Synthetic oligonucleotide
auccuacaaguguguuucc

SEQ ID NO: 3212599 - RNA, 19 nt, Artificial Sequence
  Description of Artificial Sequence: Synthetic oligonucleotide
gguagccuuggccaggucc

SEQ ID NO: 3212600 - RNA, 19 nt, Artificial Sequence
  Description of Artificial Sequence: Synthetic oligonucleotide
cuugcuuggcugguguggg

SEQ ID NO: 3212601 - RNA, 19 nt, Artificial Sequence
  Description of Artificial Sequence: Synthetic oligonucleotide
gaacaguugugagcagagg

SEQ ID NO: 3212602 - RNA, 19 nt, Artificial Sequence
  Description of Artificial Sequence: Synthetic oligonucleotide
agcagaggcaccaauccug

SEQ ID NO: 3212603 - RNA, 19 nt, Artificial Sequence
  Description of Artificial Sequence: Synthetic oligonucleotide
gucaccuggccuuugucac

SEQ ID NO: 3212604 - RNA, 19 nt, Artificial Sequence
  Description of Artificial Sequence: Synthetic oligonucleotide
uuggccaggucccugucuc

SEQ ID NO: 3212605 - RNA, 19 nt, Artificial Sequence
  Description of Artificial Sequence: Synthetic oligonucleotide
aguugugagcagaggcacc

SEQ ID NO: 3212606 - RNA, 19 nt, Artificial Sequence
  Description of Artificial Sequence: Synthetic oligonucleotide
gaggcaccaauccugaggu

SEQ ID NO: 3212607 - RNA, 19 nt, Artificial Sequence
  Description of Artificial Sequence: Synthetic oligonucleotide
ucucuggagucaccuggcc

SEQ ID NO: 3212608 - RNA, 19 nt, Artificial Sequence
  Description of Artificial Sequence: Synthetic oligonucleotide
accaauccugagguggacg

SEQ ID NO: 3212609 - RNA, 19 nt, Artificial Sequence
  Description of Artificial Sequence: Synthetic oligonucleotide
ugugagcagaggcaccaau

SEQ ID NO: 3212610 - RNA, 19 nt, Artificial Sequence
  Description of Artificial Sequence: Synthetic oligonucleotide
acaguugugagcagaggca

SEQ ID NO: 3212611 - RNA, 19 nt, Artificial Sequence
  Description of Artificial Sequence: Synthetic oligonucleotide
uggccuuugucacauccua

SEQ ID NO: 3212612 - RNA, 19 nt, Artificial Sequence
  Description of Artificial Sequence: Synthetic oligonucleotide
aggagguagccuuggccag

SEQ ID NO: 3212613 - RNA, 19 nt, Artificial Sequence
  Description of Artificial Sequence: Synthetic oligonucleotide
uuuccuucucccaggcaau

SEQ ID NO: 3212614 - RNA, 19 nt, Artificial Sequence
  Description of Artificial Sequence: Synthetic oligonucleotide
guagccuuggccagguccc

SEQ ID NO: 3212615 - RNA, 19 nt, Artificial Sequence
  Description of Artificial Sequence: Synthetic oligonucleotide
gcaaugaguucuugcuugg

SEQ ID NO: 3212616 - RNA, 19 nt, Artificial Sequence
  Description of Artificial Sequence: Synthetic oligonucleotide
guggacgccgcccuggcug

SEQ ID NO: 3212617 - RNA, 19 nt, Artificial Sequence
  Description of Artificial Sequence: Synthetic oligonucleotide
acauccuacaaguguguuu

SEQ ID NO: 3212618 - RNA, 19 nt, Artificial Sequence
  Description of Artificial Sequence: Synthetic oligonucleotide
ggauccgguguaaugagcc

SEQ ID NO: 3212619 - RNA, 19 nt, Artificial Sequence
  Description of Artificial Sequence: Synthetic oligonucleotide
uccuacaaguguguuuccu

SEQ ID NO: 3212620 - RNA, 19 nt, Artificial Sequence
  Description of Artificial Sequence: Synthetic oligonucleotide
uguuuccuucucccaggca

SEQ ID NO: 3212621 - RNA, 19 nt, Artificial Sequence
  Description of Artificial Sequence: Synthetic oligonucleotide
ugugggcgaacaguuguga

SEQ ID NO: 3212622 - RNA, 19 nt, Artificial Sequence
  Description of Artificial Sequence: Synthetic oligonucleotide
ggaggagguagccuuggcc

SEQ ID NO: 3212623 - RNA, 19 nt, Artificial Sequence
  Description of Artificial Sequence: Synthetic oligonucleotide
caguugugagcagaggcac

SEQ ID NO: 3212624 - RNA, 19 nt, Artificial Sequence
  Description of Artificial Sequence: Synthetic oligonucleotide
uucuugcuuggcuggugug

SEQ ID NO: 3212625 - RNA, 19 nt, Artificial Sequence
  Description of Artificial Sequence: Synthetic oligonucleotide
gugggcgaacaguugugag

SEQ ID NO: 3212626 - RNA, 19 nt, Artificial Sequence
  Description of Artificial Sequence: Synthetic oligonucleotide
cuggcuggggcagacuggg

SEQ ID NO: 3212627 - RNA, 19 nt, Artificial Sequence
  Description of Artificial Sequence: Synthetic oligonucleotide
guugugagcagaggcacca

SEQ ID NO: 3212628 - RNA, 19 nt, Artificial Sequence
  Description of Artificial Sequence: Synthetic oligonucleotide
uggugugggcgaacaguug

SEQ ID NO: 3212629 - RNA, 19 nt, Artificial Sequence
  Description of Artificial Sequence: Synthetic oligonucleotide
aggucccugucucuggagu

SEQ ID NO: 3212630 - RNA, 19 nt, Artificial Sequence
  Description of Artificial Sequence: Synthetic oligonucleotide
ccaauccugagguggacgc

SEQ ID NO: 3212631 - RNA, 19 nt, Artificial Sequence
  Description of Artificial Sequence: Synthetic oligonucleotide
uccgguguaaugagccuuu

SEQ ID NO: 3212632 - RNA, 19 nt, Artificial Sequence
  Description of Artificial Sequence: Synthetic oligonucleotide
ugggaggagguagccuugg

SEQ ID NO: 3212633 - RNA, 19 nt, Artificial Sequence
  Description of Artificial Sequence: Synthetic oligonucleotide
guguuuccuucucccaggc

SEQ ID NO: 3212634 - RNA, 19 nt, Artificial Sequence
  Description of Artificial Sequence: Synthetic oligonucleotide
uggacgccgcccuggcugg

SEQ ID NO: 3212635 - RNA, 19 nt, Artificial Sequence
  Description of Artificial Sequence: Synthetic oligonucleotide
cuggggcagacugggaucc

SEQ ID NO: 3212636 - RNA, 19 nt, Artificial Sequence
  Description of Artificial Sequence: Synthetic oligonucleotide
aucccugggaggagguagc

SEQ ID NO: 3212637 - RNA, 19 nt, Artificial Sequence
  Description of Artificial Sequence: Synthetic oligonucleotide
agguggacgccgcccuggc

SEQ ID NO: 3212638 - RNA, 19 nt, Artificial Sequence
  Description of Artificial Sequence: Synthetic oligonucleotide
cugggauccgguguaauga

SEQ ID NO: 3212639 - RNA, 19 nt, Artificial Sequence
  Description of Artificial Sequence: Synthetic oligonucleotide
gguuaucccugggaggagg

SEQ ID NO: 3212640 - RNA, 19 nt, Artificial Sequence
  Description of Artificial Sequence: Synthetic oligonucleotide
ucaccuggccuuugucaca

SEQ ID NO: 3212641 - RNA, 19 nt, Artificial Sequence
  Description of Artificial Sequence: Synthetic oligonucleotide
aggcaaugaguucuugcuu

SEQ ID NO: 3212642 - RNA, 19 nt, Artificial Sequence
  Description of Artificial Sequence: Synthetic oligonucleotide
caggcaaugaguucuugcu

SEQ ID NO: 3212643 - RNA, 19 nt, Artificial Sequence
  Description of Artificial Sequence: Synthetic oligonucleotide
ucucccaggcaaugaguuc

SEQ ID NO: 3212644 - RNA, 19 nt, Artificial Sequence
  Description of Artificial Sequence: Synthetic oligonucleotide
caaugaguucuugcuuggc

SEQ ID NO: 3212645 - RNA, 19 nt, Artificial Sequence
  Description of Artificial Sequence: Synthetic oligonucleotide
ccaggcaaugaguucuugc

SEQ ID NO: 3212646 - RNA, 19 nt, Artificial Sequence
  Description of Artificial Sequence: Synthetic oligonucleotide
gagguggacgccgcccugg

SEQ ID NO: 3212647 - RNA, 19 nt, Artificial Sequence
  Description of Artificial Sequence: Synthetic oligonucleotide
gccuuugucacauccuaca

SEQ ID NO: 3212648 - RNA, 19 nt, Artificial Sequence
  Description of Artificial Sequence: Synthetic oligonucleotide
ccuggccuuugucacaucc

SEQ ID NO: 3212649 - RNA, 19 nt, Artificial Sequence
  Description of Artificial Sequence: Synthetic oligonucleotide
ugagguggacgccgcccug

SEQ ID NO: 3212650 - RNA, 19 nt, Artificial Sequence
  Description of Artificial Sequence: Synthetic oligonucleotide
gugagcagaggcaccaauc

SEQ ID NO: 3212651 - RNA, 19 nt, Artificial Sequence
  Description of Artificial Sequence: Synthetic oligonucleotide
uccuucucccaggcaauga

SEQ ID NO: 3212652 - RNA, 19 nt, Artificial Sequence
  Description of Artificial Sequence: Synthetic oligonucleotide
aguucuugcuuggcuggug

SEQ ID NO: 3212653 - RNA, 19 nt, Artificial Sequence
  Description of Artificial Sequence: Synthetic oligonucleotide
uuccuucucccaggcaaug

SEQ ID NO: 3212654 - RNA, 19 nt, Artificial Sequence
  Description of Artificial Sequence: Synthetic oligonucleotide
gggcgaacaguugugagca

SEQ ID NO: 3212655 - RNA, 19 nt, Artificial Sequence
  Description of Artificial Sequence: Synthetic oligonucleotide
cgaacaguugugagcagag

SEQ ID NO: 3212656 - RNA, 19 nt, Artificial Sequence
  Description of Artificial Sequence: Synthetic oligonucleotide
gagucaccuggccuuuguc

SEQ ID NO: 3212657 - RNA, 19 nt, Artificial Sequence
  Description of Artificial Sequence: Synthetic oligonucleotide
uugcuuggcuggugugggc

SEQ ID NO: 3212658 - RNA, 19 nt, Artificial Sequence
  Description of Artificial Sequence: Synthetic oligonucleotide
guagccaucaaucaggaag

SEQ ID NO: 3212659 - RNA, 19 nt, Artificial Sequence
  Description of Artificial Sequence: Synthetic oligonucleotide
cauacaguagcaucgaggg

SEQ ID NO: 3212660 - RNA, 19 nt, Artificial Sequence
  Description of Artificial Sequence: Synthetic oligonucleotide
uccacauacaguagcaucg

SEQ ID NO: 3212661 - RNA, 19 nt, Artificial Sequence
  Description of Artificial Sequence: Synthetic oligonucleotide
uccacuuuggccaucauug

SEQ ID NO: 3212662 - RNA, 19 nt, Artificial Sequence
  Description of Artificial Sequence: Synthetic oligonucleotide
gaagaauccacuuuggcca

SEQ ID NO: 3212663 - RNA, 19 nt, Artificial Sequence
  Description of Artificial Sequence: Synthetic oligonucleotide
agcaccugcauccacauac

SEQ ID NO: 3212664 - RNA, 19 nt, Artificial Sequence
  Description of Artificial Sequence: Synthetic oligonucleotide
aaacucuucucccugcuuc

SEQ ID NO: 3212665 - RNA, 19 nt, Artificial Sequence
  Description of Artificial Sequence: Synthetic oligonucleotide
uuucugugcaaucuucucg

SEQ ID NO: 3212666 - RNA, 19 nt, Artificial Sequence
  Description of Artificial Sequence: Synthetic oligonucleotide
acugauuuuggcuuucuuc

SEQ ID NO: 3212667 - RNA, 19 nt, Artificial Sequence
  Description of Artificial Sequence: Synthetic oligonucleotide
ucaaucaggaagccgcugg

SEQ ID NO: 3212668 - RNA, 19 nt, Artificial Sequence
  Description of Artificial Sequence: Synthetic oligonucleotide
aaucuucucgcacugggug

SEQ ID NO: 3212669 - RNA, 19 nt, Artificial Sequence
  Description of Artificial Sequence: Synthetic oligonucleotide
gacgacagcaucuugcccc

SEQ ID NO: 3212670 - RNA, 19 nt, Artificial Sequence
  Description of Artificial Sequence: Synthetic oligonucleotide
acaaagacugauuuuggcu

SEQ ID NO: 3212671 - RNA, 19 nt, Artificial Sequence
  Description of Artificial Sequence: Synthetic oligonucleotide
ugucuuguucuucucgggg

SEQ ID NO: 3212672 - RNA, 19 nt, Artificial Sequence
  Description of Artificial Sequence: Synthetic oligonucleotide
uagccaucaaucaggaagc

SEQ ID NO: 3212673 - RNA, 19 nt, Artificial Sequence
  Description of Artificial Sequence: Synthetic oligonucleotide
aauuccagcacuaucucca

SEQ ID NO: 3212674 - RNA, 19 nt, Artificial Sequence
  Description of Artificial Sequence: Synthetic oligonucleotide
guuguucaaacucuucucc

SEQ ID NO: 3212675 - RNA, 19 nt, Artificial Sequence
  Description of Artificial Sequence: Synthetic oligonucleotide
uucugugcaaucuucucgc

SEQ ID NO: 3212676 - RNA, 19 nt, Artificial Sequence
  Description of Artificial Sequence: Synthetic oligonucleotide
ugcauccacauacaguagc

SEQ ID NO: 3212677 - RNA, 19 nt, Artificial Sequence
  Description of Artificial Sequence: Synthetic oligonucleotide
uuuggcuuucuucagcuuc

SEQ ID NO: 3212678 - RNA, 19 nt, Artificial Sequence
  Description of Artificial Sequence: Synthetic oligonucleotide
accacaaagacugauuuug

SEQ ID NO: 3212679 - RNA, 19 nt, Artificial Sequence
  Description of Artificial Sequence: Synthetic oligonucleotide
gguaucagcaccugcaucc

SEQ ID NO: 3212680 - RNA, 19 nt, Artificial Sequence
  Description of Artificial Sequence: Synthetic oligonucleotide
ugugcaaucuucucgcacu

SEQ ID NO: 3212681 - RNA, 19 nt, Artificial Sequence
  Description of Artificial Sequence: Synthetic oligonucleotide
auccacauacaguagcauc

SEQ ID NO: 3212682 - RNA, 19 nt, Artificial Sequence
  Description of Artificial Sequence: Synthetic oligonucleotide
ugccccuuuuccauggugg

SEQ ID NO: 3212683 - RNA, 19 nt, Artificial Sequence
  Description of Artificial Sequence: Synthetic oligonucleotide
uccagcacuaucuccagug

SEQ ID NO: 3212684 - RNA, 19 nt, Artificial Sequence
  Description of Artificial Sequence: Synthetic oligonucleotide
ggaagaauccacuuuggcc

SEQ ID NO: 3212685 - RNA, 19 nt, Artificial Sequence
  Description of Artificial Sequence: Synthetic oligonucleotide
gauuuuggcuuucuucagc

SEQ ID NO: 3212686 - RNA, 19 nt, Artificial Sequence
  Description of Artificial Sequence: Synthetic oligonucleotide
uauuucugugcaaucuucu

SEQ ID NO: 3212687 - RNA, 19 nt, Artificial Sequence
  Description of Artificial Sequence: Synthetic oligonucleotide
auuucugugcaaucuucuc

SEQ ID NO: 3212688 - RNA, 19 nt, Artificial Sequence
  Description of Artificial Sequence: Synthetic oligonucleotide
cugauuuuggcuuucuuca

SEQ ID NO: 3212689 - RNA, 19 nt, Artificial Sequence
  Description of Artificial Sequence: Synthetic oligonucleotide
auuuuggcuuucuucagcu

SEQ ID NO: 3212690 - RNA, 19 nt, Artificial Sequence
  Description of Artificial Sequence: Synthetic oligonucleotide
aucuucucgcacugggugc

SEQ ID NO: 3212691 - RNA, 19 nt, Artificial Sequence
  Description of Artificial Sequence: Synthetic oligonucleotide
uccugucuuguucuucucg

SEQ ID NO: 3212692 - RNA, 19 nt, Artificial Sequence
  Description of Artificial Sequence: Synthetic oligonucleotide
uuguucaaacucuucuccc

SEQ ID NO: 3212693 - RNA, 19 nt, Artificial Sequence
  Description of Artificial Sequence: Synthetic oligonucleotide
uuuuccaugguggacgaca

SEQ ID NO: 3212694 - RNA, 19 nt, Artificial Sequence
  Description of Artificial Sequence: Synthetic oligonucleotide
acauacaguagcaucgagg

SEQ ID NO: 3212695 - RNA, 19 nt, Artificial Sequence
  Description of Artificial Sequence: Synthetic oligonucleotide
uggaagaauccacuuuggc

SEQ ID NO: 3212696 - RNA, 19 nt, Artificial Sequence
  Description of Artificial Sequence: Synthetic oligonucleotide
aucgagggcuguccaaucc

SEQ ID NO: 3212697 - RNA, 19 nt, Artificial Sequence
  Description of Artificial Sequence: Synthetic oligonucleotide
uguucaaacucuucucccu

SEQ ID NO: 3212698 - RNA, 19 nt, Artificial Sequence
  Description of Artificial Sequence: Synthetic oligonucleotide
agcaucuugccccucuccg

SEQ ID NO: 3212699 - RNA, 19 nt, Artificial Sequence
  Description of Artificial Sequence: Synthetic oligonucleotide
uuuccaugguggacgacag

SEQ ID NO: 3212700 - RNA, 19 nt, Artificial Sequence
  Description of Artificial Sequence: Synthetic oligonucleotide
caauccguuguucaaacuc

SEQ ID NO: 3212701 - RNA, 19 nt, Artificial Sequence
  Description of Artificial Sequence: Synthetic oligonucleotide
ucggguagccaucaaucag

SEQ ID NO: 3212702 - RNA, 19 nt, Artificial Sequence
  Description of Artificial Sequence: Synthetic oligonucleotide
acuagucuccccucgcuuc

SEQ ID NO: 3212703 - RNA, 19 nt, Artificial Sequence
  Description of Artificial Sequence: Synthetic oligonucleotide
ucuucagcuucucucuggc

SEQ ID NO: 3212704 - RNA, 19 nt, Artificial Sequence
  Description of Artificial Sequence: Synthetic oligonucleotide
uguagccauauuucugugc

SEQ ID NO: 3212705 - RNA, 19 nt, Artificial Sequence
  Description of Artificial Sequence: Synthetic oligonucleotide
cacaaagacugauuuuggc

SEQ ID NO: 3212706 - RNA, 19 nt, Artificial Sequence
  Description of Artificial Sequence: Synthetic oligonucleotide
agcaauuccagcacuaucu

SEQ ID NO: 3212707 - RNA, 19 nt, Artificial Sequence
  Description of Artificial Sequence: Synthetic oligonucleotide
ccaucaaucaggaagccgc

SEQ ID NO: 3212708 - RNA, 19 nt, Artificial Sequence
  Description of Artificial Sequence: Synthetic oligonucleotide
ugauuuuggcuuucuucag

SEQ ID NO: 3212709 - RNA, 19 nt, Artificial Sequence
  Description of Artificial Sequence: Synthetic oligonucleotide
guagccauauuucugugca

SEQ ID NO: 3212710 - RNA, 19 nt, Artificial Sequence
  Description of Artificial Sequence: Synthetic oligonucleotide
uuuccugucuuguucuucu

SEQ ID NO: 3212711 - RNA, 19 nt, Artificial Sequence
  Description of Artificial Sequence: Synthetic oligonucleotide
auacaguagcaucgagggc

SEQ ID NO: 3212712 - RNA, 19 nt, Artificial Sequence
  Description of Artificial Sequence: Synthetic oligonucleotide
uccaugguggacgacagca

SEQ ID NO: 3212713 - RNA, 19 nt, Artificial Sequence
  Description of Artificial Sequence: Synthetic oligonucleotide
aauccguuguucaaacucu

SEQ ID NO: 3212714 - RNA, 19 nt, Artificial Sequence
  Description of Artificial Sequence: Synthetic oligonucleotide
aucaggaagccgcuggaag

SEQ ID NO: 3212715 - RNA, 19 nt, Artificial Sequence
  Description of Artificial Sequence: Synthetic oligonucleotide
ucgagggcuguccaauccg

SEQ ID NO: 3212716 - RNA, 19 nt, Artificial Sequence
  Description of Artificial Sequence: Synthetic oligonucleotide
aucauugccucccggagca

SEQ ID NO: 3212717 - RNA, 19 nt, Artificial Sequence
  Description of Artificial Sequence: Synthetic oligonucleotide
ucaggaagccgcuggaaga

SEQ ID NO: 3212718 - RNA, 19 nt, Artificial Sequence
  Description of Artificial Sequence: Synthetic oligonucleotide
auauuucugugcaaucuuc

SEQ ID NO: 3212719 - RNA, 19 nt, Artificial Sequence
  Description of Artificial Sequence: Synthetic oligonucleotide
uucagcuucucucuggcuu

SEQ ID NO: 3212720 - RNA, 19 nt, Artificial Sequence
  Description of Artificial Sequence: Synthetic oligonucleotide
uugggucaugguaucagca

SEQ ID NO: 3212721 - RNA, 19 nt, Artificial Sequence
  Description of Artificial Sequence: Synthetic oligonucleotide
ucuugccccucuccgaucc

SEQ ID NO: 3212722 - RNA, 19 nt, Artificial Sequence
  Description of Artificial Sequence: Synthetic oligonucleotide
caugguaucagcaccugca

SEQ ID NO: 3212723 - RNA, 19 nt, Artificial Sequence
  Description of Artificial Sequence: Synthetic oligonucleotide
aaagacugauuuuggcuuu

SEQ ID NO: 3212724 - RNA, 19 nt, Artificial Sequence
  Description of Artificial Sequence: Synthetic oligonucleotide
uggacgacagcaucuugcc

SEQ ID NO: 3212725 - RNA, 19 nt, Artificial Sequence
  Description of Artificial Sequence: Synthetic oligonucleotide
uucaaacucuucucccugc

SEQ ID NO: 3212726 - RNA, 19 nt, Artificial Sequence
  Description of Artificial Sequence: Synthetic oligonucleotide
acugggugcccuuacugag

SEQ ID NO: 3212727 - RNA, 19 nt, Artificial Sequence
  Description of Artificial Sequence: Synthetic oligonucleotide
auggguguagccauauuuc

SEQ ID NO: 3212728 - RNA, 19 nt, Artificial Sequence
  Description of Artificial Sequence: Synthetic oligonucleotide
gcuggaagaauccacuuug

SEQ ID NO: 3212729 - RNA, 19 nt, Artificial Sequence
  Description of Artificial Sequence: Synthetic oligonucleotide
caauuccagcacuaucucc

SEQ ID NO: 3212730 - RNA, 19 nt, Artificial Sequence
  Description of Artificial Sequence: Synthetic oligonucleotide
cuggaagaauccacuuugg

SEQ ID NO: 3212731 - RNA, 19 nt, Artificial Sequence
  Description of Artificial Sequence: Synthetic oligonucleotide
aacucuucucccugcuuca

SEQ ID NO: 3212732 - RNA, 19 nt, Artificial Sequence
  Description of Artificial Sequence: Synthetic oligonucleotide
uucucccugcuucacuucc

SEQ ID NO: 3212733 - RNA, 19 nt, Artificial Sequence
  Description of Artificial Sequence: Synthetic oligonucleotide
ucaugguaucagcaccugc

SEQ ID NO: 3212734 - RNA, 19 nt, Artificial Sequence
  Description of Artificial Sequence: Synthetic oligonucleotide
auccugagcugacuucggc

SEQ ID NO: 3212735 - RNA, 19 nt, Artificial Sequence
  Description of Artificial Sequence: Synthetic oligonucleotide
uuggcuuucuucagcuucu

SEQ ID NO: 3212736 - RNA, 19 nt, Artificial Sequence
  Description of Artificial Sequence: Synthetic oligonucleotide
cuucacuucccucggguag

SEQ ID NO: 3212737 - RNA, 19 nt, Artificial Sequence
  Description of Artificial Sequence: Synthetic oligonucleotide
uccaguggcaccagcugcc

SEQ ID NO: 3212738 - RNA, 19 nt, Artificial Sequence
  Description of Artificial Sequence: Synthetic oligonucleotide
uccaauccguuguucaaac

SEQ ID NO: 3212739 - RNA, 19 nt, Artificial Sequence
  Description of Artificial Sequence: Synthetic oligonucleotide
uggguguagccauauuucu

SEQ ID NO: 3212740 - RNA, 19 nt, Artificial Sequence
  Description of Artificial Sequence: Synthetic oligonucleotide
uccugagcugacuucggcc

SEQ ID NO: 3212741 - RNA, 19 nt, Artificial Sequence
  Description of Artificial Sequence: Synthetic oligonucleotide
ucccggagcaauuccagca

SEQ ID NO: 3212742 - RNA, 19 nt, Artificial Sequence
  Description of Artificial Sequence: Synthetic oligonucleotide
uuucuucagcuucucucug

SEQ ID NO: 3212743 - RNA, 19 nt, Artificial Sequence
  Description of Artificial Sequence: Synthetic oligonucleotide
ucaaacucuucucccugcu

SEQ ID NO: 3212744 - RNA, 19 nt, Artificial Sequence
  Description of Artificial Sequence: Synthetic oligonucleotide
guucaaacucuucucccug

SEQ ID NO: 3212745 - RNA, 19 nt, Artificial Sequence
  Description of Artificial Sequence: Synthetic oligonucleotide
ucuccaguggcaccagcug

SEQ ID NO: 3212746 - RNA, 19 nt, Artificial Sequence
  Description of Artificial Sequence: Synthetic oligonucleotide
ugggugcccuuacugagcc

SEQ ID NO: 3212747 - RNA, 19 nt, Artificial Sequence
  Description of Artificial Sequence: Synthetic oligonucleotide
uuggccaucauugccuccc

SEQ ID NO: 3212748 - RNA, 19 nt, Artificial Sequence
  Description of Artificial Sequence: Synthetic oligonucleotide
aagacugauuuuggcuuuc

SEQ ID NO: 3212749 - RNA, 19 nt, Artificial Sequence
  Description of Artificial Sequence: Synthetic oligonucleotide
cacuuuggccaucauugcc

SEQ ID NO: 3212750 - RNA, 19 nt, Artificial Sequence
  Description of Artificial Sequence: Synthetic oligonucleotide
gcaaucuucucgcacuggg

SEQ ID NO: 3212751 - RNA, 19 nt, Artificial Sequence
  Description of Artificial Sequence: Synthetic oligonucleotide
ugggucaugguaucagcac

SEQ ID NO: 3212752 - RNA, 19 nt, Artificial Sequence
  Description of Artificial Sequence: Synthetic oligonucleotide
acuaucuccaguggcacca

SEQ ID NO: 3212753 - RNA, 19 nt, Artificial Sequence
  Description of Artificial Sequence: Synthetic oligonucleotide
uucaggagucguuggguca

SEQ ID NO: 3212754 - RNA, 19 nt, Artificial Sequence
  Description of Artificial Sequence: Synthetic oligonucleotide
ucuucucgggguucacuag

SEQ ID NO: 3212755 - RNA, 19 nt, Artificial Sequence
  Description of Artificial Sequence: Synthetic oligonucleotide
gacuucggcccgcagcagg

SEQ ID NO: 3212756 - RNA, 19 nt, Artificial Sequence
  Description of Artificial Sequence: Synthetic oligonucleotide
ugcuucacuucccucgggu

SEQ ID NO: 3212757 - RNA, 19 nt, Artificial Sequence
  Description of Artificial Sequence: Synthetic oligonucleotide
aagaauccacuuuggccau

SEQ ID NO: 3212758 - RNA, 19 nt, Artificial Sequence
  Description of Artificial Sequence: Synthetic oligonucleotide
uaauuuguugaacagacag

SEQ ID NO: 3212759 - RNA, 19 nt, Artificial Sequence
  Description of Artificial Sequence: Synthetic oligonucleotide
uguucauugcucaagaaag

SEQ ID NO: 3212760 - RNA, 19 nt, Artificial Sequence
  Description of Artificial Sequence: Synthetic oligonucleotide
cacaugguaaauuacaugg

SEQ ID NO: 3212761 - RNA, 19 nt, Artificial Sequence
  Description of Artificial Sequence: Synthetic oligonucleotide
uuauauaacuuccacaaac

SEQ ID NO: 3212762 - RNA, 19 nt, Artificial Sequence
  Description of Artificial Sequence: Synthetic oligonucleotide
uccuaugucaucuaagagg

SEQ ID NO: 3212763 - RNA, 19 nt, Artificial Sequence
  Description of Artificial Sequence: Synthetic oligonucleotide
uguuauauaacuuccacaa

SEQ ID NO: 3212764 - RNA, 19 nt, Artificial Sequence
  Description of Artificial Sequence: Synthetic oligonucleotide
acagcacuuauucuuaucc

SEQ ID NO: 3212765 - RNA, 19 nt, Artificial Sequence
  Description of Artificial Sequence: Synthetic oligonucleotide
uauuuaugaguucacuggg

SEQ ID NO: 3212766 - RNA, 19 nt, Artificial Sequence
  Description of Artificial Sequence: Synthetic oligonucleotide
uaaaauugucaccacaccc

SEQ ID NO: 3212767 - RNA, 19 nt, Artificial Sequence
  Description of Artificial Sequence: Synthetic oligonucleotide
aguggauugcuuuaugagc

SEQ ID NO: 3212768 - RNA, 19 nt, Artificial Sequence
  Description of Artificial Sequence: Synthetic oligonucleotide
aucauaaugcugcugggcc

SEQ ID NO: 3212769 - RNA, 19 nt, Artificial Sequence
  Description of Artificial Sequence: Synthetic oligonucleotide
uaugguuggccuaauaaag

SEQ ID NO: 3212770 - RNA, 19 nt, Artificial Sequence
  Description of Artificial Sequence: Synthetic oligonucleotide
uguagcuacaaccugguca

SEQ ID NO: 3212771 - RNA, 19 nt, Artificial Sequence
  Description of Artificial Sequence: Synthetic oligonucleotide
uuacaaaggaaauaauuca

SEQ ID NO: 3212772 - RNA, 19 nt, Artificial Sequence
  Description of Artificial Sequence: Synthetic oligonucleotide
cuuaagaacaacacugugc

SEQ ID NO: 3212773 - RNA, 19 nt, Artificial Sequence
  Description of Artificial Sequence: Synthetic oligonucleotide
uagauugguggucacaggg

SEQ ID NO: 3212774 - RNA, 19 nt, Artificial Sequence
  Description of Artificial Sequence: Synthetic oligonucleotide
uuauucuucagguuggucu

SEQ ID NO: 3212775 - RNA, 19 nt, Artificial Sequence
  Description of Artificial Sequence: Synthetic oligonucleotide
ucaagugaaccauagauau

SEQ ID NO: 3212776 - RNA, 19 nt, Artificial Sequence
  Description of Artificial Sequence: Synthetic oligonucleotide
aaauuaaagcccaccauuc

SEQ ID NO: 3212777 - RNA, 19 nt, Artificial Sequence
  Description of Artificial Sequence: Synthetic oligonucleotide
acacauggaguucacaugg

SEQ ID NO: 3212778 - RNA, 19 nt, Artificial Sequence
  Description of Artificial Sequence: Synthetic oligonucleotide
gaauuuaacaguugcacuc

SEQ ID NO: 3212779 - RNA, 19 nt, Artificial Sequence
  Description of Artificial Sequence: Synthetic oligonucleotide
gauguuucauuauuuauuc

SEQ ID NO: 3212780 - RNA, 19 nt, Artificial Sequence
  Description of Artificial Sequence: Synthetic oligonucleotide
uaggaaauuaaauuuucca

SEQ ID NO: 3212781 - RNA, 19 nt, Artificial Sequence
  Description of Artificial Sequence: Synthetic oligonucleotide
uaaggagucauuuggaccu

SEQ ID NO: 3212782 - RNA, 19 nt, Artificial Sequence
  Description of Artificial Sequence: Synthetic oligonucleotide
uguuacagaguguacagca

SEQ ID NO: 3212783 - RNA, 19 nt, Artificial Sequence
  Description of Artificial Sequence: Synthetic oligonucleotide
guugcugugguuuucaaug

SEQ ID NO: 3212784 - RNA, 19 nt, Artificial Sequence
  Description of Artificial Sequence: Synthetic oligonucleotide
uaugagguaguuuaacaug

SEQ ID NO: 3212785 - RNA, 19 nt, Artificial Sequence
  Description of Artificial Sequence: Synthetic oligonucleotide
auugaguugagggacacac

SEQ ID NO: 3212786 - RNA, 19 nt, Artificial Sequence
  Description of Artificial Sequence: Synthetic oligonucleotide
acaauaauuuguugaacag

SEQ ID NO: 3212787 - RNA, 19 nt, Artificial Sequence
  Description of Artificial Sequence: Synthetic oligonucleotide
gauuauuaaaccaggcugc

SEQ ID NO: 3212788 - RNA, 19 nt, Artificial Sequence
  Description of Artificial Sequence: Synthetic oligonucleotide
ugcuaaacauguuaccagg

SEQ ID NO: 3212789 - RNA, 19 nt, Artificial Sequence
  Description of Artificial Sequence: Synthetic oligonucleotide
uaaucguuaauggaucugg

SEQ ID NO: 3212790 - RNA, 19 nt, Artificial Sequence
  Description of Artificial Sequence: Synthetic oligonucleotide
aaagcaaugaugucugaaa

SEQ ID NO: 3212791 - RNA, 19 nt, Artificial Sequence
  Description of Artificial Sequence: Synthetic oligonucleotide
auaauuugccacuaaauua

SEQ ID NO: 3212792 - RNA, 19 nt, Artificial Sequence
  Description of Artificial Sequence: Synthetic oligonucleotide
aguuguuauuuauuaauca

SEQ ID NO: 3212793 - RNA, 19 nt, Artificial Sequence
  Description of Artificial Sequence: Synthetic oligonucleotide
ggauuauuaaaccaggcug

SEQ ID NO: 3212794 - RNA, 19 nt, Artificial Sequence
  Description of Artificial Sequence: Synthetic oligonucleotide
gcaaauuugaauuguauug

SEQ ID NO: 3212795 - RNA, 19 nt, Artificial Sequence
  Description of Artificial Sequence: Synthetic oligonucleotide
uuuaugaguucacugggcu

SEQ ID NO: 3212796 - RNA, 19 nt, Artificial Sequence
  Description of Artificial Sequence: Synthetic oligonucleotide
aaaggggaagaacauuuug

SEQ ID NO: 3212797 - RNA, 19 nt, Artificial Sequence
  Description of Artificial Sequence: Synthetic oligonucleotide
ucucacagaaucaugguaa

SEQ ID NO: 3212798 - RNA, 19 nt, Artificial Sequence
  Description of Artificial Sequence: Synthetic oligonucleotide
aucuagaauaaauaggaaa

SEQ ID NO: 3212799 - RNA, 19 nt, Artificial Sequence
  Description of Artificial Sequence: Synthetic oligonucleotide
aucaagauuggucaugugu

SEQ ID NO: 3212800 - RNA, 19 nt, Artificial Sequence
  Description of Artificial Sequence: Synthetic oligonucleotide
guagcuacaaccuggucag

SEQ ID NO: 3212801 - RNA, 19 nt, Artificial Sequence
  Description of Artificial Sequence: Synthetic oligonucleotide
caaauuugaauuguauugc

SEQ ID NO: 3212802 - RNA, 19 nt, Artificial Sequence
  Description of Artificial Sequence: Synthetic oligonucleotide
gagcucauuaauuugggac

SEQ ID NO: 3212803 - RNA, 19 nt, Artificial Sequence
  Description of Artificial Sequence: Synthetic oligonucleotide
cuuaguuuuauucuuacaa

SEQ ID NO: 3212804 - RNA, 19 nt, Artificial Sequence
  Description of Artificial Sequence: Synthetic oligonucleotide
uggaaagcaaugaugucug

SEQ ID NO: 3212805 - RNA, 19 nt, Artificial Sequence
  Description of Artificial Sequence: Synthetic oligonucleotide
ucagaggauuauuaaacca

SEQ ID NO: 3212806 - RNA, 19 nt, Artificial Sequence
  Description of Artificial Sequence: Synthetic oligonucleotide
aauuaaagcccaccauuca

SEQ ID NO: 3212807 - RNA, 19 nt, Artificial Sequence
  Description of Artificial Sequence: Synthetic oligonucleotide
uuaguuuuauucuuacaaa

SEQ ID NO: 3212808 - RNA, 19 nt, Artificial Sequence
  Description of Artificial Sequence: Synthetic oligonucleotide
ucuauuacugcggauguug

SEQ ID NO: 3212809 - RNA, 19 nt, Artificial Sequence
  Description of Artificial Sequence: Synthetic oligonucleotide
aaaccagaaaaggggaggg

SEQ ID NO: 3212810 - RNA, 19 nt, Artificial Sequence
  Description of Artificial Sequence: Synthetic oligonucleotide
uuguaaagcaaauuugaau

SEQ ID NO: 3212811 - RNA, 19 nt, Artificial Sequence
  Description of Artificial Sequence: Synthetic oligonucleotide
aagugaaccauagauauuu

SEQ ID NO: 3212812 - RNA, 19 nt, Artificial Sequence
  Description of Artificial Sequence: Synthetic oligonucleotide
auugcucaagaaaggaucc

SEQ ID NO: 3212813 - RNA, 19 nt, Artificial Sequence
  Description of Artificial Sequence: Synthetic oligonucleotide
aaagaccagaauucugucu

SEQ ID NO: 3212814 - RNA, 19 nt, Artificial Sequence
  Description of Artificial Sequence: Synthetic oligonucleotide
agaaaggauccucuuuugg

SEQ ID NO: 3212815 - RNA, 19 nt, Artificial Sequence
  Description of Artificial Sequence: Synthetic oligonucleotide
guaugaagaucuuugcagc

SEQ ID NO: 3212816 - RNA, 19 nt, Artificial Sequence
  Description of Artificial Sequence: Synthetic oligonucleotide
aucggcgugaggcagaaag

SEQ ID NO: 3212817 - RNA, 19 nt, Artificial Sequence
  Description of Artificial Sequence: Synthetic oligonucleotide
aacccauccaaguauaauu

SEQ ID NO: 3212818 - RNA, 19 nt, Artificial Sequence
  Description of Artificial Sequence: Synthetic oligonucleotide
ucaagauuggucauguguu

SEQ ID NO: 3212819 - RNA, 19 nt, Artificial Sequence
  Description of Artificial Sequence: Synthetic oligonucleotide
ucaggauuuagucaccaaa

SEQ ID NO: 3212820 - RNA, 19 nt, Artificial Sequence
  Description of Artificial Sequence: Synthetic oligonucleotide
uaguggauugcuuuaugag

SEQ ID NO: 3212821 - RNA, 19 nt, Artificial Sequence
  Description of Artificial Sequence: Synthetic oligonucleotide
ucaucuaagaggccaagaa

SEQ ID NO: 3212822 - RNA, 19 nt, Artificial Sequence
  Description of Artificial Sequence: Synthetic oligonucleotide
uuaaucagcuaauccacac

SEQ ID NO: 3212823 - RNA, 19 nt, Artificial Sequence
  Description of Artificial Sequence: Synthetic oligonucleotide
agucgaucccuucaaagag

SEQ ID NO: 3212824 - RNA, 19 nt, Artificial Sequence
  Description of Artificial Sequence: Synthetic oligonucleotide
ugcuuauuuuacuagcaga

SEQ ID NO: 3212825 - RNA, 19 nt, Artificial Sequence
  Description of Artificial Sequence: Synthetic oligonucleotide
auaggaucaucaugcaauc

SEQ ID NO: 3212826 - RNA, 19 nt, Artificial Sequence
  Description of Artificial Sequence: Synthetic oligonucleotide
caaauucaaaaccagaaaa

SEQ ID NO: 3212827 - RNA, 19 nt, Artificial Sequence
  Description of Artificial Sequence: Synthetic oligonucleotide
aggauuauuaaaccaggcu

SEQ ID NO: 3212828 - RNA, 19 nt, Artificial Sequence
  Description of Artificial Sequence: Synthetic oligonucleotide
ugucccaaauuaaagccca

SEQ ID NO: 3212829 - RNA, 19 nt, Artificial Sequence
  Description of Artificial Sequence: Synthetic oligonucleotide
aauccugcuggucuuccag

SEQ ID NO: 3212830 - RNA, 19 nt, Artificial Sequence
  Description of Artificial Sequence: Synthetic oligonucleotide
uaauaaagucgcuccaaca

SEQ ID NO: 3212831 - RNA, 19 nt, Artificial Sequence
  Description of Artificial Sequence: Synthetic oligonucleotide
aaggaaaucuagaauaaau

SEQ ID NO: 3212832 - RNA, 19 nt, Artificial Sequence
  Description of Artificial Sequence: Synthetic oligonucleotide
gauaugguuggccuaauaa

SEQ ID NO: 3212833 - RNA, 19 nt, Artificial Sequence
  Description of Artificial Sequence: Synthetic oligonucleotide
ucugauguuucgauccuug

SEQ ID NO: 3212834 - RNA, 19 nt, Artificial Sequence
  Description of Artificial Sequence: Synthetic oligonucleotide
aagaacaacacugugcauu

SEQ ID NO: 3212835 - RNA, 19 nt, Artificial Sequence
  Description of Artificial Sequence: Synthetic oligonucleotide
aauuguauugccaggacua

SEQ ID NO: 3212836 - RNA, 19 nt, Artificial Sequence
  Description of Artificial Sequence: Synthetic oligonucleotide
uacuguucuauugaguuga

SEQ ID NO: 3212837 - RNA, 19 nt, Artificial Sequence
  Description of Artificial Sequence: Synthetic oligonucleotide
gugaccuuccucuucacag

SEQ ID NO: 3212838 - RNA, 19 nt, Artificial Sequence
  Description of Artificial Sequence: Synthetic oligonucleotide
aaugcuuauuuuacuagca

SEQ ID NO: 3212839 - RNA, 19 nt, Artificial Sequence
  Description of Artificial Sequence: Synthetic oligonucleotide
aagcaaugaugucugaaaa

SEQ ID NO: 3212840 - RNA, 19 nt, Artificial Sequence
  Description of Artificial Sequence: Synthetic oligonucleotide
gaguuuuacggcuacuuca

SEQ ID NO: 3212841 - RNA, 19 nt, Artificial Sequence
  Description of Artificial Sequence: Synthetic oligonucleotide
uuaaucuuagguagcuuuc

SEQ ID NO: 3212842 - RNA, 19 nt, Artificial Sequence
  Description of Artificial Sequence: Synthetic oligonucleotide
agagcaauugacccuggag

SEQ ID NO: 3212843 - RNA, 19 nt, Artificial Sequence
  Description of Artificial Sequence: Synthetic oligonucleotide
uggugugugaccuuccucu

SEQ ID NO: 3212844 - RNA, 19 nt, Artificial Sequence
  Description of Artificial Sequence: Synthetic oligonucleotide
auuuaugaguucacugggc

SEQ ID NO: 3212845 - RNA, 19 nt, Artificial Sequence
  Description of Artificial Sequence: Synthetic oligonucleotide
caauugacccuggagaagg

SEQ ID NO: 3212846 - RNA, 19 nt, Artificial Sequence
  Description of Artificial Sequence: Synthetic oligonucleotide
ucacaugguaaauuacaug

SEQ ID NO: 3212847 - RNA, 19 nt, Artificial Sequence
  Description of Artificial Sequence: Synthetic oligonucleotide
cuuguaguguguacaagac

SEQ ID NO: 3212848 - RNA, 19 nt, Artificial Sequence
  Description of Artificial Sequence: Synthetic oligonucleotide
ucugccacagagaaaugcu

SEQ ID NO: 3212849 - RNA, 19 nt, Artificial Sequence
  Description of Artificial Sequence: Synthetic oligonucleotide
uuucgauccuugcaggugu

SEQ ID NO: 3212850 - RNA, 19 nt, Artificial Sequence
  Description of Artificial Sequence: Synthetic oligonucleotide
ggagaguguagcuacaacc

SEQ ID NO: 3212851 - RNA, 19 nt, Artificial Sequence
  Description of Artificial Sequence: Synthetic oligonucleotide
auaugguuggccuaauaaa

SEQ ID NO: 3212852 - RNA, 19 nt, Artificial Sequence
  Description of Artificial Sequence: Synthetic oligonucleotide
uucauuagauuggugguca

SEQ ID NO: 3212853 - RNA, 19 nt, Artificial Sequence
  Description of Artificial Sequence: Synthetic oligonucleotide
augcuuauuuuacuagcag

SEQ ID NO: 3212854 - RNA, 19 nt, Artificial Sequence
  Description of Artificial Sequence: Synthetic oligonucleotide
cugaucaagugaaccauag

SEQ ID NO: 3212855 - RNA, 19 nt, Artificial Sequence
  Description of Artificial Sequence: Synthetic oligonucleotide
uggucuuccaguccagcag

SEQ ID NO: 3212856 - RNA, 19 nt, Artificial Sequence
  Description of Artificial Sequence: Synthetic oligonucleotide
aucuuaucuauuuccagaa

SEQ ID NO: 3212857 - RNA, 19 nt, Artificial Sequence
  Description of Artificial Sequence: Synthetic oligonucleotide
gccacuaaauuaaacaagg

SEQ ID NO: 3212858 - RNA, 19 nt, Artificial Sequence
  Description of Artificial Sequence: Synthetic oligonucleotide
aauauuuaguguccuaucc

SEQ ID NO: 3212859 - RNA, 19 nt, Artificial Sequence
  Description of Artificial Sequence: Synthetic oligonucleotide
uaugacaacaggaagagag

SEQ ID NO: 3212860 - RNA, 19 nt, Artificial Sequence
  Description of Artificial Sequence: Synthetic oligonucleotide
gaagagaguaguuaaaugg

SEQ ID NO: 3212861 - RNA, 19 nt, Artificial Sequence
  Description of Artificial Sequence: Synthetic oligonucleotide
uuuuagauaauaaauauau

SEQ ID NO: 3212862 - RNA, 19 nt, Artificial Sequence
  Description of Artificial Sequence: Synthetic oligonucleotide
agacuaaagauuuuccucc

SEQ ID NO: 3212863 - RNA, 19 nt, Artificial Sequence
  Description of Artificial Sequence: Synthetic oligonucleotide
aguaauuuguuacagaaga

SEQ ID NO: 3212864 - RNA, 19 nt, Artificial Sequence
  Description of Artificial Sequence: Synthetic oligonucleotide
cagaagaauaaauauaacc

SEQ ID NO: 3212865 - RNA, 19 nt, Artificial Sequence
  Description of Artificial Sequence: Synthetic oligonucleotide
gaagaauaaauauaaccug

SEQ ID NO: 3212866 - RNA, 19 nt, Artificial Sequence
  Description of Artificial Sequence: Synthetic oligonucleotide
uaauaaauauauauuauuu

SEQ ID NO: 3212867 - RNA, 19 nt, Artificial Sequence
  Description of Artificial Sequence: Synthetic oligonucleotide
acagucuacacauucauag

SEQ ID NO: 3212868 - RNA, 19 nt, Artificial Sequence
  Description of Artificial Sequence: Synthetic oligonucleotide
gaaacugaggauuuuauca

SEQ ID NO: 3212869 - RNA, 19 nt, Artificial Sequence
  Description of Artificial Sequence: Synthetic oligonucleotide
  modified_base (15)..(15): a, c, u, g, unknown or other
auugguacggcguunuccc

SEQ ID NO: 3212870 - RNA, 19 nt, Artificial Sequence
  Description of Artificial Sequence: Synthetic oligonucleotide
acuacgaaggcuuucccgc

SEQ ID NO: 3212871 - RNA, 19 nt, Artificial Sequence
  Description of Artificial Sequence: Synthetic oligonucleotide
uauuauuuaaacuacuguu

SEQ ID NO: 3212872 - RNA, 19 nt, Artificial Sequence
  Description of Artificial Sequence: Synthetic oligonucleotide
aaacugaggauuuuaucag

SEQ ID NO: 3212873 - RNA, 19 nt, Artificial Sequence
  Description of Artificial Sequence: Synthetic oligonucleotide
uuuaucagcucucaaagaa

SEQ ID NO: 3212874 - RNA, 19 nt, Artificial Sequence
  Description of Artificial Sequence: Synthetic oligonucleotide
cuuacaaucguacagcuuc

SEQ ID NO: 3212875 - RNA, 19 nt, Artificial Sequence
  Description of Artificial Sequence: Synthetic oligonucleotide
auagguuacacucaaguga

SEQ ID NO: 3212876 - RNA, 19 nt, Artificial Sequence
  Description of Artificial Sequence: Synthetic oligonucleotide
ggcaugaauacucugaugg

SEQ ID NO: 3212877 - RNA, 19 nt, Artificial Sequence
  Description of Artificial Sequence: Synthetic oligonucleotide
agucuacacauucauaggg

SEQ ID NO: 3212878 - RNA, 19 nt, Artificial Sequence
  Description of Artificial Sequence: Synthetic oligonucleotide
uagguuacacucaagugag

SEQ ID NO: 3212879 - RNA, 19 nt, Artificial Sequence
  Description of Artificial Sequence: Synthetic oligonucleotide
aggcaauuaauauuuagug

SEQ ID NO: 3212880 - RNA, 19 nt, Artificial Sequence
  Description of Artificial Sequence: Synthetic oligonucleotide
uaaccugguaccuacaaug

SEQ ID NO: 3212881 - RNA, 19 nt, Artificial Sequence
  Description of Artificial Sequence: Synthetic oligonucleotide
uuacacucaagugagaaug

SEQ ID NO: 3212882 - RNA, 19 nt, Artificial Sequence
  Description of Artificial Sequence: Synthetic oligonucleotide
auauuauuuaaacuacugu

SEQ ID NO: 3212883 - RNA, 19 nt, Artificial Sequence
  Description of Artificial Sequence: Synthetic oligonucleotide
cugaagauagguuacacuc

SEQ ID NO: 3212884 - RNA, 19 nt, Artificial Sequence
  Description of Artificial Sequence: Synthetic oligonucleotide
uuuucugaugcacucgaag

SEQ ID NO: 3212885 - RNA, 19 nt, Artificial Sequence
  Description of Artificial Sequence: Synthetic oligonucleotide
agcauuuugacagugagca

SEQ ID NO: 3212886 - RNA, 19 nt, Artificial Sequence
  Description of Artificial Sequence: Synthetic oligonucleotide
aacacagcuacacuccuug

SEQ ID NO: 3212887 - RNA, 19 nt, Artificial Sequence
  Description of Artificial Sequence: Synthetic oligonucleotide
gaaguggauuuucugaugc

SEQ ID NO: 3212888 - RNA, 19 nt, Artificial Sequence
  Description of Artificial Sequence: Synthetic oligonucleotide
ucuuccaacagucuacaca

SEQ ID NO: 3212889 - RNA, 19 nt, Artificial Sequence
  Description of Artificial Sequence: Synthetic oligonucleotide
guaccuacaauguggaucc

SEQ ID NO: 3212890 - RNA, 19 nt, Artificial Sequence
  Description of Artificial Sequence: Synthetic oligonucleotide
aggaacuucacucaucucu

SEQ ID NO: 3212891 - RNA, 19 nt, Artificial Sequence
  Description of Artificial Sequence: Synthetic oligonucleotide
ugaccauccagaaacugag

SEQ ID NO: 3212892 - RNA, 19 nt, Artificial Sequence
  Description of Artificial Sequence: Synthetic oligonucleotide
ugaggauuuuaucagcucu

SEQ ID NO: 3212893 - RNA, 19 nt, Artificial Sequence
  Description of Artificial Sequence: Synthetic oligonucleotide
aaagauuuuccuccauuca

SEQ ID NO: 3212894 - RNA, 19 nt, Artificial Sequence
  Description of Artificial Sequence: Synthetic oligonucleotide
ucuaguuuuaagccuucag

SEQ ID NO: 3212895 - RNA, 19 nt, Artificial Sequence
  Description of Artificial Sequence: Synthetic oligonucleotide
agauagguuacacucaagu

SEQ ID NO: 3212896 - RNA, 19 nt, Artificial Sequence
  Description of Artificial Sequence: Synthetic oligonucleotide
gauagguuacacucaagug

SEQ ID NO: 3212897 - RNA, 19 nt, Artificial Sequence
  Description of Artificial Sequence: Synthetic oligonucleotide
aaucguacagcuucugaga

SEQ ID NO: 3212898 - RNA, 19 nt, Artificial Sequence
  Description of Artificial Sequence: Synthetic oligonucleotide
guaaauacuguuaucagca

SEQ ID NO: 3212899 - RNA, 19 nt, Artificial Sequence
  Description of Artificial Sequence: Synthetic oligonucleotide
aagauuuuccuccauucau

SEQ ID NO: 3212900 - RNA, 19 nt, Artificial Sequence
  Description of Artificial Sequence: Synthetic oligonucleotide
aacaaggcaauuaauauuu

SEQ ID NO: 3212901 - RNA, 19 nt, Artificial Sequence
  Description of Artificial Sequence: Synthetic oligonucleotide
uguuggcauguccugaagg

SEQ ID NO: 3212902 - RNA, 19 nt, Artificial Sequence
  Description of Artificial Sequence: Synthetic oligonucleotide
agaaacugaggauuuuauc

SEQ ID NO: 3212903 - RNA, 19 nt, Artificial Sequence
  Description of Artificial Sequence: Synthetic oligonucleotide
aagaauucagguguuugag

SEQ ID NO: 3212904 - RNA, 19 nt, Artificial Sequence
  Description of Artificial Sequence: Synthetic oligonucleotide
uaaagauuuuccuccauuc

SEQ ID NO: 3212905 - RNA, 19 nt, Artificial Sequence
  Description of Artificial Sequence: Synthetic oligonucleotide
agaagugugaagccucugg

SEQ ID NO: 3212906 - RNA, 19 nt, Artificial Sequence
  Description of Artificial Sequence: Synthetic oligonucleotide
uaguuuuaagccuucagau

SEQ ID NO: 3212907 - RNA, 19 nt, Artificial Sequence
  Description of Artificial Sequence: Synthetic oligonucleotide
uaguaauuuguuacagaag

SEQ ID NO: 3212908 - RNA, 19 nt, Artificial Sequence
  Description of Artificial Sequence: Synthetic oligonucleotide
agaagacuaaagauuuucc

SEQ ID NO: 3212909 - RNA, 19 nt, Artificial Sequence
  Description of Artificial Sequence: Synthetic oligonucleotide
gauuuuaucagcucucaaa

SEQ ID NO: 3212910 - RNA, 19 nt, Artificial Sequence
  Description of Artificial Sequence: Synthetic oligonucleotide
cuugccuggacuuucaauc

SEQ ID NO: 3212911 - RNA, 19 nt, Artificial Sequence
  Description of Artificial Sequence: Synthetic oligonucleotide
augcuucgcacucaaaggg

SEQ ID NO: 3212912 - RNA, 19 nt, Artificial Sequence
  Description of Artificial Sequence: Synthetic oligonucleotide
aaggcaauuaauauuuagu

SEQ ID NO: 3212913 - RNA, 19 nt, Artificial Sequence
  Description of Artificial Sequence: Synthetic oligonucleotide
cucaagugagaauggaggg

SEQ ID NO: 3212914 - RNA, 19 nt, Artificial Sequence
  Description of Artificial Sequence: Synthetic oligonucleotide
ugcugaugcacccgaaagg

SEQ ID NO: 3212915 - RNA, 19 nt, Artificial Sequence
  Description of Artificial Sequence: Synthetic oligonucleotide
uguccuauccaguaugaca

SEQ ID NO: 3212916 - RNA, 19 nt, Artificial Sequence
  Description of Artificial Sequence: Synthetic oligonucleotide
uccaguaugacaacaggaa

SEQ ID NO: 3212917 - RNA, 19 nt, Artificial Sequence
  Description of Artificial Sequence: Synthetic oligonucleotide
acucaagugagaauggagg

SEQ ID NO: 3212918 - RNA, 19 nt, Artificial Sequence
  Description of Artificial Sequence: Synthetic oligonucleotide
ucacucaucucucagccga

SEQ ID NO: 3212919 - RNA, 19 nt, Artificial Sequence
  Description of Artificial Sequence: Synthetic oligonucleotide
ugcguacacugucugaagg

SEQ ID NO: 3212920 - RNA, 19 nt, Artificial Sequence
  Description of Artificial Sequence: Synthetic oligonucleotide
uguuugaggugucuaaccu

SEQ ID NO: 3212921 - RNA, 19 nt, Artificial Sequence
  Description of Artificial Sequence: Synthetic oligonucleotide
guuggcauguccugaaggg

SEQ ID NO: 3212922 - RNA, 19 nt, Artificial Sequence
  Description of Artificial Sequence: Synthetic oligonucleotide
uuucuaguaauuuguuaca

SEQ ID NO: 3212923 - RNA, 19 nt, Artificial Sequence
  Description of Artificial Sequence: Synthetic oligonucleotide
ugaagauagguuacacuca

SEQ ID NO: 3212924 - RNA, 19 nt, Artificial Sequence
  Description of Artificial Sequence: Synthetic oligonucleotide
caugcuucgcacucaaagg

SEQ ID NO: 3212925 - RNA, 19 nt, Artificial Sequence
  Description of Artificial Sequence: Synthetic oligonucleotide
cuaguaauuuguuacagaa

SEQ ID NO: 3212926 - RNA, 19 nt, Artificial Sequence
  Description of Artificial Sequence: Synthetic oligonucleotide
uacacucaagugagaaugg

SEQ ID NO: 3212927 - RNA, 19 nt, Artificial Sequence
  Description of Artificial Sequence: Synthetic oligonucleotide
aggugucuaaccugguacc

SEQ ID NO: 3212928 - RNA, 19 nt, Artificial Sequence
  Description of Artificial Sequence: Synthetic oligonucleotide
caaucguacagcuucugag

SEQ ID NO: 3212929 - RNA, 19 nt, Artificial Sequence
  Description of Artificial Sequence: Synthetic oligonucleotide
uuucaaucuacagaaauuu

SEQ ID NO: 3212930 - RNA, 19 nt, Artificial Sequence
  Description of Artificial Sequence: Synthetic oligonucleotide
aauguggauccuucucuag

SEQ ID NO: 3212931 - RNA, 19 nt, Artificial Sequence
  Description of Artificial Sequence: Synthetic oligonucleotide
aacuucacucaucucucag

SEQ ID NO: 3212932 - RNA, 19 nt, Artificial Sequence
  Description of Artificial Sequence: Synthetic oligonucleotide
aauucagguguuugaggug

SEQ ID NO: 3212933 - RNA, 19 nt, Artificial Sequence
  Description of Artificial Sequence: Synthetic oligonucleotide
ucucucaccggcaugaaua

SEQ ID NO: 3212934 - RNA, 19 nt, Artificial Sequence
  Description of Artificial Sequence: Synthetic oligonucleotide
aagagaguaguuaaaugga

SEQ ID NO: 3212935 - RNA, 19 nt, Artificial Sequence
  Description of Artificial Sequence: Synthetic oligonucleotide
caaggcaauuaauauuuag

SEQ ID NO: 3212936 - RNA, 19 nt, Artificial Sequence
  Description of Artificial Sequence: Synthetic oligonucleotide
cucucaaagaauucaggug

SEQ ID NO: 3212937 - RNA, 19 nt, Artificial Sequence
  Description of Artificial Sequence: Synthetic oligonucleotide
uccaacagucuacacauuc

SEQ ID NO: 3212938 - RNA, 19 nt, Artificial Sequence
  Description of Artificial Sequence: Synthetic oligonucleotide
ugaugcacccgaaaggccu

SEQ ID NO: 3212939 - RNA, 19 nt, Artificial Sequence
  Description of Artificial Sequence: Synthetic oligonucleotide
auuauucuuccacaggaau

SEQ ID NO: 3212940 - RNA, 19 nt, Artificial Sequence
  Description of Artificial Sequence: Synthetic oligonucleotide
acccgaaaggccuugccac

SEQ ID NO: 3212941 - RNA, 19 nt, Artificial Sequence
  Description of Artificial Sequence: Synthetic oligonucleotide
agucggaaggucuucccac

SEQ ID NO: 3212942 - RNA, 19 nt, Artificial Sequence
  Description of Artificial Sequence: Synthetic oligonucleotide
gaggugucuaaccugguac

SEQ ID NO: 3212943 - RNA, 19 nt, Artificial Sequence
  Description of Artificial Sequence: Synthetic oligonucleotide
auucaucaaauuauucuuc

SEQ ID NO: 3212944 - RNA, 19 nt, Artificial Sequence
  Description of Artificial Sequence: Synthetic oligonucleotide
cuauccaguaugacaacag

SEQ ID NO: 3212945 - RNA, 19 nt, Artificial Sequence
  Description of Artificial Sequence: Synthetic oligonucleotide
ucaaggcccaacuaaggcu

SEQ ID NO: 3212946 - RNA, 19 nt, Artificial Sequence
  Description of Artificial Sequence: Synthetic oligonucleotide
agcaacacagcuacacucc

SEQ ID NO: 3212947 - RNA, 19 nt, Artificial Sequence
  Description of Artificial Sequence: Synthetic oligonucleotide
cuaguuuuaagccuucaga

SEQ ID NO: 3212948 - RNA, 19 nt, Artificial Sequence
  Description of Artificial Sequence: Synthetic oligonucleotide
uuauucuuccacaggaauu

SEQ ID NO: 3212949 - RNA, 19 nt, Artificial Sequence
  Description of Artificial Sequence: Synthetic oligonucleotide
ucagcucucaaagaauuca

SEQ ID NO: 3212950 - RNA, 19 nt, Artificial Sequence
  Description of Artificial Sequence: Synthetic oligonucleotide
  modified_base (16)..(16): a, c, u, g, unknown or other
cauugguacggcguunucc

SEQ ID NO: 3212951 - RNA, 19 nt, Artificial Sequence
  Description of Artificial Sequence: Synthetic oligonucleotide
agggcuuuuacagcaacac

SEQ ID NO: 3212952 - RNA, 19 nt, Artificial Sequence
  Description of Artificial Sequence: Synthetic oligonucleotide
auaaccuguaaauacuguu

SEQ ID NO: 3212953 - RNA, 19 nt, Artificial Sequence
  Description of Artificial Sequence: Synthetic oligonucleotide
acaggaagagaguaguuaa

SEQ ID NO: 3212954 - RNA, 19 nt, Artificial Sequence
  Description of Artificial Sequence: Synthetic oligonucleotide
accauccagaaacugagga

SEQ ID NO: 3212955 - RNA, 19 nt, Artificial Sequence
  Description of Artificial Sequence: Synthetic oligonucleotide
ucagccgaugaccauccag

SEQ ID NO: 3212956 - RNA, 19 nt, Artificial Sequence
  Description of Artificial Sequence: Synthetic oligonucleotide
aacuaaggcuugccuggac

SEQ ID NO: 3212957 - RNA, 19 nt, Artificial Sequence
  Description of Artificial Sequence: Synthetic oligonucleotide
gagaagacuaaagauuuuc

SEQ ID NO: 3212958 - RNA, 19 nt, Artificial Sequence
  Description of Artificial Sequence: Synthetic oligonucleotide
auugaugauguucuguucc

SEQ ID NO: 3212959 - RNA, 19 nt, Artificial Sequence
  Description of Artificial Sequence: Synthetic oligonucleotide
caugauucgagcaaacucc

SEQ ID NO: 3212960 - RNA, 19 nt, Artificial Sequence
  Description of Artificial Sequence: Synthetic oligonucleotide
uccaccauagucaugauuc

SEQ ID NO: 3212961 - RNA, 19 nt, Artificial Sequence
  Description of Artificial Sequence: Synthetic oligonucleotide
uuguaauugaugauguucu

SEQ ID NO: 3212962 - RNA, 19 nt, Artificial Sequence
  Description of Artificial Sequence: Synthetic oligonucleotide
uaacccauggagaugaggc

SEQ ID NO: 3212963 - RNA, 19 nt, Artificial Sequence
  Description of Artificial Sequence: Synthetic oligonucleotide
uauaauucuugucuccugc

SEQ ID NO: 3212964 - RNA, 19 nt, Artificial Sequence
  Description of Artificial Sequence: Synthetic oligonucleotide
ucugaagucaucaggcucc

SEQ ID NO: 3212965 - RNA, 19 nt, Artificial Sequence
  Description of Artificial Sequence: Synthetic oligonucleotide
uuugaaggaggcuacaacu

SEQ ID NO: 3212966 - RNA, 19 nt, Artificial Sequence
  Description of Artificial Sequence: Synthetic oligonucleotide
aagucacaaccccagcugc

SEQ ID NO: 3212967 - RNA, 19 nt, Artificial Sequence
  Description of Artificial Sequence: Synthetic oligonucleotide
aauugaugauguucuguuc

SEQ ID NO: 3212968 - RNA, 19 nt, Artificial Sequence
  Description of Artificial Sequence: Synthetic oligonucleotide
uucgcuuccggucaaagug

SEQ ID NO: 3212969 - RNA, 19 nt, Artificial Sequence
  Description of Artificial Sequence: Synthetic oligonucleotide
aaagucacaaccccagcug

SEQ ID NO: 3212970 - RNA, 19 nt, Artificial Sequence
  Description of Artificial Sequence: Synthetic oligonucleotide
ugcuuguugucaaagacca

SEQ ID NO: 3212971 - RNA, 19 nt, Artificial Sequence
  Description of Artificial Sequence: Synthetic oligonucleotide
uuaggguccaccauaguca

SEQ ID NO: 3212972 - RNA, 19 nt, Artificial Sequence
  Description of Artificial Sequence: Synthetic oligonucleotide
auaauucuugucuccugcc

SEQ ID NO: 3212973 - RNA, 19 nt, Artificial Sequence
  Description of Artificial Sequence: Synthetic oligonucleotide
uaauauaauucuugucucc

SEQ ID NO: 3212974 - RNA, 19 nt, Artificial Sequence
  Description of Artificial Sequence: Synthetic oligonucleotide
ucaucaggcuccaucaucc

SEQ ID NO: 3212975 - RNA, 19 nt, Artificial Sequence
  Description of Artificial Sequence: Synthetic oligonucleotide
aauauaauucuugucuccu

SEQ ID NO: 3212976 - RNA, 19 nt, Artificial Sequence
  Description of Artificial Sequence: Synthetic oligonucleotide
cuuguugucaaagaccagg

SEQ ID NO: 3212977 - RNA, 19 nt, Artificial Sequence
  Description of Artificial Sequence: Synthetic oligonucleotide
ucaugauucgagcaaacuc

SEQ ID NO: 3212978 - RNA, 19 nt, Artificial Sequence
  Description of Artificial Sequence: Synthetic oligonucleotide
aauaccugguucucuaccu

SEQ ID NO: 3212979 - RNA, 19 nt, Artificial Sequence
  Description of Artificial Sequence: Synthetic oligonucleotide
aauguugcucuuguaauug

SEQ ID NO: 3212980 - RNA, 19 nt, Artificial Sequence
  Description of Artificial Sequence: Synthetic oligonucleotide
auggagaugaggcaagcuc

SEQ ID NO: 3212981 - RNA, 19 nt, Artificial Sequence
  Description of Artificial Sequence: Synthetic oligonucleotide
aacuuguucagcugugucu

SEQ ID NO: 3212982 - RNA, 19 nt, Artificial Sequence
  Description of Artificial Sequence: Synthetic oligonucleotide
aagucaucaggcuccauca

SEQ ID NO: 3212983 - RNA, 19 nt, Artificial Sequence
  Description of Artificial Sequence: Synthetic oligonucleotide
ccugccagaauuuugaagg

SEQ ID NO: 3212984 - RNA, 19 nt, Artificial Sequence
  Description of Artificial Sequence: Synthetic oligonucleotide
caggucauaacccauggag

SEQ ID NO: 3212985 - RNA, 19 nt, Artificial Sequence
  Description of Artificial Sequence: Synthetic oligonucleotide
uggaaagucacaaccccag

SEQ ID NO: 3212986 - RNA, 19 nt, Artificial Sequence
  Description of Artificial Sequence: Synthetic oligonucleotide
uugucaaagaccaggcucu

SEQ ID NO: 3212987 - RNA, 19 nt, Artificial Sequence
  Description of Artificial Sequence: Synthetic oligonucleotide
uugcucuuguaauugauga

SEQ ID NO: 3212988 - RNA, 19 nt, Artificial Sequence
  Description of Artificial Sequence: Synthetic oligonucleotide
gauggugcgagcaauggag

SEQ ID NO: 3212989 - RNA, 19 nt, Artificial Sequence
  Description of Artificial Sequence: Synthetic oligonucleotide
gguaauauaauucuugucu

SEQ ID NO: 3212990 - RNA, 19 nt, Artificial Sequence
  Description of Artificial Sequence: Synthetic oligonucleotide
ucaaagaccaggcucuccu

SEQ ID NO: 3212991 - RNA, 19 nt, Artificial Sequence
  Description of Artificial Sequence: Synthetic oligonucleotide
gaggcuacaacuuguucag

SEQ ID NO: 3212992 - RNA, 19 nt, Artificial Sequence
  Description of Artificial Sequence: Synthetic oligonucleotide
guaauauaauucuugucuc

SEQ ID NO: 3212993 - RNA, 19 nt, Artificial Sequence
  Description of Artificial Sequence: Synthetic oligonucleotide
agcucugaagucaucaggc

SEQ ID NO: 3212994 - RNA, 19 nt, Artificial Sequence
  Description of Artificial Sequence: Synthetic oligonucleotide
gaugauguucuguuccugc

SEQ ID NO: 3212995 - RNA, 19 nt, Artificial Sequence
  Description of Artificial Sequence: Synthetic oligonucleotide
uuuugaaggaggcuacaac

SEQ ID NO: 3212996 - RNA, 19 nt, Artificial Sequence
  Description of Artificial Sequence: Synthetic oligonucleotide
ucauaacccauggagauga

SEQ ID NO: 3212997 - RNA, 19 nt, Artificial Sequence
  Description of Artificial Sequence: Synthetic oligonucleotide
gauguucuguuccugcugc

SEQ ID NO: 3212998 - RNA, 19 nt, Artificial Sequence
  Description of Artificial Sequence: Synthetic oligonucleotide
gaugaggcaagcucugaag

SEQ ID NO: 3212999 - RNA, 19 nt, Artificial Sequence
  Description of Artificial Sequence: Synthetic oligonucleotide
cuuggaaagucacaacccc

SEQ ID NO: 3213000 - RNA, 19 nt, Artificial Sequence
  Description of Artificial Sequence: Synthetic oligonucleotide
agcaauggaggugagcagc

SEQ ID NO: 3213001 - RNA, 19 nt, Artificial Sequence
  Description of Artificial Sequence: Synthetic oligonucleotide
cuuguaauugaugauguuc

SEQ ID NO: 3213002 - RNA, 19 nt, Artificial Sequence
  Description of Artificial Sequence: Synthetic oligonucleotide
ucuccugccagaauuuuga

SEQ ID NO: 3213003 - RNA, 19 nt, Artificial Sequence
  Description of Artificial Sequence: Synthetic oligonucleotide
uuguugucaaagaccaggc

SEQ ID NO: 3213004 - RNA, 19 nt, Artificial Sequence
  Description of Artificial Sequence: Synthetic oligonucleotide
ugaaggaggcuacaacuug

SEQ ID NO: 3213005 - RNA, 19 nt, Artificial Sequence
  Description of Artificial Sequence: Synthetic oligonucleotide
guugucaaagaccaggcuc

SEQ ID NO: 3213006 - RNA, 19 nt, Artificial Sequence
  Description of Artificial Sequence: Synthetic oligonucleotide
uggagaugaggcaagcucu

SEQ ID NO: 3213007 - RNA, 19 nt, Artificial Sequence
  Description of Artificial Sequence: Synthetic oligonucleotide
uaauugaugauguucuguu

SEQ ID NO: 3213008 - RNA, 19 nt, Artificial Sequence
  Description of Artificial Sequence: Synthetic oligonucleotide
ucucgagucaugaagucaa

SEQ ID NO: 3213009 - RNA, 19 nt, Artificial Sequence
  Description of Artificial Sequence: Synthetic oligonucleotide
uccgggguaauauaauucu

SEQ ID NO: 3213010 - RNA, 19 nt, Artificial Sequence
  Description of Artificial Sequence: Synthetic oligonucleotide
agaauuuugaaggaggcua

SEQ ID NO: 3213011 - RNA, 19 nt, Artificial Sequence
  Description of Artificial Sequence: Synthetic oligonucleotide
uagaccugccaucugcucc

SEQ ID NO: 3213012 - RNA, 19 nt, Artificial Sequence
  Description of Artificial Sequence: Synthetic oligonucleotide
uccaucaucccauuucgcu

SEQ ID NO: 3213013 - RNA, 19 nt, Artificial Sequence
  Description of Artificial Sequence: Synthetic oligonucleotide
gaagucaucaggcuccauc

SEQ ID NO: 3213014 - RNA, 19 nt, Artificial Sequence
  Description of Artificial Sequence: Synthetic oligonucleotide
ugucucagcagucucucga

SEQ ID NO: 3213015 - RNA, 19 nt, Artificial Sequence
  Description of Artificial Sequence: Synthetic oligonucleotide
guuaggguccaccauaguc

SEQ ID NO: 3213016 - RNA, 19 nt, Artificial Sequence
  Description of Artificial Sequence: Synthetic oligonucleotide
uuggaaagucacaacccca

SEQ ID NO: 3213017 - RNA, 19 nt, Artificial Sequence
  Description of Artificial Sequence: Synthetic oligonucleotide
uguaauugaugauguucug

SEQ ID NO: 3213018 - RNA, 19 nt, Artificial Sequence
  Description of Artificial Sequence: Synthetic oligonucleotide
agucaugaagucaaugaag

SEQ ID NO: 3213019 - RNA, 19 nt, Artificial Sequence
  Description of Artificial Sequence: Synthetic oligonucleotide
auagucaugauucgagcaa

SEQ ID NO: 3213020 - RNA, 19 nt, Artificial Sequence
  Description of Artificial Sequence: Synthetic oligonucleotide
auauaauucuugucuccug

SEQ ID NO: 3213021 - RNA, 19 nt, Artificial Sequence
  Description of Artificial Sequence: Synthetic oligonucleotide
aaggcuuggaaagucacaa

SEQ ID NO: 3213022 - RNA, 19 nt, Artificial Sequence
  Description of Artificial Sequence: Synthetic oligonucleotide
ugauguucuguuccugcug

SEQ ID NO: 3213023 - RNA, 19 nt, Artificial Sequence
  Description of Artificial Sequence: Synthetic oligonucleotide
ugcuccuccagagagccgg

SEQ ID NO: 3213024 - RNA, 19 nt, Artificial Sequence
  Description of Artificial Sequence: Synthetic oligonucleotide
ucagcagucucucgaguca

SEQ ID NO: 3213025 - RNA, 19 nt, Artificial Sequence
  Description of Artificial Sequence: Synthetic oligonucleotide
agcugugucugucucagca

SEQ ID NO: 3213026 - RNA, 19 nt, Artificial Sequence
  Description of Artificial Sequence: Synthetic oligonucleotide
ggcuuggaaagucacaacc

SEQ ID NO: 3213027 - RNA, 19 nt, Artificial Sequence
  Description of Artificial Sequence: Synthetic oligonucleotide
uacaacuuguucagcugug

SEQ ID NO: 3213028 - RNA, 19 nt, Artificial Sequence
  Description of Artificial Sequence: Synthetic oligonucleotide
augaggcaagcucugaagu

SEQ ID NO: 3213029 - RNA, 19 nt, Artificial Sequence
  Description of Artificial Sequence: Synthetic oligonucleotide
uccugccagaauuuugaag

SEQ ID NO: 3213030 - RNA, 19 nt, Artificial Sequence
  Description of Artificial Sequence: Synthetic oligonucleotide
uuccgggguaauauaauuc

SEQ ID NO: 3213031 - RNA, 19 nt, Artificial Sequence
  Description of Artificial Sequence: Synthetic oligonucleotide
aaccccagcugcguuaggg

SEQ ID NO: 3213032 - RNA, 19 nt, Artificial Sequence
  Description of Artificial Sequence: Synthetic oligonucleotide
agcugcuccuggcucaggc

SEQ ID NO: 3213033 - RNA, 19 nt, Artificial Sequence
  Description of Artificial Sequence: Synthetic oligonucleotide
acuuguucagcugugucug

SEQ ID NO: 3213034 - RNA, 19 nt, Artificial Sequence
  Description of Artificial Sequence: Synthetic oligonucleotide
gucaauguugcucuuguaa

SEQ ID NO: 3213035 - RNA, 19 nt, Artificial Sequence
  Description of Artificial Sequence: Synthetic oligonucleotide
ucagcugugucugucucag

SEQ ID NO: 3213036 - RNA, 19 nt, Artificial Sequence
  Description of Artificial Sequence: Synthetic oligonucleotide
ucugcuccuccagagagcc

SEQ ID NO: 3213037 - RNA, 19 nt, Artificial Sequence
  Description of Artificial Sequence: Synthetic oligonucleotide
caucugcuccuccagagag

SEQ ID NO: 3213038 - RNA, 19 nt, Artificial Sequence
  Description of Artificial Sequence: Synthetic oligonucleotide
uguucuguuccugcugccg

SEQ ID NO: 3213039 - RNA, 19 nt, Artificial Sequence
  Description of Artificial Sequence: Synthetic oligonucleotide
guggucacccuccagccgg

SEQ ID NO: 3213040 - RNA, 19 nt, Artificial Sequence
  Description of Artificial Sequence: Synthetic oligonucleotide
agagccggccaacccagcc

SEQ ID NO: 3213041 - RNA, 19 nt, Artificial Sequence
  Description of Artificial Sequence: Synthetic oligonucleotide
acagcugguggucacccuc

SEQ ID NO: 3213042 - RNA, 19 nt, Artificial Sequence
  Description of Artificial Sequence: Synthetic oligonucleotide
gaauuuugaaggaggcuac

SEQ ID NO: 3213043 - RNA, 19 nt, Artificial Sequence
  Description of Artificial Sequence: Synthetic oligonucleotide
cauagucaugauucgagca

SEQ ID NO: 3213044 - RNA, 19 nt, Artificial Sequence
  Description of Artificial Sequence: Synthetic oligonucleotide
uguugucaaagaccaggcu

SEQ ID NO: 3213045 - RNA, 19 nt, Artificial Sequence
  Description of Artificial Sequence: Synthetic oligonucleotide
ucaggcuccaucaucccau

SEQ ID NO: 3213046 - RNA, 19 nt, Artificial Sequence
  Description of Artificial Sequence: Synthetic oligonucleotide
caauaccugguucucuacc

SEQ ID NO: 3213047 - RNA, 19 nt, Artificial Sequence
  Description of Artificial Sequence: Synthetic oligonucleotide
gagucaugaagucaaugaa

SEQ ID NO: 3213048 - RNA, 19 nt, Artificial Sequence
  Description of Artificial Sequence: Synthetic oligonucleotide
uugaaggaggcuacaacuu

SEQ ID NO: 3213049 - RNA, 19 nt, Artificial Sequence
  Description of Artificial Sequence: Synthetic oligonucleotide
aacccauggagaugaggca

SEQ ID NO: 3213050 - RNA, 19 nt, Artificial Sequence
  Description of Artificial Sequence: Synthetic oligonucleotide
gaaggaugcccggaacucg

SEQ ID NO: 3213051 - RNA, 19 nt, Artificial Sequence
  Description of Artificial Sequence: Synthetic oligonucleotide
aucucgggucaauaccugg

SEQ ID NO: 3213052 - RNA, 19 nt, Artificial Sequence
  Description of Artificial Sequence: Synthetic oligonucleotide
ggaggcuacaacuuguuca

SEQ ID NO: 3213053 - RNA, 19 nt, Artificial Sequence
  Description of Artificial Sequence: Synthetic oligonucleotide
auaccugguucucuaccuc

SEQ ID NO: 3213054 - RNA, 19 nt, Artificial Sequence
  Description of Artificial Sequence: Synthetic oligonucleotide
ugauggugcgagcaaugga

SEQ ID NO: 3213055 - RNA, 19 nt, Artificial Sequence
  Description of Artificial Sequence: Synthetic oligonucleotide
ugcguuaggguccaccaua

SEQ ID NO: 3213056 - RNA, 19 nt, Artificial Sequence
  Description of Artificial Sequence: Synthetic oligonucleotide
aauuuugaaggaggcuaca

SEQ ID NO: 3213057 - RNA, 19 nt, Artificial Sequence
  Description of Artificial Sequence: Synthetic oligonucleotide
auucgagcaaacuccacuu

SEQ ID NO: 3213058 - RNA, 19 nt, Artificial Sequence
  Description of Artificial Sequence: Synthetic oligonucleotide
aaagccauaaaacagaggg

SEQ ID NO: 3213059 - RNA, 19 nt, Artificial Sequence
  Description of Artificial Sequence: Synthetic oligonucleotide
aaauaggcuaugcagauag

SEQ ID NO: 3213060 - RNA, 19 nt, Artificial Sequence
  Description of Artificial Sequence: Synthetic oligonucleotide
uuagaaaacaucuacaguc

SEQ ID NO: 3213061 - RNA, 19 nt, Artificial Sequence
  Description of Artificial Sequence: Synthetic oligonucleotide
aguuuuagaaaacaucuac

SEQ ID NO: 3213062 - RNA, 19 nt, Artificial Sequence
  Description of Artificial Sequence: Synthetic oligonucleotide
uuuuagaaaacaucuacag

SEQ ID NO: 3213063 - RNA, 19 nt, Artificial Sequence
  Description of Artificial Sequence: Synthetic oligonucleotide
guuaaaauaggcuaugcag

SEQ ID NO: 3213064 - RNA, 19 nt, Artificial Sequence
  Description of Artificial Sequence: Synthetic oligonucleotide
uuaaaauaggcuaugcaga

SEQ ID NO: 3213065 - RNA, 19 nt, Artificial Sequence
  Description of Artificial Sequence: Synthetic oligonucleotide
aaccaggagacucuggacc

SEQ ID NO: 3213066 - RNA, 19 nt, Artificial Sequence
  Description of Artificial Sequence: Synthetic oligonucleotide
aaagcuuugucucagaguu

SEQ ID NO: 3213067 - RNA, 19 nt, Artificial Sequence
  Description of Artificial Sequence: Synthetic oligonucleotide
aaacagaggguucaggcag

SEQ ID NO: 3213068 - RNA, 19 nt, Artificial Sequence
  Description of Artificial Sequence: Synthetic oligonucleotide
uccaccucaaaacaagacg

SEQ ID NO: 3213069 - RNA, 19 nt, Artificial Sequence
  Description of Artificial Sequence: Synthetic oligonucleotide
aauguauuucagaagcugg

SEQ ID NO: 3213070 - RNA, 19 nt, Artificial Sequence
  Description of Artificial Sequence: Synthetic oligonucleotide
uaaaacagaggguucaggc

SEQ ID NO: 3213071 - RNA, 19 nt, Artificial Sequence
  Description of Artificial Sequence: Synthetic oligonucleotide
gaaaauauuucuuaaauuu

SEQ ID NO: 3213072 - RNA, 19 nt, Artificial Sequence
  Description of Artificial Sequence: Synthetic oligonucleotide
ugcucauuuucguagacag

SEQ ID NO: 3213073 - RNA, 19 nt, Artificial Sequence
  Description of Artificial Sequence: Synthetic oligonucleotide
auugaaugcauuuucugcu

SEQ ID NO: 3213074 - RNA, 19 nt, Artificial Sequence
  Description of Artificial Sequence: Synthetic oligonucleotide
ucauguuaucggaagggcg

SEQ ID NO: 3213075 - RNA, 19 nt, Artificial Sequence
  Description of Artificial Sequence: Synthetic oligonucleotide
ucuacaguccauugaaugc

SEQ ID NO: 3213076 - RNA, 19 nt, Artificial Sequence
  Description of Artificial Sequence: Synthetic oligonucleotide
uguuaaaauaggcuaugca

SEQ ID NO: 3213077 - RNA, 19 nt, Artificial Sequence
  Description of Artificial Sequence: Synthetic oligonucleotide
uuuagaaaacaucuacagu

SEQ ID NO: 3213078 - RNA, 19 nt, Artificial Sequence
  Description of Artificial Sequence: Synthetic oligonucleotide
cauugaaugcauuuucugc

SEQ ID NO: 3213079 - RNA, 19 nt, Artificial Sequence
  Description of Artificial Sequence: Synthetic oligonucleotide
uagaaaacaucuacagucc

SEQ ID NO: 3213080 - RNA, 19 nt, Artificial Sequence
  Description of Artificial Sequence: Synthetic oligonucleotide
cauguuaucggaagggcgg

SEQ ID NO: 3213081 - RNA, 19 nt, Artificial Sequence
  Description of Artificial Sequence: Synthetic oligonucleotide
agaguuuuagaaaacaucu

SEQ ID NO: 3213082 - RNA, 19 nt, Artificial Sequence
  Description of Artificial Sequence: Synthetic oligonucleotide
gugaauguuccuuugguag

SEQ ID NO: 3213083 - RNA, 19 nt, Artificial Sequence
  Description of Artificial Sequence: Synthetic oligonucleotide
ucguagacaggcuugagug

SEQ ID NO: 3213084 - RNA, 19 nt, Artificial Sequence
  Description of Artificial Sequence: Synthetic oligonucleotide
cucauuuucguagacaggc

SEQ ID NO: 3213085 - RNA, 19 nt, Artificial Sequence
  Description of Artificial Sequence: Synthetic oligonucleotide
uauuucagaagcuggagaa

SEQ ID NO: 3213086 - RNA, 19 nt, Artificial Sequence
  Description of Artificial Sequence: Synthetic oligonucleotide
aaaacagaggguucaggca

SEQ ID NO: 3213087 - RNA, 19 nt, Artificial Sequence
  Description of Artificial Sequence: Synthetic oligonucleotide
gaaagagugcucauuuucg

SEQ ID NO: 3213088 - RNA, 19 nt, Artificial Sequence
  Description of Artificial Sequence: Synthetic oligonucleotide
aaugcauuuucugcuuagc

SEQ ID NO: 3213089 - RNA, 19 nt, Artificial Sequence
  Description of Artificial Sequence: Synthetic oligonucleotide
caggcaguuguuaaaauag

SEQ ID NO: 3213090 - RNA, 19 nt, Artificial Sequence
  Description of Artificial Sequence: Synthetic oligonucleotide
cucaaaacaagacgcaggc

SEQ ID NO: 3213091 - RNA, 19 nt, Artificial Sequence
  Description of Artificial Sequence: Synthetic oligonucleotide
gaugagcucauguuaucgg

SEQ ID NO: 3213092 - RNA, 19 nt, Artificial Sequence
  Description of Artificial Sequence: Synthetic oligonucleotide
agagugcucauuuucguag

SEQ ID NO: 3213093 - RNA, 19 nt, Artificial Sequence
  Description of Artificial Sequence: Synthetic oligonucleotide
gggaauguauuucagaagc

SEQ ID NO: 3213094 - RNA, 19 nt, Artificial Sequence
  Description of Artificial Sequence: Synthetic oligonucleotide
ugggacuuggccuuugggg

SEQ ID NO: 3213095 - RNA, 19 nt, Artificial Sequence
  Description of Artificial Sequence: Synthetic oligonucleotide
ucaaagcuuugucucagag

SEQ ID NO: 3213096 - RNA, 19 nt, Artificial Sequence
  Description of Artificial Sequence: Synthetic oligonucleotide
acugcuugaaccaggagac

SEQ ID NO: 3213097 - RNA, 19 nt, Artificial Sequence
  Description of Artificial Sequence: Synthetic oligonucleotide
ucugucagggcacugcuug

SEQ ID NO: 3213098 - RNA, 19 nt, Artificial Sequence
  Description of Artificial Sequence: Synthetic oligonucleotide
aacaucuacaguccauuga

SEQ ID NO: 3213099 - RNA, 19 nt, Artificial Sequence
  Description of Artificial Sequence: Synthetic oligonucleotide
uagugugccgucuagucag

SEQ ID NO: 3213100 - RNA, 19 nt, Artificial Sequence
  Description of Artificial Sequence: Synthetic oligonucleotide
aucuacaguccauugaaug

SEQ ID NO: 3213101 - RNA, 19 nt, Artificial Sequence
  Description of Artificial Sequence: Synthetic oligonucleotide
ugaaccaggagacucugga

SEQ ID NO: 3213102 - RNA, 19 nt, Artificial Sequence
  Description of Artificial Sequence: Synthetic oligonucleotide
agaaaauauuucuuaaauu

SEQ ID NO: 3213103 - RNA, 19 nt, Artificial Sequence
  Description of Artificial Sequence: Synthetic oligonucleotide
uaugcagauagugaugggc

SEQ ID NO: 3213104 - RNA, 19 nt, Artificial Sequence
  Description of Artificial Sequence: Synthetic oligonucleotide
uucugcuuagcuccuaggc

SEQ ID NO: 3213105 - RNA, 19 nt, Artificial Sequence
  Description of Artificial Sequence: Synthetic oligonucleotide
aaagagugcucauuuucgu

SEQ ID NO: 3213106 - RNA, 19 nt, Artificial Sequence
  Description of Artificial Sequence: Synthetic oligonucleotide
aaaauauuucuuaaauuuu

SEQ ID NO: 3213107 - RNA, 19 nt, Artificial Sequence
  Description of Artificial Sequence: Synthetic oligonucleotide
uaaaauaggcuaugcagau

SEQ ID NO: 3213108 - RNA, 19 nt, Artificial Sequence
  Description of Artificial Sequence: Synthetic oligonucleotide
aaacaucuacaguccauug

SEQ ID NO: 3213109 - RNA, 19 nt, Artificial Sequence
  Description of Artificial Sequence: Synthetic oligonucleotide
gaauguauuucagaagcug

SEQ ID NO: 3213110 - RNA, 19 nt, Artificial Sequence
  Description of Artificial Sequence: Synthetic oligonucleotide
ugucacuccaccucaaaac

SEQ ID NO: 3213111 - RNA, 19 nt, Artificial Sequence
  Description of Artificial Sequence: Synthetic oligonucleotide
ucugcuuagcuccuaggca

SEQ ID NO: 3213112 - RNA, 19 nt, Artificial Sequence
  Description of Artificial Sequence: Synthetic oligonucleotide
uaggcuaugcagauaguga

SEQ ID NO: 3213113 - RNA, 19 nt, Artificial Sequence
  Description of Artificial Sequence: Synthetic oligonucleotide
uuuucugcuuagcuccuag

SEQ ID NO: 3213114 - RNA, 19 nt, Artificial Sequence
  Description of Artificial Sequence: Synthetic oligonucleotide
ucagaguuuuagaaaacau

SEQ ID NO: 3213115 - RNA, 19 nt, Artificial Sequence
  Description of Artificial Sequence: Synthetic oligonucleotide
cagaguuuuagaaaacauc

SEQ ID NO: 3213116 - RNA, 19 nt, Artificial Sequence
  Description of Artificial Sequence: Synthetic oligonucleotide
uugucucagaguuuuagaa

SEQ ID NO: 3213117 - RNA, 19 nt, Artificial Sequence
  Description of Artificial Sequence: Synthetic oligonucleotide
agaggguucaggcaguugu

SEQ ID NO: 3213118 - RNA, 19 nt, Artificial Sequence
  Description of Artificial Sequence: Synthetic oligonucleotide
agcuggagaaaauauuucu

SEQ ID NO: 3213119 - RNA, 19 nt, Artificial Sequence
  Description of Artificial Sequence: Synthetic oligonucleotide
uguauuucagaagcuggag

SEQ ID NO: 3213120 - RNA, 19 nt, Artificial Sequence
  Description of Artificial Sequence: Synthetic oligonucleotide
gcauuuucugcuuagcucc

SEQ ID NO: 3213121 - RNA, 19 nt, Artificial Sequence
  Description of Artificial Sequence: Synthetic oligonucleotide
uggagaaaauauuucuuaa

SEQ ID NO: 3213122 - RNA, 19 nt, Artificial Sequence
  Description of Artificial Sequence: Synthetic oligonucleotide
acaucuacaguccauugaa

SEQ ID NO: 3213123 - RNA, 19 nt, Artificial Sequence
  Description of Artificial Sequence: Synthetic oligonucleotide
uccauugaaugcauuuucu

SEQ ID NO: 3213124 - RNA, 19 nt, Artificial Sequence
  Description of Artificial Sequence: Synthetic oligonucleotide
gugccgucuagucagaugc

SEQ ID NO: 3213125 - RNA, 19 nt, Artificial Sequence
  Description of Artificial Sequence: Synthetic oligonucleotide
uguuccuuugguagugugc

SEQ ID NO: 3213126 - RNA, 19 nt, Artificial Sequence
  Description of Artificial Sequence: Synthetic oligonucleotide
ugcauuuucugcuuagcuc

SEQ ID NO: 3213127 - RNA, 19 nt, Artificial Sequence
  Description of Artificial Sequence: Synthetic oligonucleotide
gagaaaauauuucuuaaau

SEQ ID NO: 3213128 - RNA, 19 nt, Artificial Sequence
  Description of Artificial Sequence: Synthetic oligonucleotide
uuugucucagaguuuuaga

SEQ ID NO: 3213129 - RNA, 19 nt, Artificial Sequence
  Description of Artificial Sequence: Synthetic oligonucleotide
ucuagucagaugcugcccu

SEQ ID NO: 3213130 - RNA, 19 nt, Artificial Sequence
  Description of Artificial Sequence: Synthetic oligonucleotide
uccccagaaagccauaaaa

SEQ ID NO: 3213131 - RNA, 19 nt, Artificial Sequence
  Description of Artificial Sequence: Synthetic oligonucleotide
cugcuuagcuccuaggcag

SEQ ID NO: 3213132 - RNA, 19 nt, Artificial Sequence
  Description of Artificial Sequence: Synthetic oligonucleotide
gaaugcauuuucugcuuag

SEQ ID NO: 3213133 - RNA, 19 nt, Artificial Sequence
  Description of Artificial Sequence: Synthetic oligonucleotide
uuagcuccuaggcaggggu

SEQ ID NO: 3213134 - RNA, 19 nt, Artificial Sequence
  Description of Artificial Sequence: Synthetic oligonucleotide
ugaauguuccuuugguagu

SEQ ID NO: 3213135 - RNA, 19 nt, Artificial Sequence
  Description of Artificial Sequence: Synthetic oligonucleotide
aaaacaucuacaguccauu

SEQ ID NO: 3213136 - RNA, 19 nt, Artificial Sequence
  Description of Artificial Sequence: Synthetic oligonucleotide
aagcuggagaaaauauuuc

SEQ ID NO: 3213137 - RNA, 19 nt, Artificial Sequence
  Description of Artificial Sequence: Synthetic oligonucleotide
uaggaaagagugcucauuu

SEQ ID NO: 3213138 - RNA, 19 nt, Artificial Sequence
  Description of Artificial Sequence: Synthetic oligonucleotide
guagacaggcuugaguggg

SEQ ID NO: 3213139 - RNA, 19 nt, Artificial Sequence
  Description of Artificial Sequence: Synthetic oligonucleotide
uucguagacaggcuugagu

SEQ ID NO: 3213140 - RNA, 19 nt, Artificial Sequence
  Description of Artificial Sequence: Synthetic oligonucleotide
agcucauguuaucggaagg

SEQ ID NO: 3213141 - RNA, 19 nt, Artificial Sequence
  Description of Artificial Sequence: Synthetic oligonucleotide
ucagggcacugcuugaacc

SEQ ID NO: 3213142 - RNA, 19 nt, Artificial Sequence
  Description of Artificial Sequence: Synthetic oligonucleotide
ugucucagaguuuuagaaa

SEQ ID NO: 3213143 - RNA, 19 nt, Artificial Sequence
  Description of Artificial Sequence: Synthetic oligonucleotide
ccagaaagccauaaaacag

SEQ ID NO: 3213144 - RNA, 19 nt, Artificial Sequence
  Description of Artificial Sequence: Synthetic oligonucleotide
auaaaacagaggguucagg

SEQ ID NO: 3213145 - RNA, 19 nt, Artificial Sequence
  Description of Artificial Sequence: Synthetic oligonucleotide
uuucagaagcuggagaaaa

SEQ ID NO: 3213146 - RNA, 19 nt, Artificial Sequence
  Description of Artificial Sequence: Synthetic oligonucleotide
auaggcuaugcagauagug

SEQ ID NO: 3213147 - RNA, 19 nt, Artificial Sequence
  Description of Artificial Sequence: Synthetic oligonucleotide
uuaucggaagggcgguagg

SEQ ID NO: 3213148 - RNA, 19 nt, Artificial Sequence
  Description of Artificial Sequence: Synthetic oligonucleotide
agaaaacaucuacagucca

SEQ ID NO: 3213149 - RNA, 19 nt, Artificial Sequence
  Description of Artificial Sequence: Synthetic oligonucleotide
gagcucauguuaucggaag

SEQ ID NO: 3213150 - RNA, 19 nt, Artificial Sequence
  Description of Artificial Sequence: Synthetic oligonucleotide
agugcucauuuucguagac

SEQ ID NO: 3213151 - RNA, 19 nt, Artificial Sequence
  Description of Artificial Sequence: Synthetic oligonucleotide
gucucagaguuuuagaaaa

SEQ ID NO: 3213152 - RNA, 19 nt, Artificial Sequence
  Description of Artificial Sequence: Synthetic oligonucleotide
uuguuaaaauaggcuaugc

SEQ ID NO: 3213153 - RNA, 19 nt, Artificial Sequence
  Description of Artificial Sequence: Synthetic oligonucleotide
guuuuagaaaacaucuaca

SEQ ID NO: 3213154 - RNA, 19 nt, Artificial Sequence
  Description of Artificial Sequence: Synthetic oligonucleotide
cagaaagccauaaaacaga

SEQ ID NO: 3213155 - RNA, 19 nt, Artificial Sequence
  Description of Artificial Sequence: Synthetic oligonucleotide
guuccuuugguagugugcc

SEQ ID NO: 3213156 - RNA, 19 nt, Artificial Sequence
  Description of Artificial Sequence: Synthetic oligonucleotide
agaaagccauaaaacagag

SEQ ID NO: 3213157 - RNA, 19 nt, Artificial Sequence
  Description of Artificial Sequence: Synthetic oligonucleotide
ucaggcaguuguuaaaaua

SEQ ID NO: 3213158 - RNA, 19 nt, Artificial Sequence
  Description of Artificial Sequence: Synthetic oligonucleotide
ucuaguucuaccuuguuca

SEQ ID NO: 3213159 - RNA, 19 nt, Artificial Sequence
  Description of Artificial Sequence: Synthetic oligonucleotide
ucuaccuuguucauguagg

SEQ ID NO: 3213160 - RNA, 19 nt, Artificial Sequence
  Description of Artificial Sequence: Synthetic oligonucleotide
aucuucaugaaguugaucu

SEQ ID NO: 3213161 - RNA, 19 nt, Artificial Sequence
  Description of Artificial Sequence: Synthetic oligonucleotide
gaugaugcuguccaggucc

SEQ ID NO: 3213162 - RNA, 19 nt, Artificial Sequence
  Description of Artificial Sequence: Synthetic oligonucleotide
aagaacaucuucaugaagu

SEQ ID NO: 3213163 - RNA, 19 nt, Artificial Sequence
  Description of Artificial Sequence: Synthetic oligonucleotide
uugaccucagcgaugaugc

SEQ ID NO: 3213164 - RNA, 19 nt, Artificial Sequence
  Description of Artificial Sequence: Synthetic oligonucleotide
guaggcagcauccacaucc

SEQ ID NO: 3213165 - RNA, 19 nt, Artificial Sequence
  Description of Artificial Sequence: Synthetic oligonucleotide
acgcuuguugaucucaucc

SEQ ID NO: 3213166 - RNA, 19 nt, Artificial Sequence
  Description of Artificial Sequence: Synthetic oligonucleotide
aucacaaacucauucucgg

SEQ ID NO: 3213167 - RNA, 19 nt, Artificial Sequence
  Description of Artificial Sequence: Synthetic oligonucleotide
agagcaucaaccuuggccu

SEQ ID NO: 3213168 - RNA, 19 nt, Artificial Sequence
  Description of Artificial Sequence: Synthetic oligonucleotide
uugaucucguccaucagag

SEQ ID NO: 3213169 - RNA, 19 nt, Artificial Sequence
  Description of Artificial Sequence: Synthetic oligonucleotide
aacaucuucaugaaguuga

SEQ ID NO: 3213170 - RNA, 19 nt, Artificial Sequence
  Description of Artificial Sequence: Synthetic oligonucleotide
aaagaacaucuucaugaag

SEQ ID NO: 3213171 - RNA, 19 nt, Artificial Sequence
  Description of Artificial Sequence: Synthetic oligonucleotide
uucagcaucacaaacucau

SEQ ID NO: 3213172 - RNA, 19 nt, Artificial Sequence
  Description of Artificial Sequence: Synthetic oligonucleotide
auguccucaguacugggcc

SEQ ID NO: 3213173 - RNA, 19 nt, Artificial Sequence
  Description of Artificial Sequence: Synthetic oligonucleotide
aguucuaccuuguucaugu

SEQ ID NO: 3213174 - RNA, 19 nt, Artificial Sequence
  Description of Artificial Sequence: Synthetic oligonucleotide
accuuguucauguaggcag

SEQ ID NO: 3213175 - RNA, 19 nt, Artificial Sequence
  Description of Artificial Sequence: Synthetic oligonucleotide
ucagcgaugaugcugucca

SEQ ID NO: 3213176 - RNA, 19 nt, Artificial Sequence
  Description of Artificial Sequence: Synthetic oligonucleotide
caugaaguugaucucgucc

SEQ ID NO: 3213177 - RNA, 19 nt, Artificial Sequence
  Description of Artificial Sequence: Synthetic oligonucleotide
aaguugaucucguccauca

SEQ ID NO: 3213178 - RNA, 19 nt, Artificial Sequence
  Description of Artificial Sequence: Synthetic oligonucleotide
aauguccucaguacugggc

SEQ ID NO: 3213179 - RNA, 19 nt, Artificial Sequence
  Description of Artificial Sequence: Synthetic oligonucleotide
ucugggacagcucccaaag

SEQ ID NO: 3213180 - RNA, 19 nt, Artificial Sequence
  Description of Artificial Sequence: Synthetic oligonucleotide
cagagcaucaaccuuggcc

SEQ ID NO: 3213181 - RNA, 19 nt, Artificial Sequence
  Description of Artificial Sequence: Synthetic oligonucleotide
uccuucuucagcaucacaa

SEQ ID NO: 3213182 - RNA, 19 nt, Artificial Sequence
  Description of Artificial Sequence: Synthetic oligonucleotide
uucuucagcaucacaaacu

SEQ ID NO: 3213183 - RNA, 19 nt, Artificial Sequence
  Description of Artificial Sequence: Synthetic oligonucleotide
ucguacuuguucuugaagu

SEQ ID NO: 3213184 - RNA, 19 nt, Artificial Sequence
  Description of Artificial Sequence: Synthetic oligonucleotide
uccacauccuucuucagca

SEQ ID NO: 3213185 - RNA, 19 nt, Artificial Sequence
  Description of Artificial Sequence: Synthetic oligonucleotide
auccacauccuucuucagc

SEQ ID NO: 3213186 - RNA, 19 nt, Artificial Sequence
  Description of Artificial Sequence: Synthetic oligonucleotide
ucuucagcaucacaaacuc

SEQ ID NO: 3213187 - RNA, 19 nt, Artificial Sequence
  Description of Artificial Sequence: Synthetic oligonucleotide
cuuguugaucucauccucg

SEQ ID NO: 3213188 - RNA, 19 nt, Artificial Sequence
  Description of Artificial Sequence: Synthetic oligonucleotide
caucacaaacucauucucg

SEQ ID NO: 3213189 - RNA, 19 nt, Artificial Sequence
  Description of Artificial Sequence: Synthetic oligonucleotide
uucuaccuuguucauguag

SEQ ID NO: 3213190 - RNA, 19 nt, Artificial Sequence
  Description of Artificial Sequence: Synthetic oligonucleotide
gaucucguccaucagagca

SEQ ID NO: 3213191 - RNA, 19 nt, Artificial Sequence
  Description of Artificial Sequence: Synthetic oligonucleotide
augaaguugaucucgucca

SEQ ID NO: 3213192 - RNA, 19 nt, Artificial Sequence
  Description of Artificial Sequence: Synthetic oligonucleotide
caucagagcaucaaccuug

SEQ ID NO: 3213193 - RNA, 19 nt, Artificial Sequence
  Description of Artificial Sequence: Synthetic oligonucleotide
guugaucucauccucguac

SEQ ID NO: 3213194 - RNA, 19 nt, Artificial Sequence
  Description of Artificial Sequence: Synthetic oligonucleotide
cuucaugaaguugaucucg

SEQ ID NO: 3213195 - RNA, 19 nt, Artificial Sequence
  Description of Artificial Sequence: Synthetic oligonucleotide
aaccuuggccucuaguucu

SEQ ID NO: 3213196 - RNA, 19 nt, Artificial Sequence
  Description of Artificial Sequence: Synthetic oligonucleotide
acaaacucauucucggcag

SEQ ID NO: 3213197 - RNA, 19 nt, Artificial Sequence
  Description of Artificial Sequence: Synthetic oligonucleotide
uccauggagaggaccacgg

SEQ ID NO: 3213198 - RNA, 19 nt, Artificial Sequence
  Description of Artificial Sequence: Synthetic oligonucleotide
uuguuguccauggagagga

SEQ ID NO: 3213199 - RNA, 19 nt, Artificial Sequence
  Description of Artificial Sequence: Synthetic oligonucleotide
ugugucugagacaucgugu

SEQ ID NO: 3213200 - RNA, 19 nt, Artificial Sequence
  Description of Artificial Sequence: Synthetic oligonucleotide
uuguccauggagaggacca

SEQ ID NO: 3213201 - RNA, 19 nt, Artificial Sequence
  Description of Artificial Sequence: Synthetic oligonucleotide
guugcuagcuccuccauac

SEQ ID NO: 3213202 - RNA, 19 nt, Artificial Sequence
  Description of Artificial Sequence: Synthetic oligonucleotide
ucugguaccaggacucagc

SEQ ID NO: 3213203 - RNA, 19 nt, Artificial Sequence
  Description of Artificial Sequence: Synthetic oligonucleotide
agcaucacaaacucauucu

SEQ ID NO: 3213204 - RNA, 19 nt, Artificial Sequence
  Description of Artificial Sequence: Synthetic oligonucleotide
uguucauguaggcagcauc

SEQ ID NO: 3213205 - RNA, 19 nt, Artificial Sequence
  Description of Artificial Sequence: Synthetic oligonucleotide
agcuccuccauacuugguc

SEQ ID NO: 3213206 - RNA, 19 nt, Artificial Sequence
  Description of Artificial Sequence: Synthetic oligonucleotide
ucauccucguacuuguucu

SEQ ID NO: 3213207 - RNA, 19 nt, Artificial Sequence
  Description of Artificial Sequence: Synthetic oligonucleotide
uacuuguucuugaaguccu

SEQ ID NO: 3213208 - RNA, 19 nt, Artificial Sequence
  Description of Artificial Sequence: Synthetic oligonucleotide
uccauacuuggucugguac

SEQ ID NO: 3213209 - RNA, 19 nt, Artificial Sequence
  Description of Artificial Sequence: Synthetic oligonucleotide
ucaguacugggccuugacc

SEQ ID NO: 3213210 - RNA, 19 nt, Artificial Sequence
  Description of Artificial Sequence: Synthetic oligonucleotide
uccaucagagcaucaaccu

SEQ ID NO: 3213211 - RNA, 19 nt, Artificial Sequence
  Description of Artificial Sequence: Synthetic oligonucleotide
uuggcaauguccucaguac

SEQ ID NO: 3213212 - RNA, 19 nt, Artificial Sequence
  Description of Artificial Sequence: Synthetic oligonucleotide
ccaaagaacaucuucauga

SEQ ID NO: 3213213 - RNA, 19 nt, Artificial Sequence
  Description of Artificial Sequence: Synthetic oligonucleotide
ucaaccuuggccucuaguu

SEQ ID NO: 3213214 - RNA, 19 nt, Artificial Sequence
  Description of Artificial Sequence: Synthetic oligonucleotide
uacuuggucugguaccagg

SEQ ID NO: 3213215 - RNA, 19 nt, Artificial Sequence
  Description of Artificial Sequence: Synthetic oligonucleotide
ugggacagcucccaaagaa

SEQ ID NO: 3213216 - RNA, 19 nt, Artificial Sequence
  Description of Artificial Sequence: Synthetic oligonucleotide
agcauccacauccuucuuc

SEQ ID NO: 3213217 - RNA, 19 nt, Artificial Sequence
  Description of Artificial Sequence: Synthetic oligonucleotide
aggucugcgguuguugucc

SEQ ID NO: 3213218 - RNA, 19 nt, Artificial Sequence
  Description of Artificial Sequence: Synthetic oligonucleotide
ggaugugucugagacaucg

SEQ ID NO: 3213219 - RNA, 19 nt, Artificial Sequence
  Description of Artificial Sequence: Synthetic oligonucleotide
cuagcuccuccauacuugg

SEQ ID NO: 3213220 - RNA, 19 nt, Artificial Sequence
  Description of Artificial Sequence: Synthetic oligonucleotide
aacucauucucggcagugg

SEQ ID NO: 3213221 - RNA, 19 nt, Artificial Sequence
  Description of Artificial Sequence: Synthetic oligonucleotide
caucgugucugcaucuggg

SEQ ID NO: 3213222 - RNA, 19 nt, Artificial Sequence
  Description of Artificial Sequence: Synthetic oligonucleotide
agugguacgcuuguugauc

SEQ ID NO: 3213223 - RNA, 19 nt, Artificial Sequence
  Description of Artificial Sequence: Synthetic oligonucleotide
uucaugaaguugaucucgu

SEQ ID NO: 3213224 - RNA, 19 nt, Artificial Sequence
  Description of Artificial Sequence: Synthetic oligonucleotide
uuggucugguaccaggacu

SEQ ID NO: 3213225 - RNA, 19 nt, Artificial Sequence
  Description of Artificial Sequence: Synthetic oligonucleotide
guucauguaggcagcaucc

SEQ ID NO: 3213226 - RNA, 19 nt, Artificial Sequence
  Description of Artificial Sequence: Synthetic oligonucleotide
ucuguugcuagcuccucca

SEQ ID NO: 3213227 - RNA, 19 nt, Artificial Sequence
  Description of Artificial Sequence: Synthetic oligonucleotide
aggacucagccucuguccg

SEQ ID NO: 3213228 - RNA, 19 nt, Artificial Sequence
  Description of Artificial Sequence: Synthetic oligonucleotide
uuggccucuaguucuaccu

SEQ ID NO: 3213229 - RNA, 19 nt, Artificial Sequence
  Description of Artificial Sequence: Synthetic oligonucleotide
ucauucucggcagugguac

SEQ ID NO: 3213230 - RNA, 19 nt, Artificial Sequence
  Description of Artificial Sequence: Synthetic oligonucleotide
augugucugagacaucgug

SEQ ID NO: 3213231 - RNA, 19 nt, Artificial Sequence
  Description of Artificial Sequence: Synthetic oligonucleotide
gguaccaggacucagccuc

SEQ ID NO: 3213232 - RNA, 19 nt, Artificial Sequence
  Description of Artificial Sequence: Synthetic oligonucleotide
ucauguaggcagcauccac

SEQ ID NO: 3213233 - RNA, 19 nt, Artificial Sequence
  Description of Artificial Sequence: Synthetic oligonucleotide
cuucuucagcaucacaaac

SEQ ID NO: 3213234 - RNA, 19 nt, Artificial Sequence
  Description of Artificial Sequence: Synthetic oligonucleotide
ucacaaacucauucucggc

SEQ ID NO: 3213235 - RNA, 19 nt, Artificial Sequence
  Description of Artificial Sequence: Synthetic oligonucleotide
ucuucaugaaguugaucuc

SEQ ID NO: 3213236 - RNA, 19 nt, Artificial Sequence
  Description of Artificial Sequence: Synthetic oligonucleotide
uuguucuugaaguccucca

SEQ ID NO: 3213237 - RNA, 19 nt, Artificial Sequence
  Description of Artificial Sequence: Synthetic oligonucleotide
uugaucucauccucguacu

SEQ ID NO: 3213238 - RNA, 19 nt, Artificial Sequence
  Description of Artificial Sequence: Synthetic oligonucleotide
auucucggcagugguacgc

SEQ ID NO: 3213239 - RNA, 19 nt, Artificial Sequence
  Description of Artificial Sequence: Synthetic oligonucleotide
uccagguccaggucugcgg

SEQ ID NO: 3213240 - RNA, 19 nt, Artificial Sequence
  Description of Artificial Sequence: Synthetic oligonucleotide
aguacugggccuugaccuc

SEQ ID NO: 3213241 - RNA, 19 nt, Artificial Sequence
  Description of Artificial Sequence: Synthetic oligonucleotide
aucucauccucguacuugu

SEQ ID NO: 3213242 - RNA, 19 nt, Artificial Sequence
  Description of Artificial Sequence: Synthetic oligonucleotide
gaugcuguccagguccagg

SEQ ID NO: 3213243 - RNA, 19 nt, Artificial Sequence
  Description of Artificial Sequence: Synthetic oligonucleotide
cucccaaagaacaucuuca

SEQ ID NO: 3213244 - RNA, 19 nt, Artificial Sequence
  Description of Artificial Sequence: Synthetic oligonucleotide
uggucugguaccaggacuc

SEQ ID NO: 3213245 - RNA, 19 nt, Artificial Sequence
  Description of Artificial Sequence: Synthetic oligonucleotide
cuaccuuguucauguaggc

SEQ ID NO: 3213246 - RNA, 19 nt, Artificial Sequence
  Description of Artificial Sequence: Synthetic oligonucleotide
ucugagacaucgugucugc

SEQ ID NO: 3213247 - RNA, 19 nt, Artificial Sequence
  Description of Artificial Sequence: Synthetic oligonucleotide
gagacaucgugucugcauc

SEQ ID NO: 3213248 - RNA, 19 nt, Artificial Sequence
  Description of Artificial Sequence: Synthetic oligonucleotide
aaacucauucucggcagug

SEQ ID NO: 3213249 - RNA, 19 nt, Artificial Sequence
  Description of Artificial Sequence: Synthetic oligonucleotide
guacuuguucuugaagucc

SEQ ID NO: 3213250 - RNA, 19 nt, Artificial Sequence
  Description of Artificial Sequence: Synthetic oligonucleotide
guugaucucguccaucaga

SEQ ID NO: 3213251 - RNA, 19 nt, Artificial Sequence
  Description of Artificial Sequence: Synthetic oligonucleotide
gaucucauccucguacuug

SEQ ID NO: 3213252 - RNA, 19 nt, Artificial Sequence
  Description of Artificial Sequence: Synthetic oligonucleotide
cucuaguucuaccuuguuc

SEQ ID NO: 3213253 - RNA, 19 nt, Artificial Sequence
  Description of Artificial Sequence: Synthetic oligonucleotide
acaucgugucugcaucugg

SEQ ID NO: 3213254 - RNA, 19 nt, Artificial Sequence
  Description of Artificial Sequence: Synthetic oligonucleotide
ugagacaucgugucugcau

SEQ ID NO: 3213255 - RNA, 19 nt, Artificial Sequence
  Description of Artificial Sequence: Synthetic oligonucleotide
cugcaucugggacagcucc

SEQ ID NO: 3213256 - RNA, 19 nt, Artificial Sequence
  Description of Artificial Sequence: Synthetic oligonucleotide
ugggccuugaccucagcga

SEQ ID NO: 3213257 - RNA, 19 nt, Artificial Sequence
  Description of Artificial Sequence: Synthetic oligonucleotide
acagcucccaaagaacauc

SEQ ID NO: 3213258 - RNA, 19 nt, Artificial Sequence
  Description of Artificial Sequence: Synthetic oligonucleotide
aacaaagaaaaguuaaagg

SEQ ID NO: 3213259 - RNA, 19 nt, Artificial Sequence
  Description of Artificial Sequence: Synthetic oligonucleotide
aaucuaauucaccugugcc

SEQ ID NO: 3213260 - RNA, 19 nt, Artificial Sequence
  Description of Artificial Sequence: Synthetic oligonucleotide
acaaagaaaaguuaaaggu

SEQ ID NO: 3213261 - RNA, 19 nt, Artificial Sequence
  Description of Artificial Sequence: Synthetic oligonucleotide
aaaucuaauucaccugugc

SEQ ID NO: 3213262 - RNA, 19 nt, Artificial Sequence
  Description of Artificial Sequence: Synthetic oligonucleotide
aaagaaaaguuaaagguuc

SEQ ID NO: 3213263 - RNA, 19 nt, Artificial Sequence
  Description of Artificial Sequence: Synthetic oligonucleotide
aucuaauucaccugugccc

SEQ ID NO: 3213264 - RNA, 19 nt, Artificial Sequence
  Description of Artificial Sequence: Synthetic oligonucleotide
uacucugcaacaaagaaaa

SEQ ID NO: 3213265 - RNA, 19 nt, Artificial Sequence
  Description of Artificial Sequence: Synthetic oligonucleotide
uucaucaucuuuugguucg

SEQ ID NO: 3213266 - RNA, 19 nt, Artificial Sequence
  Description of Artificial Sequence: Synthetic oligonucleotide
uuuggaagaagucucccag

SEQ ID NO: 3213267 - RNA, 19 nt, Artificial Sequence
  Description of Artificial Sequence: Synthetic oligonucleotide
ucuucugugauuuuggcuc

SEQ ID NO: 3213268 - RNA, 19 nt, Artificial Sequence
  Description of Artificial Sequence: Synthetic oligonucleotide
ucugcaacaauucuucugu

SEQ ID NO: 3213269 - RNA, 19 nt, Artificial Sequence
  Description of Artificial Sequence: Synthetic oligonucleotide
ucugcaacaaagaaaaguu

SEQ ID NO: 3213270 - RNA, 19 nt, Artificial Sequence
  Description of Artificial Sequence: Synthetic oligonucleotide
ugugauuuuggcucgaacu

SEQ ID NO: 3213271 - RNA, 19 nt, Artificial Sequence
  Description of Artificial Sequence: Synthetic oligonucleotide
aacuauuccaugcggcuuc

SEQ ID NO: 3213272 - RNA, 19 nt, Artificial Sequence
  Description of Artificial Sequence: Synthetic oligonucleotide
ugcaacaaagaaaaguuaa

SEQ ID NO: 3213273 - RNA, 19 nt, Artificial Sequence
  Description of Artificial Sequence: Synthetic oligonucleotide
uucguuugguaucuggagg

SEQ ID NO: 3213274 - RNA, 19 nt, Artificial Sequence
  Description of Artificial Sequence: Synthetic oligonucleotide
aaaaguuaaagguucucuu

SEQ ID NO: 3213275 - RNA, 19 nt, Artificial Sequence
  Description of Artificial Sequence: Synthetic oligonucleotide
aauucuucugugauuuugg

SEQ ID NO: 3213276 - RNA, 19 nt, Artificial Sequence
  Description of Artificial Sequence: Synthetic oligonucleotide
uuuggcucgaacuauucca

SEQ ID NO: 3213277 - RNA, 19 nt, Artificial Sequence
  Description of Artificial Sequence: Synthetic oligonucleotide
ucguuugguaucuggaggg

SEQ ID NO: 3213278 - RNA, 19 nt, Artificial Sequence
  Description of Artificial Sequence: Synthetic oligonucleotide
aaaguuaaagguucucuuu

SEQ ID NO: 3213279 - RNA, 19 nt, Artificial Sequence
  Description of Artificial Sequence: Synthetic oligonucleotide
uuugguaucuggagggcag

SEQ ID NO: 3213280 - RNA, 19 nt, Artificial Sequence
  Description of Artificial Sequence: Synthetic oligonucleotide
uuuucguuugguaucugga

SEQ ID NO: 3213281 - RNA, 19 nt, Artificial Sequence
  Description of Artificial Sequence: Synthetic oligonucleotide
auucuucugugauuuuggc

SEQ ID NO: 3213282 - RNA, 19 nt, Artificial Sequence
  Description of Artificial Sequence: Synthetic oligonucleotide
caacaaagaaaaguuaaag

SEQ ID NO: 3213283 - RNA, 19 nt, Artificial Sequence
  Description of Artificial Sequence: Synthetic oligonucleotide
uuucguuugguaucuggag

SEQ ID NO: 3213284 - RNA, 19 nt, Artificial Sequence
  Description of Artificial Sequence: Synthetic oligonucleotide
aacaauucuucugugauuu

SEQ ID NO: 3213285 - RNA, 19 nt, Artificial Sequence
  Description of Artificial Sequence: Synthetic oligonucleotide
gagggcaguaggcugagcg

SEQ ID NO: 3213286 - RNA, 19 nt, Artificial Sequence
  Description of Artificial Sequence: Synthetic oligonucleotide
auuccaugcggcuucauca

SEQ ID NO: 3213287 - RNA, 19 nt, Artificial Sequence
  Description of Artificial Sequence: Synthetic oligonucleotide
aaguuaaagguucucuuuu

SEQ ID NO: 3213288 - RNA, 19 nt, Artificial Sequence
  Description of Artificial Sequence: Synthetic oligonucleotide
aucaucuuuugguucgugg

SEQ ID NO: 3213289 - RNA, 19 nt, Artificial Sequence
  Description of Artificial Sequence: Synthetic oligonucleotide
uucaccugugcccucaggc

SEQ ID NO: 3213290 - RNA, 19 nt, Artificial Sequence
  Description of Artificial Sequence: Synthetic oligonucleotide
aggcaagcuacucugcaac

SEQ ID NO: 3213291 - RNA, 19 nt, Artificial Sequence
  Description of Artificial Sequence: Synthetic oligonucleotide
uuuuggcucgaacuauucc

SEQ ID NO: 3213292 - RNA, 19 nt, Artificial Sequence
  Description of Artificial Sequence: Synthetic oligonucleotide
uggaagaagucucccagca

SEQ ID NO: 3213293 - RNA, 19 nt, Artificial Sequence
  Description of Artificial Sequence: Synthetic oligonucleotide
ucuaauucaccugugcccu

SEQ ID NO: 3213294 - RNA, 19 nt, Artificial Sequence
  Description of Artificial Sequence: Synthetic oligonucleotide
ucgaacuauuccaugcggc

SEQ ID NO: 3213295 - RNA, 19 nt, Artificial Sequence
  Description of Artificial Sequence: Synthetic oligonucleotide
gauguuuggaagaagucuc

SEQ ID NO: 3213296 - RNA, 19 nt, Artificial Sequence
  Description of Artificial Sequence: Synthetic oligonucleotide
ucaucuuuugguucguggu

SEQ ID NO: 3213297 - RNA, 19 nt, Artificial Sequence
  Description of Artificial Sequence: Synthetic oligonucleotide
guaucuggagggcaguagg

SEQ ID NO: 3213298 - RNA, 19 nt, Artificial Sequence
  Description of Artificial Sequence: Synthetic oligonucleotide
uucugcaacaauucuucug

SEQ ID NO: 3213299 - RNA, 19 nt, Artificial Sequence
  Description of Artificial Sequence: Synthetic oligonucleotide
ugcaacaauucuucuguga

SEQ ID NO: 3213300 - RNA, 19 nt, Artificial Sequence
  Description of Artificial Sequence: Synthetic oligonucleotide
agaaaaguuaaagguucuc

SEQ ID NO: 3213301 - RNA, 19 nt, Artificial Sequence
  Description of Artificial Sequence: Synthetic oligonucleotide
uaggcugagcgcauggaug

SEQ ID NO: 3213302 - RNA, 19 nt, Artificial Sequence
  Description of Artificial Sequence: Synthetic oligonucleotide
aaaaucuaauucaccugug

SEQ ID NO: 3213303 - RNA, 19 nt, Artificial Sequence
  Description of Artificial Sequence: Synthetic oligonucleotide
uucuucugugauuuuggcu

SEQ ID NO: 3213304 - RNA, 19 nt, Artificial Sequence
  Description of Artificial Sequence: Synthetic oligonucleotide
uaucuggagggcaguaggc

SEQ ID NO: 3213305 - RNA, 19 nt, Artificial Sequence
  Description of Artificial Sequence: Synthetic oligonucleotide
uuuugguucgugguuaaaa

SEQ ID NO: 3213306 - RNA, 19 nt, Artificial Sequence
  Description of Artificial Sequence: Synthetic oligonucleotide
agggcaguaggcugagcgc

SEQ ID NO: 3213307 - RNA, 19 nt, Artificial Sequence
  Description of Artificial Sequence: Synthetic oligonucleotide
aagcuacucugcaacaaag

SEQ ID NO: 3213308 - RNA, 19 nt, Artificial Sequence
  Description of Artificial Sequence: Synthetic oligonucleotide
cucgaacuauuccaugcgg

SEQ ID NO: 3213309 - RNA, 19 nt, Artificial Sequence
  Description of Artificial Sequence: Synthetic oligonucleotide
ucaggcaagcuacucugca

SEQ ID NO: 3213310 - RNA, 19 nt, Artificial Sequence
  Description of Artificial Sequence: Synthetic oligonucleotide
cuucugugauuuuggcucg

SEQ ID NO: 3213311 - RNA, 19 nt, Artificial Sequence
  Description of Artificial Sequence: Synthetic oligonucleotide
aagaaaaguuaaagguucu

SEQ ID NO: 3213312 - RNA, 19 nt, Artificial Sequence
  Description of Artificial Sequence: Synthetic oligonucleotide
ucuggagggcaguaggcug

SEQ ID NO: 3213313 - RNA, 19 nt, Artificial Sequence
  Description of Artificial Sequence: Synthetic oligonucleotide
auguuuggaagaagucucc

SEQ ID NO: 3213314 - RNA, 19 nt, Artificial Sequence
  Description of Artificial Sequence: Synthetic oligonucleotide
uuggaagaagucucccagc

SEQ ID NO: 3213315 - RNA, 19 nt, Artificial Sequence
  Description of Artificial Sequence: Synthetic oligonucleotide
uauuccaugcggcuucauc

SEQ ID NO: 3213316 - RNA, 19 nt, Artificial Sequence
  Description of Artificial Sequence: Synthetic oligonucleotide
cuucaucaucuuuugguuc

SEQ ID NO: 3213317 - RNA, 19 nt, Artificial Sequence
  Description of Artificial Sequence: Synthetic oligonucleotide
uggauguuuggaagaaguc

SEQ ID NO: 3213318 - RNA, 19 nt, Artificial Sequence
  Description of Artificial Sequence: Synthetic oligonucleotide
ugcggcuucaucaucuuuu

SEQ ID NO: 3213319 - RNA, 19 nt, Artificial Sequence
  Description of Artificial Sequence: Synthetic oligonucleotide
gaaaaguuaaagguucucu

SEQ ID NO: 3213320 - RNA, 19 nt, Artificial Sequence
  Description of Artificial Sequence: Synthetic oligonucleotide
uguuuggaagaagucuccc

SEQ ID NO: 3213321 - RNA, 19 nt, Artificial Sequence
  Description of Artificial Sequence: Synthetic oligonucleotide
caauucuucugugauuuug

SEQ ID NO: 3213322 - RNA, 19 nt, Artificial Sequence
  Description of Artificial Sequence: Synthetic oligonucleotide
auggauguuuggaagaagu

SEQ ID NO: 3213323 - RNA, 19 nt, Artificial Sequence
  Description of Artificial Sequence: Synthetic oligonucleotide
aauucaccugugcccucag

SEQ ID NO: 3213324 - RNA, 19 nt, Artificial Sequence
  Description of Artificial Sequence: Synthetic oligonucleotide
caaagaaaaguuaaagguu

SEQ ID NO: 3213325 - RNA, 19 nt, Artificial Sequence
  Description of Artificial Sequence: Synthetic oligonucleotide
uuggcucgaacuauuccau

SEQ ID NO: 3213326 - RNA, 19 nt, Artificial Sequence
  Description of Artificial Sequence: Synthetic oligonucleotide
ucaccugugcccucaggca

SEQ ID NO: 3213327 - RNA, 19 nt, Artificial Sequence
  Description of Artificial Sequence: Synthetic oligonucleotide
cuacucugcaacaaagaaa

SEQ ID NO: 3213328 - RNA, 19 nt, Artificial Sequence
  Description of Artificial Sequence: Synthetic oligonucleotide
auuuuggcucgaacuauuc

SEQ ID NO: 3213329 - RNA, 19 nt, Artificial Sequence
  Description of Artificial Sequence: Synthetic oligonucleotide
aggcugagcgcauggaugu

SEQ ID NO: 3213330 - RNA, 19 nt, Artificial Sequence
  Description of Artificial Sequence: Synthetic oligonucleotide
guuuggaagaagucuccca

SEQ ID NO: 3213331 - RNA, 19 nt, Artificial Sequence
  Description of Artificial Sequence: Synthetic oligonucleotide
gugauuuuggcucgaacua

SEQ ID NO: 3213332 - RNA, 19 nt, Artificial Sequence
  Description of Artificial Sequence: Synthetic oligonucleotide
ggcucgaacuauuccaugc

SEQ ID NO: 3213333 - RNA, 19 nt, Artificial Sequence
  Description of Artificial Sequence: Synthetic oligonucleotide
ugauuuuggcucgaacuau

SEQ ID NO: 3213334 - RNA, 19 nt, Artificial Sequence
  Description of Artificial Sequence: Synthetic oligonucleotide
agcgcauggauguuuggaa

SEQ ID NO: 3213335 - RNA, 19 nt, Artificial Sequence
  Description of Artificial Sequence: Synthetic oligonucleotide
ugugcccucaggcaagcua

SEQ ID NO: 3213336 - RNA, 19 nt, Artificial Sequence
  Description of Artificial Sequence: Synthetic oligonucleotide
uaauucaccugugcccuca

SEQ ID NO: 3213337 - RNA, 19 nt, Artificial Sequence
  Description of Artificial Sequence: Synthetic oligonucleotide
gcucgaacuauuccaugcg

SEQ ID NO: 3213338 - RNA, 19 nt, Artificial Sequence
  Description of Artificial Sequence: Synthetic oligonucleotide
ugagcgcauggauguuugg

SEQ ID NO: 3213339 - RNA, 19 nt, Artificial Sequence
  Description of Artificial Sequence: Synthetic oligonucleotide
ucuuuugguucgugguuaa

SEQ ID NO: 3213340 - RNA, 19 nt, Artificial Sequence
  Description of Artificial Sequence: Synthetic oligonucleotide
cugagcgcauggauguuug

SEQ ID NO: 3213341 - RNA, 19 nt, Artificial Sequence
  Description of Artificial Sequence: Synthetic oligonucleotide
auucaccugugcccucagg

SEQ ID NO: 3213342 - RNA, 19 nt, Artificial Sequence
  Description of Artificial Sequence: Synthetic oligonucleotide
cucaggcaagcuacucugc

SEQ ID NO: 3213343 - RNA, 19 nt, Artificial Sequence
  Description of Artificial Sequence: Synthetic oligonucleotide
caguaggcugagcgcaugg

SEQ ID NO: 3213344 - RNA, 19 nt, Artificial Sequence
  Description of Artificial Sequence: Synthetic oligonucleotide
cauggauguuuggaagaag

SEQ ID NO: 3213345 - RNA, 19 nt, Artificial Sequence
  Description of Artificial Sequence: Synthetic oligonucleotide
uuccaugcggcuucaucau

SEQ ID NO: 3213346 - RNA, 19 nt, Artificial Sequence
  Description of Artificial Sequence: Synthetic oligonucleotide
cugugauuuuggcucgaac

SEQ ID NO: 3213347 - RNA, 19 nt, Artificial Sequence
  Description of Artificial Sequence: Synthetic oligonucleotide
cucugcaacaaagaaaagu

SEQ ID NO: 3213348 - RNA, 19 nt, Artificial Sequence
  Description of Artificial Sequence: Synthetic oligonucleotide
uggcucgaacuauuccaug

SEQ ID NO: 3213349 - RNA, 19 nt, Artificial Sequence
  Description of Artificial Sequence: Synthetic oligonucleotide
gcuacucugcaacaaagaa

SEQ ID NO: 3213350 - RNA, 19 nt, Artificial Sequence
  Description of Artificial Sequence: Synthetic oligonucleotide
ggaagaagucucccagcag

SEQ ID NO: 3213351 - RNA, 19 nt, Artificial Sequence
  Description of Artificial Sequence: Synthetic oligonucleotide
aucuuuugguucgugguua

SEQ ID NO: 3213352 - RNA, 19 nt, Artificial Sequence
  Description of Artificial Sequence: Synthetic oligonucleotide
ggcuucaucaucuuuuggu

SEQ ID NO: 3213353 - RNA, 19 nt, Artificial Sequence
  Description of Artificial Sequence: Synthetic oligonucleotide
cugcaacaauucuucugug

SEQ ID NO: 3213354 - RNA, 19 nt, Artificial Sequence
  Description of Artificial Sequence: Synthetic oligonucleotide
agcuacucugcaacaaaga

SEQ ID NO: 3213355 - RNA, 19 nt, Artificial Sequence
  Description of Artificial Sequence: Synthetic oligonucleotide
aucuggagggcaguaggcu

SEQ ID NO: 3213356 - RNA, 19 nt, Artificial Sequence
  Description of Artificial Sequence: Synthetic oligonucleotide
cugcaacaaagaaaaguua

SEQ ID NO: 3213357 - RNA, 19 nt, Artificial Sequence
  Description of Artificial Sequence: Synthetic oligonucleotide
gcgcauggauguuuggaag

SEQ ID NO: 3213358 - RNA, 19 nt, Artificial Sequence
  Description of Artificial Sequence: Synthetic oligonucleotide
aacagggucagcccgaagc

SEQ ID NO: 3213359 - RNA, 19 nt, Artificial Sequence
  Description of Artificial Sequence: Synthetic oligonucleotide
augaccgacugccagaucc

SEQ ID NO: 3213360 - RNA, 19 nt, Artificial Sequence
  Description of Artificial Sequence: Synthetic oligonucleotide
gaagaacagggucagcccg

SEQ ID NO: 3213361 - RNA, 19 nt, Artificial Sequence
  Description of Artificial Sequence: Synthetic oligonucleotide
acgaagaacagggucagcc

SEQ ID NO: 3213362 - RNA, 19 nt, Artificial Sequence
  Description of Artificial Sequence: Synthetic oligonucleotide
ugcagcagguggaugaccg

SEQ ID NO: 3213363 - RNA, 19 nt, Artificial Sequence
  Description of Artificial Sequence: Synthetic oligonucleotide
aaccagcggaagcucaggc

SEQ ID NO: 3213364 - RNA, 19 nt, Artificial Sequence
  Description of Artificial Sequence: Synthetic oligonucleotide
agguggaugaccgacugcc

SEQ ID NO: 3213365 - RNA, 19 nt, Artificial Sequence
  Description of Artificial Sequence: Synthetic oligonucleotide
gacugccagauccacacgg

SEQ ID NO: 3213366 - RNA, 19 nt, Artificial Sequence
  Description of Artificial Sequence: Synthetic oligonucleotide
uccugcacgaaccagcgga

SEQ ID NO: 3213367 - RNA, 19 nt, Artificial Sequence
  Description of Artificial Sequence: Synthetic oligonucleotide
aggcagucgagccacggcc

SEQ ID NO: 3213368 - RNA, 19 nt, Artificial Sequence
  Description of Artificial Sequence: Synthetic oligonucleotide
accagcacgaagaacaggg

SEQ ID NO: 3213369 - RNA, 19 nt, Artificial Sequence
  Description of Artificial Sequence: Synthetic oligonucleotide
gaagcucaggcucugcacc

SEQ ID NO: 3213370 - RNA, 19 nt, Artificial Sequence
  Description of Artificial Sequence: Synthetic oligonucleotide
agcagcgccagcacgaucc

SEQ ID NO: 3213371 - RNA, 19 nt, Artificial Sequence
  Description of Artificial Sequence: Synthetic oligonucleotide
auccacaggcagucgagcc

SEQ ID NO: 3213372 - RNA, 19 nt, Artificial Sequence
  Description of Artificial Sequence: Synthetic oligonucleotide
ucgagggccagccacaggu

SEQ ID NO: 3213373 - RNA, 19 nt, Artificial Sequence
  Description of Artificial Sequence: Synthetic oligonucleotide
uaguccugcacgaaccagc

SEQ ID NO: 3213374 - RNA, 19 nt, Artificial Sequence
  Description of Artificial Sequence: Synthetic oligonucleotide
uccccgaagaacaccagca

SEQ ID NO: 3213375 - RNA, 19 nt, Artificial Sequence
  Description of Artificial Sequence: Synthetic oligonucleotide
aacaccagcagcgccagca

SEQ ID NO: 3213376 - RNA, 19 nt, Artificial Sequence
  Description of Artificial Sequence: Synthetic oligonucleotide
gaagaacaccagcagcgcc

SEQ ID NO: 3213377 - RNA, 19 nt, Artificial Sequence
  Description of Artificial Sequence: Synthetic oligonucleotide
ugcacgaaccagcggaagc

SEQ ID NO: 3213378 - RNA, 19 nt, Artificial Sequence
  Description of Artificial Sequence: Synthetic oligonucleotide
ggagaggcggcacagacgc

SEQ ID NO: 3213379 - RNA, 19 nt, Artificial Sequence
  Description of Artificial Sequence: Synthetic oligonucleotide
acggagaggcggcacagac

SEQ ID NO: 3213380 - RNA, 19 nt, Artificial Sequence
  Description of Artificial Sequence: Synthetic oligonucleotide
uguaguccugcacgaacca

SEQ ID NO: 3213381 - RNA, 19 nt, Artificial Sequence
  Description of Artificial Sequence: Synthetic oligonucleotide
uucgcgguaguagucgagg

SEQ ID NO: 3213382 - RNA, 19 nt, Artificial Sequence
  Description of Artificial Sequence: Synthetic oligonucleotide
aagaacaccagcagcgcca

SEQ ID NO: 3213383 - RNA, 19 nt, Artificial Sequence
  Description of Artificial Sequence: Synthetic oligonucleotide
gccagcacgauccacaggc

SEQ ID NO: 3213384 - RNA, 19 nt, Artificial Sequence
  Description of Artificial Sequence: Synthetic oligonucleotide
ucugcaccagcagcgacgg

SEQ ID NO: 3213385 - RNA, 19 nt, Artificial Sequence
  Description of Artificial Sequence: Synthetic oligonucleotide
ccgaagaacaccagcagcg

SEQ ID NO: 3213386 - RNA, 19 nt, Artificial Sequence
  Description of Artificial Sequence: Synthetic oligonucleotide
cucugcaccagcagcgacg

SEQ ID NO: 3213387 - RNA, 19 nt, Artificial Sequence
  Description of Artificial Sequence: Synthetic oligonucleotide
ugcaccagcagcgacggca

SEQ ID NO: 3213388 - RNA, 19 nt, Artificial Sequence
  Description of Artificial Sequence: Synthetic oligonucleotide
gauccacacggagaggcgg

SEQ ID NO: 3213389 - RNA, 19 nt, Artificial Sequence
  Description of Artificial Sequence: Synthetic oligonucleotide
cagauccacacggagaggc

SEQ ID NO: 3213390 - RNA, 19 nt, Artificial Sequence
  Description of Artificial Sequence: Synthetic oligonucleotide
gagggccagccacaggucg

SEQ ID NO: 3213391 - RNA, 19 nt, Artificial Sequence
  Description of Artificial Sequence: Synthetic oligonucleotide
ugccagauccacacggaga

SEQ ID NO: 3213392 - RNA, 19 nt, Artificial Sequence
  Description of Artificial Sequence: Synthetic oligonucleotide
caggucgguacccacgucc

SEQ ID NO: 3213393 - RNA, 19 nt, Artificial Sequence
  Description of Artificial Sequence: Synthetic oligonucleotide
uccacaggcagucgagcca

SEQ ID NO: 3213394 - RNA, 19 nt, Artificial Sequence
  Description of Artificial Sequence: Synthetic oligonucleotide
agcacgaagaacaggguca

SEQ ID NO: 3213395 - RNA, 19 nt, Artificial Sequence
  Description of Artificial Sequence: Synthetic oligonucleotide
gccagauccacacggagag

SEQ ID NO: 3213396 - RNA, 19 nt, Artificial Sequence
  Description of Artificial Sequence: Synthetic oligonucleotide
guagucgagggccagccac

SEQ ID NO: 3213397 - RNA, 19 nt, Artificial Sequence
  Description of Artificial Sequence: Synthetic oligonucleotide
ucaggcucugcaccagcag

SEQ ID NO: 3213398 - RNA, 19 nt, Artificial Sequence
  Description of Artificial Sequence: Synthetic oligonucleotide
guggaugaccgacugccag

SEQ ID NO: 3213399 - RNA, 19 nt, Artificial Sequence
  Description of Artificial Sequence: Synthetic oligonucleotide
gacggcaccagcacgaaga

SEQ ID NO: 3213400 - RNA, 19 nt, Artificial Sequence
  Description of Artificial Sequence: Synthetic oligonucleotide
aagcucaggcucugcacca

SEQ ID NO: 3213401 - RNA, 19 nt, Artificial Sequence
  Description of Artificial Sequence: Synthetic oligonucleotide
ucgcgguaguagucgaggg

SEQ ID NO: 3213402 - RNA, 19 nt, Artificial Sequence
  Description of Artificial Sequence: Synthetic oligonucleotide
uccaccugcggcgacgcgg

SEQ ID NO: 3213403 - RNA, 19 nt, Artificial Sequence
  Description of Artificial Sequence: Synthetic oligonucleotide
uggaugaccgacugccaga

SEQ ID NO: 3213404 - RNA, 19 nt, Artificial Sequence
  Description of Artificial Sequence: Synthetic oligonucleotide
agggucagcccgaagcagc

SEQ ID NO: 3213405 - RNA, 19 nt, Artificial Sequence
  Description of Artificial Sequence: Synthetic oligonucleotide
ggcaccagcacgaagaaca

SEQ ID NO: 3213406 - RNA, 19 nt, Artificial Sequence
  Description of Artificial Sequence: Synthetic oligonucleotide
uaguagucgagggccagcc

SEQ ID NO: 3213407 - RNA, 19 nt, Artificial Sequence
  Description of Artificial Sequence: Synthetic oligonucleotide
acagggucagcccgaagca

SEQ ID NO: 3213408 - RNA, 19 nt, Artificial Sequence
  Description of Artificial Sequence: Synthetic oligonucleotide
aguccugcacgaaccagcg

SEQ ID NO: 3213409 - RNA, 19 nt, Artificial Sequence
  Description of Artificial Sequence: Synthetic oligonucleotide
guguaguccugcacgaacc

SEQ ID NO: 3213410 - RNA, 19 nt, Artificial Sequence
  Description of Artificial Sequence: Synthetic oligonucleotide
caggcucugcaccagcagc

SEQ ID NO: 3213411 - RNA, 19 nt, Artificial Sequence
  Description of Artificial Sequence: Synthetic oligonucleotide
acaccagcagcgccagcac

SEQ ID NO: 3213412 - RNA, 19 nt, Artificial Sequence
  Description of Artificial Sequence: Synthetic oligonucleotide
ugaccgacugccagaucca

SEQ ID NO: 3213413 - RNA, 19 nt, Artificial Sequence
  Description of Artificial Sequence: Synthetic oligonucleotide
acgauccacaggcagucga

SEQ ID NO: 3213414 - RNA, 19 nt, Artificial Sequence
  Description of Artificial Sequence: Synthetic oligonucleotide
guacccacguccccgaaga

SEQ ID NO: 3213415 - RNA, 19 nt, Artificial Sequence
  Description of Artificial Sequence: Synthetic oligonucleotide
cagcacgaagaacaggguc

SEQ ID NO: 3213416 - RNA, 19 nt, Artificial Sequence
  Description of Artificial Sequence: Synthetic oligonucleotide
uagucgagggccagccaca

SEQ ID NO: 3213417 - RNA, 19 nt, Artificial Sequence
  Description of Artificial Sequence: Synthetic oligonucleotide
gucgguacccacguccccg

SEQ ID NO: 3213418 - RNA, 19 nt, Artificial Sequence
  Description of Artificial Sequence: Synthetic oligonucleotide
agaggcggcacagacgcug

SEQ ID NO: 3213419 - RNA, 19 nt, Artificial Sequence
  Description of Artificial Sequence: Synthetic oligonucleotide
gcugcggucggccggaccg

SEQ ID NO: 3213420 - RNA, 19 nt, Artificial Sequence
  Description of Artificial Sequence: Synthetic oligonucleotide
aggucgguacccacguccc

SEQ ID NO: 3213421 - RNA, 19 nt, Artificial Sequence
  Description of Artificial Sequence: Synthetic oligonucleotide
aagaacagggucagcccga

SEQ ID NO: 3213422 - RNA, 19 nt, Artificial Sequence
  Description of Artificial Sequence: Synthetic oligonucleotide
gaaccagcggaagcucagg

SEQ ID NO: 3213423 - RNA, 19 nt, Artificial Sequence
  Description of Artificial Sequence: Synthetic oligonucleotide
acccacguccccgaagaac

SEQ ID NO: 3213424 - RNA, 19 nt, Artificial Sequence
  Description of Artificial Sequence: Synthetic oligonucleotide
aggcucugcaccagcagcg

SEQ ID NO: 3213425 - RNA, 19 nt, Artificial Sequence
  Description of Artificial Sequence: Synthetic oligonucleotide
gauccacaggcagucgagc

SEQ ID NO: 3213426 - RNA, 19 nt, Artificial Sequence
  Description of Artificial Sequence: Synthetic oligonucleotide
accagcggaagcucaggcu

SEQ ID NO: 3213427 - RNA, 19 nt, Artificial Sequence
  Description of Artificial Sequence: Synthetic oligonucleotide
gcccguguaguccugcacg

SEQ ID NO: 3213428 - RNA, 19 nt, Artificial Sequence
  Description of Artificial Sequence: Synthetic oligonucleotide
auccacacggagaggcggc

SEQ ID NO: 3213429 - RNA, 19 nt, Artificial Sequence
  Description of Artificial Sequence: Synthetic oligonucleotide
cagcacgauccacaggcag

SEQ ID NO: 3213430 - RNA, 19 nt, Artificial Sequence
  Description of Artificial Sequence: Synthetic oligonucleotide
guccccgaagaacaccagc

SEQ ID NO: 3213431 - RNA, 19 nt, Artificial Sequence
  Description of Artificial Sequence: Synthetic oligonucleotide
cugccagauccacacggag

SEQ ID NO: 3213432 - RNA, 19 nt, Artificial Sequence
  Description of Artificial Sequence: Synthetic oligonucleotide
agaacaccagcagcgccag

SEQ ID NO: 3213433 - RNA, 19 nt, Artificial Sequence
  Description of Artificial Sequence: Synthetic oligonucleotide
gucggccggaccgagggcg

SEQ ID NO: 3213434 - RNA, 19 nt, Artificial Sequence
  Description of Artificial Sequence: Synthetic oligonucleotide
cuucgcgguaguagucgag

SEQ ID NO: 3213435 - RNA, 19 nt, Artificial Sequence
  Description of Artificial Sequence: Synthetic oligonucleotide
gcgguaguagucgagggcc

SEQ ID NO: 3213436 - RNA, 19 nt, Artificial Sequence
  Description of Artificial Sequence: Synthetic oligonucleotide
agauccacacggagaggcg

SEQ ID NO: 3213437 - RNA, 19 nt, Artificial Sequence
  Description of Artificial Sequence: Synthetic oligonucleotide
ccgacugccagauccacac

SEQ ID NO: 3213438 - RNA, 19 nt, Artificial Sequence
  Description of Artificial Sequence: Synthetic oligonucleotide
guaguccugcacgaaccag

SEQ ID NO: 3213439 - RNA, 19 nt, Artificial Sequence
  Description of Artificial Sequence: Synthetic oligonucleotide
acaggcagucgagccacgg

SEQ ID NO: 3213440 - RNA, 19 nt, Artificial Sequence
  Description of Artificial Sequence: Synthetic oligonucleotide
ggaagcucaggcucugcac

SEQ ID NO: 3213441 - RNA, 19 nt, Artificial Sequence
  Description of Artificial Sequence: Synthetic oligonucleotide
ucugcagcagguggaugac

SEQ ID NO: 3213442 - RNA, 19 nt, Artificial Sequence
  Description of Artificial Sequence: Synthetic oligonucleotide
agcacgauccacaggcagu

SEQ ID NO: 3213443 - RNA, 19 nt, Artificial Sequence
  Description of Artificial Sequence: Synthetic oligonucleotide
cccgaagaacaccagcagc

SEQ ID NO: 3213444 - RNA, 19 nt, Artificial Sequence
  Description of Artificial Sequence: Synthetic oligonucleotide
caccagcagcgccagcacg

SEQ ID NO: 3213445 - RNA, 19 nt, Artificial Sequence
  Description of Artificial Sequence: Synthetic oligonucleotide
acaggucgguacccacguc

SEQ ID NO: 3213446 - RNA, 19 nt, Artificial Sequence
  Description of Artificial Sequence: Synthetic oligonucleotide
caggcagucgagccacggc

SEQ ID NO: 3213447 - RNA, 19 nt, Artificial Sequence
  Description of Artificial Sequence: Synthetic oligonucleotide
aguagucgagggccagcca

SEQ ID NO: 3213448 - RNA, 19 nt, Artificial Sequence
  Description of Artificial Sequence: Synthetic oligonucleotide
agucgagccacggccgcuc

SEQ ID NO: 3213449 - RNA, 19 nt, Artificial Sequence
  Description of Artificial Sequence: Synthetic oligonucleotide
agcgccagcacgauccaca

SEQ ID NO: 3213450 - RNA, 19 nt, Artificial Sequence
  Description of Artificial Sequence: Synthetic oligonucleotide
guaguagucgagggccagc

SEQ ID NO: 3213451 - RNA, 19 nt, Artificial Sequence
  Description of Artificial Sequence: Synthetic oligonucleotide
ccagcggaagcucaggcuc

SEQ ID NO: 3213452 - RNA, 19 nt, Artificial Sequence
  Description of Artificial Sequence: Synthetic oligonucleotide
cagcagguggaugaccgac

SEQ ID NO: 3213453 - RNA, 19 nt, Artificial Sequence
  Description of Artificial Sequence: Synthetic oligonucleotide
ucgguacccacguccccga

SEQ ID NO: 3213454 - RNA, 19 nt, Artificial Sequence
  Description of Artificial Sequence: Synthetic oligonucleotide
gcagguggaugaccgacug

SEQ ID NO: 3213455 - RNA, 19 nt, Artificial Sequence
  Description of Artificial Sequence: Synthetic oligonucleotide
gaacagggucagcccgaag

SEQ ID NO: 3213456 - RNA, 19 nt, Artificial Sequence
  Description of Artificial Sequence: Synthetic oligonucleotide
acguccccgaagaacacca

SEQ ID NO: 3213457 - RNA, 19 nt, Artificial Sequence
  Description of Artificial Sequence: Synthetic oligonucleotide
cagguggaugaccgacugc

SEQ ID NO: 3213458 - RNA, 19 nt, Artificial Sequence
  Description of Artificial Sequence: Synthetic oligonucleotide
auucacuacauuuauaagg

SEQ ID NO: 3213459 - RNA, 19 nt, Artificial Sequence
  Description of Artificial Sequence: Synthetic oligonucleotide
agucaguacauuuauaugg

SEQ ID NO: 3213460 - RNA, 19 nt, Artificial Sequence
  Description of Artificial Sequence: Synthetic oligonucleotide
uguaugaagucucugaugc

SEQ ID NO: 3213461 - RNA, 19 nt, Artificial Sequence
  Description of Artificial Sequence: Synthetic oligonucleotide
aaucacuacauuuguaagg

SEQ ID NO: 3213462 - RNA, 19 nt, Artificial Sequence
  Description of Artificial Sequence: Synthetic oligonucleotide
cugaugaauuuuaagaugg

SEQ ID NO: 3213463 - RNA, 19 nt, Artificial Sequence
  Description of Artificial Sequence: Synthetic oligonucleotide
auuuguaaggcuucacucc

SEQ ID NO: 3213464 - RNA, 19 nt, Artificial Sequence
  Description of Artificial Sequence: Synthetic oligonucleotide
auuuguaagguuucucucc

SEQ ID NO: 3213465 - RNA, 19 nt, Artificial Sequence
  Description of Artificial Sequence: Synthetic oligonucleotide
aacgauuugucacagucag

SEQ ID NO: 3213466 - RNA, 19 nt, Artificial Sequence
  Description of Artificial Sequence: Synthetic oligonucleotide
uuuaagauggccugucugg

SEQ ID NO: 3213467 - RNA, 19 nt, Artificial Sequence
  Description of Artificial Sequence: Synthetic oligonucleotide
ucucugaugaauuuuaaga

SEQ ID NO: 3213468 - RNA, 19 nt, Artificial Sequence
  Description of Artificial Sequence: Synthetic oligonucleotide
uuuucuuccuguaugaagu

SEQ ID NO: 3213469 - RNA, 19 nt, Artificial Sequence
  Description of Artificial Sequence: Synthetic oligonucleotide
uguaagauggccucucugg

SEQ ID NO: 3213470 - RNA, 19 nt, Artificial Sequence
  Description of Artificial Sequence: Synthetic oligonucleotide
uaaagcauuucucacauuc

SEQ ID NO: 3213471 - RNA, 19 nt, Artificial Sequence
  Description of Artificial Sequence: Synthetic oligonucleotide
cuggugauuuguaagaugg

SEQ ID NO: 3213472 - RNA, 19 nt, Artificial Sequence
  Description of Artificial Sequence: Synthetic oligonucleotide
uucacuacauuuauaaggu

SEQ ID NO: 3213473 - RNA, 19 nt, Artificial Sequence
  Description of Artificial Sequence: Synthetic oligonucleotide
aagcauuucucacauucac

SEQ ID NO: 3213474 - RNA, 19 nt, Artificial Sequence
  Description of Artificial Sequence: Synthetic oligonucleotide
aguaugaauucucugauga

SEQ ID NO: 3213475 - RNA, 19 nt, Artificial Sequence
  Description of Artificial Sequence: Synthetic oligonucleotide
ucuaagaugguccuuugug

SEQ ID NO: 3213476 - RNA, 19 nt, Artificial Sequence
  Description of Artificial Sequence: Synthetic oligonucleotide
auucacuacauuuguaagg

SEQ ID NO: 3213477 - RNA, 19 nt, Artificial Sequence
  Description of Artificial Sequence: Synthetic oligonucleotide
aucacuacauuuguaaggc

SEQ ID NO: 3213478 - RNA, 19 nt, Artificial Sequence
  Description of Artificial Sequence: Synthetic oligonucleotide
ugaauuuuaagauggccug

SEQ ID NO: 3213479 - RNA, 19 nt, Artificial Sequence
  Description of Artificial Sequence: Synthetic oligonucleotide
uaaacgauuugucacaguc

SEQ ID NO: 3213480 - RNA, 19 nt, Artificial Sequence
  Description of Artificial Sequence: Synthetic oligonucleotide
auucacuacaccuguaagg

SEQ ID NO: 3213481 - RNA, 19 nt, Artificial Sequence
  Description of Artificial Sequence: Synthetic oligonucleotide
ucucagaugaucuuucuug

SEQ ID NO: 3213482 - RNA, 19 nt, Artificial Sequence
  Description of Artificial Sequence: Synthetic oligonucleotide
ugaguaaacgauuugucac

SEQ ID NO: 3213483 - RNA, 19 nt, Artificial Sequence
  Description of Artificial Sequence: Synthetic oligonucleotide
ucucugaugaguuaugaga

SEQ ID NO: 3213484 - RNA, 19 nt, Artificial Sequence
  Description of Artificial Sequence: Synthetic oligonucleotide
ugaguuaugagacugcuuu

SEQ ID NO: 3213485 - RNA, 19 nt, Artificial Sequence
  Description of Artificial Sequence: Synthetic oligonucleotide
ugaucuuucuuggugaagg

SEQ ID NO: 3213486 - RNA, 19 nt, Artificial Sequence
  Description of Artificial Sequence: Synthetic oligonucleotide
aaggacuugucacacucac

SEQ ID NO: 3213487 - RNA, 19 nt, Artificial Sequence
  Description of Artificial Sequence: Synthetic oligonucleotide
ucugaugaauuuuaagaug

SEQ ID NO: 3213488 - RNA, 19 nt, Artificial Sequence
  Description of Artificial Sequence: Synthetic oligonucleotide
uaaagcacgugucacauuc

SEQ ID NO: 3213489 - RNA, 19 nt, Artificial Sequence
  Description of Artificial Sequence: Synthetic oligonucleotide
ugugugaacucucugguga

SEQ ID NO: 3213490 - RNA, 19 nt, Artificial Sequence
  Description of Artificial Sequence: Synthetic oligonucleotide
acucacuacauuuguaagg

SEQ ID NO: 3213491 - RNA, 19 nt, Artificial Sequence
  Description of Artificial Sequence: Synthetic oligonucleotide
uuuuaagauggccugucug

SEQ ID NO: 3213492 - RNA, 19 nt, Artificial Sequence
  Description of Artificial Sequence: Synthetic oligonucleotide
uccaguaugaauucucuga

SEQ ID NO: 3213493 - RNA, 19 nt, Artificial Sequence
  Description of Artificial Sequence: Synthetic oligonucleotide
aauuuuaagauggccuguc

SEQ ID NO: 3213494 - RNA, 19 nt, Artificial Sequence
  Description of Artificial Sequence: Synthetic oligonucleotide
aaggaucugucacaaucac

SEQ ID NO: 3213495 - RNA, 19 nt, Artificial Sequence
  Description of Artificial Sequence: Synthetic oligonucleotide
ucuuucuuggugaaggacu

SEQ ID NO: 3213496 - RNA, 19 nt, Artificial Sequence
  Description of Artificial Sequence: Synthetic oligonucleotide
uaugagacugcuuuucuga

SEQ ID NO: 3213497 - RNA, 19 nt, Artificial Sequence
  Description of Artificial Sequence: Synthetic oligonucleotide
accuguaagguuucucucc

SEQ ID NO: 3213498 - RNA, 19 nt, Artificial Sequence
  Description of Artificial Sequence: Synthetic oligonucleotide
ugucacauucacuacaccu

SEQ ID NO: 3213499 - RNA, 19 nt, Artificial Sequence
  Description of Artificial Sequence: Synthetic oligonucleotide
uuucucucccauaugaagu

SEQ ID NO: 3213500 - RNA, 19 nt, Artificial Sequence
  Description of Artificial Sequence: Synthetic oligonucleotide
uuuguaaggcuucacucca

SEQ ID NO: 3213501 - RNA, 19 nt, Artificial Sequence
  Description of Artificial Sequence: Synthetic oligonucleotide
aaggcuucacuccaguaug

SEQ ID NO: 3213502 - RNA, 19 nt, Artificial Sequence
  Description of Artificial Sequence: Synthetic oligonucleotide
acaaucacuacauuuguaa

SEQ ID NO: 3213503 - RNA, 19 nt, Artificial Sequence
  Description of Artificial Sequence: Synthetic oligonucleotide
uccuguauggauucuguag

SEQ ID NO: 3213504 - RNA, 19 nt, Artificial Sequence
  Description of Artificial Sequence: Synthetic oligonucleotide
cauaugaagucucugauga

SEQ ID NO: 3213505 - RNA, 19 nt, Artificial Sequence
  Description of Artificial Sequence: Synthetic oligonucleotide
ucugaugcguucuaagaug

SEQ ID NO: 3213506 - RNA, 19 nt, Artificial Sequence
  Description of Artificial Sequence: Synthetic oligonucleotide
guagugaauucucagauga

SEQ ID NO: 3213507 - RNA, 19 nt, Artificial Sequence
  Description of Artificial Sequence: Synthetic oligonucleotide
uuguguaaggaucugucac

SEQ ID NO: 3213508 - RNA, 19 nt, Artificial Sequence
  Description of Artificial Sequence: Synthetic oligonucleotide
acagucaguacauuuauau

SEQ ID NO: 3213509 - RNA, 19 nt, Artificial Sequence
  Description of Artificial Sequence: Synthetic oligonucleotide
uaaggaucugucacaauca

SEQ ID NO: 3213510 - RNA, 19 nt, Artificial Sequence
  Description of Artificial Sequence: Synthetic oligonucleotide
acauuuguaagguuucucu

SEQ ID NO: 3213511 - RNA, 19 nt, Artificial Sequence
  Description of Artificial Sequence: Synthetic oligonucleotide
gaugaauuuuaagauggcc

SEQ ID NO: 3213512 - RNA, 19 nt, Artificial Sequence
  Description of Artificial Sequence: Synthetic oligonucleotide
auuugucacagucaguaca

SEQ ID NO: 3213513 - RNA, 19 nt, Artificial Sequence
  Description of Artificial Sequence: Synthetic oligonucleotide
cucacauucacuacauuug

SEQ ID NO: 3213514 - RNA, 19 nt, Artificial Sequence
  Description of Artificial Sequence: Synthetic oligonucleotide
uccugugugaacucucugg

SEQ ID NO: 3213515 - RNA, 19 nt, Artificial Sequence
  Description of Artificial Sequence: Synthetic oligonucleotide
ucugucacaaucacuacau

SEQ ID NO: 3213516 - RNA, 19 nt, Artificial Sequence
  Description of Artificial Sequence: Synthetic oligonucleotide
guaaggaucugucacaauc

SEQ ID NO: 3213517 - RNA, 19 nt, Artificial Sequence
  Description of Artificial Sequence: Synthetic oligonucleotide
aagcacgugucacauucac

SEQ ID NO: 3213518 - RNA, 19 nt, Artificial Sequence
  Description of Artificial Sequence: Synthetic oligonucleotide
cucugaugaguuaugagac

SEQ ID NO: 3213519 - RNA, 19 nt, Artificial Sequence
  Description of Artificial Sequence: Synthetic oligonucleotide
aauucucagaugaucuuuc

SEQ ID NO: 3213520 - RNA, 19 nt, Artificial Sequence
  Description of Artificial Sequence: Synthetic oligonucleotide
agugaauucucagaugauc

SEQ ID NO: 3213521 - RNA, 19 nt, Artificial Sequence
  Description of Artificial Sequence: Synthetic oligonucleotide
ucuguagugaauucucaga

SEQ ID NO: 3213522 - RNA, 19 nt, Artificial Sequence
  Description of Artificial Sequence: Synthetic oligonucleotide
auuucucacauucacuaca

SEQ ID NO: 3213523 - RNA, 19 nt, Artificial Sequence
  Description of Artificial Sequence: Synthetic oligonucleotide
uuuguaagguuucucuccu

SEQ ID NO: 3213524 - RNA, 19 nt, Artificial Sequence
  Description of Artificial Sequence: Synthetic oligonucleotide
uaagguuucucucccauau

SEQ ID NO: 3213525 - RNA, 19 nt, Artificial Sequence
  Description of Artificial Sequence: Synthetic oligonucleotide
uucacuacauuuguaaggu

SEQ ID NO: 3213526 - RNA, 19 nt, Artificial Sequence
  Description of Artificial Sequence: Synthetic oligonucleotide
ugcuuuucugaguaaacga

SEQ ID NO: 3213527 - RNA, 19 nt, Artificial Sequence
  Description of Artificial Sequence: Synthetic oligonucleotide
uuuucugaguaaacgauuu

SEQ ID NO: 3213528 - RNA, 19 nt, Artificial Sequence
  Description of Artificial Sequence: Synthetic oligonucleotide
ugaaggacuugucacacuc

SEQ ID NO: 3213529 - RNA, 19 nt, Artificial Sequence
  Description of Artificial Sequence: Synthetic oligonucleotide
acauucacuacauuuguaa

SEQ ID NO: 3213530 - RNA, 19 nt, Artificial Sequence
  Description of Artificial Sequence: Synthetic oligonucleotide
aagguuucucuccugugug

SEQ ID NO: 3213531 - RNA, 19 nt, Artificial Sequence
  Description of Artificial Sequence: Synthetic oligonucleotide
cucagaugaucuuucuugg

SEQ ID NO: 3213532 - RNA, 19 nt, Artificial Sequence
  Description of Artificial Sequence: Synthetic oligonucleotide
uucucugaugaauuuuaag

SEQ ID NO: 3213533 - RNA, 19 nt, Artificial Sequence
  Description of Artificial Sequence: Synthetic oligonucleotide
uguaagguuucucuccugu

SEQ ID NO: 3213534 - RNA, 19 nt, Artificial Sequence
  Description of Artificial Sequence: Synthetic oligonucleotide
uucacuacaccuguaaggu

SEQ ID NO: 3213535 - RNA, 19 nt, Artificial Sequence
  Description of Artificial Sequence: Synthetic oligonucleotide
uucuguagugaauucucag

SEQ ID NO: 3213536 - RNA, 19 nt, Artificial Sequence
  Description of Artificial Sequence: Synthetic oligonucleotide
ucucacauucacuacauuu

SEQ ID NO: 3213537 - RNA, 19 nt, Artificial Sequence
  Description of Artificial Sequence: Synthetic oligonucleotide
cugaugcguucuaagaugg

SEQ ID NO: 3213538 - RNA, 19 nt, Artificial Sequence
  Description of Artificial Sequence: Synthetic oligonucleotide
cauuuguaaggcuucacuc

SEQ ID NO: 3213539 - RNA, 19 nt, Artificial Sequence
  Description of Artificial Sequence: Synthetic oligonucleotide
aguacauuuauaugguuuu

SEQ ID NO: 3213540 - RNA, 19 nt, Artificial Sequence
  Description of Artificial Sequence: Synthetic oligonucleotide
ucugaguaaacgauuuguc

SEQ ID NO: 3213541 - RNA, 19 nt, Artificial Sequence
  Description of Artificial Sequence: Synthetic oligonucleotide
uaagguuucucuccugugu

SEQ ID NO: 3213542 - RNA, 19 nt, Artificial Sequence
  Description of Artificial Sequence: Synthetic oligonucleotide
guuucucucccauaugaag

SEQ ID NO: 3213543 - RNA, 19 nt, Artificial Sequence
  Description of Artificial Sequence: Synthetic oligonucleotide
augaauuuuaagauggccu

SEQ ID NO: 3213544 - RNA, 19 nt, Artificial Sequence
  Description of Artificial Sequence: Synthetic oligonucleotide
uguguaaggaucugucaca

SEQ ID NO: 3213545 - RNA, 19 nt, Artificial Sequence
  Description of Artificial Sequence: Synthetic oligonucleotide
uuuguguaaggaucuguca

SEQ ID NO: 3213546 - RNA, 19 nt, Artificial Sequence
  Description of Artificial Sequence: Synthetic oligonucleotide
ucucuggugauuuguaaga

SEQ ID NO: 3213547 - RNA, 19 nt, Artificial Sequence
  Description of Artificial Sequence: Synthetic oligonucleotide
uaugaagucucugaugagu

SEQ ID NO: 3213548 - RNA, 19 nt, Artificial Sequence
  Description of Artificial Sequence: Synthetic oligonucleotide
ucacauucacuacauuugu

SEQ ID NO: 3213549 - RNA, 19 nt, Artificial Sequence
  Description of Artificial Sequence: Synthetic oligonucleotide
uuugucacagucaguacau

SEQ ID NO: 3213550 - RNA, 19 nt, Artificial Sequence
  Description of Artificial Sequence: Synthetic oligonucleotide
gucacaaucacuacauuug

SEQ ID NO: 3213551 - RNA, 19 nt, Artificial Sequence
  Description of Artificial Sequence: Synthetic oligonucleotide
uuggugaaggacuugucac

SEQ ID NO: 3213552 - RNA, 19 nt, Artificial Sequence
  Description of Artificial Sequence: Synthetic oligonucleotide
ugauuuguaagauggccuc

SEQ ID NO: 3213553 - RNA, 19 nt, Artificial Sequence
  Description of Artificial Sequence: Synthetic oligonucleotide
agaugaucuuucuugguga

SEQ ID NO: 3213554 - RNA, 19 nt, Artificial Sequence
  Description of Artificial Sequence: Synthetic oligonucleotide
uaugaauucucugaugaau

SEQ ID NO: 3213555 - RNA, 19 nt, Artificial Sequence
  Description of Artificial Sequence: Synthetic oligonucleotide
aguuaugagacugcuuuuc

SEQ ID NO: 3213556 - RNA, 19 nt, Artificial Sequence
  Description of Artificial Sequence: Synthetic oligonucleotide
cauucacuacauuuguaag

SEQ ID NO: 3213557 - RNA, 19 nt, Artificial Sequence
  Description of Artificial Sequence: Synthetic oligonucleotide
uaaggcuucacuccaguau

SEQ ID NO: 3213558 - RNA, 19 nt, Artificial Sequence
  Description of Artificial Sequence: Synthetic oligonucleotide
uuuguuaagaucaaaaccc

SEQ ID NO: 3213559 - RNA, 19 nt, Artificial Sequence
  Description of Artificial Sequence: Synthetic oligonucleotide
aacuaugaacuucugaucc

SEQ ID NO: 3213560 - RNA, 19 nt, Artificial Sequence
  Description of Artificial Sequence: Synthetic oligonucleotide
uuuucaauaaccacggagg

SEQ ID NO: 3213561 - RNA, 19 nt, Artificial Sequence
  Description of Artificial Sequence: Synthetic oligonucleotide
auauacacacuucauaucc

SEQ ID NO: 3213562 - RNA, 19 nt, Artificial Sequence
  Description of Artificial Sequence: Synthetic oligonucleotide
auccuuguaaauuagauuc

SEQ ID NO: 3213563 - RNA, 19 nt, Artificial Sequence
  Description of Artificial Sequence: Synthetic oligonucleotide
uauaguugguaucagaaug

SEQ ID NO: 3213564 - RNA, 19 nt, Artificial Sequence
  Description of Artificial Sequence: Synthetic oligonucleotide
aaccuaguaauccaggauc

SEQ ID NO: 3213565 - RNA, 19 nt, Artificial Sequence
  Description of Artificial Sequence: Synthetic oligonucleotide
uuaagaucaaaacccaucc

SEQ ID NO: 3213566 - RNA, 19 nt, Artificial Sequence
  Description of Artificial Sequence: Synthetic oligonucleotide
aauguguacguaucuuucc

SEQ ID NO: 3213567 - RNA, 19 nt, Artificial Sequence
  Description of Artificial Sequence: Synthetic oligonucleotide
aaauuuucaauaaccacgg

SEQ ID NO: 3213568 - RNA, 19 nt, Artificial Sequence
  Description of Artificial Sequence: Synthetic oligonucleotide
cugauauccgauaagaagc

SEQ ID NO: 3213569 - RNA, 19 nt, Artificial Sequence
  Description of Artificial Sequence: Synthetic oligonucleotide
auugcaaguagagauaacc

SEQ ID NO: 3213570 - RNA, 19 nt, Artificial Sequence
  Description of Artificial Sequence: Synthetic oligonucleotide
ucugauauccgauaagaag

SEQ ID NO: 3213571 - RNA, 19 nt, Artificial Sequence
  Description of Artificial Sequence: Synthetic oligonucleotide
cuuuguuaagaucaaaacc

SEQ ID NO: 3213572 - RNA, 19 nt, Artificial Sequence
  Description of Artificial Sequence: Synthetic oligonucleotide
aauugguacacugcaaggc

SEQ ID NO: 3213573 - RNA, 19 nt, Artificial Sequence
  Description of Artificial Sequence: Synthetic oligonucleotide
aguuggaaaguuugcaucc

SEQ ID NO: 3213574 - RNA, 19 nt, Artificial Sequence
  Description of Artificial Sequence: Synthetic oligonucleotide
uuguaaauuagauuccuag

SEQ ID NO: 3213575 - RNA, 19 nt, Artificial Sequence
  Description of Artificial Sequence: Synthetic oligonucleotide
agagauaaccuaguaaucc

SEQ ID NO: 3213576 - RNA, 19 nt, Artificial Sequence
  Description of Artificial Sequence: Synthetic oligonucleotide
gguauuuuaacucauauuc

SEQ ID NO: 3213577 - RNA, 19 nt, Artificial Sequence
  Description of Artificial Sequence: Synthetic oligonucleotide
auuuucaauaaccacggag

SEQ ID NO: 3213578 - RNA, 19 nt, Artificial Sequence
  Description of Artificial Sequence: Synthetic oligonucleotide
ugaacuaugaacuucugau

SEQ ID NO: 3213579 - RNA, 19 nt, Artificial Sequence
  Description of Artificial Sequence: Synthetic oligonucleotide
uuaaauuuucaauaaccac

SEQ ID NO: 3213580 - RNA, 19 nt, Artificial Sequence
  Description of Artificial Sequence: Synthetic oligonucleotide
uucauuauccugaagguaa

SEQ ID NO: 3213581 - RNA, 19 nt, Artificial Sequence
  Description of Artificial Sequence: Synthetic oligonucleotide
uuauccugaagguaauugg

SEQ ID NO: 3213582 - RNA, 19 nt, Artificial Sequence
  Description of Artificial Sequence: Synthetic oligonucleotide
aguuauaauauacacacuu

SEQ ID NO: 3213583 - RNA, 19 nt, Artificial Sequence
  Description of Artificial Sequence: Synthetic oligonucleotide
auuauuucaaaaucucucu

SEQ ID NO: 3213584 - RNA, 19 nt, Artificial Sequence
  Description of Artificial Sequence: Synthetic oligonucleotide
uuuaacucauauucuagug

SEQ ID NO: 3213585 - RNA, 19 nt, Artificial Sequence
  Description of Artificial Sequence: Synthetic oligonucleotide
aacauuccgguauuuuaac

SEQ ID NO: 3213586 - RNA, 19 nt, Artificial Sequence
  Description of Artificial Sequence: Synthetic oligonucleotide
uuguacauugcucugacaa

SEQ ID NO: 3213587 - RNA, 19 nt, Artificial Sequence
  Description of Artificial Sequence: Synthetic oligonucleotide
cauuauuucaaaaucucuc

SEQ ID NO: 3213588 - RNA, 19 nt, Artificial Sequence
  Description of Artificial Sequence: Synthetic oligonucleotide
uaacucauauucuagugug

SEQ ID NO: 3213589 - RNA, 19 nt, Artificial Sequence
  Description of Artificial Sequence: Synthetic oligonucleotide
uaaauuagauuccuaguaa

SEQ ID NO: 3213590 - RNA, 19 nt, Artificial Sequence
  Description of Artificial Sequence: Synthetic oligonucleotide
cugaauucuaguuuccagg

SEQ ID NO: 3213591 - RNA, 19 nt, Artificial Sequence
  Description of Artificial Sequence: Synthetic oligonucleotide
gucacuaucaacauuccgg

SEQ ID NO: 3213592 - RNA, 19 nt, Artificial Sequence
  Description of Artificial Sequence: Synthetic oligonucleotide
gagcaaaccaaauacugcc

SEQ ID NO: 3213593 - RNA, 19 nt, Artificial Sequence
  Description of Artificial Sequence: Synthetic oligonucleotide
uuaacucauauucuagugu

SEQ ID NO: 3213594 - RNA, 19 nt, Artificial Sequence
  Description of Artificial Sequence: Synthetic oligonucleotide
aaauuagauuccuaguaau

SEQ ID NO: 3213595 - RNA, 19 nt, Artificial Sequence
  Description of Artificial Sequence: Synthetic oligonucleotide
ugaauucuaguuuccaggc

SEQ ID NO: 3213596 - RNA, 19 nt, Artificial Sequence
  Description of Artificial Sequence: Synthetic oligonucleotide
aucagaauguacuaccuug

SEQ ID NO: 3213597 - RNA, 19 nt, Artificial Sequence
  Description of Artificial Sequence: Synthetic oligonucleotide
cuuaaauuuucaauaacca

SEQ ID NO: 3213598 - RNA, 19 nt, Artificial Sequence
  Description of Artificial Sequence: Synthetic oligonucleotide
aacauaguauaguugguau

SEQ ID NO: 3213599 - RNA, 19 nt, Artificial Sequence
  Description of Artificial Sequence: Synthetic oligonucleotide
aaaguuugcauccaacauu

SEQ ID NO: 3213600 - RNA, 19 nt, Artificial Sequence
  Description of Artificial Sequence: Synthetic oligonucleotide
ccaguuauaauauacacac

SEQ ID NO: 3213601 - RNA, 19 nt, Artificial Sequence
  Description of Artificial Sequence: Synthetic oligonucleotide
uccauuuguacauugcucu

SEQ ID NO: 3213602 - RNA, 19 nt, Artificial Sequence
  Description of Artificial Sequence: Synthetic oligonucleotide
ucaauaaccacggagguuc

SEQ ID NO: 3213603 - RNA, 19 nt, Artificial Sequence
  Description of Artificial Sequence: Synthetic oligonucleotide
auuccuuaaauuuucaaua

SEQ ID NO: 3213604 - RNA, 19 nt, Artificial Sequence
  Description of Artificial Sequence: Synthetic oligonucleotide
guaauugguacacugcaag

SEQ ID NO: 3213605 - RNA, 19 nt, Artificial Sequence
  Description of Artificial Sequence: Synthetic oligonucleotide
caaggcaugauccaagccc

SEQ ID NO: 3213606 - RNA, 19 nt, Artificial Sequence
  Description of Artificial Sequence: Synthetic oligonucleotide
uguaaauuagauuccuagu

SEQ ID NO: 3213607 - RNA, 19 nt, Artificial Sequence
  Description of Artificial Sequence: Synthetic oligonucleotide
aagaucaaaacccauccuu

SEQ ID NO: 3213608 - RNA, 19 nt, Artificial Sequence
  Description of Artificial Sequence: Synthetic oligonucleotide
uuuuaacucauauucuagu

SEQ ID NO: 3213609 - RNA, 19 nt, Artificial Sequence
  Description of Artificial Sequence: Synthetic oligonucleotide
gauccauuauuucaaaauc

SEQ ID NO: 3213610 - RNA, 19 nt, Artificial Sequence
  Description of Artificial Sequence: Synthetic oligonucleotide
acuucugauccauuuguac

SEQ ID NO: 3213611 - RNA, 19 nt, Artificial Sequence
  Description of Artificial Sequence: Synthetic oligonucleotide
uucauauccugaauucuag

SEQ ID NO: 3213612 - RNA, 19 nt, Artificial Sequence
  Description of Artificial Sequence: Synthetic oligonucleotide
aauucuaguuuccaggcuu

SEQ ID NO: 3213613 - RNA, 19 nt, Artificial Sequence
  Description of Artificial Sequence: Synthetic oligonucleotide
uuuucauuauccugaaggu

SEQ ID NO: 3213614 - RNA, 19 nt, Artificial Sequence
  Description of Artificial Sequence: Synthetic oligonucleotide
uaauugguacacugcaagg

SEQ ID NO: 3213615 - RNA, 19 nt, Artificial Sequence
  Description of Artificial Sequence: Synthetic oligonucleotide
uauuuuaacucauauucua

SEQ ID NO: 3213616 - RNA, 19 nt, Artificial Sequence
  Description of Artificial Sequence: Synthetic oligonucleotide
uauaauauacacacuucau

SEQ ID NO: 3213617 - RNA, 19 nt, Artificial Sequence
  Description of Artificial Sequence: Synthetic oligonucleotide
uuccauugcaaguagagau

SEQ ID NO: 3213618 - RNA, 19 nt, Artificial Sequence
  Description of Artificial Sequence: Synthetic oligonucleotide
uuccuaguaaugauggucu

SEQ ID NO: 3213619 - RNA, 19 nt, Artificial Sequence
  Description of Artificial Sequence: Synthetic oligonucleotide
aaugauggucuuccaaaug

SEQ ID NO: 3213620 - RNA, 19 nt, Artificial Sequence
  Description of Artificial Sequence: Synthetic oligonucleotide
acuaucaacauuccgguau

SEQ ID NO: 3213621 - RNA, 19 nt, Artificial Sequence
  Description of Artificial Sequence: Synthetic oligonucleotide
ccuuaaauuuucaauaacc

SEQ ID NO: 3213622 - RNA, 19 nt, Artificial Sequence
  Description of Artificial Sequence: Synthetic oligonucleotide
ucagaauguacuaccuugc

SEQ ID NO: 3213623 - RNA, 19 nt, Artificial Sequence
  Description of Artificial Sequence: Synthetic oligonucleotide
aagagcaaaccaaauacug

SEQ ID NO: 3213624 - RNA, 19 nt, Artificial Sequence
  Description of Artificial Sequence: Synthetic oligonucleotide
uccauuauuucaaaaucuc

SEQ ID NO: 3213625 - RNA, 19 nt, Artificial Sequence
  Description of Artificial Sequence: Synthetic oligonucleotide
uauccgauaagaagcuucc

SEQ ID NO: 3213626 - RNA, 19 nt, Artificial Sequence
  Description of Artificial Sequence: Synthetic oligonucleotide
aauuagauuccuaguaaug

SEQ ID NO: 3213627 - RNA, 19 nt, Artificial Sequence
  Description of Artificial Sequence: Synthetic oligonucleotide
auuccuaguaaugaugguc

SEQ ID NO: 3213628 - RNA, 19 nt, Artificial Sequence
  Description of Artificial Sequence: Synthetic oligonucleotide
aauguacuaccuugccagg

SEQ ID NO: 3213629 - RNA, 19 nt, Artificial Sequence
  Description of Artificial Sequence: Synthetic oligonucleotide
cuaguaaugauggucuucc

SEQ ID NO: 3213630 - RNA, 19 nt, Artificial Sequence
  Description of Artificial Sequence: Synthetic oligonucleotide
ucaaaacccauccuuguaa

SEQ ID NO: 3213631 - RNA, 19 nt, Artificial Sequence
  Description of Artificial Sequence: Synthetic oligonucleotide
agauuccuaguaaugaugg

SEQ ID NO: 3213632 - RNA, 19 nt, Artificial Sequence
  Description of Artificial Sequence: Synthetic oligonucleotide
acugccaguuauaauauac

SEQ ID NO: 3213633 - RNA, 19 nt, Artificial Sequence
  Description of Artificial Sequence: Synthetic oligonucleotide
agagcaaaccaaauacugc

SEQ ID NO: 3213634 - RNA, 19 nt, Artificial Sequence
  Description of Artificial Sequence: Synthetic oligonucleotide
augauggucuuccaaaugu

SEQ ID NO: 3213635 - RNA, 19 nt, Artificial Sequence
  Description of Artificial Sequence: Synthetic oligonucleotide
acauaguauaguugguauc

SEQ ID NO: 3213636 - RNA, 19 nt, Artificial Sequence
  Description of Artificial Sequence: Synthetic oligonucleotide
ugaacuucugauccauuug

SEQ ID NO: 3213637 - RNA, 19 nt, Artificial Sequence
  Description of Artificial Sequence: Synthetic oligonucleotide
uguacguaucuuuccuucg

SEQ ID NO: 3213638 - RNA, 19 nt, Artificial Sequence
  Description of Artificial Sequence: Synthetic oligonucleotide
uuguuaagaucaaaaccca

SEQ ID NO: 3213639 - RNA, 19 nt, Artificial Sequence
  Description of Artificial Sequence: Synthetic oligonucleotide
ugucacuaucaacauuccg

SEQ ID NO: 3213640 - RNA, 19 nt, Artificial Sequence
  Description of Artificial Sequence: Synthetic oligonucleotide
uucaaaaucucucuuucuu

SEQ ID NO: 3213641 - RNA, 19 nt, Artificial Sequence
  Description of Artificial Sequence: Synthetic oligonucleotide
uuucaauaaccacggaggu

SEQ ID NO: 3213642 - RNA, 19 nt, Artificial Sequence
  Description of Artificial Sequence: Synthetic oligonucleotide
uauucuagugugcauuccu

SEQ ID NO: 3213643 - RNA, 19 nt, Artificial Sequence
  Description of Artificial Sequence: Synthetic oligonucleotide
uauccugaauucuaguuuc

SEQ ID NO: 3213644 - RNA, 19 nt, Artificial Sequence
  Description of Artificial Sequence: Synthetic oligonucleotide
uauccugaagguaauuggu

SEQ ID NO: 3213645 - RNA, 19 nt, Artificial Sequence
  Description of Artificial Sequence: Synthetic oligonucleotide
gauaaccuaguaauccagg

SEQ ID NO: 3213646 - RNA, 19 nt, Artificial Sequence
  Description of Artificial Sequence: Synthetic oligonucleotide
guaaauuagauuccuagua

SEQ ID NO: 3213647 - RNA, 19 nt, Artificial Sequence
  Description of Artificial Sequence: Synthetic oligonucleotide
aguagagauaaccuaguaa

SEQ ID NO: 3213648 - RNA, 19 nt, Artificial Sequence
  Description of Artificial Sequence: Synthetic oligonucleotide
ugauauccgauaagaagcu

SEQ ID NO: 3213649 - RNA, 19 nt, Artificial Sequence
  Description of Artificial Sequence: Synthetic oligonucleotide
gacgccuuuguuaagauca

SEQ ID NO: 3213650 - RNA, 19 nt, Artificial Sequence
  Description of Artificial Sequence: Synthetic oligonucleotide
aacucauauucuagugugc

SEQ ID NO: 3213651 - RNA, 19 nt, Artificial Sequence
  Description of Artificial Sequence: Synthetic oligonucleotide
gauccaagcccucauacca

SEQ ID NO: 3213652 - RNA, 19 nt, Artificial Sequence
  Description of Artificial Sequence: Synthetic oligonucleotide
ucacuaucaacauuccggu

SEQ ID NO: 3213653 - RNA, 19 nt, Artificial Sequence
  Description of Artificial Sequence: Synthetic oligonucleotide
uugcaaguagagauaaccu

SEQ ID NO: 3213654 - RNA, 19 nt, Artificial Sequence
  Description of Artificial Sequence: Synthetic oligonucleotide
gguaucagaauguacuacc

SEQ ID NO: 3213655 - RNA, 19 nt, Artificial Sequence
  Description of Artificial Sequence: Synthetic oligonucleotide
ugccaguuauaauauacac

SEQ ID NO: 3213656 - RNA, 19 nt, Artificial Sequence
  Description of Artificial Sequence: Synthetic oligonucleotide
guagagauaaccuaguaau

SEQ ID NO: 3213657 - RNA, 19 nt, Artificial Sequence
  Description of Artificial Sequence: Synthetic oligonucleotide
uccuuaaauuuucaauaac

SEQ ID NO: 3213658 - RNA, 19 nt, Artificial Sequence
  Description of Artificial Sequence: Synthetic oligonucleotide
aauauauauauauauauuc

SEQ ID NO: 3213659 - RNA, 19 nt, Artificial Sequence
  Description of Artificial Sequence: Synthetic oligonucleotide
aaauaagugucuuugcuac

SEQ ID NO: 3213660 - RNA, 19 nt, Artificial Sequence
  Description of Artificial Sequence: Synthetic oligonucleotide
aauuacuaggaucauaaag

SEQ ID NO: 3213661 - RNA, 19 nt, Artificial Sequence
  Description of Artificial Sequence: Synthetic oligonucleotide
aauggcagaaauuucaaag

SEQ ID NO: 3213662 - RNA, 19 nt, Artificial Sequence
  Description of Artificial Sequence: Synthetic oligonucleotide
uuuaaauauauauauauau

SEQ ID NO: 3213663 - RNA, 19 nt, Artificial Sequence
  Description of Artificial Sequence: Synthetic oligonucleotide
uuagugacauauaaaaggg

SEQ ID NO: 3213664 - RNA, 19 nt, Artificial Sequence
  Description of Artificial Sequence: Synthetic oligonucleotide
uauauauauauauucaucu

SEQ ID NO: 3213665 - RNA, 19 nt, Artificial Sequence
  Description of Artificial Sequence: Synthetic oligonucleotide
uuugcuacuacccaguaag

SEQ ID NO: 3213666 - RNA, 19 nt, Artificial Sequence
  Description of Artificial Sequence: Synthetic oligonucleotide
uucuaaugcaaacaggugg

SEQ ID NO: 3213667 - RNA, 19 nt, Artificial Sequence
  Description of Artificial Sequence: Synthetic oligonucleotide
uaaaaucauaucauaaucc

SEQ ID NO: 3213668 - RNA, 19 nt, Artificial Sequence
  Description of Artificial Sequence: Synthetic oligonucleotide
uauuuaaauauauauauau

SEQ ID NO: 3213669 - RNA, 19 nt, Artificial Sequence
  Description of Artificial Sequence: Synthetic oligonucleotide
uaaauauauauauauauau

SEQ ID NO: 3213670 - RNA, 19 nt, Artificial Sequence
  Description of Artificial Sequence: Synthetic oligonucleotide
ugcauuuucaacuugggcc

SEQ ID NO: 3213671 - RNA, 19 nt, Artificial Sequence
  Description of Artificial Sequence: Synthetic oligonucleotide
auuacuaggaucauaaagg

SEQ ID NO: 3213672 - RNA, 19 nt, Artificial Sequence
  Description of Artificial Sequence: Synthetic oligonucleotide
uuucauuaagguaaaagca

SEQ ID NO: 3213673 - RNA, 19 nt, Artificial Sequence
  Description of Artificial Sequence: Synthetic oligonucleotide
ucaaaguuuucucuaauag

SEQ ID NO: 3213674 - RNA, 19 nt, Artificial Sequence
  Description of Artificial Sequence: Synthetic oligonucleotide
uuugguacuguuuuaauca

SEQ ID NO: 3213675 - RNA, 19 nt, Artificial Sequence
  Description of Artificial Sequence: Synthetic oligonucleotide
gaagaaugcacuuugguac

SEQ ID NO: 3213676 - RNA, 19 nt, Artificial Sequence
  Description of Artificial Sequence: Synthetic oligonucleotide
cauaucauaauccuuauuc

SEQ ID NO: 3213677 - RNA, 19 nt, Artificial Sequence
  Description of Artificial Sequence: Synthetic oligonucleotide
aaugauuagugacauauaa

SEQ ID NO: 3213678 - RNA, 19 nt, Artificial Sequence
  Description of Artificial Sequence: Synthetic oligonucleotide
ugauuagugacauauaaaa

SEQ ID NO: 3213679 - RNA, 19 nt, Artificial Sequence
  Description of Artificial Sequence: Synthetic oligonucleotide
aguuuucucuaauagaauc

SEQ ID NO: 3213680 - RNA, 19 nt, Artificial Sequence
  Description of Artificial Sequence: Synthetic oligonucleotide
aagggaauguaugaaaugg

SEQ ID NO: 3213681 - RNA, 19 nt, Artificial Sequence
  Description of Artificial Sequence: Synthetic oligonucleotide
uuaaauauauauauauaua

SEQ ID NO: 3213682 - RNA, 19 nt, Artificial Sequence
  Description of Artificial Sequence: Synthetic oligonucleotide
uccuuauucucauugagcc

SEQ ID NO: 3213683 - RNA, 19 nt, Artificial Sequence
  Description of Artificial Sequence: Synthetic oligonucleotide
agaagcaccaagcaccacc

SEQ ID NO: 3213684 - RNA, 19 nt, Artificial Sequence
  Description of Artificial Sequence: Synthetic oligonucleotide
uaagguaaaagcaucccug

SEQ ID NO: 3213685 - RNA, 19 nt, Artificial Sequence
  Description of Artificial Sequence: Synthetic oligonucleotide
gaugcaaaagcacauggug

SEQ ID NO: 3213686 - RNA, 19 nt, Artificial Sequence
  Description of Artificial Sequence: Synthetic oligonucleotide
uauauauauauauauucau

SEQ ID NO: 3213687 - RNA, 19 nt, Artificial Sequence
  Description of Artificial Sequence: Synthetic oligonucleotide
aauccuuauucucauugag

SEQ ID NO: 3213688 - RNA, 19 nt, Artificial Sequence
  Description of Artificial Sequence: Synthetic oligonucleotide
aaaguuuucucuaauagaa

SEQ ID NO: 3213689 - RNA, 19 nt, Artificial Sequence
  Description of Artificial Sequence: Synthetic oligonucleotide
ugucaaaaggcucuuugag

SEQ ID NO: 3213690 - RNA, 19 nt, Artificial Sequence
  Description of Artificial Sequence: Synthetic oligonucleotide
cuaaaaucauaucauaauc

SEQ ID NO: 3213691 - RNA, 19 nt, Artificial Sequence
  Description of Artificial Sequence: Synthetic oligonucleotide
aagguuuauuaugaugccc

SEQ ID NO: 3213692 - RNA, 19 nt, Artificial Sequence
  Description of Artificial Sequence: Synthetic oligonucleotide
aaguccucugucaaaaggc

SEQ ID NO: 3213693 - RNA, 19 nt, Artificial Sequence
  Description of Artificial Sequence: Synthetic oligonucleotide
acauauaaaaggguggcac

SEQ ID NO: 3213694 - RNA, 19 nt, Artificial Sequence
  Description of Artificial Sequence: Synthetic oligonucleotide
uuaaucacacaucauccca

SEQ ID NO: 3213695 - RNA, 19 nt, Artificial Sequence
  Description of Artificial Sequence: Synthetic oligonucleotide
ucuaaugcaaacaggugga

SEQ ID NO: 3213696 - RNA, 19 nt, Artificial Sequence
  Description of Artificial Sequence: Synthetic oligonucleotide
ucaaaaggcucuuugaguc

SEQ ID NO: 3213697 - RNA, 19 nt, Artificial Sequence
  Description of Artificial Sequence: Synthetic oligonucleotide
uucauuaagguaaaagcau

SEQ ID NO: 3213698 - RNA, 19 nt, Artificial Sequence
  Description of Artificial Sequence: Synthetic oligonucleotide
uaacagcucauacagacac

SEQ ID NO: 3213699 - RNA, 19 nt, Artificial Sequence
  Description of Artificial Sequence: Synthetic oligonucleotide
auauauauauauauucauc

SEQ ID NO: 3213700 - RNA, 19 nt, Artificial Sequence
  Description of Artificial Sequence: Synthetic oligonucleotide
uaugaaauggcagaaauuu

SEQ ID NO: 3213701 - RNA, 19 nt, Artificial Sequence
  Description of Artificial Sequence: Synthetic oligonucleotide
uguaugaaauggcagaaau

SEQ ID NO: 3213702 - RNA, 19 nt, Artificial Sequence
  Description of Artificial Sequence: Synthetic oligonucleotide
ugauucuaaugcaaacagg

SEQ ID NO: 3213703 - RNA, 19 nt, Artificial Sequence
  Description of Artificial Sequence: Synthetic oligonucleotide
uacugcauuuucaacuugg

SEQ ID NO: 3213704 - RNA, 19 nt, Artificial Sequence
  Description of Artificial Sequence: Synthetic oligonucleotide
aagugucuuugcuacuacc

SEQ ID NO: 3213705 - RNA, 19 nt, Artificial Sequence
  Description of Artificial Sequence: Synthetic oligonucleotide
agcacauggugucagcugc

SEQ ID NO: 3213706 - RNA, 19 nt, Artificial Sequence
  Description of Artificial Sequence: Synthetic oligonucleotide
agcucuccuauuuuggggc

SEQ ID NO: 3213707 - RNA, 19 nt, Artificial Sequence
  Description of Artificial Sequence: Synthetic oligonucleotide
aaaagcacauggugucagc

SEQ ID NO: 3213708 - RNA, 19 nt, Artificial Sequence
  Description of Artificial Sequence: Synthetic oligonucleotide
auuaagguaaaagcauccc

SEQ ID NO: 3213709 - RNA, 19 nt, Artificial Sequence
  Description of Artificial Sequence: Synthetic oligonucleotide
ucaagguaguaacuagggg

SEQ ID NO: 3213710 - RNA, 19 nt, Artificial Sequence
  Description of Artificial Sequence: Synthetic oligonucleotide
caaaaccaaaacuuaauuc

SEQ ID NO: 3213711 - RNA, 19 nt, Artificial Sequence
  Description of Artificial Sequence: Synthetic oligonucleotide
uuaagguaaaagcaucccu

SEQ ID NO: 3213712 - RNA, 19 nt, Artificial Sequence
  Description of Artificial Sequence: Synthetic oligonucleotide
cauaccuugucccaagucc

SEQ ID NO: 3213713 - RNA, 19 nt, Artificial Sequence
  Description of Artificial Sequence: Synthetic oligonucleotide
ucauaaagggaauguauga

SEQ ID NO: 3213714 - RNA, 19 nt, Artificial Sequence
  Description of Artificial Sequence: Synthetic oligonucleotide
gaauguaugaaauggcaga

SEQ ID NO: 3213715 - RNA, 19 nt, Artificial Sequence
  Description of Artificial Sequence: Synthetic oligonucleotide
uaugguaacagcucauaca

SEQ ID NO: 3213716 - RNA, 19 nt, Artificial Sequence
  Description of Artificial Sequence: Synthetic oligonucleotide
aaaaggguggcacauggaa

SEQ ID NO: 3213717 - RNA, 19 nt, Artificial Sequence
  Description of Artificial Sequence: Synthetic oligonucleotide
cauuaagguaaaagcaucc

SEQ ID NO: 3213718 - RNA, 19 nt, Artificial Sequence
  Description of Artificial Sequence: Synthetic oligonucleotide
uucucuaauagaaucuccu

SEQ ID NO: 3213719 - RNA, 19 nt, Artificial Sequence
  Description of Artificial Sequence: Synthetic oligonucleotide
ggaagguuuauuaugaugc

SEQ ID NO: 3213720 - RNA, 19 nt, Artificial Sequence
  Description of Artificial Sequence: Synthetic oligonucleotide
cugauucuaaugcaaacag

SEQ ID NO: 3213721 - RNA, 19 nt, Artificial Sequence
  Description of Artificial Sequence: Synthetic oligonucleotide
auauauauauauauauuca

SEQ ID NO: 3213722 - RNA, 19 nt, Artificial Sequence
  Description of Artificial Sequence: Synthetic oligonucleotide
uaaagggaauguaugaaau

SEQ ID NO: 3213723 - RNA, 19 nt, Artificial Sequence
  Description of Artificial Sequence: Synthetic oligonucleotide
auaucauaauccuuauucu

SEQ ID NO: 3213724 - RNA, 19 nt, Artificial Sequence
  Description of Artificial Sequence: Synthetic oligonucleotide
ucauuaagguaaaagcauc

SEQ ID NO: 3213725 - RNA, 19 nt, Artificial Sequence
  Description of Artificial Sequence: Synthetic oligonucleotide
agcugcuaagaaaauaacc

SEQ ID NO: 3213726 - RNA, 19 nt, Artificial Sequence
  Description of Artificial Sequence: Synthetic oligonucleotide
agacacagggaacaccagc

SEQ ID NO: 3213727 - RNA, 19 nt, Artificial Sequence
  Description of Artificial Sequence: Synthetic oligonucleotide
cauuucauuaagguaaaag

SEQ ID NO: 3213728 - RNA, 19 nt, Artificial Sequence
  Description of Artificial Sequence: Synthetic oligonucleotide
aaauauauauauauauauu

SEQ ID NO: 3213729 - RNA, 19 nt, Artificial Sequence
  Description of Artificial Sequence: Synthetic oligonucleotide
agcccagaagggcagaagc

SEQ ID NO: 3213730 - RNA, 19 nt, Artificial Sequence
  Description of Artificial Sequence: Synthetic oligonucleotide
aagguaaaagcaucccuga

SEQ ID NO: 3213731 - RNA, 19 nt, Artificial Sequence
  Description of Artificial Sequence: Synthetic oligonucleotide
agguuuauuaugaugcccg

SEQ ID NO: 3213732 - RNA, 19 nt, Artificial Sequence
  Description of Artificial Sequence: Synthetic oligonucleotide
agugacauauaaaagggug

SEQ ID NO: 3213733 - RNA, 19 nt, Artificial Sequence
  Description of Artificial Sequence: Synthetic oligonucleotide
ucugauucuaaugcaaaca

SEQ ID NO: 3213734 - RNA, 19 nt, Artificial Sequence
  Description of Artificial Sequence: Synthetic oligonucleotide
acagggcauaccuuguccc

SEQ ID NO: 3213735 - RNA, 19 nt, Artificial Sequence
  Description of Artificial Sequence: Synthetic oligonucleotide
caagguaguaacuagggga

SEQ ID NO: 3213736 - RNA, 19 nt, Artificial Sequence
  Description of Artificial Sequence: Synthetic oligonucleotide
ugaagaaugcacuuuggua

SEQ ID NO: 3213737 - RNA, 19 nt, Artificial Sequence
  Description of Artificial Sequence: Synthetic oligonucleotide
ugacauauaaaaggguggc

SEQ ID NO: 3213738 - RNA, 19 nt, Artificial Sequence
  Description of Artificial Sequence: Synthetic oligonucleotide
ggcucuuugagucaagggg

SEQ ID NO: 3213739 - RNA, 19 nt, Artificial Sequence
  Description of Artificial Sequence: Synthetic oligonucleotide
cucuaauagaaucuccuug

SEQ ID NO: 3213740 - RNA, 19 nt, Artificial Sequence
  Description of Artificial Sequence: Synthetic oligonucleotide
aagaaugcacuuugguacu

SEQ ID NO: 3213741 - RNA, 19 nt, Artificial Sequence
  Description of Artificial Sequence: Synthetic oligonucleotide
cauugaagaaugcacuuug

SEQ ID NO: 3213742 - RNA, 19 nt, Artificial Sequence
  Description of Artificial Sequence: Synthetic oligonucleotide
uugaagaaugcacuuuggu

SEQ ID NO: 3213743 - RNA, 19 nt, Artificial Sequence
  Description of Artificial Sequence: Synthetic oligonucleotide
cuuaauuccaacuggaagu

SEQ ID NO: 3213744 - RNA, 19 nt, Artificial Sequence
  Description of Artificial Sequence: Synthetic oligonucleotide
auagaaucuccuuguaucu

SEQ ID NO: 3213745 - RNA, 19 nt, Artificial Sequence
  Description of Artificial Sequence: Synthetic oligonucleotide
auaagucacaaccaccagu

SEQ ID NO: 3213746 - RNA, 19 nt, Artificial Sequence
  Description of Artificial Sequence: Synthetic oligonucleotide
auaaagggaauguaugaaa

SEQ ID NO: 3213747 - RNA, 19 nt, Artificial Sequence
  Description of Artificial Sequence: Synthetic oligonucleotide
uuaauuccaacuggaagug

SEQ ID NO: 3213748 - RNA, 19 nt, Artificial Sequence
  Description of Artificial Sequence: Synthetic oligonucleotide
ugcacuuugguacuguuuu

SEQ ID NO: 3213749 - RNA, 19 nt, Artificial Sequence
  Description of Artificial Sequence: Synthetic oligonucleotide
ugacuaugguaacagcuca

SEQ ID NO: 3213750 - RNA, 19 nt, Artificial Sequence
  Description of Artificial Sequence: Synthetic oligonucleotide
gaagguuuauuaugaugcc

SEQ ID NO: 3213751 - RNA, 19 nt, Artificial Sequence
  Description of Artificial Sequence: Synthetic oligonucleotide
aaggguggcacauggaaaa

SEQ ID NO: 3213752 - RNA, 19 nt, Artificial Sequence
  Description of Artificial Sequence: Synthetic oligonucleotide
uuaccaaaaccaaaacuua

SEQ ID NO: 3213753 - RNA, 19 nt, Artificial Sequence
  Description of Artificial Sequence: Synthetic oligonucleotide
cagcauuucauuaagguaa

SEQ ID NO: 3213754 - RNA, 19 nt, Artificial Sequence
  Description of Artificial Sequence: Synthetic oligonucleotide
aaaccaaaacuuaauucca

SEQ ID NO: 3213755 - RNA, 19 nt, Artificial Sequence
  Description of Artificial Sequence: Synthetic oligonucleotide
uaauagaaucuccuuguau

SEQ ID NO: 3213756 - RNA, 19 nt, Artificial Sequence
  Description of Artificial Sequence: Synthetic oligonucleotide
aauguaugaaauggcagaa

SEQ ID NO: 3213757 - RNA, 19 nt, Artificial Sequence
  Description of Artificial Sequence: Synthetic oligonucleotide
gauucuaaugcaaacaggu

SEQ ID NO: 3213758 - RNA, 19 nt, Artificial Sequence
  Description of Artificial Sequence: Synthetic oligonucleotide
uuaaauucaauuuuguucc

SEQ ID NO: 3213759 - RNA, 19 nt, Artificial Sequence
  Description of Artificial Sequence: Synthetic oligonucleotide
gauugcaucagucagaucc

SEQ ID NO: 3213760 - RNA, 19 nt, Artificial Sequence
  Description of Artificial Sequence: Synthetic oligonucleotide
auagacuccacgcucaucc

SEQ ID NO: 3213761 - RNA, 19 nt, Artificial Sequence
  Description of Artificial Sequence: Synthetic oligonucleotide
aauaaggcagggcacgugc

SEQ ID NO: 3213762 - RNA, 19 nt, Artificial Sequence
  Description of Artificial Sequence: Synthetic oligonucleotide
aauuuuguuccucaguaug

SEQ ID NO: 3213763 - RNA, 19 nt, Artificial Sequence
  Description of Artificial Sequence: Synthetic oligonucleotide
augaaagccauauuuuccc

SEQ ID NO: 3213764 - RNA, 19 nt, Artificial Sequence
  Description of Artificial Sequence: Synthetic oligonucleotide
aaagccauauuuucccagc

SEQ ID NO: 3213765 - RNA, 19 nt, Artificial Sequence
  Description of Artificial Sequence: Synthetic oligonucleotide
aauuugagcacguccuggc

SEQ ID NO: 3213766 - RNA, 19 nt, Artificial Sequence
  Description of Artificial Sequence: Synthetic oligonucleotide
uugauggccauuaagaaac

SEQ ID NO: 3213767 - RNA, 19 nt, Artificial Sequence
  Description of Artificial Sequence: Synthetic oligonucleotide
aaucugaguggucaagggc

SEQ ID NO: 3213768 - RNA, 19 nt, Artificial Sequence
  Description of Artificial Sequence: Synthetic oligonucleotide
aaagggaaugucugugucc

SEQ ID NO: 3213769 - RNA, 19 nt, Artificial Sequence
  Description of Artificial Sequence: Synthetic oligonucleotide
aggagugagauagagagcc

SEQ ID NO: 3213770 - RNA, 19 nt, Artificial Sequence
  Description of Artificial Sequence: Synthetic oligonucleotide
uguccuggaaaucugagug

SEQ ID NO: 3213771 - RNA, 19 nt, Artificial Sequence
  Description of Artificial Sequence: Synthetic oligonucleotide
uggcugaugaauuugagca

SEQ ID NO: 3213772 - RNA, 19 nt, Artificial Sequence
  Description of Artificial Sequence: Synthetic oligonucleotide
ucugcagguaauaacuggg

SEQ ID NO: 3213773 - RNA, 19 nt, Artificial Sequence
  Description of Artificial Sequence: Synthetic oligonucleotide
aauucaauuuuguuccuca

SEQ ID NO: 3213774 - RNA, 19 nt, Artificial Sequence
  Description of Artificial Sequence: Synthetic oligonucleotide
gaugaauuugagcacgucc

SEQ ID NO: 3213775 - RNA, 19 nt, Artificial Sequence
  Description of Artificial Sequence: Synthetic oligonucleotide
aaaucugaguggucaaggg

SEQ ID NO: 3213776 - RNA, 19 nt, Artificial Sequence
  Description of Artificial Sequence: Synthetic oligonucleotide
uaaccuguaauaaggcagg

SEQ ID NO: 3213777 - RNA, 19 nt, Artificial Sequence
  Description of Artificial Sequence: Synthetic oligonucleotide
acugugagcacccagucuc

SEQ ID NO: 3213778 - RNA, 19 nt, Artificial Sequence
  Description of Artificial Sequence: Synthetic oligonucleotide
ugucgggaggucuugaugg

SEQ ID NO: 3213779 - RNA, 19 nt, Artificial Sequence
  Description of Artificial Sequence: Synthetic oligonucleotide
uuuguuagcagccuucccu

SEQ ID NO: 3213780 - RNA, 19 nt, Artificial Sequence
  Description of Artificial Sequence: Synthetic oligonucleotide
ucaauuuuguuccucagua

SEQ ID NO: 3213781 - RNA, 19 nt, Artificial Sequence
  Description of Artificial Sequence: Synthetic oligonucleotide
uacuagggaagccucauag

SEQ ID NO: 3213782 - RNA, 19 nt, Artificial Sequence
  Description of Artificial Sequence: Synthetic oligonucleotide
uguaauaaggcagggcacg

SEQ ID NO: 3213783 - RNA, 19 nt, Artificial Sequence
  Description of Artificial Sequence: Synthetic oligonucleotide
gagauagagagccuggcag

SEQ ID NO: 3213784 - RNA, 19 nt, Artificial Sequence
  Description of Artificial Sequence: Synthetic oligonucleotide
aagccauauuuucccagcc

SEQ ID NO: 3213785 - RNA, 19 nt, Artificial Sequence
  Description of Artificial Sequence: Synthetic oligonucleotide
agggaagccucauagacuc

SEQ ID NO: 3213786 - RNA, 19 nt, Artificial Sequence
  Description of Artificial Sequence: Synthetic oligonucleotide
agaaacuuguuccaguugu

SEQ ID NO: 3213787 - RNA, 19 nt, Artificial Sequence
  Description of Artificial Sequence: Synthetic oligonucleotide
uugucugcagguaauaacu

SEQ ID NO: 3213788 - RNA, 19 nt, Artificial Sequence
  Description of Artificial Sequence: Synthetic oligonucleotide
guugaggaaaaugaaagcc

SEQ ID NO: 3213789 - RNA, 19 nt, Artificial Sequence
  Description of Artificial Sequence: Synthetic oligonucleotide
agauagagagccuggcagc

SEQ ID NO: 3213790 - RNA, 19 nt, Artificial Sequence
  Description of Artificial Sequence: Synthetic oligonucleotide
guuuccagcuguuugauac

SEQ ID NO: 3213791 - RNA, 19 nt, Artificial Sequence
  Description of Artificial Sequence: Synthetic oligonucleotide
agccucauagacuccacgc

SEQ ID NO: 3213792 - RNA, 19 nt, Artificial Sequence
  Description of Artificial Sequence: Synthetic oligonucleotide
guaaccuguaauaaggcag

SEQ ID NO: 3213793 - RNA, 19 nt, Artificial Sequence
  Description of Artificial Sequence: Synthetic oligonucleotide
uuccaguugucuuuguuag

SEQ ID NO: 3213794 - RNA, 19 nt, Artificial Sequence
  Description of Artificial Sequence: Synthetic oligonucleotide
aaucgguugaggaaaauga

SEQ ID NO: 3213795 - RNA, 19 nt, Artificial Sequence
  Description of Artificial Sequence: Synthetic oligonucleotide
aaauucaauuuuguuccuc

SEQ ID NO: 3213796 - RNA, 19 nt, Artificial Sequence
  Description of Artificial Sequence: Synthetic oligonucleotide
gaaaucugaguggucaagg

SEQ ID NO: 3213797 - RNA, 19 nt, Artificial Sequence
  Description of Artificial Sequence: Synthetic oligonucleotide
ccauuaagaaacuuguucc

SEQ ID NO: 3213798 - RNA, 19 nt, Artificial Sequence
  Description of Artificial Sequence: Synthetic oligonucleotide
uccauggagacugugagca

SEQ ID NO: 3213799 - RNA, 19 nt, Artificial Sequence
  Description of Artificial Sequence: Synthetic oligonucleotide
uuaagaaacuuguuccagu

SEQ ID NO: 3213800 - RNA, 19 nt, Artificial Sequence
  Description of Artificial Sequence: Synthetic oligonucleotide
aaaucgguugaggaaaaug

SEQ ID NO: 3213801 - RNA, 19 nt, Artificial Sequence
  Description of Artificial Sequence: Synthetic oligonucleotide
aaaaggccuugucugcagg

SEQ ID NO: 3213802 - RNA, 19 nt, Artificial Sequence
  Description of Artificial Sequence: Synthetic oligonucleotide
ucuucgauugcaucaguca

SEQ ID NO: 3213803 - RNA, 19 nt, Artificial Sequence
  Description of Artificial Sequence: Synthetic oligonucleotide
uggccauuaagaaacuugu

SEQ ID NO: 3213804 - RNA, 19 nt, Artificial Sequence
  Description of Artificial Sequence: Synthetic oligonucleotide
ucaguaugggguaaccugu

SEQ ID NO: 3213805 - RNA, 19 nt, Artificial Sequence
  Description of Artificial Sequence: Synthetic oligonucleotide
aaugucuguguccuggaaa

SEQ ID NO: 3213806 - RNA, 19 nt, Artificial Sequence
  Description of Artificial Sequence: Synthetic oligonucleotide
cuagggaagccucauagac

SEQ ID NO: 3213807 - RNA, 19 nt, Artificial Sequence
  Description of Artificial Sequence: Synthetic oligonucleotide
uuuguuccucaguaugggg

SEQ ID NO: 3213808 - RNA, 19 nt, Artificial Sequence
  Description of Artificial Sequence: Synthetic oligonucleotide
aagaaacuuguuccaguug

SEQ ID NO: 3213809 - RNA, 19 nt, Artificial Sequence
  Description of Artificial Sequence: Synthetic oligonucleotide
aauaacuggguguggcgca

SEQ ID NO: 3213810 - RNA, 19 nt, Artificial Sequence
  Description of Artificial Sequence: Synthetic oligonucleotide
guaauaacuggguguggcg

SEQ ID NO: 3213811 - RNA, 19 nt, Artificial Sequence
  Description of Artificial Sequence: Synthetic oligonucleotide
auuuuguuccucaguaugg

SEQ ID NO: 3213812 - RNA, 19 nt, Artificial Sequence
  Description of Artificial Sequence: Synthetic oligonucleotide
cuucgauugcaucagucag

SEQ ID NO: 3213813 - RNA, 19 nt, Artificial Sequence
  Description of Artificial Sequence: Synthetic oligonucleotide
uggucaagggcauccagag

SEQ ID NO: 3213814 - RNA, 19 nt, Artificial Sequence
  Description of Artificial Sequence: Synthetic oligonucleotide
uacgguuuccagcuguuug

SEQ ID NO: 3213815 - RNA, 19 nt, Artificial Sequence
  Description of Artificial Sequence: Synthetic oligonucleotide
cucaguaugggguaaccug

SEQ ID NO: 3213816 - RNA, 19 nt, Artificial Sequence
  Description of Artificial Sequence: Synthetic oligonucleotide
uuguuccucaguauggggu

SEQ ID NO: 3213817 - RNA, 19 nt, Artificial Sequence
  Description of Artificial Sequence: Synthetic oligonucleotide
ucuugauggccauuaagaa

SEQ ID NO: 3213818 - RNA, 19 nt, Artificial Sequence
  Description of Artificial Sequence: Synthetic oligonucleotide
gaauuugagcacguccugg

SEQ ID NO: 3213819 - RNA, 19 nt, Artificial Sequence
  Description of Artificial Sequence: Synthetic oligonucleotide
cuuccuuugccgcagugcc

SEQ ID NO: 3213820 - RNA, 19 nt, Artificial Sequence
  Description of Artificial Sequence: Synthetic oligonucleotide
ugaauuugagcacguccug

SEQ ID NO: 3213821 - RNA, 19 nt, Artificial Sequence
  Description of Artificial Sequence: Synthetic oligonucleotide
aagccucauagacuccacg

SEQ ID NO: 3213822 - RNA, 19 nt, Artificial Sequence
  Description of Artificial Sequence: Synthetic oligonucleotide
uaugggguaaccuguaaua

SEQ ID NO: 3213823 - RNA, 19 nt, Artificial Sequence
  Description of Artificial Sequence: Synthetic oligonucleotide
uaauaacuggguguggcgc

SEQ ID NO: 3213824 - RNA, 19 nt, Artificial Sequence
  Description of Artificial Sequence: Synthetic oligonucleotide
cuugucugcagguaauaac

SEQ ID NO: 3213825 - RNA, 19 nt, Artificial Sequence
  Description of Artificial Sequence: Synthetic oligonucleotide
ugggguaaccuguaauaag

SEQ ID NO: 3213826 - RNA, 19 nt, Artificial Sequence
  Description of Artificial Sequence: Synthetic oligonucleotide
ugagauagagagccuggca

SEQ ID NO: 3213827 - RNA, 19 nt, Artificial Sequence
  Description of Artificial Sequence: Synthetic oligonucleotide
aagggaaugucuguguccu

SEQ ID NO: 3213828 - RNA, 19 nt, Artificial Sequence
  Description of Artificial Sequence: Synthetic oligonucleotide
uuugagcacguccuggcac

SEQ ID NO: 3213829 - RNA, 19 nt, Artificial Sequence
  Description of Artificial Sequence: Synthetic oligonucleotide
uucgauugcaucagucaga

SEQ ID NO: 3213830 - RNA, 19 nt, Artificial Sequence
  Description of Artificial Sequence: Synthetic oligonucleotide
auucaauuuuguuccucag

SEQ ID NO: 3213831 - RNA, 19 nt, Artificial Sequence
  Description of Artificial Sequence: Synthetic oligonucleotide
uuguuagcagccuucccug

SEQ ID NO: 3213832 - RNA, 19 nt, Artificial Sequence
  Description of Artificial Sequence: Synthetic oligonucleotide
uggcacacuggacugucgg

SEQ ID NO: 3213833 - RNA, 19 nt, Artificial Sequence
  Description of Artificial Sequence: Synthetic oligonucleotide
accgcuuaaauucaauuuu

SEQ ID NO: 3213834 - RNA, 19 nt, Artificial Sequence
  Description of Artificial Sequence: Synthetic oligonucleotide
ucaaagggaaugucugugu

SEQ ID NO: 3213835 - RNA, 19 nt, Artificial Sequence
  Description of Artificial Sequence: Synthetic oligonucleotide
augaauuugagcacguccu

SEQ ID NO: 3213836 - RNA, 19 nt, Artificial Sequence
  Description of Artificial Sequence: Synthetic oligonucleotide
ugucugcagguaauaacug

SEQ ID NO: 3213837 - RNA, 19 nt, Artificial Sequence
  Description of Artificial Sequence: Synthetic oligonucleotide
cuggcugaugaauuugagc

SEQ ID NO: 3213838 - RNA, 19 nt, Artificial Sequence
  Description of Artificial Sequence: Synthetic oligonucleotide
uaaaaggccuugucugcag

SEQ ID NO: 3213839 - RNA, 19 nt, Artificial Sequence
  Description of Artificial Sequence: Synthetic oligonucleotide
acuuccuuugccgcagugc

SEQ ID NO: 3213840 - RNA, 19 nt, Artificial Sequence
  Description of Artificial Sequence: Synthetic oligonucleotide
ugagcacccagucucgaac

SEQ ID NO: 3213841 - RNA, 19 nt, Artificial Sequence
  Description of Artificial Sequence: Synthetic oligonucleotide
agugcucgcugcuacuagg

SEQ ID NO: 3213842 - RNA, 19 nt, Artificial Sequence
  Description of Artificial Sequence: Synthetic oligonucleotide
guugucuuuguuagcagcc

SEQ ID NO: 3213843 - RNA, 19 nt, Artificial Sequence
  Description of Artificial Sequence: Synthetic oligonucleotide
cucgcugcuacuagggaag

SEQ ID NO: 3213844 - RNA, 19 nt, Artificial Sequence
  Description of Artificial Sequence: Synthetic oligonucleotide
ugaguggucaagggcaucc

SEQ ID NO: 3213845 - RNA, 19 nt, Artificial Sequence
  Description of Artificial Sequence: Synthetic oligonucleotide
cauuaagaaacuuguucca

SEQ ID NO: 3213846 - RNA, 19 nt, Artificial Sequence
  Description of Artificial Sequence: Synthetic oligonucleotide
aaaggccuugucugcaggu

SEQ ID NO: 3213847 - RNA, 19 nt, Artificial Sequence
  Description of Artificial Sequence: Synthetic oligonucleotide
ucuuuguuagcagccuucc

SEQ ID NO: 3213848 - RNA, 19 nt, Artificial Sequence
  Description of Artificial Sequence: Synthetic oligonucleotide
uagggaagccucauagacu

SEQ ID NO: 3213849 - RNA, 19 nt, Artificial Sequence
  Description of Artificial Sequence: Synthetic oligonucleotide
gccauuaagaaacuuguuc

SEQ ID NO: 3213850 - RNA, 19 nt, Artificial Sequence
  Description of Artificial Sequence: Synthetic oligonucleotide
gucuugauggccauuaaga

SEQ ID NO: 3213851 - RNA, 19 nt, Artificial Sequence
  Description of Artificial Sequence: Synthetic oligonucleotide
uagagagccuggcagcuac

SEQ ID NO: 3213852 - RNA, 19 nt, Artificial Sequence
  Description of Artificial Sequence: Synthetic oligonucleotide
cagccaacuuccuuugccg

SEQ ID NO: 3213853 - RNA, 19 nt, Artificial Sequence
  Description of Artificial Sequence: Synthetic oligonucleotide
uccacgcucaucccggggc

SEQ ID NO: 3213854 - RNA, 19 nt, Artificial Sequence
  Description of Artificial Sequence: Synthetic oligonucleotide
uucuucgauugcaucaguc

SEQ ID NO: 3213855 - RNA, 19 nt, Artificial Sequence
  Description of Artificial Sequence: Synthetic oligonucleotide
uguuagcagccuucccugg

SEQ ID NO: 3213856 - RNA, 19 nt, Artificial Sequence
  Description of Artificial Sequence: Synthetic oligonucleotide
agugccugcuucauaaaag

SEQ ID NO: 3213857 - RNA, 19 nt, Artificial Sequence
  Description of Artificial Sequence: Synthetic oligonucleotide
accuguaauaaggcagggc

SEQ ID NO: 3213858 - RNA, 19 nt, Artificial Sequence
  Description of Artificial Sequence: Synthetic oligonucleotide
aaacaauggcacuagaagc

SEQ ID NO: 3213859 - RNA, 19 nt, Artificial Sequence
  Description of Artificial Sequence: Synthetic oligonucleotide
auuagaguaaaucuuucac

SEQ ID NO: 3213860 - RNA, 19 nt, Artificial Sequence
  Description of Artificial Sequence: Synthetic oligonucleotide
aaugccaagagccuggucu

SEQ ID NO: 3213861 - RNA, 19 nt, Artificial Sequence
  Description of Artificial Sequence: Synthetic oligonucleotide
aaucuuucacagcuggagg

SEQ ID NO: 3213862 - RNA, 19 nt, Artificial Sequence
  Description of Artificial Sequence: Synthetic oligonucleotide
uaaugcaggacuucgaugu

SEQ ID NO: 3213863 - RNA, 19 nt, Artificial Sequence
  Description of Artificial Sequence: Synthetic oligonucleotide
uuuuccguaccaaaagugc

SEQ ID NO: 3213864 - RNA, 19 nt, Artificial Sequence
  Description of Artificial Sequence: Synthetic oligonucleotide
aauuccuuaaauaaccaga

SEQ ID NO: 3213865 - RNA, 19 nt, Artificial Sequence
  Description of Artificial Sequence: Synthetic oligonucleotide
ugcucaaugcuaauacugg

SEQ ID NO: 3213866 - RNA, 19 nt, Artificial Sequence
  Description of Artificial Sequence: Synthetic oligonucleotide
auauuuuccguaccaaaag

SEQ ID NO: 3213867 - RNA, 19 nt, Artificial Sequence
  Description of Artificial Sequence: Synthetic oligonucleotide
agaagagaggauuagagua

SEQ ID NO: 3213868 - RNA, 19 nt, Artificial Sequence
  Description of Artificial Sequence: Synthetic oligonucleotide
ugucuuagcgacuugguac

SEQ ID NO: 3213869 - RNA, 19 nt, Artificial Sequence
  Description of Artificial Sequence: Synthetic oligonucleotide
gaugucucaauaucccagg

SEQ ID NO: 3213870 - RNA, 19 nt, Artificial Sequence
  Description of Artificial Sequence: Synthetic oligonucleotide
aaugauucuuagcacggga

SEQ ID NO: 3213871 - RNA, 19 nt, Artificial Sequence
  Description of Artificial Sequence: Synthetic oligonucleotide
ugggccgcaaauaaggugc

SEQ ID NO: 3213872 - RNA, 19 nt, Artificial Sequence
  Description of Artificial Sequence: Synthetic oligonucleotide
cugaaagaguuccacaugc

SEQ ID NO: 3213873 - RNA, 19 nt, Artificial Sequence
  Description of Artificial Sequence: Synthetic oligonucleotide
uaaccagaaguccagcacc

SEQ ID NO: 3213874 - RNA, 19 nt, Artificial Sequence
  Description of Artificial Sequence: Synthetic oligonucleotide
guccuuagcaaccaggaag

SEQ ID NO: 3213875 - RNA, 19 nt, Artificial Sequence
  Description of Artificial Sequence: Synthetic oligonucleotide
uuuccguaccaaaagugcc

SEQ ID NO: 3213876 - RNA, 19 nt, Artificial Sequence
  Description of Artificial Sequence: Synthetic oligonucleotide
cuaauacugguuugguugg

SEQ ID NO: 3213877 - RNA, 19 nt, Artificial Sequence
  Description of Artificial Sequence: Synthetic oligonucleotide
uauuuuccguaccaaaagu

SEQ ID NO: 3213878 - RNA, 19 nt, Artificial Sequence
  Description of Artificial Sequence: Synthetic oligonucleotide
gcuaauacugguuugguug

SEQ ID NO: 3213879 - RNA, 19 nt, Artificial Sequence
  Description of Artificial Sequence: Synthetic oligonucleotide
gaagcgggagaccucaggg

SEQ ID NO: 3213880 - RNA, 19 nt, Artificial Sequence
  Description of Artificial Sequence: Synthetic oligonucleotide
uucgauguggcgcuugaag

SEQ ID NO: 3213881 - RNA, 19 nt, Artificial Sequence
  Description of Artificial Sequence: Synthetic oligonucleotide
uuugguuggcagcagcaag

SEQ ID NO: 3213882 - RNA, 19 nt, Artificial Sequence
  Description of Artificial Sequence: Synthetic oligonucleotide
uuuuaggucgucacugucu

SEQ ID NO: 3213883 - RNA, 19 nt, Artificial Sequence
  Description of Artificial Sequence: Synthetic oligonucleotide
acaguaauuggcguucccc

SEQ ID NO: 3213884 - RNA, 19 nt, Artificial Sequence
  Description of Artificial Sequence: Synthetic oligonucleotide
uacccagucaccaguaacc

SEQ ID NO: 3213885 - RNA, 19 nt, Artificial Sequence
  Description of Artificial Sequence: Synthetic oligonucleotide
agagccuggucuuugcaac

SEQ ID NO: 3213886 - RNA, 19 nt, Artificial Sequence
  Description of Artificial Sequence: Synthetic oligonucleotide
guuugggccgcaaauaagg

SEQ ID NO: 3213887 - RNA, 19 nt, Artificial Sequence
  Description of Artificial Sequence: Synthetic oligonucleotide
agaagcgucaguguggcuc

SEQ ID NO: 3213888 - RNA, 19 nt, Artificial Sequence
  Description of Artificial Sequence: Synthetic oligonucleotide
gauuagaguaaaucuuuca

SEQ ID NO: 3213889 - RNA, 19 nt, Artificial Sequence
  Description of Artificial Sequence: Synthetic oligonucleotide
gggaaugauucuuagcacg

SEQ ID NO: 3213890 - RNA, 19 nt, Artificial Sequence
  Description of Artificial Sequence: Synthetic oligonucleotide
ugauucuuagcacgggaga

SEQ ID NO: 3213891 - RNA, 19 nt, Artificial Sequence
  Description of Artificial Sequence: Synthetic oligonucleotide
uccccuacgaagaaccuca

SEQ ID NO: 3213892 - RNA, 19 nt, Artificial Sequence
  Description of Artificial Sequence: Synthetic oligonucleotide
ggaaacgaggcgcaggugg

SEQ ID NO: 3213893 - RNA, 19 nt, Artificial Sequence
  Description of Artificial Sequence: Synthetic oligonucleotide
accuaauucucccauuuga

SEQ ID NO: 3213894 - RNA, 19 nt, Artificial Sequence
  Description of Artificial Sequence: Synthetic oligonucleotide
uuccguaccaaaagugccc

SEQ ID NO: 3213895 - RNA, 19 nt, Artificial Sequence
  Description of Artificial Sequence: Synthetic oligonucleotide
cuggucuuugcaacuaggg

SEQ ID NO: 3213896 - RNA, 19 nt, Artificial Sequence
  Description of Artificial Sequence: Synthetic oligonucleotide
aaagaagcgggagaccuca

SEQ ID NO: 3213897 - RNA, 19 nt, Artificial Sequence
  Description of Artificial Sequence: Synthetic oligonucleotide
ucagccugaguaacucugg

SEQ ID NO: 3213898 - RNA, 19 nt, Artificial Sequence
  Description of Artificial Sequence: Synthetic oligonucleotide
auaaggugcaacguccggg

SEQ ID NO: 3213899 - RNA, 19 nt, Artificial Sequence
  Description of Artificial Sequence: Synthetic oligonucleotide
uaucccagggugaugcuca

SEQ ID NO: 3213900 - RNA, 19 nt, Artificial Sequence
  Description of Artificial Sequence: Synthetic oligonucleotide
aauggcacuagaagcuggg

SEQ ID NO: 3213901 - RNA, 19 nt, Artificial Sequence
  Description of Artificial Sequence: Synthetic oligonucleotide
aagcgggagaccucagggg

SEQ ID NO: 3213902 - RNA, 19 nt, Artificial Sequence
  Description of Artificial Sequence: Synthetic oligonucleotide
aggugcaacguccgggacc

SEQ ID NO: 3213903 - RNA, 19 nt, Artificial Sequence
  Description of Artificial Sequence: Synthetic oligonucleotide
uagcacgggagacuggucc

SEQ ID NO: 3213904 - RNA, 19 nt, Artificial Sequence
  Description of Artificial Sequence: Synthetic oligonucleotide
auccaggauccacacacac

SEQ ID NO: 3213905 - RNA, 19 nt, Artificial Sequence
  Description of Artificial Sequence: Synthetic oligonucleotide
uuagcgacuugguacccag

SEQ ID NO: 3213906 - RNA, 19 nt, Artificial Sequence
  Description of Artificial Sequence: Synthetic oligonucleotide
uauggucccugaaagaguu

SEQ ID NO: 3213907 - RNA, 19 nt, Artificial Sequence
  Description of Artificial Sequence: Synthetic oligonucleotide
ucgagucacuacuucgggg

SEQ ID NO: 3213908 - RNA, 19 nt, Artificial Sequence
  Description of Artificial Sequence: Synthetic oligonucleotide
aagcacacugccaaguucu

SEQ ID NO: 3213909 - RNA, 19 nt, Artificial Sequence
  Description of Artificial Sequence: Synthetic oligonucleotide
uaaaucuuucacagcugga

SEQ ID NO: 3213910 - RNA, 19 nt, Artificial Sequence
  Description of Artificial Sequence: Synthetic oligonucleotide
gucuuagcgacuugguacc

SEQ ID NO: 3213911 - RNA, 19 nt, Artificial Sequence
  Description of Artificial Sequence: Synthetic oligonucleotide
cagaguguagugcucaaug

SEQ ID NO: 3213912 - RNA, 19 nt, Artificial Sequence
  Description of Artificial Sequence: Synthetic oligonucleotide
uaaggugcaacguccggga

SEQ ID NO: 3213913 - RNA, 19 nt, Artificial Sequence
  Description of Artificial Sequence: Synthetic oligonucleotide
aacuagggcccaaacaaug

SEQ ID NO: 3213914 - RNA, 19 nt, Artificial Sequence
  Description of Artificial Sequence: Synthetic oligonucleotide
gauaccucagguggggucc

SEQ ID NO: 3213915 - RNA, 19 nt, Artificial Sequence
  Description of Artificial Sequence: Synthetic oligonucleotide
auuuuccguaccaaaagug

SEQ ID NO: 3213916 - RNA, 19 nt, Artificial Sequence
  Description of Artificial Sequence: Synthetic oligonucleotide
caagucuggggcugcaucc

SEQ ID NO: 3213917 - RNA, 19 nt, Artificial Sequence
  Description of Artificial Sequence: Synthetic oligonucleotide
aacuccuuagcaaccagga

SEQ ID NO: 3213918 - RNA, 19 nt, Artificial Sequence
  Description of Artificial Sequence: Synthetic oligonucleotide
guuuauuuauuguccacaa

SEQ ID NO: 3213919 - RNA, 19 nt, Artificial Sequence
  Description of Artificial Sequence: Synthetic oligonucleotide
agcacgggagacugguccc

SEQ ID NO: 3213920 - RNA, 19 nt, Artificial Sequence
  Description of Artificial Sequence: Synthetic oligonucleotide
gaaugauucuuagcacggg

SEQ ID NO: 3213921 - RNA, 19 nt, Artificial Sequence
  Description of Artificial Sequence: Synthetic oligonucleotide
ucucccauuugaucaccgg

SEQ ID NO: 3213922 - RNA, 19 nt, Artificial Sequence
  Description of Artificial Sequence: Synthetic oligonucleotide
guaaugcaggacuucgaug

SEQ ID NO: 3213923 - RNA, 19 nt, Artificial Sequence
  Description of Artificial Sequence: Synthetic oligonucleotide
uacugucccacucuauggu

SEQ ID NO: 3213924 - RNA, 19 nt, Artificial Sequence
  Description of Artificial Sequence: Synthetic oligonucleotide
agguuggagguucaucuug

SEQ ID NO: 3213925 - RNA, 19 nt, Artificial Sequence
  Description of Artificial Sequence: Synthetic oligonucleotide
agugcucaaugcuaauacu

SEQ ID NO: 3213926 - RNA, 19 nt, Artificial Sequence
  Description of Artificial Sequence: Synthetic oligonucleotide
ugcacacgaguccucacac

SEQ ID NO: 3213927 - RNA, 19 nt, Artificial Sequence
  Description of Artificial Sequence: Synthetic oligonucleotide
uggucccugaaagaguucc

SEQ ID NO: 3213928 - RNA, 19 nt, Artificial Sequence
  Description of Artificial Sequence: Synthetic oligonucleotide
ucguuugggccgcaaauaa

SEQ ID NO: 3213929 - RNA, 19 nt, Artificial Sequence
  Description of Artificial Sequence: Synthetic oligonucleotide
agaagcgggagaccucagg

SEQ ID NO: 3213930 - RNA, 19 nt, Artificial Sequence
  Description of Artificial Sequence: Synthetic oligonucleotide
aagagccuggucuuugcaa

SEQ ID NO: 3213931 - RNA, 19 nt, Artificial Sequence
  Description of Artificial Sequence: Synthetic oligonucleotide
auuccuuaaauaaccagaa

SEQ ID NO: 3213932 - RNA, 19 nt, Artificial Sequence
  Description of Artificial Sequence: Synthetic oligonucleotide
uuccacaugcccacuccag

SEQ ID NO: 3213933 - RNA, 19 nt, Artificial Sequence
  Description of Artificial Sequence: Synthetic oligonucleotide
aacguccgggaccucuggg

SEQ ID NO: 3213934 - RNA, 19 nt, Artificial Sequence
  Description of Artificial Sequence: Synthetic oligonucleotide
gugcucaaugcuaauacug

SEQ ID NO: 3213935 - RNA, 19 nt, Artificial Sequence
  Description of Artificial Sequence: Synthetic oligonucleotide
ucggggucgagucacuacu

SEQ ID NO: 3213936 - RNA, 19 nt, Artificial Sequence
  Description of Artificial Sequence: Synthetic oligonucleotide
ugucguuugggccgcaaau

SEQ ID NO: 3213937 - RNA, 19 nt, Artificial Sequence
  Description of Artificial Sequence: Synthetic oligonucleotide
uggcacuagaagcugggaa

SEQ ID NO: 3213938 - RNA, 19 nt, Artificial Sequence
  Description of Artificial Sequence: Synthetic oligonucleotide
uugggccgcaaauaaggug

SEQ ID NO: 3213939 - RNA, 19 nt, Artificial Sequence
  Description of Artificial Sequence: Synthetic oligonucleotide
agaggguugaauagggaug

SEQ ID NO: 3213940 - RNA, 19 nt, Artificial Sequence
  Description of Artificial Sequence: Synthetic oligonucleotide
acuggugacgccugggccu

SEQ ID NO: 3213941 - RNA, 19 nt, Artificial Sequence
  Description of Artificial Sequence: Synthetic oligonucleotide
augauucuuagcacgggag

SEQ ID NO: 3213942 - RNA, 19 nt, Artificial Sequence
  Description of Artificial Sequence: Synthetic oligonucleotide
uacugucuccaacagcaaa

SEQ ID NO: 3213943 - RNA, 19 nt, Artificial Sequence
  Description of Artificial Sequence: Synthetic oligonucleotide
ccuacgaagaaccucauga

SEQ ID NO: 3213944 - RNA, 19 nt, Artificial Sequence
  Description of Artificial Sequence: Synthetic oligonucleotide
aaccaggaaguuaauuccu

SEQ ID NO: 3213945 - RNA, 19 nt, Artificial Sequence
  Description of Artificial Sequence: Synthetic oligonucleotide
gucgagucacuacuucggg

SEQ ID NO: 3213946 - RNA, 19 nt, Artificial Sequence
  Description of Artificial Sequence: Synthetic oligonucleotide
aauaucccagggugaugcu

SEQ ID NO: 3213947 - RNA, 19 nt, Artificial Sequence
  Description of Artificial Sequence: Synthetic oligonucleotide
uccaggauccacacacacu

SEQ ID NO: 3213948 - RNA, 19 nt, Artificial Sequence
  Description of Artificial Sequence: Synthetic oligonucleotide
gucaguguggcucucucca

SEQ ID NO: 3213949 - RNA, 19 nt, Artificial Sequence
  Description of Artificial Sequence: Synthetic oligonucleotide
gaccuaauucucccauuug

SEQ ID NO: 3213950 - RNA, 19 nt, Artificial Sequence
  Description of Artificial Sequence: Synthetic oligonucleotide
gaagagaggauuagaguaa

SEQ ID NO: 3213951 - RNA, 19 nt, Artificial Sequence
  Description of Artificial Sequence: Synthetic oligonucleotide
aagagaggauuagaguaaa

SEQ ID NO: 3213952 - RNA, 19 nt, Artificial Sequence
  Description of Artificial Sequence: Synthetic oligonucleotide
cacugucuuagcgacuugg

SEQ ID NO: 3213953 - RNA, 19 nt, Artificial Sequence
  Description of Artificial Sequence: Synthetic oligonucleotide
aucuuggcgguuuucccca

SEQ ID NO: 3213954 - RNA, 19 nt, Artificial Sequence
  Description of Artificial Sequence: Synthetic oligonucleotide
agcgggagaccucagggga

SEQ ID NO: 3213955 - RNA, 19 nt, Artificial Sequence
  Description of Artificial Sequence: Synthetic oligonucleotide
ggguaucuggccaagacug

SEQ ID NO: 3213956 - RNA, 19 nt, Artificial Sequence
  Description of Artificial Sequence: Synthetic oligonucleotide
gaguggaaagaagcgggag

SEQ ID NO: 3213957 - RNA, 19 nt, Artificial Sequence
  Description of Artificial Sequence: Synthetic oligonucleotide
aguaauuggcguuccccaa

SEQ ID NO: 3213958 - RNA, 19 nt, Artificial Sequence
  Description of Artificial Sequence: Synthetic oligonucleotide
gaaaauggcggccaggccg

SEQ ID NO: 3213959 - RNA, 19 nt, Artificial Sequence
  Description of Artificial Sequence: Synthetic oligonucleotide
gaacuugucaugaugaagg

SEQ ID NO: 3213960 - RNA, 19 nt, Artificial Sequence
  Description of Artificial Sequence: Synthetic oligonucleotide
cauuccuaggaauaaaacg

SEQ ID NO: 3213961 - RNA, 19 nt, Artificial Sequence
  Description of Artificial Sequence: Synthetic oligonucleotide
agguccaugacucggaacc

SEQ ID NO: 3213962 - RNA, 19 nt, Artificial Sequence
  Description of Artificial Sequence: Synthetic oligonucleotide
auuccuaggaauaaaacgg

SEQ ID NO: 3213963 - RNA, 19 nt, Artificial Sequence
  Description of Artificial Sequence: Synthetic oligonucleotide
gaaggcaucgagaaaaugg

SEQ ID NO: 3213964 - RNA, 19 nt, Artificial Sequence
  Description of Artificial Sequence: Synthetic oligonucleotide
aaggcaucgagaaaauggc

SEQ ID NO: 3213965 - RNA, 19 nt, Artificial Sequence
  Description of Artificial Sequence: Synthetic oligonucleotide
aacuugucaugaugaaggc

SEQ ID NO: 3213966 - RNA, 19 nt, Artificial Sequence
  Description of Artificial Sequence: Synthetic oligonucleotide
uuccuaggaauaaaacggg

SEQ ID NO: 3213967 - RNA, 19 nt, Artificial Sequence
  Description of Artificial Sequence: Synthetic oligonucleotide
aauaaaacgggguccgcgu

SEQ ID NO: 3213968 - RNA, 19 nt, Artificial Sequence
  Description of Artificial Sequence: Synthetic oligonucleotide
gaagucuucauaugugagc

SEQ ID NO: 3213969 - RNA, 19 nt, Artificial Sequence
  Description of Artificial Sequence: Synthetic oligonucleotide
gagaucaggaaccacacga

SEQ ID NO: 3213970 - RNA, 19 nt, Artificial Sequence
  Description of Artificial Sequence: Synthetic oligonucleotide
agcucgaacauggagaggg

SEQ ID NO: 3213971 - RNA, 19 nt, Artificial Sequence
  Description of Artificial Sequence: Synthetic oligonucleotide
ucaugaugaaggcaucgag

SEQ ID NO: 3213972 - RNA, 19 nt, Artificial Sequence
  Description of Artificial Sequence: Synthetic oligonucleotide
aagucuucauaugugagcu

SEQ ID NO: 3213973 - RNA, 19 nt, Artificial Sequence
  Description of Artificial Sequence: Synthetic oligonucleotide
aacucgagcucgaacaugg

SEQ ID NO: 3213974 - RNA, 19 nt, Artificial Sequence
  Description of Artificial Sequence: Synthetic oligonucleotide
uccuaggaauaaaacgggg

SEQ ID NO: 3213975 - RNA, 19 nt, Artificial Sequence
  Description of Artificial Sequence: Synthetic oligonucleotide
ucgagcucgaacauggaga

SEQ ID NO: 3213976 - RNA, 19 nt, Artificial Sequence
  Description of Artificial Sequence: Synthetic oligonucleotide
uccgagaucaggaaccaca

SEQ ID NO: 3213977 - RNA, 19 nt, Artificial Sequence
  Description of Artificial Sequence: Synthetic oligonucleotide
uugaccauguccagcaucu

SEQ ID NO: 3213978 - RNA, 19 nt, Artificial Sequence
  Description of Artificial Sequence: Synthetic oligonucleotide
ucaggaaccacacgaaguc

SEQ ID NO: 3213979 - RNA, 19 nt, Artificial Sequence
  Description of Artificial Sequence: Synthetic oligonucleotide
gaugaaggcaucgagaaaa

SEQ ID NO: 3213980 - RNA, 19 nt, Artificial Sequence
  Description of Artificial Sequence: Synthetic oligonucleotide
gaauaaaacgggguccgcg

SEQ ID NO: 3213981 - RNA, 19 nt, Artificial Sequence
  Description of Artificial Sequence: Synthetic oligonucleotide
aaaauggcggccaggccgc

SEQ ID NO: 3213982 - RNA, 19 nt, Artificial Sequence
  Description of Artificial Sequence: Synthetic oligonucleotide
ucauuccuaggaauaaaac

SEQ ID NO: 3213983 - RNA, 19 nt, Artificial Sequence
  Description of Artificial Sequence: Synthetic oligonucleotide
cuaggaauaaaacgggguc

SEQ ID NO: 3213984 - RNA, 19 nt, Artificial Sequence
  Description of Artificial Sequence: Synthetic oligonucleotide
uccuccgagaucaggaacc

SEQ ID NO: 3213985 - RNA, 19 nt, Artificial Sequence
  Description of Artificial Sequence: Synthetic oligonucleotide
aagggcggcggcuccagcc

SEQ ID NO: 3213986 - RNA, 19 nt, Artificial Sequence
  Description of Artificial Sequence: Synthetic oligonucleotide
augaugaaggcaucgagaa

SEQ ID NO: 3213987 - RNA, 19 nt, Artificial Sequence
  Description of Artificial Sequence: Synthetic oligonucleotide
caguacucgaugcuggugg

SEQ ID NO: 3213988 - RNA, 19 nt, Artificial Sequence
  Description of Artificial Sequence: Synthetic oligonucleotide
uaggaauaaaacggggucc

SEQ ID NO: 3213989 - RNA, 19 nt, Artificial Sequence
  Description of Artificial Sequence: Synthetic oligonucleotide
ucugucauuccuaggaaua

SEQ ID NO: 3213990 - RNA, 19 nt, Artificial Sequence
  Description of Artificial Sequence: Synthetic oligonucleotide
ucgaacauggagagggccc

SEQ ID NO: 3213991 - RNA, 19 nt, Artificial Sequence
  Description of Artificial Sequence: Synthetic oligonucleotide
caucugacacgccaggucc

SEQ ID NO: 3213992 - RNA, 19 nt, Artificial Sequence
  Description of Artificial Sequence: Synthetic oligonucleotide
aggaauaaaacgggguccg

SEQ ID NO: 3213993 - RNA, 19 nt, Artificial Sequence
  Description of Artificial Sequence: Synthetic oligonucleotide
uccagcaucugacacgcca

SEQ ID NO: 3213994 - RNA, 19 nt, Artificial Sequence
  Description of Artificial Sequence: Synthetic oligonucleotide
agaaaauggcggccaggcc

SEQ ID NO: 3213995 - RNA, 19 nt, Artificial Sequence
  Description of Artificial Sequence: Synthetic oligonucleotide
gaucaggaaccacacgaag

SEQ ID NO: 3213996 - RNA, 19 nt, Artificial Sequence
  Description of Artificial Sequence: Synthetic oligonucleotide
ugucaugaugaaggcaucg

SEQ ID NO: 3213997 - RNA, 19 nt, Artificial Sequence
  Description of Artificial Sequence: Synthetic oligonucleotide
uuguccuccuccgagauca

SEQ ID NO: 3213998 - RNA, 19 nt, Artificial Sequence
  Description of Artificial Sequence: Synthetic oligonucleotide
auggagagggccccguccc

SEQ ID NO: 3213999 - RNA, 19 nt, Artificial Sequence
  Description of Artificial Sequence: Synthetic oligonucleotide
aaaacucgagcucgaacau

SEQ ID NO: 3214000 - RNA, 19 nt, Artificial Sequence
  Description of Artificial Sequence: Synthetic oligonucleotide
aaaacgggguccgcguccc

SEQ ID NO: 3214001 - RNA, 19 nt, Artificial Sequence
  Description of Artificial Sequence: Synthetic oligonucleotide
gagaaaauggcggccaggc

SEQ ID NO: 3214002 - RNA, 19 nt, Artificial Sequence
  Description of Artificial Sequence: Synthetic oligonucleotide
acacgaagucuucauaugu

SEQ ID NO: 3214003 - RNA, 19 nt, Artificial Sequence
  Description of Artificial Sequence: Synthetic oligonucleotide
auguccagcaucugacacg

SEQ ID NO: 3214004 - RNA, 19 nt, Artificial Sequence
  Description of Artificial Sequence: Synthetic oligonucleotide
uaaaacgggguccgcgucc

SEQ ID NO: 3214005 - RNA, 19 nt, Artificial Sequence
  Description of Artificial Sequence: Synthetic oligonucleotide
augacucggaaccaguacu

SEQ ID NO: 3214006 - RNA, 19 nt, Artificial Sequence
  Description of Artificial Sequence: Synthetic oligonucleotide
ucuucauaugugagcuucc

SEQ ID NO: 3214007 - RNA, 19 nt, Artificial Sequence
  Description of Artificial Sequence: Synthetic oligonucleotide
uacucgaugcuggugggcg

SEQ ID NO: 3214008 - RNA, 19 nt, Artificial Sequence
  Description of Artificial Sequence: Synthetic oligonucleotide
acgaagucuucauauguga

SEQ ID NO: 3214009 - RNA, 19 nt, Artificial Sequence
  Description of Artificial Sequence: Synthetic oligonucleotide
aaccaguacucgaugcugg

SEQ ID NO: 3214010 - RNA, 19 nt, Artificial Sequence
  Description of Artificial Sequence: Synthetic oligonucleotide
uguccagcaucugacacgc

SEQ ID NO: 3214011 - RNA, 19 nt, Artificial Sequence
  Description of Artificial Sequence: Synthetic oligonucleotide
auaaaacgggguccgcguc

SEQ ID NO: 3214012 - RNA, 19 nt, Artificial Sequence
  Description of Artificial Sequence: Synthetic oligonucleotide
uccuccuccgagaucagga

SEQ ID NO: 3214013 - RNA, 19 nt, Artificial Sequence
  Description of Artificial Sequence: Synthetic oligonucleotide
accauguccagcaucugac

SEQ ID NO: 3214014 - RNA, 19 nt, Artificial Sequence
  Description of Artificial Sequence: Synthetic oligonucleotide
caugaugaaggcaucgaga

SEQ ID NO: 3214015 - RNA, 19 nt, Artificial Sequence
  Description of Artificial Sequence: Synthetic oligonucleotide
aguacucgaugcugguggg

SEQ ID NO: 3214016 - RNA, 19 nt, Artificial Sequence
  Description of Artificial Sequence: Synthetic oligonucleotide
cacgaagucuucauaugug

SEQ ID NO: 3214017 - RNA, 19 nt, Artificial Sequence
  Description of Artificial Sequence: Synthetic oligonucleotide
cuugucaugaugaaggcau

SEQ ID NO: 3214018 - RNA, 19 nt, Artificial Sequence
  Description of Artificial Sequence: Synthetic oligonucleotide
ggcaucgagaaaauggcgg

SEQ ID NO: 3214019 - RNA, 19 nt, Artificial Sequence
  Description of Artificial Sequence: Synthetic oligonucleotide
uccuagguccaugacucgg

SEQ ID NO: 3214020 - RNA, 19 nt, Artificial Sequence
  Description of Artificial Sequence: Synthetic oligonucleotide
  modified_base (10)..(10): a, c, u, g, unknown or other
cucgcgcugnucccgagcc

SEQ ID NO: 3214021 - RNA, 19 nt, Artificial Sequence
  Description of Artificial Sequence: Synthetic oligonucleotide
caggaacuugucaugauga

SEQ ID NO: 3214022 - RNA, 19 nt, Artificial Sequence
  Description of Artificial Sequence: Synthetic oligonucleotide
  modified_base (4)..(4): a, c, u, g, unknown or other
cugnucccgagccaggaac

SEQ ID NO: 3214023 - RNA, 19 nt, Artificial Sequence
  Description of Artificial Sequence: Synthetic oligonucleotide
cauguccagcaucugacac

SEQ ID NO: 3214024 - RNA, 19 nt, Artificial Sequence
  Description of Artificial Sequence: Synthetic oligonucleotide
ucgagaaaauggcggccag

SEQ ID NO: 3214025 - RNA, 19 nt, Artificial Sequence
  Description of Artificial Sequence: Synthetic oligonucleotide
  modified_base (3)..(3): a, c, u, g, unknown or other
ugnucccgagccaggaacu

SEQ ID NO: 3214026 - RNA, 19 nt, Artificial Sequence
  Description of Artificial Sequence: Synthetic oligonucleotide
gaaccaguacucgaugcug

SEQ ID NO: 3214027 - RNA, 19 nt, Artificial Sequence
  Description of Artificial Sequence: Synthetic oligonucleotide
aaccacacgaagucuucau

SEQ ID NO: 3214028 - RNA, 19 nt, Artificial Sequence
  Description of Artificial Sequence: Synthetic oligonucleotide
ugacucggaaccaguacuc

SEQ ID NO: 3214029 - RNA, 19 nt, Artificial Sequence
  Description of Artificial Sequence: Synthetic oligonucleotide
caugacucggaaccaguac

SEQ ID NO: 3214030 - RNA, 19 nt, Artificial Sequence
  Description of Artificial Sequence: Synthetic oligonucleotide
ucggaaccaguacucgaug

SEQ ID NO: 3214031 - RNA, 19 nt, Artificial Sequence
  Description of Artificial Sequence: Synthetic oligonucleotide
cucgagcucgaacauggag

SEQ ID NO: 3214032 - RNA, 19 nt, Artificial Sequence
  Description of Artificial Sequence: Synthetic oligonucleotide
auggcggccaggccgcagc

SEQ ID NO: 3214033 - RNA, 19 nt, Artificial Sequence
  Description of Artificial Sequence: Synthetic oligonucleotide
aggucggggagcgagaucu

SEQ ID NO: 3214034 - RNA, 19 nt, Artificial Sequence
  Description of Artificial Sequence: Synthetic oligonucleotide
aaacucgagcucgaacaug

SEQ ID NO: 3214035 - RNA, 19 nt, Artificial Sequence
  Description of Artificial Sequence: Synthetic oligonucleotide
cacacgaagucuucauaug

SEQ ID NO: 3214036 - RNA, 19 nt, Artificial Sequence
  Description of Artificial Sequence: Synthetic oligonucleotide
aacgggguccgcgucccgc

SEQ ID NO: 3214037 - RNA, 19 nt, Artificial Sequence
  Description of Artificial Sequence: Synthetic oligonucleotide
guggucuuguccuccuccg

SEQ ID NO: 3214038 - RNA, 19 nt, Artificial Sequence
  Description of Artificial Sequence: Synthetic oligonucleotide
gucuucauaugugagcuuc

SEQ ID NO: 3214039 - RNA, 19 nt, Artificial Sequence
  Description of Artificial Sequence: Synthetic oligonucleotide
uccaugacucggaaccagu

SEQ ID NO: 3214040 - RNA, 19 nt, Artificial Sequence
  Description of Artificial Sequence: Synthetic oligonucleotide
ugaugaaggcaucgagaaa

SEQ ID NO: 3214041 - RNA, 19 nt, Artificial Sequence
  Description of Artificial Sequence: Synthetic oligonucleotide
gacucggaaccaguacucg

SEQ ID NO: 3214042 - RNA, 19 nt, Artificial Sequence
  Description of Artificial Sequence: Synthetic oligonucleotide
agcgagaucugcccgggca

SEQ ID NO: 3214043 - RNA, 19 nt, Artificial Sequence
  Description of Artificial Sequence: Synthetic oligonucleotide
cauggagagggccccgucc

SEQ ID NO: 3214044 - RNA, 19 nt, Artificial Sequence
  Description of Artificial Sequence: Synthetic oligonucleotide
aucaggaaccacacgaagu

SEQ ID NO: 3214045 - RNA, 19 nt, Artificial Sequence
  Description of Artificial Sequence: Synthetic oligonucleotide
cacgccaggucccggaagg

SEQ ID NO: 3214046 - RNA, 19 nt, Artificial Sequence
  Description of Artificial Sequence: Synthetic oligonucleotide
ucccgagccaggaacuugu

SEQ ID NO: 3214047 - RNA, 19 nt, Artificial Sequence
  Description of Artificial Sequence: Synthetic oligonucleotide
ucuuguccuccuccgagau

SEQ ID NO: 3214048 - RNA, 19 nt, Artificial Sequence
  Description of Artificial Sequence: Synthetic oligonucleotide
ucggggagcgagaucugcc

SEQ ID NO: 3214049 - RNA, 19 nt, Artificial Sequence
  Description of Artificial Sequence: Synthetic oligonucleotide
ugaaggcaucgagaaaaug

SEQ ID NO: 3214050 - RNA, 19 nt, Artificial Sequence
  Description of Artificial Sequence: Synthetic oligonucleotide
ucugacacgccaggucccg

SEQ ID NO: 3214051 - RNA, 19 nt, Artificial Sequence
  Description of Artificial Sequence: Synthetic oligonucleotide
gaccauguccagcaucuga

SEQ ID NO: 3214052 - RNA, 19 nt, Artificial Sequence
  Description of Artificial Sequence: Synthetic oligonucleotide
ggaacuugucaugaugaag

SEQ ID NO: 3214053 - RNA, 19 nt, Artificial Sequence
  Description of Artificial Sequence: Synthetic oligonucleotide
agggcggcggcuccagccc

SEQ ID NO: 3214054 - RNA, 19 nt, Artificial Sequence
  Description of Artificial Sequence: Synthetic oligonucleotide
gagccaggaacuugucaug

SEQ ID NO: 3214055 - RNA, 19 nt, Artificial Sequence
  Description of Artificial Sequence: Synthetic oligonucleotide
guugaccauguccagcauc

SEQ ID NO: 3214056 - RNA, 19 nt, Artificial Sequence
  Description of Artificial Sequence: Synthetic oligonucleotide
gcaucgagaaaauggcggc

SEQ ID NO: 3214057 - RNA, 19 nt, Artificial Sequence
  Description of Artificial Sequence: Synthetic oligonucleotide
aucgagaaaauggcggcca

SEQ ID NO: 3214058 - RNA, 19 nt, Artificial Sequence
  Description of Artificial Sequence: Synthetic oligonucleotide
aaauguucuagguauguaa

SEQ ID NO: 3214059 - RNA, 19 nt, Artificial Sequence
  Description of Artificial Sequence: Synthetic oligonucleotide
agggcuauuuuccaaauca

SEQ ID NO: 3214060 - RNA, 19 nt, Artificial Sequence
  Description of Artificial Sequence: Synthetic oligonucleotide
cuauuuuccaaaucaucag

SEQ ID NO: 3214061 - RNA, 19 nt, Artificial Sequence
  Description of Artificial Sequence: Synthetic oligonucleotide
aagggcuauuuuccaaauc

SEQ ID NO: 3214062 - RNA, 19 nt, Artificial Sequence
  Description of Artificial Sequence: Synthetic oligonucleotide
uuuuaagggcuauuuucca

SEQ ID NO: 3214063 - RNA, 19 nt, Artificial Sequence
  Description of Artificial Sequence: Synthetic oligonucleotide
uuaagggcuauuuuccaaa

SEQ ID NO: 3214064 - RNA, 19 nt, Artificial Sequence
  Description of Artificial Sequence: Synthetic oligonucleotide
aauguucuagguauguaau

SEQ ID NO: 3214065 - RNA, 19 nt, Artificial Sequence
  Description of Artificial Sequence: Synthetic oligonucleotide
uuuaagggcuauuuuccaa

SEQ ID NO: 3214066 - RNA, 19 nt, Artificial Sequence
  Description of Artificial Sequence: Synthetic oligonucleotide
agcucccgaguuuccaugc

SEQ ID NO: 3214067 - RNA, 19 nt, Artificial Sequence
  Description of Artificial Sequence: Synthetic oligonucleotide
gcuauuuuccaaaucauca

SEQ ID NO: 3214068 - RNA, 19 nt, Artificial Sequence
  Description of Artificial Sequence: Synthetic oligonucleotide
aaaauguucuagguaugua

SEQ ID NO: 3214069 - RNA, 19 nt, Artificial Sequence
  Description of Artificial Sequence: Synthetic oligonucleotide
uuggguguggccagcaauu

SEQ ID NO: 3214070 - RNA, 19 nt, Artificial Sequence
  Description of Artificial Sequence: Synthetic oligonucleotide
uaagggcuauuuuccaaau

SEQ ID NO: 3214071 - RNA, 19 nt, Artificial Sequence
  Description of Artificial Sequence: Synthetic oligonucleotide
aucccagcucccgaguuuc

SEQ ID NO: 3214072 - RNA, 19 nt, Artificial Sequence
  Description of Artificial Sequence: Synthetic oligonucleotide
cucccgaguuuccaugcgc

SEQ ID NO: 3214073 - RNA, 19 nt, Artificial Sequence
  Description of Artificial Sequence: Synthetic oligonucleotide
ggagaucccagcucccgag

SEQ ID NO: 3214074 - RNA, 19 nt, Artificial Sequence
  Description of Artificial Sequence: Synthetic oligonucleotide
agggagaucccagcucccg

SEQ ID NO: 3214075 - RNA, 19 nt, Artificial Sequence
  Description of Artificial Sequence: Synthetic oligonucleotide
ggcuauuuuccaaaucauc

SEQ ID NO: 3214076 - RNA, 19 nt, Artificial Sequence
  Description of Artificial Sequence: Synthetic oligonucleotide
uguuggguguggccagcaa

SEQ ID NO: 3214077 - RNA, 19 nt, Artificial Sequence
  Description of Artificial Sequence: Synthetic oligonucleotide
cagcucccgaguuuccaug

SEQ ID NO: 3214078 - RNA, 19 nt, Artificial Sequence
  Description of Artificial Sequence: Synthetic oligonucleotide
agaucccagcucccgaguu

SEQ ID NO: 3214079 - RNA, 19 nt, Artificial Sequence
  Description of Artificial Sequence: Synthetic oligonucleotide
ucccagcucccgaguuucc

SEQ ID NO: 3214080 - RNA, 19 nt, Artificial Sequence
  Description of Artificial Sequence: Synthetic oligonucleotide
guuggguguggccagcaau

SEQ ID NO: 3214081 - RNA, 19 nt, Artificial Sequence
  Description of Artificial Sequence: Synthetic oligonucleotide
gcucccgaguuuccaugcg

SEQ ID NO: 3214082 - RNA, 19 nt, Artificial Sequence
  Description of Artificial Sequence: Synthetic oligonucleotide
uggguguggccagcaauuu

SEQ ID NO: 3214083 - RNA, 19 nt, Artificial Sequence
  Description of Artificial Sequence: Synthetic oligonucleotide
gagaucccagcucccgagu

SEQ ID NO: 3214084 - RNA, 19 nt, Artificial Sequence
  Description of Artificial Sequence: Synthetic oligonucleotide
gaucccagcucccgaguuu

SEQ ID NO: 3214085 - RNA, 19 nt, Artificial Sequence
  Description of Artificial Sequence: Synthetic oligonucleotide
gggagaucccagcucccga

SEQ ID NO: 3214086 - RNA, 19 nt, Artificial Sequence
  Description of Artificial Sequence: Synthetic oligonucleotide
cuguuggguguggccagca

SEQ ID NO: 3214087 - RNA, 19 nt, Artificial Sequence
  Description of Artificial Sequence: Synthetic oligonucleotide
gggcuauuuuccaaaucau

SEQ ID NO: 3214088 - RNA, 19 nt, Artificial Sequence
  Description of Artificial Sequence: Synthetic oligonucleotide
ccuguuggguguggccagc

SEQ ID NO: 3214089 - RNA, 19 nt, Artificial Sequence
  Description of Artificial Sequence: Synthetic oligonucleotide
ggguguggccagcaauuuu

SEQ ID NO: 3214090 - RNA, 19 nt, Artificial Sequence
  Description of Artificial Sequence: Synthetic oligonucleotide
cccagcucccgaguuucca

SEQ ID NO: 3214091 - RNA, 19 nt, Artificial Sequence
  Description of Artificial Sequence: Synthetic oligonucleotide
acuguaaaccgccagaagc

SEQ ID NO: 3214092 - RNA, 19 nt, Artificial Sequence
  Description of Artificial Sequence: Synthetic oligonucleotide
agagagacagaacagagac

SEQ ID NO: 3214093 - RNA, 19 nt, Artificial Sequence
  Description of Artificial Sequence: Synthetic oligonucleotide
aacagagacagagagagac

SEQ ID NO: 3214094 - RNA, 19 nt, Artificial Sequence
  Description of Artificial Sequence: Synthetic oligonucleotide
acugaagagacauaccacc

SEQ ID NO: 3214095 - RNA, 19 nt, Artificial Sequence
  Description of Artificial Sequence: Synthetic oligonucleotide
aauccuggggcucauuucc

SEQ ID NO: 3214096 - RNA, 19 nt, Artificial Sequence
  Description of Artificial Sequence: Synthetic oligonucleotide
gaugagagaauccuggggc

SEQ ID NO: 3214097 - RNA, 19 nt, Artificial Sequence
  Description of Artificial Sequence: Synthetic oligonucleotide
agaacagagacagagagag

SEQ ID NO: 3214098 - RNA, 19 nt, Artificial Sequence
  Description of Artificial Sequence: Synthetic oligonucleotide
auagacuggagucuaagag

SEQ ID NO: 3214099 - RNA, 19 nt, Artificial Sequence
  Description of Artificial Sequence: Synthetic oligonucleotide
acuccugugaucauuaagc

SEQ ID NO: 3214100 - RNA, 19 nt, Artificial Sequence
  Description of Artificial Sequence: Synthetic oligonucleotide
aauauucuccccuuguaaa

SEQ ID NO: 3214101 - RNA, 19 nt, Artificial Sequence
  Description of Artificial Sequence: Synthetic oligonucleotide
gugaucauuaagcagauga

SEQ ID NO: 3214102 - RNA, 19 nt, Artificial Sequence
  Description of Artificial Sequence: Synthetic oligonucleotide
acagagagagaccagcagg

SEQ ID NO: 3214103 - RNA, 19 nt, Artificial Sequence
  Description of Artificial Sequence: Synthetic oligonucleotide
uguaaaucccaucaggaua

SEQ ID NO: 3214104 - RNA, 19 nt, Artificial Sequence
  Description of Artificial Sequence: Synthetic oligonucleotide
agugacuggaaggugaggc

SEQ ID NO: 3214105 - RNA, 19 nt, Artificial Sequence
  Description of Artificial Sequence: Synthetic oligonucleotide
ugaucauuaagcagaugag

SEQ ID NO: 3214106 - RNA, 19 nt, Artificial Sequence
  Description of Artificial Sequence: Synthetic oligonucleotide
gagagagagagacagaaca

SEQ ID NO: 3214107 - RNA, 19 nt, Artificial Sequence
  Description of Artificial Sequence: Synthetic oligonucleotide
uggaccuucaggaauauuc

SEQ ID NO: 3214108 - RNA, 19 nt, Artificial Sequence
  Description of Artificial Sequence: Synthetic oligonucleotide
aucaggauaggugugauag

SEQ ID NO: 3214109 - RNA, 19 nt, Artificial Sequence
  Description of Artificial Sequence: Synthetic oligonucleotide
gagagagagagagagagag

SEQ ID NO: 3214110 - RNA, 19 nt, Artificial Sequence
  Description of Artificial Sequence: Synthetic oligonucleotide
ucauuaagcagaugagucc

SEQ ID NO: 3214111 - RNA, 19 nt, Artificial Sequence
  Description of Artificial Sequence: Synthetic oligonucleotide
aagcagaugaguccuagca

SEQ ID NO: 3214112 - RNA, 19 nt, Artificial Sequence
  Description of Artificial Sequence: Synthetic oligonucleotide
gagagagagagagagacag

SEQ ID NO: 3214113 - RNA, 19 nt, Artificial Sequence
  Description of Artificial Sequence: Synthetic oligonucleotide
agucuaagagacuucuuuc

SEQ ID NO: 3214114 - RNA, 19 nt, Artificial Sequence
  Description of Artificial Sequence: Synthetic oligonucleotide
aaccgccagaagcugaccc

SEQ ID NO: 3214115 - RNA, 19 nt, Artificial Sequence
  Description of Artificial Sequence: Synthetic oligonucleotide
ugauagaugcagaaguacu

SEQ ID NO: 3214116 - RNA, 19 nt, Artificial Sequence
  Description of Artificial Sequence: Synthetic oligonucleotide
agacugaagagacauacca

SEQ ID NO: 3214117 - RNA, 19 nt, Artificial Sequence
  Description of Artificial Sequence: Synthetic oligonucleotide
uuuccuggggcucagcugc

SEQ ID NO: 3214118 - RNA, 19 nt, Artificial Sequence
  Description of Artificial Sequence: Synthetic oligonucleotide
aucauuaagcagaugaguc

SEQ ID NO: 3214119 - RNA, 19 nt, Artificial Sequence
  Description of Artificial Sequence: Synthetic oligonucleotide
aguacagucacuccuguga

SEQ ID NO: 3214120 - RNA, 19 nt, Artificial Sequence
  Description of Artificial Sequence: Synthetic oligonucleotide
cuugucagugacuggaagg

SEQ ID NO: 3214121 - RNA, 19 nt, Artificial Sequence
  Description of Artificial Sequence: Synthetic oligonucleotide
cuuuccauagacuggaguc

SEQ ID NO: 3214122 - RNA, 19 nt, Artificial Sequence
  Description of Artificial Sequence: Synthetic oligonucleotide
cuuucuuggaccuucagga

SEQ ID NO: 3214123 - RNA, 19 nt, Artificial Sequence
  Description of Artificial Sequence: Synthetic oligonucleotide
auucuccccuuguaaaucc

SEQ ID NO: 3214124 - RNA, 19 nt, Artificial Sequence
  Description of Artificial Sequence: Synthetic oligonucleotide
agacauaccaccccugguc

SEQ ID NO: 3214125 - RNA, 19 nt, Artificial Sequence
  Description of Artificial Sequence: Synthetic oligonucleotide
uaagagacuucuuucuagc

SEQ ID NO: 3214126 - RNA, 19 nt, Artificial Sequence
  Description of Artificial Sequence: Synthetic oligonucleotide
auaggugugauagaugcag

SEQ ID NO: 3214127 - RNA, 19 nt, Artificial Sequence
  Description of Artificial Sequence: Synthetic oligonucleotide
gaugaguccuagcacagug

SEQ ID NO: 3214128 - RNA, 19 nt, Artificial Sequence
  Description of Artificial Sequence: Synthetic oligonucleotide
ggauaggugugauagaugc

SEQ ID NO: 3214129 - RNA, 19 nt, Artificial Sequence
  Description of Artificial Sequence: Synthetic oligonucleotide
cuaagagacuucuuucuag

SEQ ID NO: 3214130 - RNA, 19 nt, Artificial Sequence
  Description of Artificial Sequence: Synthetic oligonucleotide
cuuucuagccaguacaguc

SEQ ID NO: 3214131 - RNA, 19 nt, Artificial Sequence
  Description of Artificial Sequence: Synthetic oligonucleotide
uaggcuagggccuggaacc

SEQ ID NO: 3214132 - RNA, 19 nt, Artificial Sequence
  Description of Artificial Sequence: Synthetic oligonucleotide
uuucuagccaguacaguca

SEQ ID NO: 3214133 - RNA, 19 nt, Artificial Sequence
  Description of Artificial Sequence: Synthetic oligonucleotide
uggucagcacuguaaaccg

SEQ ID NO: 3214134 - RNA, 19 nt, Artificial Sequence
  Description of Artificial Sequence: Synthetic oligonucleotide
uucaggaauauucuccccu

SEQ ID NO: 3214135 - RNA, 19 nt, Artificial Sequence
  Description of Artificial Sequence: Synthetic oligonucleotide
ugaagagacauaccacccc

SEQ ID NO: 3214136 - RNA, 19 nt, Artificial Sequence
  Description of Artificial Sequence: Synthetic oligonucleotide
gagagagagagagagagac

SEQ ID NO: 3214137 - RNA, 19 nt, Artificial Sequence
  Description of Artificial Sequence: Synthetic oligonucleotide
acuucuuucuagccaguac

SEQ ID NO: 3214138 - RNA, 19 nt, Artificial Sequence
  Description of Artificial Sequence: Synthetic oligonucleotide
accuucaggaauauucucc

SEQ ID NO: 3214139 - RNA, 19 nt, Artificial Sequence
  Description of Artificial Sequence: Synthetic oligonucleotide
uucuuucuagccaguacag

SEQ ID NO: 3214140 - RNA, 19 nt, Artificial Sequence
  Description of Artificial Sequence: Synthetic oligonucleotide
ugaguccuagcacaguggc

SEQ ID NO: 3214141 - RNA, 19 nt, Artificial Sequence
  Description of Artificial Sequence: Synthetic oligonucleotide
agcagaugaguccuagcac

SEQ ID NO: 3214142 - RNA, 19 nt, Artificial Sequence
  Description of Artificial Sequence: Synthetic oligonucleotide
acggccacuuuccauagac

SEQ ID NO: 3214143 - RNA, 19 nt, Artificial Sequence
  Description of Artificial Sequence: Synthetic oligonucleotide
agacuggagucuaagagac

SEQ ID NO: 3214144 - RNA, 19 nt, Artificial Sequence
  Description of Artificial Sequence: Synthetic oligonucleotide
cucacugaagacugaagag

SEQ ID NO: 3214145 - RNA, 19 nt, Artificial Sequence
  Description of Artificial Sequence: Synthetic oligonucleotide
cuuguaaaucccaucagga

SEQ ID NO: 3214146 - RNA, 19 nt, Artificial Sequence
  Description of Artificial Sequence: Synthetic oligonucleotide
ucacugaagacugaagaga

SEQ ID NO: 3214147 - RNA, 19 nt, Artificial Sequence
  Description of Artificial Sequence: Synthetic oligonucleotide
uggaaggugaggccuaggc

SEQ ID NO: 3214148 - RNA, 19 nt, Artificial Sequence
  Description of Artificial Sequence: Synthetic oligonucleotide
cuggucagcacuguaaacc

SEQ ID NO: 3214149 - RNA, 19 nt, Artificial Sequence
  Description of Artificial Sequence: Synthetic oligonucleotide
ugaggccuaggcuagggcc

SEQ ID NO: 3214150 - RNA, 19 nt, Artificial Sequence
  Description of Artificial Sequence: Synthetic oligonucleotide
ucagcugccauucucccaa

SEQ ID NO: 3214151 - RNA, 19 nt, Artificial Sequence
  Description of Artificial Sequence: Synthetic oligonucleotide
cugaagagacauaccaccc

SEQ ID NO: 3214152 - RNA, 19 nt, Artificial Sequence
  Description of Artificial Sequence: Synthetic oligonucleotide
uugacuugggucacuucag

SEQ ID NO: 3214153 - RNA, 19 nt, Artificial Sequence
  Description of Artificial Sequence: Synthetic oligonucleotide
agggccuggaaccacccgc

SEQ ID NO: 3214154 - RNA, 19 nt, Artificial Sequence
  Description of Artificial Sequence: Synthetic oligonucleotide
uccugugaucauuaagcag

SEQ ID NO: 3214155 - RNA, 19 nt, Artificial Sequence
  Description of Artificial Sequence: Synthetic oligonucleotide
ucccaguugacuuggguca

SEQ ID NO: 3214156 - RNA, 19 nt, Artificial Sequence
  Description of Artificial Sequence: Synthetic oligonucleotide
guugacuugggucacuuca

SEQ ID NO: 3214157 - RNA, 19 nt, Artificial Sequence
  Description of Artificial Sequence: Synthetic oligonucleotide
aaugcagucugggacugag

SEQ ID NO: 3214158 - RNA, 19 nt, Artificial Sequence
  Description of Artificial Sequence: Synthetic oligonucleotide
ugugauagaugcagaagua

SEQ ID NO: 3214159 - RNA, 19 nt, Artificial Sequence
  Description of Artificial Sequence: Synthetic oligonucleotide
cagaagcugacccugcugc

SEQ ID NO: 3214160 - RNA, 19 nt, Artificial Sequence
  Description of Artificial Sequence: Synthetic oligonucleotide
ucagugacuggaaggugag

SEQ ID NO: 3214161 - RNA, 19 nt, Artificial Sequence
  Description of Artificial Sequence: Synthetic oligonucleotide
ucuaagagacuucuuucua

SEQ ID NO: 3214162 - RNA, 19 nt, Artificial Sequence
  Description of Artificial Sequence: Synthetic oligonucleotide
gaaggugaggccuaggcua

SEQ ID NO: 3214163 - RNA, 19 nt, Artificial Sequence
  Description of Artificial Sequence: Synthetic oligonucleotide
gauagaugcagaaguacuc

SEQ ID NO: 3214164 - RNA, 19 nt, Artificial Sequence
  Description of Artificial Sequence: Synthetic oligonucleotide
ugccauucucccaacggcc

SEQ ID NO: 3214165 - RNA, 19 nt, Artificial Sequence
  Description of Artificial Sequence: Synthetic oligonucleotide
gaauauucuccccuuguaa

SEQ ID NO: 3214166 - RNA, 19 nt, Artificial Sequence
  Description of Artificial Sequence: Synthetic oligonucleotide
gacagagagagaccagcag

SEQ ID NO: 3214167 - RNA, 19 nt, Artificial Sequence
  Description of Artificial Sequence: Synthetic oligonucleotide
cuucuuucuagccaguaca

SEQ ID NO: 3214168 - RNA, 19 nt, Artificial Sequence
  Description of Artificial Sequence: Synthetic oligonucleotide
uuaagcagaugaguccuag

SEQ ID NO: 3214169 - RNA, 19 nt, Artificial Sequence
  Description of Artificial Sequence: Synthetic oligonucleotide
gagagagaccagcaggggc

SEQ ID NO: 3214170 - RNA, 19 nt, Artificial Sequence
  Description of Artificial Sequence: Synthetic oligonucleotide
agaugcagaaguacucccc

SEQ ID NO: 3214171 - RNA, 19 nt, Artificial Sequence
  Description of Artificial Sequence: Synthetic oligonucleotide
cuucugucuggacaggccc

SEQ ID NO: 3214172 - RNA, 19 nt, Artificial Sequence
  Description of Artificial Sequence: Synthetic oligonucleotide
uuguaaaucccaucaggau

SEQ ID NO: 3214173 - RNA, 19 nt, Artificial Sequence
  Description of Artificial Sequence: Synthetic oligonucleotide
agcaaugcagucugggacu

SEQ ID NO: 3214174 - RNA, 19 nt, Artificial Sequence
  Description of Artificial Sequence: Synthetic oligonucleotide
aguccuagcacaguggcca

SEQ ID NO: 3214175 - RNA, 19 nt, Artificial Sequence
  Description of Artificial Sequence: Synthetic oligonucleotide
gagacagagagagaccagc

SEQ ID NO: 3214176 - RNA, 19 nt, Artificial Sequence
  Description of Artificial Sequence: Synthetic oligonucleotide
ucucccaacggccacuuuc

SEQ ID NO: 3214177 - RNA, 19 nt, Artificial Sequence
  Description of Artificial Sequence: Synthetic oligonucleotide
acagucacuccugugauca

SEQ ID NO: 3214178 - RNA, 19 nt, Artificial Sequence
  Description of Artificial Sequence: Synthetic oligonucleotide
uuccuugucagugacugga

SEQ ID NO: 3214179 - RNA, 19 nt, Artificial Sequence
  Description of Artificial Sequence: Synthetic oligonucleotide
uaaaccgccagaagcugac

SEQ ID NO: 3214180 - RNA, 19 nt, Artificial Sequence
  Description of Artificial Sequence: Synthetic oligonucleotide
uucuuggaccuucaggaau

SEQ ID NO: 3214181 - RNA, 19 nt, Artificial Sequence
  Description of Artificial Sequence: Synthetic oligonucleotide
ucuuggaccuucaggaaua

SEQ ID NO: 3214182 - RNA, 19 nt, Artificial Sequence
  Description of Artificial Sequence: Synthetic oligonucleotide
uuuccauagacuggagucu

SEQ ID NO: 3214183 - RNA, 19 nt, Artificial Sequence
  Description of Artificial Sequence: Synthetic oligonucleotide
uugucagugacuggaaggu

SEQ ID NO: 3214184 - RNA, 19 nt, Artificial Sequence
  Description of Artificial Sequence: Synthetic oligonucleotide
aggaauauucuccccuugu

SEQ ID NO: 3214185 - RNA, 19 nt, Artificial Sequence
  Description of Artificial Sequence: Synthetic oligonucleotide
uucuagccaguacagucac

SEQ ID NO: 3214186 - RNA, 19 nt, Artificial Sequence
  Description of Artificial Sequence: Synthetic oligonucleotide
ggaugagagaauccugggg

SEQ ID NO: 3214187 - RNA, 19 nt, Artificial Sequence
  Description of Artificial Sequence: Synthetic oligonucleotide
auauucuccccuuguaaau

SEQ ID NO: 3214188 - RNA, 19 nt, Artificial Sequence
  Description of Artificial Sequence: Synthetic oligonucleotide
cuaggcuagggccuggaac

SEQ ID NO: 3214189 - RNA, 19 nt, Artificial Sequence
  Description of Artificial Sequence: Synthetic oligonucleotide
acuuuccauagacuggagu

SEQ ID NO: 3214190 - RNA, 19 nt, Artificial Sequence
  Description of Artificial Sequence: Synthetic oligonucleotide
gcuuucuuggaccuucagg

SEQ ID NO: 3214191 - RNA, 19 nt, Artificial Sequence
  Description of Artificial Sequence: Synthetic oligonucleotide
aaauucuugaagcugcugc

SEQ ID NO: 3214192 - RNA, 19 nt, Artificial Sequence
  Description of Artificial Sequence: Synthetic oligonucleotide
uuuuauaaauucuugaagc

SEQ ID NO: 3214193 - RNA, 19 nt, Artificial Sequence
  Description of Artificial Sequence: Synthetic oligonucleotide
uauaaauucuugaagcugc

SEQ ID NO: 3214194 - RNA, 19 nt, Artificial Sequence
  Description of Artificial Sequence: Synthetic oligonucleotide
ugcuguugaagcaugaggg

SEQ ID NO: 3214195 - RNA, 19 nt, Artificial Sequence
  Description of Artificial Sequence: Synthetic oligonucleotide
uuguuuuccagcauguugc

SEQ ID NO: 3214196 - RNA, 19 nt, Artificial Sequence
  Description of Artificial Sequence: Synthetic oligonucleotide
aagcaugagggccugcugc

SEQ ID NO: 3214197 - RNA, 19 nt, Artificial Sequence
  Description of Artificial Sequence: Synthetic oligonucleotide
uguuagaaggccuuggcgc

SEQ ID NO: 3214198 - RNA, 19 nt, Artificial Sequence
  Description of Artificial Sequence: Synthetic oligonucleotide
uugagcaagagguuggagg

SEQ ID NO: 3214199 - RNA, 19 nt, Artificial Sequence
  Description of Artificial Sequence: Synthetic oligonucleotide
ugagcaagagguuggaggg

SEQ ID NO: 3214200 - RNA, 19 nt, Artificial Sequence
  Description of Artificial Sequence: Synthetic oligonucleotide
uuuauaaauucuugaagcu

SEQ ID NO: 3214201 - RNA, 19 nt, Artificial Sequence
  Description of Artificial Sequence: Synthetic oligonucleotide
gaggaugagacacaugugc

SEQ ID NO: 3214202 - RNA, 19 nt, Artificial Sequence
  Description of Artificial Sequence: Synthetic oligonucleotide
auuguuagaaggccuuggc

SEQ ID NO: 3214203 - RNA, 19 nt, Artificial Sequence
  Description of Artificial Sequence: Synthetic oligonucleotide
aaagccaacugcuggguag

SEQ ID NO: 3214204 - RNA, 19 nt, Artificial Sequence
  Description of Artificial Sequence: Synthetic oligonucleotide
ugagggaagucuuggaagg

SEQ ID NO: 3214205 - RNA, 19 nt, Artificial Sequence
  Description of Artificial Sequence: Synthetic oligonucleotide
uuuuccagcauguugcugu

SEQ ID NO: 3214206 - RNA, 19 nt, Artificial Sequence
  Description of Artificial Sequence: Synthetic oligonucleotide
uuguuagaaggccuuggcg

SEQ ID NO: 3214207 - RNA, 19 nt, Artificial Sequence
  Description of Artificial Sequence: Synthetic oligonucleotide
uuauaaauucuugaagcug

SEQ ID NO: 3214208 - RNA, 19 nt, Artificial Sequence
  Description of Artificial Sequence: Synthetic oligonucleotide
uucauaaugagggaagucu

SEQ ID NO: 3214209 - RNA, 19 nt, Artificial Sequence
  Description of Artificial Sequence: Synthetic oligonucleotide
aauucuugaagcugcugcu

SEQ ID NO: 3214210 - RNA, 19 nt, Artificial Sequence
  Description of Artificial Sequence: Synthetic oligonucleotide
uccagcauguugcuguugg

SEQ ID NO: 3214211 - RNA, 19 nt, Artificial Sequence
  Description of Artificial Sequence: Synthetic oligonucleotide
agacaggagaugcugcugc

SEQ ID NO: 3214212 - RNA, 19 nt, Artificial Sequence
  Description of Artificial Sequence: Synthetic oligonucleotide
aauuguuagaaggccuugg

SEQ ID NO: 3214213 - RNA, 19 nt, Artificial Sequence
  Description of Artificial Sequence: Synthetic oligonucleotide
gaugagacacaugugcugg

SEQ ID NO: 3214214 - RNA, 19 nt, Artificial Sequence
  Description of Artificial Sequence: Synthetic oligonucleotide
uggaaucaugccuugagca

SEQ ID NO: 3214215 - RNA, 19 nt, Artificial Sequence
  Description of Artificial Sequence: Synthetic oligonucleotide
aagcugcugcuguugaagc

SEQ ID NO: 3214216 - RNA, 19 nt, Artificial Sequence
  Description of Artificial Sequence: Synthetic oligonucleotide
aguuccguuggaaucaugc

SEQ ID NO: 3214217 - RNA, 19 nt, Artificial Sequence
  Description of Artificial Sequence: Synthetic oligonucleotide
aaugagggaagucuuggaa

SEQ ID NO: 3214218 - RNA, 19 nt, Artificial Sequence
  Description of Artificial Sequence: Synthetic oligonucleotide
uugaauuguuagaaggccu

SEQ ID NO: 3214219 - RNA, 19 nt, Artificial Sequence
  Description of Artificial Sequence: Synthetic oligonucleotide
guuguuuuccagcauguug

SEQ ID NO: 3214220 - RNA, 19 nt, Artificial Sequence
  Description of Artificial Sequence: Synthetic oligonucleotide
uggaaagccaacugcuggg

SEQ ID NO: 3214221 - RNA, 19 nt, Artificial Sequence
  Description of Artificial Sequence: Synthetic oligonucleotide
ggguugaauuguuagaagg

SEQ ID NO: 3214222 - RNA, 19 nt, Artificial Sequence
  Description of Artificial Sequence: Synthetic oligonucleotide
augagggaagucuuggaag

SEQ ID NO: 3214223 - RNA, 19 nt, Artificial Sequence
  Description of Artificial Sequence: Synthetic oligonucleotide
auaaugagggaagucuugg

SEQ ID NO: 3214224 - RNA, 19 nt, Artificial Sequence
  Description of Artificial Sequence: Synthetic oligonucleotide
uguuggagaguugagcugc

SEQ ID NO: 3214225 - RNA, 19 nt, Artificial Sequence
  Description of Artificial Sequence: Synthetic oligonucleotide
guuggaaucaugccuugag

SEQ ID NO: 3214226 - RNA, 19 nt, Artificial Sequence
  Description of Artificial Sequence: Synthetic oligonucleotide
guugaauuguuagaaggcc

SEQ ID NO: 3214227 - RNA, 19 nt, Artificial Sequence
  Description of Artificial Sequence: Synthetic oligonucleotide
uuggaaucaugccuugagc

SEQ ID NO: 3214228 - RNA, 19 nt, Artificial Sequence
  Description of Artificial Sequence: Synthetic oligonucleotide
cuuucgguuguuuuccagc

SEQ ID NO: 3214229 - RNA, 19 nt, Artificial Sequence
  Description of Artificial Sequence: Synthetic oligonucleotide
uuccguuggaaucaugccu

SEQ ID NO: 3214230 - RNA, 19 nt, Artificial Sequence
  Description of Artificial Sequence: Synthetic oligonucleotide
ugagcugcaacuguucuug

SEQ ID NO: 3214231 - RNA, 19 nt, Artificial Sequence
  Description of Artificial Sequence: Synthetic oligonucleotide
ucuuggaaggugccgagga

SEQ ID NO: 3214232 - RNA, 19 nt, Artificial Sequence
  Description of Artificial Sequence: Synthetic oligonucleotide
acaugugcuggucaggucu

SEQ ID NO: 3214233 - RNA, 19 nt, Artificial Sequence
  Description of Artificial Sequence: Synthetic oligonucleotide
aagagguuggaggggaagg

SEQ ID NO: 3214234 - RNA, 19 nt, Artificial Sequence
  Description of Artificial Sequence: Synthetic oligonucleotide
uguugaagcaugagggccu

SEQ ID NO: 3214235 - RNA, 19 nt, Artificial Sequence
  Description of Artificial Sequence: Synthetic oligonucleotide
ucgguuguuuuccagcaug

SEQ ID NO: 3214236 - RNA, 19 nt, Artificial Sequence
  Description of Artificial Sequence: Synthetic oligonucleotide
cuggaaagccaacugcugg

SEQ ID NO: 3214237 - RNA, 19 nt, Artificial Sequence
  Description of Artificial Sequence: Synthetic oligonucleotide
gaaucaugccuugagcaag

SEQ ID NO: 3214238 - RNA, 19 nt, Artificial Sequence
  Description of Artificial Sequence: Synthetic oligonucleotide
uuucgguuguuuuccagca

SEQ ID NO: 3214239 - RNA, 19 nt, Artificial Sequence
  Description of Artificial Sequence: Synthetic oligonucleotide
caugccuugagcaagaggu

SEQ ID NO: 3214240 - RNA, 19 nt, Artificial Sequence
  Description of Artificial Sequence: Synthetic oligonucleotide
aaggugccgaggaugagac

SEQ ID NO: 3214241 - RNA, 19 nt, Artificial Sequence
  Description of Artificial Sequence: Synthetic oligonucleotide
caucuguagaagcugcugc

SEQ ID NO: 3214242 - RNA, 19 nt, Artificial Sequence
  Description of Artificial Sequence: Synthetic oligonucleotide
aacuguucuuguuuguuuu

SEQ ID NO: 3214243 - RNA, 19 nt, Artificial Sequence
  Description of Artificial Sequence: Synthetic oligonucleotide
agaagcugcugcuggaaag

SEQ ID NO: 3214244 - RNA, 19 nt, Artificial Sequence
  Description of Artificial Sequence: Synthetic oligonucleotide
ugcuggaaagccaacugcu

SEQ ID NO: 3214245 - RNA, 19 nt, Artificial Sequence
  Description of Artificial Sequence: Synthetic oligonucleotide
ugaauuguuagaaggccuu

SEQ ID NO: 3214246 - RNA, 19 nt, Artificial Sequence
  Description of Artificial Sequence: Synthetic oligonucleotide
acuugucacuucuuuccac

SEQ ID NO: 3214247 - RNA, 19 nt, Artificial Sequence
  Description of Artificial Sequence: Synthetic oligonucleotide
uguagucuccucugcagug

SEQ ID NO: 3214248 - RNA, 19 nt, Artificial Sequence
  Description of Artificial Sequence: Synthetic oligonucleotide
ucaugccuugagcaagagg

SEQ ID NO: 3214249 - RNA, 19 nt, Artificial Sequence
  Description of Artificial Sequence: Synthetic oligonucleotide
cugcuguugaagcaugagg

SEQ ID NO: 3214250 - RNA, 19 nt, Artificial Sequence
  Description of Artificial Sequence: Synthetic oligonucleotide
cauaaugagggaagucuug

SEQ ID NO: 3214251 - RNA, 19 nt, Artificial Sequence
  Description of Artificial Sequence: Synthetic oligonucleotide
aagccaacugcuggguagc

SEQ ID NO: 3214252 - RNA, 19 nt, Artificial Sequence
  Description of Artificial Sequence: Synthetic oligonucleotide
ucauaaugagggaagucuu

SEQ ID NO: 3214253 - RNA, 19 nt, Artificial Sequence
  Description of Artificial Sequence: Synthetic oligonucleotide
ugugguugcugccuguagu

SEQ ID NO: 3214254 - RNA, 19 nt, Artificial Sequence
  Description of Artificial Sequence: Synthetic oligonucleotide
aaggccuuggcgcugcaga

SEQ ID NO: 3214255 - RNA, 19 nt, Artificial Sequence
  Description of Artificial Sequence: Synthetic oligonucleotide
cacuucuuuccacagcugc

SEQ ID NO: 3214256 - RNA, 19 nt, Artificial Sequence
  Description of Artificial Sequence: Synthetic oligonucleotide
gaagcugcugcuguugaag

SEQ ID NO: 3214257 - RNA, 19 nt, Artificial Sequence
  Description of Artificial Sequence: Synthetic oligonucleotide
uucuugaagcugcugcugu

SEQ ID NO: 3214258 - RNA, 19 nt, Artificial Sequence
  Description of Artificial Sequence: Synthetic oligonucleotide
cuguagaagcugcugcugg

SEQ ID NO: 3214259 - RNA, 19 nt, Artificial Sequence
  Description of Artificial Sequence: Synthetic oligonucleotide
uggaaggugccgaggauga

SEQ ID NO: 3214260 - RNA, 19 nt, Artificial Sequence
  Description of Artificial Sequence: Synthetic oligonucleotide
ugucacuucuuuccacagc

SEQ ID NO: 3214261 - RNA, 19 nt, Artificial Sequence
  Description of Artificial Sequence: Synthetic oligonucleotide
ugcugcaucuguagaagcu

SEQ ID NO: 3214262 - RNA, 19 nt, Artificial Sequence
  Description of Artificial Sequence: Synthetic oligonucleotide
agcauguugcuguuggaga

SEQ ID NO: 3214263 - RNA, 19 nt, Artificial Sequence
  Description of Artificial Sequence: Synthetic oligonucleotide
agacacaugugcuggucag

SEQ ID NO: 3214264 - RNA, 19 nt, Artificial Sequence
  Description of Artificial Sequence: Synthetic oligonucleotide
gaagucuuggaaggugccg

SEQ ID NO: 3214265 - RNA, 19 nt, Artificial Sequence
  Description of Artificial Sequence: Synthetic oligonucleotide
cuguugaagcaugagggcc

SEQ ID NO: 3214266 - RNA, 19 nt, Artificial Sequence
  Description of Artificial Sequence: Synthetic oligonucleotide
aagcugcugcuggaaagcc

SEQ ID NO: 3214267 - RNA, 19 nt, Artificial Sequence
  Description of Artificial Sequence: Synthetic oligonucleotide
uggagaguugagcugcaac

SEQ ID NO: 3214268 - RNA, 19 nt, Artificial Sequence
  Description of Artificial Sequence: Synthetic oligonucleotide
cuuggcgcugcagagacag

SEQ ID NO: 3214269 - RNA, 19 nt, Artificial Sequence
  Description of Artificial Sequence: Synthetic oligonucleotide
ucuuucgguuguuuuccag

SEQ ID NO: 3214270 - RNA, 19 nt, Artificial Sequence
  Description of Artificial Sequence: Synthetic oligonucleotide
aagucuuggaaggugccga

SEQ ID NO: 3214271 - RNA, 19 nt, Artificial Sequence
  Description of Artificial Sequence: Synthetic oligonucleotide
uugucacuucuuuccacag

SEQ ID NO: 3214272 - RNA, 19 nt, Artificial Sequence
  Description of Artificial Sequence: Synthetic oligonucleotide
ugcaguuccguuggaauca

SEQ ID NO: 3214273 - RNA, 19 nt, Artificial Sequence
  Description of Artificial Sequence: Synthetic oligonucleotide
uccguuggaaucaugccuu

SEQ ID NO: 3214274 - RNA, 19 nt, Artificial Sequence
  Description of Artificial Sequence: Synthetic oligonucleotide
uucuuuccacagcugcugc

SEQ ID NO: 3214275 - RNA, 19 nt, Artificial Sequence
  Description of Artificial Sequence: Synthetic oligonucleotide
aucuguagaagcugcugcu

SEQ ID NO: 3214276 - RNA, 19 nt, Artificial Sequence
  Description of Artificial Sequence: Synthetic oligonucleotide
uguagaagcugcugcugga

SEQ ID NO: 3214277 - RNA, 19 nt, Artificial Sequence
  Description of Artificial Sequence: Synthetic oligonucleotide
uaaugagggaagucuugga

SEQ ID NO: 3214278 - RNA, 19 nt, Artificial Sequence
  Description of Artificial Sequence: Synthetic oligonucleotide
uuggaaggugccgaggaug

SEQ ID NO: 3214279 - RNA, 19 nt, Artificial Sequence
  Description of Artificial Sequence: Synthetic oligonucleotide
agaguugagcugcaacugu

SEQ ID NO: 3214280 - RNA, 19 nt, Artificial Sequence
  Description of Artificial Sequence: Synthetic oligonucleotide
agagacaggagaugcugcu

SEQ ID NO: 3214281 - RNA, 19 nt, Artificial Sequence
  Description of Artificial Sequence: Synthetic oligonucleotide
gguugaauuguuagaaggc

SEQ ID NO: 3214282 - RNA, 19 nt, Artificial Sequence
  Description of Artificial Sequence: Synthetic oligonucleotide
caggagaugcugcugcugc

SEQ ID NO: 3214283 - RNA, 19 nt, Artificial Sequence
  Description of Artificial Sequence: Synthetic oligonucleotide
gagaguugagcugcaacug

SEQ ID NO: 3214284 - RNA, 19 nt, Artificial Sequence
  Description of Artificial Sequence: Synthetic oligonucleotide
uugaagcugcugcuguuga

SEQ ID NO: 3214285 - RNA, 19 nt, Artificial Sequence
  Description of Artificial Sequence: Synthetic oligonucleotide
gaagcugcugcuggaaagc

SEQ ID NO: 3214286 - RNA, 19 nt, Artificial Sequence
  Description of Artificial Sequence: Synthetic oligonucleotide
ugcucuuucgguuguuuuc

SEQ ID NO: 3214287 - RNA, 19 nt, Artificial Sequence
  Description of Artificial Sequence: Synthetic oligonucleotide
cugcuggaaagccaacugc

SEQ ID NO: 3214288 - RNA, 19 nt, Artificial Sequence
  Description of Artificial Sequence: Synthetic oligonucleotide
ugcuguuggagaguugagc

SEQ ID NO: 3214289 - RNA, 19 nt, Artificial Sequence
  Description of Artificial Sequence: Synthetic oligonucleotide
gcacuugucacuucuuucc

SEQ ID NO: 3214290 - RNA, 19 nt, Artificial Sequence
  Description of Artificial Sequence: Synthetic oligonucleotide
cugcaucuguagaagcugc

SEQ ID NO: 3214291 - RNA, 19 nt, Artificial Sequence
  Description of Artificial Sequence: Synthetic oligonucleotide
uuaacuacagagcugaagg

SEQ ID NO: 3214292 - RNA, 19 nt, Artificial Sequence
  Description of Artificial Sequence: Synthetic oligonucleotide
uuaguguaaguguagauag

SEQ ID NO: 3214293 - RNA, 19 nt, Artificial Sequence
  Description of Artificial Sequence: Synthetic oligonucleotide
aaugccaucaaagacaaug

SEQ ID NO: 3214294 - RNA, 19 nt, Artificial Sequence
  Description of Artificial Sequence: Synthetic oligonucleotide
uaacucuucaaucaccagg

SEQ ID NO: 3214295 - RNA, 19 nt, Artificial Sequence
  Description of Artificial Sequence: Synthetic oligonucleotide
ucuucaaucaccaggugag

SEQ ID NO: 3214296 - RNA, 19 nt, Artificial Sequence
  Description of Artificial Sequence: Synthetic oligonucleotide
aaagacaauguccuguuug

SEQ ID NO: 3214297 - RNA, 19 nt, Artificial Sequence
  Description of Artificial Sequence: Synthetic oligonucleotide
gucaucaugagauaagcgg

SEQ ID NO: 3214298 - RNA, 19 nt, Artificial Sequence
  Description of Artificial Sequence: Synthetic oligonucleotide
uguaaguguagauaggagc

SEQ ID NO: 3214299 - RNA, 19 nt, Artificial Sequence
  Description of Artificial Sequence: Synthetic oligonucleotide
aaagaagacacucucuuaa

SEQ ID NO: 3214300 - RNA, 19 nt, Artificial Sequence
  Description of Artificial Sequence: Synthetic oligonucleotide
aauaaaccgguccuugaag

SEQ ID NO: 3214301 - RNA, 19 nt, Artificial Sequence
  Description of Artificial Sequence: Synthetic oligonucleotide
uagauaggagccaucagag

SEQ ID NO: 3214302 - RNA, 19 nt, Artificial Sequence
  Description of Artificial Sequence: Synthetic oligonucleotide
ucauacacagcaucgaucu

SEQ ID NO: 3214303 - RNA, 19 nt, Artificial Sequence
  Description of Artificial Sequence: Synthetic oligonucleotide
ugauuaacuacagagcuga

SEQ ID NO: 3214304 - RNA, 19 nt, Artificial Sequence
  Description of Artificial Sequence: Synthetic oligonucleotide
ucaucaugagauaagcgga

SEQ ID NO: 3214305 - RNA, 19 nt, Artificial Sequence
  Description of Artificial Sequence: Synthetic oligonucleotide
cuguccgccaaauaaaccg

SEQ ID NO: 3214306 - RNA, 19 nt, Artificial Sequence
  Description of Artificial Sequence: Synthetic oligonucleotide
ugagauaagcggaaguucu

SEQ ID NO: 3214307 - RNA, 19 nt, Artificial Sequence
  Description of Artificial Sequence: Synthetic oligonucleotide
uaagcggaaguucuuagug

SEQ ID NO: 3214308 - RNA, 19 nt, Artificial Sequence
  Description of Artificial Sequence: Synthetic oligonucleotide
aaguucuuaguguaagugu

SEQ ID NO: 3214309 - RNA, 19 nt, Artificial Sequence
  Description of Artificial Sequence: Synthetic oligonucleotide
auaagcaccuuucuuuggg

SEQ ID NO: 3214310 - RNA, 19 nt, Artificial Sequence
  Description of Artificial Sequence: Synthetic oligonucleotide
aagugugaagcaccagggc

SEQ ID NO: 3214311 - RNA, 19 nt, Artificial Sequence
  Description of Artificial Sequence: Synthetic oligonucleotide
acaaggaacaggcuguauc

SEQ ID NO: 3214312 - RNA, 19 nt, Artificial Sequence
  Description of Artificial Sequence: Synthetic oligonucleotide
accagugucaguaucagcg

SEQ ID NO: 3214313 - RNA, 19 nt, Artificial Sequence
  Description of Artificial Sequence: Synthetic oligonucleotide
ugucaucaugagauaagcg

SEQ ID NO: 3214314 - RNA, 19 nt, Artificial Sequence
  Description of Artificial Sequence: Synthetic oligonucleotide
ugaagaagaagaucucacc

SEQ ID NO: 3214315 - RNA, 19 nt, Artificial Sequence
  Description of Artificial Sequence: Synthetic oligonucleotide
aagacacucucuuaacucu

SEQ ID NO: 3214316 - RNA, 19 nt, Artificial Sequence
  Description of Artificial Sequence: Synthetic oligonucleotide
ucuuaacucuucaaucacc

SEQ ID NO: 3214317 - RNA, 19 nt, Artificial Sequence
  Description of Artificial Sequence: Synthetic oligonucleotide
uugaagaagaagaucucac

SEQ ID NO: 3214318 - RNA, 19 nt, Artificial Sequence
  Description of Artificial Sequence: Synthetic oligonucleotide
guaaguguagauaggagcc

SEQ ID NO: 3214319 - RNA, 19 nt, Artificial Sequence
  Description of Artificial Sequence: Synthetic oligonucleotide
aguaucagcggggagggcc

SEQ ID NO: 3214320 - RNA, 19 nt, Artificial Sequence
  Description of Artificial Sequence: Synthetic oligonucleotide
aagaucucaccacggaucu

SEQ ID NO: 3214321 - RNA, 19 nt, Artificial Sequence
  Description of Artificial Sequence: Synthetic oligonucleotide
augucaucaugagauaagc

SEQ ID NO: 3214322 - RNA, 19 nt, Artificial Sequence
  Description of Artificial Sequence: Synthetic oligonucleotide
aaauaaaccgguccuugaa

SEQ ID NO: 3214323 - RNA, 19 nt, Artificial Sequence
  Description of Artificial Sequence: Synthetic oligonucleotide
gaagugugaagcaccaggg

SEQ ID NO: 3214324 - RNA, 19 nt, Artificial Sequence
  Description of Artificial Sequence: Synthetic oligonucleotide
gauaagcggaaguucuuag

SEQ ID NO: 3214325 - RNA, 19 nt, Artificial Sequence
  Description of Artificial Sequence: Synthetic oligonucleotide
gaaguucuuaguguaagug

SEQ ID NO: 3214326 - RNA, 19 nt, Artificial Sequence
  Description of Artificial Sequence: Synthetic oligonucleotide
gaucucaccacggaucugg

SEQ ID NO: 3214327 - RNA, 19 nt, Artificial Sequence
  Description of Artificial Sequence: Synthetic oligonucleotide
gagugguacaauaagcacc

SEQ ID NO: 3214328 - RNA, 19 nt, Artificial Sequence
  Description of Artificial Sequence: Synthetic oligonucleotide
auccaagcaucccuuaagg

SEQ ID NO: 3214329 - RNA, 19 nt, Artificial Sequence
  Description of Artificial Sequence: Synthetic oligonucleotide
agaagauccaagcaucccu

SEQ ID NO: 3214330 - RNA, 19 nt, Artificial Sequence
  Description of Artificial Sequence: Synthetic oligonucleotide
ugagaagauccaagcaucc

SEQ ID NO: 3214331 - RNA, 19 nt, Artificial Sequence
  Description of Artificial Sequence: Synthetic oligonucleotide
agugugaagcaccagggca

SEQ ID NO: 3214332 - RNA, 19 nt, Artificial Sequence
  Description of Artificial Sequence: Synthetic oligonucleotide
uguccgccaaauaaaccgg

SEQ ID NO: 3214333 - RNA, 19 nt, Artificial Sequence
  Description of Artificial Sequence: Synthetic oligonucleotide
ugggagugguacaauaagc

SEQ ID NO: 3214334 - RNA, 19 nt, Artificial Sequence
  Description of Artificial Sequence: Synthetic oligonucleotide
gaugggaagagccugaagu

SEQ ID NO: 3214335 - RNA, 19 nt, Artificial Sequence
  Description of Artificial Sequence: Synthetic oligonucleotide
ugggcugccacaaggaaca

SEQ ID NO: 3214336 - RNA, 19 nt, Artificial Sequence
  Description of Artificial Sequence: Synthetic oligonucleotide
guagauaggagccaucaga

SEQ ID NO: 3214337 - RNA, 19 nt, Artificial Sequence
  Description of Artificial Sequence: Synthetic oligonucleotide
gauaggagccaucagagcu

SEQ ID NO: 3214338 - RNA, 19 nt, Artificial Sequence
  Description of Artificial Sequence: Synthetic oligonucleotide
uucaaucaccaggugaggg

SEQ ID NO: 3214339 - RNA, 19 nt, Artificial Sequence
  Description of Artificial Sequence: Synthetic oligonucleotide
uuggguacagaaagaagac

SEQ ID NO: 3214340 - RNA, 19 nt, Artificial Sequence
  Description of Artificial Sequence: Synthetic oligonucleotide
gauccaagcaucccuuaag

SEQ ID NO: 3214341 - RNA, 19 nt, Artificial Sequence
  Description of Artificial Sequence: Synthetic oligonucleotide
auaaaccgguccuugaaga

SEQ ID NO: 3214342 - RNA, 19 nt, Artificial Sequence
  Description of Artificial Sequence: Synthetic oligonucleotide
aagaagaucucaccacgga

SEQ ID NO: 3214343 - RNA, 19 nt, Artificial Sequence
  Description of Artificial Sequence: Synthetic oligonucleotide
agcaccuuucuuuggguac

SEQ ID NO: 3214344 - RNA, 19 nt, Artificial Sequence
  Description of Artificial Sequence: Synthetic oligonucleotide
agauaggagccaucagagc

SEQ ID NO: 3214345 - RNA, 19 nt, Artificial Sequence
  Description of Artificial Sequence: Synthetic oligonucleotide
gaggagaagcaccugggag

SEQ ID NO: 3214346 - RNA, 19 nt, Artificial Sequence
  Description of Artificial Sequence: Synthetic oligonucleotide
uguuugcagaucucgggag

SEQ ID NO: 3214347 - RNA, 19 nt, Artificial Sequence
  Description of Artificial Sequence: Synthetic oligonucleotide
gaaaguggccaccagcaac

SEQ ID NO: 3214348 - RNA, 19 nt, Artificial Sequence
  Description of Artificial Sequence: Synthetic oligonucleotide
uaguguaaguguagauagg

SEQ ID NO: 3214349 - RNA, 19 nt, Artificial Sequence
  Description of Artificial Sequence: Synthetic oligonucleotide
aacuacagagcugaaggca

SEQ ID NO: 3214350 - RNA, 19 nt, Artificial Sequence
  Description of Artificial Sequence: Synthetic oligonucleotide
gucaguaucagcggggagg

SEQ ID NO: 3214351 - RNA, 19 nt, Artificial Sequence
  Description of Artificial Sequence: Synthetic oligonucleotide
uguggggccaguaccagug

SEQ ID NO: 3214352 - RNA, 19 nt, Artificial Sequence
  Description of Artificial Sequence: Synthetic oligonucleotide
uucggggccucauacacag

SEQ ID NO: 3214353 - RNA, 19 nt, Artificial Sequence
  Description of Artificial Sequence: Synthetic oligonucleotide
auuaacuacagagcugaag

SEQ ID NO: 3214354 - RNA, 19 nt, Artificial Sequence
  Description of Artificial Sequence: Synthetic oligonucleotide
ucaugagauaagcggaagu

SEQ ID NO: 3214355 - RNA, 19 nt, Artificial Sequence
  Description of Artificial Sequence: Synthetic oligonucleotide
uguagauaggagccaucag

SEQ ID NO: 3214356 - RNA, 19 nt, Artificial Sequence
  Description of Artificial Sequence: Synthetic oligonucleotide
uccuguuugcagaucucgg

SEQ ID NO: 3214357 - RNA, 19 nt, Artificial Sequence
  Description of Artificial Sequence: Synthetic oligonucleotide
cucucuuaacucuucaauc

SEQ ID NO: 3214358 - RNA, 19 nt, Artificial Sequence
  Description of Artificial Sequence: Synthetic oligonucleotide
ucaguaucagcggggaggg

SEQ ID NO: 3214359 - RNA, 19 nt, Artificial Sequence
  Description of Artificial Sequence: Synthetic oligonucleotide
cugggcaaugccaucaaag

SEQ ID NO: 3214360 - RNA, 19 nt, Artificial Sequence
  Description of Artificial Sequence: Synthetic oligonucleotide
agaagacacucucuuaacu

SEQ ID NO: 3214361 - RNA, 19 nt, Artificial Sequence
  Description of Artificial Sequence: Synthetic oligonucleotide
aguguaaguguagauagga

SEQ ID NO: 3214362 - RNA, 19 nt, Artificial Sequence
  Description of Artificial Sequence: Synthetic oligonucleotide
cuuuucugggagcucaggc

SEQ ID NO: 3214363 - RNA, 19 nt, Artificial Sequence
  Description of Artificial Sequence: Synthetic oligonucleotide
ucaaucaccaggugaggga

SEQ ID NO: 3214364 - RNA, 19 nt, Artificial Sequence
  Description of Artificial Sequence: Synthetic oligonucleotide
uaacuacagagcugaaggc

SEQ ID NO: 3214365 - RNA, 19 nt, Artificial Sequence
  Description of Artificial Sequence: Synthetic oligonucleotide
aagcggaaguucuuagugu

SEQ ID NO: 3214366 - RNA, 19 nt, Artificial Sequence
  Description of Artificial Sequence: Synthetic oligonucleotide
augagauaagcggaaguuc

SEQ ID NO: 3214367 - RNA, 19 nt, Artificial Sequence
  Description of Artificial Sequence: Synthetic oligonucleotide
aaaccgguccuugaagaag

SEQ ID NO: 3214368 - RNA, 19 nt, Artificial Sequence
  Description of Artificial Sequence: Synthetic oligonucleotide
cuuuggguacagaaagaag

SEQ ID NO: 3214369 - RNA, 19 nt, Artificial Sequence
  Description of Artificial Sequence: Synthetic oligonucleotide
ucucgggagugacaggucc

SEQ ID NO: 3214370 - RNA, 19 nt, Artificial Sequence
  Description of Artificial Sequence: Synthetic oligonucleotide
aggagaagcaccugggagu

SEQ ID NO: 3214371 - RNA, 19 nt, Artificial Sequence
  Description of Artificial Sequence: Synthetic oligonucleotide
aucaaagacaauguccugu

SEQ ID NO: 3214372 - RNA, 19 nt, Artificial Sequence
  Description of Artificial Sequence: Synthetic oligonucleotide
agcaucgaucuuuucuggg

SEQ ID NO: 3214373 - RNA, 19 nt, Artificial Sequence
  Description of Artificial Sequence: Synthetic oligonucleotide
agugguacaauaagcaccu

SEQ ID NO: 3214374 - RNA, 19 nt, Artificial Sequence
  Description of Artificial Sequence: Synthetic oligonucleotide
acucucuuaacucuucaau

SEQ ID NO: 3214375 - RNA, 19 nt, Artificial Sequence
  Description of Artificial Sequence: Synthetic oligonucleotide
ucuuuggguacagaaagaa

SEQ ID NO: 3214376 - RNA, 19 nt, Artificial Sequence
  Description of Artificial Sequence: Synthetic oligonucleotide
accagggcagccuacagga

SEQ ID NO: 3214377 - RNA, 19 nt, Artificial Sequence
  Description of Artificial Sequence: Synthetic oligonucleotide
agccaucagagcuccaggg

SEQ ID NO: 3214378 - RNA, 19 nt, Artificial Sequence
  Description of Artificial Sequence: Synthetic oligonucleotide
cugauuaacuacagagcug

SEQ ID NO: 3214379 - RNA, 19 nt, Artificial Sequence
  Description of Artificial Sequence: Synthetic oligonucleotide
auccuucggggccucauac

SEQ ID NO: 3214380 - RNA, 19 nt, Artificial Sequence
  Description of Artificial Sequence: Synthetic oligonucleotide
gucacuguccgccaaauaa

SEQ ID NO: 3214381 - RNA, 19 nt, Artificial Sequence
  Description of Artificial Sequence: Synthetic oligonucleotide
aaggcugauuaacuacaga

SEQ ID NO: 3214382 - RNA, 19 nt, Artificial Sequence
  Description of Artificial Sequence: Synthetic oligonucleotide
accagcaacggcccugugg

SEQ ID NO: 3214383 - RNA, 19 nt, Artificial Sequence
  Description of Artificial Sequence: Synthetic oligonucleotide
caccaggugagggagaagg

SEQ ID NO: 3214384 - RNA, 19 nt, Artificial Sequence
  Description of Artificial Sequence: Synthetic oligonucleotide
acuacagagcugaaggcag

SEQ ID NO: 3214385 - RNA, 19 nt, Artificial Sequence
  Description of Artificial Sequence: Synthetic oligonucleotide
ggagugacaggucccagcg

SEQ ID NO: 3214386 - RNA, 19 nt, Artificial Sequence
  Description of Artificial Sequence: Synthetic oligonucleotide
auguccuguuugcagaucu

SEQ ID NO: 3214387 - RNA, 19 nt, Artificial Sequence
  Description of Artificial Sequence: Synthetic oligonucleotide
caucgaucuuuucugggag

SEQ ID NO: 3214388 - RNA, 19 nt, Artificial Sequence
  Description of Artificial Sequence: Synthetic oligonucleotide
caucagagcuccagggucc

SEQ ID NO: 3214389 - RNA, 19 nt, Artificial Sequence
  Description of Artificial Sequence: Synthetic oligonucleotide
gggagcucaggccagaaag

SEQ ID NO: 3214390 - RNA, 19 nt, Artificial Sequence
  Description of Artificial Sequence: Synthetic oligonucleotide
caucccuuaagguggggag

SEQ ID NO: 3214391 - RNA, 19 nt, Artificial Sequence
  Description of Artificial Sequence: Synthetic oligonucleotide
uaguagaugagacagaccg

SEQ ID NO: 3214392 - RNA, 19 nt, Artificial Sequence
  Description of Artificial Sequence: Synthetic oligonucleotide
aagauggccaaguaucugc

SEQ ID NO: 3214393 - RNA, 19 nt, Artificial Sequence
  Description of Artificial Sequence: Synthetic oligonucleotide
uuuaagauggccaaguauc

SEQ ID NO: 3214394 - RNA, 19 nt, Artificial Sequence
  Description of Artificial Sequence: Synthetic oligonucleotide
cauuaguggaauuugagcc

SEQ ID NO: 3214395 - RNA, 19 nt, Artificial Sequence
  Description of Artificial Sequence: Synthetic oligonucleotide
auuaguggaauuugagccc

SEQ ID NO: 3214396 - RNA, 19 nt, Artificial Sequence
  Description of Artificial Sequence: Synthetic oligonucleotide
uauagcagcaaucugggcu

SEQ ID NO: 3214397 - RNA, 19 nt, Artificial Sequence
  Description of Artificial Sequence: Synthetic oligonucleotide
aaagcacagagguacagug

SEQ ID NO: 3214398 - RNA, 19 nt, Artificial Sequence
  Description of Artificial Sequence: Synthetic oligonucleotide
uuacuaggcgggcaaaagg

SEQ ID NO: 3214399 - RNA, 19 nt, Artificial Sequence
  Description of Artificial Sequence: Synthetic oligonucleotide
agaugagacagaccggggc

SEQ ID NO: 3214400 - RNA, 19 nt, Artificial Sequence
  Description of Artificial Sequence: Synthetic oligonucleotide
gaugagacagaccggggcg

SEQ ID NO: 3214401 - RNA, 19 nt, Artificial Sequence
  Description of Artificial Sequence: Synthetic oligonucleotide
aguaucugcaggcacauga

SEQ ID NO: 3214402 - RNA, 19 nt, Artificial Sequence
  Description of Artificial Sequence: Synthetic oligonucleotide
gacggugaagagcaaaccg

SEQ ID NO: 3214403 - RNA, 19 nt, Artificial Sequence
  Description of Artificial Sequence: Synthetic oligonucleotide
agagcaaaccgccccaggc

SEQ ID NO: 3214404 - RNA, 19 nt, Artificial Sequence
  Description of Artificial Sequence: Synthetic oligonucleotide
ugcauuaguggaauuugag

SEQ ID NO: 3214405 - RNA, 19 nt, Artificial Sequence
  Description of Artificial Sequence: Synthetic oligonucleotide
aaucugggcugucagcggg

SEQ ID NO: 3214406 - RNA, 19 nt, Artificial Sequence
  Description of Artificial Sequence: Synthetic oligonucleotide
ucggagacggugaagagca

SEQ ID NO: 3214407 - RNA, 19 nt, Artificial Sequence
  Description of Artificial Sequence: Synthetic oligonucleotide
acagauguuuaagauggcc

SEQ ID NO: 3214408 - RNA, 19 nt, Artificial Sequence
  Description of Artificial Sequence: Synthetic oligonucleotide
ucagugguagauucgaaac

SEQ ID NO: 3214409 - RNA, 19 nt, Artificial Sequence
  Description of Artificial Sequence: Synthetic oligonucleotide
uacuaggcgggcaaaaggc

SEQ ID NO: 3214410 - RNA, 19 nt, Artificial Sequence
  Description of Artificial Sequence: Synthetic oligonucleotide
augugaagagccaagguac

SEQ ID NO: 3214411 - RNA, 19 nt, Artificial Sequence
  Description of Artificial Sequence: Synthetic oligonucleotide
ugugaagagccaagguacg

SEQ ID NO: 3214412 - RNA, 19 nt, Artificial Sequence
  Description of Artificial Sequence: Synthetic oligonucleotide
ucaaggugugggcaggagg

SEQ ID NO: 3214413 - RNA, 19 nt, Artificial Sequence
  Description of Artificial Sequence: Synthetic oligonucleotide
uggaauuugagcccuggcu

SEQ ID NO: 3214414 - RNA, 19 nt, Artificial Sequence
  Description of Artificial Sequence: Synthetic oligonucleotide
ugggcugcauaguaggugg

SEQ ID NO: 3214415 - RNA, 19 nt, Artificial Sequence
  Description of Artificial Sequence: Synthetic oligonucleotide
ucaaugugaagagccaagg

SEQ ID NO: 3214416 - RNA, 19 nt, Artificial Sequence
  Description of Artificial Sequence: Synthetic oligonucleotide
uguaguagaugagacagac

SEQ ID NO: 3214417 - RNA, 19 nt, Artificial Sequence
  Description of Artificial Sequence: Synthetic oligonucleotide
gauucgaaacugccaacgg

SEQ ID NO: 3214418 - RNA, 19 nt, Artificial Sequence
  Description of Artificial Sequence: Synthetic oligonucleotide
uuaagauggccaaguaucu

SEQ ID NO: 3214419 - RNA, 19 nt, Artificial Sequence
  Description of Artificial Sequence: Synthetic oligonucleotide
acguauagcagcaaucugg

SEQ ID NO: 3214420 - RNA, 19 nt, Artificial Sequence
  Description of Artificial Sequence: Synthetic oligonucleotide
agcacagagguacagugag

SEQ ID NO: 3214421 - RNA, 19 nt, Artificial Sequence
  Description of Artificial Sequence: Synthetic oligonucleotide
agagccaagguacgcauuc

SEQ ID NO: 3214422 - RNA, 19 nt, Artificial Sequence
  Description of Artificial Sequence: Synthetic oligonucleotide
auagcagcaaucugggcug

SEQ ID NO: 3214423 - RNA, 19 nt, Artificial Sequence
  Description of Artificial Sequence: Synthetic oligonucleotide
auggccaaguaucugcagg

SEQ ID NO: 3214424 - RNA, 19 nt, Artificial Sequence
  Description of Artificial Sequence: Synthetic oligonucleotide
agauucgaaacugccaacg

SEQ ID NO: 3214425 - RNA, 19 nt, Artificial Sequence
  Description of Artificial Sequence: Synthetic oligonucleotide
augaagguaucccaggcca

SEQ ID NO: 3214426 - RNA, 19 nt, Artificial Sequence
  Description of Artificial Sequence: Synthetic oligonucleotide
ugguagauucgaaacugcc

SEQ ID NO: 3214427 - RNA, 19 nt, Artificial Sequence
  Description of Artificial Sequence: Synthetic oligonucleotide
uucgaaacugccaacggua

SEQ ID NO: 3214428 - RNA, 19 nt, Artificial Sequence
  Description of Artificial Sequence: Synthetic oligonucleotide
gaccaugccugacucaagg

SEQ ID NO: 3214429 - RNA, 19 nt, Artificial Sequence
  Description of Artificial Sequence: Synthetic oligonucleotide
aagcuguaguagaugagac

SEQ ID NO: 3214430 - RNA, 19 nt, Artificial Sequence
  Description of Artificial Sequence: Synthetic oligonucleotide
gaugaagguaucccaggcc

SEQ ID NO: 3214431 - RNA, 19 nt, Artificial Sequence
  Description of Artificial Sequence: Synthetic oligonucleotide
uuccugagggcugacaggg

SEQ ID NO: 3214432 - RNA, 19 nt, Artificial Sequence
  Description of Artificial Sequence: Synthetic oligonucleotide
uggaugaagguaucccagg

SEQ ID NO: 3214433 - RNA, 19 nt, Artificial Sequence
  Description of Artificial Sequence: Synthetic oligonucleotide
auggagaacaggaccagcc

SEQ ID NO: 3214434 - RNA, 19 nt, Artificial Sequence
  Description of Artificial Sequence: Synthetic oligonucleotide
agcacucccacccgggacc

SEQ ID NO: 3214435 - RNA, 19 nt, Artificial Sequence
  Description of Artificial Sequence: Synthetic oligonucleotide
ucugcaggcacaugaccgg

SEQ ID NO: 3214436 - RNA, 19 nt, Artificial Sequence
  Description of Artificial Sequence: Synthetic oligonucleotide
cacaugaccggaagcaucc

SEQ ID NO: 3214437 - RNA, 19 nt, Artificial Sequence
  Description of Artificial Sequence: Synthetic oligonucleotide
caagguacgcauucgggag

SEQ ID NO: 3214438 - RNA, 19 nt, Artificial Sequence
  Description of Artificial Sequence: Synthetic oligonucleotide
agugguagauucgaaacug

SEQ ID NO: 3214439 - RNA, 19 nt, Artificial Sequence
  Description of Artificial Sequence: Synthetic oligonucleotide
acggugaagagcaaaccgc

SEQ ID NO: 3214440 - RNA, 19 nt, Artificial Sequence
  Description of Artificial Sequence: Synthetic oligonucleotide
uaguagguggccaugguua

SEQ ID NO: 3214441 - RNA, 19 nt, Artificial Sequence
  Description of Artificial Sequence: Synthetic oligonucleotide
gaagagcugggcugcauag

SEQ ID NO: 3214442 - RNA, 19 nt, Artificial Sequence
  Description of Artificial Sequence: Synthetic oligonucleotide
gaaacugccaacgguacac

SEQ ID NO: 3214443 - RNA, 19 nt, Artificial Sequence
  Description of Artificial Sequence: Synthetic oligonucleotide
aguagguggccaugguuac

SEQ ID NO: 3214444 - RNA, 19 nt, Artificial Sequence
  Description of Artificial Sequence: Synthetic oligonucleotide
agauguuuaagauggccaa

SEQ ID NO: 3214445 - RNA, 19 nt, Artificial Sequence
  Description of Artificial Sequence: Synthetic oligonucleotide
gcuguaguagaugagacag

SEQ ID NO: 3214446 - RNA, 19 nt, Artificial Sequence
  Description of Artificial Sequence: Synthetic oligonucleotide
cagagguacagugaguggg

SEQ ID NO: 3214447 - RNA, 19 nt, Artificial Sequence
  Description of Artificial Sequence: Synthetic oligonucleotide
agcaaucugggcugucagc

SEQ ID NO: 3214448 - RNA, 19 nt, Artificial Sequence
  Description of Artificial Sequence: Synthetic oligonucleotide
agcugggcugcauaguagg

SEQ ID NO: 3214449 - RNA, 19 nt, Artificial Sequence
  Description of Artificial Sequence: Synthetic oligonucleotide
auucgggagacccugggcu

SEQ ID NO: 3214450 - RNA, 19 nt, Artificial Sequence
  Description of Artificial Sequence: Synthetic oligonucleotide
agcccuggcuuccugaggg

SEQ ID NO: 3214451 - RNA, 19 nt, Artificial Sequence
  Description of Artificial Sequence: Synthetic oligonucleotide
aucggagacggugaagagc

SEQ ID NO: 3214452 - RNA, 19 nt, Artificial Sequence
  Description of Artificial Sequence: Synthetic oligonucleotide
uaucugcaggcacaugacc

SEQ ID NO: 3214453 - RNA, 19 nt, Artificial Sequence
  Description of Artificial Sequence: Synthetic oligonucleotide
aagagcaaaccgccccagg

SEQ ID NO: 3214454 - RNA, 19 nt, Artificial Sequence
  Description of Artificial Sequence: Synthetic oligonucleotide
agcacaggaaggaccaugc

SEQ ID NO: 3214455 - RNA, 19 nt, Artificial Sequence
  Description of Artificial Sequence: Synthetic oligonucleotide
aacugccaacgguacacag

SEQ ID NO: 3214456 - RNA, 19 nt, Artificial Sequence
  Description of Artificial Sequence: Synthetic oligonucleotide
gaagcuguaguagaugaga

SEQ ID NO: 3214457 - RNA, 19 nt, Artificial Sequence
  Description of Artificial Sequence: Synthetic oligonucleotide
aucugcaggcacaugaccg

SEQ ID NO: 3214458 - RNA, 19 nt, Artificial Sequence
  Description of Artificial Sequence: Synthetic oligonucleotide
uggagaacaggaccagccc

SEQ ID NO: 3214459 - RNA, 19 nt, Artificial Sequence
  Description of Artificial Sequence: Synthetic oligonucleotide
ugucagcggggacaggccg

SEQ ID NO: 3214460 - RNA, 19 nt, Artificial Sequence
  Description of Artificial Sequence: Synthetic oligonucleotide
auucgaaacugccaacggu

SEQ ID NO: 3214461 - RNA, 19 nt, Artificial Sequence
  Description of Artificial Sequence: Synthetic oligonucleotide
uaggcgggcaaaaggcacg

SEQ ID NO: 3214462 - RNA, 19 nt, Artificial Sequence
  Description of Artificial Sequence: Synthetic oligonucleotide
cacagcauggagaacagga

SEQ ID NO: 3214463 - RNA, 19 nt, Artificial Sequence
  Description of Artificial Sequence: Synthetic oligonucleotide
uagaugagacagaccgggg

SEQ ID NO: 3214464 - RNA, 19 nt, Artificial Sequence
  Description of Artificial Sequence: Synthetic oligonucleotide
gauguuuaagauggccaag

SEQ ID NO: 3214465 - RNA, 19 nt, Artificial Sequence
  Description of Artificial Sequence: Synthetic oligonucleotide
acaggaaggaccaugccug

SEQ ID NO: 3214466 - RNA, 19 nt, Artificial Sequence
  Description of Artificial Sequence: Synthetic oligonucleotide
uggccaaguaucugcaggc

SEQ ID NO: 3214467 - RNA, 19 nt, Artificial Sequence
  Description of Artificial Sequence: Synthetic oligonucleotide
cagcauggagaacaggacc

SEQ ID NO: 3214468 - RNA, 19 nt, Artificial Sequence
  Description of Artificial Sequence: Synthetic oligonucleotide
ugaagguaucccaggccag

SEQ ID NO: 3214469 - RNA, 19 nt, Artificial Sequence
  Description of Artificial Sequence: Synthetic oligonucleotide
cagauguuuaagauggcca

SEQ ID NO: 3214470 - RNA, 19 nt, Artificial Sequence
  Description of Artificial Sequence: Synthetic oligonucleotide
gaauuugagcccuggcuuc

SEQ ID NO: 3214471 - RNA, 19 nt, Artificial Sequence
  Description of Artificial Sequence: Synthetic oligonucleotide
agcaaaccgccccaggcag

SEQ ID NO: 3214472 - RNA, 19 nt, Artificial Sequence
  Description of Artificial Sequence: Synthetic oligonucleotide
uggccaugguuacuaggcg

SEQ ID NO: 3214473 - RNA, 19 nt, Artificial Sequence
  Description of Artificial Sequence: Synthetic oligonucleotide
uuaguggaauuugagcccu

SEQ ID NO: 3214474 - RNA, 19 nt, Artificial Sequence
  Description of Artificial Sequence: Synthetic oligonucleotide
uccggguccugcauuagug

SEQ ID NO: 3214475 - RNA, 19 nt, Artificial Sequence
  Description of Artificial Sequence: Synthetic oligonucleotide
ugacucaaggugugggcag

SEQ ID NO: 3214476 - RNA, 19 nt, Artificial Sequence
  Description of Artificial Sequence: Synthetic oligonucleotide
gcauuaguggaauuugagc

SEQ ID NO: 3214477 - RNA, 19 nt, Artificial Sequence
  Description of Artificial Sequence: Synthetic oligonucleotide
acagagguacagugagugg

SEQ ID NO: 3214478 - RNA, 19 nt, Artificial Sequence
  Description of Artificial Sequence: Synthetic oligonucleotide
agacggugaagagcaaacc

SEQ ID NO: 3214479 - RNA, 19 nt, Artificial Sequence
  Description of Artificial Sequence: Synthetic oligonucleotide
cacagagguacagugagug

SEQ ID NO: 3214480 - RNA, 19 nt, Artificial Sequence
  Description of Artificial Sequence: Synthetic oligonucleotide
agagguacagugagugggc

SEQ ID NO: 3214481 - RNA, 19 nt, Artificial Sequence
  Description of Artificial Sequence: Synthetic oligonucleotide
ugcgccacagcauggagaa

SEQ ID NO: 3214482 - RNA, 19 nt, Artificial Sequence
  Description of Artificial Sequence: Synthetic oligonucleotide
ggagaacaggaccagcccg

SEQ ID NO: 3214483 - RNA, 19 nt, Artificial Sequence
  Description of Artificial Sequence: Synthetic oligonucleotide
agccaagguacgcauucgg

SEQ ID NO: 3214484 - RNA, 19 nt, Artificial Sequence
  Description of Artificial Sequence: Synthetic oligonucleotide
accggggcgacguauagca

SEQ ID NO: 3214485 - RNA, 19 nt, Artificial Sequence
  Description of Artificial Sequence: Synthetic oligonucleotide
ucgaaacugccaacgguac

SEQ ID NO: 3214486 - RNA, 19 nt, Artificial Sequence
  Description of Artificial Sequence: Synthetic oligonucleotide
uguuuaagauggccaagua

SEQ ID NO: 3214487 - RNA, 19 nt, Artificial Sequence
  Description of Artificial Sequence: Synthetic oligonucleotide
aagguacgcauucgggaga

SEQ ID NO: 3214488 - RNA, 19 nt, Artificial Sequence
  Description of Artificial Sequence: Synthetic oligonucleotide
gacguauagcagcaaucug

SEQ ID NO: 3214489 - RNA, 19 nt, Artificial Sequence
  Description of Artificial Sequence: Synthetic oligonucleotide
aggaggaagcuguaguaga

SEQ ID NO: 3214490 - RNA, 19 nt, Artificial Sequence
  Description of Artificial Sequence: Synthetic oligonucleotide
gaguggaugaagguauccc

SEQ ID NO: 3214491 - RNA, 19 nt, Artificial Sequence
  Description of Artificial Sequence: Synthetic oligonucleotide
uguaucaacaucaagucgg

SEQ ID NO: 3214492 - RNA, 19 nt, Artificial Sequence
  Description of Artificial Sequence: Synthetic oligonucleotide
aaaacaucuaauuucuuug

SEQ ID NO: 3214493 - RNA, 19 nt, Artificial Sequence
  Description of Artificial Sequence: Synthetic oligonucleotide
uaucaagcggucuugaccg

SEQ ID NO: 3214494 - RNA, 19 nt, Artificial Sequence
  Description of Artificial Sequence: Synthetic oligonucleotide
uuuaauuccaauuccacaa

SEQ ID NO: 3214495 - RNA, 19 nt, Artificial Sequence
  Description of Artificial Sequence: Synthetic oligonucleotide
gaaguaacuaaacauggcc

SEQ ID NO: 3214496 - RNA, 19 nt, Artificial Sequence
  Description of Artificial Sequence: Synthetic oligonucleotide
accuucaugauuugaaacc

SEQ ID NO: 3214497 - RNA, 19 nt, Artificial Sequence
  Description of Artificial Sequence: Synthetic oligonucleotide
aaaaugguuccaugcaaac

SEQ ID NO: 3214498 - RNA, 19 nt, Artificial Sequence
  Description of Artificial Sequence: Synthetic oligonucleotide
aguguaucaacaucaaguc

SEQ ID NO: 3214499 - RNA, 19 nt, Artificial Sequence
  Description of Artificial Sequence: Synthetic oligonucleotide
uguacaaugccccagguuc

SEQ ID NO: 3214500 - RNA, 19 nt, Artificial Sequence
  Description of Artificial Sequence: Synthetic oligonucleotide
aacuuaaccuuccaugcuc

SEQ ID NO: 3214501 - RNA, 19 nt, Artificial Sequence
  Description of Artificial Sequence: Synthetic oligonucleotide
uacacaauguacaauuuca

SEQ ID NO: 3214502 - RNA, 19 nt, Artificial Sequence
  Description of Artificial Sequence: Synthetic oligonucleotide
ucucuuuacaguaauuuga

SEQ ID NO: 3214503 - RNA, 19 nt, Artificial Sequence
  Description of Artificial Sequence: Synthetic oligonucleotide
aaguguaucaacaucaagu

SEQ ID NO: 3214504 - RNA, 19 nt, Artificial Sequence
  Description of Artificial Sequence: Synthetic oligonucleotide
ugcaaacuuauccaaagug

SEQ ID NO: 3214505 - RNA, 19 nt, Artificial Sequence
  Description of Artificial Sequence: Synthetic oligonucleotide
ugcaguuaccauaaaagug

SEQ ID NO: 3214506 - RNA, 19 nt, Artificial Sequence
  Description of Artificial Sequence: Synthetic oligonucleotide
ucaacaucaagucggaagu

SEQ ID NO: 3214507 - RNA, 19 nt, Artificial Sequence
  Description of Artificial Sequence: Synthetic oligonucleotide
uuuaugucggcuuauguuc

SEQ ID NO: 3214508 - RNA, 19 nt, Artificial Sequence
  Description of Artificial Sequence: Synthetic oligonucleotide
accauaaaaguguaucaac

SEQ ID NO: 3214509 - RNA, 19 nt, Artificial Sequence
  Description of Artificial Sequence: Synthetic oligonucleotide
aaugccgcugucuucaaug

SEQ ID NO: 3214510 - RNA, 19 nt, Artificial Sequence
  Description of Artificial Sequence: Synthetic oligonucleotide
gugagcauuauugagaaag

SEQ ID NO: 3214511 - RNA, 19 nt, Artificial Sequence
  Description of Artificial Sequence: Synthetic oligonucleotide
uggucaaagccacagaaac

SEQ ID NO: 3214512 - RNA, 19 nt, Artificial Sequence
  Description of Artificial Sequence: Synthetic oligonucleotide
guggauauucucuuuacag

SEQ ID NO: 3214513 - RNA, 19 nt, Artificial Sequence
  Description of Artificial Sequence: Synthetic oligonucleotide
ugagcauuauugagaaagg

SEQ ID NO: 3214514 - RNA, 19 nt, Artificial Sequence
  Description of Artificial Sequence: Synthetic oligonucleotide
uuucauguucacugggugg

SEQ ID NO: 3214515 - RNA, 19 nt, Artificial Sequence
  Description of Artificial Sequence: Synthetic oligonucleotide
auacacaauguacaauuuc

SEQ ID NO: 3214516 - RNA, 19 nt, Artificial Sequence
  Description of Artificial Sequence: Synthetic oligonucleotide
aaacaucuaauuucuuugu

SEQ ID NO: 3214517 - RNA, 19 nt, Artificial Sequence
  Description of Artificial Sequence: Synthetic oligonucleotide
uuccuauuggaaaauguga

SEQ ID NO: 3214518 - RNA, 19 nt, Artificial Sequence
  Description of Artificial Sequence: Synthetic oligonucleotide
caaacuuauccaaagugac

SEQ ID NO: 3214519 - RNA, 19 nt, Artificial Sequence
  Description of Artificial Sequence: Synthetic oligonucleotide
uuaccauaaaaguguauca

SEQ ID NO: 3214520 - RNA, 19 nt, Artificial Sequence
  Description of Artificial Sequence: Synthetic oligonucleotide
acagagggaaaccugacug

SEQ ID NO: 3214521 - RNA, 19 nt, Artificial Sequence
  Description of Artificial Sequence: Synthetic oligonucleotide
uguaucauucccaacuaaa

SEQ ID NO: 3214522 - RNA, 19 nt, Artificial Sequence
  Description of Artificial Sequence: Synthetic oligonucleotide
aggucugugagguaggcag

SEQ ID NO: 3214523 - RNA, 19 nt, Artificial Sequence
  Description of Artificial Sequence: Synthetic oligonucleotide
ugaccgaaaguauacacgu

SEQ ID NO: 3214524 - RNA, 19 nt, Artificial Sequence
  Description of Artificial Sequence: Synthetic oligonucleotide
caauuauacacaauguaca

SEQ ID NO: 3214525 - RNA, 19 nt, Artificial Sequence
  Description of Artificial Sequence: Synthetic oligonucleotide
caugcaaacuuauccaaag

SEQ ID NO: 3214526 - RNA, 19 nt, Artificial Sequence
  Description of Artificial Sequence: Synthetic oligonucleotide
aaguauacacgugaccauc

SEQ ID NO: 3214527 - RNA, 19 nt, Artificial Sequence
  Description of Artificial Sequence: Synthetic oligonucleotide
aacucuccucaguaaugcc

SEQ ID NO: 3214528 - RNA, 19 nt, Artificial Sequence
  Description of Artificial Sequence: Synthetic oligonucleotide
augugaaggaugcuguuag

SEQ ID NO: 3214529 - RNA, 19 nt, Artificial Sequence
  Description of Artificial Sequence: Synthetic oligonucleotide
ugggcuuacacuuccgucc

SEQ ID NO: 3214530 - RNA, 19 nt, Artificial Sequence
  Description of Artificial Sequence: Synthetic oligonucleotide
ucgaacugcagccaccugc

SEQ ID NO: 3214531 - RNA, 19 nt, Artificial Sequence
  Description of Artificial Sequence: Synthetic oligonucleotide
aaccauuuugccaucagca

SEQ ID NO: 3214532 - RNA, 19 nt, Artificial Sequence
  Description of Artificial Sequence: Synthetic oligonucleotide
agaaucaagaggaaucauc

SEQ ID NO: 3214533 - RNA, 19 nt, Artificial Sequence
  Description of Artificial Sequence: Synthetic oligonucleotide
aacugcagccaccugccgg

SEQ ID NO: 3214534 - RNA, 19 nt, Artificial Sequence
  Description of Artificial Sequence: Synthetic oligonucleotide
gaaaugucggcgguguugg

SEQ ID NO: 3214535 - RNA, 19 nt, Artificial Sequence
  Description of Artificial Sequence: Synthetic oligonucleotide
cuuauguuccuaaaacauc

SEQ ID NO: 3214536 - RNA, 19 nt, Artificial Sequence
  Description of Artificial Sequence: Synthetic oligonucleotide
uggauauucucuuuacagu

SEQ ID NO: 3214537 - RNA, 19 nt, Artificial Sequence
  Description of Artificial Sequence: Synthetic oligonucleotide
auuucauguucacugggug

SEQ ID NO: 3214538 - RNA, 19 nt, Artificial Sequence
  Description of Artificial Sequence: Synthetic oligonucleotide
uuaugucggcuuauguucc

SEQ ID NO: 3214539 - RNA, 19 nt, Artificial Sequence
  Description of Artificial Sequence: Synthetic oligonucleotide
accgaaaguauacacguga

SEQ ID NO: 3214540 - RNA, 19 nt, Artificial Sequence
  Description of Artificial Sequence: Synthetic oligonucleotide
ugaaccaugguuuucccua

SEQ ID NO: 3214541 - RNA, 19 nt, Artificial Sequence
  Description of Artificial Sequence: Synthetic oligonucleotide
uaguuguccaugucaauug

SEQ ID NO: 3214542 - RNA, 19 nt, Artificial Sequence
  Description of Artificial Sequence: Synthetic oligonucleotide
aaaguauacacgugaccau

SEQ ID NO: 3214543 - RNA, 19 nt, Artificial Sequence
  Description of Artificial Sequence: Synthetic oligonucleotide
aaagcaaguguguguucag

SEQ ID NO: 3214544 - RNA, 19 nt, Artificial Sequence
  Description of Artificial Sequence: Synthetic oligonucleotide
aaugucggcgguguuggcg

SEQ ID NO: 3214545 - RNA, 19 nt, Artificial Sequence
  Description of Artificial Sequence: Synthetic oligonucleotide
agucgauacucaauggccc

SEQ ID NO: 3214546 - RNA, 19 nt, Artificial Sequence
  Description of Artificial Sequence: Synthetic oligonucleotide
ugcuguuaggcacaucucu

SEQ ID NO: 3214547 - RNA, 19 nt, Artificial Sequence
  Description of Artificial Sequence: Synthetic oligonucleotide
uguacaauuucauguucac

SEQ ID NO: 3214548 - RNA, 19 nt, Artificial Sequence
  Description of Artificial Sequence: Synthetic oligonucleotide
cuugaccgaaaguauacac

SEQ ID NO: 3214549 - RNA, 19 nt, Artificial Sequence
  Description of Artificial Sequence: Synthetic oligonucleotide
guguaucaacaucaagucg

SEQ ID NO: 3214550 - RNA, 19 nt, Artificial Sequence
  Description of Artificial Sequence: Synthetic oligonucleotide
aguauacacgugaccaucc

SEQ ID NO: 3214551 - RNA, 19 nt, Artificial Sequence
  Description of Artificial Sequence: Synthetic oligonucleotide
aagcaaguguguguucagc

SEQ ID NO: 3214552 - RNA, 19 nt, Artificial Sequence
  Description of Artificial Sequence: Synthetic oligonucleotide
acugccacaucuucaauga

SEQ ID NO: 3214553 - RNA, 19 nt, Artificial Sequence
  Description of Artificial Sequence: Synthetic oligonucleotide
uccacguuucuugagagca

SEQ ID NO: 3214554 - RNA, 19 nt, Artificial Sequence
  Description of Artificial Sequence: Synthetic oligonucleotide
gagcauuauugagaaaggg

SEQ ID NO: 3214555 - RNA, 19 nt, Artificial Sequence
  Description of Artificial Sequence: Synthetic oligonucleotide
acccucaucagucaguagu

SEQ ID NO: 3214556 - RNA, 19 nt, Artificial Sequence
  Description of Artificial Sequence: Synthetic oligonucleotide
aggucugaugcauuuagcu

SEQ ID NO: 3214557 - RNA, 19 nt, Artificial Sequence
  Description of Artificial Sequence: Synthetic oligonucleotide
acacagaucucaggcaucc

SEQ ID NO: 3214558 - RNA, 19 nt, Artificial Sequence
  Description of Artificial Sequence: Synthetic oligonucleotide
ugcguaaagaacccugcac

SEQ ID NO: 3214559 - RNA, 19 nt, Artificial Sequence
  Description of Artificial Sequence: Synthetic oligonucleotide
gaaccauuuugccaucagc

SEQ ID NO: 3214560 - RNA, 19 nt, Artificial Sequence
  Description of Artificial Sequence: Synthetic oligonucleotide
ucgaacaugguuggugugg

SEQ ID NO: 3214561 - RNA, 19 nt, Artificial Sequence
  Description of Artificial Sequence: Synthetic oligonucleotide
uugccuugaaccaugguuu

SEQ ID NO: 3214562 - RNA, 19 nt, Artificial Sequence
  Description of Artificial Sequence: Synthetic oligonucleotide
uccuuucuaaugaacaauu

SEQ ID NO: 3214563 - RNA, 19 nt, Artificial Sequence
  Description of Artificial Sequence: Synthetic oligonucleotide
aauuugaggcccauaauuu

SEQ ID NO: 3214564 - RNA, 19 nt, Artificial Sequence
  Description of Artificial Sequence: Synthetic oligonucleotide
acucuuggagcuaacagag

SEQ ID NO: 3214565 - RNA, 19 nt, Artificial Sequence
  Description of Artificial Sequence: Synthetic oligonucleotide
uaacuaaacauggccacug

SEQ ID NO: 3214566 - RNA, 19 nt, Artificial Sequence
  Description of Artificial Sequence: Synthetic oligonucleotide
gaccuucaugauuugaaac

SEQ ID NO: 3214567 - RNA, 19 nt, Artificial Sequence
  Description of Artificial Sequence: Synthetic oligonucleotide
aacggcaguuguugauggc

SEQ ID NO: 3214568 - RNA, 19 nt, Artificial Sequence
  Description of Artificial Sequence: Synthetic oligonucleotide
cagguaagccuaucaagcg

SEQ ID NO: 3214569 - RNA, 19 nt, Artificial Sequence
  Description of Artificial Sequence: Synthetic oligonucleotide
ugagugggaugcuauuucc

SEQ ID NO: 3214570 - RNA, 19 nt, Artificial Sequence
  Description of Artificial Sequence: Synthetic oligonucleotide
caucucaugcagucgauac

SEQ ID NO: 3214571 - RNA, 19 nt, Artificial Sequence
  Description of Artificial Sequence: Synthetic oligonucleotide
ugcagucgauacucaaugg

SEQ ID NO: 3214572 - RNA, 19 nt, Artificial Sequence
  Description of Artificial Sequence: Synthetic oligonucleotide
aaaauggcaccaaaauggu

SEQ ID NO: 3214573 - RNA, 19 nt, Artificial Sequence
  Description of Artificial Sequence: Synthetic oligonucleotide
uguuaggcacaucucugug

SEQ ID NO: 3214574 - RNA, 19 nt, Artificial Sequence
  Description of Artificial Sequence: Synthetic oligonucleotide
uuaaccuuccaugcucggg

SEQ ID NO: 3214575 - RNA, 19 nt, Artificial Sequence
  Description of Artificial Sequence: Synthetic oligonucleotide
uguccacguuucuugagag

SEQ ID NO: 3214576 - RNA, 19 nt, Artificial Sequence
  Description of Artificial Sequence: Synthetic oligonucleotide
gucgauugugauuucgggc

SEQ ID NO: 3214577 - RNA, 19 nt, Artificial Sequence
  Description of Artificial Sequence: Synthetic oligonucleotide
aaugccccagguuccagca

SEQ ID NO: 3214578 - RNA, 19 nt, Artificial Sequence
  Description of Artificial Sequence: Synthetic oligonucleotide
aguaaugccgcugucuuca

SEQ ID NO: 3214579 - RNA, 19 nt, Artificial Sequence
  Description of Artificial Sequence: Synthetic oligonucleotide
cauuugaaguaacuaaaca

SEQ ID NO: 3214580 - RNA, 19 nt, Artificial Sequence
  Description of Artificial Sequence: Synthetic oligonucleotide
uuguccacguuucuugaga

SEQ ID NO: 3214581 - RNA, 19 nt, Artificial Sequence
  Description of Artificial Sequence: Synthetic oligonucleotide
aacaugguugguguggccu

SEQ ID NO: 3214582 - RNA, 19 nt, Artificial Sequence
  Description of Artificial Sequence: Synthetic oligonucleotide
uagcgcacgaccuucuuca

SEQ ID NO: 3214583 - RNA, 19 nt, Artificial Sequence
  Description of Artificial Sequence: Synthetic oligonucleotide
uucccuauggagcguacca

SEQ ID NO: 3214584 - RNA, 19 nt, Artificial Sequence
  Description of Artificial Sequence: Synthetic oligonucleotide
uaacagaggccguagcugu

SEQ ID NO: 3214585 - RNA, 19 nt, Artificial Sequence
  Description of Artificial Sequence: Synthetic oligonucleotide
ugcuuggccgugaggaggg

SEQ ID NO: 3214586 - RNA, 19 nt, Artificial Sequence
  Description of Artificial Sequence: Synthetic oligonucleotide
caucaaacacuccuccagc

SEQ ID NO: 3214587 - RNA, 19 nt, Artificial Sequence
  Description of Artificial Sequence: Synthetic oligonucleotide
cucuccucaguaaugccgc

SEQ ID NO: 3214588 - RNA, 19 nt, Artificial Sequence
  Description of Artificial Sequence: Synthetic oligonucleotide
uccaacugccacaucuuca

SEQ ID NO: 3214589 - RNA, 19 nt, Artificial Sequence
  Description of Artificial Sequence: Synthetic oligonucleotide
ucucaugcagucgauacuc

SEQ ID NO: 3214590 - RNA, 19 nt, Artificial Sequence
  Description of Artificial Sequence: Synthetic oligonucleotide
ucaguaaugccgcugucuu

SEQ ID NO: 3214591 - RNA, 19 nt, Artificial Sequence
  Description of Artificial Sequence: Synthetic oligonucleotide
aggauugagacucagaggc

SEQ ID NO: 3214592 - RNA, 19 nt, Artificial Sequence
  Description of Artificial Sequence: Synthetic oligonucleotide
gauuaaaggaggcugaggc

SEQ ID NO: 3214593 - RNA, 19 nt, Artificial Sequence
  Description of Artificial Sequence: Synthetic oligonucleotide
aauucaguggaucugcuug

SEQ ID NO: 3214594 - RNA, 19 nt, Artificial Sequence
  Description of Artificial Sequence: Synthetic oligonucleotide
aaacucucucucuauagag

SEQ ID NO: 3214595 - RNA, 19 nt, Artificial Sequence
  Description of Artificial Sequence: Synthetic oligonucleotide
ugagugcugagauuaaagg

SEQ ID NO: 3214596 - RNA, 19 nt, Artificial Sequence
  Description of Artificial Sequence: Synthetic oligonucleotide
ucucuauagagcaggcugg

SEQ ID NO: 3214597 - RNA, 19 nt, Artificial Sequence
  Description of Artificial Sequence: Synthetic oligonucleotide
uaugggaaaauguccauga

SEQ ID NO: 3214598 - RNA, 19 nt, Artificial Sequence
  Description of Artificial Sequence: Synthetic oligonucleotide
ugaaacucucucucuauag

SEQ ID NO: 3214599 - RNA, 19 nt, Artificial Sequence
  Description of Artificial Sequence: Synthetic oligonucleotide
ucagaggccagccuauggg

SEQ ID NO: 3214600 - RNA, 19 nt, Artificial Sequence
  Description of Artificial Sequence: Synthetic oligonucleotide
uuaaaggaggcugaggcug

SEQ ID NO: 3214601 - RNA, 19 nt, Artificial Sequence
  Description of Artificial Sequence: Synthetic oligonucleotide
auucaguggaucugcuugc

SEQ ID NO: 3214602 - RNA, 19 nt, Artificial Sequence
  Description of Artificial Sequence: Synthetic oligonucleotide
ugagauuaaaggaggcuga

SEQ ID NO: 3214603 - RNA, 19 nt, Artificial Sequence
  Description of Artificial Sequence: Synthetic oligonucleotide
agugcugagauuaaaggag

SEQ ID NO: 3214604 - RNA, 19 nt, Artificial Sequence
  Description of Artificial Sequence: Synthetic oligonucleotide
aacucucucucuauagagc

SEQ ID NO: 3214605 - RNA, 19 nt, Artificial Sequence
  Description of Artificial Sequence: Synthetic oligonucleotide
cucucuauagagcaggcug

SEQ ID NO: 3214606 - RNA, 19 nt, Artificial Sequence
  Description of Artificial Sequence: Synthetic oligonucleotide
gggaaaauguccaugaaag

SEQ ID NO: 3214607 - RNA, 19 nt, Artificial Sequence
  Description of Artificial Sequence: Synthetic oligonucleotide
ggaggauugagacucagag

SEQ ID NO: 3214608 - RNA, 19 nt, Artificial Sequence
  Description of Artificial Sequence: Synthetic oligonucleotide
cuggccuugaauucagugg

SEQ ID NO: 3214609 - RNA, 19 nt, Artificial Sequence
  Description of Artificial Sequence: Synthetic oligonucleotide
gaggauugagacucagagg

SEQ ID NO: 3214610 - RNA, 19 nt, Artificial Sequence
  Description of Artificial Sequence: Synthetic oligonucleotide
uggccuugaauucagugga

SEQ ID NO: 3214611 - RNA, 19 nt, Artificial Sequence
  Description of Artificial Sequence: Synthetic oligonucleotide
ucucucucuauagagcagg

SEQ ID NO: 3214612 - RNA, 19 nt, Artificial Sequence
  Description of Artificial Sequence: Synthetic oligonucleotide
gaggcuggaggauugagac

SEQ ID NO: 3214613 - RNA, 19 nt, Artificial Sequence
  Description of Artificial Sequence: Synthetic oligonucleotide
ugggaaaauguccaugaaa

SEQ ID NO: 3214614 - RNA, 19 nt, Artificial Sequence
  Description of Artificial Sequence: Synthetic oligonucleotide
uugaauucaguggaucugc

SEQ ID NO: 3214615 - RNA, 19 nt, Artificial Sequence
  Description of Artificial Sequence: Synthetic oligonucleotide
acucucucucuauagagca

SEQ ID NO: 3214616 - RNA, 19 nt, Artificial Sequence
  Description of Artificial Sequence: Synthetic oligonucleotide
uguccugaaacucucucuc

SEQ ID NO: 3214617 - RNA, 19 nt, Artificial Sequence
  Description of Artificial Sequence: Synthetic oligonucleotide
uaaaggaggcugaggcugg

SEQ ID NO: 3214618 - RNA, 19 nt, Artificial Sequence
  Description of Artificial Sequence: Synthetic oligonucleotide
gagugcugagauuaaagga

SEQ ID NO: 3214619 - RNA, 19 nt, Artificial Sequence
  Description of Artificial Sequence: Synthetic oligonucleotide
cugagugcugagauuaaag

SEQ ID NO: 3214620 - RNA, 19 nt, Artificial Sequence
  Description of Artificial Sequence: Synthetic oligonucleotide
cugagauuaaaggaggcug

SEQ ID NO: 3214621 - RNA, 19 nt, Artificial Sequence
  Description of Artificial Sequence: Synthetic oligonucleotide
aucugcuugccucugucuc

SEQ ID NO: 3214622 - RNA, 19 nt, Artificial Sequence
  Description of Artificial Sequence: Synthetic oligonucleotide
cucuguguaguucuggcug

SEQ ID NO: 3214623 - RNA, 19 nt, Artificial Sequence
  Description of Artificial Sequence: Synthetic oligonucleotide
agccuaugggaaaaugucc

SEQ ID NO: 3214624 - RNA, 19 nt, Artificial Sequence
  Description of Artificial Sequence: Synthetic oligonucleotide
auuaaaggaggcugaggcu

SEQ ID NO: 3214625 - RNA, 19 nt, Artificial Sequence
  Description of Artificial Sequence: Synthetic oligonucleotide
uucucuguguaguucuggc

SEQ ID NO: 3214626 - RNA, 19 nt, Artificial Sequence
  Description of Artificial Sequence: Synthetic oligonucleotide
gaaacucucucucuauaga

SEQ ID NO: 3214627 - RNA, 19 nt, Artificial Sequence
  Description of Artificial Sequence: Synthetic oligonucleotide
ugcugagauuaaaggaggc

SEQ ID NO: 3214628 - RNA, 19 nt, Artificial Sequence
  Description of Artificial Sequence: Synthetic oligonucleotide
uagacaggguuucucugug

SEQ ID NO: 3214629 - RNA, 19 nt, Artificial Sequence
  Description of Artificial Sequence: Synthetic oligonucleotide
uguaguucuggcuguccug

SEQ ID NO: 3214630 - RNA, 19 nt, Artificial Sequence
  Description of Artificial Sequence: Synthetic oligonucleotide
ugaggcuggaggauugaga

SEQ ID NO: 3214631 - RNA, 19 nt, Artificial Sequence
  Description of Artificial Sequence: Synthetic oligonucleotide
uuucucuguguaguucugg

SEQ ID NO: 3214632 - RNA, 19 nt, Artificial Sequence
  Description of Artificial Sequence: Synthetic oligonucleotide
agauuaaaggaggcugagg

SEQ ID NO: 3214633 - RNA, 19 nt, Artificial Sequence
  Description of Artificial Sequence: Synthetic oligonucleotide
aggaggcugaggcuggagg

SEQ ID NO: 3214634 - RNA, 19 nt, Artificial Sequence
  Description of Artificial Sequence: Synthetic oligonucleotide
guucuggcuguccugaaac

SEQ ID NO: 3214635 - RNA, 19 nt, Artificial Sequence
  Description of Artificial Sequence: Synthetic oligonucleotide
uccuagacaggguuucucu

SEQ ID NO: 3214636 - RNA, 19 nt, Artificial Sequence
  Description of Artificial Sequence: Synthetic oligonucleotide
ucugcuugccucugucucc

SEQ ID NO: 3214637 - RNA, 19 nt, Artificial Sequence
  Description of Artificial Sequence: Synthetic oligonucleotide
gauugagacucagaggcca

SEQ ID NO: 3214638 - RNA, 19 nt, Artificial Sequence
  Description of Artificial Sequence: Synthetic oligonucleotide
cagccuaugggaaaauguc

SEQ ID NO: 3214639 - RNA, 19 nt, Artificial Sequence
  Description of Artificial Sequence: Synthetic oligonucleotide
cuugaauucaguggaucug

SEQ ID NO: 3214640 - RNA, 19 nt, Artificial Sequence
  Description of Artificial Sequence: Synthetic oligonucleotide
uuuuccuagacaggguuuc

SEQ ID NO: 3214641 - RNA, 19 nt, Artificial Sequence
  Description of Artificial Sequence: Synthetic oligonucleotide
gagauuaaaggaggcugag

SEQ ID NO: 3214642 - RNA, 19 nt, Artificial Sequence
  Description of Artificial Sequence: Synthetic oligonucleotide
ucuguguaguucuggcugu

SEQ ID NO: 3214643 - RNA, 19 nt, Artificial Sequence
  Description of Artificial Sequence: Synthetic oligonucleotide
ugaauucaguggaucugcu

SEQ ID NO: 3214644 - RNA, 19 nt, Artificial Sequence
  Description of Artificial Sequence: Synthetic oligonucleotide
gugcugagauuaaaggagg

SEQ ID NO: 3214645 - RNA, 19 nt, Artificial Sequence
  Description of Artificial Sequence: Synthetic oligonucleotide
ugccucugucuccugagug

SEQ ID NO: 3214646 - RNA, 19 nt, Artificial Sequence
  Description of Artificial Sequence: Synthetic oligonucleotide
acaggguuucucuguguag

SEQ ID NO: 3214647 - RNA, 19 nt, Artificial Sequence
  Description of Artificial Sequence: Synthetic oligonucleotide
uccugaaacucucucucua

SEQ ID NO: 3214648 - RNA, 19 nt, Artificial Sequence
  Description of Artificial Sequence: Synthetic oligonucleotide
aguggaucugcuugccucu

SEQ ID NO: 3214649 - RNA, 19 nt, Artificial Sequence
  Description of Artificial Sequence: Synthetic oligonucleotide
ucucuguguaguucuggcu

SEQ ID NO: 3214650 - RNA, 19 nt, Artificial Sequence
  Description of Artificial Sequence: Synthetic oligonucleotide
ugagacucagaggccagcc

SEQ ID NO: 3214651 - RNA, 19 nt, Artificial Sequence
  Description of Artificial Sequence: Synthetic oligonucleotide
ucugucuccugagugcuga

SEQ ID NO: 3214652 - RNA, 19 nt, Artificial Sequence
  Description of Artificial Sequence: Synthetic oligonucleotide
agcaggcuggccuugaauu

SEQ ID NO: 3214653 - RNA, 19 nt, Artificial Sequence
  Description of Artificial Sequence: Synthetic oligonucleotide
cuaugggaaaauguccaug

SEQ ID NO: 3214654 - RNA, 19 nt, Artificial Sequence
  Description of Artificial Sequence: Synthetic oligonucleotide
cuugccucugucuccugag

SEQ ID NO: 3214655 - RNA, 19 nt, Artificial Sequence
  Description of Artificial Sequence: Synthetic oligonucleotide
uauagagcaggcuggccuu

SEQ ID NO: 3214656 - RNA, 19 nt, Artificial Sequence
  Description of Artificial Sequence: Synthetic oligonucleotide
caguggaucugcuugccuc

SEQ ID NO: 3214657 - RNA, 19 nt, Artificial Sequence
  Description of Artificial Sequence: Synthetic oligonucleotide
uggaggauugagacucaga

SEQ ID NO: 3214658 - RNA, 19 nt, Artificial Sequence
  Description of Artificial Sequence: Synthetic oligonucleotide
cucagaggccagccuaugg

SEQ ID NO: 3214659 - RNA, 19 nt, Artificial Sequence
  Description of Artificial Sequence: Synthetic oligonucleotide
ucuauagagcaggcuggcc

SEQ ID NO: 3214660 - RNA, 19 nt, Artificial Sequence
  Description of Artificial Sequence: Synthetic oligonucleotide
cucucucuauagagcaggc

SEQ ID NO: 3214661 - RNA, 19 nt, Artificial Sequence
  Description of Artificial Sequence: Synthetic oligonucleotide
ucaguggaucugcuugccu

SEQ ID NO: 3214662 - RNA, 19 nt, Artificial Sequence
  Description of Artificial Sequence: Synthetic oligonucleotide
agacucagaggccagccua

SEQ ID NO: 3214663 - RNA, 19 nt, Artificial Sequence
  Description of Artificial Sequence: Synthetic oligonucleotide
ucuggcuguccugaaacuc

SEQ ID NO: 3214664 - RNA, 19 nt, Artificial Sequence
  Description of Artificial Sequence: Synthetic oligonucleotide
uguguaguucuggcugucc

SEQ ID NO: 3214665 - RNA, 19 nt, Artificial Sequence
  Description of Artificial Sequence: Synthetic oligonucleotide
cucucucucuauagagcag

SEQ ID NO: 3214666 - RNA, 19 nt, Artificial Sequence
  Description of Artificial Sequence: Synthetic oligonucleotide
uucaguggaucugcuugcc

SEQ ID NO: 3214667 - RNA, 19 nt, Artificial Sequence
  Description of Artificial Sequence: Synthetic oligonucleotide
cuauagagcaggcuggccu

SEQ ID NO: 3214668 - RNA, 19 nt, Artificial Sequence
  Description of Artificial Sequence: Synthetic oligonucleotide
cucuauagagcaggcuggc

SEQ ID NO: 3214669 - RNA, 19 nt, Artificial Sequence
  Description of Artificial Sequence: Synthetic oligonucleotide
uucuggcuguccugaaacu

SEQ ID NO: 3214670 - RNA, 19 nt, Artificial Sequence
  Description of Artificial Sequence: Synthetic oligonucleotide
gacaggguuucucugugua

SEQ ID NO: 3214671 - RNA, 19 nt, Artificial Sequence
  Description of Artificial Sequence: Synthetic oligonucleotide
ggcuggaggauugagacuc

SEQ ID NO: 3214672 - RNA, 19 nt, Artificial Sequence
  Description of Artificial Sequence: Synthetic oligonucleotide
ucucucuauagagcaggcu

SEQ ID NO: 3214673 - RNA, 19 nt, Artificial Sequence
  Description of Artificial Sequence: Synthetic oligonucleotide
guaguucuggcuguccuga

SEQ ID NO: 3214674 - RNA, 19 nt, Artificial Sequence
  Description of Artificial Sequence: Synthetic oligonucleotide
augggaaaauguccaugaa

SEQ ID NO: 3214675 - RNA, 19 nt, Artificial Sequence
  Description of Artificial Sequence: Synthetic oligonucleotide
aguucuggcuguccugaaa

SEQ ID NO: 3214676 - RNA, 19 nt, Artificial Sequence
  Description of Artificial Sequence: Synthetic oligonucleotide
auugagacucagaggccag

SEQ ID NO: 3214677 - RNA, 19 nt, Artificial Sequence
  Description of Artificial Sequence: Synthetic oligonucleotide
gcuggccuugaauucagug

SEQ ID NO: 3214678 - RNA, 19 nt, Artificial Sequence
  Description of Artificial Sequence: Synthetic oligonucleotide
uugagacucagaggccagc

SEQ ID NO: 3214679 - RNA, 19 nt, Artificial Sequence
  Description of Artificial Sequence: Synthetic oligonucleotide
uggcuguccugaaacucuc

SEQ ID NO: 3214680 - RNA, 19 nt, Artificial Sequence
  Description of Artificial Sequence: Synthetic oligonucleotide
uugccucugucuccugagu

SEQ ID NO: 3214681 - RNA, 19 nt, Artificial Sequence
  Description of Artificial Sequence: Synthetic oligonucleotide
uuuccuagacaggguuucu

SEQ ID NO: 3214682 - RNA, 19 nt, Artificial Sequence
  Description of Artificial Sequence: Synthetic oligonucleotide
gguuucucuguguaguucu

SEQ ID NO: 3214683 - RNA, 19 nt, Artificial Sequence
  Description of Artificial Sequence: Synthetic oligonucleotide
uggaucugcuugccucugu

SEQ ID NO: 3214684 - RNA, 19 nt, Artificial Sequence
  Description of Artificial Sequence: Synthetic oligonucleotide
agacaggguuucucugugu

SEQ ID NO: 3214685 - RNA, 19 nt, Artificial Sequence
  Description of Artificial Sequence: Synthetic oligonucleotide
aaggaggcugaggcuggag

SEQ ID NO: 3214686 - RNA, 19 nt, Artificial Sequence
  Description of Artificial Sequence: Synthetic oligonucleotide
ugucuccugagugcugaga

SEQ ID NO: 3214687 - RNA, 19 nt, Artificial Sequence
  Description of Artificial Sequence: Synthetic oligonucleotide
uuccuagacaggguuucuc

SEQ ID NO: 3214688 - RNA, 19 nt, Artificial Sequence
  Description of Artificial Sequence: Synthetic oligonucleotide
cuagacaggguuucucugu

SEQ ID NO: 3214689 - RNA, 19 nt, Artificial Sequence
  Description of Artificial Sequence: Synthetic oligonucleotide
uccugagugcugagauuaa

SEQ ID NO: 3214690 - RNA, 19 nt, Artificial Sequence
  Description of Artificial Sequence: Synthetic oligonucleotide
cuccugagugcugagauua

SEQ ID NO: 3214691 - RNA, 19 nt, Artificial Sequence
  Description of Artificial Sequence: Synthetic oligonucleotide
auuauuaacauccaguucc

SEQ ID NO: 3214692 - RNA, 19 nt, Artificial Sequence
  Description of Artificial Sequence: Synthetic oligonucleotide
aguaauauuauuaacaucc

SEQ ID NO: 3214693 - RNA, 19 nt, Artificial Sequence
  Description of Artificial Sequence: Synthetic oligonucleotide
auuugaaucaaauaguuuc

SEQ ID NO: 3214694 - RNA, 19 nt, Artificial Sequence
  Description of Artificial Sequence: Synthetic oligonucleotide
cauuauuugaaucaaauag

SEQ ID NO: 3214695 - RNA, 19 nt, Artificial Sequence
  Description of Artificial Sequence: Synthetic oligonucleotide
uuuuguaucauccacaguc

SEQ ID NO: 3214696 - RNA, 19 nt, Artificial Sequence
  Description of Artificial Sequence: Synthetic oligonucleotide
aauaguuucagcaugaggu

SEQ ID NO: 3214697 - RNA, 19 nt, Artificial Sequence
  Description of Artificial Sequence: Synthetic oligonucleotide
uuuaagaaggaaauuuucc

SEQ ID NO: 3214698 - RNA, 19 nt, Artificial Sequence
  Description of Artificial Sequence: Synthetic oligonucleotide
uuagaaguuucuaaguucc

SEQ ID NO: 3214699 - RNA, 19 nt, Artificial Sequence
  Description of Artificial Sequence: Synthetic oligonucleotide
auuauguucuucuuguagg

SEQ ID NO: 3214700 - RNA, 19 nt, Artificial Sequence
  Description of Artificial Sequence: Synthetic oligonucleotide
aauauuauuaacauccagu

SEQ ID NO: 3214701 - RNA, 19 nt, Artificial Sequence
  Description of Artificial Sequence: Synthetic oligonucleotide
uaacucaaaagccuuauug

SEQ ID NO: 3214702 - RNA, 19 nt, Artificial Sequence
  Description of Artificial Sequence: Synthetic oligonucleotide
uauguuuuagauacaaugu

SEQ ID NO: 3214703 - RNA, 19 nt, Artificial Sequence
  Description of Artificial Sequence: Synthetic oligonucleotide
gaaucaaauaguuucagca

SEQ ID NO: 3214704 - RNA, 19 nt, Artificial Sequence
  Description of Artificial Sequence: Synthetic oligonucleotide
aaauaguuucagcaugagg

SEQ ID NO: 3214705 - RNA, 19 nt, Artificial Sequence
  Description of Artificial Sequence: Synthetic oligonucleotide
guucuucucacacagaucc

SEQ ID NO: 3214706 - RNA, 19 nt, Artificial Sequence
  Description of Artificial Sequence: Synthetic oligonucleotide
aucauauaacucaaaagcc

SEQ ID NO: 3214707 - RNA, 19 nt, Artificial Sequence
  Description of Artificial Sequence: Synthetic oligonucleotide
ugaucauauaacucaaaag

SEQ ID NO: 3214708 - RNA, 19 nt, Artificial Sequence
  Description of Artificial Sequence: Synthetic oligonucleotide
ucaaaagccuuauugaacu

SEQ ID NO: 3214709 - RNA, 19 nt, Artificial Sequence
  Description of Artificial Sequence: Synthetic oligonucleotide
ucauauaacucaaaagccu

SEQ ID NO: 3214710 - RNA, 19 nt, Artificial Sequence
  Description of Artificial Sequence: Synthetic oligonucleotide
uuaagaaggaaauuuuccu

SEQ ID NO: 3214711 - RNA, 19 nt, Artificial Sequence
  Description of Artificial Sequence: Synthetic oligonucleotide
uccguugccauccugauca

SEQ ID NO: 3214712 - RNA, 19 nt, Artificial Sequence
  Description of Artificial Sequence: Synthetic oligonucleotide
aacucaaaagccuuauuga

SEQ ID NO: 3214713 - RNA, 19 nt, Artificial Sequence
  Description of Artificial Sequence: Synthetic oligonucleotide
aaugguuguggccaccaac

SEQ ID NO: 3214714 - RNA, 19 nt, Artificial Sequence
  Description of Artificial Sequence: Synthetic oligonucleotide
uaauauuauuaacauccag

SEQ ID NO: 3214715 - RNA, 19 nt, Artificial Sequence
  Description of Artificial Sequence: Synthetic oligonucleotide
uuugaaucaaauaguuuca

SEQ ID NO: 3214716 - RNA, 19 nt, Artificial Sequence
  Description of Artificial Sequence: Synthetic oligonucleotide
uccaucauuauuugaauca

SEQ ID NO: 3214717 - RNA, 19 nt, Artificial Sequence
  Description of Artificial Sequence: Synthetic oligonucleotide
cucaguuucaugaagccgc

SEQ ID NO: 3214718 - RNA, 19 nt, Artificial Sequence
  Description of Artificial Sequence: Synthetic oligonucleotide
ugcacugguaguaaccugg

SEQ ID NO: 3214719 - RNA, 19 nt, Artificial Sequence
  Description of Artificial Sequence: Synthetic oligonucleotide
ucaucuauguauccguugc

SEQ ID NO: 3214720 - RNA, 19 nt, Artificial Sequence
  Description of Artificial Sequence: Synthetic oligonucleotide
uggaauuuaagaaggaaau

SEQ ID NO: 3214721 - RNA, 19 nt, Artificial Sequence
  Description of Artificial Sequence: Synthetic oligonucleotide
uccuuuagaaguuucuaag

SEQ ID NO: 3214722 - RNA, 19 nt, Artificial Sequence
  Description of Artificial Sequence: Synthetic oligonucleotide
uaagaaggaaauuuuccug

SEQ ID NO: 3214723 - RNA, 19 nt, Artificial Sequence
  Description of Artificial Sequence: Synthetic oligonucleotide
aaucaaauaguuucagcau

SEQ ID NO: 3214724 - RNA, 19 nt, Artificial Sequence
  Description of Artificial Sequence: Synthetic oligonucleotide
aaggaaauuuuccugcacu

SEQ ID NO: 3214725 - RNA, 19 nt, Artificial Sequence
  Description of Artificial Sequence: Synthetic oligonucleotide
aacucuuucccacacauuu

SEQ ID NO: 3214726 - RNA, 19 nt, Artificial Sequence
  Description of Artificial Sequence: Synthetic oligonucleotide
uuauuugaaucaaauaguu

SEQ ID NO: 3214727 - RNA, 19 nt, Artificial Sequence
  Description of Artificial Sequence: Synthetic oligonucleotide
ucauccacagucuuguuug

SEQ ID NO: 3214728 - RNA, 19 nt, Artificial Sequence
  Description of Artificial Sequence: Synthetic oligonucleotide
ucccuggaauuuaagaagg

SEQ ID NO: 3214729 - RNA, 19 nt, Artificial Sequence
  Description of Artificial Sequence: Synthetic oligonucleotide
uguuuuagauacaauguau

SEQ ID NO: 3214730 - RNA, 19 nt, Artificial Sequence
  Description of Artificial Sequence: Synthetic oligonucleotide
uucaguaaagcauccagcu

SEQ ID NO: 3214731 - RNA, 19 nt, Artificial Sequence
  Description of Artificial Sequence: Synthetic oligonucleotide
uuuagaaguuucuaaguuc

SEQ ID NO: 3214732 - RNA, 19 nt, Artificial Sequence
  Description of Artificial Sequence: Synthetic oligonucleotide
aguuuuguaucauccacag

SEQ ID NO: 3214733 - RNA, 19 nt, Artificial Sequence
  Description of Artificial Sequence: Synthetic oligonucleotide
auauuauuaacauccaguu

SEQ ID NO: 3214734 - RNA, 19 nt, Artificial Sequence
  Description of Artificial Sequence: Synthetic oligonucleotide
uuugcuuucucuagcaggu

SEQ ID NO: 3214735 - RNA, 19 nt, Artificial Sequence
  Description of Artificial Sequence: Synthetic oligonucleotide
aucaaauaguuucagcaug

SEQ ID NO: 3214736 - RNA, 19 nt, Artificial Sequence
  Description of Artificial Sequence: Synthetic oligonucleotide
guuuguucuucucacacag

SEQ ID NO: 3214737 - RNA, 19 nt, Artificial Sequence
  Description of Artificial Sequence: Synthetic oligonucleotide
aaggccauuauguucuucu

SEQ ID NO: 3214738 - RNA, 19 nt, Artificial Sequence
  Description of Artificial Sequence: Synthetic oligonucleotide
aucuguucgguacagcuuc

SEQ ID NO: 3214739 - RNA, 19 nt, Artificial Sequence
  Description of Artificial Sequence: Synthetic oligonucleotide
uccgacaaggccauuaugu

SEQ ID NO: 3214740 - RNA, 19 nt, Artificial Sequence
  Description of Artificial Sequence: Synthetic oligonucleotide
uaucacuagcaaaugguug

SEQ ID NO: 3214741 - RNA, 19 nt, Artificial Sequence
  Description of Artificial Sequence: Synthetic oligonucleotide
uuuucaucuauguauccgu

SEQ ID NO: 3214742 - RNA, 19 nt, Artificial Sequence
  Description of Artificial Sequence: Synthetic oligonucleotide
aagggcaagaucuguucgg

SEQ ID NO: 3214743 - RNA, 19 nt, Artificial Sequence
  Description of Artificial Sequence: Synthetic oligonucleotide
auuaacauccaguuccugu

SEQ ID NO: 3214744 - RNA, 19 nt, Artificial Sequence
  Description of Artificial Sequence: Synthetic oligonucleotide
auuauuugaaucaaauagu

SEQ ID NO: 3214745 - RNA, 19 nt, Artificial Sequence
  Description of Artificial Sequence: Synthetic oligonucleotide
auguucuucuuguagguag

SEQ ID NO: 3214746 - RNA, 19 nt, Artificial Sequence
  Description of Artificial Sequence: Synthetic oligonucleotide
auugaacucuuucccacac

SEQ ID NO: 3214747 - RNA, 19 nt, Artificial Sequence
  Description of Artificial Sequence: Synthetic oligonucleotide
auaguuucagcaugagguc

SEQ ID NO: 3214748 - RNA, 19 nt, Artificial Sequence
  Description of Artificial Sequence: Synthetic oligonucleotide
auaagggcaagaucuguuc

SEQ ID NO: 3214749 - RNA, 19 nt, Artificial Sequence
  Description of Artificial Sequence: Synthetic oligonucleotide
aaguuucuaaguuccucag

SEQ ID NO: 3214750 - RNA, 19 nt, Artificial Sequence
  Description of Artificial Sequence: Synthetic oligonucleotide
ugaaucaaauaguuucagc

SEQ ID NO: 3214751 - RNA, 19 nt, Artificial Sequence
  Description of Artificial Sequence: Synthetic oligonucleotide
aagcauccagcucauuuuc

SEQ ID NO: 3214752 - RNA, 19 nt, Artificial Sequence
  Description of Artificial Sequence: Synthetic oligonucleotide
auuuucaucuauguauccg

SEQ ID NO: 3214753 - RNA, 19 nt, Artificial Sequence
  Description of Artificial Sequence: Synthetic oligonucleotide
acugguaguaaccuggcca

SEQ ID NO: 3214754 - RNA, 19 nt, Artificial Sequence
  Description of Artificial Sequence: Synthetic oligonucleotide
auguaucacuagcaaaugg

SEQ ID NO: 3214755 - RNA, 19 nt, Artificial Sequence
  Description of Artificial Sequence: Synthetic oligonucleotide
agcuaguuuuguaucaucc

SEQ ID NO: 3214756 - RNA, 19 nt, Artificial Sequence
  Description of Artificial Sequence: Synthetic oligonucleotide
acacauuuugauucccugg

SEQ ID NO: 3214757 - RNA, 19 nt, Artificial Sequence
  Description of Artificial Sequence: Synthetic oligonucleotide
cauuauguucuucuuguag

SEQ ID NO: 3214758 - RNA, 19 nt, Artificial Sequence
  Description of Artificial Sequence: Synthetic oligonucleotide
uuauugaacucuuucccac

SEQ ID NO: 3214759 - RNA, 19 nt, Artificial Sequence
  Description of Artificial Sequence: Synthetic oligonucleotide
uagguaguaauauuauuaa

SEQ ID NO: 3214760 - RNA, 19 nt, Artificial Sequence
  Description of Artificial Sequence: Synthetic oligonucleotide
uguaucauccacagucuug

SEQ ID NO: 3214761 - RNA, 19 nt, Artificial Sequence
  Description of Artificial Sequence: Synthetic oligonucleotide
uucuaaguuccucaguuuc

SEQ ID NO: 3214762 - RNA, 19 nt, Artificial Sequence
  Description of Artificial Sequence: Synthetic oligonucleotide
gaaguuucuaaguuccuca

SEQ ID NO: 3214763 - RNA, 19 nt, Artificial Sequence
  Description of Artificial Sequence: Synthetic oligonucleotide
uauguauccguugccaucc

SEQ ID NO: 3214764 - RNA, 19 nt, Artificial Sequence
  Description of Artificial Sequence: Synthetic oligonucleotide
uauuauuaacauccaguuc

SEQ ID NO: 3214765 - RNA, 19 nt, Artificial Sequence
  Description of Artificial Sequence: Synthetic oligonucleotide
uacaauguaucacuagcaa

SEQ ID NO: 3214766 - RNA, 19 nt, Artificial Sequence
  Description of Artificial Sequence: Synthetic oligonucleotide
uuuguaucauccacagucu

SEQ ID NO: 3214767 - RNA, 19 nt, Artificial Sequence
  Description of Artificial Sequence: Synthetic oligonucleotide
uaaagcauccagcucauuu

SEQ ID NO: 3214768 - RNA, 19 nt, Artificial Sequence
  Description of Artificial Sequence: Synthetic oligonucleotide
cuucaguaaagcauccagc

SEQ ID NO: 3214769 - RNA, 19 nt, Artificial Sequence
  Description of Artificial Sequence: Synthetic oligonucleotide
uguguacucagcuaguuuu

SEQ ID NO: 3214770 - RNA, 19 nt, Artificial Sequence
  Description of Artificial Sequence: Synthetic oligonucleotide
uucccacacauuuugauuc

SEQ ID NO: 3214771 - RNA, 19 nt, Artificial Sequence
  Description of Artificial Sequence: Synthetic oligonucleotide
agccuuauugaacucuuuc

SEQ ID NO: 3214772 - RNA, 19 nt, Artificial Sequence
  Description of Artificial Sequence: Synthetic oligonucleotide
aauuuaagaaggaaauuuu

SEQ ID NO: 3214773 - RNA, 19 nt, Artificial Sequence
  Description of Artificial Sequence: Synthetic oligonucleotide
uuguucuucucacacagau

SEQ ID NO: 3214774 - RNA, 19 nt, Artificial Sequence
  Description of Artificial Sequence: Synthetic oligonucleotide
aaagcauccagcucauuuu

SEQ ID NO: 3214775 - RNA, 19 nt, Artificial Sequence
  Description of Artificial Sequence: Synthetic oligonucleotide
gguaguaauauuauuaaca

SEQ ID NO: 3214776 - RNA, 19 nt, Artificial Sequence
  Description of Artificial Sequence: Synthetic oligonucleotide
agauacaauguaucacuag

SEQ ID NO: 3214777 - RNA, 19 nt, Artificial Sequence
  Description of Artificial Sequence: Synthetic oligonucleotide
auucccuggaauuuaagaa

SEQ ID NO: 3214778 - RNA, 19 nt, Artificial Sequence
  Description of Artificial Sequence: Synthetic oligonucleotide
aaaagccuuauugaacucu

SEQ ID NO: 3214779 - RNA, 19 nt, Artificial Sequence
  Description of Artificial Sequence: Synthetic oligonucleotide
cucaaaagccuuauugaac

SEQ ID NO: 3214780 - RNA, 19 nt, Artificial Sequence
  Description of Artificial Sequence: Synthetic oligonucleotide
uccaguuccuguuuguucu

SEQ ID NO: 3214781 - RNA, 19 nt, Artificial Sequence
  Description of Artificial Sequence: Synthetic oligonucleotide
ucuaaguuccucaguuuca

SEQ ID NO: 3214782 - RNA, 19 nt, Artificial Sequence
  Description of Artificial Sequence: Synthetic oligonucleotide
ugaacucuuucccacacau

SEQ ID NO: 3214783 - RNA, 19 nt, Artificial Sequence
  Description of Artificial Sequence: Synthetic oligonucleotide
ucuucuuguagguaguaau

SEQ ID NO: 3214784 - RNA, 19 nt, Artificial Sequence
  Description of Artificial Sequence: Synthetic oligonucleotide
aguuucaugaagccgcugu

SEQ ID NO: 3214785 - RNA, 19 nt, Artificial Sequence
  Description of Artificial Sequence: Synthetic oligonucleotide
augguuguggccaccaacc

SEQ ID NO: 3214786 - RNA, 19 nt, Artificial Sequence
  Description of Artificial Sequence: Synthetic oligonucleotide
ucauuauuugaaucaaaua

SEQ ID NO: 3214787 - RNA, 19 nt, Artificial Sequence
  Description of Artificial Sequence: Synthetic oligonucleotide
aauguaucacuagcaaaug

SEQ ID NO: 3214788 - RNA, 19 nt, Artificial Sequence
  Description of Artificial Sequence: Synthetic oligonucleotide
cuuuccaucauuauuugaa

SEQ ID NO: 3214789 - RNA, 19 nt, Artificial Sequence
  Description of Artificial Sequence: Synthetic oligonucleotide
uucgguacagcuucccucc

SEQ ID NO: 3214790 - RNA, 19 nt, Artificial Sequence
  Description of Artificial Sequence: Synthetic oligonucleotide
agaucuguucgguacagcu

SEQ ID NO: 3214791 - RNA, 19 nt, Artificial Sequence
  Description of Artificial Sequence: Synthetic oligonucleotide
aaaacauucuuccauauua

SEQ ID NO: 3214792 - RNA, 19 nt, Artificial Sequence
  Description of Artificial Sequence: Synthetic oligonucleotide
ugauucaucagccucagga

SEQ ID NO: 3214793 - RNA, 19 nt, Artificial Sequence
  Description of Artificial Sequence: Synthetic oligonucleotide
aauuagugguuauaaaaca

SEQ ID NO: 3214794 - RNA, 19 nt, Artificial Sequence
  Description of Artificial Sequence: Synthetic oligonucleotide
uacaaacauguuuucaucg

SEQ ID NO: 3214795 - RNA, 19 nt, Artificial Sequence
  Description of Artificial Sequence: Synthetic oligonucleotide
uuauaaaacauucuuccau

SEQ ID NO: 3214796 - RNA, 19 nt, Artificial Sequence
  Description of Artificial Sequence: Synthetic oligonucleotide
acaaacauguuuucaucgc

SEQ ID NO: 3214797 - RNA, 19 nt, Artificial Sequence
  Description of Artificial Sequence: Synthetic oligonucleotide
gguuauaaaacauucuucc

SEQ ID NO: 3214798 - RNA, 19 nt, Artificial Sequence
  Description of Artificial Sequence: Synthetic oligonucleotide
ugcagcaucaucucuagcc

SEQ ID NO: 3214799 - RNA, 19 nt, Artificial Sequence
  Description of Artificial Sequence: Synthetic oligonucleotide
uguuguuuuacuauuuuau

SEQ ID NO: 3214800 - RNA, 19 nt, Artificial Sequence
  Description of Artificial Sequence: Synthetic oligonucleotide
aacauguuuucaucgcuuc

SEQ ID NO: 3214801 - RNA, 19 nt, Artificial Sequence
  Description of Artificial Sequence: Synthetic oligonucleotide
uguuuuacuauuuuauuuu

SEQ ID NO: 3214802 - RNA, 19 nt, Artificial Sequence
  Description of Artificial Sequence: Synthetic oligonucleotide
gaauuagugguuauaaaac

SEQ ID NO: 3214803 - RNA, 19 nt, Artificial Sequence
  Description of Artificial Sequence: Synthetic oligonucleotide
auacaaacauguuuucauc

SEQ ID NO: 3214804 - RNA, 19 nt, Artificial Sequence
  Description of Artificial Sequence: Synthetic oligonucleotide
acaccugauccauacaaac

SEQ ID NO: 3214805 - RNA, 19 nt, Artificial Sequence
  Description of Artificial Sequence: Synthetic oligonucleotide
aaacaccugauccauacaa

SEQ ID NO: 3214806 - RNA, 19 nt, Artificial Sequence
  Description of Artificial Sequence: Synthetic oligonucleotide
uauaaaacauucuuccaua

SEQ ID NO: 3214807 - RNA, 19 nt, Artificial Sequence
  Description of Artificial Sequence: Synthetic oligonucleotide
auguuuucaucgcuucucc

SEQ ID NO: 3214808 - RNA, 19 nt, Artificial Sequence
  Description of Artificial Sequence: Synthetic oligonucleotide
uuuugaggagcugugauga

SEQ ID NO: 3214809 - RNA, 19 nt, Artificial Sequence
  Description of Artificial Sequence: Synthetic oligonucleotide
ucagccucaggaauuagug

SEQ ID NO: 3214810 - RNA, 19 nt, Artificial Sequence
  Description of Artificial Sequence: Synthetic oligonucleotide
aucaucucuagccggcucc

SEQ ID NO: 3214811 - RNA, 19 nt, Artificial Sequence
  Description of Artificial Sequence: Synthetic oligonucleotide
ugaugauucaucagccuca

SEQ ID NO: 3214812 - RNA, 19 nt, Artificial Sequence
  Description of Artificial Sequence: Synthetic oligonucleotide
ugguuauaaaacauucuuc

SEQ ID NO: 3214813 - RNA, 19 nt, Artificial Sequence
  Description of Artificial Sequence: Synthetic oligonucleotide
uagugguuauaaaacauuc

SEQ ID NO: 3214814 - RNA, 19 nt, Artificial Sequence
  Description of Artificial Sequence: Synthetic oligonucleotide
uuguuuuacuauuuuauuu

SEQ ID NO: 3214815 - RNA, 19 nt, Artificial Sequence
  Description of Artificial Sequence: Synthetic oligonucleotide
uuuuguguuguuuuacuau

SEQ ID NO: 3214816 - RNA, 19 nt, Artificial Sequence
  Description of Artificial Sequence: Synthetic oligonucleotide
uuuucuuuugaggagcugu

SEQ ID NO: 3214817 - RNA, 19 nt, Artificial Sequence
  Description of Artificial Sequence: Synthetic oligonucleotide
uuagugguuauaaaacauu

SEQ ID NO: 3214818 - RNA, 19 nt, Artificial Sequence
  Description of Artificial Sequence: Synthetic oligonucleotide
uuucuuuugaggagcugug

SEQ ID NO: 3214819 - RNA, 19 nt, Artificial Sequence
  Description of Artificial Sequence: Synthetic oligonucleotide
ugaggagcugugaugauuc

SEQ ID NO: 3214820 - RNA, 19 nt, Artificial Sequence
  Description of Artificial Sequence: Synthetic oligonucleotide
aacauucuuccauauuaaa

SEQ ID NO: 3214821 - RNA, 19 nt, Artificial Sequence
  Description of Artificial Sequence: Synthetic oligonucleotide
cugugaugauucaucagcc

SEQ ID NO: 3214822 - RNA, 19 nt, Artificial Sequence
  Description of Artificial Sequence: Synthetic oligonucleotide
accugauccauacaaacau

SEQ ID NO: 3214823 - RNA, 19 nt, Artificial Sequence
  Description of Artificial Sequence: Synthetic oligonucleotide
uuuguguuguuuuacuauu

SEQ ID NO: 3214824 - RNA, 19 nt, Artificial Sequence
  Description of Artificial Sequence: Synthetic oligonucleotide
gcugugaugauucaucagc

SEQ ID NO: 3214825 - RNA, 19 nt, Artificial Sequence
  Description of Artificial Sequence: Synthetic oligonucleotide
ggaauuagugguuauaaaa

SEQ ID NO: 3214826 - RNA, 19 nt, Artificial Sequence
  Description of Artificial Sequence: Synthetic oligonucleotide
agccucaggaauuaguggu

SEQ ID NO: 3214827 - RNA, 19 nt, Artificial Sequence
  Description of Artificial Sequence: Synthetic oligonucleotide
guuauaaaacauucuucca

SEQ ID NO: 3214828 - RNA, 19 nt, Artificial Sequence
  Description of Artificial Sequence: Synthetic oligonucleotide
ucuuuugaggagcugugau

SEQ ID NO: 3214829 - RNA, 19 nt, Artificial Sequence
  Description of Artificial Sequence: Synthetic oligonucleotide
auaaaacauucuuccauau

SEQ ID NO: 3214830 - RNA, 19 nt, Artificial Sequence
  Description of Artificial Sequence: Synthetic oligonucleotide
cuuuugaggagcugugaug

SEQ ID NO: 3214831 - RNA, 19 nt, Artificial Sequence
  Description of Artificial Sequence: Synthetic oligonucleotide
aaaacaccugauccauaca

SEQ ID NO: 3214832 - RNA, 19 nt, Artificial Sequence
  Description of Artificial Sequence: Synthetic oligonucleotide
aucucuagccggcuccucg

SEQ ID NO: 3214833 - RNA, 19 nt, Artificial Sequence
  Description of Artificial Sequence: Synthetic oligonucleotide
uguguuguuuuacuauuuu

SEQ ID NO: 3214834 - RNA, 19 nt, Artificial Sequence
  Description of Artificial Sequence: Synthetic oligonucleotide
uaaaacauucuuccauauu

SEQ ID NO: 3214835 - RNA, 19 nt, Artificial Sequence
  Description of Artificial Sequence: Synthetic oligonucleotide
ugugaugauucaucagccu

SEQ ID NO: 3214836 - RNA, 19 nt, Artificial Sequence
  Description of Artificial Sequence: Synthetic oligonucleotide
gugaugauucaucagccuc

SEQ ID NO: 3214837 - RNA, 19 nt, Artificial Sequence
  Description of Artificial Sequence: Synthetic oligonucleotide
auuagugguuauaaaacau

SEQ ID NO: 3214838 - RNA, 19 nt, Artificial Sequence
  Description of Artificial Sequence: Synthetic oligonucleotide
gauucaucagccucaggaa

SEQ ID NO: 3214839 - RNA, 19 nt, Artificial Sequence
  Description of Artificial Sequence: Synthetic oligonucleotide
acugcagcaucaucucuag

SEQ ID NO: 3214840 - RNA, 19 nt, Artificial Sequence
  Description of Artificial Sequence: Synthetic oligonucleotide
aaacauucuuccauauuaa

SEQ ID NO: 3214841 - RNA, 19 nt, Artificial Sequence
  Description of Artificial Sequence: Synthetic oligonucleotide
agcaucaucucuagccggc

SEQ ID NO: 3214842 - RNA, 19 nt, Artificial Sequence
  Description of Artificial Sequence: Synthetic oligonucleotide
uucaucagccucaggaauu

SEQ ID NO: 3214843 - RNA, 19 nt, Artificial Sequence
  Description of Artificial Sequence: Synthetic oligonucleotide
auucaucagccucaggaau

SEQ ID NO: 3214844 - RNA, 19 nt, Artificial Sequence
  Description of Artificial Sequence: Synthetic oligonucleotide
auccauacaaacauguuuu

SEQ ID NO: 3214845 - RNA, 19 nt, Artificial Sequence
  Description of Artificial Sequence: Synthetic oligonucleotide
gaugauucaucagccucag

SEQ ID NO: 3214846 - RNA, 19 nt, Artificial Sequence
  Description of Artificial Sequence: Synthetic oligonucleotide
gauccauacaaacauguuu

SEQ ID NO: 3214847 - RNA, 19 nt, Artificial Sequence
  Description of Artificial Sequence: Synthetic oligonucleotide
acauucuuccauauuaaaa

SEQ ID NO: 3214848 - RNA, 19 nt, Artificial Sequence
  Description of Artificial Sequence: Synthetic oligonucleotide
gcagcaucaucucuagccg

SEQ ID NO: 3214849 - RNA, 19 nt, Artificial Sequence
  Description of Artificial Sequence: Synthetic oligonucleotide
cauguuuucaucgcuucuc

SEQ ID NO: 3214850 - RNA, 19 nt, Artificial Sequence
  Description of Artificial Sequence: Synthetic oligonucleotide
uguuuucaucgcuucucca

SEQ ID NO: 3214851 - RNA, 19 nt, Artificial Sequence
  Description of Artificial Sequence: Synthetic oligonucleotide
agugguuauaaaacauucu

SEQ ID NO: 3214852 - RNA, 19 nt, Artificial Sequence
  Description of Artificial Sequence: Synthetic oligonucleotide
cagccucaggaauuagugg

SEQ ID NO: 3214853 - RNA, 19 nt, Artificial Sequence
  Description of Artificial Sequence: Synthetic oligonucleotide
cauacaaacauguuuucau

SEQ ID NO: 3214854 - RNA, 19 nt, Artificial Sequence
  Description of Artificial Sequence: Synthetic oligonucleotide
uccauacaaacauguuuuc

SEQ ID NO: 3214855 - RNA, 19 nt, Artificial Sequence
  Description of Artificial Sequence: Synthetic oligonucleotide
agcugugaugauucaucag

SEQ ID NO: 3214856 - RNA, 19 nt, Artificial Sequence
  Description of Artificial Sequence: Synthetic oligonucleotide
aggaauuagugguuauaaa

SEQ ID NO: 3214857 - RNA, 19 nt, Artificial Sequence
  Description of Artificial Sequence: Synthetic oligonucleotide
acauguuuucaucgcuucu

SEQ ID NO: 3214858 - RNA, 19 nt, Artificial Sequence
  Description of Artificial Sequence: Synthetic oligonucleotide
uuguguuguuuuacuauuu

SEQ ID NO: 3214859 - RNA, 19 nt, Artificial Sequence
  Description of Artificial Sequence: Synthetic oligonucleotide
gagcugugaugauucauca

SEQ ID NO: 3214860 - RNA, 19 nt, Artificial Sequence
  Description of Artificial Sequence: Synthetic oligonucleotide
ugauccauacaaacauguu

SEQ ID NO: 3214861 - RNA, 19 nt, Artificial Sequence
  Description of Artificial Sequence: Synthetic oligonucleotide
aaacauguuuucaucgcuu

SEQ ID NO: 3214862 - RNA, 19 nt, Artificial Sequence
  Description of Artificial Sequence: Synthetic oligonucleotide
cagcaucaucucuagccgg

SEQ ID NO: 3214863 - RNA, 19 nt, Artificial Sequence
  Description of Artificial Sequence: Synthetic oligonucleotide
gugguuauaaaacauucuu

SEQ ID NO: 3214864 - RNA, 19 nt, Artificial Sequence
  Description of Artificial Sequence: Synthetic oligonucleotide
ucucuagccggcuccucgc

SEQ ID NO: 3214865 - RNA, 19 nt, Artificial Sequence
  Description of Artificial Sequence: Synthetic oligonucleotide
uccacugcagcaucaucuc

SEQ ID NO: 3214866 - RNA, 19 nt, Artificial Sequence
  Description of Artificial Sequence: Synthetic oligonucleotide
uucuuuugaggagcuguga

SEQ ID NO: 3214867 - RNA, 19 nt, Artificial Sequence
  Description of Artificial Sequence: Synthetic oligonucleotide
cugauccauacaaacaugu

SEQ ID NO: 3214868 - RNA, 19 nt, Artificial Sequence
  Description of Artificial Sequence: Synthetic oligonucleotide
ucaggaauuagugguuaua

SEQ ID NO: 3214869 - RNA, 19 nt, Artificial Sequence
  Description of Artificial Sequence: Synthetic oligonucleotide
aacaccugauccauacaaa

SEQ ID NO: 3214870 - RNA, 19 nt, Artificial Sequence
  Description of Artificial Sequence: Synthetic oligonucleotide
guuguuuuacuauuuuauu

SEQ ID NO: 3214871 - RNA, 19 nt, Artificial Sequence
  Description of Artificial Sequence: Synthetic oligonucleotide
caccugauccauacaaaca

SEQ ID NO: 3214872 - RNA, 19 nt, Artificial Sequence
  Description of Artificial Sequence: Synthetic oligonucleotide
guguuguuuuacuauuuua

SEQ ID NO: 3214873 - RNA, 19 nt, Artificial Sequence
  Description of Artificial Sequence: Synthetic oligonucleotide
augauucaucagccucagg

SEQ ID NO: 3214874 - RNA, 19 nt, Artificial Sequence
  Description of Artificial Sequence: Synthetic oligonucleotide
caggaauuagugguuauaa

SEQ ID NO: 3214875 - RNA, 19 nt, Artificial Sequence
  Description of Artificial Sequence: Synthetic oligonucleotide
cuccacugcagcaucaucu

SEQ ID NO: 3214876 - RNA, 19 nt, Artificial Sequence
  Description of Artificial Sequence: Synthetic oligonucleotide
ucaucagccucaggaauua

SEQ ID NO: 3214877 - RNA, 19 nt, Artificial Sequence
  Description of Artificial Sequence: Synthetic oligonucleotide
ucuccacugcagcaucauc

SEQ ID NO: 3214878 - RNA, 19 nt, Artificial Sequence
  Description of Artificial Sequence: Synthetic oligonucleotide
uagccggcuccucgcgucg

SEQ ID NO: 3214879 - RNA, 19 nt, Artificial Sequence
  Description of Artificial Sequence: Synthetic oligonucleotide
uugaggagcugugaugauu

SEQ ID NO: 3214880 - RNA, 19 nt, Artificial Sequence
  Description of Artificial Sequence: Synthetic oligonucleotide
ucuagccggcuccucgcgu

SEQ ID NO: 3214881 - RNA, 19 nt, Artificial Sequence
  Description of Artificial Sequence: Synthetic oligonucleotide
caaacauguuuucaucgcu

SEQ ID NO: 3214882 - RNA, 19 nt, Artificial Sequence
  Description of Artificial Sequence: Synthetic oligonucleotide
ggagcugugaugauucauc

SEQ ID NO: 3214883 - RNA, 19 nt, Artificial Sequence
  Description of Artificial Sequence: Synthetic oligonucleotide
uuugaggagcugugaugau

SEQ ID NO: 3214884 - RNA, 19 nt, Artificial Sequence
  Description of Artificial Sequence: Synthetic oligonucleotide
aucagccucaggaauuagu

SEQ ID NO: 3214885 - RNA, 19 nt, Artificial Sequence
  Description of Artificial Sequence: Synthetic oligonucleotide
cuagccggcuccucgcguc

SEQ ID NO: 3214886 - RNA, 19 nt, Artificial Sequence
  Description of Artificial Sequence: Synthetic oligonucleotide
ccugauccauacaaacaug

SEQ ID NO: 3214887 - RNA, 19 nt, Artificial Sequence
  Description of Artificial Sequence: Synthetic oligonucleotide
cucuagccggcuccucgcg

SEQ ID NO: 3214888 - RNA, 19 nt, Artificial Sequence
  Description of Artificial Sequence: Synthetic oligonucleotide
ucaucucuagccggcuccu

SEQ ID NO: 3214889 - RNA, 19 nt, Artificial Sequence
  Description of Artificial Sequence: Synthetic oligonucleotide
cacugcagcaucaucucua

SEQ ID NO: 3214890 - RNA, 19 nt, Artificial Sequence
  Description of Artificial Sequence: Synthetic oligonucleotide
caucaucucuagccggcuc

SEQ ID NO: 3214891 - RNA, 19 nt, Artificial Sequence
  Description of Artificial Sequence: Synthetic oligonucleotide
aaguugaacauuuucugcc

SEQ ID NO: 3214892 - RNA, 19 nt, Artificial Sequence
  Description of Artificial Sequence: Synthetic oligonucleotide
uuuauugcuaggaagauug

SEQ ID NO: 3214893 - RNA, 19 nt, Artificial Sequence
  Description of Artificial Sequence: Synthetic oligonucleotide
aucuagauaaugcugaagc

SEQ ID NO: 3214894 - RNA, 19 nt, Artificial Sequence
  Description of Artificial Sequence: Synthetic oligonucleotide
aacauuuucugccacauug

SEQ ID NO: 3214895 - RNA, 19 nt, Artificial Sequence
  Description of Artificial Sequence: Synthetic oligonucleotide
aaggcaucuagcuucacac

SEQ ID NO: 3214896 - RNA, 19 nt, Artificial Sequence
  Description of Artificial Sequence: Synthetic oligonucleotide
uguaaguugaacauuuucu

SEQ ID NO: 3214897 - RNA, 19 nt, Artificial Sequence
  Description of Artificial Sequence: Synthetic oligonucleotide
aaagcuaucaugccugaag

SEQ ID NO: 3214898 - RNA, 19 nt, Artificial Sequence
  Description of Artificial Sequence: Synthetic oligonucleotide
ugaaggaaauccuggaugg

SEQ ID NO: 3214899 - RNA, 19 nt, Artificial Sequence
  Description of Artificial Sequence: Synthetic oligonucleotide
auugguacagucuuugguc

SEQ ID NO: 3214900 - RNA, 19 nt, Artificial Sequence
  Description of Artificial Sequence: Synthetic oligonucleotide
gauauaagcccacucgagg

SEQ ID NO: 3214901 - RNA, 19 nt, Artificial Sequence
  Description of Artificial Sequence: Synthetic oligonucleotide
aagcuaucaugccugaagg

SEQ ID NO: 3214902 - RNA, 19 nt, Artificial Sequence
  Description of Artificial Sequence: Synthetic oligonucleotide
ugggauauaagcccacucg

SEQ ID NO: 3214903 - RNA, 19 nt, Artificial Sequence
  Description of Artificial Sequence: Synthetic oligonucleotide
ucauuuuauugcuaggaag

SEQ ID NO: 3214904 - RNA, 19 nt, Artificial Sequence
  Description of Artificial Sequence: Synthetic oligonucleotide
agucuuuggucuuugaguc

SEQ ID NO: 3214905 - RNA, 19 nt, Artificial Sequence
  Description of Artificial Sequence: Synthetic oligonucleotide
aagaaaagcuaucaugccu

SEQ ID NO: 3214906 - RNA, 19 nt, Artificial Sequence
  Description of Artificial Sequence: Synthetic oligonucleotide
ucuagcuucacacugcgcu

SEQ ID NO: 3214907 - RNA, 19 nt, Artificial Sequence
  Description of Artificial Sequence: Synthetic oligonucleotide
augaagcugacucugcagc

SEQ ID NO: 3214908 - RNA, 19 nt, Artificial Sequence
  Description of Artificial Sequence: Synthetic oligonucleotide
uucuuuuguucuuaauugg

SEQ ID NO: 3214909 - RNA, 19 nt, Artificial Sequence
  Description of Artificial Sequence: Synthetic oligonucleotide
uagaaagccaucaucaauc

SEQ ID NO: 3214910 - RNA, 19 nt, Artificial Sequence
  Description of Artificial Sequence: Synthetic oligonucleotide
cuucuuuuguucuuaauug

SEQ ID NO: 3214911 - RNA, 19 nt, Artificial Sequence
  Description of Artificial Sequence: Synthetic oligonucleotide
aauugguacagucuuuggu

SEQ ID NO: 3214912 - RNA, 19 nt, Artificial Sequence
  Description of Artificial Sequence: Synthetic oligonucleotide
uuuucugccacauugggua

SEQ ID NO: 3214913 - RNA, 19 nt, Artificial Sequence
  Description of Artificial Sequence: Synthetic oligonucleotide
cuugucauuuuauugcuag

SEQ ID NO: 3214914 - RNA, 19 nt, Artificial Sequence
  Description of Artificial Sequence: Synthetic oligonucleotide
uuuuguucuuaauugguac

SEQ ID NO: 3214915 - RNA, 19 nt, Artificial Sequence
  Description of Artificial Sequence: Synthetic oligonucleotide
ucaucugcugacaaggucu

SEQ ID NO: 3214916 - RNA, 19 nt, Artificial Sequence
  Description of Artificial Sequence: Synthetic oligonucleotide
uagauaaugcugaagcaga

SEQ ID NO: 3214917 - RNA, 19 nt, Artificial Sequence
  Description of Artificial Sequence: Synthetic oligonucleotide
agaaagccaucaucaaucc

SEQ ID NO: 3214918 - RNA, 19 nt, Artificial Sequence
  Description of Artificial Sequence: Synthetic oligonucleotide
uaaguugaacauuuucugc

SEQ ID NO: 3214919 - RNA, 19 nt, Artificial Sequence
  Description of Artificial Sequence: Synthetic oligonucleotide
uggucuuuggaaaauggug

SEQ ID NO: 3214920 - RNA, 19 nt, Artificial Sequence
  Description of Artificial Sequence: Synthetic oligonucleotide
guaaguugaacauuuucug

SEQ ID NO: 3214921 - RNA, 19 nt, Artificial Sequence
  Description of Artificial Sequence: Synthetic oligonucleotide
caugucaugaagcugacuc

SEQ ID NO: 3214922 - RNA, 19 nt, Artificial Sequence
  Description of Artificial Sequence: Synthetic oligonucleotide
uuggaaaauggugagagca

SEQ ID NO: 3214923 - RNA, 19 nt, Artificial Sequence
  Description of Artificial Sequence: Synthetic oligonucleotide
uggaucugggauauaagcc

SEQ ID NO: 3214924 - RNA, 19 nt, Artificial Sequence
  Description of Artificial Sequence: Synthetic oligonucleotide
ucaucaauccuucuuuugu

SEQ ID NO: 3214925 - RNA, 19 nt, Artificial Sequence
  Description of Artificial Sequence: Synthetic oligonucleotide
ugccacauuggguagaaag

SEQ ID NO: 3214926 - RNA, 19 nt, Artificial Sequence
  Description of Artificial Sequence: Synthetic oligonucleotide
uucucaucugcugacaagg

SEQ ID NO: 3214927 - RNA, 19 nt, Artificial Sequence
  Description of Artificial Sequence: Synthetic oligonucleotide
aagcugacucugcagcucc

SEQ ID NO: 3214928 - RNA, 19 nt, Artificial Sequence
  Description of Artificial Sequence: Synthetic oligonucleotide
aaggucucuguccauuuuc

SEQ ID NO: 3214929 - RNA, 19 nt, Artificial Sequence
  Description of Artificial Sequence: Synthetic oligonucleotide
aaauggugagagcaucuag

SEQ ID NO: 3214930 - RNA, 19 nt, Artificial Sequence
  Description of Artificial Sequence: Synthetic oligonucleotide
ucuuaauugguacagucuu

SEQ ID NO: 3214931 - RNA, 19 nt, Artificial Sequence
  Description of Artificial Sequence: Synthetic oligonucleotide
cuuuggaaaauggugagag

SEQ ID NO: 3214932 - RNA, 19 nt, Artificial Sequence
  Description of Artificial Sequence: Synthetic oligonucleotide
ucucuguccauuuuccucc

SEQ ID NO: 3214933 - RNA, 19 nt, Artificial Sequence
  Description of Artificial Sequence: Synthetic oligonucleotide
cauuuuauugcuaggaaga

SEQ ID NO: 3214934 - RNA, 19 nt, Artificial Sequence
  Description of Artificial Sequence: Synthetic oligonucleotide
ucuuuuguucuuaauuggu

SEQ ID NO: 3214935 - RNA, 19 nt, Artificial Sequence
  Description of Artificial Sequence: Synthetic oligonucleotide
ucuuuggucuuugaguccg

SEQ ID NO: 3214936 - RNA, 19 nt, Artificial Sequence
  Description of Artificial Sequence: Synthetic oligonucleotide
cuagauaaugcugaagcag

SEQ ID NO: 3214937 - RNA, 19 nt, Artificial Sequence
  Description of Artificial Sequence: Synthetic oligonucleotide
uuuguucuuaauugguaca

SEQ ID NO: 3214938 - RNA, 19 nt, Artificial Sequence
  Description of Artificial Sequence: Synthetic oligonucleotide
uuaauugguacagucuuug

SEQ ID NO: 3214939 - RNA, 19 nt, Artificial Sequence
  Description of Artificial Sequence: Synthetic oligonucleotide
gaagaaaagcuaucaugcc

SEQ ID NO: 3214940 - RNA, 19 nt, Artificial Sequence
  Description of Artificial Sequence: Synthetic oligonucleotide
uucuuaauugguacagucu

SEQ ID NO: 3214941 - RNA, 19 nt, Artificial Sequence
  Description of Artificial Sequence: Synthetic oligonucleotide
agagcaucuagauaaugcu

SEQ ID NO: 3214942 - RNA, 19 nt, Artificial Sequence
  Description of Artificial Sequence: Synthetic oligonucleotide
ucuagauaaugcugaagca

SEQ ID NO: 3214943 - RNA, 19 nt, Artificial Sequence
  Description of Artificial Sequence: Synthetic oligonucleotide
auugcuaggaagauugguc

SEQ ID NO: 3214944 - RNA, 19 nt, Artificial Sequence
  Description of Artificial Sequence: Synthetic oligonucleotide
uccauuuuccuccuaccgc

SEQ ID NO: 3214945 - RNA, 19 nt, Artificial Sequence
  Description of Artificial Sequence: Synthetic oligonucleotide
ggugagagcaucuagauaa

SEQ ID NO: 3214946 - RNA, 19 nt, Artificial Sequence
  Description of Artificial Sequence: Synthetic oligonucleotide
auaaugcugaagcagaguu

SEQ ID NO: 3214947 - RNA, 19 nt, Artificial Sequence
  Description of Artificial Sequence: Synthetic oligonucleotide
aaggaaauccuggauggag

SEQ ID NO: 3214948 - RNA, 19 nt, Artificial Sequence
  Description of Artificial Sequence: Synthetic oligonucleotide
ugucauuuuauugcuagga

SEQ ID NO: 3214949 - RNA, 19 nt, Artificial Sequence
  Description of Artificial Sequence: Synthetic oligonucleotide
aucaauccuucuuuuguuc

SEQ ID NO: 3214950 - RNA, 19 nt, Artificial Sequence
  Description of Artificial Sequence: Synthetic oligonucleotide
auauaagcccacucgagga

SEQ ID NO: 3214951 - RNA, 19 nt, Artificial Sequence
  Description of Artificial Sequence: Synthetic oligonucleotide
uauaagcccacucgaggag

SEQ ID NO: 3214952 - RNA, 19 nt, Artificial Sequence
  Description of Artificial Sequence: Synthetic oligonucleotide
aaagccaucaucaauccuu

SEQ ID NO: 3214953 - RNA, 19 nt, Artificial Sequence
  Description of Artificial Sequence: Synthetic oligonucleotide
uuguaaguugaacauuuuc

SEQ ID NO: 3214954 - RNA, 19 nt, Artificial Sequence
  Description of Artificial Sequence: Synthetic oligonucleotide
gagagcaucuagauaaugc

SEQ ID NO: 3214955 - RNA, 19 nt, Artificial Sequence
  Description of Artificial Sequence: Synthetic oligonucleotide
ugccugaaggaaauccugg

SEQ ID NO: 3214956 - RNA, 19 nt, Artificial Sequence
  Description of Artificial Sequence: Synthetic oligonucleotide
gaagauuggucuuuggaaa

SEQ ID NO: 3214957 - RNA, 19 nt, Artificial Sequence
  Description of Artificial Sequence: Synthetic oligonucleotide
uugggaaguuguaaguuga

SEQ ID NO: 3214958 - RNA, 19 nt, Artificial Sequence
  Description of Artificial Sequence: Synthetic oligonucleotide
uuugaguccgucuugucau

SEQ ID NO: 3214959 - RNA, 19 nt, Artificial Sequence
  Description of Artificial Sequence: Synthetic oligonucleotide
uuguucuuaauugguacag

SEQ ID NO: 3214960 - RNA, 19 nt, Artificial Sequence
  Description of Artificial Sequence: Synthetic oligonucleotide
cugaaggaaauccuggaug

SEQ ID NO: 3214961 - RNA, 19 nt, Artificial Sequence
  Description of Artificial Sequence: Synthetic oligonucleotide
aaugcugaagcagaguuua

SEQ ID NO: 3214962 - RNA, 19 nt, Artificial Sequence
  Description of Artificial Sequence: Synthetic oligonucleotide
guggaucugggauauaagc

SEQ ID NO: 3214963 - RNA, 19 nt, Artificial Sequence
  Description of Artificial Sequence: Synthetic oligonucleotide
cugaagcagaguuuagggg

SEQ ID NO: 3214964 - RNA, 19 nt, Artificial Sequence
  Description of Artificial Sequence: Synthetic oligonucleotide
aauggugagagcaucuaga

SEQ ID NO: 3214965 - RNA, 19 nt, Artificial Sequence
  Description of Artificial Sequence: Synthetic oligonucleotide
agaaaagcuaucaugccug

SEQ ID NO: 3214966 - RNA, 19 nt, Artificial Sequence
  Description of Artificial Sequence: Synthetic oligonucleotide
uugcuaggaagauuggucu

SEQ ID NO: 3214967 - RNA, 19 nt, Artificial Sequence
  Description of Artificial Sequence: Synthetic oligonucleotide
aaauccuggauggagcugu

SEQ ID NO: 3214968 - RNA, 19 nt, Artificial Sequence
  Description of Artificial Sequence: Synthetic oligonucleotide
uaauugguacagucuuugg

SEQ ID NO: 3214969 - RNA, 19 nt, Artificial Sequence
  Description of Artificial Sequence: Synthetic oligonucleotide
uuauugcuaggaagauugg

SEQ ID NO: 3214970 - RNA, 19 nt, Artificial Sequence
  Description of Artificial Sequence: Synthetic oligonucleotide
aagauuggucuuuggaaaa

SEQ ID NO: 3214971 - RNA, 19 nt, Artificial Sequence
  Description of Artificial Sequence: Synthetic oligonucleotide
uugucauuuuauugcuagg

SEQ ID NO: 3214972 - RNA, 19 nt, Artificial Sequence
  Description of Artificial Sequence: Synthetic oligonucleotide
ggaaguuguaaguugaaca

SEQ ID NO: 3214973 - RNA, 19 nt, Artificial Sequence
  Description of Artificial Sequence: Synthetic oligonucleotide
cauuuucugccacauuggg

SEQ ID NO: 3214974 - RNA, 19 nt, Artificial Sequence
  Description of Artificial Sequence: Synthetic oligonucleotide
uccuggauggagcuguuug

SEQ ID NO: 3214975 - RNA, 19 nt, Artificial Sequence
  Description of Artificial Sequence: Synthetic oligonucleotide
acagucuuuggucuuugag

SEQ ID NO: 3214976 - RNA, 19 nt, Artificial Sequence
  Description of Artificial Sequence: Synthetic oligonucleotide
cuugggaaguuguaaguug

SEQ ID NO: 3214977 - RNA, 19 nt, Artificial Sequence
  Description of Artificial Sequence: Synthetic oligonucleotide
uuuggacuugggaaguugu

SEQ ID NO: 3214978 - RNA, 19 nt, Artificial Sequence
  Description of Artificial Sequence: Synthetic oligonucleotide
ucaugccugaaggaaaucc

SEQ ID NO: 3214979 - RNA, 19 nt, Artificial Sequence
  Description of Artificial Sequence: Synthetic oligonucleotide
ucaauccuucuuuuguucu

SEQ ID NO: 3214980 - RNA, 19 nt, Artificial Sequence
  Description of Artificial Sequence: Synthetic oligonucleotide
ggaucugggauauaagccc

SEQ ID NO: 3214981 - RNA, 19 nt, Artificial Sequence
  Description of Artificial Sequence: Synthetic oligonucleotide
guucuuaauugguacaguc

SEQ ID NO: 3214982 - RNA, 19 nt, Artificial Sequence
  Description of Artificial Sequence: Synthetic oligonucleotide
agcuguuuggacuugggaa

SEQ ID NO: 3214983 - RNA, 19 nt, Artificial Sequence
  Description of Artificial Sequence: Synthetic oligonucleotide
gcugaagcagaguuuaggg

SEQ ID NO: 3214984 - RNA, 19 nt, Artificial Sequence
  Description of Artificial Sequence: Synthetic oligonucleotide
aggaaauccuggauggagc

SEQ ID NO: 3214985 - RNA, 19 nt, Artificial Sequence
  Description of Artificial Sequence: Synthetic oligonucleotide
ugcugaagcagaguuuagg

SEQ ID NO: 3214986 - RNA, 19 nt, Artificial Sequence
  Description of Artificial Sequence: Synthetic oligonucleotide
auuuuccuccuaccgcagc

SEQ ID NO: 3214987 - RNA, 19 nt, Artificial Sequence
  Description of Artificial Sequence: Synthetic oligonucleotide
uuggucuuuggaaaauggu

SEQ ID NO: 3214988 - RNA, 19 nt, Artificial Sequence
  Description of Artificial Sequence: Synthetic oligonucleotide
guggaaggcaucuagcuuc

SEQ ID NO: 3214989 - RNA, 19 nt, Artificial Sequence
  Description of Artificial Sequence: Synthetic oligonucleotide
guccauuuuccuccuaccg

SEQ ID NO: 3214990 - RNA, 19 nt, Artificial Sequence
  Description of Artificial Sequence: Synthetic oligonucleotide
auuggucuuuggaaaaugg

SEQ ID NO: 3214991 - RNA, 19 nt, Artificial Sequence
  Description of Artificial Sequence: Synthetic oligonucleotide
uuugauauaguuaaaacag

SEQ ID NO: 3214992 - RNA, 19 nt, Artificial Sequence
  Description of Artificial Sequence: Synthetic oligonucleotide
aaaauggucaccuagcaac

SEQ ID NO: 3214993 - RNA, 19 nt, Artificial Sequence
  Description of Artificial Sequence: Synthetic oligonucleotide
aaaucuguaauacagaaug

SEQ ID NO: 3214994 - RNA, 19 nt, Artificial Sequence
  Description of Artificial Sequence: Synthetic oligonucleotide
aaugaagcgaaacaaacac

SEQ ID NO: 3214995 - RNA, 19 nt, Artificial Sequence
  Description of Artificial Sequence: Synthetic oligonucleotide
aauaguagcauguauguug

SEQ ID NO: 3214996 - RNA, 19 nt, Artificial Sequence
  Description of Artificial Sequence: Synthetic oligonucleotide
uauauauauauuuauauau

SEQ ID NO: 3214997 - RNA, 19 nt, Artificial Sequence
  Description of Artificial Sequence: Synthetic oligonucleotide
aauuggaaugcaaagaugg

SEQ ID NO: 3214998 - RNA, 19 nt, Artificial Sequence
  Description of Artificial Sequence: Synthetic oligonucleotide
caaaguucgaagaagaugc

SEQ ID NO: 3214999 - RNA, 19 nt, Artificial Sequence
  Description of Artificial Sequence: Synthetic oligonucleotide
acuguaagugguuauaccc

SEQ ID NO: 3215000 - RNA, 19 nt, Artificial Sequence
  Description of Artificial Sequence: Synthetic oligonucleotide
aaauaacaaaacuagagau

SEQ ID NO: 3215001 - RNA, 19 nt, Artificial Sequence
  Description of Artificial Sequence: Synthetic oligonucleotide
uauauauauauauauauau

SEQ ID NO: 3215002 - RNA, 19 nt, Artificial Sequence
  Description of Artificial Sequence: Synthetic oligonucleotide
aacaauuuaacauauuaaa

SEQ ID NO: 3215003 - RNA, 19 nt, Artificial Sequence
  Description of Artificial Sequence: Synthetic oligonucleotide
aaaagggaaaauuucaggu

SEQ ID NO: 3215004 - RNA, 19 nt, Artificial Sequence
  Description of Artificial Sequence: Synthetic oligonucleotide
agcuauuugaaaaugaagc

SEQ ID NO: 3215005 - RNA, 19 nt, Artificial Sequence
  Description of Artificial Sequence: Synthetic oligonucleotide
aauagcuguauccuucccc

SEQ ID NO: 3215006 - RNA, 19 nt, Artificial Sequence
  Description of Artificial Sequence: Synthetic oligonucleotide
uaaauaacaaaacuagaga

SEQ ID NO: 3215007 - RNA, 19 nt, Artificial Sequence
  Description of Artificial Sequence: Synthetic oligonucleotide
uauauauauauauuuauau

SEQ ID NO: 3215008 - RNA, 19 nt, Artificial Sequence
  Description of Artificial Sequence: Synthetic oligonucleotide
uauauauauauauauauuu

SEQ ID NO: 3215009 - RNA, 19 nt, Artificial Sequence
  Description of Artificial Sequence: Synthetic oligonucleotide
auuaucagacuucuuaugg

SEQ ID NO: 3215010 - RNA, 19 nt, Artificial Sequence
  Description of Artificial Sequence: Synthetic oligonucleotide
ugcuuuagaauaaauaaca

SEQ ID NO: 3215011 - RNA, 19 nt, Artificial Sequence
  Description of Artificial Sequence: Synthetic oligonucleotide
aaacuagagauucacuguc

SEQ ID NO: 3215012 - RNA, 19 nt, Artificial Sequence
  Description of Artificial Sequence: Synthetic oligonucleotide
auagauacaaaguucgaag

SEQ ID NO: 3215013 - RNA, 19 nt, Artificial Sequence
  Description of Artificial Sequence: Synthetic oligonucleotide
auaaauaacaaaacuagag

SEQ ID NO: 3215014 - RNA, 19 nt, Artificial Sequence
  Description of Artificial Sequence: Synthetic oligonucleotide
agcaauaacaauuuaacau

SEQ ID NO: 3215015 - RNA, 19 nt, Artificial Sequence
  Description of Artificial Sequence: Synthetic oligonucleotide
uauauauauuuauauauaa

SEQ ID NO: 3215016 - RNA, 19 nt, Artificial Sequence
  Description of Artificial Sequence: Synthetic oligonucleotide
uagauuagauuauaggcag

SEQ ID NO: 3215017 - RNA, 19 nt, Artificial Sequence
  Description of Artificial Sequence: Synthetic oligonucleotide
uauaccauagauacaaagu

SEQ ID NO: 3215018 - RNA, 19 nt, Artificial Sequence
  Description of Artificial Sequence: Synthetic oligonucleotide
uauauauauauauauuuau

SEQ ID NO: 3215019 - RNA, 19 nt, Artificial Sequence
  Description of Artificial Sequence: Synthetic oligonucleotide
uauagcaauaacaauuuaa

SEQ ID NO: 3215020 - RNA, 19 nt, Artificial Sequence
  Description of Artificial Sequence: Synthetic oligonucleotide
auagcaauaacaauuuaac

SEQ ID NO: 3215021 - RNA, 19 nt, Artificial Sequence
  Description of Artificial Sequence: Synthetic oligonucleotide
caugaagcaacucuuaagc

SEQ ID NO: 3215022 - RNA, 19 nt, Artificial Sequence
  Description of Artificial Sequence: Synthetic oligonucleotide
uuugccaacagcaaagaac

SEQ ID NO: 3215023 - RNA, 19 nt, Artificial Sequence
  Description of Artificial Sequence: Synthetic oligonucleotide
aaaacuagagauucacugu

SEQ ID NO: 3215024 - RNA, 19 nt, Artificial Sequence
  Description of Artificial Sequence: Synthetic oligonucleotide
ucgguaacuaauaagagau

SEQ ID NO: 3215025 - RNA, 19 nt, Artificial Sequence
  Description of Artificial Sequence: Synthetic oligonucleotide
acugcacagaacuaaauag

SEQ ID NO: 3215026 - RNA, 19 nt, Artificial Sequence
  Description of Artificial Sequence: Synthetic oligonucleotide
uuagauuauaggcaguaac

SEQ ID NO: 3215027 - RNA, 19 nt, Artificial Sequence
  Description of Artificial Sequence: Synthetic oligonucleotide
uugccaacagcaaagaaca

SEQ ID NO: 3215028 - RNA, 19 nt, Artificial Sequence
  Description of Artificial Sequence: Synthetic oligonucleotide
uucaguacacguaaguuca

SEQ ID NO: 3215029 - RNA, 19 nt, Artificial Sequence
  Description of Artificial Sequence: Synthetic oligonucleotide
uucacugucauaacaaaga

SEQ ID NO: 3215030 - RNA, 19 nt, Artificial Sequence
  Description of Artificial Sequence: Synthetic oligonucleotide
caaaacuagagauucacug

SEQ ID NO: 3215031 - RNA, 19 nt, Artificial Sequence
  Description of Artificial Sequence: Synthetic oligonucleotide
cacagaacuaaauaguagc

SEQ ID NO: 3215032 - RNA, 19 nt, Artificial Sequence
  Description of Artificial Sequence: Synthetic oligonucleotide
uaaauaguagcauguaugu

SEQ ID NO: 3215033 - RNA, 19 nt, Artificial Sequence
  Description of Artificial Sequence: Synthetic oligonucleotide
aguaagauggauguguagg

SEQ ID NO: 3215034 - RNA, 19 nt, Artificial Sequence
  Description of Artificial Sequence: Synthetic oligonucleotide
acuagucaugucuaauugc

SEQ ID NO: 3215035 - RNA, 19 nt, Artificial Sequence
  Description of Artificial Sequence: Synthetic oligonucleotide
augauuauauaccauagau

SEQ ID NO: 3215036 - RNA, 19 nt, Artificial Sequence
  Description of Artificial Sequence: Synthetic oligonucleotide
aggcauauaguauugaaca

SEQ ID NO: 3215037 - RNA, 19 nt, Artificial Sequence
  Description of Artificial Sequence: Synthetic oligonucleotide
ugaagcaacucuuaagccc

SEQ ID NO: 3215038 - RNA, 19 nt, Artificial Sequence
  Description of Artificial Sequence: Synthetic oligonucleotide
uacguauauauauauauau

SEQ ID NO: 3215039 - RNA, 19 nt, Artificial Sequence
  Description of Artificial Sequence: Synthetic oligonucleotide
uauacccuuaguauguacc

SEQ ID NO: 3215040 - RNA, 19 nt, Artificial Sequence
  Description of Artificial Sequence: Synthetic oligonucleotide
uauaaacuugcacauuagc

SEQ ID NO: 3215041 - RNA, 19 nt, Artificial Sequence
  Description of Artificial Sequence: Synthetic oligonucleotide
ucaauuggaaugcaaagau

SEQ ID NO: 3215042 - RNA, 19 nt, Artificial Sequence
  Description of Artificial Sequence: Synthetic oligonucleotide
aacacuauaauagaaugau

SEQ ID NO: 3215043 - RNA, 19 nt, Artificial Sequence
  Description of Artificial Sequence: Synthetic oligonucleotide
agguuauaaaaccccgucc

SEQ ID NO: 3215044 - RNA, 19 nt, Artificial Sequence
  Description of Artificial Sequence: Synthetic oligonucleotide
uguauguugucauggaaug

SEQ ID NO: 3215045 - RNA, 19 nt, Artificial Sequence
  Description of Artificial Sequence: Synthetic oligonucleotide
aaugugacaaauguauuca

SEQ ID NO: 3215046 - RNA, 19 nt, Artificial Sequence
  Description of Artificial Sequence: Synthetic oligonucleotide
uugcacauuagcuuuagca

SEQ ID NO: 3215047 - RNA, 19 nt, Artificial Sequence
  Description of Artificial Sequence: Synthetic oligonucleotide
aaaauagcaauugcuuuag

SEQ ID NO: 3215048 - RNA, 19 nt, Artificial Sequence
  Description of Artificial Sequence: Synthetic oligonucleotide
cuguagauuagauuauagg

SEQ ID NO: 3215049 - RNA, 19 nt, Artificial Sequence
  Description of Artificial Sequence: Synthetic oligonucleotide
cuaugauuauauaccauag

SEQ ID NO: 3215050 - RNA, 19 nt, Artificial Sequence
  Description of Artificial Sequence: Synthetic oligonucleotide
augaagcaacucuuaagcc

SEQ ID NO: 3215051 - RNA, 19 nt, Artificial Sequence
  Description of Artificial Sequence: Synthetic oligonucleotide
aaggcauauaguauugaac

SEQ ID NO: 3215052 - RNA, 19 nt, Artificial Sequence
  Description of Artificial Sequence: Synthetic oligonucleotide
uaauaagagauguucacau

SEQ ID NO: 3215053 - RNA, 19 nt, Artificial Sequence
  Description of Artificial Sequence: Synthetic oligonucleotide
uguaccuaagcaaugcgcu

SEQ ID NO: 3215054 - RNA, 19 nt, Artificial Sequence
  Description of Artificial Sequence: Synthetic oligonucleotide
aagcaaugcgcuuaugucu

SEQ ID NO: 3215055 - RNA, 19 nt, Artificial Sequence
  Description of Artificial Sequence: Synthetic oligonucleotide
aagcgaaacaaacacgagu

SEQ ID NO: 3215056 - RNA, 19 nt, Artificial Sequence
  Description of Artificial Sequence: Synthetic oligonucleotide
uuaguauguaccuaagcaa

SEQ ID NO: 3215057 - RNA, 19 nt, Artificial Sequence
  Description of Artificial Sequence: Synthetic oligonucleotide
ugugaauauaacucgguaa

SEQ ID NO: 3215058 - RNA, 19 nt, Artificial Sequence
  Description of Artificial Sequence: Synthetic oligonucleotide
uguauagcaauaacaauuu

SEQ ID NO: 3215059 - RNA, 19 nt, Artificial Sequence
  Description of Artificial Sequence: Synthetic oligonucleotide
aacaaagaccuucacugca

SEQ ID NO: 3215060 - RNA, 19 nt, Artificial Sequence
  Description of Artificial Sequence: Synthetic oligonucleotide
gauguguggaccauuuugg

SEQ ID NO: 3215061 - RNA, 19 nt, Artificial Sequence
  Description of Artificial Sequence: Synthetic oligonucleotide
gugacaaauguauucagug

SEQ ID NO: 3215062 - RNA, 19 nt, Artificial Sequence
  Description of Artificial Sequence: Synthetic oligonucleotide
uauucagugacuagucaug

SEQ ID NO: 3215063 - RNA, 19 nt, Artificial Sequence
  Description of Artificial Sequence: Synthetic oligonucleotide
uaugauuauauaccauaga

SEQ ID NO: 3215064 - RNA, 19 nt, Artificial Sequence
  Description of Artificial Sequence: Synthetic oligonucleotide
guauccuuccccuugacug

SEQ ID NO: 3215065 - RNA, 19 nt, Artificial Sequence
  Description of Artificial Sequence: Synthetic oligonucleotide
cauggaaugucacaucagg

SEQ ID NO: 3215066 - RNA, 19 nt, Artificial Sequence
  Description of Artificial Sequence: Synthetic oligonucleotide
gugaauauaacucgguaac

SEQ ID NO: 3215067 - RNA, 19 nt, Artificial Sequence
  Description of Artificial Sequence: Synthetic oligonucleotide
auauauauauauuuauaua

SEQ ID NO: 3215068 - RNA, 19 nt, Artificial Sequence
  Description of Artificial Sequence: Synthetic oligonucleotide
ugcuuuugcacuaaugguc

SEQ ID NO: 3215069 - RNA, 19 nt, Artificial Sequence
  Description of Artificial Sequence: Synthetic oligonucleotide
ugauuauauaccauagaua

SEQ ID NO: 3215070 - RNA, 19 nt, Artificial Sequence
  Description of Artificial Sequence: Synthetic oligonucleotide
uugauauaguuaaaacaga

SEQ ID NO: 3215071 - RNA, 19 nt, Artificial Sequence
  Description of Artificial Sequence: Synthetic oligonucleotide
ucgaagaagaugcuuacuc

SEQ ID NO: 3215072 - RNA, 19 nt, Artificial Sequence
  Description of Artificial Sequence: Synthetic oligonucleotide
agcgaaacaaacacgaguc

SEQ ID NO: 3215073 - RNA, 19 nt, Artificial Sequence
  Description of Artificial Sequence: Synthetic oligonucleotide
aaaauaagaggggaacgug

SEQ ID NO: 3215074 - RNA, 19 nt, Artificial Sequence
  Description of Artificial Sequence: Synthetic oligonucleotide
ugguuauacccuuaguaug

SEQ ID NO: 3215075 - RNA, 19 nt, Artificial Sequence
  Description of Artificial Sequence: Synthetic oligonucleotide
uacaauuuuaaugauuuua

SEQ ID NO: 3215076 - RNA, 19 nt, Artificial Sequence
  Description of Artificial Sequence: Synthetic oligonucleotide
ugagaaaaguaacaguguu

SEQ ID NO: 3215077 - RNA, 19 nt, Artificial Sequence
  Description of Artificial Sequence: Synthetic oligonucleotide
uagcaauugcuuuagaaua

SEQ ID NO: 3215078 - RNA, 19 nt, Artificial Sequence
  Description of Artificial Sequence: Synthetic oligonucleotide
ucucaaagaaaacaucuuu

SEQ ID NO: 3215079 - RNA, 19 nt, Artificial Sequence
  Description of Artificial Sequence: Synthetic oligonucleotide
uuggauucaauuggaaugc

SEQ ID NO: 3215080 - RNA, 19 nt, Artificial Sequence
  Description of Artificial Sequence: Synthetic oligonucleotide
aacucuuaagcccucuuaa

SEQ ID NO: 3215081 - RNA, 19 nt, Artificial Sequence
  Description of Artificial Sequence: Synthetic oligonucleotide
cacguaaguucacauaucc

SEQ ID NO: 3215082 - RNA, 19 nt, Artificial Sequence
  Description of Artificial Sequence: Synthetic oligonucleotide
uuaugggcucccauuaacc

SEQ ID NO: 3215083 - RNA, 19 nt, Artificial Sequence
  Description of Artificial Sequence: Synthetic oligonucleotide
uaaaaccccguccccacgg

SEQ ID NO: 3215084 - RNA, 19 nt, Artificial Sequence
  Description of Artificial Sequence: Synthetic oligonucleotide
uuagcaauagcuguauccu

SEQ ID NO: 3215085 - RNA, 19 nt, Artificial Sequence
  Description of Artificial Sequence: Synthetic oligonucleotide
agugguuauacccuuagua

SEQ ID NO: 3215086 - RNA, 19 nt, Artificial Sequence
  Description of Artificial Sequence: Synthetic oligonucleotide
uggcaaaauggucaccuag

SEQ ID NO: 3215087 - RNA, 19 nt, Artificial Sequence
  Description of Artificial Sequence: Synthetic oligonucleotide
uagcaauaacaauuuaaca

SEQ ID NO: 3215088 - RNA, 19 nt, Artificial Sequence
  Description of Artificial Sequence: Synthetic oligonucleotide
acaugaagcaacucuuaag

SEQ ID NO: 3215089 - RNA, 19 nt, Artificial Sequence
  Description of Artificial Sequence: Synthetic oligonucleotide
guaguugaaacugagaaaa

SEQ ID NO: 3215090 - RNA, 19 nt, Artificial Sequence
  Description of Artificial Sequence: Synthetic oligonucleotide
ugugacaaauguauucagu

SEQ ID NO: 3215091 - RNA, 19 nt, Artificial Sequence
  Description of Artificial Sequence: Synthetic oligonucleotide
aauaaaaguacgcaggagg

SEQ ID NO: 3215092 - RNA, 19 nt, Artificial Sequence
  Description of Artificial Sequence: Synthetic oligonucleotide
ucuaauaaaaguacgcagg

SEQ ID NO: 3215093 - RNA, 19 nt, Artificial Sequence
  Description of Artificial Sequence: Synthetic oligonucleotide
uaugacagaaacuuggacc

SEQ ID NO: 3215094 - RNA, 19 nt, Artificial Sequence
  Description of Artificial Sequence: Synthetic oligonucleotide
ucuuaagagggcaagaccu

SEQ ID NO: 3215095 - RNA, 19 nt, Artificial Sequence
  Description of Artificial Sequence: Synthetic oligonucleotide
gacaaaucuucuuaagagg

SEQ ID NO: 3215096 - RNA, 19 nt, Artificial Sequence
  Description of Artificial Sequence: Synthetic oligonucleotide
auauuagaaguguaaacag

SEQ ID NO: 3215097 - RNA, 19 nt, Artificial Sequence
  Description of Artificial Sequence: Synthetic oligonucleotide
uucuaauaaaaguacgcag

SEQ ID NO: 3215098 - RNA, 19 nt, Artificial Sequence
  Description of Artificial Sequence: Synthetic oligonucleotide
aaacagguacaaaauauac

SEQ ID NO: 3215099 - RNA, 19 nt, Artificial Sequence
  Description of Artificial Sequence: Synthetic oligonucleotide
gagaaagccacuuacccag

SEQ ID NO: 3215100 - RNA, 19 nt, Artificial Sequence
  Description of Artificial Sequence: Synthetic oligonucleotide
agaaacuuggaccuagcuc

SEQ ID NO: 3215101 - RNA, 19 nt, Artificial Sequence
  Description of Artificial Sequence: Synthetic oligonucleotide
gaaagaaucuugcugcuug

SEQ ID NO: 3215102 - RNA, 19 nt, Artificial Sequence
  Description of Artificial Sequence: Synthetic oligonucleotide
uacauagaaacaaucuucu

SEQ ID NO: 3215103 - RNA, 19 nt, Artificial Sequence
  Description of Artificial Sequence: Synthetic oligonucleotide
ugaaugggcaccauggucu

SEQ ID NO: 3215104 - RNA, 19 nt, Artificial Sequence
  Description of Artificial Sequence: Synthetic oligonucleotide
aaaaguacgcaggagggag

SEQ ID NO: 3215105 - RNA, 19 nt, Artificial Sequence
  Description of Artificial Sequence: Synthetic oligonucleotide
ucuguuuugauaacaauuu

SEQ ID NO: 3215106 - RNA, 19 nt, Artificial Sequence
  Description of Artificial Sequence: Synthetic oligonucleotide
accucaaacccuuuccucc

SEQ ID NO: 3215107 - RNA, 19 nt, Artificial Sequence
  Description of Artificial Sequence: Synthetic oligonucleotide
agaaucuugcugcuuggcc

SEQ ID NO: 3215108 - RNA, 19 nt, Artificial Sequence
  Description of Artificial Sequence: Synthetic oligonucleotide
auuccaauuaccuccaagu

SEQ ID NO: 3215109 - RNA, 19 nt, Artificial Sequence
  Description of Artificial Sequence: Synthetic oligonucleotide
ggagucaucacccauuugg

SEQ ID NO: 3215110 - RNA, 19 nt, Artificial Sequence
  Description of Artificial Sequence: Synthetic oligonucleotide
gaaacuuggaccuagcucu

SEQ ID NO: 3215111 - RNA, 19 nt, Artificial Sequence
  Description of Artificial Sequence: Synthetic oligonucleotide
uggcauuccaauuaccucc

SEQ ID NO: 3215112 - RNA, 19 nt, Artificial Sequence
  Description of Artificial Sequence: Synthetic oligonucleotide
accaaugucccucucuggc

SEQ ID NO: 3215113 - RNA, 19 nt, Artificial Sequence
  Description of Artificial Sequence: Synthetic oligonucleotide
gaucugauccauuugugug

SEQ ID NO: 3215114 - RNA, 19 nt, Artificial Sequence
  Description of Artificial Sequence: Synthetic oligonucleotide
augacagaaacuuggaccu

SEQ ID NO: 3215115 - RNA, 19 nt, Artificial Sequence
  Description of Artificial Sequence: Synthetic oligonucleotide
uuucuaauaaaaguacgca

SEQ ID NO: 3215116 - RNA, 19 nt, Artificial Sequence
  Description of Artificial Sequence: Synthetic oligonucleotide
aauggcuguguguggaggg

SEQ ID NO: 3215117 - RNA, 19 nt, Artificial Sequence
  Description of Artificial Sequence: Synthetic oligonucleotide
ucuuaacuagucuauuucu

SEQ ID NO: 3215118 - RNA, 19 nt, Artificial Sequence
  Description of Artificial Sequence: Synthetic oligonucleotide
cuaggaaagaaucuugcug

SEQ ID NO: 3215119 - RNA, 19 nt, Artificial Sequence
  Description of Artificial Sequence: Synthetic oligonucleotide
gacagcacuguuaugacag

SEQ ID NO: 3215120 - RNA, 19 nt, Artificial Sequence
  Description of Artificial Sequence: Synthetic oligonucleotide
aaucccacuaugaagauau

SEQ ID NO: 3215121 - RNA, 19 nt, Artificial Sequence
  Description of Artificial Sequence: Synthetic oligonucleotide
uucuuaacuagucuauuuc

SEQ ID NO: 3215122 - RNA, 19 nt, Artificial Sequence
  Description of Artificial Sequence: Synthetic oligonucleotide
ggacaaaucuucuuaagag

SEQ ID NO: 3215123 - RNA, 19 nt, Artificial Sequence
  Description of Artificial Sequence: Synthetic oligonucleotide
acuguuaugacagaaacuu

SEQ ID NO: 3215124 - RNA, 19 nt, Artificial Sequence
  Description of Artificial Sequence: Synthetic oligonucleotide
aaaucuucuuaagagggca

SEQ ID NO: 3215125 - RNA, 19 nt, Artificial Sequence
  Description of Artificial Sequence: Synthetic oligonucleotide
caaagccaugguuugaagg

SEQ ID NO: 3215126 - RNA, 19 nt, Artificial Sequence
  Description of Artificial Sequence: Synthetic oligonucleotide
uuuacaccggaaauuccag

SEQ ID NO: 3215127 - RNA, 19 nt, Artificial Sequence
  Description of Artificial Sequence: Synthetic oligonucleotide
uucuuaagagggcaagacc

SEQ ID NO: 3215128 - RNA, 19 nt, Artificial Sequence
  Description of Artificial Sequence: Synthetic oligonucleotide
gacgcggaaacacacgggg

SEQ ID NO: 3215129 - RNA, 19 nt, Artificial Sequence
  Description of Artificial Sequence: Synthetic oligonucleotide
uuuugagcccuuuauuucu

SEQ ID NO: 3215130 - RNA, 19 nt, Artificial Sequence
  Description of Artificial Sequence: Synthetic oligonucleotide
ucuuccaaguuccuggaac

SEQ ID NO: 3215131 - RNA, 19 nt, Artificial Sequence
  Description of Artificial Sequence: Synthetic oligonucleotide
uuuuccaaaauaucaguua

SEQ ID NO: 3215132 - RNA, 19 nt, Artificial Sequence
  Description of Artificial Sequence: Synthetic oligonucleotide
gauauuccaggccagccug

SEQ ID NO: 3215133 - RNA, 19 nt, Artificial Sequence
  Description of Artificial Sequence: Synthetic oligonucleotide
uuaacuagucuauuucuaa

SEQ ID NO: 3215134 - RNA, 19 nt, Artificial Sequence
  Description of Artificial Sequence: Synthetic oligonucleotide
uacaccggaaauuccagcc

SEQ ID NO: 3215135 - RNA, 19 nt, Artificial Sequence
  Description of Artificial Sequence: Synthetic oligonucleotide
caggagaggagaaagggag

SEQ ID NO: 3215136 - RNA, 19 nt, Artificial Sequence
  Description of Artificial Sequence: Synthetic oligonucleotide
auaucaauauuagaagugu

SEQ ID NO: 3215137 - RNA, 19 nt, Artificial Sequence
  Description of Artificial Sequence: Synthetic oligonucleotide
caaacagagucccaugagc

SEQ ID NO: 3215138 - RNA, 19 nt, Artificial Sequence
  Description of Artificial Sequence: Synthetic oligonucleotide
ugaagagccaauccccggc

SEQ ID NO: 3215139 - RNA, 19 nt, Artificial Sequence
  Description of Artificial Sequence: Synthetic oligonucleotide
aaucuugcugcuuggccug

SEQ ID NO: 3215140 - RNA, 19 nt, Artificial Sequence
  Description of Artificial Sequence: Synthetic oligonucleotide
auuaccuccaagugccuag

SEQ ID NO: 3215141 - RNA, 19 nt, Artificial Sequence
  Description of Artificial Sequence: Synthetic oligonucleotide
aagaaucuugcugcuuggc

SEQ ID NO: 3215142 - RNA, 19 nt, Artificial Sequence
  Description of Artificial Sequence: Synthetic oligonucleotide
ugcaaacagagucccauga

SEQ ID NO: 3215143 - RNA, 19 nt, Artificial Sequence
  Description of Artificial Sequence: Synthetic oligonucleotide
aaagccacuuacccaguug

SEQ ID NO: 3215144 - RNA, 19 nt, Artificial Sequence
  Description of Artificial Sequence: Synthetic oligonucleotide
aaugggaauggcugugugu

SEQ ID NO: 3215145 - RNA, 19 nt, Artificial Sequence
  Description of Artificial Sequence: Synthetic oligonucleotide
ucaccaaugucccucucug

SEQ ID NO: 3215146 - RNA, 19 nt, Artificial Sequence
  Description of Artificial Sequence: Synthetic oligonucleotide
uugugugggacaaaucuuc

SEQ ID NO: 3215147 - RNA, 19 nt, Artificial Sequence
  Description of Artificial Sequence: Synthetic oligonucleotide
cacuaugaagauauuccag

SEQ ID NO: 3215148 - RNA, 19 nt, Artificial Sequence
  Description of Artificial Sequence: Synthetic oligonucleotide
ugaucugauccauuugugu

SEQ ID NO: 3215149 - RNA, 19 nt, Artificial Sequence
  Description of Artificial Sequence: Synthetic oligonucleotide
guacauagaaacaaucuuc

SEQ ID NO: 3215150 - RNA, 19 nt, Artificial Sequence
  Description of Artificial Sequence: Synthetic oligonucleotide
cuucucucaaaagaaacac

SEQ ID NO: 3215151 - RNA, 19 nt, Artificial Sequence
  Description of Artificial Sequence: Synthetic oligonucleotide
acaguacauagaaacaauc

SEQ ID NO: 3215152 - RNA, 19 nt, Artificial Sequence
  Description of Artificial Sequence: Synthetic oligonucleotide
guuugaaggggucgggagg

SEQ ID NO: 3215153 - RNA, 19 nt, Artificial Sequence
  Description of Artificial Sequence: Synthetic oligonucleotide
cacugaagagccaaucccc

SEQ ID NO: 3215154 - RNA, 19 nt, Artificial Sequence
  Description of Artificial Sequence: Synthetic oligonucleotide
uggccuggugcaaacagag

SEQ ID NO: 3215155 - RNA, 19 nt, Artificial Sequence
  Description of Artificial Sequence: Synthetic oligonucleotide
aaaugggaauggcugugug

SEQ ID NO: 3215156 - RNA, 19 nt, Artificial Sequence
  Description of Artificial Sequence: Synthetic oligonucleotide
cuaauaaaaguacgcagga

SEQ ID NO: 3215157 - RNA, 19 nt, Artificial Sequence
  Description of Artificial Sequence: Synthetic oligonucleotide
gaugaucugauccauuugu

SEQ ID NO: 3215158 - RNA, 19 nt, Artificial Sequence
  Description of Artificial Sequence: Synthetic oligonucleotide
gucuauuucuaauaaaagu

SEQ ID NO: 3215159 - RNA, 19 nt, Artificial Sequence
  Description of Artificial Sequence: Synthetic oligonucleotide
acagcggccacacuccccg

SEQ ID NO: 3215160 - RNA, 19 nt, Artificial Sequence
  Description of Artificial Sequence: Synthetic oligonucleotide
uacaguacauagaaacaau

SEQ ID NO: 3215161 - RNA, 19 nt, Artificial Sequence
  Description of Artificial Sequence: Synthetic oligonucleotide
aagggagccccucgggaac

SEQ ID NO: 3215162 - RNA, 19 nt, Artificial Sequence
  Description of Artificial Sequence: Synthetic oligonucleotide
uaucaauauuagaagugua

SEQ ID NO: 3215163 - RNA, 19 nt, Artificial Sequence
  Description of Artificial Sequence: Synthetic oligonucleotide
agcugaaugggcaccaugg

SEQ ID NO: 3215164 - RNA, 19 nt, Artificial Sequence
  Description of Artificial Sequence: Synthetic oligonucleotide
gcucuugaugaucugaucc

SEQ ID NO: 3215165 - RNA, 19 nt, Artificial Sequence
  Description of Artificial Sequence: Synthetic oligonucleotide
aacagagucccaugagccu

SEQ ID NO: 3215166 - RNA, 19 nt, Artificial Sequence
  Description of Artificial Sequence: Synthetic oligonucleotide
gagaaagggagccccucgg

SEQ ID NO: 3215167 - RNA, 19 nt, Artificial Sequence
  Description of Artificial Sequence: Synthetic oligonucleotide
accaguggcuacuuuaaca

SEQ ID NO: 3215168 - RNA, 19 nt, Artificial Sequence
  Description of Artificial Sequence: Synthetic oligonucleotide
aaauuccagccccaccuga

SEQ ID NO: 3215169 - RNA, 19 nt, Artificial Sequence
  Description of Artificial Sequence: Synthetic oligonucleotide
aagaaacaccugucuagcu

SEQ ID NO: 3215170 - RNA, 19 nt, Artificial Sequence
  Description of Artificial Sequence: Synthetic oligonucleotide
uguguguggagggacagca

SEQ ID NO: 3215171 - RNA, 19 nt, Artificial Sequence
  Description of Artificial Sequence: Synthetic oligonucleotide
accguccucggguucaggc

SEQ ID NO: 3215172 - RNA, 19 nt, Artificial Sequence
  Description of Artificial Sequence: Synthetic oligonucleotide
cucucagggagucaucacc

SEQ ID NO: 3215173 - RNA, 19 nt, Artificial Sequence
  Description of Artificial Sequence: Synthetic oligonucleotide
acugcuugaagggucuugg

SEQ ID NO: 3215174 - RNA, 19 nt, Artificial Sequence
  Description of Artificial Sequence: Synthetic oligonucleotide
gacagaaacuuggaccuag

SEQ ID NO: 3215175 - RNA, 19 nt, Artificial Sequence
  Description of Artificial Sequence: Synthetic oligonucleotide
uaacuagucuauuucuaau

SEQ ID NO: 3215176 - RNA, 19 nt, Artificial Sequence
  Description of Artificial Sequence: Synthetic oligonucleotide
gagucaucacccauuuggg

SEQ ID NO: 3215177 - RNA, 19 nt, Artificial Sequence
  Description of Artificial Sequence: Synthetic oligonucleotide
uuugugugggacaaaucuu

SEQ ID NO: 3215178 - RNA, 19 nt, Artificial Sequence
  Description of Artificial Sequence: Synthetic oligonucleotide
ggucgaugagcuuggagcg

SEQ ID NO: 3215179 - RNA, 19 nt, Artificial Sequence
  Description of Artificial Sequence: Synthetic oligonucleotide
gaaacagcggccacacucc

SEQ ID NO: 3215180 - RNA, 19 nt, Artificial Sequence
  Description of Artificial Sequence: Synthetic oligonucleotide
aaagggagccccucgggaa

SEQ ID NO: 3215181 - RNA, 19 nt, Artificial Sequence
  Description of Artificial Sequence: Synthetic oligonucleotide
uuugaaggggucgggagga

SEQ ID NO: 3215182 - RNA, 19 nt, Artificial Sequence
  Description of Artificial Sequence: Synthetic oligonucleotide
aacugaugguccacgagug

SEQ ID NO: 3215183 - RNA, 19 nt, Artificial Sequence
  Description of Artificial Sequence: Synthetic oligonucleotide
aagaugguaucuccacuau

SEQ ID NO: 3215184 - RNA, 19 nt, Artificial Sequence
  Description of Artificial Sequence: Synthetic oligonucleotide
gaaacacacgggguguggg

SEQ ID NO: 3215185 - RNA, 19 nt, Artificial Sequence
  Description of Artificial Sequence: Synthetic oligonucleotide
uuacaccggaaauuccagc

SEQ ID NO: 3215186 - RNA, 19 nt, Artificial Sequence
  Description of Artificial Sequence: Synthetic oligonucleotide
aaaaugggaauggcugugu

SEQ ID NO: 3215187 - RNA, 19 nt, Artificial Sequence
  Description of Artificial Sequence: Synthetic oligonucleotide
cuucuuaagagggcaagac

SEQ ID NO: 3215188 - RNA, 19 nt, Artificial Sequence
  Description of Artificial Sequence: Synthetic oligonucleotide
ugugugggacaaaucuucu

SEQ ID NO: 3215189 - RNA, 19 nt, Artificial Sequence
  Description of Artificial Sequence: Synthetic oligonucleotide
uagcucuaaucccacuaug

SEQ ID NO: 3215190 - RNA, 19 nt, Artificial Sequence
  Description of Artificial Sequence: Synthetic oligonucleotide
ugacgcggaaacacacggg

SEQ ID NO: 3215191 - RNA, 19 nt, Artificial Sequence
  Description of Artificial Sequence: Synthetic oligonucleotide
ucugauaucaguaaaccag

SEQ ID NO: 3215192 - RNA, 19 nt, Artificial Sequence
  Description of Artificial Sequence: Synthetic oligonucleotide
aaaccaguggacaugagcc

SEQ ID NO: 3215193 - RNA, 19 nt, Artificial Sequence
  Description of Artificial Sequence: Synthetic oligonucleotide
gaugguguugcuuuaaucc

SEQ ID NO: 3215194 - RNA, 19 nt, Artificial Sequence
  Description of Artificial Sequence: Synthetic oligonucleotide
ucuaguagaaguuugacau

SEQ ID NO: 3215195 - RNA, 19 nt, Artificial Sequence
  Description of Artificial Sequence: Synthetic oligonucleotide
uuucauagcaucuaguaga

SEQ ID NO: 3215196 - RNA, 19 nt, Artificial Sequence
  Description of Artificial Sequence: Synthetic oligonucleotide
uaacaguacagccugagug

SEQ ID NO: 3215197 - RNA, 19 nt, Artificial Sequence
  Description of Artificial Sequence: Synthetic oligonucleotide
aaaacaaucugagacguug

SEQ ID NO: 3215198 - RNA, 19 nt, Artificial Sequence
  Description of Artificial Sequence: Synthetic oligonucleotide
uuuaauccaaaaugcaacc

SEQ ID NO: 3215199 - RNA, 19 nt, Artificial Sequence
  Description of Artificial Sequence: Synthetic oligonucleotide
cuuuaauccaaaaugcaac

SEQ ID NO: 3215200 - RNA, 19 nt, Artificial Sequence
  Description of Artificial Sequence: Synthetic oligonucleotide
auaucaguaaaccagugga

SEQ ID NO: 3215201 - RNA, 19 nt, Artificial Sequence
  Description of Artificial Sequence: Synthetic oligonucleotide
gauaucaguaaaccagugg

SEQ ID NO: 3215202 - RNA, 19 nt, Artificial Sequence
  Description of Artificial Sequence: Synthetic oligonucleotide
uuuguuaacaguacagccu

SEQ ID NO: 3215203 - RNA, 19 nt, Artificial Sequence
  Description of Artificial Sequence: Synthetic oligonucleotide
uugcuuuaauccaaaaugc

SEQ ID NO: 3215204 - RNA, 19 nt, Artificial Sequence
  Description of Artificial Sequence: Synthetic oligonucleotide
guagaaguuugacauaagg

SEQ ID NO: 3215205 - RNA, 19 nt, Artificial Sequence
  Description of Artificial Sequence: Synthetic oligonucleotide
cuuuguuaacaguacagcc

SEQ ID NO: 3215206 - RNA, 19 nt, Artificial Sequence
  Description of Artificial Sequence: Synthetic oligonucleotide
uaauccaaaaugcaaccug

SEQ ID NO: 3215207 - RNA, 19 nt, Artificial Sequence
  Description of Artificial Sequence: Synthetic oligonucleotide
aaucugagacguugaagcg

SEQ ID NO: 3215208 - RNA, 19 nt, Artificial Sequence
  Description of Artificial Sequence: Synthetic oligonucleotide
acguugaagcgucaaaccc

SEQ ID NO: 3215209 - RNA, 19 nt, Artificial Sequence
  Description of Artificial Sequence: Synthetic oligonucleotide
auuucauucacaagugagc

SEQ ID NO: 3215210 - RNA, 19 nt, Artificial Sequence
  Description of Artificial Sequence: Synthetic oligonucleotide
ucuggcacaaaacaaucug

SEQ ID NO: 3215211 - RNA, 19 nt, Artificial Sequence
  Description of Artificial Sequence: Synthetic oligonucleotide
uaaaccaguggacaugagc

SEQ ID NO: 3215212 - RNA, 19 nt, Artificial Sequence
  Description of Artificial Sequence: Synthetic oligonucleotide
acaaugaucgaacgcgugg

SEQ ID NO: 3215213 - RNA, 19 nt, Artificial Sequence
  Description of Artificial Sequence: Synthetic oligonucleotide
aaccaguggacaugagccc

SEQ ID NO: 3215214 - RNA, 19 nt, Artificial Sequence
  Description of Artificial Sequence: Synthetic oligonucleotide
gucuucaggagcaugagcg

SEQ ID NO: 3215215 - RNA, 19 nt, Artificial Sequence
  Description of Artificial Sequence: Synthetic oligonucleotide
uguuauucuggcacaaaac

SEQ ID NO: 3215216 - RNA, 19 nt, Artificial Sequence
  Description of Artificial Sequence: Synthetic oligonucleotide
ugggugacgacucugcuca

SEQ ID NO: 3215217 - RNA, 19 nt, Artificial Sequence
  Description of Artificial Sequence: Synthetic oligonucleotide
uuucauucacaagugagca

SEQ ID NO: 3215218 - RNA, 19 nt, Artificial Sequence
  Description of Artificial Sequence: Synthetic oligonucleotide
uggcacaaaacaaucugag

SEQ ID NO: 3215219 - RNA, 19 nt, Artificial Sequence
  Description of Artificial Sequence: Synthetic oligonucleotide
auaaggguucgucucuagc

SEQ ID NO: 3215220 - RNA, 19 nt, Artificial Sequence
  Description of Artificial Sequence: Synthetic oligonucleotide
guuucauagcaucuaguag

SEQ ID NO: 3215221 - RNA, 19 nt, Artificial Sequence
  Description of Artificial Sequence: Synthetic oligonucleotide
ugacguuuccaucacaguc

SEQ ID NO: 3215222 - RNA, 19 nt, Artificial Sequence
  Description of Artificial Sequence: Synthetic oligonucleotide
uguuucauagcaucuagua

SEQ ID NO: 3215223 - RNA, 19 nt, Artificial Sequence
  Description of Artificial Sequence: Synthetic oligonucleotide
aaaugucugauaucaguaa

SEQ ID NO: 3215224 - RNA, 19 nt, Artificial Sequence
  Description of Artificial Sequence: Synthetic oligonucleotide
aguguuucauagcaucuag

SEQ ID NO: 3215225 - RNA, 19 nt, Artificial Sequence
  Description of Artificial Sequence: Synthetic oligonucleotide
ugcuuuaauccaaaaugca

SEQ ID NO: 3215226 - RNA, 19 nt, Artificial Sequence
  Description of Artificial Sequence: Synthetic oligonucleotide
gcacaaaacaaucugagac

SEQ ID NO: 3215227 - RNA, 19 nt, Artificial Sequence
  Description of Artificial Sequence: Synthetic oligonucleotide
ugaucgaacgcguggauga

SEQ ID NO: 3215228 - RNA, 19 nt, Artificial Sequence
  Description of Artificial Sequence: Synthetic oligonucleotide
ugucugauaucaguaaacc

SEQ ID NO: 3215229 - RNA, 19 nt, Artificial Sequence
  Description of Artificial Sequence: Synthetic oligonucleotide
caaccugaagauuucauuc

SEQ ID NO: 3215230 - RNA, 19 nt, Artificial Sequence
  Description of Artificial Sequence: Synthetic oligonucleotide
ucauucacaagugagcagu

SEQ ID NO: 3215231 - RNA, 19 nt, Artificial Sequence
  Description of Artificial Sequence: Synthetic oligonucleotide
aagauuucauucacaagug

SEQ ID NO: 3215232 - RNA, 19 nt, Artificial Sequence
  Description of Artificial Sequence: Synthetic oligonucleotide
gcucaugugagccugauug

SEQ ID NO: 3215233 - RNA, 19 nt, Artificial Sequence
  Description of Artificial Sequence: Synthetic oligonucleotide
uugacauaaggguucgucu

SEQ ID NO: 3215234 - RNA, 19 nt, Artificial Sequence
  Description of Artificial Sequence: Synthetic oligonucleotide
ucacaagugagcagucucc

SEQ ID NO: 3215235 - RNA, 19 nt, Artificial Sequence
  Description of Artificial Sequence: Synthetic oligonucleotide
agacguugaagcgucaaac

SEQ ID NO: 3215236 - RNA, 19 nt, Artificial Sequence
  Description of Artificial Sequence: Synthetic oligonucleotide
aaaugcaaccugaagauuu

SEQ ID NO: 3215237 - RNA, 19 nt, Artificial Sequence
  Description of Artificial Sequence: Synthetic oligonucleotide
augagcccgacaaugaucg

SEQ ID NO: 3215238 - RNA, 19 nt, Artificial Sequence
  Description of Artificial Sequence: Synthetic oligonucleotide
aauccaaaaugcaaccuga

SEQ ID NO: 3215239 - RNA, 19 nt, Artificial Sequence
  Description of Artificial Sequence: Synthetic oligonucleotide
uaucaguaaaccaguggac

SEQ ID NO: 3215240 - RNA, 19 nt, Artificial Sequence
  Description of Artificial Sequence: Synthetic oligonucleotide
agaaaagugucucccuuug

SEQ ID NO: 3215241 - RNA, 19 nt, Artificial Sequence
  Description of Artificial Sequence: Synthetic oligonucleotide
gacguugaagcgucaaacc

SEQ ID NO: 3215242 - RNA, 19 nt, Artificial Sequence
  Description of Artificial Sequence: Synthetic oligonucleotide
aucuaguagaaguuugaca

SEQ ID NO: 3215243 - RNA, 19 nt, Artificial Sequence
  Description of Artificial Sequence: Synthetic oligonucleotide
gaacgcguggaugagcucg

SEQ ID NO: 3215244 - RNA, 19 nt, Artificial Sequence
  Description of Artificial Sequence: Synthetic oligonucleotide
ucaugugagccugauugcg

SEQ ID NO: 3215245 - RNA, 19 nt, Artificial Sequence
  Description of Artificial Sequence: Synthetic oligonucleotide
ugaguguuucauagcaucu

SEQ ID NO: 3215246 - RNA, 19 nt, Artificial Sequence
  Description of Artificial Sequence: Synthetic oligonucleotide
aaugcaaccugaagauuuc

SEQ ID NO: 3215247 - RNA, 19 nt, Artificial Sequence
  Description of Artificial Sequence: Synthetic oligonucleotide
ugauaucaguaaaccagug

SEQ ID NO: 3215248 - RNA, 19 nt, Artificial Sequence
  Description of Artificial Sequence: Synthetic oligonucleotide
uucacaagugagcagucuc

SEQ ID NO: 3215249 - RNA, 19 nt, Artificial Sequence
  Description of Artificial Sequence: Synthetic oligonucleotide
ucuucaggagcaugagcgg

SEQ ID NO: 3215250 - RNA, 19 nt, Artificial Sequence
  Description of Artificial Sequence: Synthetic oligonucleotide
ucugagacguugaagcguc

SEQ ID NO: 3215251 - RNA, 19 nt, Artificial Sequence
  Description of Artificial Sequence: Synthetic oligonucleotide
uccgcugacguuuccauca

SEQ ID NO: 3215252 - RNA, 19 nt, Artificial Sequence
  Description of Artificial Sequence: Synthetic oligonucleotide
aaagugucucccuuuguua

SEQ ID NO: 3215253 - RNA, 19 nt, Artificial Sequence
  Description of Artificial Sequence: Synthetic oligonucleotide
aagugucucccuuuguuaa

SEQ ID NO: 3215254 - RNA, 19 nt, Artificial Sequence
  Description of Artificial Sequence: Synthetic oligonucleotide
uaguagaaguuugacauaa

SEQ ID NO: 3215255 - RNA, 19 nt, Artificial Sequence
  Description of Artificial Sequence: Synthetic oligonucleotide
uucauagcaucuaguagaa

SEQ ID NO: 3215256 - RNA, 19 nt, Artificial Sequence
  Description of Artificial Sequence: Synthetic oligonucleotide
uuugacauaaggguucguc

SEQ ID NO: 3215257 - RNA, 19 nt, Artificial Sequence
  Description of Artificial Sequence: Synthetic oligonucleotide
uccacugaggcuugcagcu

SEQ ID NO: 3215258 - RNA, 19 nt, Artificial Sequence
  Description of Artificial Sequence: Synthetic oligonucleotide
ugacauaaggguucgucuc

SEQ ID NO: 3215259 - RNA, 19 nt, Artificial Sequence
  Description of Artificial Sequence: Synthetic oligonucleotide
cugaguguuucauagcauc

SEQ ID NO: 3215260 - RNA, 19 nt, Artificial Sequence
  Description of Artificial Sequence: Synthetic oligonucleotide
augucugauaucaguaaac

SEQ ID NO: 3215261 - RNA, 19 nt, Artificial Sequence
  Description of Artificial Sequence: Synthetic oligonucleotide
cauagcaucuaguagaagu

SEQ ID NO: 3215262 - RNA, 19 nt, Artificial Sequence
  Description of Artificial Sequence: Synthetic oligonucleotide
ucuccgagcacgccaaaug

SEQ ID NO: 3215263 - RNA, 19 nt, Artificial Sequence
  Description of Artificial Sequence: Synthetic oligonucleotide
aguacagccugaguguuuc

SEQ ID NO: 3215264 - RNA, 19 nt, Artificial Sequence
  Description of Artificial Sequence: Synthetic oligonucleotide
aagaaaagugucucccuuu

SEQ ID NO: 3215265 - RNA, 19 nt, Artificial Sequence
  Description of Artificial Sequence: Synthetic oligonucleotide
gagcgggcaacucuggucc

SEQ ID NO: 3215266 - RNA, 19 nt, Artificial Sequence
  Description of Artificial Sequence: Synthetic oligonucleotide
uucauucacaagugagcag

SEQ ID NO: 3215267 - RNA, 19 nt, Artificial Sequence
  Description of Artificial Sequence: Synthetic oligonucleotide
uuaauccaaaaugcaaccu

SEQ ID NO: 3215268 - RNA, 19 nt, Artificial Sequence
  Description of Artificial Sequence: Synthetic oligonucleotide
ugcagcucggaucuccgag

SEQ ID NO: 3215269 - RNA, 19 nt, Artificial Sequence
  Description of Artificial Sequence: Synthetic oligonucleotide
ucaguaaaccaguggacau

SEQ ID NO: 3215270 - RNA, 19 nt, Artificial Sequence
  Description of Artificial Sequence: Synthetic oligonucleotide
auguuauucuggcacaaaa

SEQ ID NO: 3215271 - RNA, 19 nt, Artificial Sequence
  Description of Artificial Sequence: Synthetic oligonucleotide
gauugcggauguuauucug

SEQ ID NO: 3215272 - RNA, 19 nt, Artificial Sequence
  Description of Artificial Sequence: Synthetic oligonucleotide
gacucugcucaugugagcc

SEQ ID NO: 3215273 - RNA, 19 nt, Artificial Sequence
  Description of Artificial Sequence: Synthetic oligonucleotide
gaagcgucaaacccuccgc

SEQ ID NO: 3215274 - RNA, 19 nt, Artificial Sequence
  Description of Artificial Sequence: Synthetic oligonucleotide
caugugagccugauugcgg

SEQ ID NO: 3215275 - RNA, 19 nt, Artificial Sequence
  Description of Artificial Sequence: Synthetic oligonucleotide
agugucucccuuuguuaac

SEQ ID NO: 3215276 - RNA, 19 nt, Artificial Sequence
  Description of Artificial Sequence: Synthetic oligonucleotide
gaagaggcuggagaggaag

SEQ ID NO: 3215277 - RNA, 19 nt, Artificial Sequence
  Description of Artificial Sequence: Synthetic oligonucleotide
ucuucgcaagaaaaguguc

SEQ ID NO: 3215278 - RNA, 19 nt, Artificial Sequence
  Description of Artificial Sequence: Synthetic oligonucleotide
aacaaucugagacguugaa

SEQ ID NO: 3215279 - RNA, 19 nt, Artificial Sequence
  Description of Artificial Sequence: Synthetic oligonucleotide
ucuccacugaggcuugcag

SEQ ID NO: 3215280 - RNA, 19 nt, Artificial Sequence
  Description of Artificial Sequence: Synthetic oligonucleotide
auugcggauguuauucugg

SEQ ID NO: 3215281 - RNA, 19 nt, Artificial Sequence
  Description of Artificial Sequence: Synthetic oligonucleotide
aucaguaaaccaguggaca

SEQ ID NO: 3215282 - RNA, 19 nt, Artificial Sequence
  Description of Artificial Sequence: Synthetic oligonucleotide
augguguugcuuuaaucca

SEQ ID NO: 3215283 - RNA, 19 nt, Artificial Sequence
  Description of Artificial Sequence: Synthetic oligonucleotide
cagccugaguguuucauag

SEQ ID NO: 3215284 - RNA, 19 nt, Artificial Sequence
  Description of Artificial Sequence: Synthetic oligonucleotide
ggagaggaagcccugcugg

SEQ ID NO: 3215285 - RNA, 19 nt, Artificial Sequence
  Description of Artificial Sequence: Synthetic oligonucleotide
auucuggcacaaaacaauc

SEQ ID NO: 3215286 - RNA, 19 nt, Artificial Sequence
  Description of Artificial Sequence: Synthetic oligonucleotide
uucgcaagaaaagugucuc

SEQ ID NO: 3215287 - RNA, 19 nt, Artificial Sequence
  Description of Artificial Sequence: Synthetic oligonucleotide
agccaugcggcccgcaggc

SEQ ID NO: 3215288 - RNA, 19 nt, Artificial Sequence
  Description of Artificial Sequence: Synthetic oligonucleotide
agauuucauucacaaguga

SEQ ID NO: 3215289 - RNA, 19 nt, Artificial Sequence
  Description of Artificial Sequence: Synthetic oligonucleotide
aguuugacauaaggguucg

SEQ ID NO: 3215290 - RNA, 19 nt, Artificial Sequence
  Description of Artificial Sequence: Synthetic oligonucleotide
cugauugcggauguuauuc

SEQ ID NO: 3215291 - RNA, 19 nt, Artificial Sequence
  Description of Artificial Sequence: Synthetic oligonucleotide
uuuggaauccaacaaauag

SEQ ID NO: 3215292 - RNA, 19 nt, Artificial Sequence
  Description of Artificial Sequence: Synthetic oligonucleotide
gaauccaacaaauagcaag

SEQ ID NO: 3215293 - RNA, 19 nt, Artificial Sequence
  Description of Artificial Sequence: Synthetic oligonucleotide
auauucucuuuguagaacc

SEQ ID NO: 3215294 - RNA, 19 nt, Artificial Sequence
  Description of Artificial Sequence: Synthetic oligonucleotide
uuuugaagaacccagacua

SEQ ID NO: 3215295 - RNA, 19 nt, Artificial Sequence
  Description of Artificial Sequence: Synthetic oligonucleotide
uuuaacggggaacaguacg

SEQ ID NO: 3215296 - RNA, 19 nt, Artificial Sequence
  Description of Artificial Sequence: Synthetic oligonucleotide
agacagauggcucaggucg

SEQ ID NO: 3215297 - RNA, 19 nt, Artificial Sequence
  Description of Artificial Sequence: Synthetic oligonucleotide
gauccaucacucuauaugg

SEQ ID NO: 3215298 - RNA, 19 nt, Artificial Sequence
  Description of Artificial Sequence: Synthetic oligonucleotide
aagacugggguguuggacc

SEQ ID NO: 3215299 - RNA, 19 nt, Artificial Sequence
  Description of Artificial Sequence: Synthetic oligonucleotide
aauccaacaaauagcaagg

SEQ ID NO: 3215300 - RNA, 19 nt, Artificial Sequence
  Description of Artificial Sequence: Synthetic oligonucleotide
aacgaguuacuuuggaauc

SEQ ID NO: 3215301 - RNA, 19 nt, Artificial Sequence
  Description of Artificial Sequence: Synthetic oligonucleotide
aacaguacguuccccaggg

SEQ ID NO: 3215302 - RNA, 19 nt, Artificial Sequence
  Description of Artificial Sequence: Synthetic oligonucleotide
uggaauccaacaaauagca

SEQ ID NO: 3215303 - RNA, 19 nt, Artificial Sequence
  Description of Artificial Sequence: Synthetic oligonucleotide
ucuauauggacaccggcag

SEQ ID NO: 3215304 - RNA, 19 nt, Artificial Sequence
  Description of Artificial Sequence: Synthetic oligonucleotide
ugaagaacccagacuaugg

SEQ ID NO: 3215305 - RNA, 19 nt, Artificial Sequence
  Description of Artificial Sequence: Synthetic oligonucleotide
aaacgaguuacuuuggaau

SEQ ID NO: 3215306 - RNA, 19 nt, Artificial Sequence
  Description of Artificial Sequence: Synthetic oligonucleotide
ugcuauauucucuuuguag

SEQ ID NO: 3215307 - RNA, 19 nt, Artificial Sequence
  Description of Artificial Sequence: Synthetic oligonucleotide
aaauagcaagguccggggc

SEQ ID NO: 3215308 - RNA, 19 nt, Artificial Sequence
  Description of Artificial Sequence: Synthetic oligonucleotide
auaggcaaagcgcuuggcc

SEQ ID NO: 3215309 - RNA, 19 nt, Artificial Sequence
  Description of Artificial Sequence: Synthetic oligonucleotide
gguucugguagacagaugg

SEQ ID NO: 3215310 - RNA, 19 nt, Artificial Sequence
  Description of Artificial Sequence: Synthetic oligonucleotide
caaagugacuugcugaacg

SEQ ID NO: 3215311 - RNA, 19 nt, Artificial Sequence
  Description of Artificial Sequence: Synthetic oligonucleotide
ccaacaaauagcaaggucc

SEQ ID NO: 3215312 - RNA, 19 nt, Artificial Sequence
  Description of Artificial Sequence: Synthetic oligonucleotide
uauggcagggagcaucucg

SEQ ID NO: 3215313 - RNA, 19 nt, Artificial Sequence
  Description of Artificial Sequence: Synthetic oligonucleotide
aagugugugguccagugga

SEQ ID NO: 3215314 - RNA, 19 nt, Artificial Sequence
  Description of Artificial Sequence: Synthetic oligonucleotide
aggaccuccugcuauauuc

SEQ ID NO: 3215315 - RNA, 19 nt, Artificial Sequence
  Description of Artificial Sequence: Synthetic oligonucleotide
caacaaauagcaagguccg

SEQ ID NO: 3215316 - RNA, 19 nt, Artificial Sequence
  Description of Artificial Sequence: Synthetic oligonucleotide
guuacuuuggaauccaaca

SEQ ID NO: 3215317 - RNA, 19 nt, Artificial Sequence
  Description of Artificial Sequence: Synthetic oligonucleotide
uuggccaugcugaacacag

SEQ ID NO: 3215318 - RNA, 19 nt, Artificial Sequence
  Description of Artificial Sequence: Synthetic oligonucleotide
acuugcugaacguuguggg

SEQ ID NO: 3215319 - RNA, 19 nt, Artificial Sequence
  Description of Artificial Sequence: Synthetic oligonucleotide
ugagaauggaagcuuguac

SEQ ID NO: 3215320 - RNA, 19 nt, Artificial Sequence
  Description of Artificial Sequence: Synthetic oligonucleotide
aauggaagcuuguacuggu

SEQ ID NO: 3215321 - RNA, 19 nt, Artificial Sequence
  Description of Artificial Sequence: Synthetic oligonucleotide
acucuauauggacaccggc

SEQ ID NO: 3215322 - RNA, 19 nt, Artificial Sequence
  Description of Artificial Sequence: Synthetic oligonucleotide
aaaacgaguuacuuuggaa

SEQ ID NO: 3215323 - RNA, 19 nt, Artificial Sequence
  Description of Artificial Sequence: Synthetic oligonucleotide
acaaauagcaagguccggg

SEQ ID NO: 3215324 - RNA, 19 nt, Artificial Sequence
  Description of Artificial Sequence: Synthetic oligonucleotide
uuacuuuggaauccaacaa

SEQ ID NO: 3215325 - RNA, 19 nt, Artificial Sequence
  Description of Artificial Sequence: Synthetic oligonucleotide
ucuuuguagaaccaauuuu

SEQ ID NO: 3215326 - RNA, 19 nt, Artificial Sequence
  Description of Artificial Sequence: Synthetic oligonucleotide
aaacguuuaacggggaaca

SEQ ID NO: 3215327 - RNA, 19 nt, Artificial Sequence
  Description of Artificial Sequence: Synthetic oligonucleotide
ucacucuauauggacaccg

SEQ ID NO: 3215328 - RNA, 19 nt, Artificial Sequence
  Description of Artificial Sequence: Synthetic oligonucleotide
ugaaucuucucaacgcugu

SEQ ID NO: 3215329 - RNA, 19 nt, Artificial Sequence
  Description of Artificial Sequence: Synthetic oligonucleotide
aagaacccagacuauggca

SEQ ID NO: 3215330 - RNA, 19 nt, Artificial Sequence
  Description of Artificial Sequence: Synthetic oligonucleotide
uucucaacgcuguaguggc

SEQ ID NO: 3215331 - RNA, 19 nt, Artificial Sequence
  Description of Artificial Sequence: Synthetic oligonucleotide
agaauggaagcuuguacug

SEQ ID NO: 3215332 - RNA, 19 nt, Artificial Sequence
  Description of Artificial Sequence: Synthetic oligonucleotide
uauauggacaccggcagcc

SEQ ID NO: 3215333 - RNA, 19 nt, Artificial Sequence
  Description of Artificial Sequence: Synthetic oligonucleotide
uuaacggggaacaguacgu

SEQ ID NO: 3215334 - RNA, 19 nt, Artificial Sequence
  Description of Artificial Sequence: Synthetic oligonucleotide
uaccguauguuggagaugc

SEQ ID NO: 3215335 - RNA, 19 nt, Artificial Sequence
  Description of Artificial Sequence: Synthetic oligonucleotide
ucaggucggguauacacag

SEQ ID NO: 3215336 - RNA, 19 nt, Artificial Sequence
  Description of Artificial Sequence: Synthetic oligonucleotide
aaagugacuugcugaacgu

SEQ ID NO: 3215337 - RNA, 19 nt, Artificial Sequence
  Description of Artificial Sequence: Synthetic oligonucleotide
caaauagcaagguccgggg

SEQ ID NO: 3215338 - RNA, 19 nt, Artificial Sequence
  Description of Artificial Sequence: Synthetic oligonucleotide
cagccaaacguuuaacggg

SEQ ID NO: 3215339 - RNA, 19 nt, Artificial Sequence
  Description of Artificial Sequence: Synthetic oligonucleotide
ugugugguccaguggauag

SEQ ID NO: 3215340 - RNA, 19 nt, Artificial Sequence
  Description of Artificial Sequence: Synthetic oligonucleotide
uauaccguauguuggagau

SEQ ID NO: 3215341 - RNA, 19 nt, Artificial Sequence
  Description of Artificial Sequence: Synthetic oligonucleotide
aacggggaacaguacguuc

SEQ ID NO: 3215342 - RNA, 19 nt, Artificial Sequence
  Description of Artificial Sequence: Synthetic oligonucleotide
acacagcagguccaggacc

SEQ ID NO: 3215343 - RNA, 19 nt, Artificial Sequence
  Description of Artificial Sequence: Synthetic oligonucleotide
aacguugugggagccaggg

SEQ ID NO: 3215344 - RNA, 19 nt, Artificial Sequence
  Description of Artificial Sequence: Synthetic oligonucleotide
gucggguauacacagcagg

SEQ ID NO: 3215345 - RNA, 19 nt, Artificial Sequence
  Description of Artificial Sequence: Synthetic oligonucleotide
uacuuuggaauccaacaaa

SEQ ID NO: 3215346 - RNA, 19 nt, Artificial Sequence
  Description of Artificial Sequence: Synthetic oligonucleotide
uaagugugugguccagugg

SEQ ID NO: 3215347 - RNA, 19 nt, Artificial Sequence
  Description of Artificial Sequence: Synthetic oligonucleotide
aaucuucucaacgcuguag

SEQ ID NO: 3215348 - RNA, 19 nt, Artificial Sequence
  Description of Artificial Sequence: Synthetic oligonucleotide
gaagaacccagacuauggc

SEQ ID NO: 3215349 - RNA, 19 nt, Artificial Sequence
  Description of Artificial Sequence: Synthetic oligonucleotide
uaggcaaagcgcuuggcca

SEQ ID NO: 3215350 - RNA, 19 nt, Artificial Sequence
  Description of Artificial Sequence: Synthetic oligonucleotide
uccugcuauauucucuuug

SEQ ID NO: 3215351 - RNA, 19 nt, Artificial Sequence
  Description of Artificial Sequence: Synthetic oligonucleotide
caguggauaggcaaagcgc

SEQ ID NO: 3215352 - RNA, 19 nt, Artificial Sequence
  Description of Artificial Sequence: Synthetic oligonucleotide
acgaguuacuuuggaaucc

SEQ ID NO: 3215353 - RNA, 19 nt, Artificial Sequence
  Description of Artificial Sequence: Synthetic oligonucleotide
gaauggaagcuuguacugg

SEQ ID NO: 3215354 - RNA, 19 nt, Artificial Sequence
  Description of Artificial Sequence: Synthetic oligonucleotide
caucacucuauauggacac

SEQ ID NO: 3215355 - RNA, 19 nt, Artificial Sequence
  Description of Artificial Sequence: Synthetic oligonucleotide
cuucucaacgcuguagugg

SEQ ID NO: 3215356 - RNA, 19 nt, Artificial Sequence
  Description of Artificial Sequence: Synthetic oligonucleotide
ggauccaucacucuauaug

SEQ ID NO: 3215357 - RNA, 19 nt, Artificial Sequence
  Description of Artificial Sequence: Synthetic oligonucleotide
aaagcgcuuggccaugcug

SEQ ID NO: 3215358 - RNA, 19 nt, Artificial Sequence
  Description of Artificial Sequence: Synthetic oligonucleotide
agggcugcgguucugguag

SEQ ID NO: 3215359 - RNA, 19 nt, Artificial Sequence
  Description of Artificial Sequence: Synthetic oligonucleotide
uggaagcuuguacugguug

SEQ ID NO: 3215360 - RNA, 19 nt, Artificial Sequence
  Description of Artificial Sequence: Synthetic oligonucleotide
aggccuaaguguguggucc

SEQ ID NO: 3215361 - RNA, 19 nt, Artificial Sequence
  Description of Artificial Sequence: Synthetic oligonucleotide
ggugguauaccguauguug

SEQ ID NO: 3215362 - RNA, 19 nt, Artificial Sequence
  Description of Artificial Sequence: Synthetic oligonucleotide
gaugcgcuccuccaugggg

SEQ ID NO: 3215363 - RNA, 19 nt, Artificial Sequence
  Description of Artificial Sequence: Synthetic oligonucleotide
aguuacuuuggaauccaac

SEQ ID NO: 3215364 - RNA, 19 nt, Artificial Sequence
  Description of Artificial Sequence: Synthetic oligonucleotide
uccaucacucuauauggac

SEQ ID NO: 3215365 - RNA, 19 nt, Artificial Sequence
  Description of Artificial Sequence: Synthetic oligonucleotide
ugcaaagugacuugcugaa

SEQ ID NO: 3215366 - RNA, 19 nt, Artificial Sequence
  Description of Artificial Sequence: Synthetic oligonucleotide
uccaacaaauagcaagguc

SEQ ID NO: 3215367 - RNA, 19 nt, Artificial Sequence
  Description of Artificial Sequence: Synthetic oligonucleotide
uauauucucuuuguagaac

SEQ ID NO: 3215368 - RNA, 19 nt, Artificial Sequence
  Description of Artificial Sequence: Synthetic oligonucleotide
agacugggguguuggaccc

SEQ ID NO: 3215369 - RNA, 19 nt, Artificial Sequence
  Description of Artificial Sequence: Synthetic oligonucleotide
ucugguagacagauggcuc

SEQ ID NO: 3215370 - RNA, 19 nt, Artificial Sequence
  Description of Artificial Sequence: Synthetic oligonucleotide
uuggaccccagugagaaug

SEQ ID NO: 3215371 - RNA, 19 nt, Artificial Sequence
  Description of Artificial Sequence: Synthetic oligonucleotide
gagaauggaagcuuguacu

SEQ ID NO: 3215372 - RNA, 19 nt, Artificial Sequence
  Description of Artificial Sequence: Synthetic oligonucleotide
gcagccaaacguuuaacgg

SEQ ID NO: 3215373 - RNA, 19 nt, Artificial Sequence
  Description of Artificial Sequence: Synthetic oligonucleotide
gaacaguacguuccccagg

SEQ ID NO: 3215374 - RNA, 19 nt, Artificial Sequence
  Description of Artificial Sequence: Synthetic oligonucleotide
cuaagugugugguccagug

SEQ ID NO: 3215375 - RNA, 19 nt, Artificial Sequence
  Description of Artificial Sequence: Synthetic oligonucleotide
uauguuggagaugcgcucc

SEQ ID NO: 3215376 - RNA, 19 nt, Artificial Sequence
  Description of Artificial Sequence: Synthetic oligonucleotide
agaacccagacuauggcag

SEQ ID NO: 3215377 - RNA, 19 nt, Artificial Sequence
  Description of Artificial Sequence: Synthetic oligonucleotide
gugguauaccguauguugg

SEQ ID NO: 3215378 - RNA, 19 nt, Artificial Sequence
  Description of Artificial Sequence: Synthetic oligonucleotide
uugaagaacccagacuaug

SEQ ID NO: 3215379 - RNA, 19 nt, Artificial Sequence
  Description of Artificial Sequence: Synthetic oligonucleotide
gacuugcugaacguugugg

SEQ ID NO: 3215380 - RNA, 19 nt, Artificial Sequence
  Description of Artificial Sequence: Synthetic oligonucleotide
gaagcuuguacugguuggg

SEQ ID NO: 3215381 - RNA, 19 nt, Artificial Sequence
  Description of Artificial Sequence: Synthetic oligonucleotide
aucuucucaacgcuguagu

SEQ ID NO: 3215382 - RNA, 19 nt, Artificial Sequence
  Description of Artificial Sequence: Synthetic oligonucleotide
uugcugaacguugugggag

SEQ ID NO: 3215383 - RNA, 19 nt, Artificial Sequence
  Description of Artificial Sequence: Synthetic oligonucleotide
acggggaacaguacguucc

SEQ ID NO: 3215384 - RNA, 19 nt, Artificial Sequence
  Description of Artificial Sequence: Synthetic oligonucleotide
ucggguauacacagcaggu

SEQ ID NO: 3215385 - RNA, 19 nt, Artificial Sequence
  Description of Artificial Sequence: Synthetic oligonucleotide
aacaaauagcaagguccgg

SEQ ID NO: 3215386 - RNA, 19 nt, Artificial Sequence
  Description of Artificial Sequence: Synthetic oligonucleotide
gcuauauucucuuuguaga

SEQ ID NO: 3215387 - RNA, 19 nt, Artificial Sequence
  Description of Artificial Sequence: Synthetic oligonucleotide
uucucuuuguagaaccaau

SEQ ID NO: 3215388 - RNA, 19 nt, Artificial Sequence
  Description of Artificial Sequence: Synthetic oligonucleotide
ugaacguugugggagccag

SEQ ID NO: 3215389 - RNA, 19 nt, Artificial Sequence
  Description of Artificial Sequence: Synthetic oligonucleotide
auacacagcagguccagga

SEQ ID NO: 3215390 - RNA, 19 nt, Artificial Sequence
  Description of Artificial Sequence: Synthetic oligonucleotide
ugguauaccguauguugga

SEQ ID NO: 3215391 - RNA, 19 nt, Artificial Sequence
  Description of Artificial Sequence: Synthetic oligonucleotide
uuaaguuacaaccagaaga

SEQ ID NO: 3215392 - RNA, 19 nt, Artificial Sequence
  Description of Artificial Sequence: Synthetic oligonucleotide
aguacaaaugaacagauuc

SEQ ID NO: 3215393 - RNA, 19 nt, Artificial Sequence
  Description of Artificial Sequence: Synthetic oligonucleotide
aagagaaacaagaaaaccc

SEQ ID NO: 3215394 - RNA, 19 nt, Artificial Sequence
  Description of Artificial Sequence: Synthetic oligonucleotide
auauaaaucaagcuguaac

SEQ ID NO: 3215395 - RNA, 19 nt, Artificial Sequence
  Description of Artificial Sequence: Synthetic oligonucleotide
uuuacauucaucauguacu

SEQ ID NO: 3215396 - RNA, 19 nt, Artificial Sequence
  Description of Artificial Sequence: Synthetic oligonucleotide
acuuaaaacauuuaaauau

SEQ ID NO: 3215397 - RNA, 19 nt, Artificial Sequence
  Description of Artificial Sequence: Synthetic oligonucleotide
uaaguuacaaccagaagag

SEQ ID NO: 3215398 - RNA, 19 nt, Artificial Sequence
  Description of Artificial Sequence: Synthetic oligonucleotide
acuaagaagucacaaaggg

SEQ ID NO: 3215399 - RNA, 19 nt, Artificial Sequence
  Description of Artificial Sequence: Synthetic oligonucleotide
acaagaaaaccccaaagac

SEQ ID NO: 3215400 - RNA, 19 nt, Artificial Sequence
  Description of Artificial Sequence: Synthetic oligonucleotide
augaacagauuccauaugc

SEQ ID NO: 3215401 - RNA, 19 nt, Artificial Sequence
  Description of Artificial Sequence: Synthetic oligonucleotide
uucaucauguacuaguccg

SEQ ID NO: 3215402 - RNA, 19 nt, Artificial Sequence
  Description of Artificial Sequence: Synthetic oligonucleotide
uuuaaauauaaaucaagcu

SEQ ID NO: 3215403 - RNA, 19 nt, Artificial Sequence
  Description of Artificial Sequence: Synthetic oligonucleotide
uaagaagucacaaaggguc

SEQ ID NO: 3215404 - RNA, 19 nt, Artificial Sequence
  Description of Artificial Sequence: Synthetic oligonucleotide
auugaacuccuucaguucc

SEQ ID NO: 3215405 - RNA, 19 nt, Artificial Sequence
  Description of Artificial Sequence: Synthetic oligonucleotide
aaacaagaaaaccccaaag

SEQ ID NO: 3215406 - RNA, 19 nt, Artificial Sequence
  Description of Artificial Sequence: Synthetic oligonucleotide
aacaagaaaaccccaaaga

SEQ ID NO: 3215407 - RNA, 19 nt, Artificial Sequence
  Description of Artificial Sequence: Synthetic oligonucleotide
uauaaaucaagcuguaacu

SEQ ID NO: 3215408 - RNA, 19 nt, Artificial Sequence
  Description of Artificial Sequence: Synthetic oligonucleotide
acagauuccauaugcagac

SEQ ID NO: 3215409 - RNA, 19 nt, Artificial Sequence
  Description of Artificial Sequence: Synthetic oligonucleotide
ugaaaguacaaaugaacag

SEQ ID NO: 3215410 - RNA, 19 nt, Artificial Sequence
  Description of Artificial Sequence: Synthetic oligonucleotide
aucgucauccucuucauac

SEQ ID NO: 3215411 - RNA, 19 nt, Artificial Sequence
  Description of Artificial Sequence: Synthetic oligonucleotide
agagaaacaagaaaacccc

SEQ ID NO: 3215412 - RNA, 19 nt, Artificial Sequence
  Description of Artificial Sequence: Synthetic oligonucleotide
aaaugaacagauuccauau

SEQ ID NO: 3215413 - RNA, 19 nt, Artificial Sequence
  Description of Artificial Sequence: Synthetic oligonucleotide
caugauugaacuuaaaaca

SEQ ID NO: 3215414 - RNA, 19 nt, Artificial Sequence
  Description of Artificial Sequence: Synthetic oligonucleotide
uugaacuuaaaacauuuaa

SEQ ID NO: 3215415 - RNA, 19 nt, Artificial Sequence
  Description of Artificial Sequence: Synthetic oligonucleotide
ucauguacuaguccgacca

SEQ ID NO: 3215416 - RNA, 19 nt, Artificial Sequence
  Description of Artificial Sequence: Synthetic oligonucleotide
agcgaugccauuuucauug

SEQ ID NO: 3215417 - RNA, 19 nt, Artificial Sequence
  Description of Artificial Sequence: Synthetic oligonucleotide
aauggagacugcugaacac

SEQ ID NO: 3215418 - RNA, 19 nt, Artificial Sequence
  Description of Artificial Sequence: Synthetic oligonucleotide
aaagacaacucagcaaugg

SEQ ID NO: 3215419 - RNA, 19 nt, Artificial Sequence
  Description of Artificial Sequence: Synthetic oligonucleotide
auaacuucuccugagaaag

SEQ ID NO: 3215420 - RNA, 19 nt, Artificial Sequence
  Description of Artificial Sequence: Synthetic oligonucleotide
aacuucuccugagaaagcc

SEQ ID NO: 3215421 - RNA, 19 nt, Artificial Sequence
  Description of Artificial Sequence: Synthetic oligonucleotide
ugcagacuagacaugauug

SEQ ID NO: 3215422 - RNA, 19 nt, Artificial Sequence
  Description of Artificial Sequence: Synthetic oligonucleotide
uaacuuaaguuacaaccag

SEQ ID NO: 3215423 - RNA, 19 nt, Artificial Sequence
  Description of Artificial Sequence: Synthetic oligonucleotide
aacuccuucaguuccaccu

SEQ ID NO: 3215424 - RNA, 19 nt, Artificial Sequence
  Description of Artificial Sequence: Synthetic oligonucleotide
aagaaaaccccaaagacaa

SEQ ID NO: 3215425 - RNA, 19 nt, Artificial Sequence
  Description of Artificial Sequence: Synthetic oligonucleotide
cuucaguuccaccugaucc

SEQ ID NO: 3215426 - RNA, 19 nt, Artificial Sequence
  Description of Artificial Sequence: Synthetic oligonucleotide
ucauccgugauccucaccu

SEQ ID NO: 3215427 - RNA, 19 nt, Artificial Sequence
  Description of Artificial Sequence: Synthetic oligonucleotide
auucaucauguacuagucc

SEQ ID NO: 3215428 - RNA, 19 nt, Artificial Sequence
  Description of Artificial Sequence: Synthetic oligonucleotide
caaguuuacauucaucaug

SEQ ID NO: 3215429 - RNA, 19 nt, Artificial Sequence
  Description of Artificial Sequence: Synthetic oligonucleotide
gaagagaaacaagaaaacc

SEQ ID NO: 3215430 - RNA, 19 nt, Artificial Sequence
  Description of Artificial Sequence: Synthetic oligonucleotide
augccauuuucauugugcc

SEQ ID NO: 3215431 - RNA, 19 nt, Artificial Sequence
  Description of Artificial Sequence: Synthetic oligonucleotide
uguccugaaaguacaaaug

SEQ ID NO: 3215432 - RNA, 19 nt, Artificial Sequence
  Description of Artificial Sequence: Synthetic oligonucleotide
ugugguacuagcaucucca

SEQ ID NO: 3215433 - RNA, 19 nt, Artificial Sequence
  Description of Artificial Sequence: Synthetic oligonucleotide
gaggcuauuaaagcgaugc

SEQ ID NO: 3215434 - RNA, 19 nt, Artificial Sequence
  Description of Artificial Sequence: Synthetic oligonucleotide
aacucagcaauggagacug

SEQ ID NO: 3215435 - RNA, 19 nt, Artificial Sequence
  Description of Artificial Sequence: Synthetic oligonucleotide
gguacuagcaucuccagag

SEQ ID NO: 3215436 - RNA, 19 nt, Artificial Sequence
  Description of Artificial Sequence: Synthetic oligonucleotide
aaguuuacauucaucaugu

SEQ ID NO: 3215437 - RNA, 19 nt, Artificial Sequence
  Description of Artificial Sequence: Synthetic oligonucleotide
gaaaguacaaaugaacaga

SEQ ID NO: 3215438 - RNA, 19 nt, Artificial Sequence
  Description of Artificial Sequence: Synthetic oligonucleotide
aaacacgaggcuauuaaag

SEQ ID NO: 3215439 - RNA, 19 nt, Artificial Sequence
  Description of Artificial Sequence: Synthetic oligonucleotide
aaagccaguguuugucagg

SEQ ID NO: 3215440 - RNA, 19 nt, Artificial Sequence
  Description of Artificial Sequence: Synthetic oligonucleotide
aaugaacagauuccauaug

SEQ ID NO: 3215441 - RNA, 19 nt, Artificial Sequence
  Description of Artificial Sequence: Synthetic oligonucleotide
guuuacauucaucauguac

SEQ ID NO: 3215442 - RNA, 19 nt, Artificial Sequence
  Description of Artificial Sequence: Synthetic oligonucleotide
gaacuuaaaacauuuaaau

SEQ ID NO: 3215443 - RNA, 19 nt, Artificial Sequence
  Description of Artificial Sequence: Synthetic oligonucleotide
ugagauaacuucuccugag

SEQ ID NO: 3215444 - RNA, 19 nt, Artificial Sequence
  Description of Artificial Sequence: Synthetic oligonucleotide
ucuggcauugcacaccagc

SEQ ID NO: 3215445 - RNA, 19 nt, Artificial Sequence
  Description of Artificial Sequence: Synthetic oligonucleotide
cuacauggugccaucaugc

SEQ ID NO: 3215446 - RNA, 19 nt, Artificial Sequence
  Description of Artificial Sequence: Synthetic oligonucleotide
cagaagagaaacaagaaaa

SEQ ID NO: 3215447 - RNA, 19 nt, Artificial Sequence
  Description of Artificial Sequence: Synthetic oligonucleotide
uuucauugugccaaguuua

SEQ ID NO: 3215448 - RNA, 19 nt, Artificial Sequence
  Description of Artificial Sequence: Synthetic oligonucleotide
gucacaaagggucagugug

SEQ ID NO: 3215449 - RNA, 19 nt, Artificial Sequence
  Description of Artificial Sequence: Synthetic oligonucleotide
ucacaaagggucagugugg

SEQ ID NO: 3215450 - RNA, 19 nt, Artificial Sequence
  Description of Artificial Sequence: Synthetic oligonucleotide
uuuucauugugccaaguuu

SEQ ID NO: 3215451 - RNA, 19 nt, Artificial Sequence
  Description of Artificial Sequence: Synthetic oligonucleotide
uacuaguccgaccaggcca

SEQ ID NO: 3215452 - RNA, 19 nt, Artificial Sequence
  Description of Artificial Sequence: Synthetic oligonucleotide
aaagcgaugccauuuucau

SEQ ID NO: 3215453 - RNA, 19 nt, Artificial Sequence
  Description of Artificial Sequence: Synthetic oligonucleotide
ugcucguugggauugaacu

SEQ ID NO: 3215454 - RNA, 19 nt, Artificial Sequence
  Description of Artificial Sequence: Synthetic oligonucleotide
uaaagcgaugccauuuuca

SEQ ID NO: 3215455 - RNA, 19 nt, Artificial Sequence
  Description of Artificial Sequence: Synthetic oligonucleotide
acaacucagcaauggagac

SEQ ID NO: 3215456 - RNA, 19 nt, Artificial Sequence
  Description of Artificial Sequence: Synthetic oligonucleotide
aagcuguaacuuaaguuac

SEQ ID NO: 3215457 - RNA, 19 nt, Artificial Sequence
  Description of Artificial Sequence: Synthetic oligonucleotide
cugaaaguacaaaugaaca

SEQ ID NO: 3215458 - RNA, 19 nt, Artificial Sequence
  Description of Artificial Sequence: Synthetic oligonucleotide
uguacuaguccgaccaggc

SEQ ID NO: 3215459 - RNA, 19 nt, Artificial Sequence
  Description of Artificial Sequence: Synthetic oligonucleotide
cacuaagaagucacaaagg

SEQ ID NO: 3215460 - RNA, 19 nt, Artificial Sequence
  Description of Artificial Sequence: Synthetic oligonucleotide
ugaacagauuccauaugca

SEQ ID NO: 3215461 - RNA, 19 nt, Artificial Sequence
  Description of Artificial Sequence: Synthetic oligonucleotide
gaugccauuuucauugugc

SEQ ID NO: 3215462 - RNA, 19 nt, Artificial Sequence
  Description of Artificial Sequence: Synthetic oligonucleotide
uccaugucauccgugaucc

SEQ ID NO: 3215463 - RNA, 19 nt, Artificial Sequence
  Description of Artificial Sequence: Synthetic oligonucleotide
caagcuguaacuuaaguua

SEQ ID NO: 3215464 - RNA, 19 nt, Artificial Sequence
  Description of Artificial Sequence: Synthetic oligonucleotide
ucaagcuguaacuuaaguu

SEQ ID NO: 3215465 - RNA, 19 nt, Artificial Sequence
  Description of Artificial Sequence: Synthetic oligonucleotide
aagccaguguuugucaggg

SEQ ID NO: 3215466 - RNA, 19 nt, Artificial Sequence
  Description of Artificial Sequence: Synthetic oligonucleotide
aaaguacaaaugaacagau

SEQ ID NO: 3215467 - RNA, 19 nt, Artificial Sequence
  Description of Artificial Sequence: Synthetic oligonucleotide
uugggauugaacuccuuca

SEQ ID NO: 3215468 - RNA, 19 nt, Artificial Sequence
  Description of Artificial Sequence: Synthetic oligonucleotide
ugggauugaacuccuucag

SEQ ID NO: 3215469 - RNA, 19 nt, Artificial Sequence
  Description of Artificial Sequence: Synthetic oligonucleotide
aagacaacucagcaaugga

SEQ ID NO: 3215470 - RNA, 19 nt, Artificial Sequence
  Description of Artificial Sequence: Synthetic oligonucleotide
aucauguacuaguccgacc

SEQ ID NO: 3215471 - RNA, 19 nt, Artificial Sequence
  Description of Artificial Sequence: Synthetic oligonucleotide
caagaaaaccccaaagaca

SEQ ID NO: 3215472 - RNA, 19 nt, Artificial Sequence
  Description of Artificial Sequence: Synthetic oligonucleotide
uucaguuccaccugaucca

SEQ ID NO: 3215473 - RNA, 19 nt, Artificial Sequence
  Description of Artificial Sequence: Synthetic oligonucleotide
uaaaucaagcuguaacuua

SEQ ID NO: 3215474 - RNA, 19 nt, Artificial Sequence
  Description of Artificial Sequence: Synthetic oligonucleotide
aaaccccaaagacaacuca

SEQ ID NO: 3215475 - RNA, 19 nt, Artificial Sequence
  Description of Artificial Sequence: Synthetic oligonucleotide
guacaaaugaacagauucc

SEQ ID NO: 3215476 - RNA, 19 nt, Artificial Sequence
  Description of Artificial Sequence: Synthetic oligonucleotide
cuuaaguuacaaccagaag

SEQ ID NO: 3215477 - RNA, 19 nt, Artificial Sequence
  Description of Artificial Sequence: Synthetic oligonucleotide
caaagggucagugugguac

SEQ ID NO: 3215478 - RNA, 19 nt, Artificial Sequence
  Description of Artificial Sequence: Synthetic oligonucleotide
gaagccacuaagaagucac

SEQ ID NO: 3215479 - RNA, 19 nt, Artificial Sequence
  Description of Artificial Sequence: Synthetic oligonucleotide
aaaucaagcuguaacuuaa

SEQ ID NO: 3215480 - RNA, 19 nt, Artificial Sequence
  Description of Artificial Sequence: Synthetic oligonucleotide
ugauccaugucauccguga

SEQ ID NO: 3215481 - RNA, 19 nt, Artificial Sequence
  Description of Artificial Sequence: Synthetic oligonucleotide
uugcacaccagcacggggc

SEQ ID NO: 3215482 - RNA, 19 nt, Artificial Sequence
  Description of Artificial Sequence: Synthetic oligonucleotide
uuccauaugcagacuagac

SEQ ID NO: 3215483 - RNA, 19 nt, Artificial Sequence
  Description of Artificial Sequence: Synthetic oligonucleotide
uccagcugagauaacuucu

SEQ ID NO: 3215484 - RNA, 19 nt, Artificial Sequence
  Description of Artificial Sequence: Synthetic oligonucleotide
auccaugucauccgugauc

SEQ ID NO: 3215485 - RNA, 19 nt, Artificial Sequence
  Description of Artificial Sequence: Synthetic oligonucleotide
ugugccaaguuuacauuca

SEQ ID NO: 3215486 - RNA, 19 nt, Artificial Sequence
  Description of Artificial Sequence: Synthetic oligonucleotide
aggcuauuaaagcgaugcc

SEQ ID NO: 3215487 - RNA, 19 nt, Artificial Sequence
  Description of Artificial Sequence: Synthetic oligonucleotide
gaaagccaguguuugucag

SEQ ID NO: 3215488 - RNA, 19 nt, Artificial Sequence
  Description of Artificial Sequence: Synthetic oligonucleotide
guaacuuaaguuacaacca

SEQ ID NO: 3215489 - RNA, 19 nt, Artificial Sequence
  Description of Artificial Sequence: Synthetic oligonucleotide
aagcagagccuccagcuga

SEQ ID NO: 3215490 - RNA, 19 nt, Artificial Sequence
  Description of Artificial Sequence: Synthetic oligonucleotide
aauauaaaucaagcuguaa

SEQ ID NO: 3215491 - RNA, 19 nt, Artificial Sequence
  Description of Artificial Sequence: Synthetic oligonucleotide
ugaaauauaaaucaaauag

SEQ ID NO: 3215492 - RNA, 19 nt, Artificial Sequence
  Description of Artificial Sequence: Synthetic oligonucleotide
aucaaauagaaauagaaac

SEQ ID NO: 3215493 - RNA, 19 nt, Artificial Sequence
  Description of Artificial Sequence: Synthetic oligonucleotide
agaaauagaaaccaguugg

SEQ ID NO: 3215494 - RNA, 19 nt, Artificial Sequence
  Description of Artificial Sequence: Synthetic oligonucleotide
auauaaaucaaauagaaau

SEQ ID NO: 3215495 - RNA, 19 nt, Artificial Sequence
  Description of Artificial Sequence: Synthetic oligonucleotide
aauguugguagauuauucc

SEQ ID NO: 3215496 - RNA, 19 nt, Artificial Sequence
  Description of Artificial Sequence: Synthetic oligonucleotide
ucaaauagaaauagaaacc

SEQ ID NO: 3215497 - RNA, 19 nt, Artificial Sequence
  Description of Artificial Sequence: Synthetic oligonucleotide
uucauuaugggaaagcaag

SEQ ID NO: 3215498 - RNA, 19 nt, Artificial Sequence
  Description of Artificial Sequence: Synthetic oligonucleotide
auuuagaaaauguugguag

SEQ ID NO: 3215499 - RNA, 19 nt, Artificial Sequence
  Description of Artificial Sequence: Synthetic oligonucleotide
uagaucauagcuuuuaugc

SEQ ID NO: 3215500 - RNA, 19 nt, Artificial Sequence
  Description of Artificial Sequence: Synthetic oligonucleotide
acaacgacgaucuagacug

SEQ ID NO: 3215501 - RNA, 19 nt, Artificial Sequence
  Description of Artificial Sequence: Synthetic oligonucleotide
uagaauuuagaaaauguug

SEQ ID NO: 3215502 - RNA, 19 nt, Artificial Sequence
  Description of Artificial Sequence: Synthetic oligonucleotide
ucuaaaugaaauauaaauc

SEQ ID NO: 3215503 - RNA, 19 nt, Artificial Sequence
  Description of Artificial Sequence: Synthetic oligonucleotide
cuaaaugaaauauaaauca

SEQ ID NO: 3215504 - RNA, 19 nt, Artificial Sequence
  Description of Artificial Sequence: Synthetic oligonucleotide
ucucguuucaacuacaugu

SEQ ID NO: 3215505 - RNA, 19 nt, Artificial Sequence
  Description of Artificial Sequence: Synthetic oligonucleotide
agaauuuagaaaauguugg

SEQ ID NO: 3215506 - RNA, 19 nt, Artificial Sequence
  Description of Artificial Sequence: Synthetic oligonucleotide
uucaacuacauguacaaug

SEQ ID NO: 3215507 - RNA, 19 nt, Artificial Sequence
  Description of Artificial Sequence: Synthetic oligonucleotide
ugacuaguguucauuaugg

SEQ ID NO: 3215508 - RNA, 19 nt, Artificial Sequence
  Description of Artificial Sequence: Synthetic oligonucleotide
uuaugggaaagcaagcucc

SEQ ID NO: 3215509 - RNA, 19 nt, Artificial Sequence
  Description of Artificial Sequence: Synthetic oligonucleotide
auaaaucaaauagaaauag

SEQ ID NO: 3215510 - RNA, 19 nt, Artificial Sequence
  Description of Artificial Sequence: Synthetic oligonucleotide
aaauauaaaucaaauagaa

SEQ ID NO: 3215511 - RNA, 19 nt, Artificial Sequence
  Description of Artificial Sequence: Synthetic oligonucleotide
gaagcugccauguaacugg

SEQ ID NO: 3215512 - RNA, 19 nt, Artificial Sequence
  Description of Artificial Sequence: Synthetic oligonucleotide
uggaaaacaacgacgaucu

SEQ ID NO: 3215513 - RNA, 19 nt, Artificial Sequence
  Description of Artificial Sequence: Synthetic oligonucleotide
aaaucaaauagaaauagaa

SEQ ID NO: 3215514 - RNA, 19 nt, Artificial Sequence
  Description of Artificial Sequence: Synthetic oligonucleotide
uauaaaucaaauagaaaua

SEQ ID NO: 3215515 - RNA, 19 nt, Artificial Sequence
  Description of Artificial Sequence: Synthetic oligonucleotide
ucaacuacauguacaauga

SEQ ID NO: 3215516 - RNA, 19 nt, Artificial Sequence
  Description of Artificial Sequence: Synthetic oligonucleotide
aauuagaauuuagaaaaug

SEQ ID NO: 3215517 - RNA, 19 nt, Artificial Sequence
  Description of Artificial Sequence: Synthetic oligonucleotide
uguaacuggcucuaaauga

SEQ ID NO: 3215518 - RNA, 19 nt, Artificial Sequence
  Description of Artificial Sequence: Synthetic oligonucleotide
aaugaaauauaaaucaaau

SEQ ID NO: 3215519 - RNA, 19 nt, Artificial Sequence
  Description of Artificial Sequence: Synthetic oligonucleotide
aauagaaaccaguuggcaa

SEQ ID NO: 3215520 - RNA, 19 nt, Artificial Sequence
  Description of Artificial Sequence: Synthetic oligonucleotide
aauagaaauagaaaccagu

SEQ ID NO: 3215521 - RNA, 19 nt, Artificial Sequence
  Description of Artificial Sequence: Synthetic oligonucleotide
uguugguagauuauuccag

SEQ ID NO: 3215522 - RNA, 19 nt, Artificial Sequence
  Description of Artificial Sequence: Synthetic oligonucleotide
gaaaacaacgacgaucuag

SEQ ID NO: 3215523 - RNA, 19 nt, Artificial Sequence
  Description of Artificial Sequence: Synthetic oligonucleotide
gaucauagcuuuuaugcug

SEQ ID NO: 3215524 - RNA, 19 nt, Artificial Sequence
  Description of Artificial Sequence: Synthetic oligonucleotide
uguacaaugaguuuuccuu

SEQ ID NO: 3215525 - RNA, 19 nt, Artificial Sequence
  Description of Artificial Sequence: Synthetic oligonucleotide
uaaaugaaauauaaaucaa

SEQ ID NO: 3215526 - RNA, 19 nt, Artificial Sequence
  Description of Artificial Sequence: Synthetic oligonucleotide
uagaaauagaaaccaguug

SEQ ID NO: 3215527 - RNA, 19 nt, Artificial Sequence
  Description of Artificial Sequence: Synthetic oligonucleotide
gauuauuccaggcugguga

SEQ ID NO: 3215528 - RNA, 19 nt, Artificial Sequence
  Description of Artificial Sequence: Synthetic oligonucleotide
uuagaauuuagaaaauguu

SEQ ID NO: 3215529 - RNA, 19 nt, Artificial Sequence
  Description of Artificial Sequence: Synthetic oligonucleotide
gaaauauaaaucaaauaga

SEQ ID NO: 3215530 - RNA, 19 nt, Artificial Sequence
  Description of Artificial Sequence: Synthetic oligonucleotide
auuaugggaaagcaagcuc

SEQ ID NO: 3215531 - RNA, 19 nt, Artificial Sequence
  Description of Artificial Sequence: Synthetic oligonucleotide
uaaaucaaauagaaauaga

SEQ ID NO: 3215532 - RNA, 19 nt, Artificial Sequence
  Description of Artificial Sequence: Synthetic oligonucleotide
agaaauagaucauagcuuu

SEQ ID NO: 3215533 - RNA, 19 nt, Artificial Sequence
  Description of Artificial Sequence: Synthetic oligonucleotide
aaauguugguagauuauuc

SEQ ID NO: 3215534 - RNA, 19 nt, Artificial Sequence
  Description of Artificial Sequence: Synthetic oligonucleotide
gcaauuagaauuuagaaaa

SEQ ID NO: 3215535 - RNA, 19 nt, Artificial Sequence
  Description of Artificial Sequence: Synthetic oligonucleotide
uuggcaauuagaauuuaga

SEQ ID NO: 3215536 - RNA, 19 nt, Artificial Sequence
  Description of Artificial Sequence: Synthetic oligonucleotide
uuuuaugcugcacuggaaa

SEQ ID NO: 3215537 - RNA, 19 nt, Artificial Sequence
  Description of Artificial Sequence: Synthetic oligonucleotide
aaaacaacgacgaucuaga

SEQ ID NO: 3215538 - RNA, 19 nt, Artificial Sequence
  Description of Artificial Sequence: Synthetic oligonucleotide
auagcuuuuaugcugcacu

SEQ ID NO: 3215539 - RNA, 19 nt, Artificial Sequence
  Description of Artificial Sequence: Synthetic oligonucleotide
aacaacgacgaucuagacu

SEQ ID NO: 3215540 - RNA, 19 nt, Artificial Sequence
  Description of Artificial Sequence: Synthetic oligonucleotide
uuuagaaaauguugguaga

SEQ ID NO: 3215541 - RNA, 19 nt, Artificial Sequence
  Description of Artificial Sequence: Synthetic oligonucleotide
auuagaauuuagaaaaugu

SEQ ID NO: 3215542 - RNA, 19 nt, Artificial Sequence
  Description of Artificial Sequence: Synthetic oligonucleotide
aaaugaaauauaaaucaaa

SEQ ID NO: 3215543 - RNA, 19 nt, Artificial Sequence
  Description of Artificial Sequence: Synthetic oligonucleotide
aaauagaaauagaaaccag

SEQ ID NO: 3215544 - RNA, 19 nt, Artificial Sequence
  Description of Artificial Sequence: Synthetic oligonucleotide
aaucaaauagaaauagaaa

SEQ ID NO: 3215545 - RNA, 19 nt, Artificial Sequence
  Description of Artificial Sequence: Synthetic oligonucleotide
guugguagauuauuccagg

SEQ ID NO: 3215546 - RNA, 19 nt, Artificial Sequence
  Description of Artificial Sequence: Synthetic oligonucleotide
acuaguguucauuauggga

SEQ ID NO: 3215547 - RNA, 19 nt, Artificial Sequence
  Description of Artificial Sequence: Synthetic oligonucleotide
auuauuccaggcuggugac

SEQ ID NO: 3215548 - RNA, 19 nt, Artificial Sequence
  Description of Artificial Sequence: Synthetic oligonucleotide
aauagaucauagcuuuuau

SEQ ID NO: 3215549 - RNA, 19 nt, Artificial Sequence
  Description of Artificial Sequence: Synthetic oligonucleotide
ucauuaugggaaagcaagc

SEQ ID NO: 3215550 - RNA, 19 nt, Artificial Sequence
  Description of Artificial Sequence: Synthetic oligonucleotide
aauauaaaucaaauagaaa

SEQ ID NO: 3215551 - RNA, 19 nt, Artificial Sequence
  Description of Artificial Sequence: Synthetic oligonucleotide
aauuuagaaaauguuggua

SEQ ID NO: 3215552 - RNA, 19 nt, Artificial Sequence
  Description of Artificial Sequence: Synthetic oligonucleotide
agaaaauguugguagauua

SEQ ID NO: 3215553 - RNA, 19 nt, Artificial Sequence
  Description of Artificial Sequence: Synthetic oligonucleotide
ugcacuggaaaacaacgac

SEQ ID NO: 3215554 - RNA, 19 nt, Artificial Sequence
  Description of Artificial Sequence: Synthetic oligonucleotide
aaacaacgacgaucuagac

SEQ ID NO: 3215555 - RNA, 19 nt, Artificial Sequence
  Description of Artificial Sequence: Synthetic oligonucleotide
aucauagcuuuuaugcugc

SEQ ID NO: 3215556 - RNA, 19 nt, Artificial Sequence
  Description of Artificial Sequence: Synthetic oligonucleotide
auagaaaccaguuggcaau

SEQ ID NO: 3215557 - RNA, 19 nt, Artificial Sequence
  Description of Artificial Sequence: Synthetic oligonucleotide
aagcaagcuccacacuugg

SEQ ID NO: 3215558 - RNA, 19 nt, Artificial Sequence
  Description of Artificial Sequence: Synthetic oligonucleotide
uggcaauuagaauuuagaa

SEQ ID NO: 3215559 - RNA, 19 nt, Artificial Sequence
  Description of Artificial Sequence: Synthetic oligonucleotide
ucuagacugccgaagcugc

SEQ ID NO: 3215560 - RNA, 19 nt, Artificial Sequence
  Description of Artificial Sequence: Synthetic oligonucleotide
aaauagaaaccaguuggca

SEQ ID NO: 3215561 - RNA, 19 nt, Artificial Sequence
  Description of Artificial Sequence: Synthetic oligonucleotide
uugggaauggggcuuauuc

SEQ ID NO: 3215562 - RNA, 19 nt, Artificial Sequence
  Description of Artificial Sequence: Synthetic oligonucleotide
auagaucauagcuuuuaug

SEQ ID NO: 3215563 - RNA, 19 nt, Artificial Sequence
  Description of Artificial Sequence: Synthetic oligonucleotide
gaaauagaaaccaguuggc

SEQ ID NO: 3215564 - RNA, 19 nt, Artificial Sequence
  Description of Artificial Sequence: Synthetic oligonucleotide
auguaacuggcucuaaaug

SEQ ID NO: 3215565 - RNA, 19 nt, Artificial Sequence
  Description of Artificial Sequence: Synthetic oligonucleotide
uguucauuaugggaaagca

SEQ ID NO: 3215566 - RNA, 19 nt, Artificial Sequence
  Description of Artificial Sequence: Synthetic oligonucleotide
aacuacauguacaaugagu

SEQ ID NO: 3215567 - RNA, 19 nt, Artificial Sequence
  Description of Artificial Sequence: Synthetic oligonucleotide
caaauagaaauagaaacca

SEQ ID NO: 3215568 - RNA, 19 nt, Artificial Sequence
  Description of Artificial Sequence: Synthetic oligonucleotide
cuaguguucauuaugggaa

SEQ ID NO: 3215569 - RNA, 19 nt, Artificial Sequence
  Description of Artificial Sequence: Synthetic oligonucleotide
cucuaaaugaaauauaaau

SEQ ID NO: 3215570 - RNA, 19 nt, Artificial Sequence
  Description of Artificial Sequence: Synthetic oligonucleotide
augaaauauaaaucaaaua

SEQ ID NO: 3215571 - RNA, 19 nt, Artificial Sequence
  Description of Artificial Sequence: Synthetic oligonucleotide
gguagauuauuccaggcug

SEQ ID NO: 3215572 - RNA, 19 nt, Artificial Sequence
  Description of Artificial Sequence: Synthetic oligonucleotide
gaaaccaguuggcaauuag

SEQ ID NO: 3215573 - RNA, 19 nt, Artificial Sequence
  Description of Artificial Sequence: Synthetic oligonucleotide
ugguagauuauuccaggcu

SEQ ID NO: 3215574 - RNA, 19 nt, Artificial Sequence
  Description of Artificial Sequence: Synthetic oligonucleotide
aaaauguugguagauuauu

SEQ ID NO: 3215575 - RNA, 19 nt, Artificial Sequence
  Description of Artificial Sequence: Synthetic oligonucleotide
uccacacuugggaaugggg

SEQ ID NO: 3215576 - RNA, 19 nt, Artificial Sequence
  Description of Artificial Sequence: Synthetic oligonucleotide
agaucauagcuuuuaugcu

SEQ ID NO: 3215577 - RNA, 19 nt, Artificial Sequence
  Description of Artificial Sequence: Synthetic oligonucleotide
aaauagaucauagcuuuua

SEQ ID NO: 3215578 - RNA, 19 nt, Artificial Sequence
  Description of Artificial Sequence: Synthetic oligonucleotide
auuccucuugacuccaguc

SEQ ID NO: 3215579 - RNA, 19 nt, Artificial Sequence
  Description of Artificial Sequence: Synthetic oligonucleotide
auguugguagauuauucca

SEQ ID NO: 3215580 - RNA, 19 nt, Artificial Sequence
  Description of Artificial Sequence: Synthetic oligonucleotide
gugacuaguguucauuaug

SEQ ID NO: 3215581 - RNA, 19 nt, Artificial Sequence
  Description of Artificial Sequence: Synthetic oligonucleotide
aacgacgaucuagacugcc

SEQ ID NO: 3215582 - RNA, 19 nt, Artificial Sequence
  Description of Artificial Sequence: Synthetic oligonucleotide
gacuaguguucauuauggg

SEQ ID NO: 3215583 - RNA, 19 nt, Artificial Sequence
  Description of Artificial Sequence: Synthetic oligonucleotide
uacauguacaaugaguuuu

SEQ ID NO: 3215584 - RNA, 19 nt, Artificial Sequence
  Description of Artificial Sequence: Synthetic oligonucleotide
ugggaaagcaagcuccaca

SEQ ID NO: 3215585 - RNA, 19 nt, Artificial Sequence
  Description of Artificial Sequence: Synthetic oligonucleotide
acuacauguacaaugaguu

SEQ ID NO: 3215586 - RNA, 19 nt, Artificial Sequence
  Description of Artificial Sequence: Synthetic oligonucleotide
ugggaauggggcuuauucc

SEQ ID NO: 3215587 - RNA, 19 nt, Artificial Sequence
  Description of Artificial Sequence: Synthetic oligonucleotide
guuucaacuacauguacaa

SEQ ID NO: 3215588 - RNA, 19 nt, Artificial Sequence
  Description of Artificial Sequence: Synthetic oligonucleotide
uugguagauuauuccaggc

SEQ ID NO: 3215589 - RNA, 19 nt, Artificial Sequence
  Description of Artificial Sequence: Synthetic oligonucleotide
acuccagucucguuucaac

SEQ ID NO: 3215590 - RNA, 19 nt, Artificial Sequence
  Description of Artificial Sequence: Synthetic oligonucleotide
uuccucuugacuccagucu

SEQ ID NO: 3215591 - RNA, 19 nt, Artificial Sequence
  Description of Artificial Sequence: Synthetic oligonucleotide
cuuguuaagcuccucaucg

SEQ ID NO: 3215592 - RNA, 19 nt, Artificial Sequence
  Description of Artificial Sequence: Synthetic oligonucleotide
uuggauguugggcaggacg

SEQ ID NO: 3215593 - RNA, 19 nt, Artificial Sequence
  Description of Artificial Sequence: Synthetic oligonucleotide
uuucaccuuggucuuaugg

SEQ ID NO: 3215594 - RNA, 19 nt, Artificial Sequence
  Description of Artificial Sequence: Synthetic oligonucleotide
gaugaugcggguuuucuug

SEQ ID NO: 3215595 - RNA, 19 nt, Artificial Sequence
  Description of Artificial Sequence: Synthetic oligonucleotide
uuaagcuccucaucguugc

SEQ ID NO: 3215596 - RNA, 19 nt, Artificial Sequence
  Description of Artificial Sequence: Synthetic oligonucleotide
uggauguugggcaggacgc

SEQ ID NO: 3215597 - RNA, 19 nt, Artificial Sequence
  Description of Artificial Sequence: Synthetic oligonucleotide
acagcuuggauguugggca

SEQ ID NO: 3215598 - RNA, 19 nt, Artificial Sequence
  Description of Artificial Sequence: Synthetic oligonucleotide
gauggccagcugcagaugg

SEQ ID NO: 3215599 - RNA, 19 nt, Artificial Sequence
  Description of Artificial Sequence: Synthetic oligonucleotide
uucaccuuggucuuauggu

SEQ ID NO: 3215600 - RNA, 19 nt, Artificial Sequence
  Description of Artificial Sequence: Synthetic oligonucleotide
agcuccaggaucucggccg

SEQ ID NO: 3215601 - RNA, 19 nt, Artificial Sequence
  Description of Artificial Sequence: Synthetic oligonucleotide
agcagcacagcuuggaugu

SEQ ID NO: 3215602 - RNA, 19 nt, Artificial Sequence
  Description of Artificial Sequence: Synthetic oligonucleotide
ucaccuuggucuuauggug

SEQ ID NO: 3215603 - RNA, 19 nt, Artificial Sequence
  Description of Artificial Sequence: Synthetic oligonucleotide
uccucaucguugcggaugg

SEQ ID NO: 3215604 - RNA, 19 nt, Artificial Sequence
  Description of Artificial Sequence: Synthetic oligonucleotide
ugggcagcagcacagcuug

SEQ ID NO: 3215605 - RNA, 19 nt, Artificial Sequence
  Description of Artificial Sequence: Synthetic oligonucleotide
acggccgccagguacaccg

SEQ ID NO: 3215606 - RNA, 19 nt, Artificial Sequence
  Description of Artificial Sequence: Synthetic oligonucleotide
guuuucuuguugucgcggg

SEQ ID NO: 3215607 - RNA, 19 nt, Artificial Sequence
  Description of Artificial Sequence: Synthetic oligonucleotide
cuuaugguggcucucgguc

SEQ ID NO: 3215608 - RNA, 19 nt, Artificial Sequence
  Description of Artificial Sequence: Synthetic oligonucleotide
acccgcuccgaguaguugc

SEQ ID NO: 3215609 - RNA, 19 nt, Artificial Sequence
  Description of Artificial Sequence: Synthetic oligonucleotide
uucuugggcagcagcacag

SEQ ID NO: 3215610 - RNA, 19 nt, Artificial Sequence
  Description of Artificial Sequence: Synthetic oligonucleotide
ucaucguugcggauggcca

SEQ ID NO: 3215611 - RNA, 19 nt, Artificial Sequence
  Description of Artificial Sequence: Synthetic oligonucleotide
uucuuguugucgcgggccg

SEQ ID NO: 3215612 - RNA, 19 nt, Artificial Sequence
  Description of Artificial Sequence: Synthetic oligonucleotide
aguaguugcccuugcggag

SEQ ID NO: 3215613 - RNA, 19 nt, Artificial Sequence
  Description of Artificial Sequence: Synthetic oligonucleotide
agccuugccacccugcuug

SEQ ID NO: 3215614 - RNA, 19 nt, Artificial Sequence
  Description of Artificial Sequence: Synthetic oligonucleotide
accuuggucuuaugguggc

SEQ ID NO: 3215615 - RNA, 19 nt, Artificial Sequence
  Description of Artificial Sequence: Synthetic oligonucleotide
ugcgcgauggucacgcgcc

SEQ ID NO: 3215616 - RNA, 19 nt, Artificial Sequence
  Description of Artificial Sequence: Synthetic oligonucleotide
uggcucucggucuucuugg

SEQ ID NO: 3215617 - RNA, 19 nt, Artificial Sequence
  Description of Artificial Sequence: Synthetic oligonucleotide
uuuucuuguugucgcgggc

SEQ ID NO: 3215618 - RNA, 19 nt, Artificial Sequence
  Description of Artificial Sequence: Synthetic oligonucleotide
guugcggauggccagcugc

SEQ ID NO: 3215619 - RNA, 19 nt, Artificial Sequence
  Description of Artificial Sequence: Synthetic oligonucleotide
uuucuuguugucgcgggcc

SEQ ID NO: 3215620 - RNA, 19 nt, Artificial Sequence
  Description of Artificial Sequence: Synthetic oligonucleotide
gaguaguugcccuugcgga

SEQ ID NO: 3215621 - RNA, 19 nt, Artificial Sequence
  Description of Artificial Sequence: Synthetic oligonucleotide
gagcaggcggugcacacgg

SEQ ID NO: 3215622 - RNA, 19 nt, Artificial Sequence
  Description of Artificial Sequence: Synthetic oligonucleotide
caccuuggucuuauggugg

SEQ ID NO: 3215623 - RNA, 19 nt, Artificial Sequence
  Description of Artificial Sequence: Synthetic oligonucleotide
gugcacacggcccacgggg

SEQ ID NO: 3215624 - RNA, 19 nt, Artificial Sequence
  Description of Artificial Sequence: Synthetic oligonucleotide
gaugcggguuuucuuguug

SEQ ID NO: 3215625 - RNA, 19 nt, Artificial Sequence
  Description of Artificial Sequence: Synthetic oligonucleotide
aagcuccucaucguugcgg

SEQ ID NO: 3215626 - RNA, 19 nt, Artificial Sequence
  Description of Artificial Sequence: Synthetic oligonucleotide
gauguugggcaggacgccg

SEQ ID NO: 3215627 - RNA, 19 nt, Artificial Sequence
  Description of Artificial Sequence: Synthetic oligonucleotide
uguuaagcuccucaucguu

SEQ ID NO: 3215628 - RNA, 19 nt, Artificial Sequence
  Description of Artificial Sequence: Synthetic oligonucleotide
gaucucggccgucagguac

SEQ ID NO: 3215629 - RNA, 19 nt, Artificial Sequence
  Description of Artificial Sequence: Synthetic oligonucleotide
uuaugguggcucucggucu

SEQ ID NO: 3215630 - RNA, 19 nt, Artificial Sequence
  Description of Artificial Sequence: Synthetic oligonucleotide
uugccagccagcuccagga

SEQ ID NO: 3215631 - RNA, 19 nt, Artificial Sequence
  Description of Artificial Sequence: Synthetic oligonucleotide
gauggcgcgggaugaugcg

SEQ ID NO: 3215632 - RNA, 19 nt, Artificial Sequence
  Description of Artificial Sequence: Synthetic oligonucleotide
cagcagcuuguuaagcucc

SEQ ID NO: 3215633 - RNA, 19 nt, Artificial Sequence
  Description of Artificial Sequence: Synthetic oligonucleotide
agauggcgcgggaugaugc

SEQ ID NO: 3215634 - RNA, 19 nt, Artificial Sequence
  Description of Artificial Sequence: Synthetic oligonucleotide
uaagcuccucaucguugcg

SEQ ID NO: 3215635 - RNA, 19 nt, Artificial Sequence
  Description of Artificial Sequence: Synthetic oligonucleotide
ucggccgucagguacucca

SEQ ID NO: 3215636 - RNA, 19 nt, Artificial Sequence
  Description of Artificial Sequence: Synthetic oligonucleotide
guuaagcuccucaucguug

SEQ ID NO: 3215637 - RNA, 19 nt, Artificial Sequence
  Description of Artificial Sequence: Synthetic oligonucleotide
uuguuaagcuccucaucgu

SEQ ID NO: 3215638 - RNA, 19 nt, Artificial Sequence
  Description of Artificial Sequence: Synthetic oligonucleotide
cacagcuuggauguugggc

SEQ ID NO: 3215639 - RNA, 19 nt, Artificial Sequence
  Description of Artificial Sequence: Synthetic oligonucleotide
agguacuccagcacggccg

SEQ ID NO: 3215640 - RNA, 19 nt, Artificial Sequence
  Description of Artificial Sequence: Synthetic oligonucleotide
guugccagccagcuccagg

SEQ ID NO: 3215641 - RNA, 19 nt, Artificial Sequence
  Description of Artificial Sequence: Synthetic oligonucleotide
ucuuaugguggcucucggu

SEQ ID NO: 3215642 - RNA, 19 nt, Artificial Sequence
  Description of Artificial Sequence: Synthetic oligonucleotide
uggcgcgggaugaugcggg

SEQ ID NO: 3215643 - RNA, 19 nt, Artificial Sequence
  Description of Artificial Sequence: Synthetic oligonucleotide
caggacgccgcccugcgcg

SEQ ID NO: 3215644 - RNA, 19 nt, Artificial Sequence
  Description of Artificial Sequence: Synthetic oligonucleotide
ucucggucuucuugggcag

SEQ ID NO: 3215645 - RNA, 19 nt, Artificial Sequence
  Description of Artificial Sequence: Synthetic oligonucleotide
cucaucguugcggauggcc

SEQ ID NO: 3215646 - RNA, 19 nt, Artificial Sequence
  Description of Artificial Sequence: Synthetic oligonucleotide
agcuuguuaagcuccucau

SEQ ID NO: 3215647 - RNA, 19 nt, Artificial Sequence
  Description of Artificial Sequence: Synthetic oligonucleotide
uggccagcugcagauggcg

SEQ ID NO: 3215648 - RNA, 19 nt, Artificial Sequence
  Description of Artificial Sequence: Synthetic oligonucleotide
gucagguacuccagcacgg

SEQ ID NO: 3215649 - RNA, 19 nt, Artificial Sequence
  Description of Artificial Sequence: Synthetic oligonucleotide
ggaacugcaggccggcccg

SEQ ID NO: 3215650 - RNA, 19 nt, Artificial Sequence
  Description of Artificial Sequence: Synthetic oligonucleotide
agcacagcuuggauguugg

SEQ ID NO: 3215651 - RNA, 19 nt, Artificial Sequence
  Description of Artificial Sequence: Synthetic oligonucleotide
cucucggucuucuugggca

SEQ ID NO: 3215652 - RNA, 19 nt, Artificial Sequence
  Description of Artificial Sequence: Synthetic oligonucleotide
uuggucuuaugguggcucu

SEQ ID NO: 3215653 - RNA, 19 nt, Artificial Sequence
  Description of Artificial Sequence: Synthetic oligonucleotide
aggaucucggccgucaggu

SEQ ID NO: 3215654 - RNA, 19 nt, Artificial Sequence
  Description of Artificial Sequence: Synthetic oligonucleotide
augaugcggguuuucuugu

SEQ ID NO: 3215655 - RNA, 19 nt, Artificial Sequence
  Description of Artificial Sequence: Synthetic oligonucleotide
caucguugcggauggccag

SEQ ID NO: 3215656 - RNA, 19 nt, Artificial Sequence
  Description of Artificial Sequence: Synthetic oligonucleotide
gucuuaugguggcucucgg

SEQ ID NO: 3215657 - RNA, 19 nt, Artificial Sequence
  Description of Artificial Sequence: Synthetic oligonucleotide
aucguugcggauggccagc

SEQ ID NO: 3215658 - RNA, 19 nt, Artificial Sequence
  Description of Artificial Sequence: Synthetic oligonucleotide
uugcggauggccagcugca

SEQ ID NO: 3215659 - RNA, 19 nt, Artificial Sequence
  Description of Artificial Sequence: Synthetic oligonucleotide
guggcucucggucuucuug

SEQ ID NO: 3215660 - RNA, 19 nt, Artificial Sequence
  Description of Artificial Sequence: Synthetic oligonucleotide
cagcagcacagcuuggaug

SEQ ID NO: 3215661 - RNA, 19 nt, Artificial Sequence
  Description of Artificial Sequence: Synthetic oligonucleotide
gguuuucuuguugucgcgg

SEQ ID NO: 3215662 - RNA, 19 nt, Artificial Sequence
  Description of Artificial Sequence: Synthetic oligonucleotide
augcggguuuucuuguugu

SEQ ID NO: 3215663 - RNA, 19 nt, Artificial Sequence
  Description of Artificial Sequence: Synthetic oligonucleotide
uugggcaggacgccgcccu

SEQ ID NO: 3215664 - RNA, 19 nt, Artificial Sequence
  Description of Artificial Sequence: Synthetic oligonucleotide
cacggggaacugcaggccg

SEQ ID NO: 3215665 - RNA, 19 nt, Artificial Sequence
  Description of Artificial Sequence: Synthetic oligonucleotide
agcuccucaucguugcgga

SEQ ID NO: 3215666 - RNA, 19 nt, Artificial Sequence
  Description of Artificial Sequence: Synthetic oligonucleotide
cuuguugucgcgggccgcg

SEQ ID NO: 3215667 - RNA, 19 nt, Artificial Sequence
  Description of Artificial Sequence: Synthetic oligonucleotide
ucuucuugggcagcagcac

SEQ ID NO: 3215668 - RNA, 19 nt, Artificial Sequence
  Description of Artificial Sequence: Synthetic oligonucleotide
cuuggucuuaugguggcuc

SEQ ID NO: 3215669 - RNA, 19 nt, Artificial Sequence
  Description of Artificial Sequence: Synthetic oligonucleotide
auggucacgcgccccagca

SEQ ID NO: 3215670 - RNA, 19 nt, Artificial Sequence
  Description of Artificial Sequence: Synthetic oligonucleotide
guugcccuugcggagcagg

SEQ ID NO: 3215671 - RNA, 19 nt, Artificial Sequence
  Description of Artificial Sequence: Synthetic oligonucleotide
guaguugcccuugcggagc

SEQ ID NO: 3215672 - RNA, 19 nt, Artificial Sequence
  Description of Artificial Sequence: Synthetic oligonucleotide
uguugggcaggacgccgcc

SEQ ID NO: 3215673 - RNA, 19 nt, Artificial Sequence
  Description of Artificial Sequence: Synthetic oligonucleotide
ugcaggccggcccgggagg

SEQ ID NO: 3215674 - RNA, 19 nt, Artificial Sequence
  Description of Artificial Sequence: Synthetic oligonucleotide
uccgaguaguugcccuugc

SEQ ID NO: 3215675 - RNA, 19 nt, Artificial Sequence
  Description of Artificial Sequence: Synthetic oligonucleotide
ggucuuaugguggcucucg

SEQ ID NO: 3215676 - RNA, 19 nt, Artificial Sequence
  Description of Artificial Sequence: Synthetic oligonucleotide
ggaggagcgggucuuggcc

SEQ ID NO: 3215677 - RNA, 19 nt, Artificial Sequence
  Description of Artificial Sequence: Synthetic oligonucleotide
ugcagauggcgcgggauga

SEQ ID NO: 3215678 - RNA, 19 nt, Artificial Sequence
  Description of Artificial Sequence: Synthetic oligonucleotide
uaugguggcucucggucuu

SEQ ID NO: 3215679 - RNA, 19 nt, Artificial Sequence
  Description of Artificial Sequence: Synthetic oligonucleotide
cuuggcgcgagccuugcca

SEQ ID NO: 3215680 - RNA, 19 nt, Artificial Sequence
  Description of Artificial Sequence: Synthetic oligonucleotide
auguugggcaggacgccgc

SEQ ID NO: 3215681 - RNA, 19 nt, Artificial Sequence
  Description of Artificial Sequence: Synthetic oligonucleotide
ucagguacuccagcacggc

SEQ ID NO: 3215682 - RNA, 19 nt, Artificial Sequence
  Description of Artificial Sequence: Synthetic oligonucleotide
uugcccuugcggagcaggc

SEQ ID NO: 3215683 - RNA, 19 nt, Artificial Sequence
  Description of Artificial Sequence: Synthetic oligonucleotide
uccagcacggccgccaggu

SEQ ID NO: 3215684 - RNA, 19 nt, Artificial Sequence
  Description of Artificial Sequence: Synthetic oligonucleotide
uugggcagcagcacagcuu

SEQ ID NO: 3215685 - RNA, 19 nt, Artificial Sequence
  Description of Artificial Sequence: Synthetic oligonucleotide
cagguacuccagcacggcc

SEQ ID NO: 3215686 - RNA, 19 nt, Artificial Sequence
  Description of Artificial Sequence: Synthetic oligonucleotide
caggcggugcacacggccc

SEQ ID NO: 3215687 - RNA, 19 nt, Artificial Sequence
  Description of Artificial Sequence: Synthetic oligonucleotide
uuggccuuggcgcgagccu

SEQ ID NO: 3215688 - RNA, 19 nt, Artificial Sequence
  Description of Artificial Sequence: Synthetic oligonucleotide
gauggucacgcgccccagc

SEQ ID NO: 3215689 - RNA, 19 nt, Artificial Sequence
  Description of Artificial Sequence: Synthetic oligonucleotide
uuggcgcgagccuugccac

SEQ ID NO: 3215690 - RNA, 19 nt, Artificial Sequence
  Description of Artificial Sequence: Synthetic oligonucleotide
cuccucaucguugcggaug

SEQ ID NO: 3215691 - RNA, 19 nt, Artificial Sequence
  Description of Artificial Sequence: Synthetic oligonucleotide
aaaucuacaaaauaacugg

SEQ ID NO: 3215692 - RNA, 19 nt, Artificial Sequence
  Description of Artificial Sequence: Synthetic oligonucleotide
aacaauauagcauagauuu

SEQ ID NO: 3215693 - RNA, 19 nt, Artificial Sequence
  Description of Artificial Sequence: Synthetic oligonucleotide
agguauacuauuuucaacc

SEQ ID NO: 3215694 - RNA, 19 nt, Artificial Sequence
  Description of Artificial Sequence: Synthetic oligonucleotide
uuuacauuuaucuuggcug

SEQ ID NO: 3215695 - RNA, 19 nt, Artificial Sequence
  Description of Artificial Sequence: Synthetic oligonucleotide
aggaauuagaguuggaggc

SEQ ID NO: 3215696 - RNA, 19 nt, Artificial Sequence
  Description of Artificial Sequence: Synthetic oligonucleotide
uaugucaugauccuuagca

SEQ ID NO: 3215697 - RNA, 19 nt, Artificial Sequence
  Description of Artificial Sequence: Synthetic oligonucleotide
uuuacuacgaauaagucua

SEQ ID NO: 3215698 - RNA, 19 nt, Artificial Sequence
  Description of Artificial Sequence: Synthetic oligonucleotide
uuuuacuugccccagauga

SEQ ID NO: 3215699 - RNA, 19 nt, Artificial Sequence
  Description of Artificial Sequence: Synthetic oligonucleotide
uuuauuaaacuguacaaga

SEQ ID NO: 3215700 - RNA, 19 nt, Artificial Sequence
  Description of Artificial Sequence: Synthetic oligonucleotide
aaggauguuaggcauacuc

SEQ ID NO: 3215701 - RNA, 19 nt, Artificial Sequence
  Description of Artificial Sequence: Synthetic oligonucleotide
auuuacauagcauauuaag

SEQ ID NO: 3215702 - RNA, 19 nt, Artificial Sequence
  Description of Artificial Sequence: Synthetic oligonucleotide
uucgauaucuacuucauca

SEQ ID NO: 3215703 - RNA, 19 nt, Artificial Sequence
  Description of Artificial Sequence: Synthetic oligonucleotide
aaaauaacuggugagugag

SEQ ID NO: 3215704 - RNA, 19 nt, Artificial Sequence
  Description of Artificial Sequence: Synthetic oligonucleotide
uuuacauagcauauuaagu

SEQ ID NO: 3215705 - RNA, 19 nt, Artificial Sequence
  Description of Artificial Sequence: Synthetic oligonucleotide
uuauuaaacuguacaagag

SEQ ID NO: 3215706 - RNA, 19 nt, Artificial Sequence
  Description of Artificial Sequence: Synthetic oligonucleotide
acugaaucaaagugcaggc

SEQ ID NO: 3215707 - RNA, 19 nt, Artificial Sequence
  Description of Artificial Sequence: Synthetic oligonucleotide
uuuuauuaaacuguacaag

SEQ ID NO: 3215708 - RNA, 19 nt, Artificial Sequence
  Description of Artificial Sequence: Synthetic oligonucleotide
agcauugaaucacaggggc

SEQ ID NO: 3215709 - RNA, 19 nt, Artificial Sequence
  Description of Artificial Sequence: Synthetic oligonucleotide
uuucaauacagaacgagga

SEQ ID NO: 3215710 - RNA, 19 nt, Artificial Sequence
  Description of Artificial Sequence: Synthetic oligonucleotide
uuuuacuacgaauaagucu

SEQ ID NO: 3215711 - RNA, 19 nt, Artificial Sequence
  Description of Artificial Sequence: Synthetic oligonucleotide
aaaauugggcccuaucuca

SEQ ID NO: 3215712 - RNA, 19 nt, Artificial Sequence
  Description of Artificial Sequence: Synthetic oligonucleotide
aguagagcccacucgaagc

SEQ ID NO: 3215713 - RNA, 19 nt, Artificial Sequence
  Description of Artificial Sequence: Synthetic oligonucleotide
uguguuaaaugaaaugacu

SEQ ID NO: 3215714 - RNA, 19 nt, Artificial Sequence
  Description of Artificial Sequence: Synthetic oligonucleotide
ucaacaaaauauugaagug

SEQ ID NO: 3215715 - RNA, 19 nt, Artificial Sequence
  Description of Artificial Sequence: Synthetic oligonucleotide
ugcuauacugguaugguug

SEQ ID NO: 3215716 - RNA, 19 nt, Artificial Sequence
  Description of Artificial Sequence: Synthetic oligonucleotide
aauuauuuggcaguaauuu

SEQ ID NO: 3215717 - RNA, 19 nt, Artificial Sequence
  Description of Artificial Sequence: Synthetic oligonucleotide
aagccauaaaauaugcugg

SEQ ID NO: 3215718 - RNA, 19 nt, Artificial Sequence
  Description of Artificial Sequence: Synthetic oligonucleotide
ugaucaacaauauagcaua

SEQ ID NO: 3215719 - RNA, 19 nt, Artificial Sequence
  Description of Artificial Sequence: Synthetic oligonucleotide
uguccauaaacucauggcu

SEQ ID NO: 3215720 - RNA, 19 nt, Artificial Sequence
  Description of Artificial Sequence: Synthetic oligonucleotide
uuacauagcauauuaaguu

SEQ ID NO: 3215721 - RNA, 19 nt, Artificial Sequence
  Description of Artificial Sequence: Synthetic oligonucleotide
uguuaaaugaaaugacugu

SEQ ID NO: 3215722 - RNA, 19 nt, Artificial Sequence
  Description of Artificial Sequence: Synthetic oligonucleotide
uaaaugacaaucuucuaaa

SEQ ID NO: 3215723 - RNA, 19 nt, Artificial Sequence
  Description of Artificial Sequence: Synthetic oligonucleotide
auucuacugacagugaucg

SEQ ID NO: 3215724 - RNA, 19 nt, Artificial Sequence
  Description of Artificial Sequence: Synthetic oligonucleotide
ucucucacaaacucgaucu

SEQ ID NO: 3215725 - RNA, 19 nt, Artificial Sequence
  Description of Artificial Sequence: Synthetic oligonucleotide
uccgacauagacaagaaua

SEQ ID NO: 3215726 - RNA, 19 nt, Artificial Sequence
  Description of Artificial Sequence: Synthetic oligonucleotide
acuaccauugcucugagau

SEQ ID NO: 3215727 - RNA, 19 nt, Artificial Sequence
  Description of Artificial Sequence: Synthetic oligonucleotide
uucuuugacugcaugauac

SEQ ID NO: 3215728 - RNA, 19 nt, Artificial Sequence
  Description of Artificial Sequence: Synthetic oligonucleotide
gaauaagucuacauucucg

SEQ ID NO: 3215729 - RNA, 19 nt, Artificial Sequence
  Description of Artificial Sequence: Synthetic oligonucleotide
aaaacaauggcaucaccaa

SEQ ID NO: 3215730 - RNA, 19 nt, Artificial Sequence
  Description of Artificial Sequence: Synthetic oligonucleotide
aaaagucuucauaucuugc

SEQ ID NO: 3215731 - RNA, 19 nt, Artificial Sequence
  Description of Artificial Sequence: Synthetic oligonucleotide
ucaccuauuauauccaaga

SEQ ID NO: 3215732 - RNA, 19 nt, Artificial Sequence
  Description of Artificial Sequence: Synthetic oligonucleotide
aacucuuccucuccuuggc

SEQ ID NO: 3215733 - RNA, 19 nt, Artificial Sequence
  Description of Artificial Sequence: Synthetic oligonucleotide
ucaguagcaaguaauuacu

SEQ ID NO: 3215734 - RNA, 19 nt, Artificial Sequence
  Description of Artificial Sequence: Synthetic oligonucleotide
aaacaucauauacauuaug

SEQ ID NO: 3215735 - RNA, 19 nt, Artificial Sequence
  Description of Artificial Sequence: Synthetic oligonucleotide
uaacaauccaagcaagcca

SEQ ID NO: 3215736 - RNA, 19 nt, Artificial Sequence
  Description of Artificial Sequence: Synthetic oligonucleotide
auugcugucugcaacuucc

SEQ ID NO: 3215737 - RNA, 19 nt, Artificial Sequence
  Description of Artificial Sequence: Synthetic oligonucleotide
aacguuggcauuugaaaca

SEQ ID NO: 3215738 - RNA, 19 nt, Artificial Sequence
  Description of Artificial Sequence: Synthetic oligonucleotide
agacaagaauauuaacaac

SEQ ID NO: 3215739 - RNA, 19 nt, Artificial Sequence
  Description of Artificial Sequence: Synthetic oligonucleotide
uguaacaauccaagcaagc

SEQ ID NO: 3215740 - RNA, 19 nt, Artificial Sequence
  Description of Artificial Sequence: Synthetic oligonucleotide
aauaacuggugagugagcu

SEQ ID NO: 3215741 - RNA, 19 nt, Artificial Sequence
  Description of Artificial Sequence: Synthetic oligonucleotide
ucaucaaggauguuaggca

SEQ ID NO: 3215742 - RNA, 19 nt, Artificial Sequence
  Description of Artificial Sequence: Synthetic oligonucleotide
auaucaguuauuuuauuaa

SEQ ID NO: 3215743 - RNA, 19 nt, Artificial Sequence
  Description of Artificial Sequence: Synthetic oligonucleotide
uuucacuucugcaugcagc

SEQ ID NO: 3215744 - RNA, 19 nt, Artificial Sequence
  Description of Artificial Sequence: Synthetic oligonucleotide
aucaucauaauugauuucu

SEQ ID NO: 3215745 - RNA, 19 nt, Artificial Sequence
  Description of Artificial Sequence: Synthetic oligonucleotide
agugacauaaugcuauacu

SEQ ID NO: 3215746 - RNA, 19 nt, Artificial Sequence
  Description of Artificial Sequence: Synthetic oligonucleotide
uauuccgacauagacaaga

SEQ ID NO: 3215747 - RNA, 19 nt, Artificial Sequence
  Description of Artificial Sequence: Synthetic oligonucleotide
cauaaauaugccacagagc

SEQ ID NO: 3215748 - RNA, 19 nt, Artificial Sequence
  Description of Artificial Sequence: Synthetic oligonucleotide
ucaccaaggaacugaauca

SEQ ID NO: 3215749 - RNA, 19 nt, Artificial Sequence
  Description of Artificial Sequence: Synthetic oligonucleotide
uaacguuggcauuugaaac

SEQ ID NO: 3215750 - RNA, 19 nt, Artificial Sequence
  Description of Artificial Sequence: Synthetic oligonucleotide
gcauaaauaugccacagag

SEQ ID NO: 3215751 - RNA, 19 nt, Artificial Sequence
  Description of Artificial Sequence: Synthetic oligonucleotide
uaucuauaaggaauucuac

SEQ ID NO: 3215752 - RNA, 19 nt, Artificial Sequence
  Description of Artificial Sequence: Synthetic oligonucleotide
aauucuacugacagugauc

SEQ ID NO: 3215753 - RNA, 19 nt, Artificial Sequence
  Description of Artificial Sequence: Synthetic oligonucleotide
ugugacuuuccauugcucu

SEQ ID NO: 3215754 - RNA, 19 nt, Artificial Sequence
  Description of Artificial Sequence: Synthetic oligonucleotide
cacauuuuacaauuauuug

SEQ ID NO: 3215755 - RNA, 19 nt, Artificial Sequence
  Description of Artificial Sequence: Synthetic oligonucleotide
ucccuaagaaugugcaugg

SEQ ID NO: 3215756 - RNA, 19 nt, Artificial Sequence
  Description of Artificial Sequence: Synthetic oligonucleotide
guuccaaccgcacuaagug

SEQ ID NO: 3215757 - RNA, 19 nt, Artificial Sequence
  Description of Artificial Sequence: Synthetic oligonucleotide
gucaguagcaaguaauuac

SEQ ID NO: 3215758 - RNA, 19 nt, Artificial Sequence
  Description of Artificial Sequence: Synthetic oligonucleotide
uaaccuguagcuuaucauc

SEQ ID NO: 3215759 - RNA, 19 nt, Artificial Sequence
  Description of Artificial Sequence: Synthetic oligonucleotide
aaaucucggaggguugagc

SEQ ID NO: 3215760 - RNA, 19 nt, Artificial Sequence
  Description of Artificial Sequence: Synthetic oligonucleotide
ucucacuccauacuccuca

SEQ ID NO: 3215761 - RNA, 19 nt, Artificial Sequence
  Description of Artificial Sequence: Synthetic oligonucleotide
ugagacaauuuuaaauaaa

SEQ ID NO: 3215762 - RNA, 19 nt, Artificial Sequence
  Description of Artificial Sequence: Synthetic oligonucleotide
guguuaaaugaaaugacug

SEQ ID NO: 3215763 - RNA, 19 nt, Artificial Sequence
  Description of Artificial Sequence: Synthetic oligonucleotide
aggauguuaggcauacucc

SEQ ID NO: 3215764 - RNA, 19 nt, Artificial Sequence
  Description of Artificial Sequence: Synthetic oligonucleotide
uuggaucaugcucuggcag

SEQ ID NO: 3215765 - RNA, 19 nt, Artificial Sequence
  Description of Artificial Sequence: Synthetic oligonucleotide
cuuuagacugucaauguca

SEQ ID NO: 3215766 - RNA, 19 nt, Artificial Sequence
  Description of Artificial Sequence: Synthetic oligonucleotide
uccccagaacuccuuaacg

SEQ ID NO: 3215767 - RNA, 19 nt, Artificial Sequence
  Description of Artificial Sequence: Synthetic oligonucleotide
cuaaaugacaaucuucuaa

SEQ ID NO: 3215768 - RNA, 19 nt, Artificial Sequence
  Description of Artificial Sequence: Synthetic oligonucleotide
uaggcacugcauaaccugg

SEQ ID NO: 3215769 - RNA, 19 nt, Artificial Sequence
  Description of Artificial Sequence: Synthetic oligonucleotide
uaucuugucaagaucuuuu

SEQ ID NO: 3215770 - RNA, 19 nt, Artificial Sequence
  Description of Artificial Sequence: Synthetic oligonucleotide
uuuauguccuauucucaca

SEQ ID NO: 3215771 - RNA, 19 nt, Artificial Sequence
  Description of Artificial Sequence: Synthetic oligonucleotide
aucuugucaagaucuuuuc

SEQ ID NO: 3215772 - RNA, 19 nt, Artificial Sequence
  Description of Artificial Sequence: Synthetic oligonucleotide
aaauaacuggugagugagc

SEQ ID NO: 3215773 - RNA, 19 nt, Artificial Sequence
  Description of Artificial Sequence: Synthetic oligonucleotide
uagcuucaacaaaauauug

SEQ ID NO: 3215774 - RNA, 19 nt, Artificial Sequence
  Description of Artificial Sequence: Synthetic oligonucleotide
auacuccucaagcagucuc

SEQ ID NO: 3215775 - RNA, 19 nt, Artificial Sequence
  Description of Artificial Sequence: Synthetic oligonucleotide
ugaucagaagaacucuuaa

SEQ ID NO: 3215776 - RNA, 19 nt, Artificial Sequence
  Description of Artificial Sequence: Synthetic oligonucleotide
aaucuacaaaauaacuggu

SEQ ID NO: 3215777 - RNA, 19 nt, Artificial Sequence
  Description of Artificial Sequence: Synthetic oligonucleotide
acuacgaauaagucuacau

SEQ ID NO: 3215778 - RNA, 19 nt, Artificial Sequence
  Description of Artificial Sequence: Synthetic oligonucleotide
aucaguagagcccacucga

SEQ ID NO: 3215779 - RNA, 19 nt, Artificial Sequence
  Description of Artificial Sequence: Synthetic oligonucleotide
ucuuugcaguucaagagau

SEQ ID NO: 3215780 - RNA, 19 nt, Artificial Sequence
  Description of Artificial Sequence: Synthetic oligonucleotide
gaacucuuccucuccuugg

SEQ ID NO: 3215781 - RNA, 19 nt, Artificial Sequence
  Description of Artificial Sequence: Synthetic oligonucleotide
auucuuaaccuguagcuua

SEQ ID NO: 3215782 - RNA, 19 nt, Artificial Sequence
  Description of Artificial Sequence: Synthetic oligonucleotide
gaucgaacuagguauacua

SEQ ID NO: 3215783 - RNA, 19 nt, Artificial Sequence
  Description of Artificial Sequence: Synthetic oligonucleotide
uauagcuacuuuccuuucu

SEQ ID NO: 3215784 - RNA, 19 nt, Artificial Sequence
  Description of Artificial Sequence: Synthetic oligonucleotide
uuugagguaaucuguuuua

SEQ ID NO: 3215785 - RNA, 19 nt, Artificial Sequence
  Description of Artificial Sequence: Synthetic oligonucleotide
cacuuuugccacucgaggc

SEQ ID NO: 3215786 - RNA, 19 nt, Artificial Sequence
  Description of Artificial Sequence: Synthetic oligonucleotide
agacuaauugauucugccu

SEQ ID NO: 3215787 - RNA, 19 nt, Artificial Sequence
  Description of Artificial Sequence: Synthetic oligonucleotide
uguaaaauugggcccuauc

SEQ ID NO: 3215788 - RNA, 19 nt, Artificial Sequence
  Description of Artificial Sequence: Synthetic oligonucleotide
uagguauacuauuuucaac

SEQ ID NO: 3215789 - RNA, 19 nt, Artificial Sequence
  Description of Artificial Sequence: Synthetic oligonucleotide
augagacaauuuuaaauaa

SEQ ID NO: 3215790 - RNA, 19 nt, Artificial Sequence
  Description of Artificial Sequence: Synthetic oligonucleotide
cacacuaucaacuuuugua

SEQ ID NO: 3215791 - RNA, 19 nt, Artificial Sequence
  Description of Artificial Sequence: Synthetic oligonucleotide
auuauaaauuuguuuaucc

SEQ ID NO: 3215792 - RNA, 19 nt, Artificial Sequence
  Description of Artificial Sequence: Synthetic oligonucleotide
aacauuaaagcaucuaaac

SEQ ID NO: 3215793 - RNA, 19 nt, Artificial Sequence
  Description of Artificial Sequence: Synthetic oligonucleotide
acagaauauauauauauac

SEQ ID NO: 3215794 - RNA, 19 nt, Artificial Sequence
  Description of Artificial Sequence: Synthetic oligonucleotide
uauauauauauacuuauac

SEQ ID NO: 3215795 - RNA, 19 nt, Artificial Sequence
  Description of Artificial Sequence: Synthetic oligonucleotide
aagauaucaaaauaauuug

SEQ ID NO: 3215796 - RNA, 19 nt, Artificial Sequence
  Description of Artificial Sequence: Synthetic oligonucleotide
uauuuaaaauuauugauac

SEQ ID NO: 3215797 - RNA, 19 nt, Artificial Sequence
  Description of Artificial Sequence: Synthetic oligonucleotide
aauauauauauauacuuau

SEQ ID NO: 3215798 - RNA, 19 nt, Artificial Sequence
  Description of Artificial Sequence: Synthetic oligonucleotide
uuauuaaucacuugcaaca

SEQ ID NO: 3215799 - RNA, 19 nt, Artificial Sequence
  Description of Artificial Sequence: Synthetic oligonucleotide
ucauuaaucacccaugaga

SEQ ID NO: 3215800 - RNA, 19 nt, Artificial Sequence
  Description of Artificial Sequence: Synthetic oligonucleotide
gguaauagcacuuaaacug

SEQ ID NO: 3215801 - RNA, 19 nt, Artificial Sequence
  Description of Artificial Sequence: Synthetic oligonucleotide
gauaucaaaauaauuuggg

SEQ ID NO: 3215802 - RNA, 19 nt, Artificial Sequence
  Description of Artificial Sequence: Synthetic oligonucleotide
uacuuauauauuauuauca

SEQ ID NO: 3215803 - RNA, 19 nt, Artificial Sequence
  Description of Artificial Sequence: Synthetic oligonucleotide
uuuauaguuauuauaaauu

SEQ ID NO: 3215804 - RNA, 19 nt, Artificial Sequence
  Description of Artificial Sequence: Synthetic oligonucleotide
agagauuccagguaaacag

SEQ ID NO: 3215805 - RNA, 19 nt, Artificial Sequence
  Description of Artificial Sequence: Synthetic oligonucleotide
agaaauauaguaguuagag

SEQ ID NO: 3215806 - RNA, 19 nt, Artificial Sequence
  Description of Artificial Sequence: Synthetic oligonucleotide
ucuuuagaaagacuucugg

SEQ ID NO: 3215807 - RNA, 19 nt, Artificial Sequence
  Description of Artificial Sequence: Synthetic oligonucleotide
aacugagauagguaauagc

SEQ ID NO: 3215808 - RNA, 19 nt, Artificial Sequence
  Description of Artificial Sequence: Synthetic oligonucleotide
guagaaauauaguaguuag

SEQ ID NO: 3215809 - RNA, 19 nt, Artificial Sequence
  Description of Artificial Sequence: Synthetic oligonucleotide
uuaaucacccaugagauug

SEQ ID NO: 3215810 - RNA, 19 nt, Artificial Sequence
  Description of Artificial Sequence: Synthetic oligonucleotide
uuuagaaagacuucuggga

SEQ ID NO: 3215811 - RNA, 19 nt, Artificial Sequence
  Description of Artificial Sequence: Synthetic oligonucleotide
uaaacauuaaagcaucuaa

SEQ ID NO: 3215812 - RNA, 19 nt, Artificial Sequence
  Description of Artificial Sequence: Synthetic oligonucleotide
ucuaggagccauaaguagg

SEQ ID NO: 3215813 - RNA, 19 nt, Artificial Sequence
  Description of Artificial Sequence: Synthetic oligonucleotide
uucauauaugagcagaaca

SEQ ID NO: 3215814 - RNA, 19 nt, Artificial Sequence
  Description of Artificial Sequence: Synthetic oligonucleotide
gagaaaucaaaccuuuuag

SEQ ID NO: 3215815 - RNA, 19 nt, Artificial Sequence
  Description of Artificial Sequence: Synthetic oligonucleotide
cuuuauaaacauuaaagca

SEQ ID NO: 3215816 - RNA, 19 nt, Artificial Sequence
  Description of Artificial Sequence: Synthetic oligonucleotide
caugauaucaucuuuagaa

SEQ ID NO: 3215817 - RNA, 19 nt, Artificial Sequence
  Description of Artificial Sequence: Synthetic oligonucleotide
uuuauugggagagagauuc

SEQ ID NO: 3215818 - RNA, 19 nt, Artificial Sequence
  Description of Artificial Sequence: Synthetic oligonucleotide
uagaaaugcaaguaugugc

SEQ ID NO: 3215819 - RNA, 19 nt, Artificial Sequence
  Description of Artificial Sequence: Synthetic oligonucleotide
uaacagaauauauauauau

SEQ ID NO: 3215820 - RNA, 19 nt, Artificial Sequence
  Description of Artificial Sequence: Synthetic oligonucleotide
uagguaauagcacuuaaac

SEQ ID NO: 3215821 - RNA, 19 nt, Artificial Sequence
  Description of Artificial Sequence: Synthetic oligonucleotide
uuauaaacauuaaagcauc

SEQ ID NO: 3215822 - RNA, 19 nt, Artificial Sequence
  Description of Artificial Sequence: Synthetic oligonucleotide
agaauauauauauauacuu

SEQ ID NO: 3215823 - RNA, 19 nt, Artificial Sequence
  Description of Artificial Sequence: Synthetic oligonucleotide
cuuuagaaagacuucuggg

SEQ ID NO: 3215824 - RNA, 19 nt, Artificial Sequence
  Description of Artificial Sequence: Synthetic oligonucleotide
augagauugacacucuuuc

SEQ ID NO: 3215825 - RNA, 19 nt, Artificial Sequence
  Description of Artificial Sequence: Synthetic oligonucleotide
uugguaguaugaaacaaag

SEQ ID NO: 3215826 - RNA, 19 nt, Artificial Sequence
  Description of Artificial Sequence: Synthetic oligonucleotide
aauacuuaguguguccacg

SEQ ID NO: 3215827 - RNA, 19 nt, Artificial Sequence
  Description of Artificial Sequence: Synthetic oligonucleotide
ucauauaugagcagaacau

SEQ ID NO: 3215828 - RNA, 19 nt, Artificial Sequence
  Description of Artificial Sequence: Synthetic oligonucleotide
ugacaguccauucacaaga

SEQ ID NO: 3215829 - RNA, 19 nt, Artificial Sequence
  Description of Artificial Sequence: Synthetic oligonucleotide
gguaguaugaaacaaaguc

SEQ ID NO: 3215830 - RNA, 19 nt, Artificial Sequence
  Description of Artificial Sequence: Synthetic oligonucleotide
cuuauauauuauuaucaag

SEQ ID NO: 3215831 - RNA, 19 nt, Artificial Sequence
  Description of Artificial Sequence: Synthetic oligonucleotide
ucgaaaauucauauaugag

SEQ ID NO: 3215832 - RNA, 19 nt, Artificial Sequence
  Description of Artificial Sequence: Synthetic oligonucleotide
aucgaaaauucauauauga

SEQ ID NO: 3215833 - RNA, 19 nt, Artificial Sequence
  Description of Artificial Sequence: Synthetic oligonucleotide
cauauaaaauaguuacugc

SEQ ID NO: 3215834 - RNA, 19 nt, Artificial Sequence
  Description of Artificial Sequence: Synthetic oligonucleotide
aaagcuuccucauccacug

SEQ ID NO: 3215835 - RNA, 19 nt, Artificial Sequence
  Description of Artificial Sequence: Synthetic oligonucleotide
aacacaagauaucaaaaua

SEQ ID NO: 3215836 - RNA, 19 nt, Artificial Sequence
  Description of Artificial Sequence: Synthetic oligonucleotide
uuaaucacuugcaacauua

SEQ ID NO: 3215837 - RNA, 19 nt, Artificial Sequence
  Description of Artificial Sequence: Synthetic oligonucleotide
cuuaguagaagagagauga

SEQ ID NO: 3215838 - RNA, 19 nt, Artificial Sequence
  Description of Artificial Sequence: Synthetic oligonucleotide
ucacuugcaacauuagcag

SEQ ID NO: 3215839 - RNA, 19 nt, Artificial Sequence
  Description of Artificial Sequence: Synthetic oligonucleotide
guuauuaaucacuugcaac

SEQ ID NO: 3215840 - RNA, 19 nt, Artificial Sequence
  Description of Artificial Sequence: Synthetic oligonucleotide
aaguaugugcaugauauca

SEQ ID NO: 3215841 - RNA, 19 nt, Artificial Sequence
  Description of Artificial Sequence: Synthetic oligonucleotide
acauuaaagcaucuaaaca

SEQ ID NO: 3215842 - RNA, 19 nt, Artificial Sequence
  Description of Artificial Sequence: Synthetic oligonucleotide
aaacaagucacaauguaga

SEQ ID NO: 3215843 - RNA, 19 nt, Artificial Sequence
  Description of Artificial Sequence: Synthetic oligonucleotide
auauauuauuaucaagaca

SEQ ID NO: 3215844 - RNA, 19 nt, Artificial Sequence
  Description of Artificial Sequence: Synthetic oligonucleotide
uuagaaagacuucugggaa

SEQ ID NO: 3215845 - RNA, 19 nt, Artificial Sequence
  Description of Artificial Sequence: Synthetic oligonucleotide
agauaucaaaauaauuugg

SEQ ID NO: 3215846 - RNA, 19 nt, Artificial Sequence
  Description of Artificial Sequence: Synthetic oligonucleotide
ucucuagagaaaucaaacc

SEQ ID NO: 3215847 - RNA, 19 nt, Artificial Sequence
  Description of Artificial Sequence: Synthetic oligonucleotide
aauauaguaguuagaguug

SEQ ID NO: 3215848 - RNA, 19 nt, Artificial Sequence
  Description of Artificial Sequence: Synthetic oligonucleotide
uuucauuaaucacccauga

SEQ ID NO: 3215849 - RNA, 19 nt, Artificial Sequence
  Description of Artificial Sequence: Synthetic oligonucleotide
uaugccuaauaacagaaua

SEQ ID NO: 3215850 - RNA, 19 nt, Artificial Sequence
  Description of Artificial Sequence: Synthetic oligonucleotide
uggcagacaauacuuagug

SEQ ID NO: 3215851 - RNA, 19 nt, Artificial Sequence
  Description of Artificial Sequence: Synthetic oligonucleotide
auaguaguuagaguugugg

SEQ ID NO: 3215852 - RNA, 19 nt, Artificial Sequence
  Description of Artificial Sequence: Synthetic oligonucleotide
uacuuauacauauacuuau

SEQ ID NO: 3215853 - RNA, 19 nt, Artificial Sequence
  Description of Artificial Sequence: Synthetic oligonucleotide
ugaaacaaagucagcuuug

SEQ ID NO: 3215854 - RNA, 19 nt, Artificial Sequence
  Description of Artificial Sequence: Synthetic oligonucleotide
ugaaagucugcucucguac

SEQ ID NO: 3215855 - RNA, 19 nt, Artificial Sequence
  Description of Artificial Sequence: Synthetic oligonucleotide
uuaucaagacacauuucca

SEQ ID NO: 3215856 - RNA, 19 nt, Artificial Sequence
  Description of Artificial Sequence: Synthetic oligonucleotide
aaccuuuuagaaaugcaag

SEQ ID NO: 3215857 - RNA, 19 nt, Artificial Sequence
  Description of Artificial Sequence: Synthetic oligonucleotide
uguuauuaaucacuugcaa

SEQ ID NO: 3215858 - RNA, 19 nt, Artificial Sequence
  Description of Artificial Sequence: Synthetic oligonucleotide
acuuauauauuauuaucaa

SEQ ID NO: 3215859 - RNA, 19 nt, Artificial Sequence
  Description of Artificial Sequence: Synthetic oligonucleotide
guaauagcacuuaaacugg

SEQ ID NO: 3215860 - RNA, 19 nt, Artificial Sequence
  Description of Artificial Sequence: Synthetic oligonucleotide
agaaaugcaaguaugugca

SEQ ID NO: 3215861 - RNA, 19 nt, Artificial Sequence
  Description of Artificial Sequence: Synthetic oligonucleotide
aggugauuucauuaaucac

SEQ ID NO: 3215862 - RNA, 19 nt, Artificial Sequence
  Description of Artificial Sequence: Synthetic oligonucleotide
agagaugaguauuuaaaau

SEQ ID NO: 3215863 - RNA, 19 nt, Artificial Sequence
  Description of Artificial Sequence: Synthetic oligonucleotide
uucuaggagccauaaguag

SEQ ID NO: 3215864 - RNA, 19 nt, Artificial Sequence
  Description of Artificial Sequence: Synthetic oligonucleotide
uucguuugucucuagagaa

SEQ ID NO: 3215865 - RNA, 19 nt, Artificial Sequence
  Description of Artificial Sequence: Synthetic oligonucleotide
uagcgaugaaaccaccccg

SEQ ID NO: 3215866 - RNA, 19 nt, Artificial Sequence
  Description of Artificial Sequence: Synthetic oligonucleotide
auuuuacuucguuugucuc

SEQ ID NO: 3215867 - RNA, 19 nt, Artificial Sequence
  Description of Artificial Sequence: Synthetic oligonucleotide
auugacacucuuucaaucu

SEQ ID NO: 3215868 - RNA, 19 nt, Artificial Sequence
  Description of Artificial Sequence: Synthetic oligonucleotide
ugcaugauaucaucuuuag

SEQ ID NO: 3215869 - RNA, 19 nt, Artificial Sequence
  Description of Artificial Sequence: Synthetic oligonucleotide
uugaacagcugacagucca

SEQ ID NO: 3215870 - RNA, 19 nt, Artificial Sequence
  Description of Artificial Sequence: Synthetic oligonucleotide
uucauuaaucacccaugag

SEQ ID NO: 3215871 - RNA, 19 nt, Artificial Sequence
  Description of Artificial Sequence: Synthetic oligonucleotide
ucugcucucguacaggcac

SEQ ID NO: 3215872 - RNA, 19 nt, Artificial Sequence
  Description of Artificial Sequence: Synthetic oligonucleotide
aagacagacuuuauaaaca

SEQ ID NO: 3215873 - RNA, 19 nt, Artificial Sequence
  Description of Artificial Sequence: Synthetic oligonucleotide
agcagcaagauucugguaa

SEQ ID NO: 3215874 - RNA, 19 nt, Artificial Sequence
  Description of Artificial Sequence: Synthetic oligonucleotide
uucuuaguagaagagagau

SEQ ID NO: 3215875 - RNA, 19 nt, Artificial Sequence
  Description of Artificial Sequence: Synthetic oligonucleotide
caagauaucaaaauaauuu

SEQ ID NO: 3215876 - RNA, 19 nt, Artificial Sequence
  Description of Artificial Sequence: Synthetic oligonucleotide
uaaacuggaacaguugaac

SEQ ID NO: 3215877 - RNA, 19 nt, Artificial Sequence
  Description of Artificial Sequence: Synthetic oligonucleotide
uuauguugccagaucuucc

SEQ ID NO: 3215878 - RNA, 19 nt, Artificial Sequence
  Description of Artificial Sequence: Synthetic oligonucleotide
uccuauacacaaaggguug

SEQ ID NO: 3215879 - RNA, 19 nt, Artificial Sequence
  Description of Artificial Sequence: Synthetic oligonucleotide
cacauuuccauauaaaaua

SEQ ID NO: 3215880 - RNA, 19 nt, Artificial Sequence
  Description of Artificial Sequence: Synthetic oligonucleotide
agguaauagcacuuaaacu

SEQ ID NO: 3215881 - RNA, 19 nt, Artificial Sequence
  Description of Artificial Sequence: Synthetic oligonucleotide
uagaaauauaguaguuaga

SEQ ID NO: 3215882 - RNA, 19 nt, Artificial Sequence
  Description of Artificial Sequence: Synthetic oligonucleotide
uguagcgaugaaaccaccc

SEQ ID NO: 3215883 - RNA, 19 nt, Artificial Sequence
  Description of Artificial Sequence: Synthetic oligonucleotide
aaguaggugauuucauuaa

SEQ ID NO: 3215884 - RNA, 19 nt, Artificial Sequence
  Description of Artificial Sequence: Synthetic oligonucleotide
ucugguaacugagauaggu

SEQ ID NO: 3215885 - RNA, 19 nt, Artificial Sequence
  Description of Artificial Sequence: Synthetic oligonucleotide
aguggacaaccacacggcc

SEQ ID NO: 3215886 - RNA, 19 nt, Artificial Sequence
  Description of Artificial Sequence: Synthetic oligonucleotide
uguagaaauauaguaguua

SEQ ID NO: 3215887 - RNA, 19 nt, Artificial Sequence
  Description of Artificial Sequence: Synthetic oligonucleotide
uaucaagacacauuuccau

SEQ ID NO: 3215888 - RNA, 19 nt, Artificial Sequence
  Description of Artificial Sequence: Synthetic oligonucleotide
uauuauaaauuuguuuauc

SEQ ID NO: 3215889 - RNA, 19 nt, Artificial Sequence
  Description of Artificial Sequence: Synthetic oligonucleotide
agagaaaucaaaccuuuua

SEQ ID NO: 3215890 - RNA, 19 nt, Artificial Sequence
  Description of Artificial Sequence: Synthetic oligonucleotide
auaguuacugcauuugauu

SEQ ID NO: 3215891 - RNA, 19 nt, Artificial Sequence
  Description of Artificial Sequence: Synthetic oligonucleotide
gauuucaugacguugccag

SEQ ID NO: 3215892 - RNA, 19 nt, Artificial Sequence
  Description of Artificial Sequence: Synthetic oligonucleotide
ucuuugaagacauuaggag

SEQ ID NO: 3215893 - RNA, 19 nt, Artificial Sequence
  Description of Artificial Sequence: Synthetic oligonucleotide
uuugaagacauuaggagcu

SEQ ID NO: 3215894 - RNA, 19 nt, Artificial Sequence
  Description of Artificial Sequence: Synthetic oligonucleotide
gauguuggagcugagagcg

SEQ ID NO: 3215895 - RNA, 19 nt, Artificial Sequence
  Description of Artificial Sequence: Synthetic oligonucleotide
uuagagaugucauacugcc

SEQ ID NO: 3215896 - RNA, 19 nt, Artificial Sequence
  Description of Artificial Sequence: Synthetic oligonucleotide
cuuugaagacauuaggagc

SEQ ID NO: 3215897 - RNA, 19 nt, Artificial Sequence
  Description of Artificial Sequence: Synthetic oligonucleotide
ucuggaugauuucaugacg

SEQ ID NO: 3215898 - RNA, 19 nt, Artificial Sequence
  Description of Artificial Sequence: Synthetic oligonucleotide
guuaaagccgucuuugaag

SEQ ID NO: 3215899 - RNA, 19 nt, Artificial Sequence
  Description of Artificial Sequence: Synthetic oligonucleotide
gaugauuucaugacguugc

SEQ ID NO: 3215900 - RNA, 19 nt, Artificial Sequence
  Description of Artificial Sequence: Synthetic oligonucleotide
aagcgcuggauguuggagc

SEQ ID NO: 3215901 - RNA, 19 nt, Artificial Sequence
  Description of Artificial Sequence: Synthetic oligonucleotide
gaagaucugcccaacaagg

SEQ ID NO: 3215902 - RNA, 19 nt, Artificial Sequence
  Description of Artificial Sequence: Synthetic oligonucleotide
aaguggcucccguacagcc

SEQ ID NO: 3215903 - RNA, 19 nt, Artificial Sequence
  Description of Artificial Sequence: Synthetic oligonucleotide
gaagcggucauccagggac

SEQ ID NO: 3215904 - RNA, 19 nt, Artificial Sequence
  Description of Artificial Sequence: Synthetic oligonucleotide
uuaaagccgucuuugaaga

SEQ ID NO: 3215905 - RNA, 19 nt, Artificial Sequence
  Description of Artificial Sequence: Synthetic oligonucleotide
uuuacuuucuuggagggca

SEQ ID NO: 3215906 - RNA, 19 nt, Artificial Sequence
  Description of Artificial Sequence: Synthetic oligonucleotide
agagaugucauacugccga

SEQ ID NO: 3215907 - RNA, 19 nt, Artificial Sequence
  Description of Artificial Sequence: Synthetic oligonucleotide
auuuguagggucuggauga

SEQ ID NO: 3215908 - RNA, 19 nt, Artificial Sequence
  Description of Artificial Sequence: Synthetic oligonucleotide
uucuccacugaccaggugc

SEQ ID NO: 3215909 - RNA, 19 nt, Artificial Sequence
  Description of Artificial Sequence: Synthetic oligonucleotide
aagacauuaggagcugccc

SEQ ID NO: 3215910 - RNA, 19 nt, Artificial Sequence
  Description of Artificial Sequence: Synthetic oligonucleotide
aauguccccaugcagccag

SEQ ID NO: 3215911 - RNA, 19 nt, Artificial Sequence
  Description of Artificial Sequence: Synthetic oligonucleotide
agaucugcccaacaaggcg

SEQ ID NO: 3215912 - RNA, 19 nt, Artificial Sequence
  Description of Artificial Sequence: Synthetic oligonucleotide
gaugucauacugccgaaug

SEQ ID NO: 3215913 - RNA, 19 nt, Artificial Sequence
  Description of Artificial Sequence: Synthetic oligonucleotide
uuucuuggagggcaccugg

SEQ ID NO: 3215914 - RNA, 19 nt, Artificial Sequence
  Description of Artificial Sequence: Synthetic oligonucleotide
uugccagucccacacaugc

SEQ ID NO: 3215915 - RNA, 19 nt, Artificial Sequence
  Description of Artificial Sequence: Synthetic oligonucleotide
ucagugcugaucaugacau

SEQ ID NO: 3215916 - RNA, 19 nt, Artificial Sequence
  Description of Artificial Sequence: Synthetic oligonucleotide
ucauucuuguagaagcgcu

SEQ ID NO: 3215917 - RNA, 19 nt, Artificial Sequence
  Description of Artificial Sequence: Synthetic oligonucleotide
uuaggagcugcccacucag

SEQ ID NO: 3215918 - RNA, 19 nt, Artificial Sequence
  Description of Artificial Sequence: Synthetic oligonucleotide
ucaccuucuccacugacca

SEQ ID NO: 3215919 - RNA, 19 nt, Artificial Sequence
  Description of Artificial Sequence: Synthetic oligonucleotide
aagaucugcccaacaaggc

SEQ ID NO: 3215920 - RNA, 19 nt, Artificial Sequence
  Description of Artificial Sequence: Synthetic oligonucleotide
acgugagcaggguuaaagc

SEQ ID NO: 3215921 - RNA, 19 nt, Artificial Sequence
  Description of Artificial Sequence: Synthetic oligonucleotide
ucagugaucaagccuggca

SEQ ID NO: 3215922 - RNA, 19 nt, Artificial Sequence
  Description of Artificial Sequence: Synthetic oligonucleotide
gaucaagccuggcauuucg

SEQ ID NO: 3215923 - RNA, 19 nt, Artificial Sequence
  Description of Artificial Sequence: Synthetic oligonucleotide
augauuucaugacguugcc

SEQ ID NO: 3215924 - RNA, 19 nt, Artificial Sequence
  Description of Artificial Sequence: Synthetic oligonucleotide
ucaagccuggcauuucggg

SEQ ID NO: 3215925 - RNA, 19 nt, Artificial Sequence
  Description of Artificial Sequence: Synthetic oligonucleotide
uccccaugcagccaguugc

SEQ ID NO: 3215926 - RNA, 19 nt, Artificial Sequence
  Description of Artificial Sequence: Synthetic oligonucleotide
uuggagggcaccuggauca

SEQ ID NO: 3215927 - RNA, 19 nt, Artificial Sequence
  Description of Artificial Sequence: Synthetic oligonucleotide
auuucgggcagcaaccagc

SEQ ID NO: 3215928 - RNA, 19 nt, Artificial Sequence
  Description of Artificial Sequence: Synthetic oligonucleotide
guugcugaaguagaggaag

SEQ ID NO: 3215929 - RNA, 19 nt, Artificial Sequence
  Description of Artificial Sequence: Synthetic oligonucleotide
ucauacugccgaauguccc

SEQ ID NO: 3215930 - RNA, 19 nt, Artificial Sequence
  Description of Artificial Sequence: Synthetic oligonucleotide
gagagcgcagccuacgaag

SEQ ID NO: 3215931 - RNA, 19 nt, Artificial Sequence
  Description of Artificial Sequence: Synthetic oligonucleotide
gaucugcccaacaaggcgg

SEQ ID NO: 3215932 - RNA, 19 nt, Artificial Sequence
  Description of Artificial Sequence: Synthetic oligonucleotide
cagcccuuuacuuucuugg

SEQ ID NO: 3215933 - RNA, 19 nt, Artificial Sequence
  Description of Artificial Sequence: Synthetic oligonucleotide
aggaugucagugaucaagc

SEQ ID NO: 3215934 - RNA, 19 nt, Artificial Sequence
  Description of Artificial Sequence: Synthetic oligonucleotide
aagccuggcauuucgggca

SEQ ID NO: 3215935 - RNA, 19 nt, Artificial Sequence
  Description of Artificial Sequence: Synthetic oligonucleotide
uggguuagagaugucauac

SEQ ID NO: 3215936 - RNA, 19 nt, Artificial Sequence
  Description of Artificial Sequence: Synthetic oligonucleotide
cauuuguagggucuggaug

SEQ ID NO: 3215937 - RNA, 19 nt, Artificial Sequence
  Description of Artificial Sequence: Synthetic oligonucleotide
uccagggacagcaggaugu

SEQ ID NO: 3215938 - RNA, 19 nt, Artificial Sequence
  Description of Artificial Sequence: Synthetic oligonucleotide
uuguagaagcgcuggaugu

SEQ ID NO: 3215939 - RNA, 19 nt, Artificial Sequence
  Description of Artificial Sequence: Synthetic oligonucleotide
aaagccgucuuugaagaca

SEQ ID NO: 3215940 - RNA, 19 nt, Artificial Sequence
  Description of Artificial Sequence: Synthetic oligonucleotide
cuuguagaagcgcuggaug

SEQ ID NO: 3215941 - RNA, 19 nt, Artificial Sequence
  Description of Artificial Sequence: Synthetic oligonucleotide
uagagaugucauacugccg

SEQ ID NO: 3215942 - RNA, 19 nt, Artificial Sequence
  Description of Artificial Sequence: Synthetic oligonucleotide
auucuuguagaagcgcugg

SEQ ID NO: 3215943 - RNA, 19 nt, Artificial Sequence
  Description of Artificial Sequence: Synthetic oligonucleotide
ucccacacaugcaaguggc

SEQ ID NO: 3215944 - RNA, 19 nt, Artificial Sequence
  Description of Artificial Sequence: Synthetic oligonucleotide
augucagugaucaagccug

SEQ ID NO: 3215945 - RNA, 19 nt, Artificial Sequence
  Description of Artificial Sequence: Synthetic oligonucleotide
aaggcggggcuucuguggg

SEQ ID NO: 3215946 - RNA, 19 nt, Artificial Sequence
  Description of Artificial Sequence: Synthetic oligonucleotide
uggaucaccuucuccacug

SEQ ID NO: 3215947 - RNA, 19 nt, Artificial Sequence
  Description of Artificial Sequence: Synthetic oligonucleotide
augcaaguggcucccguac

SEQ ID NO: 3215948 - RNA, 19 nt, Artificial Sequence
  Description of Artificial Sequence: Synthetic oligonucleotide
agcaggaugucagugauca

SEQ ID NO: 3215949 - RNA, 19 nt, Artificial Sequence
  Description of Artificial Sequence: Synthetic oligonucleotide
gguuagagaugucauacug

SEQ ID NO: 3215950 - RNA, 19 nt, Artificial Sequence
  Description of Artificial Sequence: Synthetic oligonucleotide
gacauuaggagcugcccac

SEQ ID NO: 3215951 - RNA, 19 nt, Artificial Sequence
  Description of Artificial Sequence: Synthetic oligonucleotide
uuucgggcagcaaccagcc

SEQ ID NO: 3215952 - RNA, 19 nt, Artificial Sequence
  Description of Artificial Sequence: Synthetic oligonucleotide
cauacugccgaaugucccc

SEQ ID NO: 3215953 - RNA, 19 nt, Artificial Sequence
  Description of Artificial Sequence: Synthetic oligonucleotide
cacacaugcaaguggcucc

SEQ ID NO: 3215954 - RNA, 19 nt, Artificial Sequence
  Description of Artificial Sequence: Synthetic oligonucleotide
ugagcaggguuaaagccgu

SEQ ID NO: 3215955 - RNA, 19 nt, Artificial Sequence
  Description of Artificial Sequence: Synthetic oligonucleotide
gugagcaggguuaaagccg

SEQ ID NO: 3215956 - RNA, 19 nt, Artificial Sequence
  Description of Artificial Sequence: Synthetic oligonucleotide
gacguugccagucccacac

SEQ ID NO: 3215957 - RNA, 19 nt, Artificial Sequence
  Description of Artificial Sequence: Synthetic oligonucleotide
ccauccuucauuuguaggg

SEQ ID NO: 3215958 - RNA, 19 nt, Artificial Sequence
  Description of Artificial Sequence: Synthetic oligonucleotide
guuagagaugucauacugc

SEQ ID NO: 3215959 - RNA, 19 nt, Artificial Sequence
  Description of Artificial Sequence: Synthetic oligonucleotide
uggcauuucgggcagcaac

SEQ ID NO: 3215960 - RNA, 19 nt, Artificial Sequence
  Description of Artificial Sequence: Synthetic oligonucleotide
uguggguuagagaugucau

SEQ ID NO: 3215961 - RNA, 19 nt, Artificial Sequence
  Description of Artificial Sequence: Synthetic oligonucleotide
ucuccacugaccaggugcc

SEQ ID NO: 3215962 - RNA, 19 nt, Artificial Sequence
  Description of Artificial Sequence: Synthetic oligonucleotide
uucaugacguugccagucc

SEQ ID NO: 3215963 - RNA, 19 nt, Artificial Sequence
  Description of Artificial Sequence: Synthetic oligonucleotide
aggaagcggaccuccaggg

SEQ ID NO: 3215964 - RNA, 19 nt, Artificial Sequence
  Description of Artificial Sequence: Synthetic oligonucleotide
caggaugucagugaucaag

SEQ ID NO: 3215965 - RNA, 19 nt, Artificial Sequence
  Description of Artificial Sequence: Synthetic oligonucleotide
aucaccuucuccacugacc

SEQ ID NO: 3215966 - RNA, 19 nt, Artificial Sequence
  Description of Artificial Sequence: Synthetic oligonucleotide
uucuguggguuagagaugu

SEQ ID NO: 3215967 - RNA, 19 nt, Artificial Sequence
  Description of Artificial Sequence: Synthetic oligonucleotide
ugggucauggaggaagcgg

SEQ ID NO: 3215968 - RNA, 19 nt, Artificial Sequence
  Description of Artificial Sequence: Synthetic oligonucleotide
ugaaguagaggaagcgguc

SEQ ID NO: 3215969 - RNA, 19 nt, Artificial Sequence
  Description of Artificial Sequence: Synthetic oligonucleotide
agacauuaggagcugccca

SEQ ID NO: 3215970 - RNA, 19 nt, Artificial Sequence
  Description of Artificial Sequence: Synthetic oligonucleotide
uccuucauuuguagggucu

SEQ ID NO: 3215971 - RNA, 19 nt, Artificial Sequence
  Description of Artificial Sequence: Synthetic oligonucleotide
aacaaggcggggcuucugu

SEQ ID NO: 3215972 - RNA, 19 nt, Artificial Sequence
  Description of Artificial Sequence: Synthetic oligonucleotide
uagaagcgcuggauguugg

SEQ ID NO: 3215973 - RNA, 19 nt, Artificial Sequence
  Description of Artificial Sequence: Synthetic oligonucleotide
ggaagaucugcccaacaag

SEQ ID NO: 3215974 - RNA, 19 nt, Artificial Sequence
  Description of Artificial Sequence: Synthetic oligonucleotide
ugucagugaucaagccugg

SEQ ID NO: 3215975 - RNA, 19 nt, Artificial Sequence
  Description of Artificial Sequence: Synthetic oligonucleotide
gaggaagcggucauccagg

SEQ ID NO: 3215976 - RNA, 19 nt, Artificial Sequence
  Description of Artificial Sequence: Synthetic oligonucleotide
gucuggaugauuucaugac

SEQ ID NO: 3215977 - RNA, 19 nt, Artificial Sequence
  Description of Artificial Sequence: Synthetic oligonucleotide
guagaggaagcggucaucc

SEQ ID NO: 3215978 - RNA, 19 nt, Artificial Sequence
  Description of Artificial Sequence: Synthetic oligonucleotide
ugucauacugccgaauguc

SEQ ID NO: 3215979 - RNA, 19 nt, Artificial Sequence
  Description of Artificial Sequence: Synthetic oligonucleotide
cccucauucuuguagaagc

SEQ ID NO: 3215980 - RNA, 19 nt, Artificial Sequence
  Description of Artificial Sequence: Synthetic oligonucleotide
auggaggaagcggaccucc

SEQ ID NO: 3215981 - RNA, 19 nt, Artificial Sequence
  Description of Artificial Sequence: Synthetic oligonucleotide
caagccuggcauuucgggc

SEQ ID NO: 3215982 - RNA, 19 nt, Artificial Sequence
  Description of Artificial Sequence: Synthetic oligonucleotide
cauucuuguagaagcgcug

SEQ ID NO: 3215983 - RNA, 19 nt, Artificial Sequence
  Description of Artificial Sequence: Synthetic oligonucleotide
gucuuugaagacauuagga

SEQ ID NO: 3215984 - RNA, 19 nt, Artificial Sequence
  Description of Artificial Sequence: Synthetic oligonucleotide
aaggaagaucugcccaaca

SEQ ID NO: 3215985 - RNA, 19 nt, Artificial Sequence
  Description of Artificial Sequence: Synthetic oligonucleotide
auccuucauuuguaggguc

SEQ ID NO: 3215986 - RNA, 19 nt, Artificial Sequence
  Description of Artificial Sequence: Synthetic oligonucleotide
uuucaugacguugccaguc

SEQ ID NO: 3215987 - RNA, 19 nt, Artificial Sequence
  Description of Artificial Sequence: Synthetic oligonucleotide
aaguagaggaagcggucau

SEQ ID NO: 3215988 - RNA, 19 nt, Artificial Sequence
  Description of Artificial Sequence: Synthetic oligonucleotide
gaugucagugaucaagccu

SEQ ID NO: 3215989 - RNA, 19 nt, Artificial Sequence
  Description of Artificial Sequence: Synthetic oligonucleotide
acacaugcaaguggcuccc

SEQ ID NO: 3215990 - RNA, 19 nt, Artificial Sequence
  Description of Artificial Sequence: Synthetic oligonucleotide
gucccacacaugcaagugg

SEQ ID NO: 3215991 - RNA, 19 nt, Artificial Sequence
  Description of Artificial Sequence: Synthetic oligonucleotide
aagagaagcaucuugaagg

SEQ ID NO: 3215992 - RNA, 19 nt, Artificial Sequence
  Description of Artificial Sequence: Synthetic oligonucleotide
ugaaccaagaaucaaaucc

SEQ ID NO: 3215993 - RNA, 19 nt, Artificial Sequence
  Description of Artificial Sequence: Synthetic oligonucleotide
aaucuauuucuuuauauuc

SEQ ID NO: 3215994 - RNA, 19 nt, Artificial Sequence
  Description of Artificial Sequence: Synthetic oligonucleotide
aauguuuuguugcacaggg

SEQ ID NO: 3215995 - RNA, 19 nt, Artificial Sequence
  Description of Artificial Sequence: Synthetic oligonucleotide
uuuguuugaaacuugaacu

SEQ ID NO: 3215996 - RNA, 19 nt, Artificial Sequence
  Description of Artificial Sequence: Synthetic oligonucleotide
aauggaucaguaaacaggc

SEQ ID NO: 3215997 - RNA, 19 nt, Artificial Sequence
  Description of Artificial Sequence: Synthetic oligonucleotide
auuuguuugaaacuugaac

SEQ ID NO: 3215998 - RNA, 19 nt, Artificial Sequence
  Description of Artificial Sequence: Synthetic oligonucleotide
accaaaaggggacagaagc

SEQ ID NO: 3215999 - RNA, 19 nt, Artificial Sequence
  Description of Artificial Sequence: Synthetic oligonucleotide
uaacaacacaccaaaaggg

SEQ ID NO: 3216000 - RNA, 19 nt, Artificial Sequence
  Description of Artificial Sequence: Synthetic oligonucleotide
uuugcaauguacaaaauaa

SEQ ID NO: 3216001 - RNA, 19 nt, Artificial Sequence
  Description of Artificial Sequence: Synthetic oligonucleotide
auuccaauagguuuugggg

SEQ ID NO: 3216002 - RNA, 19 nt, Artificial Sequence
  Description of Artificial Sequence: Synthetic oligonucleotide
auagaguuuaacaacacac

SEQ ID NO: 3216003 - RNA, 19 nt, Artificial Sequence
  Description of Artificial Sequence: Synthetic oligonucleotide
aaaucaguuuagucaaugg

SEQ ID NO: 3216004 - RNA, 19 nt, Artificial Sequence
  Description of Artificial Sequence: Synthetic oligonucleotide
uauagcauagccaguagcc

SEQ ID NO: 3216005 - RNA, 19 nt, Artificial Sequence
  Description of Artificial Sequence: Synthetic oligonucleotide
ucauaugcaauuuuauuug

SEQ ID NO: 3216006 - RNA, 19 nt, Artificial Sequence
  Description of Artificial Sequence: Synthetic oligonucleotide
uauuucagaaucuauuucu

SEQ ID NO: 3216007 - RNA, 19 nt, Artificial Sequence
  Description of Artificial Sequence: Synthetic oligonucleotide
caauggaucaguaaacagg

SEQ ID NO: 3216008 - RNA, 19 nt, Artificial Sequence
  Description of Artificial Sequence: Synthetic oligonucleotide
ugcaauguacaaaauaacu

SEQ ID NO: 3216009 - RNA, 19 nt, Artificial Sequence
  Description of Artificial Sequence: Synthetic oligonucleotide
gaagguauucaccaggacc

SEQ ID NO: 3216010 - RNA, 19 nt, Artificial Sequence
  Description of Artificial Sequence: Synthetic oligonucleotide
acacuuaaaagucuauuuc

SEQ ID NO: 3216011 - RNA, 19 nt, Artificial Sequence
  Description of Artificial Sequence: Synthetic oligonucleotide
aggcaaaccaauuucagag

SEQ ID NO: 3216012 - RNA, 19 nt, Artificial Sequence
  Description of Artificial Sequence: Synthetic oligonucleotide
aaucaguuuagucaaugga

SEQ ID NO: 3216013 - RNA, 19 nt, Artificial Sequence
  Description of Artificial Sequence: Synthetic oligonucleotide
uggaucaguaaacaggcag

SEQ ID NO: 3216014 - RNA, 19 nt, Artificial Sequence
  Description of Artificial Sequence: Synthetic oligonucleotide
auauagcauagccaguagc

SEQ ID NO: 3216015 - RNA, 19 nt, Artificial Sequence
  Description of Artificial Sequence: Synthetic oligonucleotide
ucuuuugucacacuggcau

SEQ ID NO: 3216016 - RNA, 19 nt, Artificial Sequence
  Description of Artificial Sequence: Synthetic oligonucleotide
uucauaugcaauuuuauuu

SEQ ID NO: 3216017 - RNA, 19 nt, Artificial Sequence
  Description of Artificial Sequence: Synthetic oligonucleotide
aaccacagauauccaagcc

SEQ ID NO: 3216018 - RNA, 19 nt, Artificial Sequence
  Description of Artificial Sequence: Synthetic oligonucleotide
aauagaguuuaacaacaca

SEQ ID NO: 3216019 - RNA, 19 nt, Artificial Sequence
  Description of Artificial Sequence: Synthetic oligonucleotide
ucuuucuuuugucacacug

SEQ ID NO: 3216020 - RNA, 19 nt, Artificial Sequence
  Description of Artificial Sequence: Synthetic oligonucleotide
ucaguaaacaggcagcuuc

SEQ ID NO: 3216021 - RNA, 19 nt, Artificial Sequence
  Description of Artificial Sequence: Synthetic oligonucleotide
ugucacacuggcauaagag

SEQ ID NO: 3216022 - RNA, 19 nt, Artificial Sequence
  Description of Artificial Sequence: Synthetic oligonucleotide
aaaagaccuaggcaaacca

SEQ ID NO: 3216023 - RNA, 19 nt, Artificial Sequence
  Description of Artificial Sequence: Synthetic oligonucleotide
uagucaauggaucaguaaa

SEQ ID NO: 3216024 - RNA, 19 nt, Artificial Sequence
  Description of Artificial Sequence: Synthetic oligonucleotide
uuguuugaaacuugaacug

SEQ ID NO: 3216025 - RNA, 19 nt, Artificial Sequence
  Description of Artificial Sequence: Synthetic oligonucleotide
acuugaacugcacaaaaca

SEQ ID NO: 3216026 - RNA, 19 nt, Artificial Sequence
  Description of Artificial Sequence: Synthetic oligonucleotide
gaauuaaaagaccuaggca

SEQ ID NO: 3216027 - RNA, 19 nt, Artificial Sequence
  Description of Artificial Sequence: Synthetic oligonucleotide
acagaagguauucaccagg

SEQ ID NO: 3216028 - RNA, 19 nt, Artificial Sequence
  Description of Artificial Sequence: Synthetic oligonucleotide
cugaugggaauuaaaagac

SEQ ID NO: 3216029 - RNA, 19 nt, Artificial Sequence
  Description of Artificial Sequence: Synthetic oligonucleotide
ucacauggggucuggaugg

SEQ ID NO: 3216030 - RNA, 19 nt, Artificial Sequence
  Description of Artificial Sequence: Synthetic oligonucleotide
ugcaauuuuauuuguuuga

SEQ ID NO: 3216031 - RNA, 19 nt, Artificial Sequence
  Description of Artificial Sequence: Synthetic oligonucleotide
aaauaacucagaaccacag

SEQ ID NO: 3216032 - RNA, 19 nt, Artificial Sequence
  Description of Artificial Sequence: Synthetic oligonucleotide
aguuuaacaacacaccaaa

SEQ ID NO: 3216033 - RNA, 19 nt, Artificial Sequence
  Description of Artificial Sequence: Synthetic oligonucleotide
auauucagcagaauguuuc

SEQ ID NO: 3216034 - RNA, 19 nt, Artificial Sequence
  Description of Artificial Sequence: Synthetic oligonucleotide
ucaauggaucaguaaacag

SEQ ID NO: 3216035 - RNA, 19 nt, Artificial Sequence
  Description of Artificial Sequence: Synthetic oligonucleotide
aacuagugcagcgaggcuc

SEQ ID NO: 3216036 - RNA, 19 nt, Artificial Sequence
  Description of Artificial Sequence: Synthetic oligonucleotide
aaaaucaguuuagucaaug

SEQ ID NO: 3216037 - RNA, 19 nt, Artificial Sequence
  Description of Artificial Sequence: Synthetic oligonucleotide
aagguauucaccaggacca

SEQ ID NO: 3216038 - RNA, 19 nt, Artificial Sequence
  Description of Artificial Sequence: Synthetic oligonucleotide
ucuauuucagaaucuauuu

SEQ ID NO: 3216039 - RNA, 19 nt, Artificial Sequence
  Description of Artificial Sequence: Synthetic oligonucleotide
ugugccagacuucugcuag

SEQ ID NO: 3216040 - RNA, 19 nt, Artificial Sequence
  Description of Artificial Sequence: Synthetic oligonucleotide
uagccaguagcccagauuc

SEQ ID NO: 3216041 - RNA, 19 nt, Artificial Sequence
  Description of Artificial Sequence: Synthetic oligonucleotide
aucaccaccaggaauggcc

SEQ ID NO: 3216042 - RNA, 19 nt, Artificial Sequence
  Description of Artificial Sequence: Synthetic oligonucleotide
ucaguuuagucaauggauc

SEQ ID NO: 3216043 - RNA, 19 nt, Artificial Sequence
  Description of Artificial Sequence: Synthetic oligonucleotide
ugaauguuuuguugcacag

SEQ ID NO: 3216044 - RNA, 19 nt, Artificial Sequence
  Description of Artificial Sequence: Synthetic oligonucleotide
aauaacucagaaccacaga

SEQ ID NO: 3216045 - RNA, 19 nt, Artificial Sequence
  Description of Artificial Sequence: Synthetic oligonucleotide
uuccaauagguuuugggga

SEQ ID NO: 3216046 - RNA, 19 nt, Artificial Sequence
  Description of Artificial Sequence: Synthetic oligonucleotide
agcugauugggacaagagg

SEQ ID NO: 3216047 - RNA, 19 nt, Artificial Sequence
  Description of Artificial Sequence: Synthetic oligonucleotide
uucuuuauauucagcagaa

SEQ ID NO: 3216048 - RNA, 19 nt, Artificial Sequence
  Description of Artificial Sequence: Synthetic oligonucleotide
gauacuugcuucaagacaa

SEQ ID NO: 3216049 - RNA, 19 nt, Artificial Sequence
  Description of Artificial Sequence: Synthetic oligonucleotide
uagguuuuggggaugcagc

SEQ ID NO: 3216050 - RNA, 19 nt, Artificial Sequence
  Description of Artificial Sequence: Synthetic oligonucleotide
aggauacuugcuucaagac

SEQ ID NO: 3216051 - RNA, 19 nt, Artificial Sequence
  Description of Artificial Sequence: Synthetic oligonucleotide
uuggccaaaaucaguuuag

SEQ ID NO: 3216052 - RNA, 19 nt, Artificial Sequence
  Description of Artificial Sequence: Synthetic oligonucleotide
accuaggcaaaccaauuuc

SEQ ID NO: 3216053 - RNA, 19 nt, Artificial Sequence
  Description of Artificial Sequence: Synthetic oligonucleotide
uaugcaauuuuauuuguuu

SEQ ID NO: 3216054 - RNA, 19 nt, Artificial Sequence
  Description of Artificial Sequence: Synthetic oligonucleotide
uucagaaucuauuucuuua

SEQ ID NO: 3216055 - RNA, 19 nt, Artificial Sequence
  Description of Artificial Sequence: Synthetic oligonucleotide
uggcauaagagaagcaucu

SEQ ID NO: 3216056 - RNA, 19 nt, Artificial Sequence
  Description of Artificial Sequence: Synthetic oligonucleotide
agcugaugggaauuaaaag

SEQ ID NO: 3216057 - RNA, 19 nt, Artificial Sequence
  Description of Artificial Sequence: Synthetic oligonucleotide
aacuugaacugcacaaaac

SEQ ID NO: 3216058 - RNA, 19 nt, Artificial Sequence
  Description of Artificial Sequence: Synthetic oligonucleotide
aaacuugaacugcacaaaa

SEQ ID NO: 3216059 - RNA, 19 nt, Artificial Sequence
  Description of Artificial Sequence: Synthetic oligonucleotide
ugaugggaauuaaaagacc

SEQ ID NO: 3216060 - RNA, 19 nt, Artificial Sequence
  Description of Artificial Sequence: Synthetic oligonucleotide
acaguacuuugcaugaacc

SEQ ID NO: 3216061 - RNA, 19 nt, Artificial Sequence
  Description of Artificial Sequence: Synthetic oligonucleotide
augcaauuuuauuuguuug

SEQ ID NO: 3216062 - RNA, 19 nt, Artificial Sequence
  Description of Artificial Sequence: Synthetic oligonucleotide
cauaagagaagcaucuuga

SEQ ID NO: 3216063 - RNA, 19 nt, Artificial Sequence
  Description of Artificial Sequence: Synthetic oligonucleotide
uugaaacuugaacugcaca

SEQ ID NO: 3216064 - RNA, 19 nt, Artificial Sequence
  Description of Artificial Sequence: Synthetic oligonucleotide
ucacacuggcauaagagaa

SEQ ID NO: 3216065 - RNA, 19 nt, Artificial Sequence
  Description of Artificial Sequence: Synthetic oligonucleotide
auagcauagccaguagccc

SEQ ID NO: 3216066 - RNA, 19 nt, Artificial Sequence
  Description of Artificial Sequence: Synthetic oligonucleotide
agcaucuugaaggugguuc

SEQ ID NO: 3216067 - RNA, 19 nt, Artificial Sequence
  Description of Artificial Sequence: Synthetic oligonucleotide
uguuugaaacuugaacugc

SEQ ID NO: 3216068 - RNA, 19 nt, Artificial Sequence
  Description of Artificial Sequence: Synthetic oligonucleotide
uaaacaggcagcuucucuc

SEQ ID NO: 3216069 - RNA, 19 nt, Artificial Sequence
  Description of Artificial Sequence: Synthetic oligonucleotide
agcuuugcaauguacaaaa

SEQ ID NO: 3216070 - RNA, 19 nt, Artificial Sequence
  Description of Artificial Sequence: Synthetic oligonucleotide
uuuucuacaaggccugcuc

SEQ ID NO: 3216071 - RNA, 19 nt, Artificial Sequence
  Description of Artificial Sequence: Synthetic oligonucleotide
gacagaagcugauugggac

SEQ ID NO: 3216072 - RNA, 19 nt, Artificial Sequence
  Description of Artificial Sequence: Synthetic oligonucleotide
uugcaauguacaaaauaac

SEQ ID NO: 3216073 - RNA, 19 nt, Artificial Sequence
  Description of Artificial Sequence: Synthetic oligonucleotide
ugaauuggcacuuggccaa

SEQ ID NO: 3216074 - RNA, 19 nt, Artificial Sequence
  Description of Artificial Sequence: Synthetic oligonucleotide
gaggauacuugcuucaaga

SEQ ID NO: 3216075 - RNA, 19 nt, Artificial Sequence
  Description of Artificial Sequence: Synthetic oligonucleotide
gcgauuucagagcugaugg

SEQ ID NO: 3216076 - RNA, 19 nt, Artificial Sequence
  Description of Artificial Sequence: Synthetic oligonucleotide
acuuaaaagucuauuucag

SEQ ID NO: 3216077 - RNA, 19 nt, Artificial Sequence
  Description of Artificial Sequence: Synthetic oligonucleotide
ugcuguugauauagcauag

SEQ ID NO: 3216078 - RNA, 19 nt, Artificial Sequence
  Description of Artificial Sequence: Synthetic oligonucleotide
gauauagcauagccaguag

SEQ ID NO: 3216079 - RNA, 19 nt, Artificial Sequence
  Description of Artificial Sequence: Synthetic oligonucleotide
gccaaaaucaguuuaguca

SEQ ID NO: 3216080 - RNA, 19 nt, Artificial Sequence
  Description of Artificial Sequence: Synthetic oligonucleotide
uugggaagagcacacugca

SEQ ID NO: 3216081 - RNA, 19 nt, Artificial Sequence
  Description of Artificial Sequence: Synthetic oligonucleotide
aaccaagaaucaaauccac

SEQ ID NO: 3216082 - RNA, 19 nt, Artificial Sequence
  Description of Artificial Sequence: Synthetic oligonucleotide
uuugaaacuugaacugcac

SEQ ID NO: 3216083 - RNA, 19 nt, Artificial Sequence
  Description of Artificial Sequence: Synthetic oligonucleotide
ugugguugauaaaaccccu

SEQ ID NO: 3216084 - RNA, 19 nt, Artificial Sequence
  Description of Artificial Sequence: Synthetic oligonucleotide
cacuuaaaagucuauuuca

SEQ ID NO: 3216085 - RNA, 19 nt, Artificial Sequence
  Description of Artificial Sequence: Synthetic oligonucleotide
agucaauggaucaguaaac

SEQ ID NO: 3216086 - RNA, 19 nt, Artificial Sequence
  Description of Artificial Sequence: Synthetic oligonucleotide
auggccucccaccugugcc

SEQ ID NO: 3216087 - RNA, 19 nt, Artificial Sequence
  Description of Artificial Sequence: Synthetic oligonucleotide
ucagaaucuauuucuuuau

SEQ ID NO: 3216088 - RNA, 19 nt, Artificial Sequence
  Description of Artificial Sequence: Synthetic oligonucleotide
gaaccacagauauccaagc

SEQ ID NO: 3216089 - RNA, 19 nt, Artificial Sequence
  Description of Artificial Sequence: Synthetic oligonucleotide
accacagauauccaagccu

SEQ ID NO: 3216090 - RNA, 19 nt, Artificial Sequence
  Description of Artificial Sequence: Synthetic oligonucleotide
uuucuacaaggccugcuca

SEQ ID NO: 3216091 - RNA, 19 nt, Artificial Sequence
  Description of Artificial Sequence: Synthetic oligonucleotide
uucaucuucagguagaaga

SEQ ID NO: 3216092 - RNA, 19 nt, Artificial Sequence
  Description of Artificial Sequence: Synthetic oligonucleotide
auucuuauaggccacggag

SEQ ID NO: 3216093 - RNA, 19 nt, Artificial Sequence
  Description of Artificial Sequence: Synthetic oligonucleotide
ucuuauaggccacggagag

SEQ ID NO: 3216094 - RNA, 19 nt, Artificial Sequence
  Description of Artificial Sequence: Synthetic oligonucleotide
uacucuuugaccucggggc

SEQ ID NO: 3216095 - RNA, 19 nt, Artificial Sequence
  Description of Artificial Sequence: Synthetic oligonucleotide
agcacagugucgcacacgc

SEQ ID NO: 3216096 - RNA, 19 nt, Artificial Sequence
  Description of Artificial Sequence: Synthetic oligonucleotide
ucagguagaagacacggcu

SEQ ID NO: 3216097 - RNA, 19 nt, Artificial Sequence
  Description of Artificial Sequence: Synthetic oligonucleotide
uuauaggccacggagagca

SEQ ID NO: 3216098 - RNA, 19 nt, Artificial Sequence
  Description of Artificial Sequence: Synthetic oligonucleotide
gaagacacggcucucggcc

SEQ ID NO: 3216099 - RNA, 19 nt, Artificial Sequence
  Description of Artificial Sequence: Synthetic oligonucleotide
gacaggacccuccaggccg

SEQ ID NO: 3216100 - RNA, 19 nt, Artificial Sequence
  Description of Artificial Sequence: Synthetic oligonucleotide
accacauucuuauaggcca

SEQ ID NO: 3216101 - RNA, 19 nt, Artificial Sequence
  Description of Artificial Sequence: Synthetic oligonucleotide
ucuccagccuccuugauga

SEQ ID NO: 3216102 - RNA, 19 nt, Artificial Sequence
  Description of Artificial Sequence: Synthetic oligonucleotide
auagcgcucggccugcucc

SEQ ID NO: 3216103 - RNA, 19 nt, Artificial Sequence
  Description of Artificial Sequence: Synthetic oligonucleotide
uucuggaucagacuggcuc

SEQ ID NO: 3216104 - RNA, 19 nt, Artificial Sequence
  Description of Artificial Sequence: Synthetic oligonucleotide
acggagagcagauucccgc

SEQ ID NO: 3216105 - RNA, 19 nt, Artificial Sequence
  Description of Artificial Sequence: Synthetic oligonucleotide
ucaucuucagguagaagac

SEQ ID NO: 3216106 - RNA, 19 nt, Artificial Sequence
  Description of Artificial Sequence: Synthetic oligonucleotide
uucuuauaggccacggaga

SEQ ID NO: 3216107 - RNA, 19 nt, Artificial Sequence
  Description of Artificial Sequence: Synthetic oligonucleotide
aacuuggccuucuggauca

SEQ ID NO: 3216108 - RNA, 19 nt, Artificial Sequence
  Description of Artificial Sequence: Synthetic oligonucleotide
cuucagguagaagacacgg

SEQ ID NO: 3216109 - RNA, 19 nt, Artificial Sequence
  Description of Artificial Sequence: Synthetic oligonucleotide
uaguagucgcccuucaucu

SEQ ID NO: 3216110 - RNA, 19 nt, Artificial Sequence
  Description of Artificial Sequence: Synthetic oligonucleotide
ucuucagguagaagacacg

SEQ ID NO: 3216111 - RNA, 19 nt, Artificial Sequence
  Description of Artificial Sequence: Synthetic oligonucleotide
acucuuugaccucggggcc

SEQ ID NO: 3216112 - RNA, 19 nt, Artificial Sequence
  Description of Artificial Sequence: Synthetic oligonucleotide
auagcgguaguagucgccc

SEQ ID NO: 3216113 - RNA, 19 nt, Artificial Sequence
  Description of Artificial Sequence: Synthetic oligonucleotide
aucuucagguagaagacac

SEQ ID NO: 3216114 - RNA, 19 nt, Artificial Sequence
  Description of Artificial Sequence: Synthetic oligonucleotide
ucgcccuucaucuucaggu

SEQ ID NO: 3216115 - RNA, 19 nt, Artificial Sequence
  Description of Artificial Sequence: Synthetic oligonucleotide
cacagugucgcacacgccc

SEQ ID NO: 3216116 - RNA, 19 nt, Artificial Sequence
  Description of Artificial Sequence: Synthetic oligonucleotide
uagaagacacggcucucgg

SEQ ID NO: 3216117 - RNA, 19 nt, Artificial Sequence
  Description of Artificial Sequence: Synthetic oligonucleotide
uucugcucgaugcuggaca

SEQ ID NO: 3216118 - RNA, 19 nt, Artificial Sequence
  Description of Artificial Sequence: Synthetic oligonucleotide
uugcucuucugcucgaugc

SEQ ID NO: 3216119 - RNA, 19 nt, Artificial Sequence
  Description of Artificial Sequence: Synthetic oligonucleotide
caugaaggcugccaugucc

SEQ ID NO: 3216120 - RNA, 19 nt, Artificial Sequence
  Description of Artificial Sequence: Synthetic oligonucleotide
agcagauucccgcuccucg

SEQ ID NO: 3216121 - RNA, 19 nt, Artificial Sequence
  Description of Artificial Sequence: Synthetic oligonucleotide
guacucuuugaccucgggg

SEQ ID NO: 3216122 - RNA, 19 nt, Artificial Sequence
  Description of Artificial Sequence: Synthetic oligonucleotide
agauagcgguaguagucgc

SEQ ID NO: 3216123 - RNA, 19 nt, Artificial Sequence
  Description of Artificial Sequence: Synthetic oligonucleotide
ugacuccgaggacagacag

SEQ ID NO: 3216124 - RNA, 19 nt, Artificial Sequence
  Description of Artificial Sequence: Synthetic oligonucleotide
cucgaugcuggacaggacc

SEQ ID NO: 3216125 - RNA, 19 nt, Artificial Sequence
  Description of Artificial Sequence: Synthetic oligonucleotide
gaggugggaguccagcagg

SEQ ID NO: 3216126 - RNA, 19 nt, Artificial Sequence
  Description of Artificial Sequence: Synthetic oligonucleotide
ucuaccuucucccgguacu

SEQ ID NO: 3216127 - RNA, 19 nt, Artificial Sequence
  Description of Artificial Sequence: Synthetic oligonucleotide
ugaggugggaguccagcag

SEQ ID NO: 3216128 - RNA, 19 nt, Artificial Sequence
  Description of Artificial Sequence: Synthetic oligonucleotide
agaagacacggcucucggc

SEQ ID NO: 3216129 - RNA, 19 nt, Artificial Sequence
  Description of Artificial Sequence: Synthetic oligonucleotide
uccgucucuaccuucuccc

SEQ ID NO: 3216130 - RNA, 19 nt, Artificial Sequence
  Description of Artificial Sequence: Synthetic oligonucleotide
uucaugaaggcugccaugu

SEQ ID NO: 3216131 - RNA, 19 nt, Artificial Sequence
  Description of Artificial Sequence: Synthetic oligonucleotide
ugcuccgccaacuuggccu

SEQ ID NO: 3216132 - RNA, 19 nt, Artificial Sequence
  Description of Artificial Sequence: Synthetic oligonucleotide
uccaugacuccgaggacag

SEQ ID NO: 3216133 - RNA, 19 nt, Artificial Sequence
  Description of Artificial Sequence: Synthetic oligonucleotide
cuggacaggacccuccagg

SEQ ID NO: 3216134 - RNA, 19 nt, Artificial Sequence
  Description of Artificial Sequence: Synthetic oligonucleotide
ucuggaucagacuggcucu

SEQ ID NO: 3216135 - RNA, 19 nt, Artificial Sequence
  Description of Artificial Sequence: Synthetic oligonucleotide
cucuccaugacuccgagga

SEQ ID NO: 3216136 - RNA, 19 nt, Artificial Sequence
  Description of Artificial Sequence: Synthetic oligonucleotide
ugccauguccucauagcgc

SEQ ID NO: 3216137 - RNA, 19 nt, Artificial Sequence
  Description of Artificial Sequence: Synthetic oligonucleotide
cucguugcucuucugcucg

SEQ ID NO: 3216138 - RNA, 19 nt, Artificial Sequence
  Description of Artificial Sequence: Synthetic oligonucleotide
gaucagacuggcucucucc

SEQ ID NO: 3216139 - RNA, 19 nt, Artificial Sequence
  Description of Artificial Sequence: Synthetic oligonucleotide
uucagguagaagacacggc

SEQ ID NO: 3216140 - RNA, 19 nt, Artificial Sequence
  Description of Artificial Sequence: Synthetic oligonucleotide
ucgaugcuggacaggaccc

SEQ ID NO: 3216141 - RNA, 19 nt, Artificial Sequence
  Description of Artificial Sequence: Synthetic oligonucleotide
uuggccuucuggaucagac

SEQ ID NO: 3216142 - RNA, 19 nt, Artificial Sequence
  Description of Artificial Sequence: Synthetic oligonucleotide
caccacauucuuauaggcc

SEQ ID NO: 3216143 - RNA, 19 nt, Artificial Sequence
  Description of Artificial Sequence: Synthetic oligonucleotide
cugccauguccucauagcg

SEQ ID NO: 3216144 - RNA, 19 nt, Artificial Sequence
  Description of Artificial Sequence: Synthetic oligonucleotide
agguagaagacacggcucu

SEQ ID NO: 3216145 - RNA, 19 nt, Artificial Sequence
  Description of Artificial Sequence: Synthetic oligonucleotide
ucccgguacucuuugaccu

SEQ ID NO: 3216146 - RNA, 19 nt, Artificial Sequence
  Description of Artificial Sequence: Synthetic oligonucleotide
uccuugaugaggugggagu

SEQ ID NO: 3216147 - RNA, 19 nt, Artificial Sequence
  Description of Artificial Sequence: Synthetic oligonucleotide
cagauagcgguaguagucg

SEQ ID NO: 3216148 - RNA, 19 nt, Artificial Sequence
  Description of Artificial Sequence: Synthetic oligonucleotide
cucuucugcucgaugcugg

SEQ ID NO: 3216149 - RNA, 19 nt, Artificial Sequence
  Description of Artificial Sequence: Synthetic oligonucleotide
ucugcucgaugcuggacag

SEQ ID NO: 3216150 - RNA, 19 nt, Artificial Sequence
  Description of Artificial Sequence: Synthetic oligonucleotide
guaguagucgcccuucauc

SEQ ID NO: 3216151 - RNA, 19 nt, Artificial Sequence
  Description of Artificial Sequence: Synthetic oligonucleotide
guagaagacacggcucucg

SEQ ID NO: 3216152 - RNA, 19 nt, Artificial Sequence
  Description of Artificial Sequence: Synthetic oligonucleotide
cuggcucucuccaugacuc

SEQ ID NO: 3216153 - RNA, 19 nt, Artificial Sequence
  Description of Artificial Sequence: Synthetic oligonucleotide
uuccucgcccuuuuccacg

SEQ ID NO: 3216154 - RNA, 19 nt, Artificial Sequence
  Description of Artificial Sequence: Synthetic oligonucleotide
gaguuccucgcccuuuucc

SEQ ID NO: 3216155 - RNA, 19 nt, Artificial Sequence
  Description of Artificial Sequence: Synthetic oligonucleotide
accucggccagauagcggu

SEQ ID NO: 3216156 - RNA, 19 nt, Artificial Sequence
  Description of Artificial Sequence: Synthetic oligonucleotide
gagagcagauucccgcucc

SEQ ID NO: 3216157 - RNA, 19 nt, Artificial Sequence
  Description of Artificial Sequence: Synthetic oligonucleotide
caugacuccgaggacagac

SEQ ID NO: 3216158 - RNA, 19 nt, Artificial Sequence
  Description of Artificial Sequence: Synthetic oligonucleotide
uggacaggacccuccaggc

SEQ ID NO: 3216159 - RNA, 19 nt, Artificial Sequence
  Description of Artificial Sequence: Synthetic oligonucleotide
cucgcaggagaguuccucg

SEQ ID NO: 3216160 - RNA, 19 nt, Artificial Sequence
  Description of Artificial Sequence: Synthetic oligonucleotide
uccagcaggcccagcacag

SEQ ID NO: 3216161 - RNA, 19 nt, Artificial Sequence
  Description of Artificial Sequence: Synthetic oligonucleotide
aggcccagcacagugucgc

SEQ ID NO: 3216162 - RNA, 19 nt, Artificial Sequence
  Description of Artificial Sequence: Synthetic oligonucleotide
ucucuggccgcccaccaca

SEQ ID NO: 3216163 - RNA, 19 nt, Artificial Sequence
  Description of Artificial Sequence: Synthetic oligonucleotide
aguuccucgcccuuuucca

SEQ ID NO: 3216164 - RNA, 19 nt, Artificial Sequence
  Description of Artificial Sequence: Synthetic oligonucleotide
ucucccgguacucuuugac

SEQ ID NO: 3216165 - RNA, 19 nt, Artificial Sequence
  Description of Artificial Sequence: Synthetic oligonucleotide
gaugaggugggaguccagc

SEQ ID NO: 3216166 - RNA, 19 nt, Artificial Sequence
  Description of Artificial Sequence: Synthetic oligonucleotide
uucucuuccgaccccuccu

SEQ ID NO: 3216167 - RNA, 19 nt, Artificial Sequence
  Description of Artificial Sequence: Synthetic oligonucleotide
acauucuuauaggccacgg

SEQ ID NO: 3216168 - RNA, 19 nt, Artificial Sequence
  Description of Artificial Sequence: Synthetic oligonucleotide
cauguccucauagcgcucg

SEQ ID NO: 3216169 - RNA, 19 nt, Artificial Sequence
  Description of Artificial Sequence: Synthetic oligonucleotide
aguccagcaggcccagcac

SEQ ID NO: 3216170 - RNA, 19 nt, Artificial Sequence
  Description of Artificial Sequence: Synthetic oligonucleotide
aucagacuggcucucucca

SEQ ID NO: 3216171 - RNA, 19 nt, Artificial Sequence
  Description of Artificial Sequence: Synthetic oligonucleotide
ugggaguccagcaggccca

SEQ ID NO: 3216172 - RNA, 19 nt, Artificial Sequence
  Description of Artificial Sequence: Synthetic oligonucleotide
ugcucgaugcuggacagga

SEQ ID NO: 3216173 - RNA, 19 nt, Artificial Sequence
  Description of Artificial Sequence: Synthetic oligonucleotide
gauucccgcuccucgcagg

SEQ ID NO: 3216174 - RNA, 19 nt, Artificial Sequence
  Description of Artificial Sequence: Synthetic oligonucleotide
uccucguugcucuucugcu

SEQ ID NO: 3216175 - RNA, 19 nt, Artificial Sequence
  Description of Artificial Sequence: Synthetic oligonucleotide
aaggcugccauguccucau

SEQ ID NO: 3216176 - RNA, 19 nt, Artificial Sequence
  Description of Artificial Sequence: Synthetic oligonucleotide
guccucauagcgcucggcc

SEQ ID NO: 3216177 - RNA, 19 nt, Artificial Sequence
  Description of Artificial Sequence: Synthetic oligonucleotide
cucccgguacucuuugacc

SEQ ID NO: 3216178 - RNA, 19 nt, Artificial Sequence
  Description of Artificial Sequence: Synthetic oligonucleotide
acuggcucucuccaugacu

SEQ ID NO: 3216179 - RNA, 19 nt, Artificial Sequence
  Description of Artificial Sequence: Synthetic oligonucleotide
aagacacggcucucggccu

SEQ ID NO: 3216180 - RNA, 19 nt, Artificial Sequence
  Description of Artificial Sequence: Synthetic oligonucleotide
gugggaguccagcaggccc

SEQ ID NO: 3216181 - RNA, 19 nt, Artificial Sequence
  Description of Artificial Sequence: Synthetic oligonucleotide
uccagccuccuugaugagg

SEQ ID NO: 3216182 - RNA, 19 nt, Artificial Sequence
  Description of Artificial Sequence: Synthetic oligonucleotide
ggccuucuggaucagacug

SEQ ID NO: 3216183 - RNA, 19 nt, Artificial Sequence
  Description of Artificial Sequence: Synthetic oligonucleotide
cuucaugaaggcugccaug

SEQ ID NO: 3216184 - RNA, 19 nt, Artificial Sequence
  Description of Artificial Sequence: Synthetic oligonucleotide
gauagcgguaguagucgcc

SEQ ID NO: 3216185 - RNA, 19 nt, Artificial Sequence
  Description of Artificial Sequence: Synthetic oligonucleotide
cuccucguugcucuucugc

SEQ ID NO: 3216186 - RNA, 19 nt, Artificial Sequence
  Description of Artificial Sequence: Synthetic oligonucleotide
uugaugaggugggagucca

SEQ ID NO: 3216187 - RNA, 19 nt, Artificial Sequence
  Description of Artificial Sequence: Synthetic oligonucleotide
acagugucgcacacgcccc

SEQ ID NO: 3216188 - RNA, 19 nt, Artificial Sequence
  Description of Artificial Sequence: Synthetic oligonucleotide
uccucgcccuuuuccacgg

SEQ ID NO: 3216189 - RNA, 19 nt, Artificial Sequence
  Description of Artificial Sequence: Synthetic oligonucleotide
ugcucuucugcucgaugcu

SEQ ID NO: 3216190 - RNA, 19 nt, Artificial Sequence
  Description of Artificial Sequence: Synthetic oligonucleotide
ucucuccaugacuccgagg

SEQ ID NO: 3216191 - RNA, 19 nt, Artificial Sequence
  Description of Artificial Sequence: Synthetic oligonucleotide
aauguuuuccaguacaagc

SEQ ID NO: 3216192 - RNA, 19 nt, Artificial Sequence
  Description of Artificial Sequence: Synthetic oligonucleotide
aaucagaugaauuaagcac

SEQ ID NO: 3216193 - RNA, 19 nt, Artificial Sequence
  Description of Artificial Sequence: Synthetic oligonucleotide
aauuauggaauccaugccc

SEQ ID NO: 3216194 - RNA, 19 nt, Artificial Sequence
  Description of Artificial Sequence: Synthetic oligonucleotide
ucaauuauggaauccaugc

SEQ ID NO: 3216195 - RNA, 19 nt, Artificial Sequence
  Description of Artificial Sequence: Synthetic oligonucleotide
ugugcuaggguuuucacgg

SEQ ID NO: 3216196 - RNA, 19 nt, Artificial Sequence
  Description of Artificial Sequence: Synthetic oligonucleotide
ucucuuguaggucacaggg

SEQ ID NO: 3216197 - RNA, 19 nt, Artificial Sequence
  Description of Artificial Sequence: Synthetic oligonucleotide
ugucagauaaauuaaucag

SEQ ID NO: 3216198 - RNA, 19 nt, Artificial Sequence
  Description of Artificial Sequence: Synthetic oligonucleotide
uuugccgucagacagcagg

SEQ ID NO: 3216199 - RNA, 19 nt, Artificial Sequence
  Description of Artificial Sequence: Synthetic oligonucleotide
aaugcucaaguucuggagg

SEQ ID NO: 3216200 - RNA, 19 nt, Artificial Sequence
  Description of Artificial Sequence: Synthetic oligonucleotide
uucucauucauccuaaugu

SEQ ID NO: 3216201 - RNA, 19 nt, Artificial Sequence
  Description of Artificial Sequence: Synthetic oligonucleotide
uucauuuccauccuuuucc

SEQ ID NO: 3216202 - RNA, 19 nt, Artificial Sequence
  Description of Artificial Sequence: Synthetic oligonucleotide
aauuaagcacaucuucuuc

SEQ ID NO: 3216203 - RNA, 19 nt, Artificial Sequence
  Description of Artificial Sequence: Synthetic oligonucleotide
auaauuuucugauauguca

SEQ ID NO: 3216204 - RNA, 19 nt, Artificial Sequence
  Description of Artificial Sequence: Synthetic oligonucleotide
ucugauaugucaagaaugc

SEQ ID NO: 3216205 - RNA, 19 nt, Artificial Sequence
  Description of Artificial Sequence: Synthetic oligonucleotide
uccaguacaagcuucauga

SEQ ID NO: 3216206 - RNA, 19 nt, Artificial Sequence
  Description of Artificial Sequence: Synthetic oligonucleotide
uuaaucagaugaauuaagc

SEQ ID NO: 3216207 - RNA, 19 nt, Artificial Sequence
  Description of Artificial Sequence: Synthetic oligonucleotide
uuuagcaucuuucucauuc

SEQ ID NO: 3216208 - RNA, 19 nt, Artificial Sequence
  Description of Artificial Sequence: Synthetic oligonucleotide
agaugaauuaagcacaucu

SEQ ID NO: 3216209 - RNA, 19 nt, Artificial Sequence
  Description of Artificial Sequence: Synthetic oligonucleotide
gauagagacucaauuaugg

SEQ ID NO: 3216210 - RNA, 19 nt, Artificial Sequence
  Description of Artificial Sequence: Synthetic oligonucleotide
augaauuaagcacaucuuc

SEQ ID NO: 3216211 - RNA, 19 nt, Artificial Sequence
  Description of Artificial Sequence: Synthetic oligonucleotide
uucugauaugucaagaaug

SEQ ID NO: 3216212 - RNA, 19 nt, Artificial Sequence
  Description of Artificial Sequence: Synthetic oligonucleotide
aaauugugaagauucugug

SEQ ID NO: 3216213 - RNA, 19 nt, Artificial Sequence
  Description of Artificial Sequence: Synthetic oligonucleotide
ugaauuaagcacaucuucu

SEQ ID NO: 3216214 - RNA, 19 nt, Artificial Sequence
  Description of Artificial Sequence: Synthetic oligonucleotide
uguucaucaucuaugguga

SEQ ID NO: 3216215 - RNA, 19 nt, Artificial Sequence
  Description of Artificial Sequence: Synthetic oligonucleotide
auugugaagauucugugcu

SEQ ID NO: 3216216 - RNA, 19 nt, Artificial Sequence
  Description of Artificial Sequence: Synthetic oligonucleotide
aaugucagauaaauuaauc

SEQ ID NO: 3216217 - RNA, 19 nt, Artificial Sequence
  Description of Artificial Sequence: Synthetic oligonucleotide
aaucaguuccuguacagcu

SEQ ID NO: 3216218 - RNA, 19 nt, Artificial Sequence
  Description of Artificial Sequence: Synthetic oligonucleotide
aauuuucugauaugucaag

SEQ ID NO: 3216219 - RNA, 19 nt, Artificial Sequence
  Description of Artificial Sequence: Synthetic oligonucleotide
ucaucaucuauggugaggg

SEQ ID NO: 3216220 - RNA, 19 nt, Artificial Sequence
  Description of Artificial Sequence: Synthetic oligonucleotide
ugauaugucaagaaugcuc

SEQ ID NO: 3216221 - RNA, 19 nt, Artificial Sequence
  Description of Artificial Sequence: Synthetic oligonucleotide
uaaucagaugaauuaagca

SEQ ID NO: 3216222 - RNA, 19 nt, Artificial Sequence
  Description of Artificial Sequence: Synthetic oligonucleotide
uaaauuaaucagaugaauu

SEQ ID NO: 3216223 - RNA, 19 nt, Artificial Sequence
  Description of Artificial Sequence: Synthetic oligonucleotide
aguucuggagguuuguaac

SEQ ID NO: 3216224 - RNA, 19 nt, Artificial Sequence
  Description of Artificial Sequence: Synthetic oligonucleotide
guuuucacggaauuugccg

SEQ ID NO: 3216225 - RNA, 19 nt, Artificial Sequence
  Description of Artificial Sequence: Synthetic oligonucleotide
uucagauuacccaagcugu

SEQ ID NO: 3216226 - RNA, 19 nt, Artificial Sequence
  Description of Artificial Sequence: Synthetic oligonucleotide
uugugaaugcucaaguucu

SEQ ID NO: 3216227 - RNA, 19 nt, Artificial Sequence
  Description of Artificial Sequence: Synthetic oligonucleotide
agucagaccaccuggcagc

SEQ ID NO: 3216228 - RNA, 19 nt, Artificial Sequence
  Description of Artificial Sequence: Synthetic oligonucleotide
cuguucaucaucuauggug

SEQ ID NO: 3216229 - RNA, 19 nt, Artificial Sequence
  Description of Artificial Sequence: Synthetic oligonucleotide
uuuguaacggacgugacgu

SEQ ID NO: 3216230 - RNA, 19 nt, Artificial Sequence
  Description of Artificial Sequence: Synthetic oligonucleotide
aagcacaucuucuucaggu

SEQ ID NO: 3216231 - RNA, 19 nt, Artificial Sequence
  Description of Artificial Sequence: Synthetic oligonucleotide
augucagauaaauuaauca

SEQ ID NO: 3216232 - RNA, 19 nt, Artificial Sequence
  Description of Artificial Sequence: Synthetic oligonucleotide
uaauuuucugauaugucaa

SEQ ID NO: 3216233 - RNA, 19 nt, Artificial Sequence
  Description of Artificial Sequence: Synthetic oligonucleotide
aacuucaucucuuguaggu

SEQ ID NO: 3216234 - RNA, 19 nt, Artificial Sequence
  Description of Artificial Sequence: Synthetic oligonucleotide
caagcugucagucagacca

SEQ ID NO: 3216235 - RNA, 19 nt, Artificial Sequence
  Description of Artificial Sequence: Synthetic oligonucleotide
ucuucuucagguuucccag

SEQ ID NO: 3216236 - RNA, 19 nt, Artificial Sequence
  Description of Artificial Sequence: Synthetic oligonucleotide
aguuugaccaaauugugaa

SEQ ID NO: 3216237 - RNA, 19 nt, Artificial Sequence
  Description of Artificial Sequence: Synthetic oligonucleotide
uuuccagauaauuuucuga

SEQ ID NO: 3216238 - RNA, 19 nt, Artificial Sequence
  Description of Artificial Sequence: Synthetic oligonucleotide
gucaagaaugcucaguuug

SEQ ID NO: 3216239 - RNA, 19 nt, Artificial Sequence
  Description of Artificial Sequence: Synthetic oligonucleotide
ugcuguucaucaucuaugg

SEQ ID NO: 3216240 - RNA, 19 nt, Artificial Sequence
  Description of Artificial Sequence: Synthetic oligonucleotide
cuucagauuacccaagcug

SEQ ID NO: 3216241 - RNA, 19 nt, Artificial Sequence
  Description of Artificial Sequence: Synthetic oligonucleotide
gagccugccaaucaguucc

SEQ ID NO: 3216242 - RNA, 19 nt, Artificial Sequence
  Description of Artificial Sequence: Synthetic oligonucleotide
ugaagauucugugcuaggg

SEQ ID NO: 3216243 - RNA, 19 nt, Artificial Sequence
  Description of Artificial Sequence: Synthetic oligonucleotide
uuugaccaaauugugaaga

SEQ ID NO: 3216244 - RNA, 19 nt, Artificial Sequence
  Description of Artificial Sequence: Synthetic oligonucleotide
auuaagcacaucuucuuca

SEQ ID NO: 3216245 - RNA, 19 nt, Artificial Sequence
  Description of Artificial Sequence: Synthetic oligonucleotide
gauaugucaagaaugcuca

SEQ ID NO: 3216246 - RNA, 19 nt, Artificial Sequence
  Description of Artificial Sequence: Synthetic oligonucleotide
ugauagagacucaauuaug

SEQ ID NO: 3216247 - RNA, 19 nt, Artificial Sequence
  Description of Artificial Sequence: Synthetic oligonucleotide
agauaauuuucugauaugu

SEQ ID NO: 3216248 - RNA, 19 nt, Artificial Sequence
  Description of Artificial Sequence: Synthetic oligonucleotide
ucaguuugaccaaauugug

SEQ ID NO: 3216249 - RNA, 19 nt, Artificial Sequence
  Description of Artificial Sequence: Synthetic oligonucleotide
ggaauuugccgucagacag

SEQ ID NO: 3216250 - RNA, 19 nt, Artificial Sequence
  Description of Artificial Sequence: Synthetic oligonucleotide
uuucucauucauccuaaug

SEQ ID NO: 3216251 - RNA, 19 nt, Artificial Sequence
  Description of Artificial Sequence: Synthetic oligonucleotide
gaaugcucaaguucuggag

SEQ ID NO: 3216252 - RNA, 19 nt, Artificial Sequence
  Description of Artificial Sequence: Synthetic oligonucleotide
uuaagcacaucuucuucag

SEQ ID NO: 3216253 - RNA, 19 nt, Artificial Sequence
  Description of Artificial Sequence: Synthetic oligonucleotide
uggagguuuguaacggacg

SEQ ID NO: 3216254 - RNA, 19 nt, Artificial Sequence
  Description of Artificial Sequence: Synthetic oligonucleotide
uuuucugauaugucaagaa

SEQ ID NO: 3216255 - RNA, 19 nt, Artificial Sequence
  Description of Artificial Sequence: Synthetic oligonucleotide
uagagacucaauuauggaa

SEQ ID NO: 3216256 - RNA, 19 nt, Artificial Sequence
  Description of Artificial Sequence: Synthetic oligonucleotide
gcaucuuucucauucaucc

SEQ ID NO: 3216257 - RNA, 19 nt, Artificial Sequence
  Description of Artificial Sequence: Synthetic oligonucleotide
aguacaagcuucaugaggu

SEQ ID NO: 3216258 - RNA, 19 nt, Artificial Sequence
  Description of Artificial Sequence: Synthetic oligonucleotide
auucauccuaauguuuucc

SEQ ID NO: 3216259 - RNA, 19 nt, Artificial Sequence
  Description of Artificial Sequence: Synthetic oligonucleotide
ucaucuauggugaggggac

SEQ ID NO: 3216260 - RNA, 19 nt, Artificial Sequence
  Description of Artificial Sequence: Synthetic oligonucleotide
gaccaaauugugaagauuc

SEQ ID NO: 3216261 - RNA, 19 nt, Artificial Sequence
  Description of Artificial Sequence: Synthetic oligonucleotide
uuucugauaugucaagaau

SEQ ID NO: 3216262 - RNA, 19 nt, Artificial Sequence
  Description of Artificial Sequence: Synthetic oligonucleotide
uuuucacggaauuugccgu

SEQ ID NO: 3216263 - RNA, 19 nt, Artificial Sequence
  Description of Artificial Sequence: Synthetic oligonucleotide
uuuuccaguacaagcuuca

SEQ ID NO: 3216264 - RNA, 19 nt, Artificial Sequence
  Description of Artificial Sequence: Synthetic oligonucleotide
ucaagaaugcucaguuuga

SEQ ID NO: 3216265 - RNA, 19 nt, Artificial Sequence
  Description of Artificial Sequence: Synthetic oligonucleotide
auuaaucagaugaauuaag

SEQ ID NO: 3216266 - RNA, 19 nt, Artificial Sequence
  Description of Artificial Sequence: Synthetic oligonucleotide
uuccagauaauuuucugau

SEQ ID NO: 3216267 - RNA, 19 nt, Artificial Sequence
  Description of Artificial Sequence: Synthetic oligonucleotide
guuuguaacggacgugacg

SEQ ID NO: 3216268 - RNA, 19 nt, Artificial Sequence
  Description of Artificial Sequence: Synthetic oligonucleotide
aagauucugugcuaggguu

SEQ ID NO: 3216269 - RNA, 19 nt, Artificial Sequence
  Description of Artificial Sequence: Synthetic oligonucleotide
auggaauccaugcccuccc

SEQ ID NO: 3216270 - RNA, 19 nt, Artificial Sequence
  Description of Artificial Sequence: Synthetic oligonucleotide
ucauccuaauguuuuccag

SEQ ID NO: 3216271 - RNA, 19 nt, Artificial Sequence
  Description of Artificial Sequence: Synthetic oligonucleotide
ugugaagauucugugcuag

SEQ ID NO: 3216272 - RNA, 19 nt, Artificial Sequence
  Description of Artificial Sequence: Synthetic oligonucleotide
guugugaaugcucaaguuc

SEQ ID NO: 3216273 - RNA, 19 nt, Artificial Sequence
  Description of Artificial Sequence: Synthetic oligonucleotide
acggaauuugccgucagac

SEQ ID NO: 3216274 - RNA, 19 nt, Artificial Sequence
  Description of Artificial Sequence: Synthetic oligonucleotide
ucuuguaggucacaggguu

SEQ ID NO: 3216275 - RNA, 19 nt, Artificial Sequence
  Description of Artificial Sequence: Synthetic oligonucleotide
uacccaagcugucagucag

SEQ ID NO: 3216276 - RNA, 19 nt, Artificial Sequence
  Description of Artificial Sequence: Synthetic oligonucleotide
ugcagguugugaaugcuca

SEQ ID NO: 3216277 - RNA, 19 nt, Artificial Sequence
  Description of Artificial Sequence: Synthetic oligonucleotide
caguacaagcuucaugagg

SEQ ID NO: 3216278 - RNA, 19 nt, Artificial Sequence
  Description of Artificial Sequence: Synthetic oligonucleotide
uccuuuuccagauaauuuu

SEQ ID NO: 3216279 - RNA, 19 nt, Artificial Sequence
  Description of Artificial Sequence: Synthetic oligonucleotide
caauuauggaauccaugcc

SEQ ID NO: 3216280 - RNA, 19 nt, Artificial Sequence
  Description of Artificial Sequence: Synthetic oligonucleotide
aucagaugaauuaagcaca

SEQ ID NO: 3216281 - RNA, 19 nt, Artificial Sequence
  Description of Artificial Sequence: Synthetic oligonucleotide
agcuucaugagguucuuca

SEQ ID NO: 3216282 - RNA, 19 nt, Artificial Sequence
  Description of Artificial Sequence: Synthetic oligonucleotide
gauaaauuaaucagaugaa

SEQ ID NO: 3216283 - RNA, 19 nt, Artificial Sequence
  Description of Artificial Sequence: Synthetic oligonucleotide
ugaaugcucaaguucugga

SEQ ID NO: 3216284 - RNA, 19 nt, Artificial Sequence
  Description of Artificial Sequence: Synthetic oligonucleotide
auaaauuaaucagaugaau

SEQ ID NO: 3216285 - RNA, 19 nt, Artificial Sequence
  Description of Artificial Sequence: Synthetic oligonucleotide
guucuggagguuuguaacg

SEQ ID NO: 3216286 - RNA, 19 nt, Artificial Sequence
  Description of Artificial Sequence: Synthetic oligonucleotide
uccauccuuuuccagauaa

SEQ ID NO: 3216287 - RNA, 19 nt, Artificial Sequence
  Description of Artificial Sequence: Synthetic oligonucleotide
cucaauuauggaauccaug

SEQ ID NO: 3216288 - RNA, 19 nt, Artificial Sequence
  Description of Artificial Sequence: Synthetic oligonucleotide
auuacccaagcugucaguc

SEQ ID NO: 3216289 - RNA, 19 nt, Artificial Sequence
  Description of Artificial Sequence: Synthetic oligonucleotide
agauuacccaagcugucag

SEQ ID NO: 3216290 - RNA, 19 nt, Artificial Sequence
  Description of Artificial Sequence: Synthetic oligonucleotide
uaagcacaucuucuucagg

SEQ ID NO: 3216291 - RNA, 19 nt, Artificial Sequence
  Description of Artificial Sequence: Synthetic oligonucleotide
aaggguguaauuuuccucc

SEQ ID NO: 3216292 - RNA, 19 nt, Artificial Sequence
  Description of Artificial Sequence: Synthetic oligonucleotide
aaacuugccgcauugaacg

SEQ ID NO: 3216293 - RNA, 19 nt, Artificial Sequence
  Description of Artificial Sequence: Synthetic oligonucleotide
auaugaauauaguuuaaac

SEQ ID NO: 3216294 - RNA, 19 nt, Artificial Sequence
  Description of Artificial Sequence: Synthetic oligonucleotide
aaauaaugaaaauggauau

SEQ ID NO: 3216295 - RNA, 19 nt, Artificial Sequence
  Description of Artificial Sequence: Synthetic oligonucleotide
aauauugccuucuaagaga

SEQ ID NO: 3216296 - RNA, 19 nt, Artificial Sequence
  Description of Artificial Sequence: Synthetic oligonucleotide
aguuagaagaguucaaguc

SEQ ID NO: 3216297 - RNA, 19 nt, Artificial Sequence
  Description of Artificial Sequence: Synthetic oligonucleotide
aaaaccucgacacucuucu

SEQ ID NO: 3216298 - RNA, 19 nt, Artificial Sequence
  Description of Artificial Sequence: Synthetic oligonucleotide
ugcauuuuguguuuuaggc

SEQ ID NO: 3216299 - RNA, 19 nt, Artificial Sequence
  Description of Artificial Sequence: Synthetic oligonucleotide
guuagaagaguucaagucc

SEQ ID NO: 3216300 - RNA, 19 nt, Artificial Sequence
  Description of Artificial Sequence: Synthetic oligonucleotide
auauaagauguaugaaugg

SEQ ID NO: 3216301 - RNA, 19 nt, Artificial Sequence
  Description of Artificial Sequence: Synthetic oligonucleotide
aggaaggaauuguauaccc

SEQ ID NO: 3216302 - RNA, 19 nt, Artificial Sequence
  Description of Artificial Sequence: Synthetic oligonucleotide
uguaugaaacacauuucag

SEQ ID NO: 3216303 - RNA, 19 nt, Artificial Sequence
  Description of Artificial Sequence: Synthetic oligonucleotide
guaugaaacacauuucagc

SEQ ID NO: 3216304 - RNA, 19 nt, Artificial Sequence
  Description of Artificial Sequence: Synthetic oligonucleotide
agugacauuacaaaauagg

SEQ ID NO: 3216305 - RNA, 19 nt, Artificial Sequence
  Description of Artificial Sequence: Synthetic oligonucleotide
uaaaagaucuuuuggaaau

SEQ ID NO: 3216306 - RNA, 19 nt, Artificial Sequence
  Description of Artificial Sequence: Synthetic oligonucleotide
agcucuuuggcacuagggc

SEQ ID NO: 3216307 - RNA, 19 nt, Artificial Sequence
  Description of Artificial Sequence: Synthetic oligonucleotide
uuguguuuuaggcagaaaa

SEQ ID NO: 3216308 - RNA, 19 nt, Artificial Sequence
  Description of Artificial Sequence: Synthetic oligonucleotide
auuuagacuaucaacauga

SEQ ID NO: 3216309 - RNA, 19 nt, Artificial Sequence
  Description of Artificial Sequence: Synthetic oligonucleotide
ucuuuuauaugaauauagu

SEQ ID NO: 3216310 - RNA, 19 nt, Artificial Sequence
  Description of Artificial Sequence: Synthetic oligonucleotide
aaaacuugccgcauugaac

SEQ ID NO: 3216311 - RNA, 19 nt, Artificial Sequence
  Description of Artificial Sequence: Synthetic oligonucleotide
uucuguuaaaaccucgaca

SEQ ID NO: 3216312 - RNA, 19 nt, Artificial Sequence
  Description of Artificial Sequence: Synthetic oligonucleotide
aaacaguagucaccgacag

SEQ ID NO: 3216313 - RNA, 19 nt, Artificial Sequence
  Description of Artificial Sequence: Synthetic oligonucleotide
uuagaagaguucaaguccu

SEQ ID NO: 3216314 - RNA, 19 nt, Artificial Sequence
  Description of Artificial Sequence: Synthetic oligonucleotide
uucaaguccuugcacaugc

SEQ ID NO: 3216315 - RNA, 19 nt, Artificial Sequence
  Description of Artificial Sequence: Synthetic oligonucleotide
gugacauuacaaaauaggg

SEQ ID NO: 3216316 - RNA, 19 nt, Artificial Sequence
  Description of Artificial Sequence: Synthetic oligonucleotide
aauguagcgugucccgucg

SEQ ID NO: 3216317 - RNA, 19 nt, Artificial Sequence
  Description of Artificial Sequence: Synthetic oligonucleotide
ugagaguuaaacaguaguc

SEQ ID NO: 3216318 - RNA, 19 nt, Artificial Sequence
  Description of Artificial Sequence: Synthetic oligonucleotide
gauaucuugacuggaaaug

SEQ ID NO: 3216319 - RNA, 19 nt, Artificial Sequence
  Description of Artificial Sequence: Synthetic oligonucleotide
uaaacaguagucaccgaca

SEQ ID NO: 3216320 - RNA, 19 nt, Artificial Sequence
  Description of Artificial Sequence: Synthetic oligonucleotide
uguaauuuuccuccacuga

SEQ ID NO: 3216321 - RNA, 19 nt, Artificial Sequence
  Description of Artificial Sequence: Synthetic oligonucleotide
uauaagauguaugaauggu

SEQ ID NO: 3216322 - RNA, 19 nt, Artificial Sequence
  Description of Artificial Sequence: Synthetic oligonucleotide
uggauggucauccaauugu

SEQ ID NO: 3216323 - RNA, 19 nt, Artificial Sequence
  Description of Artificial Sequence: Synthetic oligonucleotide
uugcauuuuguguuuuagg

SEQ ID NO: 3216324 - RNA, 19 nt, Artificial Sequence
  Description of Artificial Sequence: Synthetic oligonucleotide
auaaaagaucuuuuggaaa

SEQ ID NO: 3216325 - RNA, 19 nt, Artificial Sequence
  Description of Artificial Sequence: Synthetic oligonucleotide
uguacaugcaaaucuucca

SEQ ID NO: 3216326 - RNA, 19 nt, Artificial Sequence
  Description of Artificial Sequence: Synthetic oligonucleotide
auauucgcaaacaugcuuc

SEQ ID NO: 3216327 - RNA, 19 nt, Artificial Sequence
  Description of Artificial Sequence: Synthetic oligonucleotide
uggucuguaugcuucgacg

SEQ ID NO: 3216328 - RNA, 19 nt, Artificial Sequence
  Description of Artificial Sequence: Synthetic oligonucleotide
aaccucgacacucuucuug

SEQ ID NO: 3216329 - RNA, 19 nt, Artificial Sequence
  Description of Artificial Sequence: Synthetic oligonucleotide
acaguagucaccgacagga

SEQ ID NO: 3216330 - RNA, 19 nt, Artificial Sequence
  Description of Artificial Sequence: Synthetic oligonucleotide
auaaacucgcgccuccuuc

SEQ ID NO: 3216331 - RNA, 19 nt, Artificial Sequence
  Description of Artificial Sequence: Synthetic oligonucleotide
agaguucaaguccuugcac

SEQ ID NO: 3216332 - RNA, 19 nt, Artificial Sequence
  Description of Artificial Sequence: Synthetic oligonucleotide
ucccuguacaugcaaaucu

SEQ ID NO: 3216333 - RNA, 19 nt, Artificial Sequence
  Description of Artificial Sequence: Synthetic oligonucleotide
aacacauuucagcgaagug

SEQ ID NO: 3216334 - RNA, 19 nt, Artificial Sequence
  Description of Artificial Sequence: Synthetic oligonucleotide
uucgcuacuucccucggcc

SEQ ID NO: 3216335 - RNA, 19 nt, Artificial Sequence
  Description of Artificial Sequence: Synthetic oligonucleotide
ucuacaccaacgguagugg

SEQ ID NO: 3216336 - RNA, 19 nt, Artificial Sequence
  Description of Artificial Sequence: Synthetic oligonucleotide
uauaugaauauaguuuaaa

SEQ ID NO: 3216337 - RNA, 19 nt, Artificial Sequence
  Description of Artificial Sequence: Synthetic oligonucleotide
auccaauugucaaagaucu

SEQ ID NO: 3216338 - RNA, 19 nt, Artificial Sequence
  Description of Artificial Sequence: Synthetic oligonucleotide
cucgucuauacacagugag

SEQ ID NO: 3216339 - RNA, 19 nt, Artificial Sequence
  Description of Artificial Sequence: Synthetic oligonucleotide
ucacgcaccggccuuuugg

SEQ ID NO: 3216340 - RNA, 19 nt, Artificial Sequence
  Description of Artificial Sequence: Synthetic oligonucleotide
aguggucucucgucuauac

SEQ ID NO: 3216341 - RNA, 19 nt, Artificial Sequence
  Description of Artificial Sequence: Synthetic oligonucleotide
caaacaugcuucaagcguc

SEQ ID NO: 3216342 - RNA, 19 nt, Artificial Sequence
  Description of Artificial Sequence: Synthetic oligonucleotide
cuuacuucaggauccucag

SEQ ID NO: 3216343 - RNA, 19 nt, Artificial Sequence
  Description of Artificial Sequence: Synthetic oligonucleotide
aaacaugcuucaagcgucc

SEQ ID NO: 3216344 - RNA, 19 nt, Artificial Sequence
  Description of Artificial Sequence: Synthetic oligonucleotide
ucuucuucaucaucuuuug

SEQ ID NO: 3216345 - RNA, 19 nt, Artificial Sequence
  Description of Artificial Sequence: Synthetic oligonucleotide
aacaguagucaccgacagg

SEQ ID NO: 3216346 - RNA, 19 nt, Artificial Sequence
  Description of Artificial Sequence: Synthetic oligonucleotide
uugccaacuagacuuuggc

SEQ ID NO: 3216347 - RNA, 19 nt, Artificial Sequence
  Description of Artificial Sequence: Synthetic oligonucleotide
ugugugugugugaaauugc

SEQ ID NO: 3216348 - RNA, 19 nt, Artificial Sequence
  Description of Artificial Sequence: Synthetic oligonucleotide
auggugacuuguaugaaac

SEQ ID NO: 3216349 - RNA, 19 nt, Artificial Sequence
  Description of Artificial Sequence: Synthetic oligonucleotide
aacucggcgcucuuugcuc

SEQ ID NO: 3216350 - RNA, 19 nt, Artificial Sequence
  Description of Artificial Sequence: Synthetic oligonucleotide
ucagcgaagugacauuaca

SEQ ID NO: 3216351 - RNA, 19 nt, Artificial Sequence
  Description of Artificial Sequence: Synthetic oligonucleotide
ucuggcuuugcgcauacuc

SEQ ID NO: 3216352 - RNA, 19 nt, Artificial Sequence
  Description of Artificial Sequence: Synthetic oligonucleotide
aaacacauuucagcgaagu

SEQ ID NO: 3216353 - RNA, 19 nt, Artificial Sequence
  Description of Artificial Sequence: Synthetic oligonucleotide
gagaguuaaacaguaguca

SEQ ID NO: 3216354 - RNA, 19 nt, Artificial Sequence
  Description of Artificial Sequence: Synthetic oligonucleotide
uccgugauguccgagagcu

SEQ ID NO: 3216355 - RNA, 19 nt, Artificial Sequence
  Description of Artificial Sequence: Synthetic oligonucleotide
gccaacuagacuuuggcag

SEQ ID NO: 3216356 - RNA, 19 nt, Artificial Sequence
  Description of Artificial Sequence: Synthetic oligonucleotide
aggaaauuuugcuuucugu

SEQ ID NO: 3216357 - RNA, 19 nt, Artificial Sequence
  Description of Artificial Sequence: Synthetic oligonucleotide
ugcuuaauaaaagaucuuu

SEQ ID NO: 3216358 - RNA, 19 nt, Artificial Sequence
  Description of Artificial Sequence: Synthetic oligonucleotide
uuaccauugcuauuugaaa

SEQ ID NO: 3216359 - RNA, 19 nt, Artificial Sequence
  Description of Artificial Sequence: Synthetic oligonucleotide
aagugacauuacaaaauag

SEQ ID NO: 3216360 - RNA, 19 nt, Artificial Sequence
  Description of Artificial Sequence: Synthetic oligonucleotide
uugguaauguagcgugucc

SEQ ID NO: 3216361 - RNA, 19 nt, Artificial Sequence
  Description of Artificial Sequence: Synthetic oligonucleotide
gaaggaauuguauacccua

SEQ ID NO: 3216362 - RNA, 19 nt, Artificial Sequence
  Description of Artificial Sequence: Synthetic oligonucleotide
ugcgcauacuccacugccg

SEQ ID NO: 3216363 - RNA, 19 nt, Artificial Sequence
  Description of Artificial Sequence: Synthetic oligonucleotide
uggcaaauuuagacuauca

SEQ ID NO: 3216364 - RNA, 19 nt, Artificial Sequence
  Description of Artificial Sequence: Synthetic oligonucleotide
ccuucuaagagaguaaggg

SEQ ID NO: 3216365 - RNA, 19 nt, Artificial Sequence
  Description of Artificial Sequence: Synthetic oligonucleotide
cuggcuuugcgcauacucc

SEQ ID NO: 3216366 - RNA, 19 nt, Artificial Sequence
  Description of Artificial Sequence: Synthetic oligonucleotide
ucuguaugcuucgacguug

SEQ ID NO: 3216367 - RNA, 19 nt, Artificial Sequence
  Description of Artificial Sequence: Synthetic oligonucleotide
gguuaagaguucuuggaug

SEQ ID NO: 3216368 - RNA, 19 nt, Artificial Sequence
  Description of Artificial Sequence: Synthetic oligonucleotide
uccguaaagcugcaggaaa

SEQ ID NO: 3216369 - RNA, 19 nt, Artificial Sequence
  Description of Artificial Sequence: Synthetic oligonucleotide
cuugccgcauugaacgagg

SEQ ID NO: 3216370 - RNA, 19 nt, Artificial Sequence
  Description of Artificial Sequence: Synthetic oligonucleotide
uaaggguguaauuuuccuc

SEQ ID NO: 3216371 - RNA, 19 nt, Artificial Sequence
  Description of Artificial Sequence: Synthetic oligonucleotide
agauguaugaauggugacu

SEQ ID NO: 3216372 - RNA, 19 nt, Artificial Sequence
  Description of Artificial Sequence: Synthetic oligonucleotide
auuaccauugcuauuugaa

SEQ ID NO: 3216373 - RNA, 19 nt, Artificial Sequence
  Description of Artificial Sequence: Synthetic oligonucleotide
gguaauguagcgugucccg

SEQ ID NO: 3216374 - RNA, 19 nt, Artificial Sequence
  Description of Artificial Sequence: Synthetic oligonucleotide
aggauccucagugauggcg

SEQ ID NO: 3216375 - RNA, 19 nt, Artificial Sequence
  Description of Artificial Sequence: Synthetic oligonucleotide
uaaccuucuuuuauaugaa

SEQ ID NO: 3216376 - RNA, 19 nt, Artificial Sequence
  Description of Artificial Sequence: Synthetic oligonucleotide
uuugcgcauacuccacugc

SEQ ID NO: 3216377 - RNA, 19 nt, Artificial Sequence
  Description of Artificial Sequence: Synthetic oligonucleotide
auugccuucuaagagagua

SEQ ID NO: 3216378 - RNA, 19 nt, Artificial Sequence
  Description of Artificial Sequence: Synthetic oligonucleotide
agcugcaggaaauuuugcu

SEQ ID NO: 3216379 - RNA, 19 nt, Artificial Sequence
  Description of Artificial Sequence: Synthetic oligonucleotide
gaugucuacaccaacggua

SEQ ID NO: 3216380 - RNA, 19 nt, Artificial Sequence
  Description of Artificial Sequence: Synthetic oligonucleotide
uuggccuucaccagaugcu

SEQ ID NO: 3216381 - RNA, 19 nt, Artificial Sequence
  Description of Artificial Sequence: Synthetic oligonucleotide
uaaaaccucgacacucuuc

SEQ ID NO: 3216382 - RNA, 19 nt, Artificial Sequence
  Description of Artificial Sequence: Synthetic oligonucleotide
ugccuucuaagagaguaag

SEQ ID NO: 3216383 - RNA, 19 nt, Artificial Sequence
  Description of Artificial Sequence: Synthetic oligonucleotide
agggaugucuacaccaacg

SEQ ID NO: 3216384 - RNA, 19 nt, Artificial Sequence
  Description of Artificial Sequence: Synthetic oligonucleotide
guugccaaaccacaacuga

SEQ ID NO: 3216385 - RNA, 19 nt, Artificial Sequence
  Description of Artificial Sequence: Synthetic oligonucleotide
cuucaagcguccguaaagc

SEQ ID NO: 3216386 - RNA, 19 nt, Artificial Sequence
  Description of Artificial Sequence: Synthetic oligonucleotide
uguugcuagucugugugug

SEQ ID NO: 3216387 - RNA, 19 nt, Artificial Sequence
  Description of Artificial Sequence: Synthetic oligonucleotide
ggcuuauauauauacaaaa

SEQ ID NO: 3216388 - RNA, 19 nt, Artificial Sequence
  Description of Artificial Sequence: Synthetic oligonucleotide
gugugugugugugaaauug

SEQ ID NO: 3216389 - RNA, 19 nt, Artificial Sequence
  Description of Artificial Sequence: Synthetic oligonucleotide
guucggccgaguuagaaga

SEQ ID NO: 3216390 - RNA, 19 nt, Artificial Sequence
  Description of Artificial Sequence: Synthetic oligonucleotide
uugccaaaccacaacugau

SEQ ID NO: 3216391 - RNA, 19 nt, Artificial Sequence
  Description of Artificial Sequence: Synthetic oligonucleotide
aauuaugccaaauuuacag

SEQ ID NO: 3216392 - RNA, 19 nt, Artificial Sequence
  Description of Artificial Sequence: Synthetic oligonucleotide
ugaaguauggacaagaaca

SEQ ID NO: 3216393 - RNA, 19 nt, Artificial Sequence
  Description of Artificial Sequence: Synthetic oligonucleotide
uaaaauuuaacuaaagaaa

SEQ ID NO: 3216394 - RNA, 19 nt, Artificial Sequence
  Description of Artificial Sequence: Synthetic oligonucleotide
aaacaaacaaacaacacac

SEQ ID NO: 3216395 - RNA, 19 nt, Artificial Sequence
  Description of Artificial Sequence: Synthetic oligonucleotide
aauaaaaggugagagaagg

SEQ ID NO: 3216396 - RNA, 19 nt, Artificial Sequence
  Description of Artificial Sequence: Synthetic oligonucleotide
aaaacaaacaaacaacaca

SEQ ID NO: 3216397 - RNA, 19 nt, Artificial Sequence
  Description of Artificial Sequence: Synthetic oligonucleotide
aacuaaagaaaacaaaaca

SEQ ID NO: 3216398 - RNA, 19 nt, Artificial Sequence
  Description of Artificial Sequence: Synthetic oligonucleotide
uuaacuaaagaaaacaaaa

SEQ ID NO: 3216399 - RNA, 19 nt, Artificial Sequence
  Description of Artificial Sequence: Synthetic oligonucleotide
aagaaaacaaaacaaacaa

SEQ ID NO: 3216400 - RNA, 19 nt, Artificial Sequence
  Description of Artificial Sequence: Synthetic oligonucleotide
aacaaaacaaacaaacaac

SEQ ID NO: 3216401 - RNA, 19 nt, Artificial Sequence
  Description of Artificial Sequence: Synthetic oligonucleotide
aaacaaaacaaacaaacaa

SEQ ID NO: 3216402 - RNA, 19 nt, Artificial Sequence
  Description of Artificial Sequence: Synthetic oligonucleotide
gagagaaggagaaagaugg

SEQ ID NO: 3216403 - RNA, 19 nt, Artificial Sequence
  Description of Artificial Sequence: Synthetic oligonucleotide
gaaaacaaaacaaacaaac

SEQ ID NO: 3216404 - RNA, 19 nt, Artificial Sequence
  Description of Artificial Sequence: Synthetic oligonucleotide
aauuuaacuaaagaaaaca

SEQ ID NO: 3216405 - RNA, 19 nt, Artificial Sequence
  Description of Artificial Sequence: Synthetic oligonucleotide
uaaagaaaacaaaacaaac

SEQ ID NO: 3216406 - RNA, 19 nt, Artificial Sequence
  Description of Artificial Sequence: Synthetic oligonucleotide
aaauuuacaguacuaaaau

SEQ ID NO: 3216407 - RNA, 19 nt, Artificial Sequence
  Description of Artificial Sequence: Synthetic oligonucleotide
aguacuaaaauuuaacuaa

SEQ ID NO: 3216408 - RNA, 19 nt, Artificial Sequence
  Description of Artificial Sequence: Synthetic oligonucleotide
gacaagaacaugcuggugg

SEQ ID NO: 3216409 - RNA, 19 nt, Artificial Sequence
  Description of Artificial Sequence: Synthetic oligonucleotide
aaacaaacaacacaccaca

SEQ ID NO: 3216410 - RNA, 19 nt, Artificial Sequence
  Description of Artificial Sequence: Synthetic oligonucleotide
cauuuaugggaauaaaagg

SEQ ID NO: 3216411 - RNA, 19 nt, Artificial Sequence
  Description of Artificial Sequence: Synthetic oligonucleotide
aguauggacaagaacaugc

SEQ ID NO: 3216412 - RNA, 19 nt, Artificial Sequence
  Description of Artificial Sequence: Synthetic oligonucleotide
uuuaugggaauaaaaggug

SEQ ID NO: 3216413 - RNA, 19 nt, Artificial Sequence
  Description of Artificial Sequence: Synthetic oligonucleotide
cuaaaauuuaacuaaagaa

SEQ ID NO: 3216414 - RNA, 19 nt, Artificial Sequence
  Description of Artificial Sequence: Synthetic oligonucleotide
aaaauuuaacuaaagaaaa

SEQ ID NO: 3216415 - RNA, 19 nt, Artificial Sequence
  Description of Artificial Sequence: Synthetic oligonucleotide
aaauuuaacuaaagaaaac

SEQ ID NO: 3216416 - RNA, 19 nt, Artificial Sequence
  Description of Artificial Sequence: Synthetic oligonucleotide
uuuaacuaaagaaaacaaa

SEQ ID NO: 3216417 - RNA, 19 nt, Artificial Sequence
  Description of Artificial Sequence: Synthetic oligonucleotide
aaagaaaacaaaacaaaca

SEQ ID NO: 3216418 - RNA, 19 nt, Artificial Sequence
  Description of Artificial Sequence: Synthetic oligonucleotide
ugaacuuggaaauuaugcc

SEQ ID NO: 3216419 - RNA, 19 nt, Artificial Sequence
  Description of Artificial Sequence: Synthetic oligonucleotide
acuaaaauuuaacuaaaga

SEQ ID NO: 3216420 - RNA, 19 nt, Artificial Sequence
  Description of Artificial Sequence: Synthetic oligonucleotide
uacacaacaguguacgccg

SEQ ID NO: 3216421 - RNA, 19 nt, Artificial Sequence
  Description of Artificial Sequence: Synthetic oligonucleotide
uaacuaaagaaaacaaaac

SEQ ID NO: 3216422 - RNA, 19 nt, Artificial Sequence
  Description of Artificial Sequence: Synthetic oligonucleotide
gaaggagaaagauggaugc

SEQ ID NO: 3216423 - RNA, 19 nt, Artificial Sequence
  Description of Artificial Sequence: Synthetic oligonucleotide
gaaauuaugccaaauuuac

SEQ ID NO: 3216424 - RNA, 19 nt, Artificial Sequence
  Description of Artificial Sequence: Synthetic oligonucleotide
uaaaaggugagagaaggag

SEQ ID NO: 3216425 - RNA, 19 nt, Artificial Sequence
  Description of Artificial Sequence: Synthetic oligonucleotide
auaguagugaacuuggaaa

SEQ ID NO: 3216426 - RNA, 19 nt, Artificial Sequence
  Description of Artificial Sequence: Synthetic oligonucleotide
aauaguagugaacuuggaa

SEQ ID NO: 3216427 - RNA, 19 nt, Artificial Sequence
  Description of Artificial Sequence: Synthetic oligonucleotide
acaaacaaacaacacacca

SEQ ID NO: 3216428 - RNA, 19 nt, Artificial Sequence
  Description of Artificial Sequence: Synthetic oligonucleotide
aacaacacaccacacacaa

SEQ ID NO: 3216429 - RNA, 19 nt, Artificial Sequence
  Description of Artificial Sequence: Synthetic oligonucleotide
acauuuaugggaauaaaag

SEQ ID NO: 3216430 - RNA, 19 nt, Artificial Sequence
  Description of Artificial Sequence: Synthetic oligonucleotide
uacaguacuaaaauuuaac

SEQ ID NO: 3216431 - RNA, 19 nt, Artificial Sequence
  Description of Artificial Sequence: Synthetic oligonucleotide
auuuaugggaauaaaaggu

SEQ ID NO: 3216432 - RNA, 19 nt, Artificial Sequence
  Description of Artificial Sequence: Synthetic oligonucleotide
uacuaaaauuuaacuaaag

SEQ ID NO: 3216433 - RNA, 19 nt, Artificial Sequence
  Description of Artificial Sequence: Synthetic oligonucleotide
acaguacuaaaauuuaacu

SEQ ID NO: 3216434 - RNA, 19 nt, Artificial Sequence
  Description of Artificial Sequence: Synthetic oligonucleotide
caaacaacacaccacacac

SEQ ID NO: 3216435 - RNA, 19 nt, Artificial Sequence
  Description of Artificial Sequence: Synthetic oligonucleotide
uuaugggaauaaaagguga

SEQ ID NO: 3216436 - RNA, 19 nt, Artificial Sequence
  Description of Artificial Sequence: Synthetic oligonucleotide
uaugggaauaaaaggugag

SEQ ID NO: 3216437 - RNA, 19 nt, Artificial Sequence
  Description of Artificial Sequence: Synthetic oligonucleotide
aaaacaaaacaaacaaaca

SEQ ID NO: 3216438 - RNA, 19 nt, Artificial Sequence
  Description of Artificial Sequence: Synthetic oligonucleotide
uuuacaguacuaaaauuua

SEQ ID NO: 3216439 - RNA, 19 nt, Artificial Sequence
  Description of Artificial Sequence: Synthetic oligonucleotide
ugagagaaggagaaagaug

SEQ ID NO: 3216440 - RNA, 19 nt, Artificial Sequence
  Description of Artificial Sequence: Synthetic oligonucleotide
aaagauggaugccagcagu

SEQ ID NO: 3216441 - RNA, 19 nt, Artificial Sequence
  Description of Artificial Sequence: Synthetic oligonucleotide
ugggaauaaaaggugagag

SEQ ID NO: 3216442 - RNA, 19 nt, Artificial Sequence
  Description of Artificial Sequence: Synthetic oligonucleotide
uggaaauuaugccaaauuu

SEQ ID NO: 3216443 - RNA, 19 nt, Artificial Sequence
  Description of Artificial Sequence: Synthetic oligonucleotide
aacaaacaaacaacacacc

SEQ ID NO: 3216444 - RNA, 19 nt, Artificial Sequence
  Description of Artificial Sequence: Synthetic oligonucleotide
aauuuacaguacuaaaauu

SEQ ID NO: 3216445 - RNA, 19 nt, Artificial Sequence
  Description of Artificial Sequence: Synthetic oligonucleotide
acuaaagaaaacaaaacaa

SEQ ID NO: 3216446 - RNA, 19 nt, Artificial Sequence
  Description of Artificial Sequence: Synthetic oligonucleotide
auggacaagaacaugcugg

SEQ ID NO: 3216447 - RNA, 19 nt, Artificial Sequence
  Description of Artificial Sequence: Synthetic oligonucleotide
uggucugugaccuaugcac

SEQ ID NO: 3216448 - RNA, 19 nt, Artificial Sequence
  Description of Artificial Sequence: Synthetic oligonucleotide
gaacuuggaaauuaugcca

SEQ ID NO: 3216449 - RNA, 19 nt, Artificial Sequence
  Description of Artificial Sequence: Synthetic oligonucleotide
caaacaaacaacacaccac

SEQ ID NO: 3216450 - RNA, 19 nt, Artificial Sequence
  Description of Artificial Sequence: Synthetic oligonucleotide
cuaaagaaaacaaaacaaa

SEQ ID NO: 3216451 - RNA, 19 nt, Artificial Sequence
  Description of Artificial Sequence: Synthetic oligonucleotide
gugaacuuggaaauuaugc

SEQ ID NO: 3216452 - RNA, 19 nt, Artificial Sequence
  Description of Artificial Sequence: Synthetic oligonucleotide
caaaacaaacaaacaacac

SEQ ID NO: 3216453 - RNA, 19 nt, Artificial Sequence
  Description of Artificial Sequence: Synthetic oligonucleotide
acaaaacaaacaaacaaca

SEQ ID NO: 3216454 - RNA, 19 nt, Artificial Sequence
  Description of Artificial Sequence: Synthetic oligonucleotide
cacaaugcacauuuauggg

SEQ ID NO: 3216455 - RNA, 19 nt, Artificial Sequence
  Description of Artificial Sequence: Synthetic oligonucleotide
auuuacaguacuaaaauuu

SEQ ID NO: 3216456 - RNA, 19 nt, Artificial Sequence
  Description of Artificial Sequence: Synthetic oligonucleotide
uuaugccaaauuuacagua

SEQ ID NO: 3216457 - RNA, 19 nt, Artificial Sequence
  Description of Artificial Sequence: Synthetic oligonucleotide
acaaugcacauuuauggga

SEQ ID NO: 3216458 - RNA, 19 nt, Artificial Sequence
  Description of Artificial Sequence: Synthetic oligonucleotide
aaggagaaagauggaugcc

SEQ ID NO: 3216459 - RNA, 19 nt, Artificial Sequence
  Description of Artificial Sequence: Synthetic oligonucleotide
caaauuuacaguacuaaaa

SEQ ID NO: 3216460 - RNA, 19 nt, Artificial Sequence
  Description of Artificial Sequence: Synthetic oligonucleotide
ucucauuuggucugugacc

SEQ ID NO: 3216461 - RNA, 19 nt, Artificial Sequence
  Description of Artificial Sequence: Synthetic oligonucleotide
uaugccaaauuuacaguac

SEQ ID NO: 3216462 - RNA, 19 nt, Artificial Sequence
  Description of Artificial Sequence: Synthetic oligonucleotide
guguacacaacaguguacg

SEQ ID NO: 3216463 - RNA, 19 nt, Artificial Sequence
  Description of Artificial Sequence: Synthetic oligonucleotide
acaaacaacacaccacaca

SEQ ID NO: 3216464 - RNA, 19 nt, Artificial Sequence
  Description of Artificial Sequence: Synthetic oligonucleotide
auuaugccaaauuuacagu

SEQ ID NO: 3216465 - RNA, 19 nt, Artificial Sequence
  Description of Artificial Sequence: Synthetic oligonucleotide
ccacaaugcacauuuaugg

SEQ ID NO: 3216466 - RNA, 19 nt, Artificial Sequence
  Description of Artificial Sequence: Synthetic oligonucleotide
uauggacaagaacaugcug

SEQ ID NO: 3216467 - RNA, 19 nt, Artificial Sequence
  Description of Artificial Sequence: Synthetic oligonucleotide
aagaacaugcugguggucu

SEQ ID NO: 3216468 - RNA, 19 nt, Artificial Sequence
  Description of Artificial Sequence: Synthetic oligonucleotide
agcaauaguagugaacuug

SEQ ID NO: 3216469 - RNA, 19 nt, Artificial Sequence
  Description of Artificial Sequence: Synthetic oligonucleotide
uuacaguacuaaaauuuaa

SEQ ID NO: 3216470 - RNA, 19 nt, Artificial Sequence
  Description of Artificial Sequence: Synthetic oligonucleotide
uuuggucugugaccuaugc

SEQ ID NO: 3216471 - RNA, 19 nt, Artificial Sequence
  Description of Artificial Sequence: Synthetic oligonucleotide
caacacaccacacacaaca

SEQ ID NO: 3216472 - RNA, 19 nt, Artificial Sequence
  Description of Artificial Sequence: Synthetic oligonucleotide
aaaaggugagagaaggaga

SEQ ID NO: 3216473 - RNA, 19 nt, Artificial Sequence
  Description of Artificial Sequence: Synthetic oligonucleotide
gaaagauggaugccagcag

SEQ ID NO: 3216474 - RNA, 19 nt, Artificial Sequence
  Description of Artificial Sequence: Synthetic oligonucleotide
uaguagugaacuuggaaau

SEQ ID NO: 3216475 - RNA, 19 nt, Artificial Sequence
  Description of Artificial Sequence: Synthetic oligonucleotide
uuggaaauuaugccaaauu

SEQ ID NO: 3216476 - RNA, 19 nt, Artificial Sequence
  Description of Artificial Sequence: Synthetic oligonucleotide
accuaugcaccccacaaug

SEQ ID NO: 3216477 - RNA, 19 nt, Artificial Sequence
  Description of Artificial Sequence: Synthetic oligonucleotide
aacaaacaacacaccacac

SEQ ID NO: 3216478 - RNA, 19 nt, Artificial Sequence
  Description of Artificial Sequence: Synthetic oligonucleotide
agaaagauggaugccagca

SEQ ID NO: 3216479 - RNA, 19 nt, Artificial Sequence
  Description of Artificial Sequence: Synthetic oligonucleotide
aaaggugagagaaggagaa

SEQ ID NO: 3216480 - RNA, 19 nt, Artificial Sequence
  Description of Artificial Sequence: Synthetic oligonucleotide
ugcugguggucucauuugg

SEQ ID NO: 3216481 - RNA, 19 nt, Artificial Sequence
  Description of Artificial Sequence: Synthetic oligonucleotide
aguagcaauaguagugaac

SEQ ID NO: 3216482 - RNA, 19 nt, Artificial Sequence
  Description of Artificial Sequence: Synthetic oligonucleotide
auuuaacuaaagaaaacaa

SEQ ID NO: 3216483 - RNA, 19 nt, Artificial Sequence
  Description of Artificial Sequence: Synthetic oligonucleotide
gaauaaaaggugagagaag

SEQ ID NO: 3216484 - RNA, 19 nt, Artificial Sequence
  Description of Artificial Sequence: Synthetic oligonucleotide
uguacgccguuccugaagu

SEQ ID NO: 3216485 - RNA, 19 nt, Artificial Sequence
  Description of Artificial Sequence: Synthetic oligonucleotide
gauggaugccagcaguagc

SEQ ID NO: 3216486 - RNA, 19 nt, Artificial Sequence
  Description of Artificial Sequence: Synthetic oligonucleotide
aggugagagaaggagaaag

SEQ ID NO: 3216487 - RNA, 19 nt, Artificial Sequence
  Description of Artificial Sequence: Synthetic oligonucleotide
agaaggagaaagauggaug

SEQ ID NO: 3216488 - RNA, 19 nt, Artificial Sequence
  Description of Artificial Sequence: Synthetic oligonucleotide
aaauuaugccaaauuuaca

SEQ ID NO: 3216489 - RNA, 19 nt, Artificial Sequence
  Description of Artificial Sequence: Synthetic oligonucleotide
uguguacacaacaguguac

SEQ ID NO: 3216490 - RNA, 19 nt, Artificial Sequence
  Description of Artificial Sequence: Synthetic oligonucleotide
ugaccuaugcaccccacaa

SEQ ID NO: 3216491 - RNA, 19 nt, Artificial Sequence
  Description of Artificial Sequence: Synthetic oligonucleotide
uuuauauauacuaagauaa

SEQ ID NO: 3216492 - RNA, 19 nt, Artificial Sequence
  Description of Artificial Sequence: Synthetic oligonucleotide
uauacuaagauaaaguaug

SEQ ID NO: 3216493 - RNA, 19 nt, Artificial Sequence
  Description of Artificial Sequence: Synthetic oligonucleotide
aauaacugcauucccaagg

SEQ ID NO: 3216494 - RNA, 19 nt, Artificial Sequence
  Description of Artificial Sequence: Synthetic oligonucleotide
uuuguuuuaguuuauauau

SEQ ID NO: 3216495 - RNA, 19 nt, Artificial Sequence
  Description of Artificial Sequence: Synthetic oligonucleotide
aaguaugguuauuuuaccc

SEQ ID NO: 3216496 - RNA, 19 nt, Artificial Sequence
  Description of Artificial Sequence: Synthetic oligonucleotide
aaaguaugguuauuuuacc

SEQ ID NO: 3216497 - RNA, 19 nt, Artificial Sequence
  Description of Artificial Sequence: Synthetic oligonucleotide
uuaguuuauauauacuaag

SEQ ID NO: 3216498 - RNA, 19 nt, Artificial Sequence
  Description of Artificial Sequence: Synthetic oligonucleotide
uaaaguaugguuauuuuac

SEQ ID NO: 3216499 - RNA, 19 nt, Artificial Sequence
  Description of Artificial Sequence: Synthetic oligonucleotide
cuuuccaugacacaggaag

SEQ ID NO: 3216500 - RNA, 19 nt, Artificial Sequence
  Description of Artificial Sequence: Synthetic oligonucleotide
uuuuaguuuauauauacua

SEQ ID NO: 3216501 - RNA, 19 nt, Artificial Sequence
  Description of Artificial Sequence: Synthetic oligonucleotide
uauauauacuaagauaaag

SEQ ID NO: 3216502 - RNA, 19 nt, Artificial Sequence
  Description of Artificial Sequence: Synthetic oligonucleotide
aguuagaauaacugcauuc

SEQ ID NO: 3216503 - RNA, 19 nt, Artificial Sequence
  Description of Artificial Sequence: Synthetic oligonucleotide
uguuuuaguuuauauauac

SEQ ID NO: 3216504 - RNA, 19 nt, Artificial Sequence
  Description of Artificial Sequence: Synthetic oligonucleotide
uauauacuaagauaaagua

SEQ ID NO: 3216505 - RNA, 19 nt, Artificial Sequence
  Description of Artificial Sequence: Synthetic oligonucleotide
ucagcaguuagaauaacug

SEQ ID NO: 3216506 - RNA, 19 nt, Artificial Sequence
  Description of Artificial Sequence: Synthetic oligonucleotide
uuuaguuuauauauacuaa

SEQ ID NO: 3216507 - RNA, 19 nt, Artificial Sequence
  Description of Artificial Sequence: Synthetic oligonucleotide
uauuuuacccuuuccauga

SEQ ID NO: 3216508 - RNA, 19 nt, Artificial Sequence
  Description of Artificial Sequence: Synthetic oligonucleotide
uuggcaauugccagaaagg

SEQ ID NO: 3216509 - RNA, 19 nt, Artificial Sequence
  Description of Artificial Sequence: Synthetic oligonucleotide
uaguuuauauauacuaaga

SEQ ID NO: 3216510 - RNA, 19 nt, Artificial Sequence
  Description of Artificial Sequence: Synthetic oligonucleotide
agcuagagaaacuagggug

SEQ ID NO: 3216511 - RNA, 19 nt, Artificial Sequence
  Description of Artificial Sequence: Synthetic oligonucleotide
auaacugcauucccaaggg

SEQ ID NO: 3216512 - RNA, 19 nt, Artificial Sequence
  Description of Artificial Sequence: Synthetic oligonucleotide
acuaagauaaaguaugguu

SEQ ID NO: 3216513 - RNA, 19 nt, Artificial Sequence
  Description of Artificial Sequence: Synthetic oligonucleotide
uuauuuuacccuuuccaug

SEQ ID NO: 3216514 - RNA, 19 nt, Artificial Sequence
  Description of Artificial Sequence: Synthetic oligonucleotide
gaagcuagagaaacuaggg

SEQ ID NO: 3216515 - RNA, 19 nt, Artificial Sequence
  Description of Artificial Sequence: Synthetic oligonucleotide
aguuuauauauacuaagau

SEQ ID NO: 3216516 - RNA, 19 nt, Artificial Sequence
  Description of Artificial Sequence: Synthetic oligonucleotide
aaacuaggguggcaguuac

SEQ ID NO: 3216517 - RNA, 19 nt, Artificial Sequence
  Description of Artificial Sequence: Synthetic oligonucleotide
uccuaauuggcucagcagu

SEQ ID NO: 3216518 - RNA, 19 nt, Artificial Sequence
  Description of Artificial Sequence: Synthetic oligonucleotide
uuagaauaacugcauuccc

SEQ ID NO: 3216519 - RNA, 19 nt, Artificial Sequence
  Description of Artificial Sequence: Synthetic oligonucleotide
uuuuguuuuaguuuauaua

SEQ ID NO: 3216520 - RNA, 19 nt, Artificial Sequence
  Description of Artificial Sequence: Synthetic oligonucleotide
ugcacgguauuucaguucc

SEQ ID NO: 3216521 - RNA, 19 nt, Artificial Sequence
  Description of Artificial Sequence: Synthetic oligonucleotide
uagaauaacugcauuccca

SEQ ID NO: 3216522 - RNA, 19 nt, Artificial Sequence
  Description of Artificial Sequence: Synthetic oligonucleotide
uuuacccuuuccaugacac

SEQ ID NO: 3216523 - RNA, 19 nt, Artificial Sequence
  Description of Artificial Sequence: Synthetic oligonucleotide
gacacaggaagcuagagaa

SEQ ID NO: 3216524 - RNA, 19 nt, Artificial Sequence
  Description of Artificial Sequence: Synthetic oligonucleotide
auagucucggaucuggaag

SEQ ID NO: 3216525 - RNA, 19 nt, Artificial Sequence
  Description of Artificial Sequence: Synthetic oligonucleotide
aguaugguuauuuuacccu

SEQ ID NO: 3216526 - RNA, 19 nt, Artificial Sequence
  Description of Artificial Sequence: Synthetic oligonucleotide
ucucggaucuggaagcugg

SEQ ID NO: 3216527 - RNA, 19 nt, Artificial Sequence
  Description of Artificial Sequence: Synthetic oligonucleotide
auauauacuaagauaaagu

SEQ ID NO: 3216528 - RNA, 19 nt, Artificial Sequence
  Description of Artificial Sequence: Synthetic oligonucleotide
guuagaauaacugcauucc

SEQ ID NO: 3216529 - RNA, 19 nt, Artificial Sequence
  Description of Artificial Sequence: Synthetic oligonucleotide
agucacacaaaggagcagc

SEQ ID NO: 3216530 - RNA, 19 nt, Artificial Sequence
  Description of Artificial Sequence: Synthetic oligonucleotide
cuuggcaauugccagaaag

SEQ ID NO: 3216531 - RNA, 19 nt, Artificial Sequence
  Description of Artificial Sequence: Synthetic oligonucleotide
uaagauaaaguaugguuau

SEQ ID NO: 3216532 - RNA, 19 nt, Artificial Sequence
  Description of Artificial Sequence: Synthetic oligonucleotide
aacugcauucccaaggguc

SEQ ID NO: 3216533 - RNA, 19 nt, Artificial Sequence
  Description of Artificial Sequence: Synthetic oligonucleotide
guuuauauauacuaagaua

SEQ ID NO: 3216534 - RNA, 19 nt, Artificial Sequence
  Description of Artificial Sequence: Synthetic oligonucleotide
acaaaggagcagcagcugg

SEQ ID NO: 3216535 - RNA, 19 nt, Artificial Sequence
  Description of Artificial Sequence: Synthetic oligonucleotide
uaggguggcaguuacuucc

SEQ ID NO: 3216536 - RNA, 19 nt, Artificial Sequence
  Description of Artificial Sequence: Synthetic oligonucleotide
cuaagauaaaguaugguua

SEQ ID NO: 3216537 - RNA, 19 nt, Artificial Sequence
  Description of Artificial Sequence: Synthetic oligonucleotide
uuauauauacuaagauaaa

SEQ ID NO: 3216538 - RNA, 19 nt, Artificial Sequence
  Description of Artificial Sequence: Synthetic oligonucleotide
uccacauagucucggaucu

SEQ ID NO: 3216539 - RNA, 19 nt, Artificial Sequence
  Description of Artificial Sequence: Synthetic oligonucleotide
ugccagaaaggccagcucc

SEQ ID NO: 3216540 - RNA, 19 nt, Artificial Sequence
  Description of Artificial Sequence: Synthetic oligonucleotide
uuuccaugacacaggaagc

SEQ ID NO: 3216541 - RNA, 19 nt, Artificial Sequence
  Description of Artificial Sequence: Synthetic oligonucleotide
aagcuagagaaacuagggu

SEQ ID NO: 3216542 - RNA, 19 nt, Artificial Sequence
  Description of Artificial Sequence: Synthetic oligonucleotide
auaaaguaugguuauuuua

SEQ ID NO: 3216543 - RNA, 19 nt, Artificial Sequence
  Description of Artificial Sequence: Synthetic oligonucleotide
uaauuggcucagcaguuag

SEQ ID NO: 3216544 - RNA, 19 nt, Artificial Sequence
  Description of Artificial Sequence: Synthetic oligonucleotide
cacacaaaggagcagcagc

SEQ ID NO: 3216545 - RNA, 19 nt, Artificial Sequence
  Description of Artificial Sequence: Synthetic oligonucleotide
uauuucaguuccuuggcaa

SEQ ID NO: 3216546 - RNA, 19 nt, Artificial Sequence
  Description of Artificial Sequence: Synthetic oligonucleotide
agaauaacugcauucccaa

SEQ ID NO: 3216547 - RNA, 19 nt, Artificial Sequence
  Description of Artificial Sequence: Synthetic oligonucleotide
uggcucagcaguuagaaua

SEQ ID NO: 3216548 - RNA, 19 nt, Artificial Sequence
  Description of Artificial Sequence: Synthetic oligonucleotide
ucuccuaauuggcucagca

SEQ ID NO: 3216549 - RNA, 19 nt, Artificial Sequence
  Description of Artificial Sequence: Synthetic oligonucleotide
uacccuuuccaugacacag

SEQ ID NO: 3216550 - RNA, 19 nt, Artificial Sequence
  Description of Artificial Sequence: Synthetic oligonucleotide
ugggacuccacauagucuc

SEQ ID NO: 3216551 - RNA, 19 nt, Artificial Sequence
  Description of Artificial Sequence: Synthetic oligonucleotide
ucugcuccuccucuuagcc

SEQ ID NO: 3216552 - RNA, 19 nt, Artificial Sequence
  Description of Artificial Sequence: Synthetic oligonucleotide
ugggagucacacaaaggag

SEQ ID NO: 3216553 - RNA, 19 nt, Artificial Sequence
  Description of Artificial Sequence: Synthetic oligonucleotide
agagaaacuaggguggcag

SEQ ID NO: 3216554 - RNA, 19 nt, Artificial Sequence
  Description of Artificial Sequence: Synthetic oligonucleotide
ucugggacuccacauaguc

SEQ ID NO: 3216555 - RNA, 19 nt, Artificial Sequence
  Description of Artificial Sequence: Synthetic oligonucleotide
cagcaguuagaauaacugc

SEQ ID NO: 3216556 - RNA, 19 nt, Artificial Sequence
  Description of Artificial Sequence: Synthetic oligonucleotide
aggagcagcagcuggggcg

SEQ ID NO: 3216557 - RNA, 19 nt, Artificial Sequence
  Description of Artificial Sequence: Synthetic oligonucleotide
aaggagcagcagcuggggc

SEQ ID NO: 3216558 - RNA, 19 nt, Artificial Sequence
  Description of Artificial Sequence: Synthetic oligonucleotide
augguuauuuuacccuuuc

SEQ ID NO: 3216559 - RNA, 19 nt, Artificial Sequence
  Description of Artificial Sequence: Synthetic oligonucleotide
ugacacaggaagcuagaga

SEQ ID NO: 3216560 - RNA, 19 nt, Artificial Sequence
  Description of Artificial Sequence: Synthetic oligonucleotide
guggcaguuacuucccugg

SEQ ID NO: 3216561 - RNA, 19 nt, Artificial Sequence
  Description of Artificial Sequence: Synthetic oligonucleotide
ugcuccuccucuuagcccc

SEQ ID NO: 3216562 - RNA, 19 nt, Artificial Sequence
  Description of Artificial Sequence: Synthetic oligonucleotide
auacuaagauaaaguaugg

SEQ ID NO: 3216563 - RNA, 19 nt, Artificial Sequence
  Description of Artificial Sequence: Synthetic oligonucleotide
caaaggagcagcagcuggg

SEQ ID NO: 3216564 - RNA, 19 nt, Artificial Sequence
  Description of Artificial Sequence: Synthetic oligonucleotide
agcaguuagaauaacugca

SEQ ID NO: 3216565 - RNA, 19 nt, Artificial Sequence
  Description of Artificial Sequence: Synthetic oligonucleotide
uagucucggaucuggaagc

SEQ ID NO: 3216566 - RNA, 19 nt, Artificial Sequence
  Description of Artificial Sequence: Synthetic oligonucleotide
auauacuaagauaaaguau

SEQ ID NO: 3216567 - RNA, 19 nt, Artificial Sequence
  Description of Artificial Sequence: Synthetic oligonucleotide
gguuauuuuacccuuucca

SEQ ID NO: 3216568 - RNA, 19 nt, Artificial Sequence
  Description of Artificial Sequence: Synthetic oligonucleotide
aaaggagcagcagcugggg

SEQ ID NO: 3216569 - RNA, 19 nt, Artificial Sequence
  Description of Artificial Sequence: Synthetic oligonucleotide
cugggagucacacaaagga

SEQ ID NO: 3216570 - RNA, 19 nt, Artificial Sequence
  Description of Artificial Sequence: Synthetic oligonucleotide
uuuuacccuuuccaugaca

SEQ ID NO: 3216571 - RNA, 19 nt, Artificial Sequence
  Description of Artificial Sequence: Synthetic oligonucleotide
gaagcugggcucaucaggc

SEQ ID NO: 3216572 - RNA, 19 nt, Artificial Sequence
  Description of Artificial Sequence: Synthetic oligonucleotide
gaauaacugcauucccaag

SEQ ID NO: 3216573 - RNA, 19 nt, Artificial Sequence
  Description of Artificial Sequence: Synthetic oligonucleotide
uggcaauugccagaaaggc

SEQ ID NO: 3216574 - RNA, 19 nt, Artificial Sequence
  Description of Artificial Sequence: Synthetic oligonucleotide
ugguuauuuuacccuuucc

SEQ ID NO: 3216575 - RNA, 19 nt, Artificial Sequence
  Description of Artificial Sequence: Synthetic oligonucleotide
aaucccagcucucuccuaa

SEQ ID NO: 3216576 - RNA, 19 nt, Artificial Sequence
  Description of Artificial Sequence: Synthetic oligonucleotide
uuguuuuaguuuauauaua

SEQ ID NO: 3216577 - RNA, 19 nt, Artificial Sequence
  Description of Artificial Sequence: Synthetic oligonucleotide
guuccuuggcaauugccag

SEQ ID NO: 3216578 - RNA, 19 nt, Artificial Sequence
  Description of Artificial Sequence: Synthetic oligonucleotide
ggaagcuagagaaacuagg

SEQ ID NO: 3216579 - RNA, 19 nt, Artificial Sequence
  Description of Artificial Sequence: Synthetic oligonucleotide
cuucugggacuccacauag

SEQ ID NO: 3216580 - RNA, 19 nt, Artificial Sequence
  Description of Artificial Sequence: Synthetic oligonucleotide
auuuuacccuuuccaugac

SEQ ID NO: 3216581 - RNA, 19 nt, Artificial Sequence
  Description of Artificial Sequence: Synthetic oligonucleotide
gcuagagaaacuagggugg

SEQ ID NO: 3216582 - RNA, 19 nt, Artificial Sequence
  Description of Artificial Sequence: Synthetic oligonucleotide
aauugccagaaaggccagc

SEQ ID NO: 3216583 - RNA, 19 nt, Artificial Sequence
  Description of Artificial Sequence: Synthetic oligonucleotide
ucaucaggcugccugccug

SEQ ID NO: 3216584 - RNA, 19 nt, Artificial Sequence
  Description of Artificial Sequence: Synthetic oligonucleotide
agauaaaguaugguuauuu

SEQ ID NO: 3216585 - RNA, 19 nt, Artificial Sequence
  Description of Artificial Sequence: Synthetic oligonucleotide
cacaggaagcuagagaaac

SEQ ID NO: 3216586 - RNA, 19 nt, Artificial Sequence
  Description of Artificial Sequence: Synthetic oligonucleotide
auucccaagggucucugcu

SEQ ID NO: 3216587 - RNA, 19 nt, Artificial Sequence
  Description of Artificial Sequence: Synthetic oligonucleotide
ucccaagggucucugcucc

SEQ ID NO: 3216588 - RNA, 19 nt, Artificial Sequence
  Description of Artificial Sequence: Synthetic oligonucleotide
guuacuucccuggccaggg

SEQ ID NO: 3216589 - RNA, 19 nt, Artificial Sequence
  Description of Artificial Sequence: Synthetic oligonucleotide
gguauuucaguuccuuggc

SEQ ID NO: 3216590 - RNA, 19 nt, Artificial Sequence
  Description of Artificial Sequence: Synthetic oligonucleotide
uacuaagauaaaguauggu

SEQ ID NO: 3216591 - RNA, 19 nt, Artificial Sequence
  Description of Artificial Sequence: Synthetic oligonucleotide
aaacaaggaaaguugauuc

SEQ ID NO: 3216592 - RNA, 19 nt, Artificial Sequence
  Description of Artificial Sequence: Synthetic oligonucleotide
acaauauuaaauaugguuc

SEQ ID NO: 3216593 - RNA, 19 nt, Artificial Sequence
  Description of Artificial Sequence: Synthetic oligonucleotide
uuagagaacaaggagaccc

SEQ ID NO: 3216594 - RNA, 19 nt, Artificial Sequence
  Description of Artificial Sequence: Synthetic oligonucleotide
uuuguuaaaguuaguaugu

SEQ ID NO: 3216595 - RNA, 19 nt, Artificial Sequence
  Description of Artificial Sequence: Synthetic oligonucleotide
aaguuaguauguguaaugc

SEQ ID NO: 3216596 - RNA, 19 nt, Artificial Sequence
  Description of Artificial Sequence: Synthetic oligonucleotide
aaaguuaguauguguaaug

SEQ ID NO: 3216597 - RNA, 19 nt, Artificial Sequence
  Description of Artificial Sequence: Synthetic oligonucleotide
gucucugaaacucacaggg

SEQ ID NO: 3216598 - RNA, 19 nt, Artificial Sequence
  Description of Artificial Sequence: Synthetic oligonucleotide
ucugguaauccucagauuc

SEQ ID NO: 3216599 - RNA, 19 nt, Artificial Sequence
  Description of Artificial Sequence: Synthetic oligonucleotide
uacauaggcagcaucaugu

SEQ ID NO: 3216600 - RNA, 19 nt, Artificial Sequence
  Description of Artificial Sequence: Synthetic oligonucleotide
gaagaucugagcaaacugg

SEQ ID NO: 3216601 - RNA, 19 nt, Artificial Sequence
  Description of Artificial Sequence: Synthetic oligonucleotide
uauuaaauaugguuccagc

SEQ ID NO: 3216602 - RNA, 19 nt, Artificial Sequence
  Description of Artificial Sequence: Synthetic oligonucleotide
uucucuucaccccugggcg

SEQ ID NO: 3216603 - RNA, 19 nt, Artificial Sequence
  Description of Artificial Sequence: Synthetic oligonucleotide
agucauguaacauucccag

SEQ ID NO: 3216604 - RNA, 19 nt, Artificial Sequence
  Description of Artificial Sequence: Synthetic oligonucleotide
auuaaauaugguuccagca

SEQ ID NO: 3216605 - RNA, 19 nt, Artificial Sequence
  Description of Artificial Sequence: Synthetic oligonucleotide
ucauguaacauucccagaa

SEQ ID NO: 3216606 - RNA, 19 nt, Artificial Sequence
  Description of Artificial Sequence: Synthetic oligonucleotide
aauccucagauuccucgcc

SEQ ID NO: 3216607 - RNA, 19 nt, Artificial Sequence
  Description of Artificial Sequence: Synthetic oligonucleotide
auguguaaugcucucagag

SEQ ID NO: 3216608 - RNA, 19 nt, Artificial Sequence
  Description of Artificial Sequence: Synthetic oligonucleotide
uguucuuccuuuccgauga

SEQ ID NO: 3216609 - RNA, 19 nt, Artificial Sequence
  Description of Artificial Sequence: Synthetic oligonucleotide
aggaaaguugauucucucc

SEQ ID NO: 3216610 - RNA, 19 nt, Artificial Sequence
  Description of Artificial Sequence: Synthetic oligonucleotide
gaucugagcaaacuggagc

SEQ ID NO: 3216611 - RNA, 19 nt, Artificial Sequence
  Description of Artificial Sequence: Synthetic oligonucleotide
cucagagacagaaaguccc

SEQ ID NO: 3216612 - RNA, 19 nt, Artificial Sequence
  Description of Artificial Sequence: Synthetic oligonucleotide
uucucauuucucuucaccc

SEQ ID NO: 3216613 - RNA, 19 nt, Artificial Sequence
  Description of Artificial Sequence: Synthetic oligonucleotide
aggaauggaagaucugagc

SEQ ID NO: 3216614 - RNA, 19 nt, Artificial Sequence
  Description of Artificial Sequence: Synthetic oligonucleotide
aacauucauaagcaauuug

SEQ ID NO: 3216615 - RNA, 19 nt, Artificial Sequence
  Description of Artificial Sequence: Synthetic oligonucleotide
cuaucaccgacccacaagg

SEQ ID NO: 3216616 - RNA, 19 nt, Artificial Sequence
  Description of Artificial Sequence: Synthetic oligonucleotide
acuuagagaacaaggagac

SEQ ID NO: 3216617 - RNA, 19 nt, Artificial Sequence
  Description of Artificial Sequence: Synthetic oligonucleotide
acucacaggguuuauugac

SEQ ID NO: 3216618 - RNA, 19 nt, Artificial Sequence
  Description of Artificial Sequence: Synthetic oligonucleotide
uucauuuucuugcugguuc

SEQ ID NO: 3216619 - RNA, 19 nt, Artificial Sequence
  Description of Artificial Sequence: Synthetic oligonucleotide
aacuggagcccacuuagag

SEQ ID NO: 3216620 - RNA, 19 nt, Artificial Sequence
  Description of Artificial Sequence: Synthetic oligonucleotide
aaucuggcuccucaucugg

SEQ ID NO: 3216621 - RNA, 19 nt, Artificial Sequence
  Description of Artificial Sequence: Synthetic oligonucleotide
uucauguuggcuuggggag

SEQ ID NO: 3216622 - RNA, 19 nt, Artificial Sequence
  Description of Artificial Sequence: Synthetic oligonucleotide
ggagucaucaucuucuggg

SEQ ID NO: 3216623 - RNA, 19 nt, Artificial Sequence
  Description of Artificial Sequence: Synthetic oligonucleotide
uuucucauuucucuucacc

SEQ ID NO: 3216624 - RNA, 19 nt, Artificial Sequence
  Description of Artificial Sequence: Synthetic oligonucleotide
gagaugagagaacagcagc

SEQ ID NO: 3216625 - RNA, 19 nt, Artificial Sequence
  Description of Artificial Sequence: Synthetic oligonucleotide
ucaccgacccacaaggucc

SEQ ID NO: 3216626 - RNA, 19 nt, Artificial Sequence
  Description of Artificial Sequence: Synthetic oligonucleotide
agaacaaggagaccccagg

SEQ ID NO: 3216627 - RNA, 19 nt, Artificial Sequence
  Description of Artificial Sequence: Synthetic oligonucleotide
uguuaaaguuaguaugugu

SEQ ID NO: 3216628 - RNA, 19 nt, Artificial Sequence
  Description of Artificial Sequence: Synthetic oligonucleotide
auucauguuggcuugggga

SEQ ID NO: 3216629 - RNA, 19 nt, Artificial Sequence
  Description of Artificial Sequence: Synthetic oligonucleotide
cagaaaucaacauucauaa

SEQ ID NO: 3216630 - RNA, 19 nt, Artificial Sequence
  Description of Artificial Sequence: Synthetic oligonucleotide
ucacaggguuuauugacgg

SEQ ID NO: 3216631 - RNA, 19 nt, Artificial Sequence
  Description of Artificial Sequence: Synthetic oligonucleotide
aacaccagacucuggcggg

SEQ ID NO: 3216632 - RNA, 19 nt, Artificial Sequence
  Description of Artificial Sequence: Synthetic oligonucleotide
cugacaauggccacaguag

SEQ ID NO: 3216633 - RNA, 19 nt, Artificial Sequence
  Description of Artificial Sequence: Synthetic oligonucleotide
uuuccgaugacuugucuga

SEQ ID NO: 3216634 - RNA, 19 nt, Artificial Sequence
  Description of Artificial Sequence: Synthetic oligonucleotide
ucgagaugagagaacagca

SEQ ID NO: 3216635 - RNA, 19 nt, Artificial Sequence
  Description of Artificial Sequence: Synthetic oligonucleotide
uuugagguccaaacaagga

SEQ ID NO: 3216636 - RNA, 19 nt, Artificial Sequence
  Description of Artificial Sequence: Synthetic oligonucleotide
gacaauauuaaauaugguu

SEQ ID NO: 3216637 - RNA, 19 nt, Artificial Sequence
  Description of Artificial Sequence: Synthetic oligonucleotide
ugagguccaaacaaggaaa

SEQ ID NO: 3216638 - RNA, 19 nt, Artificial Sequence
  Description of Artificial Sequence: Synthetic oligonucleotide
uccaaacaaggaaaguuga

SEQ ID NO: 3216639 - RNA, 19 nt, Artificial Sequence
  Description of Artificial Sequence: Synthetic oligonucleotide
uucgagaugagagaacagc

SEQ ID NO: 3216640 - RNA, 19 nt, Artificial Sequence
  Description of Artificial Sequence: Synthetic oligonucleotide
guguaaugcucucagagac

SEQ ID NO: 3216641 - RNA, 19 nt, Artificial Sequence
  Description of Artificial Sequence: Synthetic oligonucleotide
acauucauaagcaauuuga

SEQ ID NO: 3216642 - RNA, 19 nt, Artificial Sequence
  Description of Artificial Sequence: Synthetic oligonucleotide
uguguaaugcucucagaga

SEQ ID NO: 3216643 - RNA, 19 nt, Artificial Sequence
  Description of Artificial Sequence: Synthetic oligonucleotide
uguccaucagggauccugg

SEQ ID NO: 3216644 - RNA, 19 nt, Artificial Sequence
  Description of Artificial Sequence: Synthetic oligonucleotide
uggacacacagccaggcug

SEQ ID NO: 3216645 - RNA, 19 nt, Artificial Sequence
  Description of Artificial Sequence: Synthetic oligonucleotide
ugacaauggccacaguagc

SEQ ID NO: 3216646 - RNA, 19 nt, Artificial Sequence
  Description of Artificial Sequence: Synthetic oligonucleotide
ucucguaggaguuggaguc

SEQ ID NO: 3216647 - RNA, 19 nt, Artificial Sequence
  Description of Artificial Sequence: Synthetic oligonucleotide
ucaggaauggaagaucuga

SEQ ID NO: 3216648 - RNA, 19 nt, Artificial Sequence
  Description of Artificial Sequence: Synthetic oligonucleotide
ucucauuucucuucacccc

SEQ ID NO: 3216649 - RNA, 19 nt, Artificial Sequence
  Description of Artificial Sequence: Synthetic oligonucleotide
uuacccuacaccccgcuca

SEQ ID NO: 3216650 - RNA, 19 nt, Artificial Sequence
  Description of Artificial Sequence: Synthetic oligonucleotide
aguaaagcucucuucauuu

SEQ ID NO: 3216651 - RNA, 19 nt, Artificial Sequence
  Description of Artificial Sequence: Synthetic oligonucleotide
acaaggaaaguugauucuc

SEQ ID NO: 3216652 - RNA, 19 nt, Artificial Sequence
  Description of Artificial Sequence: Synthetic oligonucleotide
ugucucugaaacucacagg

SEQ ID NO: 3216653 - RNA, 19 nt, Artificial Sequence
  Description of Artificial Sequence: Synthetic oligonucleotide
gaugcauacugaguucugg

SEQ ID NO: 3216654 - RNA, 19 nt, Artificial Sequence
  Description of Artificial Sequence: Synthetic oligonucleotide
aauggaagaucugagcaaa

SEQ ID NO: 3216655 - RNA, 19 nt, Artificial Sequence
  Description of Artificial Sequence: Synthetic oligonucleotide
ucauuuucuugcugguucc

SEQ ID NO: 3216656 - RNA, 19 nt, Artificial Sequence
  Description of Artificial Sequence: Synthetic oligonucleotide
cucacaggguuuauugacg

SEQ ID NO: 3216657 - RNA, 19 nt, Artificial Sequence
  Description of Artificial Sequence: Synthetic oligonucleotide
auuugagguccaaacaagg

SEQ ID NO: 3216658 - RNA, 19 nt, Artificial Sequence
  Description of Artificial Sequence: Synthetic oligonucleotide
ucauaagcaauuugagguc

SEQ ID NO: 3216659 - RNA, 19 nt, Artificial Sequence
  Description of Artificial Sequence: Synthetic oligonucleotide
caagccaaugccaacacca

SEQ ID NO: 3216660 - RNA, 19 nt, Artificial Sequence
  Description of Artificial Sequence: Synthetic oligonucleotide
aguuaguauguguaaugcu

SEQ ID NO: 3216661 - RNA, 19 nt, Artificial Sequence
  Description of Artificial Sequence: Synthetic oligonucleotide
auuccucgccaccugaguc

SEQ ID NO: 3216662 - RNA, 19 nt, Artificial Sequence
  Description of Artificial Sequence: Synthetic oligonucleotide
cauaagcaauuugaggucc

SEQ ID NO: 3216663 - RNA, 19 nt, Artificial Sequence
  Description of Artificial Sequence: Synthetic oligonucleotide
aacucacaggguuuauuga

SEQ ID NO: 3216664 - RNA, 19 nt, Artificial Sequence
  Description of Artificial Sequence: Synthetic oligonucleotide
aucaccgacccacaagguc

SEQ ID NO: 3216665 - RNA, 19 nt, Artificial Sequence
  Description of Artificial Sequence: Synthetic oligonucleotide
agcagugggacugacaaug

SEQ ID NO: 3216666 - RNA, 19 nt, Artificial Sequence
  Description of Artificial Sequence: Synthetic oligonucleotide
cugacauugacaauauuaa

SEQ ID NO: 3216667 - RNA, 19 nt, Artificial Sequence
  Description of Artificial Sequence: Synthetic oligonucleotide
uaauccucagauuccucgc

SEQ ID NO: 3216668 - RNA, 19 nt, Artificial Sequence
  Description of Artificial Sequence: Synthetic oligonucleotide
agaaaucaacauucauaag

SEQ ID NO: 3216669 - RNA, 19 nt, Artificial Sequence
  Description of Artificial Sequence: Synthetic oligonucleotide
aggguuuauugacgguugc

SEQ ID NO: 3216670 - RNA, 19 nt, Artificial Sequence
  Description of Artificial Sequence: Synthetic oligonucleotide
acaauggccacaguagcuc

SEQ ID NO: 3216671 - RNA, 19 nt, Artificial Sequence
  Description of Artificial Sequence: Synthetic oligonucleotide
aguagcuccaacucggcau

SEQ ID NO: 3216672 - RNA, 19 nt, Artificial Sequence
  Description of Artificial Sequence: Synthetic oligonucleotide
uaaaguuaguauguguaau

SEQ ID NO: 3216673 - RNA, 19 nt, Artificial Sequence
  Description of Artificial Sequence: Synthetic oligonucleotide
cuuuccgaugacuugucug

SEQ ID NO: 3216674 - RNA, 19 nt, Artificial Sequence
  Description of Artificial Sequence: Synthetic oligonucleotide
caacaccagacucuggcgg

SEQ ID NO: 3216675 - RNA, 19 nt, Artificial Sequence
  Description of Artificial Sequence: Synthetic oligonucleotide
guuaaaguuaguaugugua

SEQ ID NO: 3216676 - RNA, 19 nt, Artificial Sequence
  Description of Artificial Sequence: Synthetic oligonucleotide
ggaauggaagaucugagca

SEQ ID NO: 3216677 - RNA, 19 nt, Artificial Sequence
  Description of Artificial Sequence: Synthetic oligonucleotide
cagguuacccuacaccccg

SEQ ID NO: 3216678 - RNA, 19 nt, Artificial Sequence
  Description of Artificial Sequence: Synthetic oligonucleotide
auaggcagcaucaugucug

SEQ ID NO: 3216679 - RNA, 19 nt, Artificial Sequence
  Description of Artificial Sequence: Synthetic oligonucleotide
aaagcucucuucauuuucu

SEQ ID NO: 3216680 - RNA, 19 nt, Artificial Sequence
  Description of Artificial Sequence: Synthetic oligonucleotide
uucucguaggaguuggagu

SEQ ID NO: 3216681 - RNA, 19 nt, Artificial Sequence
  Description of Artificial Sequence: Synthetic oligonucleotide
ucggcauucauguuggcuu

SEQ ID NO: 3216682 - RNA, 19 nt, Artificial Sequence
  Description of Artificial Sequence: Synthetic oligonucleotide
aaguugauucucuccuaga

SEQ ID NO: 3216683 - RNA, 19 nt, Artificial Sequence
  Description of Artificial Sequence: Synthetic oligonucleotide
cauucacauaaucuggcuc

SEQ ID NO: 3216684 - RNA, 19 nt, Artificial Sequence
  Description of Artificial Sequence: Synthetic oligonucleotide
acauaggcagcaucauguc

SEQ ID NO: 3216685 - RNA, 19 nt, Artificial Sequence
  Description of Artificial Sequence: Synthetic oligonucleotide
caauuugagguccaaacaa

SEQ ID NO: 3216686 - RNA, 19 nt, Artificial Sequence
  Description of Artificial Sequence: Synthetic oligonucleotide
cucagccgcagccacaucc

SEQ ID NO: 3216687 - RNA, 19 nt, Artificial Sequence
  Description of Artificial Sequence: Synthetic oligonucleotide
aagaucugagcaaacugga

SEQ ID NO: 3216688 - RNA, 19 nt, Artificial Sequence
  Description of Artificial Sequence: Synthetic oligonucleotide
caacucggcauucauguug

SEQ ID NO: 3216689 - RNA, 19 nt, Artificial Sequence
  Description of Artificial Sequence: Synthetic oligonucleotide
guccaaacaaggaaaguug

SEQ ID NO: 3216690 - RNA, 19 nt, Artificial Sequence
  Description of Artificial Sequence: Synthetic oligonucleotide
acaaggucccuucaggaau

SEQ ID NO: 3216691 - RNA, 19 nt, Artificial Sequence
  Description of Artificial Sequence: Synthetic oligonucleotide
aacuacagaaugcugauac

SEQ ID NO: 3216692 - RNA, 19 nt, Artificial Sequence
  Description of Artificial Sequence: Synthetic oligonucleotide
acugcuuuagguuuuagcg

SEQ ID NO: 3216693 - RNA, 19 nt, Artificial Sequence
  Description of Artificial Sequence: Synthetic oligonucleotide
cauuaaauguuuuacauac

SEQ ID NO: 3216694 - RNA, 19 nt, Artificial Sequence
  Description of Artificial Sequence: Synthetic oligonucleotide
auuaaauguacaugcgucc

SEQ ID NO: 3216695 - RNA, 19 nt, Artificial Sequence
  Description of Artificial Sequence: Synthetic oligonucleotide
ucucuugugaacuaugagg

SEQ ID NO: 3216696 - RNA, 19 nt, Artificial Sequence
  Description of Artificial Sequence: Synthetic oligonucleotide
aacuuuaucucuugugaac

SEQ ID NO: 3216697 - RNA, 19 nt, Artificial Sequence
  Description of Artificial Sequence: Synthetic oligonucleotide
aguuguauuaaaugucacc

SEQ ID NO: 3216698 - RNA, 19 nt, Artificial Sequence
  Description of Artificial Sequence: Synthetic oligonucleotide
uaaaguaucugguaccggg

SEQ ID NO: 3216699 - RNA, 19 nt, Artificial Sequence
  Description of Artificial Sequence: Synthetic oligonucleotide
ucucagaccaacaaaacca

SEQ ID NO: 3216700 - RNA, 19 nt, Artificial Sequence
  Description of Artificial Sequence: Synthetic oligonucleotide
gcuauuaccaaucaguagg

SEQ ID NO: 3216701 - RNA, 19 nt, Artificial Sequence
  Description of Artificial Sequence: Synthetic oligonucleotide
uuuguauucauuaaaugua

SEQ ID NO: 3216702 - RNA, 19 nt, Artificial Sequence
  Description of Artificial Sequence: Synthetic oligonucleotide
cucuugugaacuaugaggg

SEQ ID NO: 3216703 - RNA, 19 nt, Artificial Sequence
  Description of Artificial Sequence: Synthetic oligonucleotide
uuaaauucuucucuccaag

SEQ ID NO: 3216704 - RNA, 19 nt, Artificial Sequence
  Description of Artificial Sequence: Synthetic oligonucleotide
auugcaugcacucagauuu

SEQ ID NO: 3216705 - RNA, 19 nt, Artificial Sequence
  Description of Artificial Sequence: Synthetic oligonucleotide
uuuugaagguagaacuugg

SEQ ID NO: 3216706 - RNA, 19 nt, Artificial Sequence
  Description of Artificial Sequence: Synthetic oligonucleotide
uuaccaaucaguaggaauc

SEQ ID NO: 3216707 - RNA, 19 nt, Artificial Sequence
  Description of Artificial Sequence: Synthetic oligonucleotide
uucauuaaauguacaugcg

SEQ ID NO: 3216708 - RNA, 19 nt, Artificial Sequence
  Description of Artificial Sequence: Synthetic oligonucleotide
ugacugaaaucucagacca

SEQ ID NO: 3216709 - RNA, 19 nt, Artificial Sequence
  Description of Artificial Sequence: Synthetic oligonucleotide
ugaguuguauuaaauguca

SEQ ID NO: 3216710 - RNA, 19 nt, Artificial Sequence
  Description of Artificial Sequence: Synthetic oligonucleotide
uuuaaaguaucugguaccg

SEQ ID NO: 3216711 - RNA, 19 nt, Artificial Sequence
  Description of Artificial Sequence: Synthetic oligonucleotide
cuuuugauuucauacacug

SEQ ID NO: 3216712 - RNA, 19 nt, Artificial Sequence
  Description of Artificial Sequence: Synthetic oligonucleotide
uguacaugcguccaguuac

SEQ ID NO: 3216713 - RNA, 19 nt, Artificial Sequence
  Description of Artificial Sequence: Synthetic oligonucleotide
aaguuucacacacauguug

SEQ ID NO: 3216714 - RNA, 19 nt, Artificial Sequence
  Description of Artificial Sequence: Synthetic oligonucleotide
ucaguacugaggaaguggg

SEQ ID NO: 3216715 - RNA, 19 nt, Artificial Sequence
  Description of Artificial Sequence: Synthetic oligonucleotide
ugaacuaugagggagagua

SEQ ID NO: 3216716 - RNA, 19 nt, Artificial Sequence
  Description of Artificial Sequence: Synthetic oligonucleotide
agucaagggaccuagagga

SEQ ID NO: 3216717 - RNA, 19 nt, Artificial Sequence
  Description of Artificial Sequence: Synthetic oligonucleotide
agccuuuuaaaguaucugg

SEQ ID NO: 3216718 - RNA, 19 nt, Artificial Sequence
  Description of Artificial Sequence: Synthetic oligonucleotide
agucuugauacacaugggg

SEQ ID NO: 3216719 - RNA, 19 nt, Artificial Sequence
  Description of Artificial Sequence: Synthetic oligonucleotide
accauuuguauuuccaggg

SEQ ID NO: 3216720 - RNA, 19 nt, Artificial Sequence
  Description of Artificial Sequence: Synthetic oligonucleotide
ucgauaaacuacuucuagg

SEQ ID NO: 3216721 - RNA, 19 nt, Artificial Sequence
  Description of Artificial Sequence: Synthetic oligonucleotide
uucgauaaacuacuucuag

SEQ ID NO: 3216722 - RNA, 19 nt, Artificial Sequence
  Description of Artificial Sequence: Synthetic oligonucleotide
ugauuucucagaaugcuga

SEQ ID NO: 3216723 - RNA, 19 nt, Artificial Sequence
  Description of Artificial Sequence: Synthetic oligonucleotide
uagacaugguaacauaggc

SEQ ID NO: 3216724 - RNA, 19 nt, Artificial Sequence
  Description of Artificial Sequence: Synthetic oligonucleotide
uacuucuaggccaaaagga

SEQ ID NO: 3216725 - RNA, 19 nt, Artificial Sequence
  Description of Artificial Sequence: Synthetic oligonucleotide
ugacaaacugguaucagga

SEQ ID NO: 3216726 - RNA, 19 nt, Artificial Sequence
  Description of Artificial Sequence: Synthetic oligonucleotide
ugauucaguacugaggaag

SEQ ID NO: 3216727 - RNA, 19 nt, Artificial Sequence
  Description of Artificial Sequence: Synthetic oligonucleotide
ucauuaaauguacaugcgu

SEQ ID NO: 3216728 - RNA, 19 nt, Artificial Sequence
  Description of Artificial Sequence: Synthetic oligonucleotide
cauucuagacuuuccaucc

SEQ ID NO: 3216729 - RNA, 19 nt, Artificial Sequence
  Description of Artificial Sequence: Synthetic oligonucleotide
cauuaaauguacaugcguc

SEQ ID NO: 3216730 - RNA, 19 nt, Artificial Sequence
  Description of Artificial Sequence: Synthetic oligonucleotide
gauaaacuacuucuaggcc

SEQ ID NO: 3216731 - RNA, 19 nt, Artificial Sequence
  Description of Artificial Sequence: Synthetic oligonucleotide
ugcauuaaauguuuuacau

SEQ ID NO: 3216732 - RNA, 19 nt, Artificial Sequence
  Description of Artificial Sequence: Synthetic oligonucleotide
uaccauuuguauuuccagg

SEQ ID NO: 3216733 - RNA, 19 nt, Artificial Sequence
  Description of Artificial Sequence: Synthetic oligonucleotide
acagaaugcugauacuugg

SEQ ID NO: 3216734 - RNA, 19 nt, Artificial Sequence
  Description of Artificial Sequence: Synthetic oligonucleotide
aaaacuacagaaugcugau

SEQ ID NO: 3216735 - RNA, 19 nt, Artificial Sequence
  Description of Artificial Sequence: Synthetic oligonucleotide
aguuucacacacauguugc

SEQ ID NO: 3216736 - RNA, 19 nt, Artificial Sequence
  Description of Artificial Sequence: Synthetic oligonucleotide
aacuaucuuggauauuucu

SEQ ID NO: 3216737 - RNA, 19 nt, Artificial Sequence
  Description of Artificial Sequence: Synthetic oligonucleotide
acugaaaucucagaccaac

SEQ ID NO: 3216738 - RNA, 19 nt, Artificial Sequence
  Description of Artificial Sequence: Synthetic oligonucleotide
  modified_base (6)..(6): a, c, u, g, unknown or other
ggaucngggguuuugaagg

SEQ ID NO: 3216739 - RNA, 19 nt, Artificial Sequence
  Description of Artificial Sequence: Synthetic oligonucleotide
uccuaauucauuuguuuug

SEQ ID NO: 3216740 - RNA, 19 nt, Artificial Sequence
  Description of Artificial Sequence: Synthetic oligonucleotide
acuacuucuaggccaaaag

SEQ ID NO: 3216741 - RNA, 19 nt, Artificial Sequence
  Description of Artificial Sequence: Synthetic oligonucleotide
auacacaugggguccauuc

SEQ ID NO: 3216742 - RNA, 19 nt, Artificial Sequence
  Description of Artificial Sequence: Synthetic oligonucleotide
ugugauagaagggucuccg

SEQ ID NO: 3216743 - RNA, 19 nt, Artificial Sequence
  Description of Artificial Sequence: Synthetic oligonucleotide
guuguauuaaaugucacca

SEQ ID NO: 3216744 - RNA, 19 nt, Artificial Sequence
  Description of Artificial Sequence: Synthetic oligonucleotide
cuacuucuaggccaaaagg

SEQ ID NO: 3216745 - RNA, 19 nt, Artificial Sequence
  Description of Artificial Sequence: Synthetic oligonucleotide
agaggaagggaauguacgg

SEQ ID NO: 3216746 - RNA, 19 nt, Artificial Sequence
  Description of Artificial Sequence: Synthetic oligonucleotide
cuagacaugguaacauagg

SEQ ID NO: 3216747 - RNA, 19 nt, Artificial Sequence
  Description of Artificial Sequence: Synthetic oligonucleotide
uuggacuccaaucacucca

SEQ ID NO: 3216748 - RNA, 19 nt, Artificial Sequence
  Description of Artificial Sequence: Synthetic oligonucleotide
uuaggggugagucucuucu

SEQ ID NO: 3216749 - RNA, 19 nt, Artificial Sequence
  Description of Artificial Sequence: Synthetic oligonucleotide
guuucugguaugcugacug

SEQ ID NO: 3216750 - RNA, 19 nt, Artificial Sequence
  Description of Artificial Sequence: Synthetic oligonucleotide
  modified_base (3)..(3): a, c, u, g, unknown or other
ucngggguuuugaagguag

SEQ ID NO: 3216751 - RNA, 19 nt, Artificial Sequence
  Description of Artificial Sequence: Synthetic oligonucleotide
caaacugguaucaggauuc

SEQ ID NO: 3216752 - RNA, 19 nt, Artificial Sequence
  Description of Artificial Sequence: Synthetic oligonucleotide
uuagcguucguucuaguau

SEQ ID NO: 3216753 - RNA, 19 nt, Artificial Sequence
  Description of Artificial Sequence: Synthetic oligonucleotide
aguuaaauucuucucucca

SEQ ID NO: 3216754 - RNA, 19 nt, Artificial Sequence
  Description of Artificial Sequence: Synthetic oligonucleotide
uugaagguagaacuuggac

SEQ ID NO: 3216755 - RNA, 19 nt, Artificial Sequence
  Description of Artificial Sequence: Synthetic oligonucleotide
aacauaggcuucuucuuga

SEQ ID NO: 3216756 - RNA, 19 nt, Artificial Sequence
  Description of Artificial Sequence: Synthetic oligonucleotide
cugacugaaaucucagacc

SEQ ID NO: 3216757 - RNA, 19 nt, Artificial Sequence
  Description of Artificial Sequence: Synthetic oligonucleotide
caugcacucagauuucugc

SEQ ID NO: 3216758 - RNA, 19 nt, Artificial Sequence
  Description of Artificial Sequence: Synthetic oligonucleotide
caugcauuaaauguuuuac

SEQ ID NO: 3216759 - RNA, 19 nt, Artificial Sequence
  Description of Artificial Sequence: Synthetic oligonucleotide
cugcucaggaaucuuaggg

SEQ ID NO: 3216760 - RNA, 19 nt, Artificial Sequence
  Description of Artificial Sequence: Synthetic oligonucleotide
cugacaaacugguaucagg

SEQ ID NO: 3216761 - RNA, 19 nt, Artificial Sequence
  Description of Artificial Sequence: Synthetic oligonucleotide
aucaacuuuaucucuugug

SEQ ID NO: 3216762 - RNA, 19 nt, Artificial Sequence
  Description of Artificial Sequence: Synthetic oligonucleotide
ucuugauacacaugggguc

SEQ ID NO: 3216763 - RNA, 19 nt, Artificial Sequence
  Description of Artificial Sequence: Synthetic oligonucleotide
auuaccaaucaguaggaau

SEQ ID NO: 3216764 - RNA, 19 nt, Artificial Sequence
  Description of Artificial Sequence: Synthetic oligonucleotide
  modified_base (16)..(16): a, c, u, g, unknown or other
ucgacuccagggaucnggg

SEQ ID NO: 3216765 - RNA, 19 nt, Artificial Sequence
  Description of Artificial Sequence: Synthetic oligonucleotide
uguuuuacauacuucuuuu

SEQ ID NO: 3216766 - RNA, 19 nt, Artificial Sequence
  Description of Artificial Sequence: Synthetic oligonucleotide
uguugcuauuaccaaucag

SEQ ID NO: 3216767 - RNA, 19 nt, Artificial Sequence
  Description of Artificial Sequence: Synthetic oligonucleotide
uucuugauucaguacugag

SEQ ID NO: 3216768 - RNA, 19 nt, Artificial Sequence
  Description of Artificial Sequence: Synthetic oligonucleotide
auuucauacacugcuuuag

SEQ ID NO: 3216769 - RNA, 19 nt, Artificial Sequence
  Description of Artificial Sequence: Synthetic oligonucleotide
aaaguaucugguaccgggg

SEQ ID NO: 3216770 - RNA, 19 nt, Artificial Sequence
  Description of Artificial Sequence: Synthetic oligonucleotide
acacacauguugcuauuac

SEQ ID NO: 3216771 - RNA, 19 nt, Artificial Sequence
  Description of Artificial Sequence: Synthetic oligonucleotide
caugcguccaguuacuuuc

SEQ ID NO: 3216772 - RNA, 19 nt, Artificial Sequence
  Description of Artificial Sequence: Synthetic oligonucleotide
uaucucuugugaacuauga

SEQ ID NO: 3216773 - RNA, 19 nt, Artificial Sequence
  Description of Artificial Sequence: Synthetic oligonucleotide
uuaucucuugugaacuaug

SEQ ID NO: 3216774 - RNA, 19 nt, Artificial Sequence
  Description of Artificial Sequence: Synthetic oligonucleotide
gaauguacgggguauugca

SEQ ID NO: 3216775 - RNA, 19 nt, Artificial Sequence
  Description of Artificial Sequence: Synthetic oligonucleotide
ugcuauuaccaaucaguag

SEQ ID NO: 3216776 - RNA, 19 nt, Artificial Sequence
  Description of Artificial Sequence: Synthetic oligonucleotide
uagguuuuagcguucguuc

SEQ ID NO: 3216777 - RNA, 19 nt, Artificial Sequence
  Description of Artificial Sequence: Synthetic oligonucleotide
cuucuaggccaaaaggagc

SEQ ID NO: 3216778 - RNA, 19 nt, Artificial Sequence
  Description of Artificial Sequence: Synthetic oligonucleotide
uguguagcaagguugcauc

SEQ ID NO: 3216779 - RNA, 19 nt, Artificial Sequence
  Description of Artificial Sequence: Synthetic oligonucleotide
aucucacucgacuccaggg

SEQ ID NO: 3216780 - RNA, 19 nt, Artificial Sequence
  Description of Artificial Sequence: Synthetic oligonucleotide
guagucaagggaccuagag

SEQ ID NO: 3216781 - RNA, 19 nt, Artificial Sequence
  Description of Artificial Sequence: Synthetic oligonucleotide
aacaggaucccaucucacu

SEQ ID NO: 3216782 - RNA, 19 nt, Artificial Sequence
  Description of Artificial Sequence: Synthetic oligonucleotide
uaaauucuucucuccaagu

SEQ ID NO: 3216783 - RNA, 19 nt, Artificial Sequence
  Description of Artificial Sequence: Synthetic oligonucleotide
uuugaagguagaacuugga

SEQ ID NO: 3216784 - RNA, 19 nt, Artificial Sequence
  Description of Artificial Sequence: Synthetic oligonucleotide
guaccauuuguauuuccag

SEQ ID NO: 3216785 - RNA, 19 nt, Artificial Sequence
  Description of Artificial Sequence: Synthetic oligonucleotide
cuugauacacauggggucc

SEQ ID NO: 3216786 - RNA, 19 nt, Artificial Sequence
  Description of Artificial Sequence: Synthetic oligonucleotide
augcauuaaauguuuuaca

SEQ ID NO: 3216787 - RNA, 19 nt, Artificial Sequence
  Description of Artificial Sequence: Synthetic oligonucleotide
uguacgggguauugcaugc

SEQ ID NO: 3216788 - RNA, 19 nt, Artificial Sequence
  Description of Artificial Sequence: Synthetic oligonucleotide
acuaugagggagaguaggc

SEQ ID NO: 3216789 - RNA, 19 nt, Artificial Sequence
  Description of Artificial Sequence: Synthetic oligonucleotide
ugagugaguuguauuaaau

SEQ ID NO: 3216790 - RNA, 19 nt, Artificial Sequence
  Description of Artificial Sequence: Synthetic oligonucleotide
aaacugguaucaggauucc

SEQ ID NO: 3216791 - RNA, 19 nt, Artificial Sequence
  Description of Artificial Sequence: Synthetic oligonucleotide
aauagcugcauuaaggucc

SEQ ID NO: 3216792 - RNA, 19 nt, Artificial Sequence
  Description of Artificial Sequence: Synthetic oligonucleotide
auuucauaugaauagcugc

SEQ ID NO: 3216793 - RNA, 19 nt, Artificial Sequence
  Description of Artificial Sequence: Synthetic oligonucleotide
ugaaacuaaauucauacca

SEQ ID NO: 3216794 - RNA, 19 nt, Artificial Sequence
  Description of Artificial Sequence: Synthetic oligonucleotide
agugacuagaauuagcuac

SEQ ID NO: 3216795 - RNA, 19 nt, Artificial Sequence
  Description of Artificial Sequence: Synthetic oligonucleotide
uagauuauuagcaaagcag

SEQ ID NO: 3216796 - RNA, 19 nt, Artificial Sequence
  Description of Artificial Sequence: Synthetic oligonucleotide
aguaccuaaaauuagagga

SEQ ID NO: 3216797 - RNA, 19 nt, Artificial Sequence
  Description of Artificial Sequence: Synthetic oligonucleotide
agauggauaguacagagac

SEQ ID NO: 3216798 - RNA, 19 nt, Artificial Sequence
  Description of Artificial Sequence: Synthetic oligonucleotide
auuuggaaaauccaaacuc

SEQ ID NO: 3216799 - RNA, 19 nt, Artificial Sequence
  Description of Artificial Sequence: Synthetic oligonucleotide
ucuucaagaauccuaaaag

SEQ ID NO: 3216800 - RNA, 19 nt, Artificial Sequence
  Description of Artificial Sequence: Synthetic oligonucleotide
aagaaugagggcuucuccc

SEQ ID NO: 3216801 - RNA, 19 nt, Artificial Sequence
  Description of Artificial Sequence: Synthetic oligonucleotide
uuucaaguuugacacaugg

SEQ ID NO: 3216802 - RNA, 19 nt, Artificial Sequence
  Description of Artificial Sequence: Synthetic oligonucleotide
uucacuauaaacaauuaaa

SEQ ID NO: 3216803 - RNA, 19 nt, Artificial Sequence
  Description of Artificial Sequence: Synthetic oligonucleotide
aucaauauuaacuaauagu

SEQ ID NO: 3216804 - RNA, 19 nt, Artificial Sequence
  Description of Artificial Sequence: Synthetic oligonucleotide
ugaagcggaguuaagaucc

SEQ ID NO: 3216805 - RNA, 19 nt, Artificial Sequence
  Description of Artificial Sequence: Synthetic oligonucleotide
auuacaguggcaauggugc

SEQ ID NO: 3216806 - RNA, 19 nt, Artificial Sequence
  Description of Artificial Sequence: Synthetic oligonucleotide
acagugauauuacaguggc

SEQ ID NO: 3216807 - RNA, 19 nt, Artificial Sequence
  Description of Artificial Sequence: Synthetic oligonucleotide
uuuauauauuauuaauuug

SEQ ID NO: 3216808 - RNA, 19 nt, Artificial Sequence
  Description of Artificial Sequence: Synthetic oligonucleotide
ugaauggaaacacaagcag

SEQ ID NO: 3216809 - RNA, 19 nt, Artificial Sequence
  Description of Artificial Sequence: Synthetic oligonucleotide
acuccauuuaauuacagug

SEQ ID NO: 3216810 - RNA, 19 nt, Artificial Sequence
  Description of Artificial Sequence: Synthetic oligonucleotide
gaagaguagauauaaacca

SEQ ID NO: 3216811 - RNA, 19 nt, Artificial Sequence
  Description of Artificial Sequence: Synthetic oligonucleotide
uacaguuaaucacauuugg

SEQ ID NO: 3216812 - RNA, 19 nt, Artificial Sequence
  Description of Artificial Sequence: Synthetic oligonucleotide
gaaacuuaacuucucagug

SEQ ID NO: 3216813 - RNA, 19 nt, Artificial Sequence
  Description of Artificial Sequence: Synthetic oligonucleotide
uauuagcuuacuaucauga

SEQ ID NO: 3216814 - RNA, 19 nt, Artificial Sequence
  Description of Artificial Sequence: Synthetic oligonucleotide
aaaggaaucagauuaccaa

SEQ ID NO: 3216815 - RNA, 19 nt, Artificial Sequence
  Description of Artificial Sequence: Synthetic oligonucleotide
aaugaguaggguuuuagaa

SEQ ID NO: 3216816 - RNA, 19 nt, Artificial Sequence
  Description of Artificial Sequence: Synthetic oligonucleotide
uaagugacuagaauuagcu

SEQ ID NO: 3216817 - RNA, 19 nt, Artificial Sequence
  Description of Artificial Sequence: Synthetic oligonucleotide
uuguaaauguuauuuaaga

SEQ ID NO: 3216818 - RNA, 19 nt, Artificial Sequence
  Description of Artificial Sequence: Synthetic oligonucleotide
uaaacaauuaaaaggcagu

SEQ ID NO: 3216819 - RNA, 19 nt, Artificial Sequence
  Description of Artificial Sequence: Synthetic oligonucleotide
uuagauuauuagcaaagca

SEQ ID NO: 3216820 - RNA, 19 nt, Artificial Sequence
  Description of Artificial Sequence: Synthetic oligonucleotide
uauuaacuaacguaucaag

SEQ ID NO: 3216821 - RNA, 19 nt, Artificial Sequence
  Description of Artificial Sequence: Synthetic oligonucleotide
agucauuuaguucucauca

SEQ ID NO: 3216822 - RNA, 19 nt, Artificial Sequence
  Description of Artificial Sequence: Synthetic oligonucleotide
agguguaagagacaaacag

SEQ ID NO: 3216823 - RNA, 19 nt, Artificial Sequence
  Description of Artificial Sequence: Synthetic oligonucleotide
augaaacuaaauucauacc

SEQ ID NO: 3216824 - RNA, 19 nt, Artificial Sequence
  Description of Artificial Sequence: Synthetic oligonucleotide
auagcugucaaaauuuagc

SEQ ID NO: 3216825 - RNA, 19 nt, Artificial Sequence
  Description of Artificial Sequence: Synthetic oligonucleotide
uccucuguaauacagacau

SEQ ID NO: 3216826 - RNA, 19 nt, Artificial Sequence
  Description of Artificial Sequence: Synthetic oligonucleotide
aagaauuuaaauaggaaau

SEQ ID NO: 3216827 - RNA, 19 nt, Artificial Sequence
  Description of Artificial Sequence: Synthetic oligonucleotide
aaaugagucugauagucga

SEQ ID NO: 3216828 - RNA, 19 nt, Artificial Sequence
  Description of Artificial Sequence: Synthetic oligonucleotide
caaaguuuaguguaugaag

SEQ ID NO: 3216829 - RNA, 19 nt, Artificial Sequence
  Description of Artificial Sequence: Synthetic oligonucleotide
ugaguaggguuuuagaaug

SEQ ID NO: 3216830 - RNA, 19 nt, Artificial Sequence
  Description of Artificial Sequence: Synthetic oligonucleotide
aagacuuauaguauuagcu

SEQ ID NO: 3216831 - RNA, 19 nt, Artificial Sequence
  Description of Artificial Sequence: Synthetic oligonucleotide
ucacuauaaacaauuaaaa

SEQ ID NO: 3216832 - RNA, 19 nt, Artificial Sequence
  Description of Artificial Sequence: Synthetic oligonucleotide
ugaauuauuuauauauuau

SEQ ID NO: 3216833 - RNA, 19 nt, Artificial Sequence
  Description of Artificial Sequence: Synthetic oligonucleotide
aacuaacguaucaaguugc

SEQ ID NO: 3216834 - RNA, 19 nt, Artificial Sequence
  Description of Artificial Sequence: Synthetic oligonucleotide
aauuaaaaggcaguuuucu

SEQ ID NO: 3216835 - RNA, 19 nt, Artificial Sequence
  Description of Artificial Sequence: Synthetic oligonucleotide
auacuguuucuucauuucc

SEQ ID NO: 3216836 - RNA, 19 nt, Artificial Sequence
  Description of Artificial Sequence: Synthetic oligonucleotide
uacuuuaaauacaauuaug

SEQ ID NO: 3216837 - RNA, 19 nt, Artificial Sequence
  Description of Artificial Sequence: Synthetic oligonucleotide
aguaaacugcuuucagucc

SEQ ID NO: 3216838 - RNA, 19 nt, Artificial Sequence
  Description of Artificial Sequence: Synthetic oligonucleotide
uaccuauuaagaaaaguac

SEQ ID NO: 3216839 - RNA, 19 nt, Artificial Sequence
  Description of Artificial Sequence: Synthetic oligonucleotide
gagauagaaacuuaacuuc

SEQ ID NO: 3216840 - RNA, 19 nt, Artificial Sequence
  Description of Artificial Sequence: Synthetic oligonucleotide
uuagcuuacuaucaugacu

SEQ ID NO: 3216841 - RNA, 19 nt, Artificial Sequence
  Description of Artificial Sequence: Synthetic oligonucleotide
ugugugugaaaguagaaaa

SEQ ID NO: 3216842 - RNA, 19 nt, Artificial Sequence
  Description of Artificial Sequence: Synthetic oligonucleotide
uauuuggaaaauccaaacu

SEQ ID NO: 3216843 - RNA, 19 nt, Artificial Sequence
  Description of Artificial Sequence: Synthetic oligonucleotide
uuuaugccaaaucuaacaa

SEQ ID NO: 3216844 - RNA, 19 nt, Artificial Sequence
  Description of Artificial Sequence: Synthetic oligonucleotide
uucaguauaagaacucaga

SEQ ID NO: 3216845 - RNA, 19 nt, Artificial Sequence
  Description of Artificial Sequence: Synthetic oligonucleotide
uuauuagcaaagcaguauc

SEQ ID NO: 3216846 - RNA, 19 nt, Artificial Sequence
  Description of Artificial Sequence: Synthetic oligonucleotide
cacagauuaaauaagggca

SEQ ID NO: 3216847 - RNA, 19 nt, Artificial Sequence
  Description of Artificial Sequence: Synthetic oligonucleotide
uuaacuaacguaucaaguu

SEQ ID NO: 3216848 - RNA, 19 nt, Artificial Sequence
  Description of Artificial Sequence: Synthetic oligonucleotide
uccauuauuuacuuuaaau

SEQ ID NO: 3216849 - RNA, 19 nt, Artificial Sequence
  Description of Artificial Sequence: Synthetic oligonucleotide
aauaucacacagcuuuugu

SEQ ID NO: 3216850 - RNA, 19 nt, Artificial Sequence
  Description of Artificial Sequence: Synthetic oligonucleotide
aacuaugaauguuacacuu

SEQ ID NO: 3216851 - RNA, 19 nt, Artificial Sequence
  Description of Artificial Sequence: Synthetic oligonucleotide
cacacaagguguaagagac

SEQ ID NO: 3216852 - RNA, 19 nt, Artificial Sequence
  Description of Artificial Sequence: Synthetic oligonucleotide
ucgaugacggacuucaaug

SEQ ID NO: 3216853 - RNA, 19 nt, Artificial Sequence
  Description of Artificial Sequence: Synthetic oligonucleotide
cucagauggauaaaucugc

SEQ ID NO: 3216854 - RNA, 19 nt, Artificial Sequence
  Description of Artificial Sequence: Synthetic oligonucleotide
agagauggauaguacagag

SEQ ID NO: 3216855 - RNA, 19 nt, Artificial Sequence
  Description of Artificial Sequence: Synthetic oligonucleotide
ucuuaaaauauaucuucac

SEQ ID NO: 3216856 - RNA, 19 nt, Artificial Sequence
  Description of Artificial Sequence: Synthetic oligonucleotide
uguacaacacuuuaccauc

SEQ ID NO: 3216857 - RNA, 19 nt, Artificial Sequence
  Description of Artificial Sequence: Synthetic oligonucleotide
aguuauaagccacaaacua

SEQ ID NO: 3216858 - RNA, 19 nt, Artificial Sequence
  Description of Artificial Sequence: Synthetic oligonucleotide
aaggaaucagauuaccaaa

SEQ ID NO: 3216859 - RNA, 19 nt, Artificial Sequence
  Description of Artificial Sequence: Synthetic oligonucleotide
acauaaaugagaccuuuca

SEQ ID NO: 3216860 - RNA, 19 nt, Artificial Sequence
  Description of Artificial Sequence: Synthetic oligonucleotide
auuagcuuacuaucaugac

SEQ ID NO: 3216861 - RNA, 19 nt, Artificial Sequence
  Description of Artificial Sequence: Synthetic oligonucleotide
ugugugaaaguagaaaacu

SEQ ID NO: 3216862 - RNA, 19 nt, Artificial Sequence
  Description of Artificial Sequence: Synthetic oligonucleotide
uagcuuacuaucaugacuu

SEQ ID NO: 3216863 - RNA, 19 nt, Artificial Sequence
  Description of Artificial Sequence: Synthetic oligonucleotide
acuagaacuaguucaccag

SEQ ID NO: 3216864 - RNA, 19 nt, Artificial Sequence
  Description of Artificial Sequence: Synthetic oligonucleotide
uaacguaucaaguugcuuu

SEQ ID NO: 3216865 - RNA, 19 nt, Artificial Sequence
  Description of Artificial Sequence: Synthetic oligonucleotide
ucucccacugaccaauagg

SEQ ID NO: 3216866 - RNA, 19 nt, Artificial Sequence
  Description of Artificial Sequence: Synthetic oligonucleotide
agauuaccaaaguuuagug

SEQ ID NO: 3216867 - RNA, 19 nt, Artificial Sequence
  Description of Artificial Sequence: Synthetic oligonucleotide
aauuuguaugugccauuuc

SEQ ID NO: 3216868 - RNA, 19 nt, Artificial Sequence
  Description of Artificial Sequence: Synthetic oligonucleotide
agaaugaucaaaugaccca

SEQ ID NO: 3216869 - RNA, 19 nt, Artificial Sequence
  Description of Artificial Sequence: Synthetic oligonucleotide
ugaaaauuuuaucaauauu

SEQ ID NO: 3216870 - RNA, 19 nt, Artificial Sequence
  Description of Artificial Sequence: Synthetic oligonucleotide
uaugugccauuucuggagg

SEQ ID NO: 3216871 - RNA, 19 nt, Artificial Sequence
  Description of Artificial Sequence: Synthetic oligonucleotide
auuaugauauucaaauaug

SEQ ID NO: 3216872 - RNA, 19 nt, Artificial Sequence
  Description of Artificial Sequence: Synthetic oligonucleotide
cauaaaugagaccuuucag

SEQ ID NO: 3216873 - RNA, 19 nt, Artificial Sequence
  Description of Artificial Sequence: Synthetic oligonucleotide
ugguuaaaaggaaucagau

SEQ ID NO: 3216874 - RNA, 19 nt, Artificial Sequence
  Description of Artificial Sequence: Synthetic oligonucleotide
uuaaaaugucacaggacaa

SEQ ID NO: 3216875 - RNA, 19 nt, Artificial Sequence
  Description of Artificial Sequence: Synthetic oligonucleotide
auguaaaguucuucaguac

SEQ ID NO: 3216876 - RNA, 19 nt, Artificial Sequence
  Description of Artificial Sequence: Synthetic oligonucleotide
ucucccaacaagaaugagu

SEQ ID NO: 3216877 - RNA, 19 nt, Artificial Sequence
  Description of Artificial Sequence: Synthetic oligonucleotide
uacuucuagucaguaaugg

SEQ ID NO: 3216878 - RNA, 19 nt, Artificial Sequence
  Description of Artificial Sequence: Synthetic oligonucleotide
uguuacacuuagaaauuga

SEQ ID NO: 3216879 - RNA, 19 nt, Artificial Sequence
  Description of Artificial Sequence: Synthetic oligonucleotide
uuguacaacacuuuaccau

SEQ ID NO: 3216880 - RNA, 19 nt, Artificial Sequence
  Description of Artificial Sequence: Synthetic oligonucleotide
gacagugauauuacagugg

SEQ ID NO: 3216881 - RNA, 19 nt, Artificial Sequence
  Description of Artificial Sequence: Synthetic oligonucleotide
caguaaacugcuuucaguc

SEQ ID NO: 3216882 - RNA, 19 nt, Artificial Sequence
  Description of Artificial Sequence: Synthetic oligonucleotide
ugaauguuacacuuagaaa

SEQ ID NO: 3216883 - RNA, 19 nt, Artificial Sequence
  Description of Artificial Sequence: Synthetic oligonucleotide
guaaguagccaaaucaccc

SEQ ID NO: 3216884 - RNA, 19 nt, Artificial Sequence
  Description of Artificial Sequence: Synthetic oligonucleotide
gacaacuucaguauaagaa

SEQ ID NO: 3216885 - RNA, 19 nt, Artificial Sequence
  Description of Artificial Sequence: Synthetic oligonucleotide
uauguaauuuuccaucauu

SEQ ID NO: 3216886 - RNA, 19 nt, Artificial Sequence
  Description of Artificial Sequence: Synthetic oligonucleotide
gagaccuuucaguaaacug

SEQ ID NO: 3216887 - RNA, 19 nt, Artificial Sequence
  Description of Artificial Sequence: Synthetic oligonucleotide
aacacuuuaccaucaggau

SEQ ID NO: 3216888 - RNA, 19 nt, Artificial Sequence
  Description of Artificial Sequence: Synthetic oligonucleotide
cucccacugaccaauaggc

SEQ ID NO: 3216889 - RNA, 19 nt, Artificial Sequence
  Description of Artificial Sequence: Synthetic oligonucleotide
gaaaugagucugauagucg

SEQ ID NO: 3216890 - RNA, 19 nt, Artificial Sequence
  Description of Artificial Sequence: Synthetic oligonucleotide
uuuuagaauguugccaaug

SEQ ID NO: 3216891 - RNA, 19 nt, Artificial Sequence
  Description of Artificial Sequence: Synthetic oligonucleotide
ugagccaucccacauaggg

SEQ ID NO: 3216892 - RNA, 19 nt, Artificial Sequence
  Description of Artificial Sequence: Synthetic oligonucleotide
guuauaguccuuuggagag

SEQ ID NO: 3216893 - RNA, 19 nt, Artificial Sequence
  Description of Artificial Sequence: Synthetic oligonucleotide
acuuugggcuccuaggacc

SEQ ID NO: 3216894 - RNA, 19 nt, Artificial Sequence
  Description of Artificial Sequence: Synthetic oligonucleotide
aauuccugucccaauacac

SEQ ID NO: 3216895 - RNA, 19 nt, Artificial Sequence
  Description of Artificial Sequence: Synthetic oligonucleotide
uucaaugcuucuucuaucc

SEQ ID NO: 3216896 - RNA, 19 nt, Artificial Sequence
  Description of Artificial Sequence: Synthetic oligonucleotide
cuuacuuugggcuccuagg

SEQ ID NO: 3216897 - RNA, 19 nt, Artificial Sequence
  Description of Artificial Sequence: Synthetic oligonucleotide
aguuauaguccuuuggaga

SEQ ID NO: 3216898 - RNA, 19 nt, Artificial Sequence
  Description of Artificial Sequence: Synthetic oligonucleotide
aauacacuuggguccuugg

SEQ ID NO: 3216899 - RNA, 19 nt, Artificial Sequence
  Description of Artificial Sequence: Synthetic oligonucleotide
aaaaggcugagccauccca

SEQ ID NO: 3216900 - RNA, 19 nt, Artificial Sequence
  Description of Artificial Sequence: Synthetic oligonucleotide
cucuggaaaaggcugagcc

SEQ ID NO: 3216901 - RNA, 19 nt, Artificial Sequence
  Description of Artificial Sequence: Synthetic oligonucleotide
aguuccugaccacauuccc

SEQ ID NO: 3216902 - RNA, 19 nt, Artificial Sequence
  Description of Artificial Sequence: Synthetic oligonucleotide
ugcuucuucuauccgagcc

SEQ ID NO: 3216903 - RNA, 19 nt, Artificial Sequence
  Description of Artificial Sequence: Synthetic oligonucleotide
ucccaauacacuugggucc

SEQ ID NO: 3216904 - RNA, 19 nt, Artificial Sequence
  Description of Artificial Sequence: Synthetic oligonucleotide
uucuauccgagccuccagg

SEQ ID NO: 3216905 - RNA, 19 nt, Artificial Sequence
  Description of Artificial Sequence: Synthetic oligonucleotide
ugugcucaguuccugacca

SEQ ID NO: 3216906 - RNA, 19 nt, Artificial Sequence
  Description of Artificial Sequence: Synthetic oligonucleotide
aaugcuucuucuauccgag

SEQ ID NO: 3216907 - RNA, 19 nt, Artificial Sequence
  Description of Artificial Sequence: Synthetic oligonucleotide
uuacuuugggcuccuagga

SEQ ID NO: 3216908 - RNA, 19 nt, Artificial Sequence
  Description of Artificial Sequence: Synthetic oligonucleotide
uacacuuggguccuuggca

SEQ ID NO: 3216909 - RNA, 19 nt, Artificial Sequence
  Description of Artificial Sequence: Synthetic oligonucleotide
auacacuuggguccuuggc

SEQ ID NO: 3216910 - RNA, 19 nt, Artificial Sequence
  Description of Artificial Sequence: Synthetic oligonucleotide
ugucccaauacacuugggu

SEQ ID NO: 3216911 - RNA, 19 nt, Artificial Sequence
  Description of Artificial Sequence: Synthetic oligonucleotide
ucaaugcuucuucuauccg

SEQ ID NO: 3216912 - RNA, 19 nt, Artificial Sequence
  Description of Artificial Sequence: Synthetic oligonucleotide
accacauucccuucucugg

SEQ ID NO: 3216913 - RNA, 19 nt, Artificial Sequence
  Description of Artificial Sequence: Synthetic oligonucleotide
acuguccuuacuuugggcu

SEQ ID NO: 3216914 - RNA, 19 nt, Artificial Sequence
  Description of Artificial Sequence: Synthetic oligonucleotide
acccucugugcucaguucc

SEQ ID NO: 3216915 - RNA, 19 nt, Artificial Sequence
  Description of Artificial Sequence: Synthetic oligonucleotide
ucaguuccugaccacauuc

SEQ ID NO: 3216916 - RNA, 19 nt, Artificial Sequence
  Description of Artificial Sequence: Synthetic oligonucleotide
aguucaaugcuucuucuau

SEQ ID NO: 3216917 - RNA, 19 nt, Artificial Sequence
  Description of Artificial Sequence: Synthetic oligonucleotide
cauagggugcaccaauucc

SEQ ID NO: 3216918 - RNA, 19 nt, Artificial Sequence
  Description of Artificial Sequence: Synthetic oligonucleotide
uccuuuggagaguucaaug

SEQ ID NO: 3216919 - RNA, 19 nt, Artificial Sequence
  Description of Artificial Sequence: Synthetic oligonucleotide
aaaggcugagccaucccac

SEQ ID NO: 3216920 - RNA, 19 nt, Artificial Sequence
  Description of Artificial Sequence: Synthetic oligonucleotide
ugauggcccaguuauaguc

SEQ ID NO: 3216921 - RNA, 19 nt, Artificial Sequence
  Description of Artificial Sequence: Synthetic oligonucleotide
agccaucccacauagggug

SEQ ID NO: 3216922 - RNA, 19 nt, Artificial Sequence
  Description of Artificial Sequence: Synthetic oligonucleotide
caguuauaguccuuuggag

SEQ ID NO: 3216923 - RNA, 19 nt, Artificial Sequence
  Description of Artificial Sequence: Synthetic oligonucleotide
gagaguucaaugcuucuuc

SEQ ID NO: 3216924 - RNA, 19 nt, Artificial Sequence
  Description of Artificial Sequence: Synthetic oligonucleotide
uauccgagccuccagguuc

SEQ ID NO: 3216925 - RNA, 19 nt, Artificial Sequence
  Description of Artificial Sequence: Synthetic oligonucleotide
aagcacuguccuuacuuug

SEQ ID NO: 3216926 - RNA, 19 nt, Artificial Sequence
  Description of Artificial Sequence: Synthetic oligonucleotide
acauagggugcaccaauuc

SEQ ID NO: 3216927 - RNA, 19 nt, Artificial Sequence
  Description of Artificial Sequence: Synthetic oligonucleotide
ucuggaaaaggcugagcca

SEQ ID NO: 3216928 - RNA, 19 nt, Artificial Sequence
  Description of Artificial Sequence: Synthetic oligonucleotide
uucccuucucuggugaugg

SEQ ID NO: 3216929 - RNA, 19 nt, Artificial Sequence
  Description of Artificial Sequence: Synthetic oligonucleotide
uuuggagaguucaaugcuu

SEQ ID NO: 3216930 - RNA, 19 nt, Artificial Sequence
  Description of Artificial Sequence: Synthetic oligonucleotide
uccuuggcaagcacugucc

SEQ ID NO: 3216931 - RNA, 19 nt, Artificial Sequence
  Description of Artificial Sequence: Synthetic oligonucleotide
uuggagaguucaaugcuuc

SEQ ID NO: 3216932 - RNA, 19 nt, Artificial Sequence
  Description of Artificial Sequence: Synthetic oligonucleotide
uaguccuuuggagaguuca

SEQ ID NO: 3216933 - RNA, 19 nt, Artificial Sequence
  Description of Artificial Sequence: Synthetic oligonucleotide
cuuugggcuccuaggaccc

SEQ ID NO: 3216934 - RNA, 19 nt, Artificial Sequence
  Description of Artificial Sequence: Synthetic oligonucleotide
uucucccggguaaugaagu

SEQ ID NO: 3216935 - RNA, 19 nt, Artificial Sequence
  Description of Artificial Sequence: Synthetic oligonucleotide
gucccaauacacuuggguc

SEQ ID NO: 3216936 - RNA, 19 nt, Artificial Sequence
  Description of Artificial Sequence: Synthetic oligonucleotide
gaccacauucccuucucug

SEQ ID NO: 3216937 - RNA, 19 nt, Artificial Sequence
  Description of Artificial Sequence: Synthetic oligonucleotide
uccuaggacccucugugcu

SEQ ID NO: 3216938 - RNA, 19 nt, Artificial Sequence
  Description of Artificial Sequence: Synthetic oligonucleotide
agaguucaaugcuucuucu

SEQ ID NO: 3216939 - RNA, 19 nt, Artificial Sequence
  Description of Artificial Sequence: Synthetic oligonucleotide
uacuuugggcuccuaggac

SEQ ID NO: 3216940 - RNA, 19 nt, Artificial Sequence
  Description of Artificial Sequence: Synthetic oligonucleotide
ccuuuggagaguucaaugc

SEQ ID NO: 3216941 - RNA, 19 nt, Artificial Sequence
  Description of Artificial Sequence: Synthetic oligonucleotide
uagggugcaccaauuccug

SEQ ID NO: 3216942 - RNA, 19 nt, Artificial Sequence
  Description of Artificial Sequence: Synthetic oligonucleotide
acuuggguccuuggcaagc

SEQ ID NO: 3216943 - RNA, 19 nt, Artificial Sequence
  Description of Artificial Sequence: Synthetic oligonucleotide
ucuauccgagccuccaggu

SEQ ID NO: 3216944 - RNA, 19 nt, Artificial Sequence
  Description of Artificial Sequence: Synthetic oligonucleotide
gauggcccaguuauagucc

SEQ ID NO: 3216945 - RNA, 19 nt, Artificial Sequence
  Description of Artificial Sequence: Synthetic oligonucleotide
uccugucccaauacacuug

SEQ ID NO: 3216946 - RNA, 19 nt, Artificial Sequence
  Description of Artificial Sequence: Synthetic oligonucleotide
auagggugcaccaauuccu

SEQ ID NO: 3216947 - RNA, 19 nt, Artificial Sequence
  Description of Artificial Sequence: Synthetic oligonucleotide
agcacuguccuuacuuugg

SEQ ID NO: 3216948 - RNA, 19 nt, Artificial Sequence
  Description of Artificial Sequence: Synthetic oligonucleotide
ucugugcucaguuccugac

SEQ ID NO: 3216949 - RNA, 19 nt, Artificial Sequence
  Description of Artificial Sequence: Synthetic oligonucleotide
gaaaaggcugagccauccc

SEQ ID NO: 3216950 - RNA, 19 nt, Artificial Sequence
  Description of Artificial Sequence: Synthetic oligonucleotide
aaggcugagccaucccaca

SEQ ID NO: 3216951 - RNA, 19 nt, Artificial Sequence
  Description of Artificial Sequence: Synthetic oligonucleotide
caaugcuucuucuauccga

SEQ ID NO: 3216952 - RNA, 19 nt, Artificial Sequence
  Description of Artificial Sequence: Synthetic oligonucleotide
uuggcaagcacuguccuua

SEQ ID NO: 3216953 - RNA, 19 nt, Artificial Sequence
  Description of Artificial Sequence: Synthetic oligonucleotide
uuccugaccacauucccuu

SEQ ID NO: 3216954 - RNA, 19 nt, Artificial Sequence
  Description of Artificial Sequence: Synthetic oligonucleotide
uguccuuacuuugggcucc

SEQ ID NO: 3216955 - RNA, 19 nt, Artificial Sequence
  Description of Artificial Sequence: Synthetic oligonucleotide
augcuucuucuauccgagc

SEQ ID NO: 3216956 - RNA, 19 nt, Artificial Sequence
  Description of Artificial Sequence: Synthetic oligonucleotide
uccagguucucccggguaa

SEQ ID NO: 3216957 - RNA, 19 nt, Artificial Sequence
  Description of Artificial Sequence: Synthetic oligonucleotide
ucccacauagggugcacca

SEQ ID NO: 3216958 - RNA, 19 nt, Artificial Sequence
  Description of Artificial Sequence: Synthetic oligonucleotide
caguuccugaccacauucc

SEQ ID NO: 3216959 - RNA, 19 nt, Artificial Sequence
  Description of Artificial Sequence: Synthetic oligonucleotide
ucuucuauccgagccucca

SEQ ID NO: 3216960 - RNA, 19 nt, Artificial Sequence
  Description of Artificial Sequence: Synthetic oligonucleotide
guucaaugcuucuucuauc

SEQ ID NO: 3216961 - RNA, 19 nt, Artificial Sequence
  Description of Artificial Sequence: Synthetic oligonucleotide
ucccggguaaugaaguuuu

SEQ ID NO: 3216962 - RNA, 19 nt, Artificial Sequence
  Description of Artificial Sequence: Synthetic oligonucleotide
ggugauggcccaguuauag

SEQ ID NO: 3216963 - RNA, 19 nt, Artificial Sequence
  Description of Artificial Sequence: Synthetic oligonucleotide
uuccugucccaauacacuu

SEQ ID NO: 3216964 - RNA, 19 nt, Artificial Sequence
  Description of Artificial Sequence: Synthetic oligonucleotide
accaauuccugucccaaua

SEQ ID NO: 3216965 - RNA, 19 nt, Artificial Sequence
  Description of Artificial Sequence: Synthetic oligonucleotide
acacuuggguccuuggcaa

SEQ ID NO: 3216966 - RNA, 19 nt, Artificial Sequence
  Description of Artificial Sequence: Synthetic oligonucleotide
uggguccuuggcaagcacu

SEQ ID NO: 3216967 - RNA, 19 nt, Artificial Sequence
  Description of Artificial Sequence: Synthetic oligonucleotide
acauucccuucucugguga

SEQ ID NO: 3216968 - RNA, 19 nt, Artificial Sequence
  Description of Artificial Sequence: Synthetic oligonucleotide
uauaguccuuuggagaguu

SEQ ID NO: 3216969 - RNA, 19 nt, Artificial Sequence
  Description of Artificial Sequence: Synthetic oligonucleotide
ugcaccaauuccuguccca

SEQ ID NO: 3216970 - RNA, 19 nt, Artificial Sequence
  Description of Artificial Sequence: Synthetic oligonucleotide
gcugagccaucccacauag

SEQ ID NO: 3216971 - RNA, 19 nt, Artificial Sequence
  Description of Artificial Sequence: Synthetic oligonucleotide
auuccugucccaauacacu

SEQ ID NO: 3216972 - RNA, 19 nt, Artificial Sequence
  Description of Artificial Sequence: Synthetic oligonucleotide
ucuggugauggcccaguua

SEQ ID NO: 3216973 - RNA, 19 nt, Artificial Sequence
  Description of Artificial Sequence: Synthetic oligonucleotide
gcuccuaggacccucugug

SEQ ID NO: 3216974 - RNA, 19 nt, Artificial Sequence
  Description of Artificial Sequence: Synthetic oligonucleotide
ugcucaguuccugaccaca

SEQ ID NO: 3216975 - RNA, 19 nt, Artificial Sequence
  Description of Artificial Sequence: Synthetic oligonucleotide
uggagaguucaaugcuucu

SEQ ID NO: 3216976 - RNA, 19 nt, Artificial Sequence
  Description of Artificial Sequence: Synthetic oligonucleotide
uucuucuauccgagccucc

SEQ ID NO: 3216977 - RNA, 19 nt, Artificial Sequence
  Description of Artificial Sequence: Synthetic oligonucleotide
ugaccacauucccuucucu

SEQ ID NO: 3216978 - RNA, 19 nt, Artificial Sequence
  Description of Artificial Sequence: Synthetic oligonucleotide
ggugcaccaauuccugucc

SEQ ID NO: 3216979 - RNA, 19 nt, Artificial Sequence
  Description of Artificial Sequence: Synthetic oligonucleotide
uuauaguccuuuggagagu

SEQ ID NO: 3216980 - RNA, 19 nt, Artificial Sequence
  Description of Artificial Sequence: Synthetic oligonucleotide
cugugcucaguuccugacc

SEQ ID NO: 3216981 - RNA, 19 nt, Artificial Sequence
  Description of Artificial Sequence: Synthetic oligonucleotide
cacuguccuuacuuugggc

SEQ ID NO: 3216982 - RNA, 19 nt, Artificial Sequence
  Description of Artificial Sequence: Synthetic oligonucleotide
cuguccuuacuuugggcuc

SEQ ID NO: 3216983 - RNA, 19 nt, Artificial Sequence
  Description of Artificial Sequence: Synthetic oligonucleotide
aucccacauagggugcacc

SEQ ID NO: 3216984 - RNA, 19 nt, Artificial Sequence
  Description of Artificial Sequence: Synthetic oligonucleotide
auggcccaguuauaguccu

SEQ ID NO: 3216985 - RNA, 19 nt, Artificial Sequence
  Description of Artificial Sequence: Synthetic oligonucleotide
ugcucuggaaaaggcugag

SEQ ID NO: 3216986 - RNA, 19 nt, Artificial Sequence
  Description of Artificial Sequence: Synthetic oligonucleotide
cuucuauccgagccuccag

SEQ ID NO: 3216987 - RNA, 19 nt, Artificial Sequence
  Description of Artificial Sequence: Synthetic oligonucleotide
ccuucucuggugauggccc

SEQ ID NO: 3216988 - RNA, 19 nt, Artificial Sequence
  Description of Artificial Sequence: Synthetic oligonucleotide
ccugucccaauacacuugg

SEQ ID NO: 3216989 - RNA, 19 nt, Artificial Sequence
  Description of Artificial Sequence: Synthetic oligonucleotide
gagccuccagguucucccg

SEQ ID NO: 3216990 - RNA, 19 nt, Artificial Sequence
  Description of Artificial Sequence: Synthetic oligonucleotide
cuucuucuauccgagccuc

SEQ ID NO: 3216991 - RNA, 19 nt, Artificial Sequence
  Description of Artificial Sequence: Synthetic oligonucleotide
aaggcuguuaugcugaccc

SEQ ID NO: 3216992 - RNA, 19 nt, Artificial Sequence
  Description of Artificial Sequence: Synthetic oligonucleotide
auuucuaucuccuugagcu

SEQ ID NO: 3216993 - RNA, 19 nt, Artificial Sequence
  Description of Artificial Sequence: Synthetic oligonucleotide
ucuuauagcaacacaaugu

SEQ ID NO: 3216994 - RNA, 19 nt, Artificial Sequence
  Description of Artificial Sequence: Synthetic oligonucleotide
uauagcaacacaauguguc

SEQ ID NO: 3216995 - RNA, 19 nt, Artificial Sequence
  Description of Artificial Sequence: Synthetic oligonucleotide
ugugguaucauggagguca

SEQ ID NO: 3216996 - RNA, 19 nt, Artificial Sequence
  Description of Artificial Sequence: Synthetic oligonucleotide
auagcaacacaaugugucc

SEQ ID NO: 3216997 - RNA, 19 nt, Artificial Sequence
  Description of Artificial Sequence: Synthetic oligonucleotide
ucucucucuaccaucgugg

SEQ ID NO: 3216998 - RNA, 19 nt, Artificial Sequence
  Description of Artificial Sequence: Synthetic oligonucleotide
cuuauagcaacacaaugug

SEQ ID NO: 3216999 - RNA, 19 nt, Artificial Sequence
  Description of Artificial Sequence: Synthetic oligonucleotide
aauggugugugguaucaug

SEQ ID NO: 3217000 - RNA, 19 nt, Artificial Sequence
  Description of Artificial Sequence: Synthetic oligonucleotide
uugagcugguaucuuauag

SEQ ID NO: 3217001 - RNA, 19 nt, Artificial Sequence
  Description of Artificial Sequence: Synthetic oligonucleotide
uacucucucaagaaggcug

SEQ ID NO: 3217002 - RNA, 19 nt, Artificial Sequence
  Description of Artificial Sequence: Synthetic oligonucleotide
cucaagaaggcuguuaugc

SEQ ID NO: 3217003 - RNA, 19 nt, Artificial Sequence
  Description of Artificial Sequence: Synthetic oligonucleotide
aucuuauagcaacacaaug

SEQ ID NO: 3217004 - RNA, 19 nt, Artificial Sequence
  Description of Artificial Sequence: Synthetic oligonucleotide
uaucauggaggucacuacc

SEQ ID NO: 3217005 - RNA, 19 nt, Artificial Sequence
  Description of Artificial Sequence: Synthetic oligonucleotide
ugagcugguaucuuauagc

SEQ ID NO: 3217006 - RNA, 19 nt, Artificial Sequence
  Description of Artificial Sequence: Synthetic oligonucleotide
uauuucuaucuccuugagc

SEQ ID NO: 3217007 - RNA, 19 nt, Artificial Sequence
  Description of Artificial Sequence: Synthetic oligonucleotide
uucuaucuccuugagcugg

SEQ ID NO: 3217008 - RNA, 19 nt, Artificial Sequence
  Description of Artificial Sequence: Synthetic oligonucleotide
cucucuaccaucguggggc

SEQ ID NO: 3217009 - RNA, 19 nt, Artificial Sequence
  Description of Artificial Sequence: Synthetic oligonucleotide
aucuccuugagcugguauc

SEQ ID NO: 3217010 - RNA, 19 nt, Artificial Sequence
  Description of Artificial Sequence: Synthetic oligonucleotide
agcaacacaauguguccac

SEQ ID NO: 3217011 - RNA, 19 nt, Artificial Sequence
  Description of Artificial Sequence: Synthetic oligonucleotide
uaucuuauagcaacacaau

SEQ ID NO: 3217012 - RNA, 19 nt, Artificial Sequence
  Description of Artificial Sequence: Synthetic oligonucleotide
ucauggaggucacuaccgg

SEQ ID NO: 3217013 - RNA, 19 nt, Artificial Sequence
  Description of Artificial Sequence: Synthetic oligonucleotide
uuauagcaacacaaugugu

SEQ ID NO: 3217014 - RNA, 19 nt, Artificial Sequence
  Description of Artificial Sequence: Synthetic oligonucleotide
ugugugguaucauggaggu

SEQ ID NO: 3217015 - RNA, 19 nt, Artificial Sequence
  Description of Artificial Sequence: Synthetic oligonucleotide
accaucguggggcuggugg

SEQ ID NO: 3217016 - RNA, 19 nt, Artificial Sequence
  Description of Artificial Sequence: Synthetic oligonucleotide
ucuaccaucguggggcugg

SEQ ID NO: 3217017 - RNA, 19 nt, Artificial Sequence
  Description of Artificial Sequence: Synthetic oligonucleotide
cucucucucucuaccaucg

SEQ ID NO: 3217018 - RNA, 19 nt, Artificial Sequence
  Description of Artificial Sequence: Synthetic oligonucleotide
ugucccaugaguacuccca

SEQ ID NO: 3217019 - RNA, 19 nt, Artificial Sequence
  Description of Artificial Sequence: Synthetic oligonucleotide
caaggguauuucuaucucc

SEQ ID NO: 3217020 - RNA, 19 nt, Artificial Sequence
  Description of Artificial Sequence: Synthetic oligonucleotide
guaucuuauagcaacacaa

SEQ ID NO: 3217021 - RNA, 19 nt, Artificial Sequence
  Description of Artificial Sequence: Synthetic oligonucleotide
gagcugguaucuuauagca

SEQ ID NO: 3217022 - RNA, 19 nt, Artificial Sequence
  Description of Artificial Sequence: Synthetic oligonucleotide
caagaaggcuguuaugcug

SEQ ID NO: 3217023 - RNA, 19 nt, Artificial Sequence
  Description of Artificial Sequence: Synthetic oligonucleotide
ucaagaaggcuguuaugcu

SEQ ID NO: 3217024 - RNA, 19 nt, Artificial Sequence
  Description of Artificial Sequence: Synthetic oligonucleotide
aagaaggcuguuaugcuga

SEQ ID NO: 3217025 - RNA, 19 nt, Artificial Sequence
  Description of Artificial Sequence: Synthetic oligonucleotide
gcugguaucuuauagcaac

SEQ ID NO: 3217026 - RNA, 19 nt, Artificial Sequence
  Description of Artificial Sequence: Synthetic oligonucleotide
aaggguauuucuaucuccu

SEQ ID NO: 3217027 - RNA, 19 nt, Artificial Sequence
  Description of Artificial Sequence: Synthetic oligonucleotide
gugugugguaucauggagg

SEQ ID NO: 3217028 - RNA, 19 nt, Artificial Sequence
  Description of Artificial Sequence: Synthetic oligonucleotide
guuaugcugacccggcuug

SEQ ID NO: 3217029 - RNA, 19 nt, Artificial Sequence
  Description of Artificial Sequence: Synthetic oligonucleotide
ugugcgguggugacugucc

SEQ ID NO: 3217030 - RNA, 19 nt, Artificial Sequence
  Description of Artificial Sequence: Synthetic oligonucleotide
ugcugacccggcuugugcg

SEQ ID NO: 3217031 - RNA, 19 nt, Artificial Sequence
  Description of Artificial Sequence: Synthetic oligonucleotide
ucucucuaccaucgugggg

SEQ ID NO: 3217032 - RNA, 19 nt, Artificial Sequence
  Description of Artificial Sequence: Synthetic oligonucleotide
auggugugugguaucaugg

SEQ ID NO: 3217033 - RNA, 19 nt, Artificial Sequence
  Description of Artificial Sequence: Synthetic oligonucleotide
ucuacugggccgaguuccg

SEQ ID NO: 3217034 - RNA, 19 nt, Artificial Sequence
  Description of Artificial Sequence: Synthetic oligonucleotide
aucauggaggucacuaccg

SEQ ID NO: 3217035 - RNA, 19 nt, Artificial Sequence
  Description of Artificial Sequence: Synthetic oligonucleotide
augcugacccggcuugugc

SEQ ID NO: 3217036 - RNA, 19 nt, Artificial Sequence
  Description of Artificial Sequence: Synthetic oligonucleotide
cacuccaaccucaauggug

SEQ ID NO: 3217037 - RNA, 19 nt, Artificial Sequence
  Description of Artificial Sequence: Synthetic oligonucleotide
ucaauggugugugguauca

SEQ ID NO: 3217038 - RNA, 19 nt, Artificial Sequence
  Description of Artificial Sequence: Synthetic oligonucleotide
uuucuaucuccuugagcug

SEQ ID NO: 3217039 - RNA, 19 nt, Artificial Sequence
  Description of Artificial Sequence: Synthetic oligonucleotide
ugugcccacuccaaccuca

SEQ ID NO: 3217040 - RNA, 19 nt, Artificial Sequence
  Description of Artificial Sequence: Synthetic oligonucleotide
gacggggucuacugggccg

SEQ ID NO: 3217041 - RNA, 19 nt, Artificial Sequence
  Description of Artificial Sequence: Synthetic oligonucleotide
gguauuucuaucuccuuga

SEQ ID NO: 3217042 - RNA, 19 nt, Artificial Sequence
  Description of Artificial Sequence: Synthetic oligonucleotide
guauuucuaucuccuugag

SEQ ID NO: 3217043 - RNA, 19 nt, Artificial Sequence
  Description of Artificial Sequence: Synthetic oligonucleotide
uacugggccgaguuccgcg

SEQ ID NO: 3217044 - RNA, 19 nt, Artificial Sequence
  Description of Artificial Sequence: Synthetic oligonucleotide
uguuaugcugacccggcuu

SEQ ID NO: 3217045 - RNA, 19 nt, Artificial Sequence
  Description of Artificial Sequence: Synthetic oligonucleotide
ucucaagaaggcuguuaug

SEQ ID NO: 3217046 - RNA, 19 nt, Artificial Sequence
  Description of Artificial Sequence: Synthetic oligonucleotide
caggacggggucuacuggg

SEQ ID NO: 3217047 - RNA, 19 nt, Artificial Sequence
  Description of Artificial Sequence: Synthetic oligonucleotide
acuccaaccucaauggugu

SEQ ID NO: 3217048 - RNA, 19 nt, Artificial Sequence
  Description of Artificial Sequence: Synthetic oligonucleotide
cucucucuaccaucguggg

SEQ ID NO: 3217049 - RNA, 19 nt, Artificial Sequence
  Description of Artificial Sequence: Synthetic oligonucleotide
uaccggagccgcuaccagg

SEQ ID NO: 3217050 - RNA, 19 nt, Artificial Sequence
  Description of Artificial Sequence: Synthetic oligonucleotide
ggguauuucuaucuccuug

SEQ ID NO: 3217051 - RNA, 19 nt, Artificial Sequence
  Description of Artificial Sequence: Synthetic oligonucleotide
guaucauggaggucacuac

SEQ ID NO: 3217052 - RNA, 19 nt, Artificial Sequence
  Description of Artificial Sequence: Synthetic oligonucleotide
ucucucucucucucuacca

SEQ ID NO: 3217053 - RNA, 19 nt, Artificial Sequence
  Description of Artificial Sequence: Synthetic oligonucleotide
aaccucaaugguguguggu

SEQ ID NO: 3217054 - RNA, 19 nt, Artificial Sequence
  Description of Artificial Sequence: Synthetic oligonucleotide
ucuccuugagcugguaucu

SEQ ID NO: 3217055 - RNA, 19 nt, Artificial Sequence
  Description of Artificial Sequence: Synthetic oligonucleotide
ggugguaccacgccugugc

SEQ ID NO: 3217056 - RNA, 19 nt, Artificial Sequence
  Description of Artificial Sequence: Synthetic oligonucleotide
cucucucucucucucuacc

SEQ ID NO: 3217057 - RNA, 19 nt, Artificial Sequence
  Description of Artificial Sequence: Synthetic oligonucleotide
agaaggcuguuaugcugac

SEQ ID NO: 3217058 - RNA, 19 nt, Artificial Sequence
  Description of Artificial Sequence: Synthetic oligonucleotide
gucuacugggccgaguucc

SEQ ID NO: 3217059 - RNA, 19 nt, Artificial Sequence
  Description of Artificial Sequence: Synthetic oligonucleotide
uggaggucacuaccggagc

SEQ ID NO: 3217060 - RNA, 19 nt, Artificial Sequence
  Description of Artificial Sequence: Synthetic oligonucleotide
gaggucacuaccggagccg

SEQ ID NO: 3217061 - RNA, 19 nt, Artificial Sequence
  Description of Artificial Sequence: Synthetic oligonucleotide
uggugugugguaucaugga

SEQ ID NO: 3217062 - RNA, 19 nt, Artificial Sequence
  Description of Artificial Sequence: Synthetic oligonucleotide
auggaggucacuaccggag

SEQ ID NO: 3217063 - RNA, 19 nt, Artificial Sequence
  Description of Artificial Sequence: Synthetic oligonucleotide
ggugugugguaucauggag

SEQ ID NO: 3217064 - RNA, 19 nt, Artificial Sequence
  Description of Artificial Sequence: Synthetic oligonucleotide
gugacugucccaugaguac

SEQ ID NO: 3217065 - RNA, 19 nt, Artificial Sequence
  Description of Artificial Sequence: Synthetic oligonucleotide
uagcaacacaaugugucca

SEQ ID NO: 3217066 - RNA, 19 nt, Artificial Sequence
  Description of Artificial Sequence: Synthetic oligonucleotide
ugaguacucccaaggguau

SEQ ID NO: 3217067 - RNA, 19 nt, Artificial Sequence
  Description of Artificial Sequence: Synthetic oligonucleotide
cccacuccaaccucaaugg

SEQ ID NO: 3217068 - RNA, 19 nt, Artificial Sequence
  Description of Artificial Sequence: Synthetic oligonucleotide
ugguaucuuauagcaacac

SEQ ID NO: 3217069 - RNA, 19 nt, Artificial Sequence
  Description of Artificial Sequence: Synthetic oligonucleotide
uggugacugucccaugagu

SEQ ID NO: 3217070 - RNA, 19 nt, Artificial Sequence
  Description of Artificial Sequence: Synthetic oligonucleotide
uaucuccuugagcugguau

SEQ ID NO: 3217071 - RNA, 19 nt, Artificial Sequence
  Description of Artificial Sequence: Synthetic oligonucleotide
accaggacggggucuacug

SEQ ID NO: 3217072 - RNA, 19 nt, Artificial Sequence
  Description of Artificial Sequence: Synthetic oligonucleotide
ugacugucccaugaguacu

SEQ ID NO: 3217073 - RNA, 19 nt, Artificial Sequence
  Description of Artificial Sequence: Synthetic oligonucleotide
acugggccgaguuccgcgg

SEQ ID NO: 3217074 - RNA, 19 nt, Artificial Sequence
  Description of Artificial Sequence: Synthetic oligonucleotide
ucuaucuccuugagcuggu

SEQ ID NO: 3217075 - RNA, 19 nt, Artificial Sequence
  Description of Artificial Sequence: Synthetic oligonucleotide
gguaucuuauagcaacaca

SEQ ID NO: 3217076 - RNA, 19 nt, Artificial Sequence
  Description of Artificial Sequence: Synthetic oligonucleotide
augaguacucccaagggua

SEQ ID NO: 3217077 - RNA, 19 nt, Artificial Sequence
  Description of Artificial Sequence: Synthetic oligonucleotide
gcguacucucucaagaagg

SEQ ID NO: 3217078 - RNA, 19 nt, Artificial Sequence
  Description of Artificial Sequence: Synthetic oligonucleotide
ucucucucucucuaccauc

SEQ ID NO: 3217079 - RNA, 19 nt, Artificial Sequence
  Description of Artificial Sequence: Synthetic oligonucleotide
ucccaugaguacucccaag

SEQ ID NO: 3217080 - RNA, 19 nt, Artificial Sequence
  Description of Artificial Sequence: Synthetic oligonucleotide
cucucucucuaccaucgug

SEQ ID NO: 3217081 - RNA, 19 nt, Artificial Sequence
  Description of Artificial Sequence: Synthetic oligonucleotide
cccaugaguacucccaagg

SEQ ID NO: 3217082 - RNA, 19 nt, Artificial Sequence
  Description of Artificial Sequence: Synthetic oligonucleotide
uggggcuggugguaccacg

SEQ ID NO: 3217083 - RNA, 19 nt, Artificial Sequence
  Description of Artificial Sequence: Synthetic oligonucleotide
acugucccaugaguacucc

SEQ ID NO: 3217084 - RNA, 19 nt, Artificial Sequence
  Description of Artificial Sequence: Synthetic oligonucleotide
uacucccaaggguauuucu

SEQ ID NO: 3217085 - RNA, 19 nt, Artificial Sequence
  Description of Artificial Sequence: Synthetic oligonucleotide
ggagccgcuaccaggacgg

SEQ ID NO: 3217086 - RNA, 19 nt, Artificial Sequence
  Description of Artificial Sequence: Synthetic oligonucleotide
aggucacuaccggagccgc

SEQ ID NO: 3217087 - RNA, 19 nt, Artificial Sequence
  Description of Artificial Sequence: Synthetic oligonucleotide
aggcuguuaugcugacccg

SEQ ID NO: 3217088 - RNA, 19 nt, Artificial Sequence
  Description of Artificial Sequence: Synthetic oligonucleotide
uccaaccucaauggugugu

SEQ ID NO: 3217089 - RNA, 19 nt, Artificial Sequence
  Description of Artificial Sequence: Synthetic oligonucleotide
ggcguacucucucaagaag

SEQ ID NO: 3217090 - RNA, 19 nt, Artificial Sequence
  Description of Artificial Sequence: Synthetic oligonucleotide
uccuugagcugguaucuua

SEQ ID NO: 3217091 - RNA, 19 nt, Artificial Sequence
  Description of Artificial Sequence: Synthetic oligonucleotide
aauggaugagcuucccagc

SEQ ID NO: 3217092 - RNA, 19 nt, Artificial Sequence
  Description of Artificial Sequence: Synthetic oligonucleotide
aaucucgcaaguuucuuag

SEQ ID NO: 3217093 - RNA, 19 nt, Artificial Sequence
  Description of Artificial Sequence: Synthetic oligonucleotide
ugcaguaacaccuggcacg

SEQ ID NO: 3217094 - RNA, 19 nt, Artificial Sequence
  Description of Artificial Sequence: Synthetic oligonucleotide
aguaacaccuggcacggcc

SEQ ID NO: 3217095 - RNA, 19 nt, Artificial Sequence
  Description of Artificial Sequence: Synthetic oligonucleotide
gaauggaugagcuucccag

SEQ ID NO: 3217096 - RNA, 19 nt, Artificial Sequence
  Description of Artificial Sequence: Synthetic oligonucleotide
auggcuagcugccugaugg

SEQ ID NO: 3217097 - RNA, 19 nt, Artificial Sequence
  Description of Artificial Sequence: Synthetic oligonucleotide
uuguucugcaguaacaccu

SEQ ID NO: 3217098 - RNA, 19 nt, Artificial Sequence
  Description of Artificial Sequence: Synthetic oligonucleotide
ugcuccaucacgcucgggg

SEQ ID NO: 3217099 - RNA, 19 nt, Artificial Sequence
  Description of Artificial Sequence: Synthetic oligonucleotide
aagcacaguucugucaucc

SEQ ID NO: 3217100 - RNA, 19 nt, Artificial Sequence
  Description of Artificial Sequence: Synthetic oligonucleotide
gacguaagcggccaugagg

SEQ ID NO: 3217101 - RNA, 19 nt, Artificial Sequence
  Description of Artificial Sequence: Synthetic oligonucleotide
agcacagcuguguagacag

SEQ ID NO: 3217102 - RNA, 19 nt, Artificial Sequence
  Description of Artificial Sequence: Synthetic oligonucleotide
uuguagaccaacaggaaau

SEQ ID NO: 3217103 - RNA, 19 nt, Artificial Sequence
  Description of Artificial Sequence: Synthetic oligonucleotide
ucugucauccgauuguaga

SEQ ID NO: 3217104 - RNA, 19 nt, Artificial Sequence
  Description of Artificial Sequence: Synthetic oligonucleotide
ucugcaguaacaccuggca

SEQ ID NO: 3217105 - RNA, 19 nt, Artificial Sequence
  Description of Artificial Sequence: Synthetic oligonucleotide
ucuuaguugcugcugcugc

SEQ ID NO: 3217106 - RNA, 19 nt, Artificial Sequence
  Description of Artificial Sequence: Synthetic oligonucleotide
guuagaauggaugagcuuc

SEQ ID NO: 3217107 - RNA, 19 nt, Artificial Sequence
  Description of Artificial Sequence: Synthetic oligonucleotide
aguuguucugcaguaacac

SEQ ID NO: 3217108 - RNA, 19 nt, Artificial Sequence
  Description of Artificial Sequence: Synthetic oligonucleotide
acguaagcggccaugaggc

SEQ ID NO: 3217109 - RNA, 19 nt, Artificial Sequence
  Description of Artificial Sequence: Synthetic oligonucleotide
augagguggacguaagcgg

SEQ ID NO: 3217110 - RNA, 19 nt, Artificial Sequence
  Description of Artificial Sequence: Synthetic oligonucleotide
uuagaauggaugagcuucc

SEQ ID NO: 3217111 - RNA, 19 nt, Artificial Sequence
  Description of Artificial Sequence: Synthetic oligonucleotide
ugaggcggugguuagaaug

SEQ ID NO: 3217112 - RNA, 19 nt, Artificial Sequence
  Description of Artificial Sequence: Synthetic oligonucleotide
ugcugcuccaucacgcucg

SEQ ID NO: 3217113 - RNA, 19 nt, Artificial Sequence
  Description of Artificial Sequence: Synthetic oligonucleotide
uccgauuguagaccaacag

SEQ ID NO: 3217114 - RNA, 19 nt, Artificial Sequence
  Description of Artificial Sequence: Synthetic oligonucleotide
ugagcuucccagcacagcu

SEQ ID NO: 3217115 - RNA, 19 nt, Artificial Sequence
  Description of Artificial Sequence: Synthetic oligonucleotide
aacaggaaaucucgcaagu

SEQ ID NO: 3217116 - RNA, 19 nt, Artificial Sequence
  Description of Artificial Sequence: Synthetic oligonucleotide
ucgcaaguuucuuaguugc

SEQ ID NO: 3217117 - RNA, 19 nt, Artificial Sequence
  Description of Artificial Sequence: Synthetic oligonucleotide
caugagguggacguaagcg

SEQ ID NO: 3217118 - RNA, 19 nt, Artificial Sequence
  Description of Artificial Sequence: Synthetic oligonucleotide
caaguuucuuaguugcugc

SEQ ID NO: 3217119 - RNA, 19 nt, Artificial Sequence
  Description of Artificial Sequence: Synthetic oligonucleotide
uagaccaacaggaaaucuc

SEQ ID NO: 3217120 - RNA, 19 nt, Artificial Sequence
  Description of Artificial Sequence: Synthetic oligonucleotide
ugagguggacguaagcggc

SEQ ID NO: 3217121 - RNA, 19 nt, Artificial Sequence
  Description of Artificial Sequence: Synthetic oligonucleotide
guuucuuaguugcugcugc

SEQ ID NO: 3217122 - RNA, 19 nt, Artificial Sequence
  Description of Artificial Sequence: Synthetic oligonucleotide
ugaguuguucugcaguaac

SEQ ID NO: 3217123 - RNA, 19 nt, Artificial Sequence
  Description of Artificial Sequence: Synthetic oligonucleotide
auuguagaccaacaggaaa

SEQ ID NO: 3217124 - RNA, 19 nt, Artificial Sequence
  Description of Artificial Sequence: Synthetic oligonucleotide
agaccaacaggaaaucucg

SEQ ID NO: 3217125 - RNA, 19 nt, Artificial Sequence
  Description of Artificial Sequence: Synthetic oligonucleotide
ugguuagaauggaugagcu

SEQ ID NO: 3217126 - RNA, 19 nt, Artificial Sequence
  Description of Artificial Sequence: Synthetic oligonucleotide
gaggcagccucguaguccg

SEQ ID NO: 3217127 - RNA, 19 nt, Artificial Sequence
  Description of Artificial Sequence: Synthetic oligonucleotide
aguucugucauccgauugu

SEQ ID NO: 3217128 - RNA, 19 nt, Artificial Sequence
  Description of Artificial Sequence: Synthetic oligonucleotide
aaaucucgcaaguuucuua

SEQ ID NO: 3217129 - RNA, 19 nt, Artificial Sequence
  Description of Artificial Sequence: Synthetic oligonucleotide
uguucugcaguaacaccug

SEQ ID NO: 3217130 - RNA, 19 nt, Artificial Sequence
  Description of Artificial Sequence: Synthetic oligonucleotide
gacaagggcgggcaugagg

SEQ ID NO: 3217131 - RNA, 19 nt, Artificial Sequence
  Description of Artificial Sequence: Synthetic oligonucleotide
aaguuucuuaguugcugcu

SEQ ID NO: 3217132 - RNA, 19 nt, Artificial Sequence
  Description of Artificial Sequence: Synthetic oligonucleotide
aggaaaucucgcaaguuuc

SEQ ID NO: 3217133 - RNA, 19 nt, Artificial Sequence
  Description of Artificial Sequence: Synthetic oligonucleotide
caacaggaaaucucgcaag

SEQ ID NO: 3217134 - RNA, 19 nt, Artificial Sequence
  Description of Artificial Sequence: Synthetic oligonucleotide
agucucugaguuguucugc

SEQ ID NO: 3217135 - RNA, 19 nt, Artificial Sequence
  Description of Artificial Sequence: Synthetic oligonucleotide
cugucauccgauuguagac

SEQ ID NO: 3217136 - RNA, 19 nt, Artificial Sequence
  Description of Artificial Sequence: Synthetic oligonucleotide
gaggcggugguuagaaugg

SEQ ID NO: 3217137 - RNA, 19 nt, Artificial Sequence
  Description of Artificial Sequence: Synthetic oligonucleotide
ugcugcugcuccaucacgc

SEQ ID NO: 3217138 - RNA, 19 nt, Artificial Sequence
  Description of Artificial Sequence: Synthetic oligonucleotide
ucguaguccgcgaugcggc

SEQ ID NO: 3217139 - RNA, 19 nt, Artificial Sequence
  Description of Artificial Sequence: Synthetic oligonucleotide
acaggccuccuccucagcg

SEQ ID NO: 3217140 - RNA, 19 nt, Artificial Sequence
  Description of Artificial Sequence: Synthetic oligonucleotide
ugucauccgauuguagacc

SEQ ID NO: 3217141 - RNA, 19 nt, Artificial Sequence
  Description of Artificial Sequence: Synthetic oligonucleotide
uucugcaguaacaccuggc

SEQ ID NO: 3217142 - RNA, 19 nt, Artificial Sequence
  Description of Artificial Sequence: Synthetic oligonucleotide
guuguucugcaguaacacc

SEQ ID NO: 3217143 - RNA, 19 nt, Artificial Sequence
  Description of Artificial Sequence: Synthetic oligonucleotide
ucucgcaaguuucuuaguu

SEQ ID NO: 3217144 - RNA, 19 nt, Artificial Sequence
  Description of Artificial Sequence: Synthetic oligonucleotide
aagggcgggcaugaggugg

SEQ ID NO: 3217145 - RNA, 19 nt, Artificial Sequence
  Description of Artificial Sequence: Synthetic oligonucleotide
cucgcaaguuucuuaguug

SEQ ID NO: 3217146 - RNA, 19 nt, Artificial Sequence
  Description of Artificial Sequence: Synthetic oligonucleotide
accaacaggaaaucucgca

SEQ ID NO: 3217147 - RNA, 19 nt, Artificial Sequence
  Description of Artificial Sequence: Synthetic oligonucleotide
gugguuagaauggaugagc

SEQ ID NO: 3217148 - RNA, 19 nt, Artificial Sequence
  Description of Artificial Sequence: Synthetic oligonucleotide
ucugaguuguucugcagua

SEQ ID NO: 3217149 - RNA, 19 nt, Artificial Sequence
  Description of Artificial Sequence: Synthetic oligonucleotide
guguagacaggccuccucc

SEQ ID NO: 3217150 - RNA, 19 nt, Artificial Sequence
  Description of Artificial Sequence: Synthetic oligonucleotide
cugauggcgagucucugag

SEQ ID NO: 3217151 - RNA, 19 nt, Artificial Sequence
  Description of Artificial Sequence: Synthetic oligonucleotide
gaugcggcgcuggacaagg

SEQ ID NO: 3217152 - RNA, 19 nt, Artificial Sequence
  Description of Artificial Sequence: Synthetic oligonucleotide
uggaagcacaguucuguca

SEQ ID NO: 3217153 - RNA, 19 nt, Artificial Sequence
  Description of Artificial Sequence: Synthetic oligonucleotide
uagacaggccuccuccuca

SEQ ID NO: 3217154 - RNA, 19 nt, Artificial Sequence
  Description of Artificial Sequence: Synthetic oligonucleotide
agcguccagagcucggugg

SEQ ID NO: 3217155 - RNA, 19 nt, Artificial Sequence
  Description of Artificial Sequence: Synthetic oligonucleotide
uccuccucagcguccagag

SEQ ID NO: 3217156 - RNA, 19 nt, Artificial Sequence
  Description of Artificial Sequence: Synthetic oligonucleotide
guaagcggccaugaggcgg

SEQ ID NO: 3217157 - RNA, 19 nt, Artificial Sequence
  Description of Artificial Sequence: Synthetic oligonucleotide
uucugucauccgauuguag

SEQ ID NO: 3217158 - RNA, 19 nt, Artificial Sequence
  Description of Artificial Sequence: Synthetic oligonucleotide
auggaugagcuucccagca

SEQ ID NO: 3217159 - RNA, 19 nt, Artificial Sequence
  Description of Artificial Sequence: Synthetic oligonucleotide
acagcuguguagacaggcc

SEQ ID NO: 3217160 - RNA, 19 nt, Artificial Sequence
  Description of Artificial Sequence: Synthetic oligonucleotide
gagucucugaguuguucug

SEQ ID NO: 3217161 - RNA, 19 nt, Artificial Sequence
  Description of Artificial Sequence: Synthetic oligonucleotide
agcucgguggugcaggcug

SEQ ID NO: 3217162 - RNA, 19 nt, Artificial Sequence
  Description of Artificial Sequence: Synthetic oligonucleotide
agcacaguucugucauccg

SEQ ID NO: 3217163 - RNA, 19 nt, Artificial Sequence
  Description of Artificial Sequence: Synthetic oligonucleotide
gcaggcugggcacacagcg

SEQ ID NO: 3217164 - RNA, 19 nt, Artificial Sequence
  Description of Artificial Sequence: Synthetic oligonucleotide
ucucugaguuguucugcag

SEQ ID NO: 3217165 - RNA, 19 nt, Artificial Sequence
  Description of Artificial Sequence: Synthetic oligonucleotide
uuaguugcugcugcugcug

SEQ ID NO: 3217166 - RNA, 19 nt, Artificial Sequence
  Description of Artificial Sequence: Synthetic oligonucleotide
cuagcugccugauggcgag

SEQ ID NO: 3217167 - RNA, 19 nt, Artificial Sequence
  Description of Artificial Sequence: Synthetic oligonucleotide
agaauggaugagcuuccca

SEQ ID NO: 3217168 - RNA, 19 nt, Artificial Sequence
  Description of Artificial Sequence: Synthetic oligonucleotide
uaagcggccaugaggcggu

SEQ ID NO: 3217169 - RNA, 19 nt, Artificial Sequence
  Description of Artificial Sequence: Synthetic oligonucleotide
ccgauuguagaccaacagg

SEQ ID NO: 3217170 - RNA, 19 nt, Artificial Sequence
  Description of Artificial Sequence: Synthetic oligonucleotide
acaagggcgggcaugaggu

SEQ ID NO: 3217171 - RNA, 19 nt, Artificial Sequence
  Description of Artificial Sequence: Synthetic oligonucleotide
aguuucuuaguugcugcug

SEQ ID NO: 3217172 - RNA, 19 nt, Artificial Sequence
  Description of Artificial Sequence: Synthetic oligonucleotide
agagcucgguggugcaggc

SEQ ID NO: 3217173 - RNA, 19 nt, Artificial Sequence
  Description of Artificial Sequence: Synthetic oligonucleotide
guucugcaguaacaccugg

SEQ ID NO: 3217174 - RNA, 19 nt, Artificial Sequence
  Description of Artificial Sequence: Synthetic oligonucleotide
uuucuuaguugcugcugcu

SEQ ID NO: 3217175 - RNA, 19 nt, Artificial Sequence
  Description of Artificial Sequence: Synthetic oligonucleotide
ucacgcucggggcacgcag

SEQ ID NO: 3217176 - RNA, 19 nt, Artificial Sequence
  Description of Artificial Sequence: Synthetic oligonucleotide
cacagcuguguagacaggc

SEQ ID NO: 3217177 - RNA, 19 nt, Artificial Sequence
  Description of Artificial Sequence: Synthetic oligonucleotide
uguguagacaggccuccuc

SEQ ID NO: 3217178 - RNA, 19 nt, Artificial Sequence
  Description of Artificial Sequence: Synthetic oligonucleotide
caggcgauggcuagcugcc

SEQ ID NO: 3217179 - RNA, 19 nt, Artificial Sequence
  Description of Artificial Sequence: Synthetic oligonucleotide
uguagaccaacaggaaauc

SEQ ID NO: 3217180 - RNA, 19 nt, Artificial Sequence
  Description of Artificial Sequence: Synthetic oligonucleotide
cucguaguccgcgaugcgg

SEQ ID NO: 3217181 - RNA, 19 nt, Artificial Sequence
  Description of Artificial Sequence: Synthetic oligonucleotide
uucuuaguugcugcugcug

SEQ ID NO: 3217182 - RNA, 19 nt, Artificial Sequence
  Description of Artificial Sequence: Synthetic oligonucleotide
uguagacaggccuccuccu

SEQ ID NO: 3217183 - RNA, 19 nt, Artificial Sequence
  Description of Artificial Sequence: Synthetic oligonucleotide
ucucuccuggggcaggcga

SEQ ID NO: 3217184 - RNA, 19 nt, Artificial Sequence
  Description of Artificial Sequence: Synthetic oligonucleotide
uaguugcugcugcugcugc

SEQ ID NO: 3217185 - RNA, 19 nt, Artificial Sequence
  Description of Artificial Sequence: Synthetic oligonucleotide
augagcuucccagcacagc

SEQ ID NO: 3217186 - RNA, 19 nt, Artificial Sequence
  Description of Artificial Sequence: Synthetic oligonucleotide
guaacaccuggcacggccg

SEQ ID NO: 3217187 - RNA, 19 nt, Artificial Sequence
  Description of Artificial Sequence: Synthetic oligonucleotide
uggaugagcuucccagcac

SEQ ID NO: 3217188 - RNA, 19 nt, Artificial Sequence
  Description of Artificial Sequence: Synthetic oligonucleotide
ugcggcgcuggacaagggc

SEQ ID NO: 3217189 - RNA, 19 nt, Artificial Sequence
  Description of Artificial Sequence: Synthetic oligonucleotide
ugcugcugcugcuccauca

SEQ ID NO: 3217190 - RNA, 19 nt, Artificial Sequence
  Description of Artificial Sequence: Synthetic oligonucleotide
cauccgauuguagaccaac

SEQ ID NO: 3217191 - RNA, 19 nt, Artificial Sequence
  Description of Artificial Sequence: Synthetic oligonucleotide
ugagucaucauccaugcug

SEQ ID NO: 3217192 - RNA, 19 nt, Artificial Sequence
  Description of Artificial Sequence: Synthetic oligonucleotide
uugaugauggauuucaugu

SEQ ID NO: 3217193 - RNA, 19 nt, Artificial Sequence
  Description of Artificial Sequence: Synthetic oligonucleotide
aagacuggagucgaggagc

SEQ ID NO: 3217194 - RNA, 19 nt, Artificial Sequence
  Description of Artificial Sequence: Synthetic oligonucleotide
aaagacggcgccgagcugc

SEQ ID NO: 3217195 - RNA, 19 nt, Artificial Sequence
  Description of Artificial Sequence: Synthetic oligonucleotide
gaugucaugacgaagcccc

SEQ ID NO: 3217196 - RNA, 19 nt, Artificial Sequence
  Description of Artificial Sequence: Synthetic oligonucleotide
aagcucuggggcuuggugc

SEQ ID NO: 3217197 - RNA, 19 nt, Artificial Sequence
  Description of Artificial Sequence: Synthetic oligonucleotide
uugaguuugaugagcuugg

SEQ ID NO: 3217198 - RNA, 19 nt, Artificial Sequence
  Description of Artificial Sequence: Synthetic oligonucleotide
ugggguacuuccaacaacc

SEQ ID NO: 3217199 - RNA, 19 nt, Artificial Sequence
  Description of Artificial Sequence: Synthetic oligonucleotide
aaagcaaucagcagcucuc

SEQ ID NO: 3217200 - RNA, 19 nt, Artificial Sequence
  Description of Artificial Sequence: Synthetic oligonucleotide
caagccauugagcacaggg

SEQ ID NO: 3217201 - RNA, 19 nt, Artificial Sequence
  Description of Artificial Sequence: Synthetic oligonucleotide
uuugaugauggauuucaug

SEQ ID NO: 3217202 - RNA, 19 nt, Artificial Sequence
  Description of Artificial Sequence: Synthetic oligonucleotide
agguacaccaugcugauga

SEQ ID NO: 3217203 - RNA, 19 nt, Artificial Sequence
  Description of Artificial Sequence: Synthetic oligonucleotide
uucaucuucuucagcgugg

SEQ ID NO: 3217204 - RNA, 19 nt, Artificial Sequence
  Description of Artificial Sequence: Synthetic oligonucleotide
aauguugugcaaagcaauc

SEQ ID NO: 3217205 - RNA, 19 nt, Artificial Sequence
  Description of Artificial Sequence: Synthetic oligonucleotide
aggagagccagauagagau

SEQ ID NO: 3217206 - RNA, 19 nt, Artificial Sequence
  Description of Artificial Sequence: Synthetic oligonucleotide
ucagguagguacaccaugc

SEQ ID NO: 3217207 - RNA, 19 nt, Artificial Sequence
  Description of Artificial Sequence: Synthetic oligonucleotide
augacuuggaagcucuggg

SEQ ID NO: 3217208 - RNA, 19 nt, Artificial Sequence
  Description of Artificial Sequence: Synthetic oligonucleotide
caaaacacagguugguggc

SEQ ID NO: 3217209 - RNA, 19 nt, Artificial Sequence
  Description of Artificial Sequence: Synthetic oligonucleotide
gugcaaagcaaucagcagc

SEQ ID NO: 3217210 - RNA, 19 nt, Artificial Sequence
  Description of Artificial Sequence: Synthetic oligonucleotide
ugaugaaacccucccaaac

SEQ ID NO: 3217211 - RNA, 19 nt, Artificial Sequence
  Description of Artificial Sequence: Synthetic oligonucleotide
uccgcaaaacacagguugg

SEQ ID NO: 3217212 - RNA, 19 nt, Artificial Sequence
  Description of Artificial Sequence: Synthetic oligonucleotide
auugucagguguuagcaga

SEQ ID NO: 3217213 - RNA, 19 nt, Artificial Sequence
  Description of Artificial Sequence: Synthetic oligonucleotide
gaacucagcagugaugucc

SEQ ID NO: 3217214 - RNA, 19 nt, Artificial Sequence
  Description of Artificial Sequence: Synthetic oligonucleotide
ugacuuggaagcucugggg

SEQ ID NO: 3217215 - RNA, 19 nt, Artificial Sequence
  Description of Artificial Sequence: Synthetic oligonucleotide
cuugaugucggcgauggcc

SEQ ID NO: 3217216 - RNA, 19 nt, Artificial Sequence
  Description of Artificial Sequence: Synthetic oligonucleotide
acuugucaaagacggcgcc

SEQ ID NO: 3217217 - RNA, 19 nt, Artificial Sequence
  Description of Artificial Sequence: Synthetic oligonucleotide
caaucagcagcucuccugg

SEQ ID NO: 3217218 - RNA, 19 nt, Artificial Sequence
  Description of Artificial Sequence: Synthetic oligonucleotide
uuuaccagcucuggggacg

SEQ ID NO: 3217219 - RNA, 19 nt, Artificial Sequence
  Description of Artificial Sequence: Synthetic oligonucleotide
cuugacggagucaauguug

SEQ ID NO: 3217220 - RNA, 19 nt, Artificial Sequence
  Description of Artificial Sequence: Synthetic oligonucleotide
ugauguccgugucugacug

SEQ ID NO: 3217221 - RNA, 19 nt, Artificial Sequence
  Description of Artificial Sequence: Synthetic oligonucleotide
uggagucugcaucaucccg

SEQ ID NO: 3217222 - RNA, 19 nt, Artificial Sequence
  Description of Artificial Sequence: Synthetic oligonucleotide
uggauuucaugucacacuu

SEQ ID NO: 3217223 - RNA, 19 nt, Artificial Sequence
  Description of Artificial Sequence: Synthetic oligonucleotide
auaaggcugaguucccuuc

SEQ ID NO: 3217224 - RNA, 19 nt, Artificial Sequence
  Description of Artificial Sequence: Synthetic oligonucleotide
aagcguacaucaggcagcc

SEQ ID NO: 3217225 - RNA, 19 nt, Artificial Sequence
  Description of Artificial Sequence: Synthetic oligonucleotide
agcacgguccgcuugaugu

SEQ ID NO: 3217226 - RNA, 19 nt, Artificial Sequence
  Description of Artificial Sequence: Synthetic oligonucleotide
cuccgcaaaacacagguug

SEQ ID NO: 3217227 - RNA, 19 nt, Artificial Sequence
  Description of Artificial Sequence: Synthetic oligonucleotide
aagcaggggacccucaaga

SEQ ID NO: 3217228 - RNA, 19 nt, Artificial Sequence
  Description of Artificial Sequence: Synthetic oligonucleotide
aacucagcagugauguccg

SEQ ID NO: 3217229 - RNA, 19 nt, Artificial Sequence
  Description of Artificial Sequence: Synthetic oligonucleotide
gcaaaacacagguuggugg

SEQ ID NO: 3217230 - RNA, 19 nt, Artificial Sequence
  Description of Artificial Sequence: Synthetic oligonucleotide
uuucgggagucuuugcugc

SEQ ID NO: 3217231 - RNA, 19 nt, Artificial Sequence
  Description of Artificial Sequence: Synthetic oligonucleotide
uugaugucggcgauggccu

SEQ ID NO: 3217232 - RNA, 19 nt, Artificial Sequence
  Description of Artificial Sequence: Synthetic oligonucleotide
aguucaugcccaucccucg

SEQ ID NO: 3217233 - RNA, 19 nt, Artificial Sequence
  Description of Artificial Sequence: Synthetic oligonucleotide
gauggauuucaugucacac

SEQ ID NO: 3217234 - RNA, 19 nt, Artificial Sequence
  Description of Artificial Sequence: Synthetic oligonucleotide
uggaugacgguccgcauga

SEQ ID NO: 3217235 - RNA, 19 nt, Artificial Sequence
  Description of Artificial Sequence: Synthetic oligonucleotide
agugauguccgugucugac

SEQ ID NO: 3217236 - RNA, 19 nt, Artificial Sequence
  Description of Artificial Sequence: Synthetic oligonucleotide
auggauuucaugucacacu

SEQ ID NO: 3217237 - RNA, 19 nt, Artificial Sequence
  Description of Artificial Sequence: Synthetic oligonucleotide
uuguccgugaggcugugca

SEQ ID NO: 3217238 - RNA, 19 nt, Artificial Sequence
  Description of Artificial Sequence: Synthetic oligonucleotide
ugcugccuccuuaagcagg

SEQ ID NO: 3217239 - RNA, 19 nt, Artificial Sequence
  Description of Artificial Sequence: Synthetic oligonucleotide
uuuaccacgaugggguuga

SEQ ID NO: 3217240 - RNA, 19 nt, Artificial Sequence
  Description of Artificial Sequence: Synthetic oligonucleotide
uccgacguauacacguucc

SEQ ID NO: 3217241 - RNA, 19 nt, Artificial Sequence
  Description of Artificial Sequence: Synthetic oligonucleotide
auggucagggacuggauga

SEQ ID NO: 3217242 - RNA, 19 nt, Artificial Sequence
  Description of Artificial Sequence: Synthetic oligonucleotide
ugaccagcgucucugcccc

SEQ ID NO: 3217243 - RNA, 19 nt, Artificial Sequence
  Description of Artificial Sequence: Synthetic oligonucleotide
ggaagcguacaucaggcag

SEQ ID NO: 3217244 - RNA, 19 nt, Artificial Sequence
  Description of Artificial Sequence: Synthetic oligonucleotide
gucucugccccuuuggggc

SEQ ID NO: 3217245 - RNA, 19 nt, Artificial Sequence
  Description of Artificial Sequence: Synthetic oligonucleotide
acaaccugcuucaugauga

SEQ ID NO: 3217246 - RNA, 19 nt, Artificial Sequence
  Description of Artificial Sequence: Synthetic oligonucleotide
gaggaagcguacaucaggc

SEQ ID NO: 3217247 - RNA, 19 nt, Artificial Sequence
  Description of Artificial Sequence: Synthetic oligonucleotide
gaagcguacaucaggcagc

SEQ ID NO: 3217248 - RNA, 19 nt, Artificial Sequence
  Description of Artificial Sequence: Synthetic oligonucleotide
ugcugcaucacgacagcca

SEQ ID NO: 3217249 - RNA, 19 nt, Artificial Sequence
  Description of Artificial Sequence: Synthetic oligonucleotide
uucacugucccaguccugc

SEQ ID NO: 3217250 - RNA, 19 nt, Artificial Sequence
  Description of Artificial Sequence: Synthetic oligonucleotide
gaguuugaugagcuugggc

SEQ ID NO: 3217251 - RNA, 19 nt, Artificial Sequence
  Description of Artificial Sequence: Synthetic oligonucleotide
ucuggggaguucaugccca

SEQ ID NO: 3217252 - RNA, 19 nt, Artificial Sequence
  Description of Artificial Sequence: Synthetic oligonucleotide
cuuugaagucccugauggg

SEQ ID NO: 3217253 - RNA, 19 nt, Artificial Sequence
  Description of Artificial Sequence: Synthetic oligonucleotide
uaagcaggggacccucaag

SEQ ID NO: 3217254 - RNA, 19 nt, Artificial Sequence
  Description of Artificial Sequence: Synthetic oligonucleotide
agcucuggggcuuggugcg

SEQ ID NO: 3217255 - RNA, 19 nt, Artificial Sequence
  Description of Artificial Sequence: Synthetic oligonucleotide
cagcccugagucaucaucc

SEQ ID NO: 3217256 - RNA, 19 nt, Artificial Sequence
  Description of Artificial Sequence: Synthetic oligonucleotide
auguccgugucugacuggc

SEQ ID NO: 3217257 - RNA, 19 nt, Artificial Sequence
  Description of Artificial Sequence: Synthetic oligonucleotide
caugucacacuugacggag

SEQ ID NO: 3217258 - RNA, 19 nt, Artificial Sequence
  Description of Artificial Sequence: Synthetic oligonucleotide
gagucugcaucaucccggg

SEQ ID NO: 3217259 - RNA, 19 nt, Artificial Sequence
  Description of Artificial Sequence: Synthetic oligonucleotide
aucuucucccaaguugggc

SEQ ID NO: 3217260 - RNA, 19 nt, Artificial Sequence
  Description of Artificial Sequence: Synthetic oligonucleotide
acauugucagguguuagca

SEQ ID NO: 3217261 - RNA, 19 nt, Artificial Sequence
  Description of Artificial Sequence: Synthetic oligonucleotide
agguagguacaccaugcug

SEQ ID NO: 3217262 - RNA, 19 nt, Artificial Sequence
  Description of Artificial Sequence: Synthetic oligonucleotide
gugccugcagacuccaccg

SEQ ID NO: 3217263 - RNA, 19 nt, Artificial Sequence
  Description of Artificial Sequence: Synthetic oligonucleotide
uuucggccagcccugaguc

SEQ ID NO: 3217264 - RNA, 19 nt, Artificial Sequence
  Description of Artificial Sequence: Synthetic oligonucleotide
uguguggccaugagccgag

SEQ ID NO: 3217265 - RNA, 19 nt, Artificial Sequence
  Description of Artificial Sequence: Synthetic oligonucleotide
cauugucagguguuagcag

SEQ ID NO: 3217266 - RNA, 19 nt, Artificial Sequence
  Description of Artificial Sequence: Synthetic oligonucleotide
aggcugaguucccuucacc

SEQ ID NO: 3217267 - RNA, 19 nt, Artificial Sequence
  Description of Artificial Sequence: Synthetic oligonucleotide
ugucacacuugacggaguc

SEQ ID NO: 3217268 - RNA, 19 nt, Artificial Sequence
  Description of Artificial Sequence: Synthetic oligonucleotide
gaugacgguccgcaugagc

SEQ ID NO: 3217269 - RNA, 19 nt, Artificial Sequence
  Description of Artificial Sequence: Synthetic oligonucleotide
augagcagcaugggcagcg

SEQ ID NO: 3217270 - RNA, 19 nt, Artificial Sequence
  Description of Artificial Sequence: Synthetic oligonucleotide
acuccgcucguccuugggg

SEQ ID NO: 3217271 - RNA, 19 nt, Artificial Sequence
  Description of Artificial Sequence: Synthetic oligonucleotide
agauacagacacugcuuca

SEQ ID NO: 3217272 - RNA, 19 nt, Artificial Sequence
  Description of Artificial Sequence: Synthetic oligonucleotide
ugaguuugaugagcuuggg

SEQ ID NO: 3217273 - RNA, 19 nt, Artificial Sequence
  Description of Artificial Sequence: Synthetic oligonucleotide
uggcuuggaaggaggcagg

SEQ ID NO: 3217274 - RNA, 19 nt, Artificial Sequence
  Description of Artificial Sequence: Synthetic oligonucleotide
uugaugaaacccucccaaa

SEQ ID NO: 3217275 - RNA, 19 nt, Artificial Sequence
  Description of Artificial Sequence: Synthetic oligonucleotide
gagucaucauccaugcuga

SEQ ID NO: 3217276 - RNA, 19 nt, Artificial Sequence
  Description of Artificial Sequence: Synthetic oligonucleotide
caccaugcugaugaggacc

SEQ ID NO: 3217277 - RNA, 19 nt, Artificial Sequence
  Description of Artificial Sequence: Synthetic oligonucleotide
gguagguacaccaugcuga

SEQ ID NO: 3217278 - RNA, 19 nt, Artificial Sequence
  Description of Artificial Sequence: Synthetic oligonucleotide
uuaagcaggggacccucaa

SEQ ID NO: 3217279 - RNA, 19 nt, Artificial Sequence
  Description of Artificial Sequence: Synthetic oligonucleotide
agcagaggcugcaagaacu

SEQ ID NO: 3217280 - RNA, 19 nt, Artificial Sequence
  Description of Artificial Sequence: Synthetic oligonucleotide
uugucaaagacggcgccga

SEQ ID NO: 3217281 - RNA, 19 nt, Artificial Sequence
  Description of Artificial Sequence: Synthetic oligonucleotide
guucaugcccaucccucgg

SEQ ID NO: 3217282 - RNA, 19 nt, Artificial Sequence
  Description of Artificial Sequence: Synthetic oligonucleotide
gacguauacacguuccgcu

SEQ ID NO: 3217283 - RNA, 19 nt, Artificial Sequence
  Description of Artificial Sequence: Synthetic oligonucleotide
cauggucagggacuggaug

SEQ ID NO: 3217284 - RNA, 19 nt, Artificial Sequence
  Description of Artificial Sequence: Synthetic oligonucleotide
cagcucguggaucagcuug

SEQ ID NO: 3217285 - RNA, 19 nt, Artificial Sequence
  Description of Artificial Sequence: Synthetic oligonucleotide
ugccuccuuaagcagggga

SEQ ID NO: 3217286 - RNA, 19 nt, Artificial Sequence
  Description of Artificial Sequence: Synthetic oligonucleotide
agucgaggagcgugguuuc

SEQ ID NO: 3217287 - RNA, 19 nt, Artificial Sequence
  Description of Artificial Sequence: Synthetic oligonucleotide
agcgucucugccccuuugg

SEQ ID NO: 3217288 - RNA, 19 nt, Artificial Sequence
  Description of Artificial Sequence: Synthetic oligonucleotide
agaggcugcaagaacucag

SEQ ID NO: 3217289 - RNA, 19 nt, Artificial Sequence
  Description of Artificial Sequence: Synthetic oligonucleotide
ccaacaaccugcuucauga

SEQ ID NO: 3217290 - RNA, 19 nt, Artificial Sequence
  Description of Artificial Sequence: Synthetic oligonucleotide
caucccgggaccguuuucg

SEQ ID NO: 3217291 - RNA, 19 nt, Artificial Sequence
  Description of Artificial Sequence: Synthetic oligonucleotide
aaaagaaaauucuagaagg

SEQ ID NO: 3217292 - RNA, 19 nt, Artificial Sequence
  Description of Artificial Sequence: Synthetic oligonucleotide
aaaauuaaugaaugggagg

SEQ ID NO: 3217293 - RNA, 19 nt, Artificial Sequence
  Description of Artificial Sequence: Synthetic oligonucleotide
aaauuaaugaaugggaggg

SEQ ID NO: 3217294 - RNA, 19 nt, Artificial Sequence
  Description of Artificial Sequence: Synthetic oligonucleotide
uaaaagaaaauucuagaag

SEQ ID NO: 3217295 - RNA, 19 nt, Artificial Sequence
  Description of Artificial Sequence: Synthetic oligonucleotide
uagaaaauugacaaggacc

SEQ ID NO: 3217296 - RNA, 19 nt, Artificial Sequence
  Description of Artificial Sequence: Synthetic oligonucleotide
uaugauuaaaagaaaauuc

SEQ ID NO: 3217297 - RNA, 19 nt, Artificial Sequence
  Description of Artificial Sequence: Synthetic oligonucleotide
agaaaauugacaaggaccc

SEQ ID NO: 3217298 - RNA, 19 nt, Artificial Sequence
  Description of Artificial Sequence: Synthetic oligonucleotide
aaaagguaugauuaaaaga

SEQ ID NO: 3217299 - RNA, 19 nt, Artificial Sequence
  Description of Artificial Sequence: Synthetic oligonucleotide
aggaagacccucuugaugc

SEQ ID NO: 3217300 - RNA, 19 nt, Artificial Sequence
  Description of Artificial Sequence: Synthetic oligonucleotide
uugacaaggacccaagggg

SEQ ID NO: 3217301 - RNA, 19 nt, Artificial Sequence
  Description of Artificial Sequence: Synthetic oligonucleotide
aaagguaugauuaaaagaa

SEQ ID NO: 3217302 - RNA, 19 nt, Artificial Sequence
  Description of Artificial Sequence: Synthetic oligonucleotide
gauuaaaagaaaauucuag

SEQ ID NO: 3217303 - RNA, 19 nt, Artificial Sequence
  Description of Artificial Sequence: Synthetic oligonucleotide
auuaaaagaaaauucuaga

SEQ ID NO: 3217304 - RNA, 19 nt, Artificial Sequence
  Description of Artificial Sequence: Synthetic oligonucleotide
uuaaaagaaaauucuagaa

SEQ ID NO: 3217305 - RNA, 19 nt, Artificial Sequence
  Description of Artificial Sequence: Synthetic oligonucleotide
aacgacuugggcuagaaaa

SEQ ID NO: 3217306 - RNA, 19 nt, Artificial Sequence
  Description of Artificial Sequence: Synthetic oligonucleotide
aaaauucuagaagggaagg

SEQ ID NO: 3217307 - RNA, 19 nt, Artificial Sequence
  Description of Artificial Sequence: Synthetic oligonucleotide
aaagaaaauucuagaaggg

SEQ ID NO: 3217308 - RNA, 19 nt, Artificial Sequence
  Description of Artificial Sequence: Synthetic oligonucleotide
uagaagggaaggaagaccc

SEQ ID NO: 3217309 - RNA, 19 nt, Artificial Sequence
  Description of Artificial Sequence: Synthetic oligonucleotide
auugacaaggacccaaggg

SEQ ID NO: 3217310 - RNA, 19 nt, Artificial Sequence
  Description of Artificial Sequence: Synthetic oligonucleotide
ucugcuacugcaaauccag

SEQ ID NO: 3217311 - RNA, 19 nt, Artificial Sequence
  Description of Artificial Sequence: Synthetic oligonucleotide
aaugggaccgugcugggag

SEQ ID NO: 3217312 - RNA, 19 nt, Artificial Sequence
  Description of Artificial Sequence: Synthetic oligonucleotide
caaaagguaugauuaaaag

SEQ ID NO: 3217313 - RNA, 19 nt, Artificial Sequence
  Description of Artificial Sequence: Synthetic oligonucleotide
ugggcuagaaaauugacaa

SEQ ID NO: 3217314 - RNA, 19 nt, Artificial Sequence
  Description of Artificial Sequence: Synthetic oligonucleotide
auccuuaggacgccgaggc

SEQ ID NO: 3217315 - RNA, 19 nt, Artificial Sequence
  Description of Artificial Sequence: Synthetic oligonucleotide
uaaugaaugggagggaggg

SEQ ID NO: 3217316 - RNA, 19 nt, Artificial Sequence
  Description of Artificial Sequence: Synthetic oligonucleotide
uuaaugaaugggagggagg

SEQ ID NO: 3217317 - RNA, 19 nt, Artificial Sequence
  Description of Artificial Sequence: Synthetic oligonucleotide
aauugacaaggacccaagg

SEQ ID NO: 3217318 - RNA, 19 nt, Artificial Sequence
  Description of Artificial Sequence: Synthetic oligonucleotide
gaaaauucuagaagggaag

SEQ ID NO: 3217319 - RNA, 19 nt, Artificial Sequence
  Description of Artificial Sequence: Synthetic oligonucleotide
ucaaaagguaugauuaaaa

SEQ ID NO: 3217320 - RNA, 19 nt, Artificial Sequence
  Description of Artificial Sequence: Synthetic oligonucleotide
aaauccaggagggagagga

SEQ ID NO: 3217321 - RNA, 19 nt, Artificial Sequence
  Description of Artificial Sequence: Synthetic oligonucleotide
uacugcaaauccaggaggg

SEQ ID NO: 3217322 - RNA, 19 nt, Artificial Sequence
  Description of Artificial Sequence: Synthetic oligonucleotide
ugauuaaaagaaaauucua

SEQ ID NO: 3217323 - RNA, 19 nt, Artificial Sequence
  Description of Artificial Sequence: Synthetic oligonucleotide
augauuaaaagaaaauucu

SEQ ID NO: 3217324 - RNA, 19 nt, Artificial Sequence
  Description of Artificial Sequence: Synthetic oligonucleotide
aagaaaauucuagaaggga

SEQ ID NO: 3217325 - RNA, 19 nt, Artificial Sequence
  Description of Artificial Sequence: Synthetic oligonucleotide
uacuucuucacuccucugc

SEQ ID NO: 3217326 - RNA, 19 nt, Artificial Sequence
  Description of Artificial Sequence: Synthetic oligonucleotide
uucuagaagggaaggaaga

SEQ ID NO: 3217327 - RNA, 19 nt, Artificial Sequence
  Description of Artificial Sequence: Synthetic oligonucleotide
aauucuagaagggaaggaa

SEQ ID NO: 3217328 - RNA, 19 nt, Artificial Sequence
  Description of Artificial Sequence: Synthetic oligonucleotide
auuaaugaaugggagggag

SEQ ID NO: 3217329 - RNA, 19 nt, Artificial Sequence
  Description of Artificial Sequence: Synthetic oligonucleotide
aaggaagacccucuugaug

SEQ ID NO: 3217330 - RNA, 19 nt, Artificial Sequence
  Description of Artificial Sequence: Synthetic oligonucleotide
uccguugaggaucuugugc

SEQ ID NO: 3217331 - RNA, 19 nt, Artificial Sequence
  Description of Artificial Sequence: Synthetic oligonucleotide
aaaauugacaaggacccaa

SEQ ID NO: 3217332 - RNA, 19 nt, Artificial Sequence
  Description of Artificial Sequence: Synthetic oligonucleotide
ugacaaggacccaaggggc

SEQ ID NO: 3217333 - RNA, 19 nt, Artificial Sequence
  Description of Artificial Sequence: Synthetic oligonucleotide
uugggcuagaaaauugaca

SEQ ID NO: 3217334 - RNA, 19 nt, Artificial Sequence
  Description of Artificial Sequence: Synthetic oligonucleotide
ggcuagaaaauugacaagg

SEQ ID NO: 3217335 - RNA, 19 nt, Artificial Sequence
  Description of Artificial Sequence: Synthetic oligonucleotide
cuagaaaauugacaaggac

SEQ ID NO: 3217336 - RNA, 19 nt, Artificial Sequence
  Description of Artificial Sequence: Synthetic oligonucleotide
acccucuugaugcucaagg

SEQ ID NO: 3217337 - RNA, 19 nt, Artificial Sequence
  Description of Artificial Sequence: Synthetic oligonucleotide
uccaggagggagaggaacg

SEQ ID NO: 3217338 - RNA, 19 nt, Artificial Sequence
  Description of Artificial Sequence: Synthetic oligonucleotide
cucaaugggaccgugcugg

SEQ ID NO: 3217339 - RNA, 19 nt, Artificial Sequence
  Description of Artificial Sequence: Synthetic oligonucleotide
cuacugcaaauccaggagg

SEQ ID NO: 3217340 - RNA, 19 nt, Artificial Sequence
  Description of Artificial Sequence: Synthetic oligonucleotide
ggagggagggaucaaaagg

SEQ ID NO: 3217341 - RNA, 19 nt, Artificial Sequence
  Description of Artificial Sequence: Synthetic oligonucleotide
auucccuccaauccuuagg

SEQ ID NO: 3217342 - RNA, 19 nt, Artificial Sequence
  Description of Artificial Sequence: Synthetic oligonucleotide
aauccuuaggacgccgagg

SEQ ID NO: 3217343 - RNA, 19 nt, Artificial Sequence
  Description of Artificial Sequence: Synthetic oligonucleotide
ugcaaauccaggagggaga

SEQ ID NO: 3217344 - RNA, 19 nt, Artificial Sequence
  Description of Artificial Sequence: Synthetic oligonucleotide
uucuucacuccucugcuac

SEQ ID NO: 3217345 - RNA, 19 nt, Artificial Sequence
  Description of Artificial Sequence: Synthetic oligonucleotide
uucccuccaauccuuagga

SEQ ID NO: 3217346 - RNA, 19 nt, Artificial Sequence
  Description of Artificial Sequence: Synthetic oligonucleotide
ugcuacugcaaauccagga

SEQ ID NO: 3217347 - RNA, 19 nt, Artificial Sequence
  Description of Artificial Sequence: Synthetic oligonucleotide
aaauugacaaggacccaag

SEQ ID NO: 3217348 - RNA, 19 nt, Artificial Sequence
  Description of Artificial Sequence: Synthetic oligonucleotide
aaauucuagaagggaagga

SEQ ID NO: 3217349 - RNA, 19 nt, Artificial Sequence
  Description of Artificial Sequence: Synthetic oligonucleotide
agaaaauucuagaagggaa

SEQ ID NO: 3217350 - RNA, 19 nt, Artificial Sequence
  Description of Artificial Sequence: Synthetic oligonucleotide
ucuccguugaggaucuugu

SEQ ID NO: 3217351 - RNA, 19 nt, Artificial Sequence
  Description of Artificial Sequence: Synthetic oligonucleotide
agggagaggaacgacuugg

SEQ ID NO: 3217352 - RNA, 19 nt, Artificial Sequence
  Description of Artificial Sequence: Synthetic oligonucleotide
gaggcuacuucuucacucc

SEQ ID NO: 3217353 - RNA, 19 nt, Artificial Sequence
  Description of Artificial Sequence: Synthetic oligonucleotide
cuagaagggaaggaagacc

SEQ ID NO: 3217354 - RNA, 19 nt, Artificial Sequence
  Description of Artificial Sequence: Synthetic oligonucleotide
ucuugaugcucaaggccag

SEQ ID NO: 3217355 - RNA, 19 nt, Artificial Sequence
  Description of Artificial Sequence: Synthetic oligonucleotide
aauuaaugaaugggaggga

SEQ ID NO: 3217356 - RNA, 19 nt, Artificial Sequence
  Description of Artificial Sequence: Synthetic oligonucleotide
auucuagaagggaaggaag

SEQ ID NO: 3217357 - RNA, 19 nt, Artificial Sequence
  Description of Artificial Sequence: Synthetic oligonucleotide
agaggaacgacuugggcua

SEQ ID NO: 3217358 - RNA, 19 nt, Artificial Sequence
  Description of Artificial Sequence: Synthetic oligonucleotide
acuucuucacuccucugcu

SEQ ID NO: 3217359 - RNA, 19 nt, Artificial Sequence
  Description of Artificial Sequence: Synthetic oligonucleotide
cucuugaugcucaaggcca

SEQ ID NO: 3217360 - RNA, 19 nt, Artificial Sequence
  Description of Artificial Sequence: Synthetic oligonucleotide
ucuagaagggaaggaagac

SEQ ID NO: 3217361 - RNA, 19 nt, Artificial Sequence
  Description of Artificial Sequence: Synthetic oligonucleotide
aaggccaggauucccucca

SEQ ID NO: 3217362 - RNA, 19 nt, Artificial Sequence
  Description of Artificial Sequence: Synthetic oligonucleotide
gagaggaacgacuugggcu

SEQ ID NO: 3217363 - RNA, 19 nt, Artificial Sequence
  Description of Artificial Sequence: Synthetic oligonucleotide
gaucaaaagguaugauuaa

SEQ ID NO: 3217364 - RNA, 19 nt, Artificial Sequence
  Description of Artificial Sequence: Synthetic oligonucleotide
cuugggcuagaaaauugac

SEQ ID NO: 3217365 - RNA, 19 nt, Artificial Sequence
  Description of Artificial Sequence: Synthetic oligonucleotide
agcaggaggcuacuucuuc

SEQ ID NO: 3217366 - RNA, 19 nt, Artificial Sequence
  Description of Artificial Sequence: Synthetic oligonucleotide
gcuacugcaaauccaggag

SEQ ID NO: 3217367 - RNA, 19 nt, Artificial Sequence
  Description of Artificial Sequence: Synthetic oligonucleotide
augcucaaggccaggauuc

SEQ ID NO: 3217368 - RNA, 19 nt, Artificial Sequence
  Description of Artificial Sequence: Synthetic oligonucleotide
ggaaggaagacccucuuga

SEQ ID NO: 3217369 - RNA, 19 nt, Artificial Sequence
  Description of Artificial Sequence: Synthetic oligonucleotide
gauucccuccaauccuuag

SEQ ID NO: 3217370 - RNA, 19 nt, Artificial Sequence
  Description of Artificial Sequence: Synthetic oligonucleotide
ggaucaaaagguaugauua

SEQ ID NO: 3217371 - RNA, 19 nt, Artificial Sequence
  Description of Artificial Sequence: Synthetic oligonucleotide
agguaugauuaaaagaaaa

SEQ ID NO: 3217372 - RNA, 19 nt, Artificial Sequence
  Description of Artificial Sequence: Synthetic oligonucleotide
ucucaaugggaccgugcug

SEQ ID NO: 3217373 - RNA, 19 nt, Artificial Sequence
  Description of Artificial Sequence: Synthetic oligonucleotide
gacuugggcuagaaaauug

SEQ ID NO: 3217374 - RNA, 19 nt, Artificial Sequence
  Description of Artificial Sequence: Synthetic oligonucleotide
aagguaugauuaaaagaaa

SEQ ID NO: 3217375 - RNA, 19 nt, Artificial Sequence
  Description of Artificial Sequence: Synthetic oligonucleotide
cugcaaauccaggagggag

SEQ ID NO: 3217376 - RNA, 19 nt, Artificial Sequence
  Description of Artificial Sequence: Synthetic oligonucleotide
auccaggagggagaggaac

SEQ ID NO: 3217377 - RNA, 19 nt, Artificial Sequence
  Description of Artificial Sequence: Synthetic oligonucleotide
cuuaggacgccgaggcccc

SEQ ID NO: 3217378 - RNA, 19 nt, Artificial Sequence
  Description of Artificial Sequence: Synthetic oligonucleotide
guaugauuaaaagaaaauu

SEQ ID NO: 3217379 - RNA, 19 nt, Artificial Sequence
  Description of Artificial Sequence: Synthetic oligonucleotide
aucaaaagguaugauuaaa

SEQ ID NO: 3217380 - RNA, 19 nt, Artificial Sequence
  Description of Artificial Sequence: Synthetic oligonucleotide
cccuccaauccuuaggacg

SEQ ID NO: 3217381 - RNA, 19 nt, Artificial Sequence
  Description of Artificial Sequence: Synthetic oligonucleotide
ucaaugggaccgugcuggg

SEQ ID NO: 3217382 - RNA, 19 nt, Artificial Sequence
  Description of Artificial Sequence: Synthetic oligonucleotide
ccuccaauccuuaggacgc

SEQ ID NO: 3217383 - RNA, 19 nt, Artificial Sequence
  Description of Artificial Sequence: Synthetic oligonucleotide
augaaugggagggagggau

SEQ ID NO: 3217384 - RNA, 19 nt, Artificial Sequence
  Description of Artificial Sequence: Synthetic oligonucleotide
uucacuccucugcuacugc

SEQ ID NO: 3217385 - RNA, 19 nt, Artificial Sequence
  Description of Artificial Sequence: Synthetic oligonucleotide
gagggaucaaaagguauga

SEQ ID NO: 3217386 - RNA, 19 nt, Artificial Sequence
  Description of Artificial Sequence: Synthetic oligonucleotide
uccaauccuuaggacgccg

SEQ ID NO: 3217387 - RNA, 19 nt, Artificial Sequence
  Description of Artificial Sequence: Synthetic oligonucleotide
aaugaaugggagggaggga

SEQ ID NO: 3217388 - RNA, 19 nt, Artificial Sequence
  Description of Artificial Sequence: Synthetic oligonucleotide
gaagggaaggaagacccuc

SEQ ID NO: 3217389 - RNA, 19 nt, Artificial Sequence
  Description of Artificial Sequence: Synthetic oligonucleotide
ccguugaggaucuugugcc

SEQ ID NO: 3217390 - RNA, 19 nt, Artificial Sequence
  Description of Artificial Sequence: Synthetic oligonucleotide
ucacuccucugcuacugca

SEQ ID NO: 3217391 - RNA, 19 nt, Artificial Sequence
  Description of Artificial Sequence: Synthetic oligonucleotide
aaagaggggaucugggugc

SEQ ID NO: 3217392 - RNA, 19 nt, Artificial Sequence
  Description of Artificial Sequence: Synthetic oligonucleotide
aaaagaggggaucugggug

SEQ ID NO: 3217393 - RNA, 19 nt, Artificial Sequence
  Description of Artificial Sequence: Synthetic oligonucleotide
  modified_base (10)..(10): a, c, u, g, unknown or other
gaagcaaggngaaagugcc

SEQ ID NO: 3217394 - RNA, 19 nt, Artificial Sequence
  Description of Artificial Sequence: Synthetic oligonucleotide
aaguggugaccacaggggc

SEQ ID NO: 3217395 - RNA, 19 nt, Artificial Sequence
  Description of Artificial Sequence: Synthetic oligonucleotide
agugccuccagcccuagcc

SEQ ID NO: 3217396 - RNA, 19 nt, Artificial Sequence
  Description of Artificial Sequence: Synthetic oligonucleotide
uuuugcuugagguggaucu

SEQ ID NO: 3217397 - RNA, 19 nt, Artificial Sequence
  Description of Artificial Sequence: Synthetic oligonucleotide
cuugagguggaucuuggcg

SEQ ID NO: 3217398 - RNA, 19 nt, Artificial Sequence
  Description of Artificial Sequence: Synthetic oligonucleotide
  modified_base (4)..(4): a, c, u, g, unknown or other
aggngaaagugccuccagc

SEQ ID NO: 3217399 - RNA, 19 nt, Artificial Sequence
  Description of Artificial Sequence: Synthetic oligonucleotide
cacuggugggaaaagaggg

SEQ ID NO: 3217400 - RNA, 19 nt, Artificial Sequence
  Description of Artificial Sequence: Synthetic oligonucleotide
uucuccuuuugcuugaggu

SEQ ID NO: 3217401 - RNA, 19 nt, Artificial Sequence
  Description of Artificial Sequence: Synthetic oligonucleotide
caaguggugaccacagggg

SEQ ID NO: 3217402 - RNA, 19 nt, Artificial Sequence
  Description of Artificial Sequence: Synthetic oligonucleotide
ucgaaggggaggcaagggg

SEQ ID NO: 3217403 - RNA, 19 nt, Artificial Sequence
  Description of Artificial Sequence: Synthetic oligonucleotide
uugagguggaucuuggcgu

SEQ ID NO: 3217404 - RNA, 19 nt, Artificial Sequence
  Description of Artificial Sequence: Synthetic oligonucleotide
caggcgaccagccaggagg

SEQ ID NO: 3217405 - RNA, 19 nt, Artificial Sequence
  Description of Artificial Sequence: Synthetic oligonucleotide
uuucaggcgaccagccagg

SEQ ID NO: 3217406 - RNA, 19 nt, Artificial Sequence
  Description of Artificial Sequence: Synthetic oligonucleotide
cuuucaggcgaccagccag

SEQ ID NO: 3217407 - RNA, 19 nt, Artificial Sequence
  Description of Artificial Sequence: Synthetic oligonucleotide
agaacucgcacgcgaaggg

SEQ ID NO: 3217408 - RNA, 19 nt, Artificial Sequence
  Description of Artificial Sequence: Synthetic oligonucleotide
cuccuuuugcuugaggugg

SEQ ID NO: 3217409 - RNA, 19 nt, Artificial Sequence
  Description of Artificial Sequence: Synthetic oligonucleotide
ucaguggcuagcuuucccc

SEQ ID NO: 3217410 - RNA, 19 nt, Artificial Sequence
  Description of Artificial Sequence: Synthetic oligonucleotide
aacuugcgcccacagaacu

SEQ ID NO: 3217411 - RNA, 19 nt, Artificial Sequence
  Description of Artificial Sequence: Synthetic oligonucleotide
  modified_base (5)..(5): a, c, u, g, unknown or other
aaggngaaagugccuccag

SEQ ID NO: 3217412 - RNA, 19 nt, Artificial Sequence
  Description of Artificial Sequence: Synthetic oligonucleotide
ugcaagggugggaaugggg

SEQ ID NO: 3217413 - RNA, 19 nt, Artificial Sequence
  Description of Artificial Sequence: Synthetic oligonucleotide
ucuccuuuugcuugaggug

SEQ ID NO: 3217414 - RNA, 19 nt, Artificial Sequence
  Description of Artificial Sequence: Synthetic oligonucleotide
  modified_base (2)..(2): a, c, u, g, unknown or other
gngaaagugccuccagccc

SEQ ID NO: 3217415 - RNA, 19 nt, Artificial Sequence
  Description of Artificial Sequence: Synthetic oligonucleotide
ugugcaagggugggaaugg

SEQ ID NO: 3217416 - RNA, 19 nt, Artificial Sequence
  Description of Artificial Sequence: Synthetic oligonucleotide
  modified_base (8)..(8): a, c, u, g, unknown or other
agcaaggngaaagugccuc

SEQ ID NO: 3217417 - RNA, 19 nt, Artificial Sequence
  Description of Artificial Sequence: Synthetic oligonucleotide
cuucuucuccuuuugcuug

SEQ ID NO: 3217418 - RNA, 19 nt, Artificial Sequence
  Description of Artificial Sequence: Synthetic oligonucleotide
caaacuugcgcccacagaa

SEQ ID NO: 3217419 - RNA, 19 nt, Artificial Sequence
  Description of Artificial Sequence: Synthetic oligonucleotide
gcaaguggugaccacaggg

SEQ ID NO: 3217420 - RNA, 19 nt, Artificial Sequence
  Description of Artificial Sequence: Synthetic oligonucleotide
agccaggaggcacuggugg

SEQ ID NO: 3217421 - RNA, 19 nt, Artificial Sequence
  Description of Artificial Sequence: Synthetic oligonucleotide
  modified_base (3)..(3): a, c, u, g, unknown or other
ggngaaagugccuccagcc

SEQ ID NO: 3217422 - RNA, 19 nt, Artificial Sequence
  Description of Artificial Sequence: Synthetic oligonucleotide
ugcuugagguggaucuugg

SEQ ID NO: 3217423 - RNA, 19 nt, Artificial Sequence
  Description of Artificial Sequence: Synthetic oligonucleotide
cuagccccaaccaucggcc

SEQ ID NO: 3217424 - RNA, 19 nt, Artificial Sequence
  Description of Artificial Sequence: Synthetic oligonucleotide
aguggcuagcuuuccccgc

SEQ ID NO: 3217425 - RNA, 19 nt, Artificial Sequence
  Description of Artificial Sequence: Synthetic oligonucleotide
uccaggacgagaccagggc

SEQ ID NO: 3217426 - RNA, 19 nt, Artificial Sequence
  Description of Artificial Sequence: Synthetic oligonucleotide
aaacuugcgcccacagaac

SEQ ID NO: 3217427 - RNA, 19 nt, Artificial Sequence
  Description of Artificial Sequence: Synthetic oligonucleotide
uuccccgcugcuuucaggc

SEQ ID NO: 3217428 - RNA, 19 nt, Artificial Sequence
  Description of Artificial Sequence: Synthetic oligonucleotide
acaggggccaaggacacgg

SEQ ID NO: 3217429 - RNA, 19 nt, Artificial Sequence
  Description of Artificial Sequence: Synthetic oligonucleotide
aguggugaccacaggggcc

SEQ ID NO: 3217430 - RNA, 19 nt, Artificial Sequence
  Description of Artificial Sequence: Synthetic oligonucleotide
aagaggggaucugggugcc

SEQ ID NO: 3217431 - RNA, 19 nt, Artificial Sequence
  Description of Artificial Sequence: Synthetic oligonucleotide
cuugcgcccacagaacucg

SEQ ID NO: 3217432 - RNA, 19 nt, Artificial Sequence
  Description of Artificial Sequence: Synthetic oligonucleotide
cugcgcgcaaacuugcgcc

SEQ ID NO: 3217433 - RNA, 19 nt, Artificial Sequence
  Description of Artificial Sequence: Synthetic oligonucleotide
cacgcgaagggcuucuccc

SEQ ID NO: 3217434 - RNA, 19 nt, Artificial Sequence
  Description of Artificial Sequence: Synthetic oligonucleotide
  modified_base (11)..(11): a, c, u, g, unknown or other
ggaagcaaggngaaagugc

SEQ ID NO: 3217435 - RNA, 19 nt, Artificial Sequence
  Description of Artificial Sequence: Synthetic oligonucleotide
acgcgaagggcuucucccc

SEQ ID NO: 3217436 - RNA, 19 nt, Artificial Sequence
  Description of Artificial Sequence: Synthetic oligonucleotide
acuucuucuccuuuugcuu

SEQ ID NO: 3217437 - RNA, 19 nt, Artificial Sequence
  Description of Artificial Sequence: Synthetic oligonucleotide
ugcuuucaggcgaccagcc

SEQ ID NO: 3217438 - RNA, 19 nt, Artificial Sequence
  Description of Artificial Sequence: Synthetic oligonucleotide
ugagguggaucuuggcgug

SEQ ID NO: 3217439 - RNA, 19 nt, Artificial Sequence
  Description of Artificial Sequence: Synthetic oligonucleotide
gagccucaggcgcaagugg

SEQ ID NO: 3217440 - RNA, 19 nt, Artificial Sequence
  Description of Artificial Sequence: Synthetic oligonucleotide
cuuucuccgacuucuucuc

SEQ ID NO: 3217441 - RNA, 19 nt, Artificial Sequence
  Description of Artificial Sequence: Synthetic oligonucleotide
caggacgagaccagggcgc

SEQ ID NO: 3217442 - RNA, 19 nt, Artificial Sequence
  Description of Artificial Sequence: Synthetic oligonucleotide
uacguccaggacgagacca

SEQ ID NO: 3217443 - RNA, 19 nt, Artificial Sequence
  Description of Artificial Sequence: Synthetic oligonucleotide
agggcgcaccccuuucucc

SEQ ID NO: 3217444 - RNA, 19 nt, Artificial Sequence
  Description of Artificial Sequence: Synthetic oligonucleotide
uuucuccgacuucuucucc

SEQ ID NO: 3217445 - RNA, 19 nt, Artificial Sequence
  Description of Artificial Sequence: Synthetic oligonucleotide
acagaacucgcacgcgaag

SEQ ID NO: 3217446 - RNA, 19 nt, Artificial Sequence
  Description of Artificial Sequence: Synthetic oligonucleotide
cuuggcguggcgcuugcgc

SEQ ID NO: 3217447 - RNA, 19 nt, Artificial Sequence
  Description of Artificial Sequence: Synthetic oligonucleotide
uugcgcucgucgcugcgcg

SEQ ID NO: 3217448 - RNA, 19 nt, Artificial Sequence
  Description of Artificial Sequence: Synthetic oligonucleotide
gaccacaggggccaaggac

SEQ ID NO: 3217449 - RNA, 19 nt, Artificial Sequence
  Description of Artificial Sequence: Synthetic oligonucleotide
cagaacucgcacgcgaagg

SEQ ID NO: 3217450 - RNA, 19 nt, Artificial Sequence
  Description of Artificial Sequence: Synthetic oligonucleotide
uucuccgacuucuucuccu

SEQ ID NO: 3217451 - RNA, 19 nt, Artificial Sequence
  Description of Artificial Sequence: Synthetic oligonucleotide
acuggugggaaaagagggg

SEQ ID NO: 3217452 - RNA, 19 nt, Artificial Sequence
  Description of Artificial Sequence: Synthetic oligonucleotide
uucuucuccuuuugcuuga

SEQ ID NO: 3217453 - RNA, 19 nt, Artificial Sequence
  Description of Artificial Sequence: Synthetic oligonucleotide
uggaucuuggcguggcgcu

SEQ ID NO: 3217454 - RNA, 19 nt, Artificial Sequence
  Description of Artificial Sequence: Synthetic oligonucleotide
caguggcuagcuuuccccg

SEQ ID NO: 3217455 - RNA, 19 nt, Artificial Sequence
  Description of Artificial Sequence: Synthetic oligonucleotide
ggaaaagaggggaucuggg

SEQ ID NO: 3217456 - RNA, 19 nt, Artificial Sequence
  Description of Artificial Sequence: Synthetic oligonucleotide
gaaaagaggggaucugggu

SEQ ID NO: 3217457 - RNA, 19 nt, Artificial Sequence
  Description of Artificial Sequence: Synthetic oligonucleotide
uuuccccgcugcuuucagg

SEQ ID NO: 3217458 - RNA, 19 nt, Artificial Sequence
  Description of Artificial Sequence: Synthetic oligonucleotide
uccagcccuagccccaacc

SEQ ID NO: 3217459 - RNA, 19 nt, Artificial Sequence
  Description of Artificial Sequence: Synthetic oligonucleotide
gcgccgaggaugcagaggg

SEQ ID NO: 3217460 - RNA, 19 nt, Artificial Sequence
  Description of Artificial Sequence: Synthetic oligonucleotide
aagugccuccagcccuagc

SEQ ID NO: 3217461 - RNA, 19 nt, Artificial Sequence
  Description of Artificial Sequence: Synthetic oligonucleotide
gaggggaucugggugcccg

SEQ ID NO: 3217462 - RNA, 19 nt, Artificial Sequence
  Description of Artificial Sequence: Synthetic oligonucleotide
aaggacacggugggcgccg

SEQ ID NO: 3217463 - RNA, 19 nt, Artificial Sequence
  Description of Artificial Sequence: Synthetic oligonucleotide
accacaggggccaaggaca

SEQ ID NO: 3217464 - RNA, 19 nt, Artificial Sequence
  Description of Artificial Sequence: Synthetic oligonucleotide
gacuucuucuccuuuugcu

SEQ ID NO: 3217465 - RNA, 19 nt, Artificial Sequence
  Description of Artificial Sequence: Synthetic oligonucleotide
gggaaaagaggggaucugg

SEQ ID NO: 3217466 - RNA, 19 nt, Artificial Sequence
  Description of Artificial Sequence: Synthetic oligonucleotide
gggccguacguccaggacg

SEQ ID NO: 3217467 - RNA, 19 nt, Artificial Sequence
  Description of Artificial Sequence: Synthetic oligonucleotide
uccuuuugcuugaggugga

SEQ ID NO: 3217468 - RNA, 19 nt, Artificial Sequence
  Description of Artificial Sequence: Synthetic oligonucleotide
uugcuugagguggaucuug

SEQ ID NO: 3217469 - RNA, 19 nt, Artificial Sequence
  Description of Artificial Sequence: Synthetic oligonucleotide
cucaguggcuagcuuuccc

SEQ ID NO: 3217470 - RNA, 19 nt, Artificial Sequence
  Description of Artificial Sequence: Synthetic oligonucleotide
aacucgcacgcgaagggcu

SEQ ID NO: 3217471 - RNA, 19 nt, Artificial Sequence
  Description of Artificial Sequence: Synthetic oligonucleotide
aucugggugcccgagccuc

SEQ ID NO: 3217472 - RNA, 19 nt, Artificial Sequence
  Description of Artificial Sequence: Synthetic oligonucleotide
aucgaaggggaggcaaggg

SEQ ID NO: 3217473 - RNA, 19 nt, Artificial Sequence
  Description of Artificial Sequence: Synthetic oligonucleotide
gugaccacaggggccaagg

SEQ ID NO: 3217474 - RNA, 19 nt, Artificial Sequence
  Description of Artificial Sequence: Synthetic oligonucleotide
uuggcguggcgcuugcgcu

SEQ ID NO: 3217475 - RNA, 19 nt, Artificial Sequence
  Description of Artificial Sequence: Synthetic oligonucleotide
caucgaaggggaggcaagg

SEQ ID NO: 3217476 - RNA, 19 nt, Artificial Sequence
  Description of Artificial Sequence: Synthetic oligonucleotide
agguggaucuuggcguggc

SEQ ID NO: 3217477 - RNA, 19 nt, Artificial Sequence
  Description of Artificial Sequence: Synthetic oligonucleotide
gacacggugggcgccgagg

SEQ ID NO: 3217478 - RNA, 19 nt, Artificial Sequence
  Description of Artificial Sequence: Synthetic oligonucleotide
ugcgcgcaaacuugcgccc

SEQ ID NO: 3217479 - RNA, 19 nt, Artificial Sequence
  Description of Artificial Sequence: Synthetic oligonucleotide
ggaucugggugcccgagcc

SEQ ID NO: 3217480 - RNA, 19 nt, Artificial Sequence
  Description of Artificial Sequence: Synthetic oligonucleotide
  modified_base (7)..(7): a, c, u, g, unknown or other
gcaaggngaaagugccucc

SEQ ID NO: 3217481 - RNA, 19 nt, Artificial Sequence
  Description of Artificial Sequence: Synthetic oligonucleotide
cuucuccuuuugcuugagg

SEQ ID NO: 3217482 - RNA, 19 nt, Artificial Sequence
  Description of Artificial Sequence: Synthetic oligonucleotide
gagaccagggcgcggcccc

SEQ ID NO: 3217483 - RNA, 19 nt, Artificial Sequence
  Description of Artificial Sequence: Synthetic oligonucleotide
ucaggcgcaaguggugacc

SEQ ID NO: 3217484 - RNA, 19 nt, Artificial Sequence
  Description of Artificial Sequence: Synthetic oligonucleotide
agccccaaccaucggccgg

SEQ ID NO: 3217485 - RNA, 19 nt, Artificial Sequence
  Description of Artificial Sequence: Synthetic oligonucleotide
cugcuuucaggcgaccagc

SEQ ID NO: 3217486 - RNA, 19 nt, Artificial Sequence
  Description of Artificial Sequence: Synthetic oligonucleotide
gacgagaccagggcgcggc

SEQ ID NO: 3217487 - RNA, 19 nt, Artificial Sequence
  Description of Artificial Sequence: Synthetic oligonucleotide
aucuuggcguggcgcuugc

SEQ ID NO: 3217488 - RNA, 19 nt, Artificial Sequence
  Description of Artificial Sequence: Synthetic oligonucleotide
uagcuuuccccgcugcuuu

SEQ ID NO: 3217489 - RNA, 19 nt, Artificial Sequence
  Description of Artificial Sequence: Synthetic oligonucleotide
agcccuagccccaaccauc

SEQ ID NO: 3217490 - RNA, 19 nt, Artificial Sequence
  Description of Artificial Sequence: Synthetic oligonucleotide
ugggaaaagaggggaucug

SEQ ID NO: 3217491 - RNA, 19 nt, Artificial Sequence
  Description of Artificial Sequence: Synthetic oligonucleotide
auugauuacauucauaggg

SEQ ID NO: 3217492 - RNA, 19 nt, Artificial Sequence
  Description of Artificial Sequence: Synthetic oligonucleotide
auugauuacauacauacgg

SEQ ID NO: 3217493 - RNA, 19 nt, Artificial Sequence
  Description of Artificial Sequence: Synthetic oligonucleotide
acauugauuacauacauac

SEQ ID NO: 3217494 - RNA, 19 nt, Artificial Sequence
  Description of Artificial Sequence: Synthetic oligonucleotide
ucuuuuauguacuugaagc

SEQ ID NO: 3217495 - RNA, 19 nt, Artificial Sequence
  Description of Artificial Sequence: Synthetic oligonucleotide
acauugauuacauucauag

SEQ ID NO: 3217496 - RNA, 19 nt, Artificial Sequence
  Description of Artificial Sequence: Synthetic oligonucleotide
uuuguucucagcaaaagcu

SEQ ID NO: 3217497 - RNA, 19 nt, Artificial Sequence
  Description of Artificial Sequence: Synthetic oligonucleotide
auuacauacauacgguuuc

SEQ ID NO: 3217498 - RNA, 19 nt, Artificial Sequence
  Description of Artificial Sequence: Synthetic oligonucleotide
uauguagucuuuuauguug

SEQ ID NO: 3217499 - RNA, 19 nt, Artificial Sequence
  Description of Artificial Sequence: Synthetic oligonucleotide
uguaguagauuacuggacc

SEQ ID NO: 3217500 - RNA, 19 nt, Artificial Sequence
  Description of Artificial Sequence: Synthetic oligonucleotide
auacauacgguuucucucc

SEQ ID NO: 3217501 - RNA, 19 nt, Artificial Sequence
  Description of Artificial Sequence: Synthetic oligonucleotide
uguucuuuuauguacuuga

SEQ ID NO: 3217502 - RNA, 19 nt, Artificial Sequence
  Description of Artificial Sequence: Synthetic oligonucleotide
uuuuauguuguguaguaga

SEQ ID NO: 3217503 - RNA, 19 nt, Artificial Sequence
  Description of Artificial Sequence: Synthetic oligonucleotide
agcuuuaccacauugauua

SEQ ID NO: 3217504 - RNA, 19 nt, Artificial Sequence
  Description of Artificial Sequence: Synthetic oligonucleotide
uuguguaguagauuacugg

SEQ ID NO: 3217505 - RNA, 19 nt, Artificial Sequence
  Description of Artificial Sequence: Synthetic oligonucleotide
aguauguagucuuuuaugu

SEQ ID NO: 3217506 - RNA, 19 nt, Artificial Sequence
  Description of Artificial Sequence: Synthetic oligonucleotide
uauguuguguaguagauua

SEQ ID NO: 3217507 - RNA, 19 nt, Artificial Sequence
  Description of Artificial Sequence: Synthetic oligonucleotide
uuuauguacuugaagcuga

SEQ ID NO: 3217508 - RNA, 19 nt, Artificial Sequence
  Description of Artificial Sequence: Synthetic oligonucleotide
aaaaggcuuuaccacauug

SEQ ID NO: 3217509 - RNA, 19 nt, Artificial Sequence
  Description of Artificial Sequence: Synthetic oligonucleotide
uauguguucuuuuauguac

SEQ ID NO: 3217510 - RNA, 19 nt, Artificial Sequence
  Description of Artificial Sequence: Synthetic oligonucleotide
uaccacauugauuacauac

SEQ ID NO: 3217511 - RNA, 19 nt, Artificial Sequence
  Description of Artificial Sequence: Synthetic oligonucleotide
uuuuguucucagcaaaagc

SEQ ID NO: 3217512 - RNA, 19 nt, Artificial Sequence
  Description of Artificial Sequence: Synthetic oligonucleotide
uguguaguagauuacugga

SEQ ID NO: 3217513 - RNA, 19 nt, Artificial Sequence
  Description of Artificial Sequence: Synthetic oligonucleotide
ugugaaaaggcuuuaccac

SEQ ID NO: 3217514 - RNA, 19 nt, Artificial Sequence
  Description of Artificial Sequence: Synthetic oligonucleotide
aaagcuuuaccacauugau

SEQ ID NO: 3217515 - RNA, 19 nt, Artificial Sequence
  Description of Artificial Sequence: Synthetic oligonucleotide
auuacauucauaggguuuc

SEQ ID NO: 3217516 - RNA, 19 nt, Artificial Sequence
  Description of Artificial Sequence: Synthetic oligonucleotide
uucuuuuauguacuugaag

SEQ ID NO: 3217517 - RNA, 19 nt, Artificial Sequence
  Description of Artificial Sequence: Synthetic oligonucleotide
uugauuacauucauagggu

SEQ ID NO: 3217518 - RNA, 19 nt, Artificial Sequence
  Description of Artificial Sequence: Synthetic oligonucleotide
uaccacauugauuacauuc

SEQ ID NO: 3217519 - RNA, 19 nt, Artificial Sequence
  Description of Artificial Sequence: Synthetic oligonucleotide
auucauaggguuucgucuc

SEQ ID NO: 3217520 - RNA, 19 nt, Artificial Sequence
  Description of Artificial Sequence: Synthetic oligonucleotide
uuuuauguacuugaagcug

SEQ ID NO: 3217521 - RNA, 19 nt, Artificial Sequence
  Description of Artificial Sequence: Synthetic oligonucleotide
ucagcaaaagcuuuaccac

SEQ ID NO: 3217522 - RNA, 19 nt, Artificial Sequence
  Description of Artificial Sequence: Synthetic oligonucleotide
uuuaccacauugauuacau

SEQ ID NO: 3217523 - RNA, 19 nt, Artificial Sequence
  Description of Artificial Sequence: Synthetic oligonucleotide
uugauuacauacauacggu

SEQ ID NO: 3217524 - RNA, 19 nt, Artificial Sequence
  Description of Artificial Sequence: Synthetic oligonucleotide
acauucauaggguuucguc

SEQ ID NO: 3217525 - RNA, 19 nt, Artificial Sequence
  Description of Artificial Sequence: Synthetic oligonucleotide
uucgucuccaguauguagu

SEQ ID NO: 3217526 - RNA, 19 nt, Artificial Sequence
  Description of Artificial Sequence: Synthetic oligonucleotide
uuuauguuguguaguagau

SEQ ID NO: 3217527 - RNA, 19 nt, Artificial Sequence
  Description of Artificial Sequence: Synthetic oligonucleotide
cauugauuacauacauacg

SEQ ID NO: 3217528 - RNA, 19 nt, Artificial Sequence
  Description of Artificial Sequence: Synthetic oligonucleotide
cucagcaaaagcuuuacca

SEQ ID NO: 3217529 - RNA, 19 nt, Artificial Sequence
  Description of Artificial Sequence: Synthetic oligonucleotide
cauugauuacauucauagg

SEQ ID NO: 3217530 - RNA, 19 nt, Artificial Sequence
  Description of Artificial Sequence: Synthetic oligonucleotide
uacuggaccugugaaaagg

SEQ ID NO: 3217531 - RNA, 19 nt, Artificial Sequence
  Description of Artificial Sequence: Synthetic oligonucleotide
aaggcuuuaccacauugau

SEQ ID NO: 3217532 - RNA, 19 nt, Artificial Sequence
  Description of Artificial Sequence: Synthetic oligonucleotide
aaaagcuuuaccacauuga

SEQ ID NO: 3217533 - RNA, 19 nt, Artificial Sequence
  Description of Artificial Sequence: Synthetic oligonucleotide
cauacauacgguuucucuc

SEQ ID NO: 3217534 - RNA, 19 nt, Artificial Sequence
  Description of Artificial Sequence: Synthetic oligonucleotide
agucuuuuauguuguguag

SEQ ID NO: 3217535 - RNA, 19 nt, Artificial Sequence
  Description of Artificial Sequence: Synthetic oligonucleotide
uagauuacuggaccuguga

SEQ ID NO: 3217536 - RNA, 19 nt, Artificial Sequence
  Description of Artificial Sequence: Synthetic oligonucleotide
caaaagcuuuaccacauug

SEQ ID NO: 3217537 - RNA, 19 nt, Artificial Sequence
  Description of Artificial Sequence: Synthetic oligonucleotide
uagucuuuuauguugugua

SEQ ID NO: 3217538 - RNA, 19 nt, Artificial Sequence
  Description of Artificial Sequence: Synthetic oligonucleotide
uuucgucuccaguauguag

SEQ ID NO: 3217539 - RNA, 19 nt, Artificial Sequence
  Description of Artificial Sequence: Synthetic oligonucleotide
caguauguagucuuuuaug

SEQ ID NO: 3217540 - RNA, 19 nt, Artificial Sequence
  Description of Artificial Sequence: Synthetic oligonucleotide
ucuuuuauguuguguagua

SEQ ID NO: 3217541 - RNA, 19 nt, Artificial Sequence
  Description of Artificial Sequence: Synthetic oligonucleotide
ggcuuuaccacauugauua

SEQ ID NO: 3217542 - RNA, 19 nt, Artificial Sequence
  Description of Artificial Sequence: Synthetic oligonucleotide
ugaaaaggcuuuaccacau

SEQ ID NO: 3217543 - RNA, 19 nt, Artificial Sequence
  Description of Artificial Sequence: Synthetic oligonucleotide
acauacauacgguuucucu

SEQ ID NO: 3217544 - RNA, 19 nt, Artificial Sequence
  Description of Artificial Sequence: Synthetic oligonucleotide
uguuguguaguagauuacu

SEQ ID NO: 3217545 - RNA, 19 nt, Artificial Sequence
  Description of Artificial Sequence: Synthetic oligonucleotide
uacauacgguuucucuccg

SEQ ID NO: 3217546 - RNA, 19 nt, Artificial Sequence
  Description of Artificial Sequence: Synthetic oligonucleotide
cugugaaaaggcuuuacca

SEQ ID NO: 3217547 - RNA, 19 nt, Artificial Sequence
  Description of Artificial Sequence: Synthetic oligonucleotide
auuacuggaccugugaaaa

SEQ ID NO: 3217548 - RNA, 19 nt, Artificial Sequence
  Description of Artificial Sequence: Synthetic oligonucleotide
aaaggcuuuaccacauuga

SEQ ID NO: 3217549 - RNA, 19 nt, Artificial Sequence
  Description of Artificial Sequence: Synthetic oligonucleotide
ugauuacauacauacgguu

SEQ ID NO: 3217550 - RNA, 19 nt, Artificial Sequence
  Description of Artificial Sequence: Synthetic oligonucleotide
uacgguuucucuccgguau

SEQ ID NO: 3217551 - RNA, 19 nt, Artificial Sequence
  Description of Artificial Sequence: Synthetic oligonucleotide
gugaaaaggcuuuaccaca

SEQ ID NO: 3217552 - RNA, 19 nt, Artificial Sequence
  Description of Artificial Sequence: Synthetic oligonucleotide
uuucucuccgguauguguu

SEQ ID NO: 3217553 - RNA, 19 nt, Artificial Sequence
  Description of Artificial Sequence: Synthetic oligonucleotide
uaggguuucgucuccagua

SEQ ID NO: 3217554 - RNA, 19 nt, Artificial Sequence
  Description of Artificial Sequence: Synthetic oligonucleotide
acuggaccugugaaaaggc

SEQ ID NO: 3217555 - RNA, 19 nt, Artificial Sequence
  Description of Artificial Sequence: Synthetic oligonucleotide
ucucagcaaaagcuuuacc

SEQ ID NO: 3217556 - RNA, 19 nt, Artificial Sequence
  Description of Artificial Sequence: Synthetic oligonucleotide
uuguucucagcaaaagcuu

SEQ ID NO: 3217557 - RNA, 19 nt, Artificial Sequence
  Description of Artificial Sequence: Synthetic oligonucleotide
uuauguacuugaagcugac

SEQ ID NO: 3217558 - RNA, 19 nt, Artificial Sequence
  Description of Artificial Sequence: Synthetic oligonucleotide
uguucucagcaaaagcuuu

SEQ ID NO: 3217559 - RNA, 19 nt, Artificial Sequence
  Description of Artificial Sequence: Synthetic oligonucleotide
uucauaggguuucgucucc

SEQ ID NO: 3217560 - RNA, 19 nt, Artificial Sequence
  Description of Artificial Sequence: Synthetic oligonucleotide
gauuacuggaccugugaaa

SEQ ID NO: 3217561 - RNA, 19 nt, Artificial Sequence
  Description of Artificial Sequence: Synthetic oligonucleotide
agauuacuggaccugugaa

SEQ ID NO: 3217562 - RNA, 19 nt, Artificial Sequence
  Description of Artificial Sequence: Synthetic oligonucleotide
cuuuuauguuguguaguag

SEQ ID NO: 3217563 - RNA, 19 nt, Artificial Sequence
  Description of Artificial Sequence: Synthetic oligonucleotide
ugauuacauucauaggguu

SEQ ID NO: 3217564 - RNA, 19 nt, Artificial Sequence
  Description of Artificial Sequence: Synthetic oligonucleotide
guuguguaguagauuacug

SEQ ID NO: 3217565 - RNA, 19 nt, Artificial Sequence
  Description of Artificial Sequence: Synthetic oligonucleotide
uuacauucauaggguuucg

SEQ ID NO: 3217566 - RNA, 19 nt, Artificial Sequence
  Description of Artificial Sequence: Synthetic oligonucleotide
accacauugauuacauuca

SEQ ID NO: 3217567 - RNA, 19 nt, Artificial Sequence
  Description of Artificial Sequence: Synthetic oligonucleotide
uuacuggaccugugaaaag

SEQ ID NO: 3217568 - RNA, 19 nt, Artificial Sequence
  Description of Artificial Sequence: Synthetic oligonucleotide
uaguagauuacuggaccug

SEQ ID NO: 3217569 - RNA, 19 nt, Artificial Sequence
  Description of Artificial Sequence: Synthetic oligonucleotide
aguagauuacuggaccugu

SEQ ID NO: 3217570 - RNA, 19 nt, Artificial Sequence
  Description of Artificial Sequence: Synthetic oligonucleotide
cuuuuauguacuugaagcu

SEQ ID NO: 3217571 - RNA, 19 nt, Artificial Sequence
  Description of Artificial Sequence: Synthetic oligonucleotide
uguagucuuuuauguugug

SEQ ID NO: 3217572 - RNA, 19 nt, Artificial Sequence
  Description of Artificial Sequence: Synthetic oligonucleotide
uggaccugugaaaaggcuu

SEQ ID NO: 3217573 - RNA, 19 nt, Artificial Sequence
  Description of Artificial Sequence: Synthetic oligonucleotide
accacauugauuacauaca

SEQ ID NO: 3217574 - RNA, 19 nt, Artificial Sequence
  Description of Artificial Sequence: Synthetic oligonucleotide
uuacauacauacgguuucu

SEQ ID NO: 3217575 - RNA, 19 nt, Artificial Sequence
  Description of Artificial Sequence: Synthetic oligonucleotide
cauucauaggguuucgucu

SEQ ID NO: 3217576 - RNA, 19 nt, Artificial Sequence
  Description of Artificial Sequence: Synthetic oligonucleotide
uccaguauguagucuuuua

SEQ ID NO: 3217577 - RNA, 19 nt, Artificial Sequence
  Description of Artificial Sequence: Synthetic oligonucleotide
auaggguuucgucuccagu

SEQ ID NO: 3217578 - RNA, 19 nt, Artificial Sequence
  Description of Artificial Sequence: Synthetic oligonucleotide
acauacgguuucucuccgg

SEQ ID NO: 3217579 - RNA, 19 nt, Artificial Sequence
  Description of Artificial Sequence: Synthetic oligonucleotide
uucucagcaaaagcuuuac

SEQ ID NO: 3217580 - RNA, 19 nt, Artificial Sequence
  Description of Artificial Sequence: Synthetic oligonucleotide
uccgguauguguucuuuua

SEQ ID NO: 3217581 - RNA, 19 nt, Artificial Sequence
  Description of Artificial Sequence: Synthetic oligonucleotide
cagcaaaagcuuuaccaca

SEQ ID NO: 3217582 - RNA, 19 nt, Artificial Sequence
  Description of Artificial Sequence: Synthetic oligonucleotide
auguuguguaguagauuac

SEQ ID NO: 3217583 - RNA, 19 nt, Artificial Sequence
  Description of Artificial Sequence: Synthetic oligonucleotide
accugugaaaaggcuuuac

SEQ ID NO: 3217584 - RNA, 19 nt, Artificial Sequence
  Description of Artificial Sequence: Synthetic oligonucleotide
ccugugaaaaggcuuuacc

SEQ ID NO: 3217585 - RNA, 19 nt, Artificial Sequence
  Description of Artificial Sequence: Synthetic oligonucleotide
uguguucuuuuauguacuu

SEQ ID NO: 3217586 - RNA, 19 nt, Artificial Sequence
  Description of Artificial Sequence: Synthetic oligonucleotide
guguaguagauuacuggac

SEQ ID NO: 3217587 - RNA, 19 nt, Artificial Sequence
  Description of Artificial Sequence: Synthetic oligonucleotide
auguguucuuuuauguacu

SEQ ID NO: 3217588 - RNA, 19 nt, Artificial Sequence
  Description of Artificial Sequence: Synthetic oligonucleotide
uuauguuguguaguagauu

SEQ ID NO: 3217589 - RNA, 19 nt, Artificial Sequence
  Description of Artificial Sequence: Synthetic oligonucleotide
auguagucuuuuauguugu

SEQ ID NO: 3217590 - RNA, 19 nt, Artificial Sequence
  Description of Artificial Sequence: Synthetic oligonucleotide
guauguguucuuuuaugua

SEQ ID NO: 3217591 - RNA, 19 nt, Artificial Sequence
  Description of Artificial Sequence: Synthetic oligonucleotide
aauuaaugugcuuuaacuc

SEQ ID NO: 3217592 - RNA, 19 nt, Artificial Sequence
  Description of Artificial Sequence: Synthetic oligonucleotide
agaaagaucuuucaggugg

SEQ ID NO: 3217593 - RNA, 19 nt, Artificial Sequence
  Description of Artificial Sequence: Synthetic oligonucleotide
aaauuaaugugcuuuaacu

SEQ ID NO: 3217594 - RNA, 19 nt, Artificial Sequence
  Description of Artificial Sequence: Synthetic oligonucleotide
uguagaaagaucuuucagg

SEQ ID NO: 3217595 - RNA, 19 nt, Artificial Sequence
  Description of Artificial Sequence: Synthetic oligonucleotide
cuaaaggugaacaaccugg

SEQ ID NO: 3217596 - RNA, 19 nt, Artificial Sequence
  Description of Artificial Sequence: Synthetic oligonucleotide
uuucuuuuagaagauaagg

SEQ ID NO: 3217597 - RNA, 19 nt, Artificial Sequence
  Description of Artificial Sequence: Synthetic oligonucleotide
ugugcuuuaacucuuccag

SEQ ID NO: 3217598 - RNA, 19 nt, Artificial Sequence
  Description of Artificial Sequence: Synthetic oligonucleotide
aaaagcugcuaaaauacgc

SEQ ID NO: 3217599 - RNA, 19 nt, Artificial Sequence
  Description of Artificial Sequence: Synthetic oligonucleotide
uagaagauaagguauauuc

SEQ ID NO: 3217600 - RNA, 19 nt, Artificial Sequence
  Description of Artificial Sequence: Synthetic oligonucleotide
aacucuuccagaucccugc

SEQ ID NO: 3217601 - RNA, 19 nt, Artificial Sequence
  Description of Artificial Sequence: Synthetic oligonucleotide
uauauuccugccuaaagag

SEQ ID NO: 3217602 - RNA, 19 nt, Artificial Sequence
  Description of Artificial Sequence: Synthetic oligonucleotide
ugcaucuuguuccagaaag

SEQ ID NO: 3217603 - RNA, 19 nt, Artificial Sequence
  Description of Artificial Sequence: Synthetic oligonucleotide
auuggaaucaccuggaccu

SEQ ID NO: 3217604 - RNA, 19 nt, Artificial Sequence
  Description of Artificial Sequence: Synthetic oligonucleotide
cuaaaauacgccagcaugg

SEQ ID NO: 3217605 - RNA, 19 nt, Artificial Sequence
  Description of Artificial Sequence: Synthetic oligonucleotide
agauaagguauauuccugc

SEQ ID NO: 3217606 - RNA, 19 nt, Artificial Sequence
  Description of Artificial Sequence: Synthetic oligonucleotide
aaagcugcuaaaauacgcc

SEQ ID NO: 3217607 - RNA, 19 nt, Artificial Sequence
  Description of Artificial Sequence: Synthetic oligonucleotide
auuaaugugcuuuaacucu

SEQ ID NO: 3217608 - RNA, 19 nt, Artificial Sequence
  Description of Artificial Sequence: Synthetic oligonucleotide
auaaugguuggcuguaacc

SEQ ID NO: 3217609 - RNA, 19 nt, Artificial Sequence
  Description of Artificial Sequence: Synthetic oligonucleotide
uaaagagcagcccaaaccu

SEQ ID NO: 3217610 - RNA, 19 nt, Artificial Sequence
  Description of Artificial Sequence: Synthetic oligonucleotide
ugcagguaaacccacauga

SEQ ID NO: 3217611 - RNA, 19 nt, Artificial Sequence
  Description of Artificial Sequence: Synthetic oligonucleotide
ucacuaaaggugaacaacc

SEQ ID NO: 3217612 - RNA, 19 nt, Artificial Sequence
  Description of Artificial Sequence: Synthetic oligonucleotide
uucuuuuagaagauaaggu

SEQ ID NO: 3217613 - RNA, 19 nt, Artificial Sequence
  Description of Artificial Sequence: Synthetic oligonucleotide
uuuucuuuuagaagauaag

SEQ ID NO: 3217614 - RNA, 19 nt, Artificial Sequence
  Description of Artificial Sequence: Synthetic oligonucleotide
augaguaagguuuucagga

SEQ ID NO: 3217615 - RNA, 19 nt, Artificial Sequence
  Description of Artificial Sequence: Synthetic oligonucleotide
uucaucugcagguaaaccc

SEQ ID NO: 3217616 - RNA, 19 nt, Artificial Sequence
  Description of Artificial Sequence: Synthetic oligonucleotide
aaugguuggcuguaacccg

SEQ ID NO: 3217617 - RNA, 19 nt, Artificial Sequence
  Description of Artificial Sequence: Synthetic oligonucleotide
agauggaacucacuaaagg

SEQ ID NO: 3217618 - RNA, 19 nt, Artificial Sequence
  Description of Artificial Sequence: Synthetic oligonucleotide
agggaagaaauuaaugugc

SEQ ID NO: 3217619 - RNA, 19 nt, Artificial Sequence
  Description of Artificial Sequence: Synthetic oligonucleotide
agaagauaagguauauucc

SEQ ID NO: 3217620 - RNA, 19 nt, Artificial Sequence
  Description of Artificial Sequence: Synthetic oligonucleotide
ucuuuuagaagauaaggua

SEQ ID NO: 3217621 - RNA, 19 nt, Artificial Sequence
  Description of Artificial Sequence: Synthetic oligonucleotide
uucagguggaccauguugc

SEQ ID NO: 3217622 - RNA, 19 nt, Artificial Sequence
  Description of Artificial Sequence: Synthetic oligonucleotide
cuaaagagcagcccaaacc

SEQ ID NO: 3217623 - RNA, 19 nt, Artificial Sequence
  Description of Artificial Sequence: Synthetic oligonucleotide
uaaaggugaacaaccuggg

SEQ ID NO: 3217624 - RNA, 19 nt, Artificial Sequence
  Description of Artificial Sequence: Synthetic oligonucleotide
uuucagguggaccauguug

SEQ ID NO: 3217625 - RNA, 19 nt, Artificial Sequence
  Description of Artificial Sequence: Synthetic oligonucleotide
guggauuggaaucaccugg

SEQ ID NO: 3217626 - RNA, 19 nt, Artificial Sequence
  Description of Artificial Sequence: Synthetic oligonucleotide
uuggcuguaacccggacca

SEQ ID NO: 3217627 - RNA, 19 nt, Artificial Sequence
  Description of Artificial Sequence: Synthetic oligonucleotide
aagagugguguccaggucu

SEQ ID NO: 3217628 - RNA, 19 nt, Artificial Sequence
  Description of Artificial Sequence: Synthetic oligonucleotide
agaucuuucagguggacca

SEQ ID NO: 3217629 - RNA, 19 nt, Artificial Sequence
  Description of Artificial Sequence: Synthetic oligonucleotide
aaauacgccagcauggucu

SEQ ID NO: 3217630 - RNA, 19 nt, Artificial Sequence
  Description of Artificial Sequence: Synthetic oligonucleotide
aagaucuuucagguggacc

SEQ ID NO: 3217631 - RNA, 19 nt, Artificial Sequence
  Description of Artificial Sequence: Synthetic oligonucleotide
uguuccagaaagcagcacu

SEQ ID NO: 3217632 - RNA, 19 nt, Artificial Sequence
  Description of Artificial Sequence: Synthetic oligonucleotide
gaaauuaaugugcuuuaac

SEQ ID NO: 3217633 - RNA, 19 nt, Artificial Sequence
  Description of Artificial Sequence: Synthetic oligonucleotide
agguggaccauguugcccc

SEQ ID NO: 3217634 - RNA, 19 nt, Artificial Sequence
  Description of Artificial Sequence: Synthetic oligonucleotide
caugaguaagguuuucagg

SEQ ID NO: 3217635 - RNA, 19 nt, Artificial Sequence
  Description of Artificial Sequence: Synthetic oligonucleotide
uaaacccacaugaguaagg

SEQ ID NO: 3217636 - RNA, 19 nt, Artificial Sequence
  Description of Artificial Sequence: Synthetic oligonucleotide
aaccucauggcuuguguag

SEQ ID NO: 3217637 - RNA, 19 nt, Artificial Sequence
  Description of Artificial Sequence: Synthetic oligonucleotide
uggaacucacuaaagguga

SEQ ID NO: 3217638 - RNA, 19 nt, Artificial Sequence
  Description of Artificial Sequence: Synthetic oligonucleotide
cacuucuuggaaaagcugc

SEQ ID NO: 3217639 - RNA, 19 nt, Artificial Sequence
  Description of Artificial Sequence: Synthetic oligonucleotide
gauaagguauauuccugcc

SEQ ID NO: 3217640 - RNA, 19 nt, Artificial Sequence
  Description of Artificial Sequence: Synthetic oligonucleotide
ugaacaaccugggagacug

SEQ ID NO: 3217641 - RNA, 19 nt, Artificial Sequence
  Description of Artificial Sequence: Synthetic oligonucleotide
uaaugguuggcuguaaccc

SEQ ID NO: 3217642 - RNA, 19 nt, Artificial Sequence
  Description of Artificial Sequence: Synthetic oligonucleotide
gaugcugagggaugugucg

SEQ ID NO: 3217643 - RNA, 19 nt, Artificial Sequence
  Description of Artificial Sequence: Synthetic oligonucleotide
caccuuaugcagcagaugc

SEQ ID NO: 3217644 - RNA, 19 nt, Artificial Sequence
  Description of Artificial Sequence: Synthetic oligonucleotide
gauuggaaucaccuggacc

SEQ ID NO: 3217645 - RNA, 19 nt, Artificial Sequence
  Description of Artificial Sequence: Synthetic oligonucleotide
uaagguauauuccugccua

SEQ ID NO: 3217646 - RNA, 19 nt, Artificial Sequence
  Description of Artificial Sequence: Synthetic oligonucleotide
ucaucugcagguaaaccca

SEQ ID NO: 3217647 - RNA, 19 nt, Artificial Sequence
  Description of Artificial Sequence: Synthetic oligonucleotide
ucauggcuuguguagaaag

SEQ ID NO: 3217648 - RNA, 19 nt, Artificial Sequence
  Description of Artificial Sequence: Synthetic oligonucleotide
cuugcuguucaucugcagg

SEQ ID NO: 3217649 - RNA, 19 nt, Artificial Sequence
  Description of Artificial Sequence: Synthetic oligonucleotide
uguguagaaagaucuuuca

SEQ ID NO: 3217650 - RNA, 19 nt, Artificial Sequence
  Description of Artificial Sequence: Synthetic oligonucleotide
gaagauaagguauauuccu

SEQ ID NO: 3217651 - RNA, 19 nt, Artificial Sequence
  Description of Artificial Sequence: Synthetic oligonucleotide
aauacgccagcauggucuc

SEQ ID NO: 3217652 - RNA, 19 nt, Artificial Sequence
  Description of Artificial Sequence: Synthetic oligonucleotide
uggaaaagcugcuaaaaua

SEQ ID NO: 3217653 - RNA, 19 nt, Artificial Sequence
  Description of Artificial Sequence: Synthetic oligonucleotide
acugcagcaccuuaugcag

SEQ ID NO: 3217654 - RNA, 19 nt, Artificial Sequence
  Description of Artificial Sequence: Synthetic oligonucleotide
aucaccuggaccuugcugu

SEQ ID NO: 3217655 - RNA, 19 nt, Artificial Sequence
  Description of Artificial Sequence: Synthetic oligonucleotide
ugaguaagguuuucaggag

SEQ ID NO: 3217656 - RNA, 19 nt, Artificial Sequence
  Description of Artificial Sequence: Synthetic oligonucleotide
gaaaagcugcuaaaauacg

SEQ ID NO: 3217657 - RNA, 19 nt, Artificial Sequence
  Description of Artificial Sequence: Synthetic oligonucleotide
aacucacuaaaggugaaca

SEQ ID NO: 3217658 - RNA, 19 nt, Artificial Sequence
  Description of Artificial Sequence: Synthetic oligonucleotide
uuguguagaaagaucuuuc

SEQ ID NO: 3217659 - RNA, 19 nt, Artificial Sequence
  Description of Artificial Sequence: Synthetic oligonucleotide
aagcugcuaaaauacgcca

SEQ ID NO: 3217660 - RNA, 19 nt, Artificial Sequence
  Description of Artificial Sequence: Synthetic oligonucleotide
gcuaaaauacgccagcaug

SEQ ID NO: 3217661 - RNA, 19 nt, Artificial Sequence
  Description of Artificial Sequence: Synthetic oligonucleotide
acuaaaggugaacaaccug

SEQ ID NO: 3217662 - RNA, 19 nt, Artificial Sequence
  Description of Artificial Sequence: Synthetic oligonucleotide
augccaugcagacguaggc

SEQ ID NO: 3217663 - RNA, 19 nt, Artificial Sequence
  Description of Artificial Sequence: Synthetic oligonucleotide
uuuaacucuuccagauccc

SEQ ID NO: 3217664 - RNA, 19 nt, Artificial Sequence
  Description of Artificial Sequence: Synthetic oligonucleotide
agaaagcagcacuucuugg

SEQ ID NO: 3217665 - RNA, 19 nt, Artificial Sequence
  Description of Artificial Sequence: Synthetic oligonucleotide
uuaugcagcagaugcugag

SEQ ID NO: 3217666 - RNA, 19 nt, Artificial Sequence
  Description of Artificial Sequence: Synthetic oligonucleotide
guauauuccugccuaaaga

SEQ ID NO: 3217667 - RNA, 19 nt, Artificial Sequence
  Description of Artificial Sequence: Synthetic oligonucleotide
aaucaccuggaccuugcug

SEQ ID NO: 3217668 - RNA, 19 nt, Artificial Sequence
  Description of Artificial Sequence: Synthetic oligonucleotide
gaaagcagcacuucuugga

SEQ ID NO: 3217669 - RNA, 19 nt, Artificial Sequence
  Description of Artificial Sequence: Synthetic oligonucleotide
aagauaagguauauuccug

SEQ ID NO: 3217670 - RNA, 19 nt, Artificial Sequence
  Description of Artificial Sequence: Synthetic oligonucleotide
ucguggauuggaaucaccu

SEQ ID NO: 3217671 - RNA, 19 nt, Artificial Sequence
  Description of Artificial Sequence: Synthetic oligonucleotide
agacugcagcaccuuaugc

SEQ ID NO: 3217672 - RNA, 19 nt, Artificial Sequence
  Description of Artificial Sequence: Synthetic oligonucleotide
cucagggaagaaauuaaug

SEQ ID NO: 3217673 - RNA, 19 nt, Artificial Sequence
  Description of Artificial Sequence: Synthetic oligonucleotide
auauuccugccuaaagagc

SEQ ID NO: 3217674 - RNA, 19 nt, Artificial Sequence
  Description of Artificial Sequence: Synthetic oligonucleotide
cagugcgugauaaugguug

SEQ ID NO: 3217675 - RNA, 19 nt, Artificial Sequence
  Description of Artificial Sequence: Synthetic oligonucleotide
gauggaacucacuaaaggu

SEQ ID NO: 3217676 - RNA, 19 nt, Artificial Sequence
  Description of Artificial Sequence: Synthetic oligonucleotide
guguagaaagaucuuucag

SEQ ID NO: 3217677 - RNA, 19 nt, Artificial Sequence
  Description of Artificial Sequence: Synthetic oligonucleotide
uuggaaaagcugcuaaaau

SEQ ID NO: 3217678 - RNA, 19 nt, Artificial Sequence
  Description of Artificial Sequence: Synthetic oligonucleotide
ugagggaugugucggaggu

SEQ ID NO: 3217679 - RNA, 19 nt, Artificial Sequence
  Description of Artificial Sequence: Synthetic oligonucleotide
auaagguauauuccugccu

SEQ ID NO: 3217680 - RNA, 19 nt, Artificial Sequence
  Description of Artificial Sequence: Synthetic oligonucleotide
ugcuuuaacucuuccagau

SEQ ID NO: 3217681 - RNA, 19 nt, Artificial Sequence
  Description of Artificial Sequence: Synthetic oligonucleotide
uggaccuugcuguucaucu

SEQ ID NO: 3217682 - RNA, 19 nt, Artificial Sequence
  Description of Artificial Sequence: Synthetic oligonucleotide
ggaaaagcugcuaaaauac

SEQ ID NO: 3217683 - RNA, 19 nt, Artificial Sequence
  Description of Artificial Sequence: Synthetic oligonucleotide
uucuuggaaaagcugcuaa

SEQ ID NO: 3217684 - RNA, 19 nt, Artificial Sequence
  Description of Artificial Sequence: Synthetic oligonucleotide
ucuuccagaucccugccac

SEQ ID NO: 3217685 - RNA, 19 nt, Artificial Sequence
  Description of Artificial Sequence: Synthetic oligonucleotide
accauguugccccacucuc

SEQ ID NO: 3217686 - RNA, 19 nt, Artificial Sequence
  Description of Artificial Sequence: Synthetic oligonucleotide
uuaaugugcuuuaacucuu

SEQ ID NO: 3217687 - RNA, 19 nt, Artificial Sequence
  Description of Artificial Sequence: Synthetic oligonucleotide
gauaaugguuggcuguaac

SEQ ID NO: 3217688 - RNA, 19 nt, Artificial Sequence
  Description of Artificial Sequence: Synthetic oligonucleotide
uccagaaagcagcacuucu

SEQ ID NO: 3217689 - RNA, 19 nt, Artificial Sequence
  Description of Artificial Sequence: Synthetic oligonucleotide
agugcgugauaaugguugg

SEQ ID NO: 3217690 - RNA, 19 nt, Artificial Sequence
  Description of Artificial Sequence: Synthetic oligonucleotide
aaaggugaacaaccuggga

SEQ ID NO: 3217691 - RNA, 19 nt, Artificial Sequence
  Description of Artificial Sequence: Synthetic oligonucleotide
uuaauaaccaaacugaagg

SEQ ID NO: 3217692 - RNA, 19 nt, Artificial Sequence
  Description of Artificial Sequence: Synthetic oligonucleotide
aaagaauuuagguggcucc

SEQ ID NO: 3217693 - RNA, 19 nt, Artificial Sequence
  Description of Artificial Sequence: Synthetic oligonucleotide
aaauuaagccaaaauagcc

SEQ ID NO: 3217694 - RNA, 19 nt, Artificial Sequence
  Description of Artificial Sequence: Synthetic oligonucleotide
ucaacuauccucuugaaug

SEQ ID NO: 3217695 - RNA, 19 nt, Artificial Sequence
  Description of Artificial Sequence: Synthetic oligonucleotide
uucauuucaccucugaagg

SEQ ID NO: 3217696 - RNA, 19 nt, Artificial Sequence
  Description of Artificial Sequence: Synthetic oligonucleotide
agaucuucaggccugaacc

SEQ ID NO: 3217697 - RNA, 19 nt, Artificial Sequence
  Description of Artificial Sequence: Synthetic oligonucleotide
aagauuguagugugaaacc

SEQ ID NO: 3217698 - RNA, 19 nt, Artificial Sequence
  Description of Artificial Sequence: Synthetic oligonucleotide
uuaacaaaagaauuuaggu

SEQ ID NO: 3217699 - RNA, 19 nt, Artificial Sequence
  Description of Artificial Sequence: Synthetic oligonucleotide
aauaggacuuuguggaagc

SEQ ID NO: 3217700 - RNA, 19 nt, Artificial Sequence
  Description of Artificial Sequence: Synthetic oligonucleotide
aagaaaugcaugcaaaaug

SEQ ID NO: 3217701 - RNA, 19 nt, Artificial Sequence
  Description of Artificial Sequence: Synthetic oligonucleotide
aaucuuccuauuuguaugc

SEQ ID NO: 3217702 - RNA, 19 nt, Artificial Sequence
  Description of Artificial Sequence: Synthetic oligonucleotide
aaaacaaugcagcucuuuc

SEQ ID NO: 3217703 - RNA, 19 nt, Artificial Sequence
  Description of Artificial Sequence: Synthetic oligonucleotide
uccauaugcaaccaguagg

SEQ ID NO: 3217704 - RNA, 19 nt, Artificial Sequence
  Description of Artificial Sequence: Synthetic oligonucleotide
aggauguuuguccaggucc

SEQ ID NO: 3217705 - RNA, 19 nt, Artificial Sequence
  Description of Artificial Sequence: Synthetic oligonucleotide
uuugucuggcaacagauag

SEQ ID NO: 3217706 - RNA, 19 nt, Artificial Sequence
  Description of Artificial Sequence: Synthetic oligonucleotide
aaacugaacacuuccuuuc

SEQ ID NO: 3217707 - RNA, 19 nt, Artificial Sequence
  Description of Artificial Sequence: Synthetic oligonucleotide
uuugagauugagaaggaug

SEQ ID NO: 3217708 - RNA, 19 nt, Artificial Sequence
  Description of Artificial Sequence: Synthetic oligonucleotide
uucaaugucuuauuagagg

SEQ ID NO: 3217709 - RNA, 19 nt, Artificial Sequence
  Description of Artificial Sequence: Synthetic oligonucleotide
aaagcauuccuucacccag

SEQ ID NO: 3217710 - RNA, 19 nt, Artificial Sequence
  Description of Artificial Sequence: Synthetic oligonucleotide
aaggaugguacauuuaaca

SEQ ID NO: 3217711 - RNA, 19 nt, Artificial Sequence
  Description of Artificial Sequence: Synthetic oligonucleotide
agaaggauggaauucaaug

SEQ ID NO: 3217712 - RNA, 19 nt, Artificial Sequence
  Description of Artificial Sequence: Synthetic oligonucleotide
ugugaaaccuguaugggug

SEQ ID NO: 3217713 - RNA, 19 nt, Artificial Sequence
  Description of Artificial Sequence: Synthetic oligonucleotide
uuuucuuugguguggaagc

SEQ ID NO: 3217714 - RNA, 19 nt, Artificial Sequence
  Description of Artificial Sequence: Synthetic oligonucleotide
auaugcaaccaguaggugg

SEQ ID NO: 3217715 - RNA, 19 nt, Artificial Sequence
  Description of Artificial Sequence: Synthetic oligonucleotide
uagugugaaaccuguaugg

SEQ ID NO: 3217716 - RNA, 19 nt, Artificial Sequence
  Description of Artificial Sequence: Synthetic oligonucleotide
gaauucaaugucuuauuag

SEQ ID NO: 3217717 - RNA, 19 nt, Artificial Sequence
  Description of Artificial Sequence: Synthetic oligonucleotide
uaugcaaccaguagguggc

SEQ ID NO: 3217718 - RNA, 19 nt, Artificial Sequence
  Description of Artificial Sequence: Synthetic oligonucleotide
uaaucuuccuauuuguaug

SEQ ID NO: 3217719 - RNA, 19 nt, Artificial Sequence
  Description of Artificial Sequence: Synthetic oligonucleotide
auacuggagagcuaguuuc

SEQ ID NO: 3217720 - RNA, 19 nt, Artificial Sequence
  Description of Artificial Sequence: Synthetic oligonucleotide
uuuccuacagcucuugucu

SEQ ID NO: 3217721 - RNA, 19 nt, Artificial Sequence
  Description of Artificial Sequence: Synthetic oligonucleotide
aacacuuccuuucacuucu

SEQ ID NO: 3217722 - RNA, 19 nt, Artificial Sequence
  Description of Artificial Sequence: Synthetic oligonucleotide
uugaauguuggcaucacac

SEQ ID NO: 3217723 - RNA, 19 nt, Artificial Sequence
  Description of Artificial Sequence: Synthetic oligonucleotide
aagaauuuagguggcuccc

SEQ ID NO: 3217724 - RNA, 19 nt, Artificial Sequence
  Description of Artificial Sequence: Synthetic oligonucleotide
aaaucaaagcauuccuuca

SEQ ID NO: 3217725 - RNA, 19 nt, Artificial Sequence
  Description of Artificial Sequence: Synthetic oligonucleotide
uuuacacugggccacaaaa

SEQ ID NO: 3217726 - RNA, 19 nt, Artificial Sequence
  Description of Artificial Sequence: Synthetic oligonucleotide
uuuuccuacugguaucugg

SEQ ID NO: 3217727 - RNA, 19 nt, Artificial Sequence
  Description of Artificial Sequence: Synthetic oligonucleotide
aacugaaggccugaauugc

SEQ ID NO: 3217728 - RNA, 19 nt, Artificial Sequence
  Description of Artificial Sequence: Synthetic oligonucleotide
cauguagucaauugcaaac

SEQ ID NO: 3217729 - RNA, 19 nt, Artificial Sequence
  Description of Artificial Sequence: Synthetic oligonucleotide
uuuaacuaucugcugcugc

SEQ ID NO: 3217730 - RNA, 19 nt, Artificial Sequence
  Description of Artificial Sequence: Synthetic oligonucleotide
auuuguaugcccagcaagc

SEQ ID NO: 3217731 - RNA, 19 nt, Artificial Sequence
  Description of Artificial Sequence: Synthetic oligonucleotide
ugguacauuuaacaaaaga

SEQ ID NO: 3217732 - RNA, 19 nt, Artificial Sequence
  Description of Artificial Sequence: Synthetic oligonucleotide
gaacccaucauacaccaug

SEQ ID NO: 3217733 - RNA, 19 nt, Artificial Sequence
  Description of Artificial Sequence: Synthetic oligonucleotide
acaggcuuccaucagaucu

SEQ ID NO: 3217734 - RNA, 19 nt, Artificial Sequence
  Description of Artificial Sequence: Synthetic oligonucleotide
aaggccugaauugccaugc

SEQ ID NO: 3217735 - RNA, 19 nt, Artificial Sequence
  Description of Artificial Sequence: Synthetic oligonucleotide
ugcauaguaaucacaguga

SEQ ID NO: 3217736 - RNA, 19 nt, Artificial Sequence
  Description of Artificial Sequence: Synthetic oligonucleotide
ucuuauuagaggcugccaa

SEQ ID NO: 3217737 - RNA, 19 nt, Artificial Sequence
  Description of Artificial Sequence: Synthetic oligonucleotide
ucaaagaaaugcaugcaaa

SEQ ID NO: 3217738 - RNA, 19 nt, Artificial Sequence
  Description of Artificial Sequence: Synthetic oligonucleotide
aaauaggacuuuguggaag

SEQ ID NO: 3217739 - RNA, 19 nt, Artificial Sequence
  Description of Artificial Sequence: Synthetic oligonucleotide
uguucuuccugucuuuacc

SEQ ID NO: 3217740 - RNA, 19 nt, Artificial Sequence
  Description of Artificial Sequence: Synthetic oligonucleotide
uugcaaacugaacacuucc

SEQ ID NO: 3217741 - RNA, 19 nt, Artificial Sequence
  Description of Artificial Sequence: Synthetic oligonucleotide
aguaauaguugucuuauua

SEQ ID NO: 3217742 - RNA, 19 nt, Artificial Sequence
  Description of Artificial Sequence: Synthetic oligonucleotide
uaggucuuuacauaugggu

SEQ ID NO: 3217743 - RNA, 19 nt, Artificial Sequence
  Description of Artificial Sequence: Synthetic oligonucleotide
uuuacccuaucccaggagu

SEQ ID NO: 3217744 - RNA, 19 nt, Artificial Sequence
  Description of Artificial Sequence: Synthetic oligonucleotide
uguagugugaaaccuguau

SEQ ID NO: 3217745 - RNA, 19 nt, Artificial Sequence
  Description of Artificial Sequence: Synthetic oligonucleotide
uaaucacagugacaagggg

SEQ ID NO: 3217746 - RNA, 19 nt, Artificial Sequence
  Description of Artificial Sequence: Synthetic oligonucleotide
caagauuguagugugaaac

SEQ ID NO: 3217747 - RNA, 19 nt, Artificial Sequence
  Description of Artificial Sequence: Synthetic oligonucleotide
ucugucaucacuguuguuc

SEQ ID NO: 3217748 - RNA, 19 nt, Artificial Sequence
  Description of Artificial Sequence: Synthetic oligonucleotide
uuggcucuggaacauacug

SEQ ID NO: 3217749 - RNA, 19 nt, Artificial Sequence
  Description of Artificial Sequence: Synthetic oligonucleotide
uuaacuaucugcugcugcu

SEQ ID NO: 3217750 - RNA, 19 nt, Artificial Sequence
  Description of Artificial Sequence: Synthetic oligonucleotide
acagcucuugucuucuggc

SEQ ID NO: 3217751 - RNA, 19 nt, Artificial Sequence
  Description of Artificial Sequence: Synthetic oligonucleotide
ugcuaagucuuuacacugg

SEQ ID NO: 3217752 - RNA, 19 nt, Artificial Sequence
  Description of Artificial Sequence: Synthetic oligonucleotide
ucuacacaggcuuccauca

SEQ ID NO: 3217753 - RNA, 19 nt, Artificial Sequence
  Description of Artificial Sequence: Synthetic oligonucleotide
ugaauugccaugcaagauu

SEQ ID NO: 3217754 - RNA, 19 nt, Artificial Sequence
  Description of Artificial Sequence: Synthetic oligonucleotide
aauguuggcaucacacauc

SEQ ID NO: 3217755 - RNA, 19 nt, Artificial Sequence
  Description of Artificial Sequence: Synthetic oligonucleotide
agaaaugcaugcaaaauga

SEQ ID NO: 3217756 - RNA, 19 nt, Artificial Sequence
  Description of Artificial Sequence: Synthetic oligonucleotide
aauuccauaugcaaccagu

SEQ ID NO: 3217757 - RNA, 19 nt, Artificial Sequence
  Description of Artificial Sequence: Synthetic oligonucleotide
uugccaugcaagauuguag

SEQ ID NO: 3217758 - RNA, 19 nt, Artificial Sequence
  Description of Artificial Sequence: Synthetic oligonucleotide
cuauccucuugaauguugg

SEQ ID NO: 3217759 - RNA, 19 nt, Artificial Sequence
  Description of Artificial Sequence: Synthetic oligonucleotide
uaguugucuuauuaugaag

SEQ ID NO: 3217760 - RNA, 19 nt, Artificial Sequence
  Description of Artificial Sequence: Synthetic oligonucleotide
uacaccaugguaugguuga

SEQ ID NO: 3217761 - RNA, 19 nt, Artificial Sequence
  Description of Artificial Sequence: Synthetic oligonucleotide
ugccaaauaggacuuugug

SEQ ID NO: 3217762 - RNA, 19 nt, Artificial Sequence
  Description of Artificial Sequence: Synthetic oligonucleotide
cauuccuucacccagaugu

SEQ ID NO: 3217763 - RNA, 19 nt, Artificial Sequence
  Description of Artificial Sequence: Synthetic oligonucleotide
guaaucacagugacaaggg

SEQ ID NO: 3217764 - RNA, 19 nt, Artificial Sequence
  Description of Artificial Sequence: Synthetic oligonucleotide
guagugugaaaccuguaug

SEQ ID NO: 3217765 - RNA, 19 nt, Artificial Sequence
  Description of Artificial Sequence: Synthetic oligonucleotide
aaucacagugacaaggggu

SEQ ID NO: 3217766 - RNA, 19 nt, Artificial Sequence
  Description of Artificial Sequence: Synthetic oligonucleotide
aguucaauuuuccuaacuu

SEQ ID NO: 3217767 - RNA, 19 nt, Artificial Sequence
  Description of Artificial Sequence: Synthetic oligonucleotide
uuugguguggaagcaacag

SEQ ID NO: 3217768 - RNA, 19 nt, Artificial Sequence
  Description of Artificial Sequence: Synthetic oligonucleotide
caugguaugguugaagaug

SEQ ID NO: 3217769 - RNA, 19 nt, Artificial Sequence
  Description of Artificial Sequence: Synthetic oligonucleotide
ccauuugagauugagaagg

SEQ ID NO: 3217770 - RNA, 19 nt, Artificial Sequence
  Description of Artificial Sequence: Synthetic oligonucleotide
ugaauguuggcaucacaca

SEQ ID NO: 3217771 - RNA, 19 nt, Artificial Sequence
  Description of Artificial Sequence: Synthetic oligonucleotide
uccauuugagauugagaag

SEQ ID NO: 3217772 - RNA, 19 nt, Artificial Sequence
  Description of Artificial Sequence: Synthetic oligonucleotide
augguaugguugaagaugg

SEQ ID NO: 3217773 - RNA, 19 nt, Artificial Sequence
  Description of Artificial Sequence: Synthetic oligonucleotide
cuuccaucagaucuucagg

SEQ ID NO: 3217774 - RNA, 19 nt, Artificial Sequence
  Description of Artificial Sequence: Synthetic oligonucleotide
uucacuucuagguugccaa

SEQ ID NO: 3217775 - RNA, 19 nt, Artificial Sequence
  Description of Artificial Sequence: Synthetic oligonucleotide
ugcaugcaaaaugacuugg

SEQ ID NO: 3217776 - RNA, 19 nt, Artificial Sequence
  Description of Artificial Sequence: Synthetic oligonucleotide
agcuaguuucauuucaccu

SEQ ID NO: 3217777 - RNA, 19 nt, Artificial Sequence
  Description of Artificial Sequence: Synthetic oligonucleotide
gaauugccaugcaagauug

SEQ ID NO: 3217778 - RNA, 19 nt, Artificial Sequence
  Description of Artificial Sequence: Synthetic oligonucleotide
gucuucuucaccacgaaug

SEQ ID NO: 3217779 - RNA, 19 nt, Artificial Sequence
  Description of Artificial Sequence: Synthetic oligonucleotide
caucucguggggcauaccg

SEQ ID NO: 3217780 - RNA, 19 nt, Artificial Sequence
  Description of Artificial Sequence: Synthetic oligonucleotide
aggucuuuacauauggguc

SEQ ID NO: 3217781 - RNA, 19 nt, Artificial Sequence
  Description of Artificial Sequence: Synthetic oligonucleotide
ugccaugcaagauuguagu

SEQ ID NO: 3217782 - RNA, 19 nt, Artificial Sequence
  Description of Artificial Sequence: Synthetic oligonucleotide
uuaugaaguugucugucau

SEQ ID NO: 3217783 - RNA, 19 nt, Artificial Sequence
  Description of Artificial Sequence: Synthetic oligonucleotide
auguuggcaucacacaucu

SEQ ID NO: 3217784 - RNA, 19 nt, Artificial Sequence
  Description of Artificial Sequence: Synthetic oligonucleotide
aaguccauuugagauugag

SEQ ID NO: 3217785 - RNA, 19 nt, Artificial Sequence
  Description of Artificial Sequence: Synthetic oligonucleotide
ugucuggcaacagauaggu

SEQ ID NO: 3217786 - RNA, 19 nt, Artificial Sequence
  Description of Artificial Sequence: Synthetic oligonucleotide
aaguugucugucaucacug

SEQ ID NO: 3217787 - RNA, 19 nt, Artificial Sequence
  Description of Artificial Sequence: Synthetic oligonucleotide
accaugguaugguugaaga

SEQ ID NO: 3217788 - RNA, 19 nt, Artificial Sequence
  Description of Artificial Sequence: Synthetic oligonucleotide
agaauuuagguggcucccc

SEQ ID NO: 3217789 - RNA, 19 nt, Artificial Sequence
  Description of Artificial Sequence: Synthetic oligonucleotide
agugugaaaccuguauggg

SEQ ID NO: 3217790 - RNA, 19 nt, Artificial Sequence
  Description of Artificial Sequence: Synthetic oligonucleotide
auucaaugucuuauuagag

SEQ ID NO: 3217791 - RNA, 19 nt, Artificial Sequence
  Description of Artificial Sequence: Synthetic oligonucleotide
uuuguaaacaucuccaucu

SEQ ID NO: 3217792 - RNA, 19 nt, Artificial Sequence
  Description of Artificial Sequence: Synthetic oligonucleotide
uuuucuacagccuuuaagu

SEQ ID NO: 3217793 - RNA, 19 nt, Artificial Sequence
  Description of Artificial Sequence: Synthetic oligonucleotide
aucauuauccucuggauuc

SEQ ID NO: 3217794 - RNA, 19 nt, Artificial Sequence
  Description of Artificial Sequence: Synthetic oligonucleotide
ugucuuauggucucuaagg

SEQ ID NO: 3217795 - RNA, 19 nt, Artificial Sequence
  Description of Artificial Sequence: Synthetic oligonucleotide
auguuuuguaaacaucucc

SEQ ID NO: 3217796 - RNA, 19 nt, Artificial Sequence
  Description of Artificial Sequence: Synthetic oligonucleotide
ugaacuucaaauucgugcc

SEQ ID NO: 3217797 - RNA, 19 nt, Artificial Sequence
  Description of Artificial Sequence: Synthetic oligonucleotide
uguuuuguaaacaucucca

SEQ ID NO: 3217798 - RNA, 19 nt, Artificial Sequence
  Description of Artificial Sequence: Synthetic oligonucleotide
agaacucacaaguuccucc

SEQ ID NO: 3217799 - RNA, 19 nt, Artificial Sequence
  Description of Artificial Sequence: Synthetic oligonucleotide
uuugauguuguucuuccag

SEQ ID NO: 3217800 - RNA, 19 nt, Artificial Sequence
  Description of Artificial Sequence: Synthetic oligonucleotide
cugaacuucaaauucgugc

SEQ ID NO: 3217801 - RNA, 19 nt, Artificial Sequence
  Description of Artificial Sequence: Synthetic oligonucleotide
aacaucuccaucuugguuu

SEQ ID NO: 3217802 - RNA, 19 nt, Artificial Sequence
  Description of Artificial Sequence: Synthetic oligonucleotide
auguuguucuuccagcacc

SEQ ID NO: 3217803 - RNA, 19 nt, Artificial Sequence
  Description of Artificial Sequence: Synthetic oligonucleotide
uuuaguuccucuuccaugu

SEQ ID NO: 3217804 - RNA, 19 nt, Artificial Sequence
  Description of Artificial Sequence: Synthetic oligonucleotide
uuccucaacagcuuucugg

SEQ ID NO: 3217805 - RNA, 19 nt, Artificial Sequence
  Description of Artificial Sequence: Synthetic oligonucleotide
uauccucuggauucuaugg

SEQ ID NO: 3217806 - RNA, 19 nt, Artificial Sequence
  Description of Artificial Sequence: Synthetic oligonucleotide
guaaacaucuccaucuugg

SEQ ID NO: 3217807 - RNA, 19 nt, Artificial Sequence
  Description of Artificial Sequence: Synthetic oligonucleotide
uccucaacagcuuucuggg

SEQ ID NO: 3217808 - RNA, 19 nt, Artificial Sequence
  Description of Artificial Sequence: Synthetic oligonucleotide
gauucuauggaccauacgu

SEQ ID NO: 3217809 - RNA, 19 nt, Artificial Sequence
  Description of Artificial Sequence: Synthetic oligonucleotide
uugguuuucuuuucuacag

SEQ ID NO: 3217810 - RNA, 19 nt, Artificial Sequence
  Description of Artificial Sequence: Synthetic oligonucleotide
uggcacuccaucauuaucc

SEQ ID NO: 3217811 - RNA, 19 nt, Artificial Sequence
  Description of Artificial Sequence: Synthetic oligonucleotide
uccuccaugaccuuucuug

SEQ ID NO: 3217812 - RNA, 19 nt, Artificial Sequence
  Description of Artificial Sequence: Synthetic oligonucleotide
auucgugccugucauuugc

SEQ ID NO: 3217813 - RNA, 19 nt, Artificial Sequence
  Description of Artificial Sequence: Synthetic oligonucleotide
aguucucucucuuuaguuc

SEQ ID NO: 3217814 - RNA, 19 nt, Artificial Sequence
  Description of Artificial Sequence: Synthetic oligonucleotide
uccaucauuauccucugga

SEQ ID NO: 3217815 - RNA, 19 nt, Artificial Sequence
  Description of Artificial Sequence: Synthetic oligonucleotide
ucuuugauguuguucuucc

SEQ ID NO: 3217816 - RNA, 19 nt, Artificial Sequence
  Description of Artificial Sequence: Synthetic oligonucleotide
ugucucuuccucaacagcu

SEQ ID NO: 3217817 - RNA, 19 nt, Artificial Sequence
  Description of Artificial Sequence: Synthetic oligonucleotide
uccaucuucucucuguggc

SEQ ID NO: 3217818 - RNA, 19 nt, Artificial Sequence
  Description of Artificial Sequence: Synthetic oligonucleotide
ucuacagccuuuaagucuc

SEQ ID NO: 3217819 - RNA, 19 nt, Artificial Sequence
  Description of Artificial Sequence: Synthetic oligonucleotide
uuuuguaaacaucuccauc

SEQ ID NO: 3217820 - RNA, 19 nt, Artificial Sequence
  Description of Artificial Sequence: Synthetic oligonucleotide
ucuuauggucucuaagggc

SEQ ID NO: 3217821 - RNA, 19 nt, Artificial Sequence
  Description of Artificial Sequence: Synthetic oligonucleotide
ucucuuuaguuccucuucc

SEQ ID NO: 3217822 - RNA, 19 nt, Artificial Sequence
  Description of Artificial Sequence: Synthetic oligonucleotide
uucaaauucgugccuguca

SEQ ID NO: 3217823 - RNA, 19 nt, Artificial Sequence
  Description of Artificial Sequence: Synthetic oligonucleotide
gucuuauggucucuaaggg

SEQ ID NO: 3217824 - RNA, 19 nt, Artificial Sequence
  Description of Artificial Sequence: Synthetic oligonucleotide
cuuuucuacagccuuuaag

SEQ ID NO: 3217825 - RNA, 19 nt, Artificial Sequence
  Description of Artificial Sequence: Synthetic oligonucleotide
uucuauggaccauacguug

SEQ ID NO: 3217826 - RNA, 19 nt, Artificial Sequence
  Description of Artificial Sequence: Synthetic oligonucleotide
acagccuccaucuucucuc

SEQ ID NO: 3217827 - RNA, 19 nt, Artificial Sequence
  Description of Artificial Sequence: Synthetic oligonucleotide
ucuuccauguuuuguaaac

SEQ ID NO: 3217828 - RNA, 19 nt, Artificial Sequence
  Description of Artificial Sequence: Synthetic oligonucleotide
uugucuuauggucucuaag

SEQ ID NO: 3217829 - RNA, 19 nt, Artificial Sequence
  Description of Artificial Sequence: Synthetic oligonucleotide
uucuacagccuuuaagucu

SEQ ID NO: 3217830 - RNA, 19 nt, Artificial Sequence
  Description of Artificial Sequence: Synthetic oligonucleotide
uuuucuuuucuacagccuu

SEQ ID NO: 3217831 - RNA, 19 nt, Artificial Sequence
  Description of Artificial Sequence: Synthetic oligonucleotide
ucuugucucuuccucaaca

SEQ ID NO: 3217832 - RNA, 19 nt, Artificial Sequence
  Description of Artificial Sequence: Synthetic oligonucleotide
cuuuaagucucuuugaugu

SEQ ID NO: 3217833 - RNA, 19 nt, Artificial Sequence
  Description of Artificial Sequence: Synthetic oligonucleotide
uucuucacagccuccaucu

SEQ ID NO: 3217834 - RNA, 19 nt, Artificial Sequence
  Description of Artificial Sequence: Synthetic oligonucleotide
ucaaauucgugccugucau

SEQ ID NO: 3217835 - RNA, 19 nt, Artificial Sequence
  Description of Artificial Sequence: Synthetic oligonucleotide
uguaaacaucuccaucuug

SEQ ID NO: 3217836 - RNA, 19 nt, Artificial Sequence
  Description of Artificial Sequence: Synthetic oligonucleotide
uugauguuguucuuccagc

SEQ ID NO: 3217837 - RNA, 19 nt, Artificial Sequence
  Description of Artificial Sequence: Synthetic oligonucleotide
cucaacagcuuucugggcc

SEQ ID NO: 3217838 - RNA, 19 nt, Artificial Sequence
  Description of Artificial Sequence: Synthetic oligonucleotide
uuaagucucuuugauguug

SEQ ID NO: 3217839 - RNA, 19 nt, Artificial Sequence
  Description of Artificial Sequence: Synthetic oligonucleotide
uccaugaccuuucuugucu

SEQ ID NO: 3217840 - RNA, 19 nt, Artificial Sequence
  Description of Artificial Sequence: Synthetic oligonucleotide
ucucuaagggcugucaagc

SEQ ID NO: 3217841 - RNA, 19 nt, Artificial Sequence
  Description of Artificial Sequence: Synthetic oligonucleotide
ucuaagggcugucaagcca

SEQ ID NO: 3217842 - RNA, 19 nt, Artificial Sequence
  Description of Artificial Sequence: Synthetic oligonucleotide
uguucugcagcagaguucu

SEQ ID NO: 3217843 - RNA, 19 nt, Artificial Sequence
  Description of Artificial Sequence: Synthetic oligonucleotide
cacaaguuccuccaugacc

SEQ ID NO: 3217844 - RNA, 19 nt, Artificial Sequence
  Description of Artificial Sequence: Synthetic oligonucleotide
cuaagggcugucaagccag

SEQ ID NO: 3217845 - RNA, 19 nt, Artificial Sequence
  Description of Artificial Sequence: Synthetic oligonucleotide
cuuuaguuccucuuccaug

SEQ ID NO: 3217846 - RNA, 19 nt, Artificial Sequence
  Description of Artificial Sequence: Synthetic oligonucleotide
ucuugguuuucuuuucuac

SEQ ID NO: 3217847 - RNA, 19 nt, Artificial Sequence
  Description of Artificial Sequence: Synthetic oligonucleotide
acaaguuccuccaugaccu

SEQ ID NO: 3217848 - RNA, 19 nt, Artificial Sequence
  Description of Artificial Sequence: Synthetic oligonucleotide
guucucucucuuuaguucc

SEQ ID NO: 3217849 - RNA, 19 nt, Artificial Sequence
  Description of Artificial Sequence: Synthetic oligonucleotide
agccagaacucacaaguuc

SEQ ID NO: 3217850 - RNA, 19 nt, Artificial Sequence
  Description of Artificial Sequence: Synthetic oligonucleotide
caccugaacuucaaauucg

SEQ ID NO: 3217851 - RNA, 19 nt, Artificial Sequence
  Description of Artificial Sequence: Synthetic oligonucleotide
uucacagccuccaucuucu

SEQ ID NO: 3217852 - RNA, 19 nt, Artificial Sequence
  Description of Artificial Sequence: Synthetic oligonucleotide
uuauccucuggauucuaug

SEQ ID NO: 3217853 - RNA, 19 nt, Artificial Sequence
  Description of Artificial Sequence: Synthetic oligonucleotide
ugauguuguucuuccagca

SEQ ID NO: 3217854 - RNA, 19 nt, Artificial Sequence
  Description of Artificial Sequence: Synthetic oligonucleotide
gguuuucuuuucuacagcc

SEQ ID NO: 3217855 - RNA, 19 nt, Artificial Sequence
  Description of Artificial Sequence: Synthetic oligonucleotide
ucuauggaccauacguugu

SEQ ID NO: 3217856 - RNA, 19 nt, Artificial Sequence
  Description of Artificial Sequence: Synthetic oligonucleotide
uguucuuccagcaccugaa

SEQ ID NO: 3217857 - RNA, 19 nt, Artificial Sequence
  Description of Artificial Sequence: Synthetic oligonucleotide
aacuucaaauucgugccug

SEQ ID NO: 3217858 - RNA, 19 nt, Artificial Sequence
  Description of Artificial Sequence: Synthetic oligonucleotide
uaagucucuuugauguugu

SEQ ID NO: 3217859 - RNA, 19 nt, Artificial Sequence
  Description of Artificial Sequence: Synthetic oligonucleotide
ugguuuucuuuucuacagc

SEQ ID NO: 3217860 - RNA, 19 nt, Artificial Sequence
  Description of Artificial Sequence: Synthetic oligonucleotide
aaauucgugccugucauuu

SEQ ID NO: 3217861 - RNA, 19 nt, Artificial Sequence
  Description of Artificial Sequence: Synthetic oligonucleotide
uguuguucuuccagcaccu

SEQ ID NO: 3217862 - RNA, 19 nt, Artificial Sequence
  Description of Artificial Sequence: Synthetic oligonucleotide
ucuucccuggcuuucuuca

SEQ ID NO: 3217863 - RNA, 19 nt, Artificial Sequence
  Description of Artificial Sequence: Synthetic oligonucleotide
cuugucucuuccucaacag

SEQ ID NO: 3217864 - RNA, 19 nt, Artificial Sequence
  Description of Artificial Sequence: Synthetic oligonucleotide
agggcugucaagccagaac

SEQ ID NO: 3217865 - RNA, 19 nt, Artificial Sequence
  Description of Artificial Sequence: Synthetic oligonucleotide
uuucuacagccuuuaaguc

SEQ ID NO: 3217866 - RNA, 19 nt, Artificial Sequence
  Description of Artificial Sequence: Synthetic oligonucleotide
uacguuguucugcagcaga

SEQ ID NO: 3217867 - RNA, 19 nt, Artificial Sequence
  Description of Artificial Sequence: Synthetic oligonucleotide
ugucaagccagaacucaca

SEQ ID NO: 3217868 - RNA, 19 nt, Artificial Sequence
  Description of Artificial Sequence: Synthetic oligonucleotide
uccauguuuuguaaacauc

SEQ ID NO: 3217869 - RNA, 19 nt, Artificial Sequence
  Description of Artificial Sequence: Synthetic oligonucleotide
ucuuccagcaccugaacuu

SEQ ID NO: 3217870 - RNA, 19 nt, Artificial Sequence
  Description of Artificial Sequence: Synthetic oligonucleotide
cagccuuuaagucucuuug

SEQ ID NO: 3217871 - RNA, 19 nt, Artificial Sequence
  Description of Artificial Sequence: Synthetic oligonucleotide
uuccauguuuuguaaacau

SEQ ID NO: 3217872 - RNA, 19 nt, Artificial Sequence
  Description of Artificial Sequence: Synthetic oligonucleotide
agcucucucucuucuuccc

SEQ ID NO: 3217873 - RNA, 19 nt, Artificial Sequence
  Description of Artificial Sequence: Synthetic oligonucleotide
uuguucuuccagcaccuga

SEQ ID NO: 3217874 - RNA, 19 nt, Artificial Sequence
  Description of Artificial Sequence: Synthetic oligonucleotide
agucucuuugauguuguuc

SEQ ID NO: 3217875 - RNA, 19 nt, Artificial Sequence
  Description of Artificial Sequence: Synthetic oligonucleotide
aauucgugccugucauuug

SEQ ID NO: 3217876 - RNA, 19 nt, Artificial Sequence
  Description of Artificial Sequence: Synthetic oligonucleotide
uccaucuugguuuucuuuu

SEQ ID NO: 3217877 - RNA, 19 nt, Artificial Sequence
  Description of Artificial Sequence: Synthetic oligonucleotide
uugucucuuccucaacagc

SEQ ID NO: 3217878 - RNA, 19 nt, Artificial Sequence
  Description of Artificial Sequence: Synthetic oligonucleotide
ucuuuaguuccucuuccau

SEQ ID NO: 3217879 - RNA, 19 nt, Artificial Sequence
  Description of Artificial Sequence: Synthetic oligonucleotide
uaaacaucuccaucuuggu

SEQ ID NO: 3217880 - RNA, 19 nt, Artificial Sequence
  Description of Artificial Sequence: Synthetic oligonucleotide
cuuauggucucuaagggcu

SEQ ID NO: 3217881 - RNA, 19 nt, Artificial Sequence
  Description of Artificial Sequence: Synthetic oligonucleotide
aaacaucuccaucuugguu

SEQ ID NO: 3217882 - RNA, 19 nt, Artificial Sequence
  Description of Artificial Sequence: Synthetic oligonucleotide
uucuuccagcaccugaacu

SEQ ID NO: 3217883 - RNA, 19 nt, Artificial Sequence
  Description of Artificial Sequence: Synthetic oligonucleotide
ucaagccagaacucacaag

SEQ ID NO: 3217884 - RNA, 19 nt, Artificial Sequence
  Description of Artificial Sequence: Synthetic oligonucleotide
gauguuguucuuccagcac

SEQ ID NO: 3217885 - RNA, 19 nt, Artificial Sequence
  Description of Artificial Sequence: Synthetic oligonucleotide
uuucuucacagccuccauc

SEQ ID NO: 3217886 - RNA, 19 nt, Artificial Sequence
  Description of Artificial Sequence: Synthetic oligonucleotide
ucaacagcuuucugggcca

SEQ ID NO: 3217887 - RNA, 19 nt, Artificial Sequence
  Description of Artificial Sequence: Synthetic oligonucleotide
ucucucucuucuucccugg

SEQ ID NO: 3217888 - RNA, 19 nt, Artificial Sequence
  Description of Artificial Sequence: Synthetic oligonucleotide
uccucuggauucuauggac

SEQ ID NO: 3217889 - RNA, 19 nt, Artificial Sequence
  Description of Artificial Sequence: Synthetic oligonucleotide
gaacucacaaguuccucca

SEQ ID NO: 3217890 - RNA, 19 nt, Artificial Sequence
  Description of Artificial Sequence: Synthetic oligonucleotide
uucgugccugucauuugcg

SEQ ID NO: 3217891 - RNA, 19 nt, Artificial Sequence
  Description of Artificial Sequence: Synthetic oligonucleotide
auaacgauguaucugaacc

SEQ ID NO: 3217892 - RNA, 19 nt, Artificial Sequence
  Description of Artificial Sequence: Synthetic oligonucleotide
aagaccaacaacaaggggc

SEQ ID NO: 3217893 - RNA, 19 nt, Artificial Sequence
  Description of Artificial Sequence: Synthetic oligonucleotide
aggaaugugauauaccugg

SEQ ID NO: 3217894 - RNA, 19 nt, Artificial Sequence
  Description of Artificial Sequence: Synthetic oligonucleotide
aaaggacucgucuaagugg

SEQ ID NO: 3217895 - RNA, 19 nt, Artificial Sequence
  Description of Artificial Sequence: Synthetic oligonucleotide
ugaauaaagguguugagcu

SEQ ID NO: 3217896 - RNA, 19 nt, Artificial Sequence
  Description of Artificial Sequence: Synthetic oligonucleotide
ugggauggaaaucagaccc

SEQ ID NO: 3217897 - RNA, 19 nt, Artificial Sequence
  Description of Artificial Sequence: Synthetic oligonucleotide
acuuguuucacagauggcc

SEQ ID NO: 3217898 - RNA, 19 nt, Artificial Sequence
  Description of Artificial Sequence: Synthetic oligonucleotide
aagguguugagcucuuugc

SEQ ID NO: 3217899 - RNA, 19 nt, Artificial Sequence
  Description of Artificial Sequence: Synthetic oligonucleotide
aaugugauauaccuggggu

SEQ ID NO: 3217900 - RNA, 19 nt, Artificial Sequence
  Description of Artificial Sequence: Synthetic oligonucleotide
aauaacgauguaucugaac

SEQ ID NO: 3217901 - RNA, 19 nt, Artificial Sequence
  Description of Artificial Sequence: Synthetic oligonucleotide
uuuucuuaaguuauuugug

SEQ ID NO: 3217902 - RNA, 19 nt, Artificial Sequence
  Description of Artificial Sequence: Synthetic oligonucleotide
aaguuauuuguguaaggag

SEQ ID NO: 3217903 - RNA, 19 nt, Artificial Sequence
  Description of Artificial Sequence: Synthetic oligonucleotide
ucacagauggccuugaugu

SEQ ID NO: 3217904 - RNA, 19 nt, Artificial Sequence
  Description of Artificial Sequence: Synthetic oligonucleotide
aaaaggacucgucuaagug

SEQ ID NO: 3217905 - RNA, 19 nt, Artificial Sequence
  Description of Artificial Sequence: Synthetic oligonucleotide
auuuucacaggcaauaacg

SEQ ID NO: 3217906 - RNA, 19 nt, Artificial Sequence
  Description of Artificial Sequence: Synthetic oligonucleotide
uaucugaacccucuggagg

SEQ ID NO: 3217907 - RNA, 19 nt, Artificial Sequence
  Description of Artificial Sequence: Synthetic oligonucleotide
acuguuacaguaucugucg

SEQ ID NO: 3217908 - RNA, 19 nt, Artificial Sequence
  Description of Artificial Sequence: Synthetic oligonucleotide
augaauaaagguguugagc

SEQ ID NO: 3217909 - RNA, 19 nt, Artificial Sequence
  Description of Artificial Sequence: Synthetic oligonucleotide
aacaacaaggggcccagac

SEQ ID NO: 3217910 - RNA, 19 nt, Artificial Sequence
  Description of Artificial Sequence: Synthetic oligonucleotide
cuuggugccaugaauaaag

SEQ ID NO: 3217911 - RNA, 19 nt, Artificial Sequence
  Description of Artificial Sequence: Synthetic oligonucleotide
ucaggaaugugauauaccu

SEQ ID NO: 3217912 - RNA, 19 nt, Artificial Sequence
  Description of Artificial Sequence: Synthetic oligonucleotide
uucacaggcaauaacgaug

SEQ ID NO: 3217913 - RNA, 19 nt, Artificial Sequence
  Description of Artificial Sequence: Synthetic oligonucleotide
agguaagccauuuucacag

SEQ ID NO: 3217914 - RNA, 19 nt, Artificial Sequence
  Description of Artificial Sequence: Synthetic oligonucleotide
ucucauuauacuguuacag

SEQ ID NO: 3217915 - RNA, 19 nt, Artificial Sequence
  Description of Artificial Sequence: Synthetic oligonucleotide
auuauacuguuacaguauc

SEQ ID NO: 3217916 - RNA, 19 nt, Artificial Sequence
  Description of Artificial Sequence: Synthetic oligonucleotide
ucugggacagaguuggugg

SEQ ID NO: 3217917 - RNA, 19 nt, Artificial Sequence
  Description of Artificial Sequence: Synthetic oligonucleotide
uugauguuguccuuggugc

SEQ ID NO: 3217918 - RNA, 19 nt, Artificial Sequence
  Description of Artificial Sequence: Synthetic oligonucleotide
uuaaguuauuuguguaagg

SEQ ID NO: 3217919 - RNA, 19 nt, Artificial Sequence
  Description of Artificial Sequence: Synthetic oligonucleotide
aucugaacccucuggaggc

SEQ ID NO: 3217920 - RNA, 19 nt, Artificial Sequence
  Description of Artificial Sequence: Synthetic oligonucleotide
aauaaagguguugagcucu

SEQ ID NO: 3217921 - RNA, 19 nt, Artificial Sequence
  Description of Artificial Sequence: Synthetic oligonucleotide
ugaucuggaauugagaggu

SEQ ID NO: 3217922 - RNA, 19 nt, Artificial Sequence
  Description of Artificial Sequence: Synthetic oligonucleotide
uuucuuaaguuauuugugu

SEQ ID NO: 3217923 - RNA, 19 nt, Artificial Sequence
  Description of Artificial Sequence: Synthetic oligonucleotide
uaaguuauuuguguaagga

SEQ ID NO: 3217924 - RNA, 19 nt, Artificial Sequence
  Description of Artificial Sequence: Synthetic oligonucleotide
aaucagacccagcaugaag

SEQ ID NO: 3217925 - RNA, 19 nt, Artificial Sequence
  Description of Artificial Sequence: Synthetic oligonucleotide
uguaucugaacccucugga

SEQ ID NO: 3217926 - RNA, 19 nt, Artificial Sequence
  Description of Artificial Sequence: Synthetic oligonucleotide
uauacuguuacaguaucug

SEQ ID NO: 3217927 - RNA, 19 nt, Artificial Sequence
  Description of Artificial Sequence: Synthetic oligonucleotide
auugucaucucuuccaaca

SEQ ID NO: 3217928 - RNA, 19 nt, Artificial Sequence
  Description of Artificial Sequence: Synthetic oligonucleotide
uuuucacaggcaauaacga

SEQ ID NO: 3217929 - RNA, 19 nt, Artificial Sequence
  Description of Artificial Sequence: Synthetic oligonucleotide
aguuccacuuguuucacag

SEQ ID NO: 3217930 - RNA, 19 nt, Artificial Sequence
  Description of Artificial Sequence: Synthetic oligonucleotide
gaaugugauauaccugggg

SEQ ID NO: 3217931 - RNA, 19 nt, Artificial Sequence
  Description of Artificial Sequence: Synthetic oligonucleotide
cuucucauuauacuguuac

SEQ ID NO: 3217932 - RNA, 19 nt, Artificial Sequence
  Description of Artificial Sequence: Synthetic oligonucleotide
ucauuauacuguuacagua

SEQ ID NO: 3217933 - RNA, 19 nt, Artificial Sequence
  Description of Artificial Sequence: Synthetic oligonucleotide
auggaaaucagacccagca

SEQ ID NO: 3217934 - RNA, 19 nt, Artificial Sequence
  Description of Artificial Sequence: Synthetic oligonucleotide
aaagguguugagcucuuug

SEQ ID NO: 3217935 - RNA, 19 nt, Artificial Sequence
  Description of Artificial Sequence: Synthetic oligonucleotide
acucauugucaucucuucc

SEQ ID NO: 3217936 - RNA, 19 nt, Artificial Sequence
  Description of Artificial Sequence: Synthetic oligonucleotide
cauucugggacagaguugg

SEQ ID NO: 3217937 - RNA, 19 nt, Artificial Sequence
  Description of Artificial Sequence: Synthetic oligonucleotide
uauaccuggggucauucug

SEQ ID NO: 3217938 - RNA, 19 nt, Artificial Sequence
  Description of Artificial Sequence: Synthetic oligonucleotide
uacaguaucugucgucccg

SEQ ID NO: 3217939 - RNA, 19 nt, Artificial Sequence
  Description of Artificial Sequence: Synthetic oligonucleotide
guaucugucgucccgaccc

SEQ ID NO: 3217940 - RNA, 19 nt, Artificial Sequence
  Description of Artificial Sequence: Synthetic oligonucleotide
ggugaucuggaauugagag

SEQ ID NO: 3217941 - RNA, 19 nt, Artificial Sequence
  Description of Artificial Sequence: Synthetic oligonucleotide
cucgguaccggcauggagg

SEQ ID NO: 3217942 - RNA, 19 nt, Artificial Sequence
  Description of Artificial Sequence: Synthetic oligonucleotide
ucacaggcaauaacgaugu

SEQ ID NO: 3217943 - RNA, 19 nt, Artificial Sequence
  Description of Artificial Sequence: Synthetic oligonucleotide
ucuuaaguuauuuguguaa

SEQ ID NO: 3217944 - RNA, 19 nt, Artificial Sequence
  Description of Artificial Sequence: Synthetic oligonucleotide
agcaugaagaccaacaaca

SEQ ID NO: 3217945 - RNA, 19 nt, Artificial Sequence
  Description of Artificial Sequence: Synthetic oligonucleotide
cuuaaguuauuuguguaag

SEQ ID NO: 3217946 - RNA, 19 nt, Artificial Sequence
  Description of Artificial Sequence: Synthetic oligonucleotide
uaaguggacagguaagcca

SEQ ID NO: 3217947 - RNA, 19 nt, Artificial Sequence
  Description of Artificial Sequence: Synthetic oligonucleotide
agaccaacaacaaggggcc

SEQ ID NO: 3217948 - RNA, 19 nt, Artificial Sequence
  Description of Artificial Sequence: Synthetic oligonucleotide
uauuuguguaaggaguucc

SEQ ID NO: 3217949 - RNA, 19 nt, Artificial Sequence
  Description of Artificial Sequence: Synthetic oligonucleotide
aguuauuuguguaaggagu

SEQ ID NO: 3217950 - RNA, 19 nt, Artificial Sequence
  Description of Artificial Sequence: Synthetic oligonucleotide
uguaaggaguuccacuugu

SEQ ID NO: 3217951 - RNA, 19 nt, Artificial Sequence
  Description of Artificial Sequence: Synthetic oligonucleotide
augugauauaccugggguc

SEQ ID NO: 3217952 - RNA, 19 nt, Artificial Sequence
  Description of Artificial Sequence: Synthetic oligonucleotide
augggcaucauagugcugg

SEQ ID NO: 3217953 - RNA, 19 nt, Artificial Sequence
  Description of Artificial Sequence: Synthetic oligonucleotide
ugugauauaccugggguca

SEQ ID NO: 3217954 - RNA, 19 nt, Artificial Sequence
  Description of Artificial Sequence: Synthetic oligonucleotide
uacuguuacaguaucuguc

SEQ ID NO: 3217955 - RNA, 19 nt, Artificial Sequence
  Description of Artificial Sequence: Synthetic oligonucleotide
ugcugguucaggaauguga

SEQ ID NO: 3217956 - RNA, 19 nt, Artificial Sequence
  Description of Artificial Sequence: Synthetic oligonucleotide
cuugauguuguccuuggug

SEQ ID NO: 3217957 - RNA, 19 nt, Artificial Sequence
  Description of Artificial Sequence: Synthetic oligonucleotide
uaacgauguaucugaaccc

SEQ ID NO: 3217958 - RNA, 19 nt, Artificial Sequence
  Description of Artificial Sequence: Synthetic oligonucleotide
caggcaauaacgauguauc

SEQ ID NO: 3217959 - RNA, 19 nt, Artificial Sequence
  Description of Artificial Sequence: Synthetic oligonucleotide
uucaggaaugugauauacc

SEQ ID NO: 3217960 - RNA, 19 nt, Artificial Sequence
  Description of Artificial Sequence: Synthetic oligonucleotide
uguguaaggaguuccacuu

SEQ ID NO: 3217961 - RNA, 19 nt, Artificial Sequence
  Description of Artificial Sequence: Synthetic oligonucleotide
uguugagcucuuugcaggg

SEQ ID NO: 3217962 - RNA, 19 nt, Artificial Sequence
  Description of Artificial Sequence: Synthetic oligonucleotide
guuacaguaucugucgucc

SEQ ID NO: 3217963 - RNA, 19 nt, Artificial Sequence
  Description of Artificial Sequence: Synthetic oligonucleotide
auguaucugaacccucugg

SEQ ID NO: 3217964 - RNA, 19 nt, Artificial Sequence
  Description of Artificial Sequence: Synthetic oligonucleotide
gaagaccaacaacaagggg

SEQ ID NO: 3217965 - RNA, 19 nt, Artificial Sequence
  Description of Artificial Sequence: Synthetic oligonucleotide
uucacagauggccuugaug

SEQ ID NO: 3217966 - RNA, 19 nt, Artificial Sequence
  Description of Artificial Sequence: Synthetic oligonucleotide
ucuaaguggacagguaagc

SEQ ID NO: 3217967 - RNA, 19 nt, Artificial Sequence
  Description of Artificial Sequence: Synthetic oligonucleotide
gacagaguuggugggaugg

SEQ ID NO: 3217968 - RNA, 19 nt, Artificial Sequence
  Description of Artificial Sequence: Synthetic oligonucleotide
aucuggaauugagaggugc

SEQ ID NO: 3217969 - RNA, 19 nt, Artificial Sequence
  Description of Artificial Sequence: Synthetic oligonucleotide
ucagcuuucgccuucucau

SEQ ID NO: 3217970 - RNA, 19 nt, Artificial Sequence
  Description of Artificial Sequence: Synthetic oligonucleotide
guguugagcucuuugcagg

SEQ ID NO: 3217971 - RNA, 19 nt, Artificial Sequence
  Description of Artificial Sequence: Synthetic oligonucleotide
ucucuuccaacagagauuc

SEQ ID NO: 3217972 - RNA, 19 nt, Artificial Sequence
  Description of Artificial Sequence: Synthetic oligonucleotide
uuauacuguuacaguaucu

SEQ ID NO: 3217973 - RNA, 19 nt, Artificial Sequence
  Description of Artificial Sequence: Synthetic oligonucleotide
gacucgucuaaguggacag

SEQ ID NO: 3217974 - RNA, 19 nt, Artificial Sequence
  Description of Artificial Sequence: Synthetic oligonucleotide
uuccacuuguuucacagau

SEQ ID NO: 3217975 - RNA, 19 nt, Artificial Sequence
  Description of Artificial Sequence: Synthetic oligonucleotide
uugagcucuuugcagggag

SEQ ID NO: 3217976 - RNA, 19 nt, Artificial Sequence
  Description of Artificial Sequence: Synthetic oligonucleotide
uaagccauuuucacaggca

SEQ ID NO: 3217977 - RNA, 19 nt, Artificial Sequence
  Description of Artificial Sequence: Synthetic oligonucleotide
ucuuccaacagagauuccu

SEQ ID NO: 3217978 - RNA, 19 nt, Artificial Sequence
  Description of Artificial Sequence: Synthetic oligonucleotide
ggaaaucagacccagcaug

SEQ ID NO: 3217979 - RNA, 19 nt, Artificial Sequence
  Description of Artificial Sequence: Synthetic oligonucleotide
aacgauguaucugaacccu

SEQ ID NO: 3217980 - RNA, 19 nt, Artificial Sequence
  Description of Artificial Sequence: Synthetic oligonucleotide
caugaauaaagguguugag

SEQ ID NO: 3217981 - RNA, 19 nt, Artificial Sequence
  Description of Artificial Sequence: Synthetic oligonucleotide
aagccauuuucacaggcaa

SEQ ID NO: 3217982 - RNA, 19 nt, Artificial Sequence
  Description of Artificial Sequence: Synthetic oligonucleotide
aaggggcccagacucauug

SEQ ID NO: 3217983 - RNA, 19 nt, Artificial Sequence
  Description of Artificial Sequence: Synthetic oligonucleotide
ugguucaggaaugugauau

SEQ ID NO: 3217984 - RNA, 19 nt, Artificial Sequence
  Description of Artificial Sequence: Synthetic oligonucleotide
uugucaucucuuccaacag

SEQ ID NO: 3217985 - RNA, 19 nt, Artificial Sequence
  Description of Artificial Sequence: Synthetic oligonucleotide
uuggugccaugaauaaagg

SEQ ID NO: 3217986 - RNA, 19 nt, Artificial Sequence
  Description of Artificial Sequence: Synthetic oligonucleotide
gugaucuggaauugagagg

SEQ ID NO: 3217987 - RNA, 19 nt, Artificial Sequence
  Description of Artificial Sequence: Synthetic oligonucleotide
ucgccuucucauuauacug

SEQ ID NO: 3217988 - RNA, 19 nt, Artificial Sequence
  Description of Artificial Sequence: Synthetic oligonucleotide
uccacuaugccugcaaaug

SEQ ID NO: 3217989 - RNA, 19 nt, Artificial Sequence
  Description of Artificial Sequence: Synthetic oligonucleotide
aguaucugucgucccgacc

SEQ ID NO: 3217990 - RNA, 19 nt, Artificial Sequence
  Description of Artificial Sequence: Synthetic oligonucleotide
ggugccaugaauaaaggug

SEQ ID NO: 3217991 - RNA, 19 nt, Artificial Sequence
  Description of Artificial Sequence: Synthetic oligonucleotide
aaaauuuacagauacaaac

SEQ ID NO: 3217992 - RNA, 19 nt, Artificial Sequence
  Description of Artificial Sequence: Synthetic oligonucleotide
aaaacauaagacuuacccc

SEQ ID NO: 3217993 - RNA, 19 nt, Artificial Sequence
  Description of Artificial Sequence: Synthetic oligonucleotide
ucaauuauaaaacauguca

SEQ ID NO: 3217994 - RNA, 19 nt, Artificial Sequence
  Description of Artificial Sequence: Synthetic oligonucleotide
aaagaaaacaucuuuaaaa

SEQ ID NO: 3217995 - RNA, 19 nt, Artificial Sequence
  Description of Artificial Sequence: Synthetic oligonucleotide
aagaauucucuauaaaauc

SEQ ID NO: 3217996 - RNA, 19 nt, Artificial Sequence
  Description of Artificial Sequence: Synthetic oligonucleotide
uauaaaacaugucaaaaga

SEQ ID NO: 3217997 - RNA, 19 nt, Artificial Sequence
  Description of Artificial Sequence: Synthetic oligonucleotide
aauuuacagauacaaacag

SEQ ID NO: 3217998 - RNA, 19 nt, Artificial Sequence
  Description of Artificial Sequence: Synthetic oligonucleotide
acaucuuuaaaauuuacag

SEQ ID NO: 3217999 - RNA, 19 nt, Artificial Sequence
  Description of Artificial Sequence: Synthetic oligonucleotide
uuauucacaaaacauaaga

SEQ ID NO: 3218000 - RNA, 19 nt, Artificial Sequence
  Description of Artificial Sequence: Synthetic oligonucleotide
aaacauaagacuuaccccu

SEQ ID NO: 3218001 - RNA, 19 nt, Artificial Sequence
  Description of Artificial Sequence: Synthetic oligonucleotide
uuuacagauacaaacaggu

SEQ ID NO: 3218002 - RNA, 19 nt, Artificial Sequence
  Description of Artificial Sequence: Synthetic oligonucleotide
caaaacauaagacuuaccc

SEQ ID NO: 3218003 - RNA, 19 nt, Artificial Sequence
  Description of Artificial Sequence: Synthetic oligonucleotide
uucucuauaaaauccaucc

SEQ ID NO: 3218004 - RNA, 19 nt, Artificial Sequence
  Description of Artificial Sequence: Synthetic oligonucleotide
uuauaaaacaugucaaaag

SEQ ID NO: 3218005 - RNA, 19 nt, Artificial Sequence
  Description of Artificial Sequence: Synthetic oligonucleotide
acaaacagguacuuuauac

SEQ ID NO: 3218006 - RNA, 19 nt, Artificial Sequence
  Description of Artificial Sequence: Synthetic oligonucleotide
auuuguuucuuuuauucac

SEQ ID NO: 3218007 - RNA, 19 nt, Artificial Sequence
  Description of Artificial Sequence: Synthetic oligonucleotide
ucuuugauucucuagaaug

SEQ ID NO: 3218008 - RNA, 19 nt, Artificial Sequence
  Description of Artificial Sequence: Synthetic oligonucleotide
uuuuauucacaaaacauaa

SEQ ID NO: 3218009 - RNA, 19 nt, Artificial Sequence
  Description of Artificial Sequence: Synthetic oligonucleotide
cuuuaaaauuuacagauac

SEQ ID NO: 3218010 - RNA, 19 nt, Artificial Sequence
  Description of Artificial Sequence: Synthetic oligonucleotide
aucuuuaaaauuuacagau

SEQ ID NO: 3218011 - RNA, 19 nt, Artificial Sequence
  Description of Artificial Sequence: Synthetic oligonucleotide
aagaaaacaucuuuaaaau

SEQ ID NO: 3218012 - RNA, 19 nt, Artificial Sequence
  Description of Artificial Sequence: Synthetic oligonucleotide
agaauucucuauaaaaucc

SEQ ID NO: 3218013 - RNA, 19 nt, Artificial Sequence
  Description of Artificial Sequence: Synthetic oligonucleotide
uacagauacaaacagguac

SEQ ID NO: 3218014 - RNA, 19 nt, Artificial Sequence
  Description of Artificial Sequence: Synthetic oligonucleotide
uuaaaauuuacagauacaa

SEQ ID NO: 3218015 - RNA, 19 nt, Artificial Sequence
  Description of Artificial Sequence: Synthetic oligonucleotide
uucucuagaauguucagag

SEQ ID NO: 3218016 - RNA, 19 nt, Artificial Sequence
  Description of Artificial Sequence: Synthetic oligonucleotide
aaacaugucaaaagaaaac

SEQ ID NO: 3218017 - RNA, 19 nt, Artificial Sequence
  Description of Artificial Sequence: Synthetic oligonucleotide
gaauguaaggcauacucag

SEQ ID NO: 3218018 - RNA, 19 nt, Artificial Sequence
  Description of Artificial Sequence: Synthetic oligonucleotide
ugucaauuauaaaacaugu

SEQ ID NO: 3218019 - RNA, 19 nt, Artificial Sequence
  Description of Artificial Sequence: Synthetic oligonucleotide
aauuauaaaacaugucaaa

SEQ ID NO: 3218020 - RNA, 19 nt, Artificial Sequence
  Description of Artificial Sequence: Synthetic oligonucleotide
agaugugucaauuauaaaa

SEQ ID NO: 3218021 - RNA, 19 nt, Artificial Sequence
  Description of Artificial Sequence: Synthetic oligonucleotide
uugaugauuuuacagaccu

SEQ ID NO: 3218022 - RNA, 19 nt, Artificial Sequence
  Description of Artificial Sequence: Synthetic oligonucleotide
auaaaauccauccauguaa

SEQ ID NO: 3218023 - RNA, 19 nt, Artificial Sequence
  Description of Artificial Sequence: Synthetic oligonucleotide
uuucuugaugauuuuacag

SEQ ID NO: 3218024 - RNA, 19 nt, Artificial Sequence
  Description of Artificial Sequence: Synthetic oligonucleotide
gaauguucagaguaucugg

SEQ ID NO: 3218025 - RNA, 19 nt, Artificial Sequence
  Description of Artificial Sequence: Synthetic oligonucleotide
ucuuuuauucacaaaacau

SEQ ID NO: 3218026 - RNA, 19 nt, Artificial Sequence
  Description of Artificial Sequence: Synthetic oligonucleotide
uaaaacaugucaaaagaaa

SEQ ID NO: 3218027 - RNA, 19 nt, Artificial Sequence
  Description of Artificial Sequence: Synthetic oligonucleotide
ucuauaaaauccauccaug

SEQ ID NO: 3218028 - RNA, 19 nt, Artificial Sequence
  Description of Artificial Sequence: Synthetic oligonucleotide
auucacaaaacauaagacu

SEQ ID NO: 3218029 - RNA, 19 nt, Artificial Sequence
  Description of Artificial Sequence: Synthetic oligonucleotide
uauucacaaaacauaagac

SEQ ID NO: 3218030 - RNA, 19 nt, Artificial Sequence
  Description of Artificial Sequence: Synthetic oligonucleotide
uucacaaaacauaagacuu

SEQ ID NO: 3218031 - RNA, 19 nt, Artificial Sequence
  Description of Artificial Sequence: Synthetic oligonucleotide
uguucagaguaucugguag

SEQ ID NO: 3218032 - RNA, 19 nt, Artificial Sequence
  Description of Artificial Sequence: Synthetic oligonucleotide
ugagaugugucaauuauaa

SEQ ID NO: 3218033 - RNA, 19 nt, Artificial Sequence
  Description of Artificial Sequence: Synthetic oligonucleotide
aacaugucaaaagaaaaca

SEQ ID NO: 3218034 - RNA, 19 nt, Artificial Sequence
  Description of Artificial Sequence: Synthetic oligonucleotide
gaugauuuuacagaccuug

SEQ ID NO: 3218035 - RNA, 19 nt, Artificial Sequence
  Description of Artificial Sequence: Synthetic oligonucleotide
uucuuuuauucacaaaaca

SEQ ID NO: 3218036 - RNA, 19 nt, Artificial Sequence
  Description of Artificial Sequence: Synthetic oligonucleotide
uuuacagaccuugagaugu

SEQ ID NO: 3218037 - RNA, 19 nt, Artificial Sequence
  Description of Artificial Sequence: Synthetic oligonucleotide
aaauuuacagauacaaaca

SEQ ID NO: 3218038 - RNA, 19 nt, Artificial Sequence
  Description of Artificial Sequence: Synthetic oligonucleotide
uucucuuugauucucuaga

SEQ ID NO: 3218039 - RNA, 19 nt, Artificial Sequence
  Description of Artificial Sequence: Synthetic oligonucleotide
uauacaagaauucucuaua

SEQ ID NO: 3218040 - RNA, 19 nt, Artificial Sequence
  Description of Artificial Sequence: Synthetic oligonucleotide
uuuauucacaaaacauaag

SEQ ID NO: 3218041 - RNA, 19 nt, Artificial Sequence
  Description of Artificial Sequence: Synthetic oligonucleotide
uuuucuaaugagcauuugu

SEQ ID NO: 3218042 - RNA, 19 nt, Artificial Sequence
  Description of Artificial Sequence: Synthetic oligonucleotide
uucuugaugauuuuacaga

SEQ ID NO: 3218043 - RNA, 19 nt, Artificial Sequence
  Description of Artificial Sequence: Synthetic oligonucleotide
aaaagaaaacaucuuuaaa

SEQ ID NO: 3218044 - RNA, 19 nt, Artificial Sequence
  Description of Artificial Sequence: Synthetic oligonucleotide
uuuaaaauuuacagauaca

SEQ ID NO: 3218045 - RNA, 19 nt, Artificial Sequence
  Description of Artificial Sequence: Synthetic oligonucleotide
auuuuacagaccuugagau

SEQ ID NO: 3218046 - RNA, 19 nt, Artificial Sequence
  Description of Artificial Sequence: Synthetic oligonucleotide
guuucuuuuauucacaaaa

SEQ ID NO: 3218047 - RNA, 19 nt, Artificial Sequence
  Description of Artificial Sequence: Synthetic oligonucleotide
ucaaaagaaaacaucuuua

SEQ ID NO: 3218048 - RNA, 19 nt, Artificial Sequence
  Description of Artificial Sequence: Synthetic oligonucleotide
ucuguugagacccuuuucu

SEQ ID NO: 3218049 - RNA, 19 nt, Artificial Sequence
  Description of Artificial Sequence: Synthetic oligonucleotide
aaacagguacuuuauacaa

SEQ ID NO: 3218050 - RNA, 19 nt, Artificial Sequence
  Description of Artificial Sequence: Synthetic oligonucleotide
ugauucucuagaauguuca

SEQ ID NO: 3218051 - RNA, 19 nt, Artificial Sequence
  Description of Artificial Sequence: Synthetic oligonucleotide
gaugugucaauuauaaaac

SEQ ID NO: 3218052 - RNA, 19 nt, Artificial Sequence
  Description of Artificial Sequence: Synthetic oligonucleotide
acaagaauucucuauaaaa

SEQ ID NO: 3218053 - RNA, 19 nt, Artificial Sequence
  Description of Artificial Sequence: Synthetic oligonucleotide
ucuaaugagcauuuguuuc

SEQ ID NO: 3218054 - RNA, 19 nt, Artificial Sequence
  Description of Artificial Sequence: Synthetic oligonucleotide
ugauuuuacagaccuugag

SEQ ID NO: 3218055 - RNA, 19 nt, Artificial Sequence
  Description of Artificial Sequence: Synthetic oligonucleotide
ucuugaugauuuuacagac

SEQ ID NO: 3218056 - RNA, 19 nt, Artificial Sequence
  Description of Artificial Sequence: Synthetic oligonucleotide
uuucuuuuauucacaaaac

SEQ ID NO: 3218057 - RNA, 19 nt, Artificial Sequence
  Description of Artificial Sequence: Synthetic oligonucleotide
ucaguugucauuagaauua

SEQ ID NO: 3218058 - RNA, 19 nt, Artificial Sequence
  Description of Artificial Sequence: Synthetic oligonucleotide
gauuuuacagaccuugaga

SEQ ID NO: 3218059 - RNA, 19 nt, Artificial Sequence
  Description of Artificial Sequence: Synthetic oligonucleotide
ugaauguaaggcauacuca

SEQ ID NO: 3218060 - RNA, 19 nt, Artificial Sequence
  Description of Artificial Sequence: Synthetic oligonucleotide
gauacaaacagguacuuua

SEQ ID NO: 3218061 - RNA, 19 nt, Artificial Sequence
  Description of Artificial Sequence: Synthetic oligonucleotide
ugugucaauuauaaaacau

SEQ ID NO: 3218062 - RNA, 19 nt, Artificial Sequence
  Description of Artificial Sequence: Synthetic oligonucleotide
uaaaauuuacagauacaaa

SEQ ID NO: 3218063 - RNA, 19 nt, Artificial Sequence
  Description of Artificial Sequence: Synthetic oligonucleotide
uuuguuucuuuuauucaca

SEQ ID NO: 3218064 - RNA, 19 nt, Artificial Sequence
  Description of Artificial Sequence: Synthetic oligonucleotide
uuucuaaugagcauuuguu

SEQ ID NO: 3218065 - RNA, 19 nt, Artificial Sequence
  Description of Artificial Sequence: Synthetic oligonucleotide
cuuuucuugaugauuuuac

SEQ ID NO: 3218066 - RNA, 19 nt, Artificial Sequence
  Description of Artificial Sequence: Synthetic oligonucleotide
aaaacaugucaaaagaaaa

SEQ ID NO: 3218067 - RNA, 19 nt, Artificial Sequence
  Description of Artificial Sequence: Synthetic oligonucleotide
aagacuuaccccucuguug

SEQ ID NO: 3218068 - RNA, 19 nt, Artificial Sequence
  Description of Artificial Sequence: Synthetic oligonucleotide
cucggcaccauucugauac

SEQ ID NO: 3218069 - RNA, 19 nt, Artificial Sequence
  Description of Artificial Sequence: Synthetic oligonucleotide
aagacuucgcaagugaaug

SEQ ID NO: 3218070 - RNA, 19 nt, Artificial Sequence
  Description of Artificial Sequence: Synthetic oligonucleotide
aagugaauguaaggcauac

SEQ ID NO: 3218071 - RNA, 19 nt, Artificial Sequence
  Description of Artificial Sequence: Synthetic oligonucleotide
uuauacaagaauucucuau

SEQ ID NO: 3218072 - RNA, 19 nt, Artificial Sequence
  Description of Artificial Sequence: Synthetic oligonucleotide
acagguacuuuauacaaga

SEQ ID NO: 3218073 - RNA, 19 nt, Artificial Sequence
  Description of Artificial Sequence: Synthetic oligonucleotide
ucuuguuggagacuuuucu

SEQ ID NO: 3218074 - RNA, 19 nt, Artificial Sequence
  Description of Artificial Sequence: Synthetic oligonucleotide
uucgcaagugaauguaagg

SEQ ID NO: 3218075 - RNA, 19 nt, Artificial Sequence
  Description of Artificial Sequence: Synthetic oligonucleotide
caugucaaaagaaaacauc

SEQ ID NO: 3218076 - RNA, 19 nt, Artificial Sequence
  Description of Artificial Sequence: Synthetic oligonucleotide
aaacaucuuuaaaauuuac

SEQ ID NO: 3218077 - RNA, 19 nt, Artificial Sequence
  Description of Artificial Sequence: Synthetic oligonucleotide
gugaauguaaggcauacuc

SEQ ID NO: 3218078 - RNA, 19 nt, Artificial Sequence
  Description of Artificial Sequence: Synthetic oligonucleotide
uauaaaauccauccaugua

SEQ ID NO: 3218079 - RNA, 19 nt, Artificial Sequence
  Description of Artificial Sequence: Synthetic oligonucleotide
aacaucuuuaaaauuuaca

SEQ ID NO: 3218080 - RNA, 19 nt, Artificial Sequence
  Description of Artificial Sequence: Synthetic oligonucleotide
uuuucuugaugauuuuaca

SEQ ID NO: 3218081 - RNA, 19 nt, Artificial Sequence
  Description of Artificial Sequence: Synthetic oligonucleotide
augucaaaagaaaacaucu

SEQ ID NO: 3218082 - RNA, 19 nt, Artificial Sequence
  Description of Artificial Sequence: Synthetic oligonucleotide
uacucaguugucauuagaa

SEQ ID NO: 3218083 - RNA, 19 nt, Artificial Sequence
  Description of Artificial Sequence: Synthetic oligonucleotide
acuuuauacaagaauucuc

SEQ ID NO: 3218084 - RNA, 19 nt, Artificial Sequence
  Description of Artificial Sequence: Synthetic oligonucleotide
auuauaaaacaugucaaaa

SEQ ID NO: 3218085 - RNA, 19 nt, Artificial Sequence
  Description of Artificial Sequence: Synthetic oligonucleotide
uaaaauccauccauguaaa

SEQ ID NO: 3218086 - RNA, 19 nt, Artificial Sequence
  Description of Artificial Sequence: Synthetic oligonucleotide
auuuacagauacaaacagg

SEQ ID NO: 3218087 - RNA, 19 nt, Artificial Sequence
  Description of Artificial Sequence: Synthetic oligonucleotide
uuucucuuugauucucuag

SEQ ID NO: 3218088 - RNA, 19 nt, Artificial Sequence
  Description of Artificial Sequence: Synthetic oligonucleotide
uuguuggagacuuuucucu

SEQ ID NO: 3218089 - RNA, 19 nt, Artificial Sequence
  Description of Artificial Sequence: Synthetic oligonucleotide
ccugauuucucuuugauuc

SEQ ID NO: 3218090 - RNA, 19 nt, Artificial Sequence
  Description of Artificial Sequence: Synthetic oligonucleotide
ucucuauaaaauccaucca

SEQ ID NO: 3218091 - RNA, 19 nt, Artificial Sequence
  Description of Artificial Sequence: Synthetic oligonucleotide
aauacuguagcucuguggc

SEQ ID NO: 3218092 - RNA, 19 nt, Artificial Sequence
  Description of Artificial Sequence: Synthetic oligonucleotide
aagaauaaauauuuucuac

SEQ ID NO: 3218093 - RNA, 19 nt, Artificial Sequence
  Description of Artificial Sequence: Synthetic oligonucleotide
uuauauaagaaaauuucag

SEQ ID NO: 3218094 - RNA, 19 nt, Artificial Sequence
  Description of Artificial Sequence: Synthetic oligonucleotide
auuaguacaagcuauaaga

SEQ ID NO: 3218095 - RNA, 19 nt, Artificial Sequence
  Description of Artificial Sequence: Synthetic oligonucleotide
aaacaaauguaucugacug

SEQ ID NO: 3218096 - RNA, 19 nt, Artificial Sequence
  Description of Artificial Sequence: Synthetic oligonucleotide
uuuucuacaagcaaauccc

SEQ ID NO: 3218097 - RNA, 19 nt, Artificial Sequence
  Description of Artificial Sequence: Synthetic oligonucleotide
uaauuacugaacaaaacag

SEQ ID NO: 3218098 - RNA, 19 nt, Artificial Sequence
  Description of Artificial Sequence: Synthetic oligonucleotide
ucucuuuucaacuagcucc

SEQ ID NO: 3218099 - RNA, 19 nt, Artificial Sequence
  Description of Artificial Sequence: Synthetic oligonucleotide
aaaauaaauuccauaauag

SEQ ID NO: 3218100 - RNA, 19 nt, Artificial Sequence
  Description of Artificial Sequence: Synthetic oligonucleotide
uaaguguucaaacaaaugu

SEQ ID NO: 3218101 - RNA, 19 nt, Artificial Sequence
  Description of Artificial Sequence: Synthetic oligonucleotide
uauauaagaaaauuucagc

SEQ ID NO: 3218102 - RNA, 19 nt, Artificial Sequence
  Description of Artificial Sequence: Synthetic oligonucleotide
aguaaaauaaauuccauaa

SEQ ID NO: 3218103 - RNA, 19 nt, Artificial Sequence
  Description of Artificial Sequence: Synthetic oligonucleotide
aaguuuuaaaguaaacccc

SEQ ID NO: 3218104 - RNA, 19 nt, Artificial Sequence
  Description of Artificial Sequence: Synthetic oligonucleotide
aagaguauauauuucuaag

SEQ ID NO: 3218105 - RNA, 19 nt, Artificial Sequence
  Description of Artificial Sequence: Synthetic oligonucleotide
aauaccagcauauaucagu

SEQ ID NO: 3218106 - RNA, 19 nt, Artificial Sequence
  Description of Artificial Sequence: Synthetic oligonucleotide
auauaagaaaauuucagca

SEQ ID NO: 3218107 - RNA, 19 nt, Artificial Sequence
  Description of Artificial Sequence: Synthetic oligonucleotide
auaauuacugaacaaaaca

SEQ ID NO: 3218108 - RNA, 19 nt, Artificial Sequence
  Description of Artificial Sequence: Synthetic oligonucleotide
uguucuauauuuauaggcc

SEQ ID NO: 3218109 - RNA, 19 nt, Artificial Sequence
  Description of Artificial Sequence: Synthetic oligonucleotide
aaauaaauuccauaauagu

SEQ ID NO: 3218110 - RNA, 19 nt, Artificial Sequence
  Description of Artificial Sequence: Synthetic oligonucleotide
aauuuaauagaaaagagua

SEQ ID NO: 3218111 - RNA, 19 nt, Artificial Sequence
  Description of Artificial Sequence: Synthetic oligonucleotide
auaaauggaaguuuuaaga

SEQ ID NO: 3218112 - RNA, 19 nt, Artificial Sequence
  Description of Artificial Sequence: Synthetic oligonucleotide
augaagaauaaauauuuuc

SEQ ID NO: 3218113 - RNA, 19 nt, Artificial Sequence
  Description of Artificial Sequence: Synthetic oligonucleotide
agaaauaauguaguguugc

SEQ ID NO: 3218114 - RNA, 19 nt, Artificial Sequence
  Description of Artificial Sequence: Synthetic oligonucleotide
aaaacuauuaguacaagcu

SEQ ID NO: 3218115 - RNA, 19 nt, Artificial Sequence
  Description of Artificial Sequence: Synthetic oligonucleotide
uauaucaguaguaacacaa

SEQ ID NO: 3218116 - RNA, 19 nt, Artificial Sequence
  Description of Artificial Sequence: Synthetic oligonucleotide
uuuuaagaaauaauguagu

SEQ ID NO: 3218117 - RNA, 19 nt, Artificial Sequence
  Description of Artificial Sequence: Synthetic oligonucleotide
auauuucuaaguuacagcu

SEQ ID NO: 3218118 - RNA, 19 nt, Artificial Sequence
  Description of Artificial Sequence: Synthetic oligonucleotide
caagcuauaagauaucuug

SEQ ID NO: 3218119 - RNA, 19 nt, Artificial Sequence
  Description of Artificial Sequence: Synthetic oligonucleotide
uaauaugaagaauaaauau

SEQ ID NO: 3218120 - RNA, 19 nt, Artificial Sequence
  Description of Artificial Sequence: Synthetic oligonucleotide
auaaauuccauaauaguuc

SEQ ID NO: 3218121 - RNA, 19 nt, Artificial Sequence
  Description of Artificial Sequence: Synthetic oligonucleotide
uuuaaauaaucccugaauu

SEQ ID NO: 3218122 - RNA, 19 nt, Artificial Sequence
  Description of Artificial Sequence: Synthetic oligonucleotide
gauaaauggaaguuuuaag

SEQ ID NO: 3218123 - RNA, 19 nt, Artificial Sequence
  Description of Artificial Sequence: Synthetic oligonucleotide
aaauacuguagcucugugg

SEQ ID NO: 3218124 - RNA, 19 nt, Artificial Sequence
  Description of Artificial Sequence: Synthetic oligonucleotide
uuagacuugaccuauaauu

SEQ ID NO: 3218125 - RNA, 19 nt, Artificial Sequence
  Description of Artificial Sequence: Synthetic oligonucleotide
cuauaagauaucuugcugc

SEQ ID NO: 3218126 - RNA, 19 nt, Artificial Sequence
  Description of Artificial Sequence: Synthetic oligonucleotide
uauauuucuaaguuacagc

SEQ ID NO: 3218127 - RNA, 19 nt, Artificial Sequence
  Description of Artificial Sequence: Synthetic oligonucleotide
uaagaaauaauguaguguu

SEQ ID NO: 3218128 - RNA, 19 nt, Artificial Sequence
  Description of Artificial Sequence: Synthetic oligonucleotide
ucaguaguaacacaaacau

SEQ ID NO: 3218129 - RNA, 19 nt, Artificial Sequence
  Description of Artificial Sequence: Synthetic oligonucleotide
aaaauuucagcacaacaaa

SEQ ID NO: 3218130 - RNA, 19 nt, Artificial Sequence
  Description of Artificial Sequence: Synthetic oligonucleotide
aaauuuaauagaaaagagu

SEQ ID NO: 3218131 - RNA, 19 nt, Artificial Sequence
  Description of Artificial Sequence: Synthetic oligonucleotide
uauaagaaaauuucagcac

SEQ ID NO: 3218132 - RNA, 19 nt, Artificial Sequence
  Description of Artificial Sequence: Synthetic oligonucleotide
uuucagcacaacaaaagag

SEQ ID NO: 3218133 - RNA, 19 nt, Artificial Sequence
  Description of Artificial Sequence: Synthetic oligonucleotide
aauaaauuccauaauaguu

SEQ ID NO: 3218134 - RNA, 19 nt, Artificial Sequence
  Description of Artificial Sequence: Synthetic oligonucleotide
gaacaaaacagacauguac

SEQ ID NO: 3218135 - RNA, 19 nt, Artificial Sequence
  Description of Artificial Sequence: Synthetic oligonucleotide
aacccaauuaccaaaauca

SEQ ID NO: 3218136 - RNA, 19 nt, Artificial Sequence
  Description of Artificial Sequence: Synthetic oligonucleotide
uuuaagaaauaauguagug

SEQ ID NO: 3218137 - RNA, 19 nt, Artificial Sequence
  Description of Artificial Sequence: Synthetic oligonucleotide
uuuuaaauaaucccugaau

SEQ ID NO: 3218138 - RNA, 19 nt, Artificial Sequence
  Description of Artificial Sequence: Synthetic oligonucleotide
auaagaaaauuucagcaca

SEQ ID NO: 3218139 - RNA, 19 nt, Artificial Sequence
  Description of Artificial Sequence: Synthetic oligonucleotide
uauaauuacugaacaaaac

SEQ ID NO: 3218140 - RNA, 19 nt, Artificial Sequence
  Description of Artificial Sequence: Synthetic oligonucleotide
cuuggcuacauuaugcucc

SEQ ID NO: 3218141 - RNA, 19 nt, Artificial Sequence
  Description of Artificial Sequence: Synthetic oligonucleotide
aauuucagcacaacaaaag

SEQ ID NO: 3218142 - RNA, 19 nt, Artificial Sequence
  Description of Artificial Sequence: Synthetic oligonucleotide
uaaguuacagcuaucuaac

SEQ ID NO: 3218143 - RNA, 19 nt, Artificial Sequence
  Description of Artificial Sequence: Synthetic oligonucleotide
uuuaauagaaaagaguaua

SEQ ID NO: 3218144 - RNA, 19 nt, Artificial Sequence
  Description of Artificial Sequence: Synthetic oligonucleotide
aaauauuuucuacaagcaa

SEQ ID NO: 3218145 - RNA, 19 nt, Artificial Sequence
  Description of Artificial Sequence: Synthetic oligonucleotide
aaagaguauauauuucuaa

SEQ ID NO: 3218146 - RNA, 19 nt, Artificial Sequence
  Description of Artificial Sequence: Synthetic oligonucleotide
uauuuauaggcccaaccca

SEQ ID NO: 3218147 - RNA, 19 nt, Artificial Sequence
  Description of Artificial Sequence: Synthetic oligonucleotide
uagaaaagaguauauauuu

SEQ ID NO: 3218148 - RNA, 19 nt, Artificial Sequence
  Description of Artificial Sequence: Synthetic oligonucleotide
uaaauggaaguuuuaagaa

SEQ ID NO: 3218149 - RNA, 19 nt, Artificial Sequence
  Description of Artificial Sequence: Synthetic oligonucleotide
uuaagaaauaauguagugu

SEQ ID NO: 3218150 - RNA, 19 nt, Artificial Sequence
  Description of Artificial Sequence: Synthetic oligonucleotide
ugucccaacacuuaauaug

SEQ ID NO: 3218151 - RNA, 19 nt, Artificial Sequence
  Description of Artificial Sequence: Synthetic oligonucleotide
uacauuaugcuccaaaauu

SEQ ID NO: 3218152 - RNA, 19 nt, Artificial Sequence
  Description of Artificial Sequence: Synthetic oligonucleotide
uacaauaaguguucaaaca

SEQ ID NO: 3218153 - RNA, 19 nt, Artificial Sequence
  Description of Artificial Sequence: Synthetic oligonucleotide
uaaauuccauaauaguuca

SEQ ID NO: 3218154 - RNA, 19 nt, Artificial Sequence
  Description of Artificial Sequence: Synthetic oligonucleotide
auauauuucuaaguuacag

SEQ ID NO: 3218155 - RNA, 19 nt, Artificial Sequence
  Description of Artificial Sequence: Synthetic oligonucleotide
uguauugugucccaacacu

SEQ ID NO: 3218156 - RNA, 19 nt, Artificial Sequence
  Description of Artificial Sequence: Synthetic oligonucleotide
aguaguaacacaaacauuu

SEQ ID NO: 3218157 - RNA, 19 nt, Artificial Sequence
  Description of Artificial Sequence: Synthetic oligonucleotide
guuacagcuaucuaacccc

SEQ ID NO: 3218158 - RNA, 19 nt, Artificial Sequence
  Description of Artificial Sequence: Synthetic oligonucleotide
aauaugaagaauaaauauu

SEQ ID NO: 3218159 - RNA, 19 nt, Artificial Sequence
  Description of Artificial Sequence: Synthetic oligonucleotide
aaguuacagcuaucuaacc

SEQ ID NO: 3218160 - RNA, 19 nt, Artificial Sequence
  Description of Artificial Sequence: Synthetic oligonucleotide
aaauggaaguuuuaagaaa

SEQ ID NO: 3218161 - RNA, 19 nt, Artificial Sequence
  Description of Artificial Sequence: Synthetic oligonucleotide
ugaccuauaauuacugaac

SEQ ID NO: 3218162 - RNA, 19 nt, Artificial Sequence
  Description of Artificial Sequence: Synthetic oligonucleotide
agaaaauuucagcacaaca

SEQ ID NO: 3218163 - RNA, 19 nt, Artificial Sequence
  Description of Artificial Sequence: Synthetic oligonucleotide
uuaauagaaaagaguauau

SEQ ID NO: 3218164 - RNA, 19 nt, Artificial Sequence
  Description of Artificial Sequence: Synthetic oligonucleotide
aagcuauaagauaucuugc

SEQ ID NO: 3218165 - RNA, 19 nt, Artificial Sequence
  Description of Artificial Sequence: Synthetic oligonucleotide
cuuaauaugaagaauaaau

SEQ ID NO: 3218166 - RNA, 19 nt, Artificial Sequence
  Description of Artificial Sequence: Synthetic oligonucleotide
uaagauaucuugcugcuau

SEQ ID NO: 3218167 - RNA, 19 nt, Artificial Sequence
  Description of Artificial Sequence: Synthetic oligonucleotide
uucaauacgcucccgaccu

SEQ ID NO: 3218168 - RNA, 19 nt, Artificial Sequence
  Description of Artificial Sequence: Synthetic oligonucleotide
acaauaaguguucaaacaa

SEQ ID NO: 3218169 - RNA, 19 nt, Artificial Sequence
  Description of Artificial Sequence: Synthetic oligonucleotide
auuucuaaguuacagcuau

SEQ ID NO: 3218170 - RNA, 19 nt, Artificial Sequence
  Description of Artificial Sequence: Synthetic oligonucleotide
ugcuccaaaauuuaauaga

SEQ ID NO: 3218171 - RNA, 19 nt, Artificial Sequence
  Description of Artificial Sequence: Synthetic oligonucleotide
agaguauauauuucuaagu

SEQ ID NO: 3218172 - RNA, 19 nt, Artificial Sequence
  Description of Artificial Sequence: Synthetic oligonucleotide
agcauauaucaguaguaac

SEQ ID NO: 3218173 - RNA, 19 nt, Artificial Sequence
  Description of Artificial Sequence: Synthetic oligonucleotide
ucaaacaaauguaucugac

SEQ ID NO: 3218174 - RNA, 19 nt, Artificial Sequence
  Description of Artificial Sequence: Synthetic oligonucleotide
agacuugaccuauaauuac

SEQ ID NO: 3218175 - RNA, 19 nt, Artificial Sequence
  Description of Artificial Sequence: Synthetic oligonucleotide
ugagcacaaauucuguagc

SEQ ID NO: 3218176 - RNA, 19 nt, Artificial Sequence
  Description of Artificial Sequence: Synthetic oligonucleotide
aauggaaguuuuaagaaau

SEQ ID NO: 3218177 - RNA, 19 nt, Artificial Sequence
  Description of Artificial Sequence: Synthetic oligonucleotide
aauuacugaacaaaacaga

SEQ ID NO: 3218178 - RNA, 19 nt, Artificial Sequence
  Description of Artificial Sequence: Synthetic oligonucleotide
uguacaauaaguguucaaa

SEQ ID NO: 3218179 - RNA, 19 nt, Artificial Sequence
  Description of Artificial Sequence: Synthetic oligonucleotide
uucacuucucuuuucaacu

SEQ ID NO: 3218180 - RNA, 19 nt, Artificial Sequence
  Description of Artificial Sequence: Synthetic oligonucleotide
aaacuauuaguacaagcua

SEQ ID NO: 3218181 - RNA, 19 nt, Artificial Sequence
  Description of Artificial Sequence: Synthetic oligonucleotide
uuuugguugcuguaauuag

SEQ ID NO: 3218182 - RNA, 19 nt, Artificial Sequence
  Description of Artificial Sequence: Synthetic oligonucleotide
uuaaauaaucccugaauuu

SEQ ID NO: 3218183 - RNA, 19 nt, Artificial Sequence
  Description of Artificial Sequence: Synthetic oligonucleotide
uaucaguaguaacacaaac

SEQ ID NO: 3218184 - RNA, 19 nt, Artificial Sequence
  Description of Artificial Sequence: Synthetic oligonucleotide
aguacaagcuauaagauau

SEQ ID NO: 3218185 - RNA, 19 nt, Artificial Sequence
  Description of Artificial Sequence: Synthetic oligonucleotide
gaaauaauguaguguugcc

SEQ ID NO: 3218186 - RNA, 19 nt, Artificial Sequence
  Description of Artificial Sequence: Synthetic oligonucleotide
uauaagauaucuugcugcu

SEQ ID NO: 3218187 - RNA, 19 nt, Artificial Sequence
  Description of Artificial Sequence: Synthetic oligonucleotide
gaaaagaguauauauuucu

SEQ ID NO: 3218188 - RNA, 19 nt, Artificial Sequence
  Description of Artificial Sequence: Synthetic oligonucleotide
cagacauguacaauaagug

SEQ ID NO: 3218189 - RNA, 19 nt, Artificial Sequence
  Description of Artificial Sequence: Synthetic oligonucleotide
ccccauaaaagauaaaugg

SEQ ID NO: 3218190 - RNA, 19 nt, Artificial Sequence
  Description of Artificial Sequence: Synthetic oligonucleotide
aaauaauguaguguugccu

SEQ ID NO: 3218191 - RNA, 19 nt, Artificial Sequence
  Description of Artificial Sequence: Synthetic oligonucleotide
aaauucacauuucugaggc

SEQ ID NO: 3218192 - RNA, 19 nt, Artificial Sequence
  Description of Artificial Sequence: Synthetic oligonucleotide
aacaauuuuauucagcauc

SEQ ID NO: 3218193 - RNA, 19 nt, Artificial Sequence
  Description of Artificial Sequence: Synthetic oligonucleotide
auauaaaacauuuaccugg

SEQ ID NO: 3218194 - RNA, 19 nt, Artificial Sequence
  Description of Artificial Sequence: Synthetic oligonucleotide
aauacauuuuauuugaaca

SEQ ID NO: 3218195 - RNA, 19 nt, Artificial Sequence
  Description of Artificial Sequence: Synthetic oligonucleotide
uuuaacaaaauuaaauuca

SEQ ID NO: 3218196 - RNA, 19 nt, Artificial Sequence
  Description of Artificial Sequence: Synthetic oligonucleotide
uuuaauuuaacaaaauuaa

SEQ ID NO: 3218197 - RNA, 19 nt, Artificial Sequence
  Description of Artificial Sequence: Synthetic oligonucleotide
uauauacagaacaagagcc

SEQ ID NO: 3218198 - RNA, 19 nt, Artificial Sequence
  Description of Artificial Sequence: Synthetic oligonucleotide
auuugaacauaacauaugc

SEQ ID NO: 3218199 - RNA, 19 nt, Artificial Sequence
  Description of Artificial Sequence: Synthetic oligonucleotide
auauuuauuucucuguugc

SEQ ID NO: 3218200 - RNA, 19 nt, Artificial Sequence
  Description of Artificial Sequence: Synthetic oligonucleotide
auuuaacaaaauuaaauuc

SEQ ID NO: 3218201 - RNA, 19 nt, Artificial Sequence
  Description of Artificial Sequence: Synthetic oligonucleotide
aacaaaauuaaauucacau

SEQ ID NO: 3218202 - RNA, 19 nt, Artificial Sequence
  Description of Artificial Sequence: Synthetic oligonucleotide
aaauacauuuuauuugaac

SEQ ID NO: 3218203 - RNA, 19 nt, Artificial Sequence
  Description of Artificial Sequence: Synthetic oligonucleotide
ucuggaaaagacuagacag

SEQ ID NO: 3218204 - RNA, 19 nt, Artificial Sequence
  Description of Artificial Sequence: Synthetic oligonucleotide
aaaauaacccagaaaauac

SEQ ID NO: 3218205 - RNA, 19 nt, Artificial Sequence
  Description of Artificial Sequence: Synthetic oligonucleotide
aauuuaacaaaauuaaauu

SEQ ID NO: 3218206 - RNA, 19 nt, Artificial Sequence
  Description of Artificial Sequence: Synthetic oligonucleotide
uuuuauuugaacauaacau

SEQ ID NO: 3218207 - RNA, 19 nt, Artificial Sequence
  Description of Artificial Sequence: Synthetic oligonucleotide
uaauuuaacaaaauuaaau

SEQ ID NO: 3218208 - RNA, 19 nt, Artificial Sequence
  Description of Artificial Sequence: Synthetic oligonucleotide
auuaaauucacauuucuga

SEQ ID NO: 3218209 - RNA, 19 nt, Artificial Sequence
  Description of Artificial Sequence: Synthetic oligonucleotide
aauauaaaccaaugaugac

SEQ ID NO: 3218210 - RNA, 19 nt, Artificial Sequence
  Description of Artificial Sequence: Synthetic oligonucleotide
aaaacauuuaccuggggca

SEQ ID NO: 3218211 - RNA, 19 nt, Artificial Sequence
  Description of Artificial Sequence: Synthetic oligonucleotide
uuggauaccaaguauauac

SEQ ID NO: 3218212 - RNA, 19 nt, Artificial Sequence
  Description of Artificial Sequence: Synthetic oligonucleotide
ucugaaacuaguauaguug

SEQ ID NO: 3218213 - RNA, 19 nt, Artificial Sequence
  Description of Artificial Sequence: Synthetic oligonucleotide
agaucuuccauauaaaaca

SEQ ID NO: 3218214 - RNA, 19 nt, Artificial Sequence
  Description of Artificial Sequence: Synthetic oligonucleotide
uaaaacauuuaccuggggc

SEQ ID NO: 3218215 - RNA, 19 nt, Artificial Sequence
  Description of Artificial Sequence: Synthetic oligonucleotide
uuuauuucucuguugcucg

SEQ ID NO: 3218216 - RNA, 19 nt, Artificial Sequence
  Description of Artificial Sequence: Synthetic oligonucleotide
uauaaaacauuuaccuggg

SEQ ID NO: 3218217 - RNA, 19 nt, Artificial Sequence
  Description of Artificial Sequence: Synthetic oligonucleotide
uguugcucgaauauaaacc

SEQ ID NO: 3218218 - RNA, 19 nt, Artificial Sequence
  Description of Artificial Sequence: Synthetic oligonucleotide
auuuuauucagcaucaguc

SEQ ID NO: 3218219 - RNA, 19 nt, Artificial Sequence
  Description of Artificial Sequence: Synthetic oligonucleotide
uuaaauucacauuucugag

SEQ ID NO: 3218220 - RNA, 19 nt, Artificial Sequence
  Description of Artificial Sequence: Synthetic oligonucleotide
aaauuaaauucacauuucu

SEQ ID NO: 3218221 - RNA, 19 nt, Artificial Sequence
  Description of Artificial Sequence: Synthetic oligonucleotide
auuuuauuugaacauaaca

SEQ ID NO: 3218222 - RNA, 19 nt, Artificial Sequence
  Description of Artificial Sequence: Synthetic oligonucleotide
auaacauaugcuuauauaa

SEQ ID NO: 3218223 - RNA, 19 nt, Artificial Sequence
  Description of Artificial Sequence: Synthetic oligonucleotide
uuccauauaaaacauuuac

SEQ ID NO: 3218224 - RNA, 19 nt, Artificial Sequence
  Description of Artificial Sequence: Synthetic oligonucleotide
aguauaguugaacuguuuc

SEQ ID NO: 3218225 - RNA, 19 nt, Artificial Sequence
  Description of Artificial Sequence: Synthetic oligonucleotide
agaauaaugauguuccucu

SEQ ID NO: 3218226 - RNA, 19 nt, Artificial Sequence
  Description of Artificial Sequence: Synthetic oligonucleotide
uuaacaaaauuaaauucac

SEQ ID NO: 3218227 - RNA, 19 nt, Artificial Sequence
  Description of Artificial Sequence: Synthetic oligonucleotide
ucgaauauaaaccaaugau

SEQ ID NO: 3218228 - RNA, 19 nt, Artificial Sequence
  Description of Artificial Sequence: Synthetic oligonucleotide
aaacuaguauaguugaacu

SEQ ID NO: 3218229 - RNA, 19 nt, Artificial Sequence
  Description of Artificial Sequence: Synthetic oligonucleotide
uccauauaaaacauuuacc

SEQ ID NO: 3218230 - RNA, 19 nt, Artificial Sequence
  Description of Artificial Sequence: Synthetic oligonucleotide
agaacaauuuuauucagca

SEQ ID NO: 3218231 - RNA, 19 nt, Artificial Sequence
  Description of Artificial Sequence: Synthetic oligonucleotide
uaaauucacauuucugagg

SEQ ID NO: 3218232 - RNA, 19 nt, Artificial Sequence
  Description of Artificial Sequence: Synthetic oligonucleotide
uuauuugaacauaacauau

SEQ ID NO: 3218233 - RNA, 19 nt, Artificial Sequence
  Description of Artificial Sequence: Synthetic oligonucleotide
gaauauaaaccaaugauga

SEQ ID NO: 3218234 - RNA, 19 nt, Artificial Sequence
  Description of Artificial Sequence: Synthetic oligonucleotide
uuuauuugaacauaacaua

SEQ ID NO: 3218235 - RNA, 19 nt, Artificial Sequence
  Description of Artificial Sequence: Synthetic oligonucleotide
uauaaaccaaugaugacaa

SEQ ID NO: 3218236 - RNA, 19 nt, Artificial Sequence
  Description of Artificial Sequence: Synthetic oligonucleotide
aagaggagaaacucugggg

SEQ ID NO: 3218237 - RNA, 19 nt, Artificial Sequence
  Description of Artificial Sequence: Synthetic oligonucleotide
guauauacagaacaagagc

SEQ ID NO: 3218238 - RNA, 19 nt, Artificial Sequence
  Description of Artificial Sequence: Synthetic oligonucleotide
gacagaauaaugauguucc

SEQ ID NO: 3218239 - RNA, 19 nt, Artificial Sequence
  Description of Artificial Sequence: Synthetic oligonucleotide
aaaauuaaauucacauuuc

SEQ ID NO: 3218240 - RNA, 19 nt, Artificial Sequence
  Description of Artificial Sequence: Synthetic oligonucleotide
aauuuuauucagcaucagu

SEQ ID NO: 3218241 - RNA, 19 nt, Artificial Sequence
  Description of Artificial Sequence: Synthetic oligonucleotide
gaaaagacuagacagaaua

SEQ ID NO: 3218242 - RNA, 19 nt, Artificial Sequence
  Description of Artificial Sequence: Synthetic oligonucleotide
aacauaugcuuauauaaaa

SEQ ID NO: 3218243 - RNA, 19 nt, Artificial Sequence
  Description of Artificial Sequence: Synthetic oligonucleotide
accaaguauauacagaaca

SEQ ID NO: 3218244 - RNA, 19 nt, Artificial Sequence
  Description of Artificial Sequence: Synthetic oligonucleotide
uuaauuuaacaaaauuaaa

SEQ ID NO: 3218245 - RNA, 19 nt, Artificial Sequence
  Description of Artificial Sequence: Synthetic oligonucleotide
ucuauauuuauuucucugu

SEQ ID NO: 3218246 - RNA, 19 nt, Artificial Sequence
  Description of Artificial Sequence: Synthetic oligonucleotide
uugaacauaacauaugcuu

SEQ ID NO: 3218247 - RNA, 19 nt, Artificial Sequence
  Description of Artificial Sequence: Synthetic oligonucleotide
ucugaggccaucauagugc

SEQ ID NO: 3218248 - RNA, 19 nt, Artificial Sequence
  Description of Artificial Sequence: Synthetic oligonucleotide
ucuuccauauaaaacauuu

SEQ ID NO: 3218249 - RNA, 19 nt, Artificial Sequence
  Description of Artificial Sequence: Synthetic oligonucleotide
uauuugaacauaacauaug

SEQ ID NO: 3218250 - RNA, 19 nt, Artificial Sequence
  Description of Artificial Sequence: Synthetic oligonucleotide
aaaccaaugaugacaagag

SEQ ID NO: 3218251 - RNA, 19 nt, Artificial Sequence
  Description of Artificial Sequence: Synthetic oligonucleotide
aacuaguauaguugaacug

SEQ ID NO: 3218252 - RNA, 19 nt, Artificial Sequence
  Description of Artificial Sequence: Synthetic oligonucleotide
ucagucuauauuuauuucu

SEQ ID NO: 3218253 - RNA, 19 nt, Artificial Sequence
  Description of Artificial Sequence: Synthetic oligonucleotide
auauaaaccaaugaugaca

SEQ ID NO: 3218254 - RNA, 19 nt, Artificial Sequence
  Description of Artificial Sequence: Synthetic oligonucleotide
uagaucuuccauauaaaac

SEQ ID NO: 3218255 - RNA, 19 nt, Artificial Sequence
  Description of Artificial Sequence: Synthetic oligonucleotide
uuuuauucagcaucagucu

SEQ ID NO: 3218256 - RNA, 19 nt, Artificial Sequence
  Description of Artificial Sequence: Synthetic oligonucleotide
uaaaccaaugaugacaaga

SEQ ID NO: 3218257 - RNA, 19 nt, Artificial Sequence
  Description of Artificial Sequence: Synthetic oligonucleotide
agaacaagagcccuucauc

SEQ ID NO: 3218258 - RNA, 19 nt, Artificial Sequence
  Description of Artificial Sequence: Synthetic oligonucleotide
auaaugauguuccucuuug

SEQ ID NO: 3218259 - RNA, 19 nt, Artificial Sequence
  Description of Artificial Sequence: Synthetic oligonucleotide
uuuaccuggggcaaaacaa

SEQ ID NO: 3218260 - RNA, 19 nt, Artificial Sequence
  Description of Artificial Sequence: Synthetic oligonucleotide
uauauuuauuucucuguug

SEQ ID NO: 3218261 - RNA, 19 nt, Artificial Sequence
  Description of Artificial Sequence: Synthetic oligonucleotide
aauuaaauucacauuucug

SEQ ID NO: 3218262 - RNA, 19 nt, Artificial Sequence
  Description of Artificial Sequence: Synthetic oligonucleotide
uggggcaaaacaaugaaaa

SEQ ID NO: 3218263 - RNA, 19 nt, Artificial Sequence
  Description of Artificial Sequence: Synthetic oligonucleotide
cauauaaaacauuuaccug

SEQ ID NO: 3218264 - RNA, 19 nt, Artificial Sequence
  Description of Artificial Sequence: Synthetic oligonucleotide
aaguauauacagaacaaga

SEQ ID NO: 3218265 - RNA, 19 nt, Artificial Sequence
  Description of Artificial Sequence: Synthetic oligonucleotide
aaauacaucucugaaacua

SEQ ID NO: 3218266 - RNA, 19 nt, Artificial Sequence
  Description of Artificial Sequence: Synthetic oligonucleotide
auuuauuucucuguugcuc

SEQ ID NO: 3218267 - RNA, 19 nt, Artificial Sequence
  Description of Artificial Sequence: Synthetic oligonucleotide
auaccaaguauauacagaa

SEQ ID NO: 3218268 - RNA, 19 nt, Artificial Sequence
  Description of Artificial Sequence: Synthetic oligonucleotide
aauucacauuucugaggcc

SEQ ID NO: 3218269 - RNA, 19 nt, Artificial Sequence
  Description of Artificial Sequence: Synthetic oligonucleotide
aaccaaugaugacaagagg

SEQ ID NO: 3218270 - RNA, 19 nt, Artificial Sequence
  Description of Artificial Sequence: Synthetic oligonucleotide
aguauauacagaacaagag

SEQ ID NO: 3218271 - RNA, 19 nt, Artificial Sequence
  Description of Artificial Sequence: Synthetic oligonucleotide
auuucugaggccaucauag

SEQ ID NO: 3218272 - RNA, 19 nt, Artificial Sequence
  Description of Artificial Sequence: Synthetic oligonucleotide
ucagcaucagucuauauuu

SEQ ID NO: 3218273 - RNA, 19 nt, Artificial Sequence
  Description of Artificial Sequence: Synthetic oligonucleotide
ugaacauaacauaugcuua

SEQ ID NO: 3218274 - RNA, 19 nt, Artificial Sequence
  Description of Artificial Sequence: Synthetic oligonucleotide
guuuaauuuaacaaaauua

SEQ ID NO: 3218275 - RNA, 19 nt, Artificial Sequence
  Description of Artificial Sequence: Synthetic oligonucleotide
aguugaacuguuuccuugg

SEQ ID NO: 3218276 - RNA, 19 nt, Artificial Sequence
  Description of Artificial Sequence: Synthetic oligonucleotide
uaacauaugcuuauauaaa

SEQ ID NO: 3218277 - RNA, 19 nt, Artificial Sequence
  Description of Artificial Sequence: Synthetic oligonucleotide
aagacuagacagaauaaug

SEQ ID NO: 3218278 - RNA, 19 nt, Artificial Sequence
  Description of Artificial Sequence: Synthetic oligonucleotide
ucauagugcaucccaaugu

SEQ ID NO: 3218279 - RNA, 19 nt, Artificial Sequence
  Description of Artificial Sequence: Synthetic oligonucleotide
uuugaacauaacauaugcu

SEQ ID NO: 3218280 - RNA, 19 nt, Artificial Sequence
  Description of Artificial Sequence: Synthetic oligonucleotide
guauaguugaacuguuucc

SEQ ID NO: 3218281 - RNA, 19 nt, Artificial Sequence
  Description of Artificial Sequence: Synthetic oligonucleotide
auauacagaacaagagccc

SEQ ID NO: 3218282 - RNA, 19 nt, Artificial Sequence
  Description of Artificial Sequence: Synthetic oligonucleotide
acuaguauaguugaacugu

SEQ ID NO: 3218283 - RNA, 19 nt, Artificial Sequence
  Description of Artificial Sequence: Synthetic oligonucleotide
aauacaucucugaaacuag

SEQ ID NO: 3218284 - RNA, 19 nt, Artificial Sequence
  Description of Artificial Sequence: Synthetic oligonucleotide
aaucuggaaaagacuagac

SEQ ID NO: 3218285 - RNA, 19 nt, Artificial Sequence
  Description of Artificial Sequence: Synthetic oligonucleotide
ucaaucuggaaaagacuag

SEQ ID NO: 3218286 - RNA, 19 nt, Artificial Sequence
  Description of Artificial Sequence: Synthetic oligonucleotide
auacauuuuauuugaacau

SEQ ID NO: 3218287 - RNA, 19 nt, Artificial Sequence
  Description of Artificial Sequence: Synthetic oligonucleotide
uucaucuaggggagcaugg

SEQ ID NO: 3218288 - RNA, 19 nt, Artificial Sequence
  Description of Artificial Sequence: Synthetic oligonucleotide
agacagaauaaugauguuc

SEQ ID NO: 3218289 - RNA, 19 nt, Artificial Sequence
  Description of Artificial Sequence: Synthetic oligonucleotide
gaaacuaguauaguugaac

SEQ ID NO: 3218290 - RNA, 19 nt, Artificial Sequence
  Description of Artificial Sequence: Synthetic oligonucleotide
uaacaaaauuaaauucaca

SEQ ID NO: 3218291 - RNA, 19 nt, Artificial Sequence
  Description of Artificial Sequence: Synthetic oligonucleotide
aauauuauguuucauuuag

SEQ ID NO: 3218292 - RNA, 19 nt, Artificial Sequence
  Description of Artificial Sequence: Synthetic oligonucleotide
acaauuuuguaccaaauac

SEQ ID NO: 3218293 - RNA, 19 nt, Artificial Sequence
  Description of Artificial Sequence: Synthetic oligonucleotide
cuucuuuugaaauagacag

SEQ ID NO: 3218294 - RNA, 19 nt, Artificial Sequence
  Description of Artificial Sequence: Synthetic oligonucleotide
uuauguuucauuuaggacu

SEQ ID NO: 3218295 - RNA, 19 nt, Artificial Sequence
  Description of Artificial Sequence: Synthetic oligonucleotide
uaacaauuaauaauuuagg

SEQ ID NO: 3218296 - RNA, 19 nt, Artificial Sequence
  Description of Artificial Sequence: Synthetic oligonucleotide
uuugaaauagacagaaaag

SEQ ID NO: 3218297 - RNA, 19 nt, Artificial Sequence
  Description of Artificial Sequence: Synthetic oligonucleotide
uuuugaaauagacagaaaa

SEQ ID NO: 3218298 - RNA, 19 nt, Artificial Sequence
  Description of Artificial Sequence: Synthetic oligonucleotide
uugaggaauauaaagacug

SEQ ID NO: 3218299 - RNA, 19 nt, Artificial Sequence
  Description of Artificial Sequence: Synthetic oligonucleotide
aacaauuaauaauuuagga

SEQ ID NO: 3218300 - RNA, 19 nt, Artificial Sequence
  Description of Artificial Sequence: Synthetic oligonucleotide
acauauaucaaccauaaau

SEQ ID NO: 3218301 - RNA, 19 nt, Artificial Sequence
  Description of Artificial Sequence: Synthetic oligonucleotide
gaguuaacaauguacaugc

SEQ ID NO: 3218302 - RNA, 19 nt, Artificial Sequence
  Description of Artificial Sequence: Synthetic oligonucleotide
aguguauuuucuuacugcc

SEQ ID NO: 3218303 - RNA, 19 nt, Artificial Sequence
  Description of Artificial Sequence: Synthetic oligonucleotide
ucauacacaauuuuguacc

SEQ ID NO: 3218304 - RNA, 19 nt, Artificial Sequence
  Description of Artificial Sequence: Synthetic oligonucleotide
aaugugucaaagaauuucc

SEQ ID NO: 3218305 - RNA, 19 nt, Artificial Sequence
  Description of Artificial Sequence: Synthetic oligonucleotide
uguguaacaauuaauucca

SEQ ID NO: 3218306 - RNA, 19 nt, Artificial Sequence
  Description of Artificial Sequence: Synthetic oligonucleotide
uuagaaguaaaucucacuc

SEQ ID NO: 3218307 - RNA, 19 nt, Artificial Sequence
  Description of Artificial Sequence: Synthetic oligonucleotide
aaaugugucaaagaauuuc

SEQ ID NO: 3218308 - RNA, 19 nt, Artificial Sequence
  Description of Artificial Sequence: Synthetic oligonucleotide
uuuaggauuccuuuagggg

SEQ ID NO: 3218309 - RNA, 19 nt, Artificial Sequence
  Description of Artificial Sequence: Synthetic oligonucleotide
uaacaauuaauuccaauca

SEQ ID NO: 3218310 - RNA, 19 nt, Artificial Sequence
  Description of Artificial Sequence: Synthetic oligonucleotide
uauugaaggaaauauagaa

SEQ ID NO: 3218311 - RNA, 19 nt, Artificial Sequence
  Description of Artificial Sequence: Synthetic oligonucleotide
uucauuuaggacuucauca

SEQ ID NO: 3218312 - RNA, 19 nt, Artificial Sequence
  Description of Artificial Sequence: Synthetic oligonucleotide
uacaucuuuauuuauauaa

SEQ ID NO: 3218313 - RNA, 19 nt, Artificial Sequence
  Description of Artificial Sequence: Synthetic oligonucleotide
auuccaaucauuaaacggc

SEQ ID NO: 3218314 - RNA, 19 nt, Artificial Sequence
  Description of Artificial Sequence: Synthetic oligonucleotide
uuuuguaccaaauacaauu

SEQ ID NO: 3218315 - RNA, 19 nt, Artificial Sequence
  Description of Artificial Sequence: Synthetic oligonucleotide
ugugaguuaacaauguaca

SEQ ID NO: 3218316 - RNA, 19 nt, Artificial Sequence
  Description of Artificial Sequence: Synthetic oligonucleotide
uucaaauuguuucaaaagu

SEQ ID NO: 3218317 - RNA, 19 nt, Artificial Sequence
  Description of Artificial Sequence: Synthetic oligonucleotide
uagacagaaaagaauaccc

SEQ ID NO: 3218318 - RNA, 19 nt, Artificial Sequence
  Description of Artificial Sequence: Synthetic oligonucleotide
aaauacaauuuguuuguuc

SEQ ID NO: 3218319 - RNA, 19 nt, Artificial Sequence
  Description of Artificial Sequence: Synthetic oligonucleotide
aggaauuagaaguaaaucu

SEQ ID NO: 3218320 - RNA, 19 nt, Artificial Sequence
  Description of Artificial Sequence: Synthetic oligonucleotide
aaaauacaccauuagcuug

SEQ ID NO: 3218321 - RNA, 19 nt, Artificial Sequence
  Description of Artificial Sequence: Synthetic oligonucleotide
uuaacaauguacaugcuuc

SEQ ID NO: 3218322 - RNA, 19 nt, Artificial Sequence
  Description of Artificial Sequence: Synthetic oligonucleotide
auuauguuucauuuaggac

SEQ ID NO: 3218323 - RNA, 19 nt, Artificial Sequence
  Description of Artificial Sequence: Synthetic oligonucleotide
ugaaaugugucaaagaauu

SEQ ID NO: 3218324 - RNA, 19 nt, Artificial Sequence
  Description of Artificial Sequence: Synthetic oligonucleotide
uauuauguuucauuuagga

SEQ ID NO: 3218325 - RNA, 19 nt, Artificial Sequence
  Description of Artificial Sequence: Synthetic oligonucleotide
uaauuuaggauuccuuuag

SEQ ID NO: 3218326 - RNA, 19 nt, Artificial Sequence
  Description of Artificial Sequence: Synthetic oligonucleotide
gaaguuuucuguuugagga

SEQ ID NO: 3218327 - RNA, 19 nt, Artificial Sequence
  Description of Artificial Sequence: Synthetic oligonucleotide
uguaucuaaaaucccagca

SEQ ID NO: 3218328 - RNA, 19 nt, Artificial Sequence
  Description of Artificial Sequence: Synthetic oligonucleotide
auuauuaaguauuuguuau

SEQ ID NO: 3218329 - RNA, 19 nt, Artificial Sequence
  Description of Artificial Sequence: Synthetic oligonucleotide
aauuccauaaggcacuggu

SEQ ID NO: 3218330 - RNA, 19 nt, Artificial Sequence
  Description of Artificial Sequence: Synthetic oligonucleotide
acauuauuuacauauacau

SEQ ID NO: 3218331 - RNA, 19 nt, Artificial Sequence
  Description of Artificial Sequence: Synthetic oligonucleotide
uuuuauuagggaaaaugac

SEQ ID NO: 3218332 - RNA, 19 nt, Artificial Sequence
  Description of Artificial Sequence: Synthetic oligonucleotide
uccagaaugaacauuauuu

SEQ ID NO: 3218333 - RNA, 19 nt, Artificial Sequence
  Description of Artificial Sequence: Synthetic oligonucleotide
auuuaggauuccuuuaggg

SEQ ID NO: 3218334 - RNA, 19 nt, Artificial Sequence
  Description of Artificial Sequence: Synthetic oligonucleotide
aauuuaggauuccuuuagg

SEQ ID NO: 3218335 - RNA, 19 nt, Artificial Sequence
  Description of Artificial Sequence: Synthetic oligonucleotide
auugaaaugugucaaagaa

SEQ ID NO: 3218336 - RNA, 19 nt, Artificial Sequence
  Description of Artificial Sequence: Synthetic oligonucleotide
uaaauauuauguuucauuu

SEQ ID NO: 3218337 - RNA, 19 nt, Artificial Sequence
  Description of Artificial Sequence: Synthetic oligonucleotide
auagacagaaaagaauacc

SEQ ID NO: 3218338 - RNA, 19 nt, Artificial Sequence
  Description of Artificial Sequence: Synthetic oligonucleotide
aauuuguuuguucccuaac

SEQ ID NO: 3218339 - RNA, 19 nt, Artificial Sequence
  Description of Artificial Sequence: Synthetic oligonucleotide
uuaggauuccuuuagggga

SEQ ID NO: 3218340 - RNA, 19 nt, Artificial Sequence
  Description of Artificial Sequence: Synthetic oligonucleotide
ugaaauagacagaaaagaa

SEQ ID NO: 3218341 - RNA, 19 nt, Artificial Sequence
  Description of Artificial Sequence: Synthetic oligonucleotide
uauuaaguauuuguuaugc

SEQ ID NO: 3218342 - RNA, 19 nt, Artificial Sequence
  Description of Artificial Sequence: Synthetic oligonucleotide
uuuguuuguucccuaaccc

SEQ ID NO: 3218343 - RNA, 19 nt, Artificial Sequence
  Description of Artificial Sequence: Synthetic oligonucleotide
uaucuaaaaucccagcaug

SEQ ID NO: 3218344 - RNA, 19 nt, Artificial Sequence
  Description of Artificial Sequence: Synthetic oligonucleotide
uaacccugaauaauuacag

SEQ ID NO: 3218345 - RNA, 19 nt, Artificial Sequence
  Description of Artificial Sequence: Synthetic oligonucleotide
ucauccauaauauuuuacu

SEQ ID NO: 3218346 - RNA, 19 nt, Artificial Sequence
  Description of Artificial Sequence: Synthetic oligonucleotide
auuuaggacuucaucaucc

SEQ ID NO: 3218347 - RNA, 19 nt, Artificial Sequence
  Description of Artificial Sequence: Synthetic oligonucleotide
aaacaggucauacacaauu

SEQ ID NO: 3218348 - RNA, 19 nt, Artificial Sequence
  Description of Artificial Sequence: Synthetic oligonucleotide
ucucuaauccacauacuag

SEQ ID NO: 3218349 - RNA, 19 nt, Artificial Sequence
  Description of Artificial Sequence: Synthetic oligonucleotide
aaauagacagaaaagaaua

SEQ ID NO: 3218350 - RNA, 19 nt, Artificial Sequence
  Description of Artificial Sequence: Synthetic oligonucleotide
aauugaaaugugucaaaga

SEQ ID NO: 3218351 - RNA, 19 nt, Artificial Sequence
  Description of Artificial Sequence: Synthetic oligonucleotide
guucaaauuguuucaaaag

SEQ ID NO: 3218352 - RNA, 19 nt, Artificial Sequence
  Description of Artificial Sequence: Synthetic oligonucleotide
uaauuccaaucauuaaacg

SEQ ID NO: 3218353 - RNA, 19 nt, Artificial Sequence
  Description of Artificial Sequence: Synthetic oligonucleotide
guuugaggaauauaaagac

SEQ ID NO: 3218354 - RNA, 19 nt, Artificial Sequence
  Description of Artificial Sequence: Synthetic oligonucleotide
gaacauuauuuacauauac

SEQ ID NO: 3218355 - RNA, 19 nt, Artificial Sequence
  Description of Artificial Sequence: Synthetic oligonucleotide
auacacacauauaucaacc

SEQ ID NO: 3218356 - RNA, 19 nt, Artificial Sequence
  Description of Artificial Sequence: Synthetic oligonucleotide
guauauacaaauuccauaa

SEQ ID NO: 3218357 - RNA, 19 nt, Artificial Sequence
  Description of Artificial Sequence: Synthetic oligonucleotide
uugugaguuaacaauguac

SEQ ID NO: 3218358 - RNA, 19 nt, Artificial Sequence
  Description of Artificial Sequence: Synthetic oligonucleotide
ucauuaaacggcaucauuu

SEQ ID NO: 3218359 - RNA, 19 nt, Artificial Sequence
  Description of Artificial Sequence: Synthetic oligonucleotide
auacaauuuguuuguuccc

SEQ ID NO: 3218360 - RNA, 19 nt, Artificial Sequence
  Description of Artificial Sequence: Synthetic oligonucleotide
aagaauuuccuguaucuaa

SEQ ID NO: 3218361 - RNA, 19 nt, Artificial Sequence
  Description of Artificial Sequence: Synthetic oligonucleotide
uugacuacacaccaauuga

SEQ ID NO: 3218362 - RNA, 19 nt, Artificial Sequence
  Description of Artificial Sequence: Synthetic oligonucleotide
uaauccacauacuagaguu

SEQ ID NO: 3218363 - RNA, 19 nt, Artificial Sequence
  Description of Artificial Sequence: Synthetic oligonucleotide
ugaggaauauaaagacugg

SEQ ID NO: 3218364 - RNA, 19 nt, Artificial Sequence
  Description of Artificial Sequence: Synthetic oligonucleotide
uuucaaaaguguauuuucu

SEQ ID NO: 3218365 - RNA, 19 nt, Artificial Sequence
  Description of Artificial Sequence: Synthetic oligonucleotide
ucauuugugaguuaacaau

SEQ ID NO: 3218366 - RNA, 19 nt, Artificial Sequence
  Description of Artificial Sequence: Synthetic oligonucleotide
uuucagaggucguaaaacc

SEQ ID NO: 3218367 - RNA, 19 nt, Artificial Sequence
  Description of Artificial Sequence: Synthetic oligonucleotide
aacaauuaauuccaaucau

SEQ ID NO: 3218368 - RNA, 19 nt, Artificial Sequence
  Description of Artificial Sequence: Synthetic oligonucleotide
ugccuuuccauuauuaagu

SEQ ID NO: 3218369 - RNA, 19 nt, Artificial Sequence
  Description of Artificial Sequence: Synthetic oligonucleotide
auaaagacuggucagcaga

SEQ ID NO: 3218370 - RNA, 19 nt, Artificial Sequence
  Description of Artificial Sequence: Synthetic oligonucleotide
auuuguuaugcuugacuac

SEQ ID NO: 3218371 - RNA, 19 nt, Artificial Sequence
  Description of Artificial Sequence: Synthetic oligonucleotide
ugaguuaacaauguacaug

SEQ ID NO: 3218372 - RNA, 19 nt, Artificial Sequence
  Description of Artificial Sequence: Synthetic oligonucleotide
uauuuguuaugcuugacua

SEQ ID NO: 3218373 - RNA, 19 nt, Artificial Sequence
  Description of Artificial Sequence: Synthetic oligonucleotide
uuaaguauuuguuaugcuu

SEQ ID NO: 3218374 - RNA, 19 nt, Artificial Sequence
  Description of Artificial Sequence: Synthetic oligonucleotide
uuugaggaauauaaagacu

SEQ ID NO: 3218375 - RNA, 19 nt, Artificial Sequence
  Description of Artificial Sequence: Synthetic oligonucleotide
uguacaugcuuccauaaau

SEQ ID NO: 3218376 - RNA, 19 nt, Artificial Sequence
  Description of Artificial Sequence: Synthetic oligonucleotide
auacaaauuccauaaggca

SEQ ID NO: 3218377 - RNA, 19 nt, Artificial Sequence
  Description of Artificial Sequence: Synthetic oligonucleotide
ucuaauccacauacuagag

SEQ ID NO: 3218378 - RNA, 19 nt, Artificial Sequence
  Description of Artificial Sequence: Synthetic oligonucleotide
uuauuaaguauuuguuaug

SEQ ID NO: 3218379 - RNA, 19 nt, Artificial Sequence
  Description of Artificial Sequence: Synthetic oligonucleotide
uuuguuaugcuugacuaca

SEQ ID NO: 3218380 - RNA, 19 nt, Artificial Sequence
  Description of Artificial Sequence: Synthetic oligonucleotide
uguuuguucccuaacccug

SEQ ID NO: 3218381 - RNA, 19 nt, Artificial Sequence
  Description of Artificial Sequence: Synthetic oligonucleotide
aucaaccauaaauuugaac

SEQ ID NO: 3218382 - RNA, 19 nt, Artificial Sequence
  Description of Artificial Sequence: Synthetic oligonucleotide
uuugaacauacaaaguuuu

SEQ ID NO: 3218383 - RNA, 19 nt, Artificial Sequence
  Description of Artificial Sequence: Synthetic oligonucleotide
cuugacuacacaccaauug

SEQ ID NO: 3218384 - RNA, 19 nt, Artificial Sequence
  Description of Artificial Sequence: Synthetic oligonucleotide
gaaaaugacacuaauuuua

SEQ ID NO: 3218385 - RNA, 19 nt, Artificial Sequence
  Description of Artificial Sequence: Synthetic oligonucleotide
acuaauuuuauugaaggaa

SEQ ID NO: 3218386 - RNA, 19 nt, Artificial Sequence
  Description of Artificial Sequence: Synthetic oligonucleotide
uguauuuucuuacugccuu

SEQ ID NO: 3218387 - RNA, 19 nt, Artificial Sequence
  Description of Artificial Sequence: Synthetic oligonucleotide
ggaacuuggguuuucagag

SEQ ID NO: 3218388 - RNA, 19 nt, Artificial Sequence
  Description of Artificial Sequence: Synthetic oligonucleotide
uaaagacuggucagcagag

SEQ ID NO: 3218389 - RNA, 19 nt, Artificial Sequence
  Description of Artificial Sequence: Synthetic oligonucleotide
accauaaauuugaacauac

SEQ ID NO: 3218390 - RNA, 19 nt, Artificial Sequence
  Description of Artificial Sequence: Synthetic oligonucleotide
aaauauuauguuucauuua

SEQ ID NO: 3218391 - RNA, 19 nt, Artificial Sequence
  Description of Artificial Sequence: Synthetic oligonucleotide
augaguaaaguauugaagg

SEQ ID NO: 3218392 - RNA, 19 nt, Artificial Sequence
  Description of Artificial Sequence: Synthetic oligonucleotide
agaaggauggaguugaucg

SEQ ID NO: 3218393 - RNA, 19 nt, Artificial Sequence
  Description of Artificial Sequence: Synthetic oligonucleotide
aacacugcaaagcuucugc

SEQ ID NO: 3218394 - RNA, 19 nt, Artificial Sequence
  Description of Artificial Sequence: Synthetic oligonucleotide
uuuguauucagccagcaga

SEQ ID NO: 3218395 - RNA, 19 nt, Artificial Sequence
  Description of Artificial Sequence: Synthetic oligonucleotide
ugggcaauggccuugaagg

SEQ ID NO: 3218396 - RNA, 19 nt, Artificial Sequence
  Description of Artificial Sequence: Synthetic oligonucleotide
uugaaggucagcaaccugg

SEQ ID NO: 3218397 - RNA, 19 nt, Artificial Sequence
  Description of Artificial Sequence: Synthetic oligonucleotide
aacagguacgccauaaugc

SEQ ID NO: 3218398 - RNA, 19 nt, Artificial Sequence
  Description of Artificial Sequence: Synthetic oligonucleotide
acuggcagagaucacaacc

SEQ ID NO: 3218399 - RNA, 19 nt, Artificial Sequence
  Description of Artificial Sequence: Synthetic oligonucleotide
uugauaauggugaacaggu

SEQ ID NO: 3218400 - RNA, 19 nt, Artificial Sequence
  Description of Artificial Sequence: Synthetic oligonucleotide
aaagcuucugcuucagcac

SEQ ID NO: 3218401 - RNA, 19 nt, Artificial Sequence
  Description of Artificial Sequence: Synthetic oligonucleotide
aguuaugugucccguagcc

SEQ ID NO: 3218402 - RNA, 19 nt, Artificial Sequence
  Description of Artificial Sequence: Synthetic oligonucleotide
auugaaggcacccugcagg

SEQ ID NO: 3218403 - RNA, 19 nt, Artificial Sequence
  Description of Artificial Sequence: Synthetic oligonucleotide
aaugaguaaaguauugaag

SEQ ID NO: 3218404 - RNA, 19 nt, Artificial Sequence
  Description of Artificial Sequence: Synthetic oligonucleotide
gauaauggugaacagguac

SEQ ID NO: 3218405 - RNA, 19 nt, Artificial Sequence
  Description of Artificial Sequence: Synthetic oligonucleotide
ugaguuucgagacaucuga

SEQ ID NO: 3218406 - RNA, 19 nt, Artificial Sequence
  Description of Artificial Sequence: Synthetic oligonucleotide
ugcuucagcacccacagug

SEQ ID NO: 3218407 - RNA, 19 nt, Artificial Sequence
  Description of Artificial Sequence: Synthetic oligonucleotide
uguauacuggcagagauca

SEQ ID NO: 3218408 - RNA, 19 nt, Artificial Sequence
  Description of Artificial Sequence: Synthetic oligonucleotide
aaggucagcaaccuggugu

SEQ ID NO: 3218409 - RNA, 19 nt, Artificial Sequence
  Description of Artificial Sequence: Synthetic oligonucleotide
aguuucgagacaucugagc

SEQ ID NO: 3218410 - RNA, 19 nt, Artificial Sequence
  Description of Artificial Sequence: Synthetic oligonucleotide
aagcuucugcuucagcacc

SEQ ID NO: 3218411 - RNA, 19 nt, Artificial Sequence
  Description of Artificial Sequence: Synthetic oligonucleotide
aguaaaguauugaaggcac

SEQ ID NO: 3218412 - RNA, 19 nt, Artificial Sequence
  Description of Artificial Sequence: Synthetic oligonucleotide
augcccagcacccaggagc

SEQ ID NO: 3218413 - RNA, 19 nt, Artificial Sequence
  Description of Artificial Sequence: Synthetic oligonucleotide
acugcaaagcuucugcuuc

SEQ ID NO: 3218414 - RNA, 19 nt, Artificial Sequence
  Description of Artificial Sequence: Synthetic oligonucleotide
ugaguaaaguauugaaggc

SEQ ID NO: 3218415 - RNA, 19 nt, Artificial Sequence
  Description of Artificial Sequence: Synthetic oligonucleotide
ugagcuaacacugcaaagc

SEQ ID NO: 3218416 - RNA, 19 nt, Artificial Sequence
  Description of Artificial Sequence: Synthetic oligonucleotide
agucuuuguauucagccag

SEQ ID NO: 3218417 - RNA, 19 nt, Artificial Sequence
  Description of Artificial Sequence: Synthetic oligonucleotide
uuguauucagccagcagag

SEQ ID NO: 3218418 - RNA, 19 nt, Artificial Sequence
  Description of Artificial Sequence: Synthetic oligonucleotide
agagaucacaaccaccagg

SEQ ID NO: 3218419 - RNA, 19 nt, Artificial Sequence
  Description of Artificial Sequence: Synthetic oligonucleotide
gaguugaucgugaugaucc

SEQ ID NO: 3218420 - RNA, 19 nt, Artificial Sequence
  Description of Artificial Sequence: Synthetic oligonucleotide
gugaugaucccacagacug

SEQ ID NO: 3218421 - RNA, 19 nt, Artificial Sequence
  Description of Artificial Sequence: Synthetic oligonucleotide
ucugcuucagcacccacag

SEQ ID NO: 3218422 - RNA, 19 nt, Artificial Sequence
  Description of Artificial Sequence: Synthetic oligonucleotide
uggaaaaugcccagcaccc

SEQ ID NO: 3218423 - RNA, 19 nt, Artificial Sequence
  Description of Artificial Sequence: Synthetic oligonucleotide
aaguauugaaggcacccug

SEQ ID NO: 3218424 - RNA, 19 nt, Artificial Sequence
  Description of Artificial Sequence: Synthetic oligonucleotide
aagaugaagaucugggcaa

SEQ ID NO: 3218425 - RNA, 19 nt, Artificial Sequence
  Description of Artificial Sequence: Synthetic oligonucleotide
uaaugcucgccauaggacc

SEQ ID NO: 3218426 - RNA, 19 nt, Artificial Sequence
  Description of Artificial Sequence: Synthetic oligonucleotide
uaaaguauugaaggcaccc

SEQ ID NO: 3218427 - RNA, 19 nt, Artificial Sequence
  Description of Artificial Sequence: Synthetic oligonucleotide
uguggcuguauacuggcag

SEQ ID NO: 3218428 - RNA, 19 nt, Artificial Sequence
  Description of Artificial Sequence: Synthetic oligonucleotide
guugauaauggugaacagg

SEQ ID NO: 3218429 - RNA, 19 nt, Artificial Sequence
  Description of Artificial Sequence: Synthetic oligonucleotide
gagcccauagcccaaaggc

SEQ ID NO: 3218430 - RNA, 19 nt, Artificial Sequence
  Description of Artificial Sequence: Synthetic oligonucleotide
guauucagccagcagagag

SEQ ID NO: 3218431 - RNA, 19 nt, Artificial Sequence
  Description of Artificial Sequence: Synthetic oligonucleotide
cuggaaaaugcccagcacc

SEQ ID NO: 3218432 - RNA, 19 nt, Artificial Sequence
  Description of Artificial Sequence: Synthetic oligonucleotide
agaguuaugugucccguag

SEQ ID NO: 3218433 - RNA, 19 nt, Artificial Sequence
  Description of Artificial Sequence: Synthetic oligonucleotide
aauggugaacagguacgcc

SEQ ID NO: 3218434 - RNA, 19 nt, Artificial Sequence
  Description of Artificial Sequence: Synthetic oligonucleotide
auaauggugaacagguacg

SEQ ID NO: 3218435 - RNA, 19 nt, Artificial Sequence
  Description of Artificial Sequence: Synthetic oligonucleotide
aaucuggaaaaugcccagc

SEQ ID NO: 3218436 - RNA, 19 nt, Artificial Sequence
  Description of Artificial Sequence: Synthetic oligonucleotide
gaaaaugcccagcacccag

SEQ ID NO: 3218437 - RNA, 19 nt, Artificial Sequence
  Description of Artificial Sequence: Synthetic oligonucleotide
uguccuugaguuucgagac

SEQ ID NO: 3218438 - RNA, 19 nt, Artificial Sequence
  Description of Artificial Sequence: Synthetic oligonucleotide
gacaucugagcuaacacug

SEQ ID NO: 3218439 - RNA, 19 nt, Artificial Sequence
  Description of Artificial Sequence: Synthetic oligonucleotide
auggaguugaucgugauga

SEQ ID NO: 3218440 - RNA, 19 nt, Artificial Sequence
  Description of Artificial Sequence: Synthetic oligonucleotide
gaacagguacgccauaaug

SEQ ID NO: 3218441 - RNA, 19 nt, Artificial Sequence
  Description of Artificial Sequence: Synthetic oligonucleotide
uacgccauaaugcucgcca

SEQ ID NO: 3218442 - RNA, 19 nt, Artificial Sequence
  Description of Artificial Sequence: Synthetic oligonucleotide
uauacuggcagagaucaca

SEQ ID NO: 3218443 - RNA, 19 nt, Artificial Sequence
  Description of Artificial Sequence: Synthetic oligonucleotide
ugagcagacagugaaugag

SEQ ID NO: 3218444 - RNA, 19 nt, Artificial Sequence
  Description of Artificial Sequence: Synthetic oligonucleotide
accaccaggacugggagcc

SEQ ID NO: 3218445 - RNA, 19 nt, Artificial Sequence
  Description of Artificial Sequence: Synthetic oligonucleotide
accaaucuggaaaaugccc

SEQ ID NO: 3218446 - RNA, 19 nt, Artificial Sequence
  Description of Artificial Sequence: Synthetic oligonucleotide
gaaugaguaaaguauugaa

SEQ ID NO: 3218447 - RNA, 19 nt, Artificial Sequence
  Description of Artificial Sequence: Synthetic oligonucleotide
aucacaaccaccaggacug

SEQ ID NO: 3218448 - RNA, 19 nt, Artificial Sequence
  Description of Artificial Sequence: Synthetic oligonucleotide
ugaagaucugggcaauggc

SEQ ID NO: 3218449 - RNA, 19 nt, Artificial Sequence
  Description of Artificial Sequence: Synthetic oligonucleotide
aguauugaaggcacccugc

SEQ ID NO: 3218450 - RNA, 19 nt, Artificial Sequence
  Description of Artificial Sequence: Synthetic oligonucleotide
ugucccguagccuuguggc

SEQ ID NO: 3218451 - RNA, 19 nt, Artificial Sequence
  Description of Artificial Sequence: Synthetic oligonucleotide
ugaaugaguaaaguauuga

SEQ ID NO: 3218452 - RNA, 19 nt, Artificial Sequence
  Description of Artificial Sequence: Synthetic oligonucleotide
gaagaucugggcaauggcc

SEQ ID NO: 3218453 - RNA, 19 nt, Artificial Sequence
  Description of Artificial Sequence: Synthetic oligonucleotide
ucugagcuaacacugcaaa

SEQ ID NO: 3218454 - RNA, 19 nt, Artificial Sequence
  Description of Artificial Sequence: Synthetic oligonucleotide
agcagagaguuaugugucc

SEQ ID NO: 3218455 - RNA, 19 nt, Artificial Sequence
  Description of Artificial Sequence: Synthetic oligonucleotide
ugcaggcuguugauaaugg

SEQ ID NO: 3218456 - RNA, 19 nt, Artificial Sequence
  Description of Artificial Sequence: Synthetic oligonucleotide
ugaucccacagacuggccc

SEQ ID NO: 3218457 - RNA, 19 nt, Artificial Sequence
  Description of Artificial Sequence: Synthetic oligonucleotide
auagcccaaaggcacacag

SEQ ID NO: 3218458 - RNA, 19 nt, Artificial Sequence
  Description of Artificial Sequence: Synthetic oligonucleotide
acagguacgccauaaugcu

SEQ ID NO: 3218459 - RNA, 19 nt, Artificial Sequence
  Description of Artificial Sequence: Synthetic oligonucleotide
aguugaucgugaugauccc

SEQ ID NO: 3218460 - RNA, 19 nt, Artificial Sequence
  Description of Artificial Sequence: Synthetic oligonucleotide
ugaugaucccacagacugg

SEQ ID NO: 3218461 - RNA, 19 nt, Artificial Sequence
  Description of Artificial Sequence: Synthetic oligonucleotide
uguugauaauggugaacag

SEQ ID NO: 3218462 - RNA, 19 nt, Artificial Sequence
  Description of Artificial Sequence: Synthetic oligonucleotide
agacaucugagcuaacacu

SEQ ID NO: 3218463 - RNA, 19 nt, Artificial Sequence
  Description of Artificial Sequence: Synthetic oligonucleotide
uauugaaggcacccugcag

SEQ ID NO: 3218464 - RNA, 19 nt, Artificial Sequence
  Description of Artificial Sequence: Synthetic oligonucleotide
uugaucgugaugaucccac

SEQ ID NO: 3218465 - RNA, 19 nt, Artificial Sequence
  Description of Artificial Sequence: Synthetic oligonucleotide
auaaugcucgccauaggac

SEQ ID NO: 3218466 - RNA, 19 nt, Artificial Sequence
  Description of Artificial Sequence: Synthetic oligonucleotide
uccagaugaacccagucuu

SEQ ID NO: 3218467 - RNA, 19 nt, Artificial Sequence
  Description of Artificial Sequence: Synthetic oligonucleotide
acagacuggccccaggaag

SEQ ID NO: 3218468 - RNA, 19 nt, Artificial Sequence
  Description of Artificial Sequence: Synthetic oligonucleotide
auggugaacagguacgcca

SEQ ID NO: 3218469 - RNA, 19 nt, Artificial Sequence
  Description of Artificial Sequence: Synthetic oligonucleotide
uauucagccagcagagagu

SEQ ID NO: 3218470 - RNA, 19 nt, Artificial Sequence
  Description of Artificial Sequence: Synthetic oligonucleotide
aaccugguguccuugaguu

SEQ ID NO: 3218471 - RNA, 19 nt, Artificial Sequence
  Description of Artificial Sequence: Synthetic oligonucleotide
gaucgugaugaucccacag

SEQ ID NO: 3218472 - RNA, 19 nt, Artificial Sequence
  Description of Artificial Sequence: Synthetic oligonucleotide
gaugaucccacagacuggc

SEQ ID NO: 3218473 - RNA, 19 nt, Artificial Sequence
  Description of Artificial Sequence: Synthetic oligonucleotide
aaccaccaggacugggagc

SEQ ID NO: 3218474 - RNA, 19 nt, Artificial Sequence
  Description of Artificial Sequence: Synthetic oligonucleotide
cuuguggcuguauacuggc

SEQ ID NO: 3218475 - RNA, 19 nt, Artificial Sequence
  Description of Artificial Sequence: Synthetic oligonucleotide
gagacaucugagcuaacac

SEQ ID NO: 3218476 - RNA, 19 nt, Artificial Sequence
  Description of Artificial Sequence: Synthetic oligonucleotide
cauaggaccaaucuggaaa

SEQ ID NO: 3218477 - RNA, 19 nt, Artificial Sequence
  Description of Artificial Sequence: Synthetic oligonucleotide
ucgugaugaucccacagac

SEQ ID NO: 3218478 - RNA, 19 nt, Artificial Sequence
  Description of Artificial Sequence: Synthetic oligonucleotide
aggacugggagcccauagc

SEQ ID NO: 3218479 - RNA, 19 nt, Artificial Sequence
  Description of Artificial Sequence: Synthetic oligonucleotide
uugaguuucgagacaucug

SEQ ID NO: 3218480 - RNA, 19 nt, Artificial Sequence
  Description of Artificial Sequence: Synthetic oligonucleotide
caagaugaagaucugggca

SEQ ID NO: 3218481 - RNA, 19 nt, Artificial Sequence
  Description of Artificial Sequence: Synthetic oligonucleotide
caaagcuucugcuucagca

SEQ ID NO: 3218482 - RNA, 19 nt, Artificial Sequence
  Description of Artificial Sequence: Synthetic oligonucleotide
acagugaaugaguaaagua

SEQ ID NO: 3218483 - RNA, 19 nt, Artificial Sequence
  Description of Artificial Sequence: Synthetic oligonucleotide
agguacgccauaaugcucg

SEQ ID NO: 3218484 - RNA, 19 nt, Artificial Sequence
  Description of Artificial Sequence: Synthetic oligonucleotide
gaguaaaguauugaaggca

SEQ ID NO: 3218485 - RNA, 19 nt, Artificial Sequence
  Description of Artificial Sequence: Synthetic oligonucleotide
caggcuguugauaauggug

SEQ ID NO: 3218486 - RNA, 19 nt, Artificial Sequence
  Description of Artificial Sequence: Synthetic oligonucleotide
aaaguauugaaggcacccu

SEQ ID NO: 3218487 - RNA, 19 nt, Artificial Sequence
  Description of Artificial Sequence: Synthetic oligonucleotide
aggucagcaaccugguguc

SEQ ID NO: 3218488 - RNA, 19 nt, Artificial Sequence
  Description of Artificial Sequence: Synthetic oligonucleotide
uguccaggugagaaggaug

SEQ ID NO: 3218489 - RNA, 19 nt, Artificial Sequence
  Description of Artificial Sequence: Synthetic oligonucleotide
aaggauggaguugaucgug

SEQ ID NO: 3218490 - RNA, 19 nt, Artificial Sequence
  Description of Artificial Sequence: Synthetic oligonucleotide
gagaucacaaccaccagga

SEQ ID NO: 3218491 - RNA, 19 nt, Artificial Sequence
  Description of Artificial Sequence: Synthetic oligonucleotide
aaagacaucguacauagac

SEQ ID NO: 3218492 - RNA, 19 nt, Artificial Sequence
  Description of Artificial Sequence: Synthetic oligonucleotide
aaaaucauaggcuaacuag

SEQ ID NO: 3218493 - RNA, 19 nt, Artificial Sequence
  Description of Artificial Sequence: Synthetic oligonucleotide
aaaacuuccacacauuucu

SEQ ID NO: 3218494 - RNA, 19 nt, Artificial Sequence
  Description of Artificial Sequence: Synthetic oligonucleotide
ucuuuaacuauuuaauagg

SEQ ID NO: 3218495 - RNA, 19 nt, Artificial Sequence
  Description of Artificial Sequence: Synthetic oligonucleotide
uacaauaguagucaaauca

SEQ ID NO: 3218496 - RNA, 19 nt, Artificial Sequence
  Description of Artificial Sequence: Synthetic oligonucleotide
acuuuuaaagacuuuugcc

SEQ ID NO: 3218497 - RNA, 19 nt, Artificial Sequence
  Description of Artificial Sequence: Synthetic oligonucleotide
auaguagucaaaucaauac

SEQ ID NO: 3218498 - RNA, 19 nt, Artificial Sequence
  Description of Artificial Sequence: Synthetic oligonucleotide
uuaacuauuuaauaggccu

SEQ ID NO: 3218499 - RNA, 19 nt, Artificial Sequence
  Description of Artificial Sequence: Synthetic oligonucleotide
auaaagacaucguacauag

SEQ ID NO: 3218500 - RNA, 19 nt, Artificial Sequence
  Description of Artificial Sequence: Synthetic oligonucleotide
aggaggaaaugcuaaaugc

SEQ ID NO: 3218501 - RNA, 19 nt, Artificial Sequence
  Description of Artificial Sequence: Synthetic oligonucleotide
caauacaucauuuugguuc

SEQ ID NO: 3218502 - RNA, 19 nt, Artificial Sequence
  Description of Artificial Sequence: Synthetic oligonucleotide
aaucaauacaucauuuugg

SEQ ID NO: 3218503 - RNA, 19 nt, Artificial Sequence
  Description of Artificial Sequence: Synthetic oligonucleotide
uuugguuacacaaucaaaa

SEQ ID NO: 3218504 - RNA, 19 nt, Artificial Sequence
  Description of Artificial Sequence: Synthetic oligonucleotide
cauuggauggguuucaugg

SEQ ID NO: 3218505 - RNA, 19 nt, Artificial Sequence
  Description of Artificial Sequence: Synthetic oligonucleotide
ucuagauuuggaaaugcag

SEQ ID NO: 3218506 - RNA, 19 nt, Artificial Sequence
  Description of Artificial Sequence: Synthetic oligonucleotide
uucucaaucaaacaaucca

SEQ ID NO: 3218507 - RNA, 19 nt, Artificial Sequence
  Description of Artificial Sequence: Synthetic oligonucleotide
gucuuuaacuauuuaauag

SEQ ID NO: 3218508 - RNA, 19 nt, Artificial Sequence
  Description of Artificial Sequence: Synthetic oligonucleotide
cuagauuuggaaaugcagc

SEQ ID NO: 3218509 - RNA, 19 nt, Artificial Sequence
  Description of Artificial Sequence: Synthetic oligonucleotide
ucugauaucacucuagauu

SEQ ID NO: 3218510 - RNA, 19 nt, Artificial Sequence
  Description of Artificial Sequence: Synthetic oligonucleotide
cuuuaacuauuuaauaggc

SEQ ID NO: 3218511 - RNA, 19 nt, Artificial Sequence
  Description of Artificial Sequence: Synthetic oligonucleotide
aauacaucauuuugguuca

SEQ ID NO: 3218512 - RNA, 19 nt, Artificial Sequence
  Description of Artificial Sequence: Synthetic oligonucleotide
uuaaucgcaagucccauug

SEQ ID NO: 3218513 - RNA, 19 nt, Artificial Sequence
  Description of Artificial Sequence: Synthetic oligonucleotide
ucuaaaaugccccuguaaa

SEQ ID NO: 3218514 - RNA, 19 nt, Artificial Sequence
  Description of Artificial Sequence: Synthetic oligonucleotide
auuugcgccaucuucuccc

SEQ ID NO: 3218515 - RNA, 19 nt, Artificial Sequence
  Description of Artificial Sequence: Synthetic oligonucleotide
aaagacuuuugccauuaag

SEQ ID NO: 3218516 - RNA, 19 nt, Artificial Sequence
  Description of Artificial Sequence: Synthetic oligonucleotide
uguacagcccgucauuugg

SEQ ID NO: 3218517 - RNA, 19 nt, Artificial Sequence
  Description of Artificial Sequence: Synthetic oligonucleotide
gauuuggaaaugcagcucc

SEQ ID NO: 3218518 - RNA, 19 nt, Artificial Sequence
  Description of Artificial Sequence: Synthetic oligonucleotide
aauaauuuucagccuucuc

SEQ ID NO: 3218519 - RNA, 19 nt, Artificial Sequence
  Description of Artificial Sequence: Synthetic oligonucleotide
aauccaauuauuugcgcca

SEQ ID NO: 3218520 - RNA, 19 nt, Artificial Sequence
  Description of Artificial Sequence: Synthetic oligonucleotide
aacaauccaauuauuugcg

SEQ ID NO: 3218521 - RNA, 19 nt, Artificial Sequence
  Description of Artificial Sequence: Synthetic oligonucleotide
uagucaaaucaauacauca

SEQ ID NO: 3218522 - RNA, 19 nt, Artificial Sequence
  Description of Artificial Sequence: Synthetic oligonucleotide
gacuuuuaaagacuuuugc

SEQ ID NO: 3218523 - RNA, 19 nt, Artificial Sequence
  Description of Artificial Sequence: Synthetic oligonucleotide
uaauuuucagccuucucug

SEQ ID NO: 3218524 - RNA, 19 nt, Artificial Sequence
  Description of Artificial Sequence: Synthetic oligonucleotide
aaggaggaaaugcuaaaug

SEQ ID NO: 3218525 - RNA, 19 nt, Artificial Sequence
  Description of Artificial Sequence: Synthetic oligonucleotide
auuuaauaggccuuucuga

SEQ ID NO: 3218526 - RNA, 19 nt, Artificial Sequence
  Description of Artificial Sequence: Synthetic oligonucleotide
uacauagacuuguacagcc

SEQ ID NO: 3218527 - RNA, 19 nt, Artificial Sequence
  Description of Artificial Sequence: Synthetic oligonucleotide
uguacagugcaacaacgcc

SEQ ID NO: 3218528 - RNA, 19 nt, Artificial Sequence
  Description of Artificial Sequence: Synthetic oligonucleotide
aagacuuuugccauuaagu

SEQ ID NO: 3218529 - RNA, 19 nt, Artificial Sequence
  Description of Artificial Sequence: Synthetic oligonucleotide
aaaugcagcuccuuguaca

SEQ ID NO: 3218530 - RNA, 19 nt, Artificial Sequence
  Description of Artificial Sequence: Synthetic oligonucleotide
  modified_base (2)..(2): a, c, u, g, unknown or other
anaggauaaagacaucgua

SEQ ID NO: 3218531 - RNA, 19 nt, Artificial Sequence
  Description of Artificial Sequence: Synthetic oligonucleotide
aaaauaauuuucagccuuc

SEQ ID NO: 3218532 - RNA, 19 nt, Artificial Sequence
  Description of Artificial Sequence: Synthetic oligonucleotide
agccuucucuguuauaacc

SEQ ID NO: 3218533 - RNA, 19 nt, Artificial Sequence
  Description of Artificial Sequence: Synthetic oligonucleotide
uaguagucaaaucaauaca

SEQ ID NO: 3218534 - RNA, 19 nt, Artificial Sequence
  Description of Artificial Sequence: Synthetic oligonucleotide
agacuuuugccauuaagug

SEQ ID NO: 3218535 - RNA, 19 nt, Artificial Sequence
  Description of Artificial Sequence: Synthetic oligonucleotide
aacuagugaaggaaggagg

SEQ ID NO: 3218536 - RNA, 19 nt, Artificial Sequence
  Description of Artificial Sequence: Synthetic oligonucleotide
uacaguggguuacaaacag

SEQ ID NO: 3218537 - RNA, 19 nt, Artificial Sequence
  Description of Artificial Sequence: Synthetic oligonucleotide
uuuaauaggccuuucugau

SEQ ID NO: 3218538 - RNA, 19 nt, Artificial Sequence
  Description of Artificial Sequence: Synthetic oligonucleotide
uaaaugcgcauauaaugag

SEQ ID NO: 3218539 - RNA, 19 nt, Artificial Sequence
  Description of Artificial Sequence: Synthetic oligonucleotide
aaugcagcuccuuguacag

SEQ ID NO: 3218540 - RNA, 19 nt, Artificial Sequence
  Description of Artificial Sequence: Synthetic oligonucleotide
uaauaggccuuucugauau

SEQ ID NO: 3218541 - RNA, 19 nt, Artificial Sequence
  Description of Artificial Sequence: Synthetic oligonucleotide
aacuguacaaaugcaacug

SEQ ID NO: 3218542 - RNA, 19 nt, Artificial Sequence
  Description of Artificial Sequence: Synthetic oligonucleotide
cucccuuuuauacaguggg

SEQ ID NO: 3218543 - RNA, 19 nt, Artificial Sequence
  Description of Artificial Sequence: Synthetic oligonucleotide
ugcgcauauaaugaguggg

SEQ ID NO: 3218544 - RNA, 19 nt, Artificial Sequence
  Description of Artificial Sequence: Synthetic oligonucleotide
cuuguacagugcaacaacg

SEQ ID NO: 3218545 - RNA, 19 nt, Artificial Sequence
  Description of Artificial Sequence: Synthetic oligonucleotide
ucuggcucuaaaaugcccc

SEQ ID NO: 3218546 - RNA, 19 nt, Artificial Sequence
  Description of Artificial Sequence: Synthetic oligonucleotide
ucucaaucaaacaauccaa

SEQ ID NO: 3218547 - RNA, 19 nt, Artificial Sequence
  Description of Artificial Sequence: Synthetic oligonucleotide
auuuggucuucugaggugc

SEQ ID NO: 3218548 - RNA, 19 nt, Artificial Sequence
  Description of Artificial Sequence: Synthetic oligonucleotide
aaaucggcuacaauaguag

SEQ ID NO: 3218549 - RNA, 19 nt, Artificial Sequence
  Description of Artificial Sequence: Synthetic oligonucleotide
aucaauacaucauuuuggu

SEQ ID NO: 3218550 - RNA, 19 nt, Artificial Sequence
  Description of Artificial Sequence: Synthetic oligonucleotide
aggauaaagacaucguaca

SEQ ID NO: 3218551 - RNA, 19 nt, Artificial Sequence
  Description of Artificial Sequence: Synthetic oligonucleotide
uagauuuggaaaugcagcu

SEQ ID NO: 3218552 - RNA, 19 nt, Artificial Sequence
  Description of Artificial Sequence: Synthetic oligonucleotide
aaaucauaggcuaacuagu

SEQ ID NO: 3218553 - RNA, 19 nt, Artificial Sequence
  Description of Artificial Sequence: Synthetic oligonucleotide
cuaaaugcgcauauaauga

SEQ ID NO: 3218554 - RNA, 19 nt, Artificial Sequence
  Description of Artificial Sequence: Synthetic oligonucleotide
caauccaauuauuugcgcc

SEQ ID NO: 3218555 - RNA, 19 nt, Artificial Sequence
  Description of Artificial Sequence: Synthetic oligonucleotide
aaugcgcauauaaugagug

SEQ ID NO: 3218556 - RNA, 19 nt, Artificial Sequence
  Description of Artificial Sequence: Synthetic oligonucleotide
aaaguguaagcagccgagc

SEQ ID NO: 3218557 - RNA, 19 nt, Artificial Sequence
  Description of Artificial Sequence: Synthetic oligonucleotide
uguacaaaugcaacugggu

SEQ ID NO: 3218558 - RNA, 19 nt, Artificial Sequence
  Description of Artificial Sequence: Synthetic oligonucleotide
aaaaguguaagcagccgag

SEQ ID NO: 3218559 - RNA, 19 nt, Artificial Sequence
  Description of Artificial Sequence: Synthetic oligonucleotide
ucauuuggucuucugaggu

SEQ ID NO: 3218560 - RNA, 19 nt, Artificial Sequence
  Description of Artificial Sequence: Synthetic oligonucleotide
acaauccaauuauuugcgc

SEQ ID NO: 3218561 - RNA, 19 nt, Artificial Sequence
  Description of Artificial Sequence: Synthetic oligonucleotide
ucuucugaggugcaagggc

SEQ ID NO: 3218562 - RNA, 19 nt, Artificial Sequence
  Description of Artificial Sequence: Synthetic oligonucleotide
ucauaggcuaacuagugaa

SEQ ID NO: 3218563 - RNA, 19 nt, Artificial Sequence
  Description of Artificial Sequence: Synthetic oligonucleotide
  modified_base (7)..(7): a, c, u, g, unknown or other
ugcccanaggauaaagaca

SEQ ID NO: 3218564 - RNA, 19 nt, Artificial Sequence
  Description of Artificial Sequence: Synthetic oligonucleotide
uuucugauaucacucuaga

SEQ ID NO: 3218565 - RNA, 19 nt, Artificial Sequence
  Description of Artificial Sequence: Synthetic oligonucleotide
cauagacuuguacagcccg

SEQ ID NO: 3218566 - RNA, 19 nt, Artificial Sequence
  Description of Artificial Sequence: Synthetic oligonucleotide
aaaugcuaaaugcgcauau

SEQ ID NO: 3218567 - RNA, 19 nt, Artificial Sequence
  Description of Artificial Sequence: Synthetic oligonucleotide
cuuucugauaucacucuag

SEQ ID NO: 3218568 - RNA, 19 nt, Artificial Sequence
  Description of Artificial Sequence: Synthetic oligonucleotide
acuuuugccauuaagugcu

SEQ ID NO: 3218569 - RNA, 19 nt, Artificial Sequence
  Description of Artificial Sequence: Synthetic oligonucleotide
aaucgcaagucccauugga

SEQ ID NO: 3218570 - RNA, 19 nt, Artificial Sequence
  Description of Artificial Sequence: Synthetic oligonucleotide
aaguguaagcagccgagcu

SEQ ID NO: 3218571 - RNA, 19 nt, Artificial Sequence
  Description of Artificial Sequence: Synthetic oligonucleotide
auaggcuaacuagugaagg

SEQ ID NO: 3218572 - RNA, 19 nt, Artificial Sequence
  Description of Artificial Sequence: Synthetic oligonucleotide
uuacaaacagcuucuaguu

SEQ ID NO: 3218573 - RNA, 19 nt, Artificial Sequence
  Description of Artificial Sequence: Synthetic oligonucleotide
gaggaaaugcuaaaugcgc

SEQ ID NO: 3218574 - RNA, 19 nt, Artificial Sequence
  Description of Artificial Sequence: Synthetic oligonucleotide
aucguacauagacuuguac

SEQ ID NO: 3218575 - RNA, 19 nt, Artificial Sequence
  Description of Artificial Sequence: Synthetic oligonucleotide
uuggaaaugcagcuccuug

SEQ ID NO: 3218576 - RNA, 19 nt, Artificial Sequence
  Description of Artificial Sequence: Synthetic oligonucleotide
agcaguguuugucuggcuc

SEQ ID NO: 3218577 - RNA, 19 nt, Artificial Sequence
  Description of Artificial Sequence: Synthetic oligonucleotide
caucuucucccuuuuauac

SEQ ID NO: 3218578 - RNA, 19 nt, Artificial Sequence
  Description of Artificial Sequence: Synthetic oligonucleotide
ucucccuuuuauacagugg

SEQ ID NO: 3218579 - RNA, 19 nt, Artificial Sequence
  Description of Artificial Sequence: Synthetic oligonucleotide
uauuccgggaggcugcugc

SEQ ID NO: 3218580 - RNA, 19 nt, Artificial Sequence
  Description of Artificial Sequence: Synthetic oligonucleotide
aaugcaacuggguuugguu

SEQ ID NO: 3218581 - RNA, 19 nt, Artificial Sequence
  Description of Artificial Sequence: Synthetic oligonucleotide
uuguacagugcaacaacgc

SEQ ID NO: 3218582 - RNA, 19 nt, Artificial Sequence
  Description of Artificial Sequence: Synthetic oligonucleotide
ugucuuuaacuauuuaaua

SEQ ID NO: 3218583 - RNA, 19 nt, Artificial Sequence
  Description of Artificial Sequence: Synthetic oligonucleotide
aauaguagucaaaucaaua

SEQ ID NO: 3218584 - RNA, 19 nt, Artificial Sequence
  Description of Artificial Sequence: Synthetic oligonucleotide
aaucauaggcuaacuagug

SEQ ID NO: 3218585 - RNA, 19 nt, Artificial Sequence
  Description of Artificial Sequence: Synthetic oligonucleotide
ugcaacaacgccucuguga

SEQ ID NO: 3218586 - RNA, 19 nt, Artificial Sequence
  Description of Artificial Sequence: Synthetic oligonucleotide
uggguuacaaacagcuucu

SEQ ID NO: 3218587 - RNA, 19 nt, Artificial Sequence
  Description of Artificial Sequence: Synthetic oligonucleotide
ugugaaaaucauaggcuaa

SEQ ID NO: 3218588 - RNA, 19 nt, Artificial Sequence
  Description of Artificial Sequence: Synthetic oligonucleotide
acucuagauuuggaaaugc

SEQ ID NO: 3218589 - RNA, 19 nt, Artificial Sequence
  Description of Artificial Sequence: Synthetic oligonucleotide
  modified_base (9)..(9): a, c, u, g, unknown or other
ucugcccanaggauaaaga

SEQ ID NO: 3218590 - RNA, 19 nt, Artificial Sequence
  Description of Artificial Sequence: Synthetic oligonucleotide
  modified_base (8)..(8): a, c, u, g, unknown or other
cugcccanaggauaaagac

SEQ ID NO: 3218591 - RNA, 19 nt, Artificial Sequence
  Description of Artificial Sequence: Synthetic oligonucleotide
ugaagugaggaucaaaagg

SEQ ID NO: 3218592 - RNA, 19 nt, Artificial Sequence
  Description of Artificial Sequence: Synthetic oligonucleotide
aaaauuuuguuccauguga

SEQ ID NO: 3218593 - RNA, 19 nt, Artificial Sequence
  Description of Artificial Sequence: Synthetic oligonucleotide
aaugugauuagugcaaacc

SEQ ID NO: 3218594 - RNA, 19 nt, Artificial Sequence
  Description of Artificial Sequence: Synthetic oligonucleotide
uauggcauuuguuaggugg

SEQ ID NO: 3218595 - RNA, 19 nt, Artificial Sequence
  Description of Artificial Sequence: Synthetic oligonucleotide
uccauuguuacuaaagaca

SEQ ID NO: 3218596 - RNA, 19 nt, Artificial Sequence
  Description of Artificial Sequence: Synthetic oligonucleotide
gauguuaccauaauccagg

SEQ ID NO: 3218597 - RNA, 19 nt, Artificial Sequence
  Description of Artificial Sequence: Synthetic oligonucleotide
gauauuggaaacugcauug

SEQ ID NO: 3218598 - RNA, 19 nt, Artificial Sequence
  Description of Artificial Sequence: Synthetic oligonucleotide
aaaaggcuguccuuccucc

SEQ ID NO: 3218599 - RNA, 19 nt, Artificial Sequence
  Description of Artificial Sequence: Synthetic oligonucleotide
agggauguuaccauaaucc

SEQ ID NO: 3218600 - RNA, 19 nt, Artificial Sequence
  Description of Artificial Sequence: Synthetic oligonucleotide
ucugauugguguaaugggg

SEQ ID NO: 3218601 - RNA, 19 nt, Artificial Sequence
  Description of Artificial Sequence: Synthetic oligonucleotide
uugguuaucuugaagugag

SEQ ID NO: 3218602 - RNA, 19 nt, Artificial Sequence
  Description of Artificial Sequence: Synthetic oligonucleotide
aaucaccagaugcaacugc

SEQ ID NO: 3218603 - RNA, 19 nt, Artificial Sequence
  Description of Artificial Sequence: Synthetic oligonucleotide
gaagugaggaucaaaaggc

SEQ ID NO: 3218604 - RNA, 19 nt, Artificial Sequence
  Description of Artificial Sequence: Synthetic oligonucleotide
aauccauuguuacuaaaga

SEQ ID NO: 3218605 - RNA, 19 nt, Artificial Sequence
  Description of Artificial Sequence: Synthetic oligonucleotide
aaugauauuggaaacugca

SEQ ID NO: 3218606 - RNA, 19 nt, Artificial Sequence
  Description of Artificial Sequence: Synthetic oligonucleotide
aacugcauugguuaucuug

SEQ ID NO: 3218607 - RNA, 19 nt, Artificial Sequence
  Description of Artificial Sequence: Synthetic oligonucleotide
augaucaauccauuguuac

SEQ ID NO: 3218608 - RNA, 19 nt, Artificial Sequence
  Description of Artificial Sequence: Synthetic oligonucleotide
uguuacuaaagacacguuc

SEQ ID NO: 3218609 - RNA, 19 nt, Artificial Sequence
  Description of Artificial Sequence: Synthetic oligonucleotide
agcuucuuugaucaagggc

SEQ ID NO: 3218610 - RNA, 19 nt, Artificial Sequence
  Description of Artificial Sequence: Synthetic oligonucleotide
agugaaagcuucuuugauc

SEQ ID NO: 3218611 - RNA, 19 nt, Artificial Sequence
  Description of Artificial Sequence: Synthetic oligonucleotide
aagggauguuaccauaauc

SEQ ID NO: 3218612 - RNA, 19 nt, Artificial Sequence
  Description of Artificial Sequence: Synthetic oligonucleotide
uccaaauccagcuggaaca

SEQ ID NO: 3218613 - RNA, 19 nt, Artificial Sequence
  Description of Artificial Sequence: Synthetic oligonucleotide
auccauuguuacuaaagac

SEQ ID NO: 3218614 - RNA, 19 nt, Artificial Sequence
  Description of Artificial Sequence: Synthetic oligonucleotide
auuguuacuaaagacacgu

SEQ ID NO: 3218615 - RNA, 19 nt, Artificial Sequence
  Description of Artificial Sequence: Synthetic oligonucleotide
uacuucuucacaaacugcu

SEQ ID NO: 3218616 - RNA, 19 nt, Artificial Sequence
  Description of Artificial Sequence: Synthetic oligonucleotide
aaggccucuuccuguaugc

SEQ ID NO: 3218617 - RNA, 19 nt, Artificial Sequence
  Description of Artificial Sequence: Synthetic oligonucleotide
aaaugauauuggaaacugc

SEQ ID NO: 3218618 - RNA, 19 nt, Artificial Sequence
  Description of Artificial Sequence: Synthetic oligonucleotide
ucucugauugguguaaugg

SEQ ID NO: 3218619 - RNA, 19 nt, Artificial Sequence
  Description of Artificial Sequence: Synthetic oligonucleotide
aguuaugaccacugaaggg

SEQ ID NO: 3218620 - RNA, 19 nt, Artificial Sequence
  Description of Artificial Sequence: Synthetic oligonucleotide
ugaaucaccagaugcaacu

SEQ ID NO: 3218621 - RNA, 19 nt, Artificial Sequence
  Description of Artificial Sequence: Synthetic oligonucleotide
aaagcuucuuugaucaagg

SEQ ID NO: 3218622 - RNA, 19 nt, Artificial Sequence
  Description of Artificial Sequence: Synthetic oligonucleotide
uaauccaggcuaaugaggu

SEQ ID NO: 3218623 - RNA, 19 nt, Artificial Sequence
  Description of Artificial Sequence: Synthetic oligonucleotide
uuuguuagguggaaggccu

SEQ ID NO: 3218624 - RNA, 19 nt, Artificial Sequence
  Description of Artificial Sequence: Synthetic oligonucleotide
uguuccaugugagugaaag

SEQ ID NO: 3218625 - RNA, 19 nt, Artificial Sequence
  Description of Artificial Sequence: Synthetic oligonucleotide
augcaacugcuccaaaucc

SEQ ID NO: 3218626 - RNA, 19 nt, Artificial Sequence
  Description of Artificial Sequence: Synthetic oligonucleotide
acuaaagacacguucucug

SEQ ID NO: 3218627 - RNA, 19 nt, Artificial Sequence
  Description of Artificial Sequence: Synthetic oligonucleotide
auuuguuagguggaaggcc

SEQ ID NO: 3218628 - RNA, 19 nt, Artificial Sequence
  Description of Artificial Sequence: Synthetic oligonucleotide
cauacuucuucacaaacug

SEQ ID NO: 3218629 - RNA, 19 nt, Artificial Sequence
  Description of Artificial Sequence: Synthetic oligonucleotide
aaauuuuguuccaugugag

SEQ ID NO: 3218630 - RNA, 19 nt, Artificial Sequence
  Description of Artificial Sequence: Synthetic oligonucleotide
guuaccauaauccaggcua

SEQ ID NO: 3218631 - RNA, 19 nt, Artificial Sequence
  Description of Artificial Sequence: Synthetic oligonucleotide
uggccauaggacaugauca

SEQ ID NO: 3218632 - RNA, 19 nt, Artificial Sequence
  Description of Artificial Sequence: Synthetic oligonucleotide
aagacacguucucugauug

SEQ ID NO: 3218633 - RNA, 19 nt, Artificial Sequence
  Description of Artificial Sequence: Synthetic oligonucleotide
caauccauuguuacuaaag

SEQ ID NO: 3218634 - RNA, 19 nt, Artificial Sequence
  Description of Artificial Sequence: Synthetic oligonucleotide
uucacaaacugcugaauca

SEQ ID NO: 3218635 - RNA, 19 nt, Artificial Sequence
  Description of Artificial Sequence: Synthetic oligonucleotide
cauaggacaugaucaaucc

SEQ ID NO: 3218636 - RNA, 19 nt, Artificial Sequence
  Description of Artificial Sequence: Synthetic oligonucleotide
aacugcuccaaauccagcu

SEQ ID NO: 3218637 - RNA, 19 nt, Artificial Sequence
  Description of Artificial Sequence: Synthetic oligonucleotide
uuaucuugaagugaggauc

SEQ ID NO: 3218638 - RNA, 19 nt, Artificial Sequence
  Description of Artificial Sequence: Synthetic oligonucleotide
uccucaaugugauuagugc

SEQ ID NO: 3218639 - RNA, 19 nt, Artificial Sequence
  Description of Artificial Sequence: Synthetic oligonucleotide
uaucuugaagugaggauca

SEQ ID NO: 3218640 - RNA, 19 nt, Artificial Sequence
  Description of Artificial Sequence: Synthetic oligonucleotide
uaggacaugaucaauccau

SEQ ID NO: 3218641 - RNA, 19 nt, Artificial Sequence
  Description of Artificial Sequence: Synthetic oligonucleotide
auuuuguuccaugugagug

SEQ ID NO: 3218642 - RNA, 19 nt, Artificial Sequence
  Description of Artificial Sequence: Synthetic oligonucleotide
ugauauuggaaacugcauu

SEQ ID NO: 3218643 - RNA, 19 nt, Artificial Sequence
  Description of Artificial Sequence: Synthetic oligonucleotide
aaugagguuuccauacuuc

SEQ ID NO: 3218644 - RNA, 19 nt, Artificial Sequence
  Description of Artificial Sequence: Synthetic oligonucleotide
aucaaaaggcuguccuucc

SEQ ID NO: 3218645 - RNA, 19 nt, Artificial Sequence
  Description of Artificial Sequence: Synthetic oligonucleotide
cauaauccaggcuaaugag

SEQ ID NO: 3218646 - RNA, 19 nt, Artificial Sequence
  Description of Artificial Sequence: Synthetic oligonucleotide
uuccaugugagugaaagcu

SEQ ID NO: 3218647 - RNA, 19 nt, Artificial Sequence
  Description of Artificial Sequence: Synthetic oligonucleotide
aauuuuguuccaugugagu

SEQ ID NO: 3218648 - RNA, 19 nt, Artificial Sequence
  Description of Artificial Sequence: Synthetic oligonucleotide
uccaaaguuccucaaugug

SEQ ID NO: 3218649 - RNA, 19 nt, Artificial Sequence
  Description of Artificial Sequence: Synthetic oligonucleotide
uuagugcaaaccuucuuug

SEQ ID NO: 3218650 - RNA, 19 nt, Artificial Sequence
  Description of Artificial Sequence: Synthetic oligonucleotide
ucuccuauggcauuuguua

SEQ ID NO: 3218651 - RNA, 19 nt, Artificial Sequence
  Description of Artificial Sequence: Synthetic oligonucleotide
uugaagugaggaucaaaag

SEQ ID NO: 3218652 - RNA, 19 nt, Artificial Sequence
  Description of Artificial Sequence: Synthetic oligonucleotide
aguccaaaguuccucaaug

SEQ ID NO: 3218653 - RNA, 19 nt, Artificial Sequence
  Description of Artificial Sequence: Synthetic oligonucleotide
uuuuguuccaugugaguga

SEQ ID NO: 3218654 - RNA, 19 nt, Artificial Sequence
  Description of Artificial Sequence: Synthetic oligonucleotide
ugauugguguaauggggcg

SEQ ID NO: 3218655 - RNA, 19 nt, Artificial Sequence
  Description of Artificial Sequence: Synthetic oligonucleotide
aaaccuucuuugcuccuuc

SEQ ID NO: 3218656 - RNA, 19 nt, Artificial Sequence
  Description of Artificial Sequence: Synthetic oligonucleotide
uuuccauacuucuucacaa

SEQ ID NO: 3218657 - RNA, 19 nt, Artificial Sequence
  Description of Artificial Sequence: Synthetic oligonucleotide
gugaaagcuucuuugauca

SEQ ID NO: 3218658 - RNA, 19 nt, Artificial Sequence
  Description of Artificial Sequence: Synthetic oligonucleotide
uuggaaacugcauugguua

SEQ ID NO: 3218659 - RNA, 19 nt, Artificial Sequence
  Description of Artificial Sequence: Synthetic oligonucleotide
augugauuagugcaaaccu

SEQ ID NO: 3218660 - RNA, 19 nt, Artificial Sequence
  Description of Artificial Sequence: Synthetic oligonucleotide
uuugaucaagggcagucca

SEQ ID NO: 3218661 - RNA, 19 nt, Artificial Sequence
  Description of Artificial Sequence: Synthetic oligonucleotide
caguuaugaccacugaagg

SEQ ID NO: 3218662 - RNA, 19 nt, Artificial Sequence
  Description of Artificial Sequence: Synthetic oligonucleotide
uccaugucuggccauagga

SEQ ID NO: 3218663 - RNA, 19 nt, Artificial Sequence
  Description of Artificial Sequence: Synthetic oligonucleotide
aaacugcugaaucaccaga

SEQ ID NO: 3218664 - RNA, 19 nt, Artificial Sequence
  Description of Artificial Sequence: Synthetic oligonucleotide
cucugauugguguaauggg

SEQ ID NO: 3218665 - RNA, 19 nt, Artificial Sequence
  Description of Artificial Sequence: Synthetic oligonucleotide
auuagugcaaaccuucuuu

SEQ ID NO: 3218666 - RNA, 19 nt, Artificial Sequence
  Description of Artificial Sequence: Synthetic oligonucleotide
uccucuaagcucuuccucc

SEQ ID NO: 3218667 - RNA, 19 nt, Artificial Sequence
  Description of Artificial Sequence: Synthetic oligonucleotide
uccuauggcauuuguuagg

SEQ ID NO: 3218668 - RNA, 19 nt, Artificial Sequence
  Description of Artificial Sequence: Synthetic oligonucleotide
gaaagcuucuuugaucaag

SEQ ID NO: 3218669 - RNA, 19 nt, Artificial Sequence
  Description of Artificial Sequence: Synthetic oligonucleotide
gugagugaaagcuucuuug

SEQ ID NO: 3218670 - RNA, 19 nt, Artificial Sequence
  Description of Artificial Sequence: Synthetic oligonucleotide
ugagugaaagcuucuuuga

SEQ ID NO: 3218671 - RNA, 19 nt, Artificial Sequence
  Description of Artificial Sequence: Synthetic oligonucleotide
ugcugaaucaccagaugca

SEQ ID NO: 3218672 - RNA, 19 nt, Artificial Sequence
  Description of Artificial Sequence: Synthetic oligonucleotide
gaugcaacugcuccaaauc

SEQ ID NO: 3218673 - RNA, 19 nt, Artificial Sequence
  Description of Artificial Sequence: Synthetic oligonucleotide
cugauugguguaauggggc

SEQ ID NO: 3218674 - RNA, 19 nt, Artificial Sequence
  Description of Artificial Sequence: Synthetic oligonucleotide
caaaugauauuggaaacug

SEQ ID NO: 3218675 - RNA, 19 nt, Artificial Sequence
  Description of Artificial Sequence: Synthetic oligonucleotide
ugcauugguuaucuugaag

SEQ ID NO: 3218676 - RNA, 19 nt, Artificial Sequence
  Description of Artificial Sequence: Synthetic oligonucleotide
guuaugaccacugaaggga

SEQ ID NO: 3218677 - RNA, 19 nt, Artificial Sequence
  Description of Artificial Sequence: Synthetic oligonucleotide
uuccucaaugugauuagug

SEQ ID NO: 3218678 - RNA, 19 nt, Artificial Sequence
  Description of Artificial Sequence: Synthetic oligonucleotide
uccauacuucuucacaaac

SEQ ID NO: 3218679 - RNA, 19 nt, Artificial Sequence
  Description of Artificial Sequence: Synthetic oligonucleotide
aagcuucuuugaucaaggg

SEQ ID NO: 3218680 - RNA, 19 nt, Artificial Sequence
  Description of Artificial Sequence: Synthetic oligonucleotide
cugcugaaucaccagaugc

SEQ ID NO: 3218681 - RNA, 19 nt, Artificial Sequence
  Description of Artificial Sequence: Synthetic oligonucleotide
agcucuuccuccccagucc

SEQ ID NO: 3218682 - RNA, 19 nt, Artificial Sequence
  Description of Artificial Sequence: Synthetic oligonucleotide
auguuaccauaauccaggc

SEQ ID NO: 3218683 - RNA, 19 nt, Artificial Sequence
  Description of Artificial Sequence: Synthetic oligonucleotide
agugcaaaccuucuuugcu

SEQ ID NO: 3218684 - RNA, 19 nt, Artificial Sequence
  Description of Artificial Sequence: Synthetic oligonucleotide
ucaagggcaguccaguuau

SEQ ID NO: 3218685 - RNA, 19 nt, Artificial Sequence
  Description of Artificial Sequence: Synthetic oligonucleotide
aaccuucuuugcuccuucc

SEQ ID NO: 3218686 - RNA, 19 nt, Artificial Sequence
  Description of Artificial Sequence: Synthetic oligonucleotide
aagcucuuccuccccaguc

SEQ ID NO: 3218687 - RNA, 19 nt, Artificial Sequence
  Description of Artificial Sequence: Synthetic oligonucleotide
gagguuuccauacuucuuc

SEQ ID NO: 3218688 - RNA, 19 nt, Artificial Sequence
  Description of Artificial Sequence: Synthetic oligonucleotide
auaauccaggcuaaugagg

SEQ ID NO: 3218689 - RNA, 19 nt, Artificial Sequence
  Description of Artificial Sequence: Synthetic oligonucleotide
cuugaagugaggaucaaaa

SEQ ID NO: 3218690 - RNA, 19 nt, Artificial Sequence
  Description of Artificial Sequence: Synthetic oligonucleotide
ugcaaaccuucuuugcucc

SEQ ID NO: 3218691 - RNA, 19 nt, Artificial Sequence
  Description of Artificial Sequence: Synthetic oligonucleotide
uuuaaaagaacaauugucu

SEQ ID NO: 3218692 - RNA, 19 nt, Artificial Sequence
  Description of Artificial Sequence: Synthetic oligonucleotide
augguuaucaucuaugaac

SEQ ID NO: 3218693 - RNA, 19 nt, Artificial Sequence
  Description of Artificial Sequence: Synthetic oligonucleotide
cuuaguaaggacuugauug

SEQ ID NO: 3218694 - RNA, 19 nt, Artificial Sequence
  Description of Artificial Sequence: Synthetic oligonucleotide
uuucuuuugacuuuuaacu

SEQ ID NO: 3218695 - RNA, 19 nt, Artificial Sequence
  Description of Artificial Sequence: Synthetic oligonucleotide
ucaucuaugaacuucauuc

SEQ ID NO: 3218696 - RNA, 19 nt, Artificial Sequence
  Description of Artificial Sequence: Synthetic oligonucleotide
uucucuaaaauuauggaca

SEQ ID NO: 3218697 - RNA, 19 nt, Artificial Sequence
  Description of Artificial Sequence: Synthetic oligonucleotide
uuuuaaaagaacaauuguc

SEQ ID NO: 3218698 - RNA, 19 nt, Artificial Sequence
  Description of Artificial Sequence: Synthetic oligonucleotide
uuugaaaucugucauaauc

SEQ ID NO: 3218699 - RNA, 19 nt, Artificial Sequence
  Description of Artificial Sequence: Synthetic oligonucleotide
acaaacuucaaucagugug

SEQ ID NO: 3218700 - RNA, 19 nt, Artificial Sequence
  Description of Artificial Sequence: Synthetic oligonucleotide
aauugucuuguauucacuc

SEQ ID NO: 3218701 - RNA, 19 nt, Artificial Sequence
  Description of Artificial Sequence: Synthetic oligonucleotide
uugaaaucugucauaaucc

SEQ ID NO: 3218702 - RNA, 19 nt, Artificial Sequence
  Description of Artificial Sequence: Synthetic oligonucleotide
cuugauuguccuaaaaugg

SEQ ID NO: 3218703 - RNA, 19 nt, Artificial Sequence
  Description of Artificial Sequence: Synthetic oligonucleotide
aaauuucuucagcagugcc

SEQ ID NO: 3218704 - RNA, 19 nt, Artificial Sequence
  Description of Artificial Sequence: Synthetic oligonucleotide
ucugucauaauccucuugc

SEQ ID NO: 3218705 - RNA, 19 nt, Artificial Sequence
  Description of Artificial Sequence: Synthetic oligonucleotide
aaugcuuugacaaacuuca

SEQ ID NO: 3218706 - RNA, 19 nt, Artificial Sequence
  Description of Artificial Sequence: Synthetic oligonucleotide
uugacuuuuaacuuuugcc

SEQ ID NO: 3218707 - RNA, 19 nt, Artificial Sequence
  Description of Artificial Sequence: Synthetic oligonucleotide
uuugucuuccaucagguca

SEQ ID NO: 3218708 - RNA, 19 nt, Artificial Sequence
  Description of Artificial Sequence: Synthetic oligonucleotide
acuucauuccuuuuaaaag

SEQ ID NO: 3218709 - RNA, 19 nt, Artificial Sequence
  Description of Artificial Sequence: Synthetic oligonucleotide
uaaaagaacaauugucuug

SEQ ID NO: 3218710 - RNA, 19 nt, Artificial Sequence
  Description of Artificial Sequence: Synthetic oligonucleotide
uuaacuuuugccuucucug

SEQ ID NO: 3218711 - RNA, 19 nt, Artificial Sequence
  Description of Artificial Sequence: Synthetic oligonucleotide
uuugacaaacuucaaucag

SEQ ID NO: 3218712 - RNA, 19 nt, Artificial Sequence
  Description of Artificial Sequence: Synthetic oligonucleotide
gaauuugucuuccaucagg

SEQ ID NO: 3218713 - RNA, 19 nt, Artificial Sequence
  Description of Artificial Sequence: Synthetic oligonucleotide
aauuucuucagcagugccc

SEQ ID NO: 3218714 - RNA, 19 nt, Artificial Sequence
  Description of Artificial Sequence: Synthetic oligonucleotide
aaaagaacaauugucuugu

SEQ ID NO: 3218715 - RNA, 19 nt, Artificial Sequence
  Description of Artificial Sequence: Synthetic oligonucleotide
aaauuauggacaauccuuc

SEQ ID NO: 3218716 - RNA, 19 nt, Artificial Sequence
  Description of Artificial Sequence: Synthetic oligonucleotide
ucuaaaauuauggacaauc

SEQ ID NO: 3218717 - RNA, 19 nt, Artificial Sequence
  Description of Artificial Sequence: Synthetic oligonucleotide
acuugauuguccuaaaaug

SEQ ID NO: 3218718 - RNA, 19 nt, Artificial Sequence
  Description of Artificial Sequence: Synthetic oligonucleotide
auuuucucuaaaauuaugg

SEQ ID NO: 3218719 - RNA, 19 nt, Artificial Sequence
  Description of Artificial Sequence: Synthetic oligonucleotide
ugacuuuuaacuuuugccu

SEQ ID NO: 3218720 - RNA, 19 nt, Artificial Sequence
  Description of Artificial Sequence: Synthetic oligonucleotide
uuauggacaauccuucuug

SEQ ID NO: 3218721 - RNA, 19 nt, Artificial Sequence
  Description of Artificial Sequence: Synthetic oligonucleotide
cuuguauucacucauuuuc

SEQ ID NO: 3218722 - RNA, 19 nt, Artificial Sequence
  Description of Artificial Sequence: Synthetic oligonucleotide
uaaaauuauggacaauccu

SEQ ID NO: 3218723 - RNA, 19 nt, Artificial Sequence
  Description of Artificial Sequence: Synthetic oligonucleotide
uuucucuaaaauuauggac

SEQ ID NO: 3218724 - RNA, 19 nt, Artificial Sequence
  Description of Artificial Sequence: Synthetic oligonucleotide
cuaaaauuauggacaaucc

SEQ ID NO: 3218725 - RNA, 19 nt, Artificial Sequence
  Description of Artificial Sequence: Synthetic oligonucleotide
acaauugucuuguauucac

SEQ ID NO: 3218726 - RNA, 19 nt, Artificial Sequence
  Description of Artificial Sequence: Synthetic oligonucleotide
aguucuucaaugcuuugac

SEQ ID NO: 3218727 - RNA, 19 nt, Artificial Sequence
  Description of Artificial Sequence: Synthetic oligonucleotide
uuaucaucuaugaacuuca

SEQ ID NO: 3218728 - RNA, 19 nt, Artificial Sequence
  Description of Artificial Sequence: Synthetic oligonucleotide
aaaugguuaucaucuauga

SEQ ID NO: 3218729 - RNA, 19 nt, Artificial Sequence
  Description of Artificial Sequence: Synthetic oligonucleotide
aaaucugucauaauccucu

SEQ ID NO: 3218730 - RNA, 19 nt, Artificial Sequence
  Description of Artificial Sequence: Synthetic oligonucleotide
uuuucucuaaaauuaugga

SEQ ID NO: 3218731 - RNA, 19 nt, Artificial Sequence
  Description of Artificial Sequence: Synthetic oligonucleotide
aacuucauuccuuuuaaaa

SEQ ID NO: 3218732 - RNA, 19 nt, Artificial Sequence
  Description of Artificial Sequence: Synthetic oligonucleotide
uuucguuagauuuaguuuu

SEQ ID NO: 3218733 - RNA, 19 nt, Artificial Sequence
  Description of Artificial Sequence: Synthetic oligonucleotide
aaaauuauggacaauccuu

SEQ ID NO: 3218734 - RNA, 19 nt, Artificial Sequence
  Description of Artificial Sequence: Synthetic oligonucleotide
ugacaaacuucaaucagug

SEQ ID NO: 3218735 - RNA, 19 nt, Artificial Sequence
  Description of Artificial Sequence: Synthetic oligonucleotide
uuugacuuuuaacuuuugc

SEQ ID NO: 3218736 - RNA, 19 nt, Artificial Sequence
  Description of Artificial Sequence: Synthetic oligonucleotide
ugguuaucaucuaugaacu

SEQ ID NO: 3218737 - RNA, 19 nt, Artificial Sequence
  Description of Artificial Sequence: Synthetic oligonucleotide
uucuucaaugcuuugacaa

SEQ ID NO: 3218738 - RNA, 19 nt, Artificial Sequence
  Description of Artificial Sequence: Synthetic oligonucleotide
aaaaugguuaucaucuaug

SEQ ID NO: 3218739 - RNA, 19 nt, Artificial Sequence
  Description of Artificial Sequence: Synthetic oligonucleotide
ucagcuauuugaaaucugu

SEQ ID NO: 3218740 - RNA, 19 nt, Artificial Sequence
  Description of Artificial Sequence: Synthetic oligonucleotide
uuuaacuuuugccuucucu

SEQ ID NO: 3218741 - RNA, 19 nt, Artificial Sequence
  Description of Artificial Sequence: Synthetic oligonucleotide
uuuaaguucuucaaugcuu

SEQ ID NO: 3218742 - RNA, 19 nt, Artificial Sequence
  Description of Artificial Sequence: Synthetic oligonucleotide
uguccuaaaaugguuauca

SEQ ID NO: 3218743 - RNA, 19 nt, Artificial Sequence
  Description of Artificial Sequence: Synthetic oligonucleotide
aacuucaaucagugugucc

SEQ ID NO: 3218744 - RNA, 19 nt, Artificial Sequence
  Description of Artificial Sequence: Synthetic oligonucleotide
cuuucuuuugacuuuuaac

SEQ ID NO: 3218745 - RNA, 19 nt, Artificial Sequence
  Description of Artificial Sequence: Synthetic oligonucleotide
uugacaaacuucaaucagu

SEQ ID NO: 3218746 - RNA, 19 nt, Artificial Sequence
  Description of Artificial Sequence: Synthetic oligonucleotide
uuucgcaaggccuuuaagu

SEQ ID NO: 3218747 - RNA, 19 nt, Artificial Sequence
  Description of Artificial Sequence: Synthetic oligonucleotide
uuaguaaggacuugauugu

SEQ ID NO: 3218748 - RNA, 19 nt, Artificial Sequence
  Description of Artificial Sequence: Synthetic oligonucleotide
uccuuuuaaaagaacaauu

SEQ ID NO: 3218749 - RNA, 19 nt, Artificial Sequence
  Description of Artificial Sequence: Synthetic oligonucleotide
acuuuuaacuuuugccuuc

SEQ ID NO: 3218750 - RNA, 19 nt, Artificial Sequence
  Description of Artificial Sequence: Synthetic oligonucleotide
uggaaauuucuucagcagu

SEQ ID NO: 3218751 - RNA, 19 nt, Artificial Sequence
  Description of Artificial Sequence: Synthetic oligonucleotide
agaacaauugucuuguauu

SEQ ID NO: 3218752 - RNA, 19 nt, Artificial Sequence
  Description of Artificial Sequence: Synthetic oligonucleotide
agcuauuugaaaucuguca

SEQ ID NO: 3218753 - RNA, 19 nt, Artificial Sequence
  Description of Artificial Sequence: Synthetic oligonucleotide
uccucuugcaucucuuucg

SEQ ID NO: 3218754 - RNA, 19 nt, Artificial Sequence
  Description of Artificial Sequence: Synthetic oligonucleotide
uugucuuccaucaggucag

SEQ ID NO: 3218755 - RNA, 19 nt, Artificial Sequence
  Description of Artificial Sequence: Synthetic oligonucleotide
uugauuguccuaaaauggu

SEQ ID NO: 3218756 - RNA, 19 nt, Artificial Sequence
  Description of Artificial Sequence: Synthetic oligonucleotide
aucauuugggaauuugucu

SEQ ID NO: 3218757 - RNA, 19 nt, Artificial Sequence
  Description of Artificial Sequence: Synthetic oligonucleotide
ucauaauccucuugcaucu

SEQ ID NO: 3218758 - RNA, 19 nt, Artificial Sequence
  Description of Artificial Sequence: Synthetic oligonucleotide
aaggccuuuaaguucuuca

SEQ ID NO: 3218759 - RNA, 19 nt, Artificial Sequence
  Description of Artificial Sequence: Synthetic oligonucleotide
uuggaaauuucuucagcag

SEQ ID NO: 3218760 - RNA, 19 nt, Artificial Sequence
  Description of Artificial Sequence: Synthetic oligonucleotide
ugaaaucugucauaauccu

SEQ ID NO: 3218761 - RNA, 19 nt, Artificial Sequence
  Description of Artificial Sequence: Synthetic oligonucleotide
aaucaguguguccagucca

SEQ ID NO: 3218762 - RNA, 19 nt, Artificial Sequence
  Description of Artificial Sequence: Synthetic oligonucleotide
aauuauggacaauccuucu

SEQ ID NO: 3218763 - RNA, 19 nt, Artificial Sequence
  Description of Artificial Sequence: Synthetic oligonucleotide
ugaacuucauuccuuuuaa

SEQ ID NO: 3218764 - RNA, 19 nt, Artificial Sequence
  Description of Artificial Sequence: Synthetic oligonucleotide
ucuuggaaauuucuucagc

SEQ ID NO: 3218765 - RNA, 19 nt, Artificial Sequence
  Description of Artificial Sequence: Synthetic oligonucleotide
uauuugaaaucugucauaa

SEQ ID NO: 3218766 - RNA, 19 nt, Artificial Sequence
  Description of Artificial Sequence: Synthetic oligonucleotide
uauggacaauccuucuugg

SEQ ID NO: 3218767 - RNA, 19 nt, Artificial Sequence
  Description of Artificial Sequence: Synthetic oligonucleotide
acuucaaucagugugucca

SEQ ID NO: 3218768 - RNA, 19 nt, Artificial Sequence
  Description of Artificial Sequence: Synthetic oligonucleotide
aagaacaauugucuuguau

SEQ ID NO: 3218769 - RNA, 19 nt, Artificial Sequence
  Description of Artificial Sequence: Synthetic oligonucleotide
uaaaaugguuaucaucuau

SEQ ID NO: 3218770 - RNA, 19 nt, Artificial Sequence
  Description of Artificial Sequence: Synthetic oligonucleotide
cauuccuuuuaaaagaaca

SEQ ID NO: 3218771 - RNA, 19 nt, Artificial Sequence
  Description of Artificial Sequence: Synthetic oligonucleotide
ucuuucguuagauuuaguu

SEQ ID NO: 3218772 - RNA, 19 nt, Artificial Sequence
  Description of Artificial Sequence: Synthetic oligonucleotide
cuucauuccuuuuaaaaga

SEQ ID NO: 3218773 - RNA, 19 nt, Artificial Sequence
  Description of Artificial Sequence: Synthetic oligonucleotide
cucauuuucucuaaaauua

SEQ ID NO: 3218774 - RNA, 19 nt, Artificial Sequence
  Description of Artificial Sequence: Synthetic oligonucleotide
caucuaugaacuucauucc

SEQ ID NO: 3218775 - RNA, 19 nt, Artificial Sequence
  Description of Artificial Sequence: Synthetic oligonucleotide
gaacaauugucuuguauuc

SEQ ID NO: 3218776 - RNA, 19 nt, Artificial Sequence
  Description of Artificial Sequence: Synthetic oligonucleotide
uuaaguucuucaaugcuuu

SEQ ID NO: 3218777 - RNA, 19 nt, Artificial Sequence
  Description of Artificial Sequence: Synthetic oligonucleotide
uuguauucacucauuuucu

SEQ ID NO: 3218778 - RNA, 19 nt, Artificial Sequence
  Description of Artificial Sequence: Synthetic oligonucleotide
uuaaaagaacaauugucuu

SEQ ID NO: 3218779 - RNA, 19 nt, Artificial Sequence
  Description of Artificial Sequence: Synthetic oligonucleotide
aguaaggacuugauugucc

SEQ ID NO: 3218780 - RNA, 19 nt, Artificial Sequence
  Description of Artificial Sequence: Synthetic oligonucleotide
aaugguuaucaucuaugaa

SEQ ID NO: 3218781 - RNA, 19 nt, Artificial Sequence
  Description of Artificial Sequence: Synthetic oligonucleotide
uggacaauccuucuuggaa

SEQ ID NO: 3218782 - RNA, 19 nt, Artificial Sequence
  Description of Artificial Sequence: Synthetic oligonucleotide
uucauuccuuuuaaaagaa

SEQ ID NO: 3218783 - RNA, 19 nt, Artificial Sequence
  Description of Artificial Sequence: Synthetic oligonucleotide
ucauuugggaauuugucuu

SEQ ID NO: 3218784 - RNA, 19 nt, Artificial Sequence
  Description of Artificial Sequence: Synthetic oligonucleotide
aauuugucuuccaucaggu

SEQ ID NO: 3218785 - RNA, 19 nt, Artificial Sequence
  Description of Artificial Sequence: Synthetic oligonucleotide
gucauaauccucuugcauc

SEQ ID NO: 3218786 - RNA, 19 nt, Artificial Sequence
  Description of Artificial Sequence: Synthetic oligonucleotide
ucuugcaucucuuucguua

SEQ ID NO: 3218787 - RNA, 19 nt, Artificial Sequence
  Description of Artificial Sequence: Synthetic oligonucleotide
aggucagcuauuugaaauc

SEQ ID NO: 3218788 - RNA, 19 nt, Artificial Sequence
  Description of Artificial Sequence: Synthetic oligonucleotide
ucucuaaaauuauggacaa

SEQ ID NO: 3218789 - RNA, 19 nt, Artificial Sequence
  Description of Artificial Sequence: Synthetic oligonucleotide
acucauuuucucuaaaauu

SEQ ID NO: 3218790 - RNA, 19 nt, Artificial Sequence
  Description of Artificial Sequence: Synthetic oligonucleotide
cuuggaaauuucuucagca

SEQ ID NO: 3218791 - RNA, 19 nt, Artificial Sequence
  Description of Artificial Sequence: Synthetic oligonucleotide
aaauaagccacuuuugucg

SEQ ID NO: 3218792 - RNA, 19 nt, Artificial Sequence
  Description of Artificial Sequence: Synthetic oligonucleotide
aacuuaaaggaaaauaagc

SEQ ID NO: 3218793 - RNA, 19 nt, Artificial Sequence
  Description of Artificial Sequence: Synthetic oligonucleotide
aaaauaagccacuuuuguc

SEQ ID NO: 3218794 - RNA, 19 nt, Artificial Sequence
  Description of Artificial Sequence: Synthetic oligonucleotide
uuuguguucagcacaaagg

SEQ ID NO: 3218795 - RNA, 19 nt, Artificial Sequence
  Description of Artificial Sequence: Synthetic oligonucleotide
acuuaaaggaaaauaagcc

SEQ ID NO: 3218796 - RNA, 19 nt, Artificial Sequence
  Description of Artificial Sequence: Synthetic oligonucleotide
uuaaccaccacacaacugc

SEQ ID NO: 3218797 - RNA, 19 nt, Artificial Sequence
  Description of Artificial Sequence: Synthetic oligonucleotide
uuaaaggaaaauaagccac

SEQ ID NO: 3218798 - RNA, 19 nt, Artificial Sequence
  Description of Artificial Sequence: Synthetic oligonucleotide
auagguuuaucacaguugg

SEQ ID NO: 3218799 - RNA, 19 nt, Artificial Sequence
  Description of Artificial Sequence: Synthetic oligonucleotide
uuguguucagcacaaaggg

SEQ ID NO: 3218800 - RNA, 19 nt, Artificial Sequence
  Description of Artificial Sequence: Synthetic oligonucleotide
uucaaugacgucuuuagcc

SEQ ID NO: 3218801 - RNA, 19 nt, Artificial Sequence
  Description of Artificial Sequence: Synthetic oligonucleotide
accaacuugauguacauag

SEQ ID NO: 3218802 - RNA, 19 nt, Artificial Sequence
  Description of Artificial Sequence: Synthetic oligonucleotide
aaaacuuaaaggaaaauaa

SEQ ID NO: 3218803 - RNA, 19 nt, Artificial Sequence
  Description of Artificial Sequence: Synthetic oligonucleotide
aauuagguugauuuugugu

SEQ ID NO: 3218804 - RNA, 19 nt, Artificial Sequence
  Description of Artificial Sequence: Synthetic oligonucleotide
uucgccauaguucuuaacc

SEQ ID NO: 3218805 - RNA, 19 nt, Artificial Sequence
  Description of Artificial Sequence: Synthetic oligonucleotide
aguguugacguccauuucg

SEQ ID NO: 3218806 - RNA, 19 nt, Artificial Sequence
  Description of Artificial Sequence: Synthetic oligonucleotide
uguacauagguuuaucaca

SEQ ID NO: 3218807 - RNA, 19 nt, Artificial Sequence
  Description of Artificial Sequence: Synthetic oligonucleotide
ugcacgcacgcaaagaugg

SEQ ID NO: 3218808 - RNA, 19 nt, Artificial Sequence
  Description of Artificial Sequence: Synthetic oligonucleotide
uuuagccugagacucuucg

SEQ ID NO: 3218809 - RNA, 19 nt, Artificial Sequence
  Description of Artificial Sequence: Synthetic oligonucleotide
uuuuguguucagcacaaag

SEQ ID NO: 3218810 - RNA, 19 nt, Artificial Sequence
  Description of Artificial Sequence: Synthetic oligonucleotide
agcacaaagggauuccacc

SEQ ID NO: 3218811 - RNA, 19 nt, Artificial Sequence
  Description of Artificial Sequence: Synthetic oligonucleotide
ucuucaaugacgucuuuag

SEQ ID NO: 3218812 - RNA, 19 nt, Artificial Sequence
  Description of Artificial Sequence: Synthetic oligonucleotide
auguacauagguuuaucac

SEQ ID NO: 3218813 - RNA, 19 nt, Artificial Sequence
  Description of Artificial Sequence: Synthetic oligonucleotide
gauuccaccaacuugaugu

SEQ ID NO: 3218814 - RNA, 19 nt, Artificial Sequence
  Description of Artificial Sequence: Synthetic oligonucleotide
ucaucaaccuuaauuaggu

SEQ ID NO: 3218815 - RNA, 19 nt, Artificial Sequence
  Description of Artificial Sequence: Synthetic oligonucleotide
aaacuuaaaggaaaauaag

SEQ ID NO: 3218816 - RNA, 19 nt, Artificial Sequence
  Description of Artificial Sequence: Synthetic oligonucleotide
guuuaucacaguuggaugc

SEQ ID NO: 3218817 - RNA, 19 nt, Artificial Sequence
  Description of Artificial Sequence: Synthetic oligonucleotide
ugauuuuguguucagcaca

SEQ ID NO: 3218818 - RNA, 19 nt, Artificial Sequence
  Description of Artificial Sequence: Synthetic oligonucleotide
uugccuaaggcuuuggcag

SEQ ID NO: 3218819 - RNA, 19 nt, Artificial Sequence
  Description of Artificial Sequence: Synthetic oligonucleotide
uccauuucgguccagcagc

SEQ ID NO: 3218820 - RNA, 19 nt, Artificial Sequence
  Description of Artificial Sequence: Synthetic oligonucleotide
cagccuaucacuuuucggg

SEQ ID NO: 3218821 - RNA, 19 nt, Artificial Sequence
  Description of Artificial Sequence: Synthetic oligonucleotide
uugacguccauuucggucc

SEQ ID NO: 3218822 - RNA, 19 nt, Artificial Sequence
  Description of Artificial Sequence: Synthetic oligonucleotide
auuagguugauuuuguguu

SEQ ID NO: 3218823 - RNA, 19 nt, Artificial Sequence
  Description of Artificial Sequence: Synthetic oligonucleotide
uuaauuagguugauuuugu

SEQ ID NO: 3218824 - RNA, 19 nt, Artificial Sequence
  Description of Artificial Sequence: Synthetic oligonucleotide
aucacaguuggaugcacgc

SEQ ID NO: 3218825 - RNA, 19 nt, Artificial Sequence
  Description of Artificial Sequence: Synthetic oligonucleotide
cuuucggucaguuuugcag

SEQ ID NO: 3218826 - RNA, 19 nt, Artificial Sequence
  Description of Artificial Sequence: Synthetic oligonucleotide
cuuaaaggaaaauaagcca

SEQ ID NO: 3218827 - RNA, 19 nt, Artificial Sequence
  Description of Artificial Sequence: Synthetic oligonucleotide
gacgucuuuagccugagac

SEQ ID NO: 3218828 - RNA, 19 nt, Artificial Sequence
  Description of Artificial Sequence: Synthetic oligonucleotide
aauuccucgugccaggcca

SEQ ID NO: 3218829 - RNA, 19 nt, Artificial Sequence
  Description of Artificial Sequence: Synthetic oligonucleotide
cuuaauuagguugauuuug

SEQ ID NO: 3218830 - RNA, 19 nt, Artificial Sequence
  Description of Artificial Sequence: Synthetic oligonucleotide
cauagagaaacccuguuuc

SEQ ID NO: 3218831 - RNA, 19 nt, Artificial Sequence
  Description of Artificial Sequence: Synthetic oligonucleotide
aggaaaauaagccacuuuu

SEQ ID NO: 3218832 - RNA, 19 nt, Artificial Sequence
  Description of Artificial Sequence: Synthetic oligonucleotide
aagggauuccaccaacuug

SEQ ID NO: 3218833 - RNA, 19 nt, Artificial Sequence
  Description of Artificial Sequence: Synthetic oligonucleotide
uaguucuuaaccaccacac

SEQ ID NO: 3218834 - RNA, 19 nt, Artificial Sequence
  Description of Artificial Sequence: Synthetic oligonucleotide
accuuaauuagguugauuu

SEQ ID NO: 3218835 - RNA, 19 nt, Artificial Sequence
  Description of Artificial Sequence: Synthetic oligonucleotide
guugauuuuguguucagca

SEQ ID NO: 3218836 - RNA, 19 nt, Artificial Sequence
  Description of Artificial Sequence: Synthetic oligonucleotide
aauaagccacuuuugucgu

SEQ ID NO: 3218837 - RNA, 19 nt, Artificial Sequence
  Description of Artificial Sequence: Synthetic oligonucleotide
uucaaucccagcaccuugg

SEQ ID NO: 3218838 - RNA, 19 nt, Artificial Sequence
  Description of Artificial Sequence: Synthetic oligonucleotide
ucaaugacgucuuuagccu

SEQ ID NO: 3218839 - RNA, 19 nt, Artificial Sequence
  Description of Artificial Sequence: Synthetic oligonucleotide
uccaaagcaguguugacgu

SEQ ID NO: 3218840 - RNA, 19 nt, Artificial Sequence
  Description of Artificial Sequence: Synthetic oligonucleotide
accaccacacaacugcagc

SEQ ID NO: 3218841 - RNA, 19 nt, Artificial Sequence
  Description of Artificial Sequence: Synthetic oligonucleotide
uucagcaccucuuccaaag

SEQ ID NO: 3218842 - RNA, 19 nt, Artificial Sequence
  Description of Artificial Sequence: Synthetic oligonucleotide
uaaaggaaaauaagccacu

SEQ ID NO: 3218843 - RNA, 19 nt, Artificial Sequence
  Description of Artificial Sequence: Synthetic oligonucleotide
uuccaaagcaguguugacg

SEQ ID NO: 3218844 - RNA, 19 nt, Artificial Sequence
  Description of Artificial Sequence: Synthetic oligonucleotide
acaacugcagccuaucacu

SEQ ID NO: 3218845 - RNA, 19 nt, Artificial Sequence
  Description of Artificial Sequence: Synthetic oligonucleotide
gaaguacucuucaaugacg

SEQ ID NO: 3218846 - RNA, 19 nt, Artificial Sequence
  Description of Artificial Sequence: Synthetic oligonucleotide
acuugauguacauagguuu

SEQ ID NO: 3218847 - RNA, 19 nt, Artificial Sequence
  Description of Artificial Sequence: Synthetic oligonucleotide
uucuuaaccaccacacaac

SEQ ID NO: 3218848 - RNA, 19 nt, Artificial Sequence
  Description of Artificial Sequence: Synthetic oligonucleotide
gauguacauagguuuauca

SEQ ID NO: 3218849 - RNA, 19 nt, Artificial Sequence
  Description of Artificial Sequence: Synthetic oligonucleotide
ucuuaaccaccacacaacu

SEQ ID NO: 3218850 - RNA, 19 nt, Artificial Sequence
  Description of Artificial Sequence: Synthetic oligonucleotide
cauagguuuaucacaguug

SEQ ID NO: 3218851 - RNA, 19 nt, Artificial Sequence
  Description of Artificial Sequence: Synthetic oligonucleotide
uaucacaguuggaugcacg

SEQ ID NO: 3218852 - RNA, 19 nt, Artificial Sequence
  Description of Artificial Sequence: Synthetic oligonucleotide
auaguucuuaaccaccaca

SEQ ID NO: 3218853 - RNA, 19 nt, Artificial Sequence
  Description of Artificial Sequence: Synthetic oligonucleotide
uuuggcagcuucaugaauu

SEQ ID NO: 3218854 - RNA, 19 nt, Artificial Sequence
  Description of Artificial Sequence: Synthetic oligonucleotide
auuucuugcauuugaagua

SEQ ID NO: 3218855 - RNA, 19 nt, Artificial Sequence
  Description of Artificial Sequence: Synthetic oligonucleotide
acaaagggauuccaccaac

SEQ ID NO: 3218856 - RNA, 19 nt, Artificial Sequence
  Description of Artificial Sequence: Synthetic oligonucleotide
guugcuguucauuucuugc

SEQ ID NO: 3218857 - RNA, 19 nt, Artificial Sequence
  Description of Artificial Sequence: Synthetic oligonucleotide
uucaugaauuccucgugcc

SEQ ID NO: 3218858 - RNA, 19 nt, Artificial Sequence
  Description of Artificial Sequence: Synthetic oligonucleotide
auuugaaguacucuucaau

SEQ ID NO: 3218859 - RNA, 19 nt, Artificial Sequence
  Description of Artificial Sequence: Synthetic oligonucleotide
guacauagguuuaucacag

SEQ ID NO: 3218860 - RNA, 19 nt, Artificial Sequence
  Description of Artificial Sequence: Synthetic oligonucleotide
ucuuccaaagcaguguuga

SEQ ID NO: 3218861 - RNA, 19 nt, Artificial Sequence
  Description of Artificial Sequence: Synthetic oligonucleotide
uagccugagacucuucgcc

SEQ ID NO: 3218862 - RNA, 19 nt, Artificial Sequence
  Description of Artificial Sequence: Synthetic oligonucleotide
gaaaauaagccacuuuugu

SEQ ID NO: 3218863 - RNA, 19 nt, Artificial Sequence
  Description of Artificial Sequence: Synthetic oligonucleotide
uuucggucaguuuugcaga

SEQ ID NO: 3218864 - RNA, 19 nt, Artificial Sequence
  Description of Artificial Sequence: Synthetic oligonucleotide
cuucaugaauuccucgugc

SEQ ID NO: 3218865 - RNA, 19 nt, Artificial Sequence
  Description of Artificial Sequence: Synthetic oligonucleotide
gcaaagaugggcuuggcgc

SEQ ID NO: 3218866 - RNA, 19 nt, Artificial Sequence
  Description of Artificial Sequence: Synthetic oligonucleotide
uugauuuuguguucagcac

SEQ ID NO: 3218867 - RNA, 19 nt, Artificial Sequence
  Description of Artificial Sequence: Synthetic oligonucleotide
uuuugcagaggccuaccca

SEQ ID NO: 3218868 - RNA, 19 nt, Artificial Sequence
  Description of Artificial Sequence: Synthetic oligonucleotide
ugcauuugaaguacucuuc

SEQ ID NO: 3218869 - RNA, 19 nt, Artificial Sequence
  Description of Artificial Sequence: Synthetic oligonucleotide
uuugcagaggccuacccau

SEQ ID NO: 3218870 - RNA, 19 nt, Artificial Sequence
  Description of Artificial Sequence: Synthetic oligonucleotide
uccaccaacuugauguaca

SEQ ID NO: 3218871 - RNA, 19 nt, Artificial Sequence
  Description of Artificial Sequence: Synthetic oligonucleotide
aaguacucuucaaugacgu

SEQ ID NO: 3218872 - RNA, 19 nt, Artificial Sequence
  Description of Artificial Sequence: Synthetic oligonucleotide
ugcagccuaucacuuuucg

SEQ ID NO: 3218873 - RNA, 19 nt, Artificial Sequence
  Description of Artificial Sequence: Synthetic oligonucleotide
agccuaucacuuuucgggg

SEQ ID NO: 3218874 - RNA, 19 nt, Artificial Sequence
  Description of Artificial Sequence: Synthetic oligonucleotide
acuuuugucguugcuguuc

SEQ ID NO: 3218875 - RNA, 19 nt, Artificial Sequence
  Description of Artificial Sequence: Synthetic oligonucleotide
uaauuagguugauuuugug

SEQ ID NO: 3218876 - RNA, 19 nt, Artificial Sequence
  Description of Artificial Sequence: Synthetic oligonucleotide
guucuuaaccaccacacaa

SEQ ID NO: 3218877 - RNA, 19 nt, Artificial Sequence
  Description of Artificial Sequence: Synthetic oligonucleotide
caaagcaguguugacgucc

SEQ ID NO: 3218878 - RNA, 19 nt, Artificial Sequence
  Description of Artificial Sequence: Synthetic oligonucleotide
ucaugaauuccucgugcca

SEQ ID NO: 3218879 - RNA, 19 nt, Artificial Sequence
  Description of Artificial Sequence: Synthetic oligonucleotide
uuucuugcauuugaaguac

SEQ ID NO: 3218880 - RNA, 19 nt, Artificial Sequence
  Description of Artificial Sequence: Synthetic oligonucleotide
aagccacuuuugucguugc

SEQ ID NO: 3218881 - RNA, 19 nt, Artificial Sequence
  Description of Artificial Sequence: Synthetic oligonucleotide
aaagggauuccaccaacuu

SEQ ID NO: 3218882 - RNA, 19 nt, Artificial Sequence
  Description of Artificial Sequence: Synthetic oligonucleotide
agcuucaugaauuccucgu

SEQ ID NO: 3218883 - RNA, 19 nt, Artificial Sequence
  Description of Artificial Sequence: Synthetic oligonucleotide
uugcauuugaaguacucuu

SEQ ID NO: 3218884 - RNA, 19 nt, Artificial Sequence
  Description of Artificial Sequence: Synthetic oligonucleotide
caugaauuccucgugccag

SEQ ID NO: 3218885 - RNA, 19 nt, Artificial Sequence
  Description of Artificial Sequence: Synthetic oligonucleotide
ucgccauaguucuuaacca

SEQ ID NO: 3218886 - RNA, 19 nt, Artificial Sequence
  Description of Artificial Sequence: Synthetic oligonucleotide
agacucuucgccauaguuc

SEQ ID NO: 3218887 - RNA, 19 nt, Artificial Sequence
  Description of Artificial Sequence: Synthetic oligonucleotide
caccuugggaggcagaggc

SEQ ID NO: 3218888 - RNA, 19 nt, Artificial Sequence
  Description of Artificial Sequence: Synthetic oligonucleotide
uugcuguucauuucuugca

SEQ ID NO: 3218889 - RNA, 19 nt, Artificial Sequence
  Description of Artificial Sequence: Synthetic oligonucleotide
acauagguuuaucacaguu

SEQ ID NO: 3218890 - RNA, 19 nt, Artificial Sequence
  Description of Artificial Sequence: Synthetic oligonucleotide
uuuaucacaguuggaugca

SEQ ID NO: 3218891 - RNA, 19 nt, Artificial Sequence
  Description of Artificial Sequence: Synthetic oligonucleotide
uccaggaacaccuucagca

SEQ ID NO: 3218892 - RNA, 19 nt, Artificial Sequence
  Description of Artificial Sequence: Synthetic oligonucleotide
uagaccacguccauggcgg

SEQ ID NO: 3218893 - RNA, 19 nt, Artificial Sequence
  Description of Artificial Sequence: Synthetic oligonucleotide
aagcgugcggcccuggcgc

SEQ ID NO: 3218894 - RNA, 19 nt, Artificial Sequence
  Description of Artificial Sequence: Synthetic oligonucleotide
uuugcgguggcgcuuggcg

SEQ ID NO: 3218895 - RNA, 19 nt, Artificial Sequence
  Description of Artificial Sequence: Synthetic oligonucleotide
aacaccuucagcaccccgc

SEQ ID NO: 3218896 - RNA, 19 nt, Artificial Sequence
  Description of Artificial Sequence: Synthetic oligonucleotide
aagccguaaagcgugcggc

SEQ ID NO: 3218897 - RNA, 19 nt, Artificial Sequence
  Description of Artificial Sequence: Synthetic oligonucleotide
aaagcgugcggcccuggcg

SEQ ID NO: 3218898 - RNA, 19 nt, Artificial Sequence
  Description of Artificial Sequence: Synthetic oligonucleotide
cuugacuccgccacggcgg

SEQ ID NO: 3218899 - RNA, 19 nt, Artificial Sequence
  Description of Artificial Sequence: Synthetic oligonucleotide
uuggugaugcccuggaugu

SEQ ID NO: 3218900 - RNA, 19 nt, Artificial Sequence
  Description of Artificial Sequence: Synthetic oligonucleotide
uagaugaggccggagaugc

SEQ ID NO: 3218901 - RNA, 19 nt, Artificial Sequence
  Description of Artificial Sequence: Synthetic oligonucleotide
augcccuggauguugucgc

SEQ ID NO: 3218902 - RNA, 19 nt, Artificial Sequence
  Description of Artificial Sequence: Synthetic oligonucleotide
gaagccguaaagcgugcgg

SEQ ID NO: 3218903 - RNA, 19 nt, Artificial Sequence
  Description of Artificial Sequence: Synthetic oligonucleotide
guagaccacguccauggcg

SEQ ID NO: 3218904 - RNA, 19 nt, Artificial Sequence
  Description of Artificial Sequence: Synthetic oligonucleotide
uucuccaggaacaccuuca

SEQ ID NO: 3218905 - RNA, 19 nt, Artificial Sequence
  Description of Artificial Sequence: Synthetic oligonucleotide
gaucacguucuccaggaac

SEQ ID NO: 3218906 - RNA, 19 nt, Artificial Sequence
  Description of Artificial Sequence: Synthetic oligonucleotide
gagggcguagaccacgucc

SEQ ID NO: 3218907 - RNA, 19 nt, Artificial Sequence
  Description of Artificial Sequence: Synthetic oligonucleotide
cuuggugaugcccuggaug

SEQ ID NO: 3218908 - RNA, 19 nt, Artificial Sequence
  Description of Artificial Sequence: Synthetic oligonucleotide
ucguagaugaggccggaga

SEQ ID NO: 3218909 - RNA, 19 nt, Artificial Sequence
  Description of Artificial Sequence: Synthetic oligonucleotide
gaugcccuggauguugucg

SEQ ID NO: 3218910 - RNA, 19 nt, Artificial Sequence
  Description of Artificial Sequence: Synthetic oligonucleotide
accuucagcaccccgcggg

SEQ ID NO: 3218911 - RNA, 19 nt, Artificial Sequence
  Description of Artificial Sequence: Synthetic oligonucleotide
aggaacaccuucagcaccc

SEQ ID NO: 3218912 - RNA, 19 nt, Artificial Sequence
  Description of Artificial Sequence: Synthetic oligonucleotide
acguccauggcggugacgg

SEQ ID NO: 3218913 - RNA, 19 nt, Artificial Sequence
  Description of Artificial Sequence: Synthetic oligonucleotide
augcgcuugacuccgccac

SEQ ID NO: 3218914 - RNA, 19 nt, Artificial Sequence
  Description of Artificial Sequence: Synthetic oligonucleotide
uccucguagaugaggccgg

SEQ ID NO: 3218915 - RNA, 19 nt, Artificial Sequence
  Description of Artificial Sequence: Synthetic oligonucleotide
ucuccaggaacaccuucag

SEQ ID NO: 3218916 - RNA, 19 nt, Artificial Sequence
  Description of Artificial Sequence: Synthetic oligonucleotide
agccguaaagcgugcggcc

SEQ ID NO: 3218917 - RNA, 19 nt, Artificial Sequence
  Description of Artificial Sequence: Synthetic oligonucleotide
uggauguugucgcggagga

SEQ ID NO: 3218918 - RNA, 19 nt, Artificial Sequence
  Description of Artificial Sequence: Synthetic oligonucleotide
ugcuccguguaggugaccg

SEQ ID NO: 3218919 - RNA, 19 nt, Artificial Sequence
  Description of Artificial Sequence: Synthetic oligonucleotide
accgccgaagccguaaagc

SEQ ID NO: 3218920 - RNA, 19 nt, Artificial Sequence
  Description of Artificial Sequence: Synthetic oligonucleotide
agaugcgcuugacuccgcc

SEQ ID NO: 3218921 - RNA, 19 nt, Artificial Sequence
  Description of Artificial Sequence: Synthetic oligonucleotide
auggcggugacggucuugc

SEQ ID NO: 3218922 - RNA, 19 nt, Artificial Sequence
  Description of Artificial Sequence: Synthetic oligonucleotide
ugucgcggaggacuuugcg

SEQ ID NO: 3218923 - RNA, 19 nt, Artificial Sequence
  Description of Artificial Sequence: Synthetic oligonucleotide
acaccuucagcaccccgcg

SEQ ID NO: 3218924 - RNA, 19 nt, Artificial Sequence
  Description of Artificial Sequence: Synthetic oligonucleotide
gucgcggaggacuuugcgg

SEQ ID NO: 3218925 - RNA, 19 nt, Artificial Sequence
  Description of Artificial Sequence: Synthetic oligonucleotide
cuccucguagaugaggccg

SEQ ID NO: 3218926 - RNA, 19 nt, Artificial Sequence
  Description of Artificial Sequence: Synthetic oligonucleotide
gaugaggccggagaugcgc

SEQ ID NO: 3218927 - RNA, 19 nt, Artificial Sequence
  Description of Artificial Sequence: Synthetic oligonucleotide
gcguagaccacguccaugg

SEQ ID NO: 3218928 - RNA, 19 nt, Artificial Sequence
  Description of Artificial Sequence: Synthetic oligonucleotide
gacggucuugcgcuuggcg

SEQ ID NO: 3218929 - RNA, 19 nt, Artificial Sequence
  Description of Artificial Sequence: Synthetic oligonucleotide
ucgcggaucacguucucca

SEQ ID NO: 3218930 - RNA, 19 nt, Artificial Sequence
  Description of Artificial Sequence: Synthetic oligonucleotide
ucgcggaggacuuugcggu

SEQ ID NO: 3218931 - RNA, 19 nt, Artificial Sequence
  Description of Artificial Sequence: Synthetic oligonucleotide
auggcgggcuuggugaugc

SEQ ID NO: 3218932 - RNA, 19 nt, Artificial Sequence
  Description of Artificial Sequence: Synthetic oligonucleotide
cuugagggcguagaccacg

SEQ ID NO: 3218933 - RNA, 19 nt, Artificial Sequence
  Description of Artificial Sequence: Synthetic oligonucleotide
uguaggugaccgcgucgcg

SEQ ID NO: 3218934 - RNA, 19 nt, Artificial Sequence
  Description of Artificial Sequence: Synthetic oligonucleotide
gauguugucgcggaggacu

SEQ ID NO: 3218935 - RNA, 19 nt, Artificial Sequence
  Description of Artificial Sequence: Synthetic oligonucleotide
aucacguucuccaggaaca

SEQ ID NO: 3218936 - RNA, 19 nt, Artificial Sequence
  Description of Artificial Sequence: Synthetic oligonucleotide
uugacuccgccacggcggg

SEQ ID NO: 3218937 - RNA, 19 nt, Artificial Sequence
  Description of Artificial Sequence: Synthetic oligonucleotide
caggaacaccuucagcacc

SEQ ID NO: 3218938 - RNA, 19 nt, Artificial Sequence
  Description of Artificial Sequence: Synthetic oligonucleotide
uuggcgugcuccguguagg

SEQ ID NO: 3218939 - RNA, 19 nt, Artificial Sequence
  Description of Artificial Sequence: Synthetic oligonucleotide
cuggauguugucgcggagg

SEQ ID NO: 3218940 - RNA, 19 nt, Artificial Sequence
  Description of Artificial Sequence: Synthetic oligonucleotide
acggucuugcgcuuggcgu

SEQ ID NO: 3218941 - RNA, 19 nt, Artificial Sequence
  Description of Artificial Sequence: Synthetic oligonucleotide
gaacaccuucagcaccccg

SEQ ID NO: 3218942 - RNA, 19 nt, Artificial Sequence
  Description of Artificial Sequence: Synthetic oligonucleotide
uucagcaccccgcgggucu

SEQ ID NO: 3218943 - RNA, 19 nt, Artificial Sequence
  Description of Artificial Sequence: Synthetic oligonucleotide
uccauggcggugacggucu

SEQ ID NO: 3218944 - RNA, 19 nt, Artificial Sequence
  Description of Artificial Sequence: Synthetic oligonucleotide
gaggacuuugcgguggcgc

SEQ ID NO: 3218945 - RNA, 19 nt, Artificial Sequence
  Description of Artificial Sequence: Synthetic oligonucleotide
ugcgcuugacuccgccacg

SEQ ID NO: 3218946 - RNA, 19 nt, Artificial Sequence
  Description of Artificial Sequence: Synthetic oligonucleotide
gucuccucguagaugaggc

SEQ ID NO: 3218947 - RNA, 19 nt, Artificial Sequence
  Description of Artificial Sequence: Synthetic oligonucleotide
uaggugaccgcgucgcgga

SEQ ID NO: 3218948 - RNA, 19 nt, Artificial Sequence
  Description of Artificial Sequence: Synthetic oligonucleotide
aaccgccgaagccguaaag

SEQ ID NO: 3218949 - RNA, 19 nt, Artificial Sequence
  Description of Artificial Sequence: Synthetic oligonucleotide
acguucuccaggaacaccu

SEQ ID NO: 3218950 - RNA, 19 nt, Artificial Sequence
  Description of Artificial Sequence: Synthetic oligonucleotide
cuccguguaggugaccgcg

SEQ ID NO: 3218951 - RNA, 19 nt, Artificial Sequence
  Description of Artificial Sequence: Synthetic oligonucleotide
uaaagcgugcggcccuggc

SEQ ID NO: 3218952 - RNA, 19 nt, Artificial Sequence
  Description of Artificial Sequence: Synthetic oligonucleotide
ugcgguggcgcuuggcgcc

SEQ ID NO: 3218953 - RNA, 19 nt, Artificial Sequence
  Description of Artificial Sequence: Synthetic oligonucleotide
guaggugaccgcgucgcgg

SEQ ID NO: 3218954 - RNA, 19 nt, Artificial Sequence
  Description of Artificial Sequence: Synthetic oligonucleotide
ggagaugcgcuugacuccg

SEQ ID NO: 3218955 - RNA, 19 nt, Artificial Sequence
  Description of Artificial Sequence: Synthetic oligonucleotide
ucuccucguagaugaggcc

SEQ ID NO: 3218956 - RNA, 19 nt, Artificial Sequence
  Description of Artificial Sequence: Synthetic oligonucleotide
aggacuuugcgguggcgcu

SEQ ID NO: 3218957 - RNA, 19 nt, Artificial Sequence
  Description of Artificial Sequence: Synthetic oligonucleotide
uugcgcuuggcgugcuccg

SEQ ID NO: 3218958 - RNA, 19 nt, Artificial Sequence
  Description of Artificial Sequence: Synthetic oligonucleotide
uuaaccgccgaagccguaa

SEQ ID NO: 3218959 - RNA, 19 nt, Artificial Sequence
  Description of Artificial Sequence: Synthetic oligonucleotide
uugagggcguagaccacgu

SEQ ID NO: 3218960 - RNA, 19 nt, Artificial Sequence
  Description of Artificial Sequence: Synthetic oligonucleotide
cuugcgcuuggcgugcucc

SEQ ID NO: 3218961 - RNA, 19 nt, Artificial Sequence
  Description of Artificial Sequence: Synthetic oligonucleotide
cuuggcgugcuccguguag

SEQ ID NO: 3218962 - RNA, 19 nt, Artificial Sequence
  Description of Artificial Sequence: Synthetic oligonucleotide
uugcgguggcgcuuggcgc

SEQ ID NO: 3218963 - RNA, 19 nt, Artificial Sequence
  Description of Artificial Sequence: Synthetic oligonucleotide
guagaugaggccggagaug

SEQ ID NO: 3218964 - RNA, 19 nt, Artificial Sequence
  Description of Artificial Sequence: Synthetic oligonucleotide
ugcccuggauguugucgcg

SEQ ID NO: 3218965 - RNA, 19 nt, Artificial Sequence
  Description of Artificial Sequence: Synthetic oligonucleotide
guguaggugaccgcgucgc

SEQ ID NO: 3218966 - RNA, 19 nt, Artificial Sequence
  Description of Artificial Sequence: Synthetic oligonucleotide
gcuugacuccgccacggcg

SEQ ID NO: 3218967 - RNA, 19 nt, Artificial Sequence
  Description of Artificial Sequence: Synthetic oligonucleotide
guugucgcggaggacuuug

SEQ ID NO: 3218968 - RNA, 19 nt, Artificial Sequence
  Description of Artificial Sequence: Synthetic oligonucleotide
gaccgcgucgcggaucacg

SEQ ID NO: 3218969 - RNA, 19 nt, Artificial Sequence
  Description of Artificial Sequence: Synthetic oligonucleotide
gaugcgcuugacuccgcca

SEQ ID NO: 3218970 - RNA, 19 nt, Artificial Sequence
  Description of Artificial Sequence: Synthetic oligonucleotide
gugacggucuugcgcuugg

SEQ ID NO: 3218971 - RNA, 19 nt, Artificial Sequence
  Description of Artificial Sequence: Synthetic oligonucleotide
ccggagaugcgcuugacuc

SEQ ID NO: 3218972 - RNA, 19 nt, Artificial Sequence
  Description of Artificial Sequence: Synthetic oligonucleotide
cuccaggaacaccuucagc

SEQ ID NO: 3218973 - RNA, 19 nt, Artificial Sequence
  Description of Artificial Sequence: Synthetic oligonucleotide
gacuuugcgguggcgcuug

SEQ ID NO: 3218974 - RNA, 19 nt, Artificial Sequence
  Description of Artificial Sequence: Synthetic oligonucleotide
gccacggcgggccaggcgg

SEQ ID NO: 3218975 - RNA, 19 nt, Artificial Sequence
  Description of Artificial Sequence: Synthetic oligonucleotide
uccguguaggugaccgcgu

SEQ ID NO: 3218976 - RNA, 19 nt, Artificial Sequence
  Description of Artificial Sequence: Synthetic oligonucleotide
guucuccaggaacaccuuc

SEQ ID NO: 3218977 - RNA, 19 nt, Artificial Sequence
  Description of Artificial Sequence: Synthetic oligonucleotide
uugucgcggaggacuuugc

SEQ ID NO: 3218978 - RNA, 19 nt, Artificial Sequence
  Description of Artificial Sequence: Synthetic oligonucleotide
caccccgcgggucuccucg

SEQ ID NO: 3218979 - RNA, 19 nt, Artificial Sequence
  Description of Artificial Sequence: Synthetic oligonucleotide
gacuccgccacggcgggcc

SEQ ID NO: 3218980 - RNA, 19 nt, Artificial Sequence
  Description of Artificial Sequence: Synthetic oligonucleotide
cuuggcgccgcccuugcca

SEQ ID NO: 3218981 - RNA, 19 nt, Artificial Sequence
  Description of Artificial Sequence: Synthetic oligonucleotide
ggugaugcccuggauguug

SEQ ID NO: 3218982 - RNA, 19 nt, Artificial Sequence
  Description of Artificial Sequence: Synthetic oligonucleotide
ccgccgaagccguaaagcg

SEQ ID NO: 3218983 - RNA, 19 nt, Artificial Sequence
  Description of Artificial Sequence: Synthetic oligonucleotide
accacguccauggcgguga

SEQ ID NO: 3218984 - RNA, 19 nt, Artificial Sequence
  Description of Artificial Sequence: Synthetic oligonucleotide
ggcggugacggucuugcgc

SEQ ID NO: 3218985 - RNA, 19 nt, Artificial Sequence
  Description of Artificial Sequence: Synthetic oligonucleotide
ggucuccucguagaugagg

SEQ ID NO: 3218986 - RNA, 19 nt, Artificial Sequence
  Description of Artificial Sequence: Synthetic oligonucleotide
gcggaucacguucuccagg

SEQ ID NO: 3218987 - RNA, 19 nt, Artificial Sequence
  Description of Artificial Sequence: Synthetic oligonucleotide
ucacguucuccaggaacac

SEQ ID NO: 3218988 - RNA, 19 nt, Artificial Sequence
  Description of Artificial Sequence: Synthetic oligonucleotide
agggcguagaccacgucca

SEQ ID NO: 3218989 - RNA, 19 nt, Artificial Sequence
  Description of Artificial Sequence: Synthetic oligonucleotide
uaaccgccgaagccguaaa

SEQ ID NO: 3218990 - RNA, 19 nt, Artificial Sequence
  Description of Artificial Sequence: Synthetic oligonucleotide
gugaccgcgucgcggauca

SEQ ID NO: 3218991 - RNA, 19 nt, Artificial Sequence
  Description of Artificial Sequence: Synthetic oligonucleotide
aauagaacaagucugaggg

SEQ ID NO: 3218992 - RNA, 19 nt, Artificial Sequence
  Description of Artificial Sequence: Synthetic oligonucleotide
gauuuaauuaaccaggaag

SEQ ID NO: 3218993 - RNA, 19 nt, Artificial Sequence
  Description of Artificial Sequence: Synthetic oligonucleotide
aaaacuucagcccuaggac

SEQ ID NO: 3218994 - RNA, 19 nt, Artificial Sequence
  Description of Artificial Sequence: Synthetic oligonucleotide
gugauaaauauguacaugg

SEQ ID NO: 3218995 - RNA, 19 nt, Artificial Sequence
  Description of Artificial Sequence: Synthetic oligonucleotide
uguuaggugaaagagaggg

SEQ ID NO: 3218996 - RNA, 19 nt, Artificial Sequence
  Description of Artificial Sequence: Synthetic oligonucleotide
uuugucacaaggaaugggg

SEQ ID NO: 3218997 - RNA, 19 nt, Artificial Sequence
  Description of Artificial Sequence: Synthetic oligonucleotide
auuuaauuaaccaggaagg

SEQ ID NO: 3218998 - RNA, 19 nt, Artificial Sequence
  Description of Artificial Sequence: Synthetic oligonucleotide
ugaggauuuaauuaaccag

SEQ ID NO: 3218999 - RNA, 19 nt, Artificial Sequence
  Description of Artificial Sequence: Synthetic oligonucleotide
uauaaauauucgcaaguca

SEQ ID NO: 3219000 - RNA, 19 nt, Artificial Sequence
  Description of Artificial Sequence: Synthetic oligonucleotide
aaggcugagccuuuuagag

SEQ ID NO: 3219001 - RNA, 19 nt, Artificial Sequence
  Description of Artificial Sequence: Synthetic oligonucleotide
uaggacuuuugucacaagg

SEQ ID NO: 3219002 - RNA, 19 nt, Artificial Sequence
  Description of Artificial Sequence: Synthetic oligonucleotide
uuuaauuaaccaggaaggg

SEQ ID NO: 3219003 - RNA, 19 nt, Artificial Sequence
  Description of Artificial Sequence: Synthetic oligonucleotide
agccaaauaguguuugccc

SEQ ID NO: 3219004 - RNA, 19 nt, Artificial Sequence
  Description of Artificial Sequence: Synthetic oligonucleotide
aaggaggcgaagcuugugg

SEQ ID NO: 3219005 - RNA, 19 nt, Artificial Sequence
  Description of Artificial Sequence: Synthetic oligonucleotide
aagcuugugggagucaccc

SEQ ID NO: 3219006 - RNA, 19 nt, Artificial Sequence
  Description of Artificial Sequence: Synthetic oligonucleotide
auauaaauauucgcaaguc

SEQ ID NO: 3219007 - RNA, 19 nt, Artificial Sequence
  Description of Artificial Sequence: Synthetic oligonucleotide
ucugaggauuuaauuaacc

SEQ ID NO: 3219008 - RNA, 19 nt, Artificial Sequence
  Description of Artificial Sequence: Synthetic oligonucleotide
gagucuaaggcuugaaggc

SEQ ID NO: 3219009 - RNA, 19 nt, Artificial Sequence
  Description of Artificial Sequence: Synthetic oligonucleotide
ugcaccuuaggucaugagc

SEQ ID NO: 3219010 - RNA, 19 nt, Artificial Sequence
  Description of Artificial Sequence: Synthetic oligonucleotide
aggcuaggaacacagcacc

SEQ ID NO: 3219011 - RNA, 19 nt, Artificial Sequence
  Description of Artificial Sequence: Synthetic oligonucleotide
gacuuagccauuaagagga

SEQ ID NO: 3219012 - RNA, 19 nt, Artificial Sequence
  Description of Artificial Sequence: Synthetic oligonucleotide
cuacagagaggccagaggc

SEQ ID NO: 3219013 - RNA, 19 nt, Artificial Sequence
  Description of Artificial Sequence: Synthetic oligonucleotide
ucaggaaggguccaugagc

SEQ ID NO: 3219014 - RNA, 19 nt, Artificial Sequence
  Description of Artificial Sequence: Synthetic oligonucleotide
ggagucuaaggcuugaagg

SEQ ID NO: 3219015 - RNA, 19 nt, Artificial Sequence
  Description of Artificial Sequence: Synthetic oligonucleotide
aaauaguguuugcccuucc

SEQ ID NO: 3219016 - RNA, 19 nt, Artificial Sequence
  Description of Artificial Sequence: Synthetic oligonucleotide
ugagauugugaccuuugcc

SEQ ID NO: 3219017 - RNA, 19 nt, Artificial Sequence
  Description of Artificial Sequence: Synthetic oligonucleotide
gauucuaggucccuuuccc

SEQ ID NO: 3219018 - RNA, 19 nt, Artificial Sequence
  Description of Artificial Sequence: Synthetic oligonucleotide
aaacuucagcccuaggacu

SEQ ID NO: 3219019 - RNA, 19 nt, Artificial Sequence
  Description of Artificial Sequence: Synthetic oligonucleotide
cagaauaagccccacuggg

SEQ ID NO: 3219020 - RNA, 19 nt, Artificial Sequence
  Description of Artificial Sequence: Synthetic oligonucleotide
aaaguuccggucuuguuaa

SEQ ID NO: 3219021 - RNA, 19 nt, Artificial Sequence
  Description of Artificial Sequence: Synthetic oligonucleotide
acuuuugucacaaggaaug

SEQ ID NO: 3219022 - RNA, 19 nt, Artificial Sequence
  Description of Artificial Sequence: Synthetic oligonucleotide
acagaauaagccccacugg

SEQ ID NO: 3219023 - RNA, 19 nt, Artificial Sequence
  Description of Artificial Sequence: Synthetic oligonucleotide
aauguacaaaaggucuggg

SEQ ID NO: 3219024 - RNA, 19 nt, Artificial Sequence
  Description of Artificial Sequence: Synthetic oligonucleotide
augagauugugaccuuugc

SEQ ID NO: 3219025 - RNA, 19 nt, Artificial Sequence
  Description of Artificial Sequence: Synthetic oligonucleotide
acuagggcggaccccaagc

SEQ ID NO: 3219026 - RNA, 19 nt, Artificial Sequence
  Description of Artificial Sequence: Synthetic oligonucleotide
ugagccauaaccucugaaa

SEQ ID NO: 3219027 - RNA, 19 nt, Artificial Sequence
  Description of Artificial Sequence: Synthetic oligonucleotide
cagccuagauucuaggucc

SEQ ID NO: 3219028 - RNA, 19 nt, Artificial Sequence
  Description of Artificial Sequence: Synthetic oligonucleotide
ugcuggaccccacauaccc

SEQ ID NO: 3219029 - RNA, 19 nt, Artificial Sequence
  Description of Artificial Sequence: Synthetic oligonucleotide
agaggcuaggaacacagca

SEQ ID NO: 3219030 - RNA, 19 nt, Artificial Sequence
  Description of Artificial Sequence: Synthetic oligonucleotide
agcccuaggacuuuuguca

SEQ ID NO: 3219031 - RNA, 19 nt, Artificial Sequence
  Description of Artificial Sequence: Synthetic oligonucleotide
aaggauuggcugcagcaug

SEQ ID NO: 3219032 - RNA, 19 nt, Artificial Sequence
  Description of Artificial Sequence: Synthetic oligonucleotide
uuagugagcccuuggggag

SEQ ID NO: 3219033 - RNA, 19 nt, Artificial Sequence
  Description of Artificial Sequence: Synthetic oligonucleotide
uuaguuugggacaggguuc

SEQ ID NO: 3219034 - RNA, 19 nt, Artificial Sequence
  Description of Artificial Sequence: Synthetic oligonucleotide
uuccucagcccuaggaggg

SEQ ID NO: 3219035 - RNA, 19 nt, Artificial Sequence
  Description of Artificial Sequence: Synthetic oligonucleotide
aggucuggggcauuugugg

SEQ ID NO: 3219036 - RNA, 19 nt, Artificial Sequence
  Description of Artificial Sequence: Synthetic oligonucleotide
acagaaugaauagaacaag

SEQ ID NO: 3219037 - RNA, 19 nt, Artificial Sequence
  Description of Artificial Sequence: Synthetic oligonucleotide
caggaaggguccaugagcc

SEQ ID NO: 3219038 - RNA, 19 nt, Artificial Sequence
  Description of Artificial Sequence: Synthetic oligonucleotide
uuaaacugagcccugccuu

SEQ ID NO: 3219039 - RNA, 19 nt, Artificial Sequence
  Description of Artificial Sequence: Synthetic oligonucleotide
agcccugccuucuaguugg

SEQ ID NO: 3219040 - RNA, 19 nt, Artificial Sequence
  Description of Artificial Sequence: Synthetic oligonucleotide
gagauugugaccuuugccu

SEQ ID NO: 3219041 - RNA, 19 nt, Artificial Sequence
  Description of Artificial Sequence: Synthetic oligonucleotide
uucuuucuggggcaaagac

SEQ ID NO: 3219042 - RNA, 19 nt, Artificial Sequence
  Description of Artificial Sequence: Synthetic oligonucleotide
aaaggucuggggcauuugu

SEQ ID NO: 3219043 - RNA, 19 nt, Artificial Sequence
  Description of Artificial Sequence: Synthetic oligonucleotide
gagccuuuuagagcuaugg

SEQ ID NO: 3219044 - RNA, 19 nt, Artificial Sequence
  Description of Artificial Sequence: Synthetic oligonucleotide
uaagaggagucuaaggcuu

SEQ ID NO: 3219045 - RNA, 19 nt, Artificial Sequence
  Description of Artificial Sequence: Synthetic oligonucleotide
ggacuuagccauuaagagg

SEQ ID NO: 3219046 - RNA, 19 nt, Artificial Sequence
  Description of Artificial Sequence: Synthetic oligonucleotide
cuuccucagcccuaggagg

SEQ ID NO: 3219047 - RNA, 19 nt, Artificial Sequence
  Description of Artificial Sequence: Synthetic oligonucleotide
accccuuuuccuuuaguuc

SEQ ID NO: 3219048 - RNA, 19 nt, Artificial Sequence
  Description of Artificial Sequence: Synthetic oligonucleotide
gaaaugguggugguggcag

SEQ ID NO: 3219049 - RNA, 19 nt, Artificial Sequence
  Description of Artificial Sequence: Synthetic oligonucleotide
uguugcccaccccugaacc

SEQ ID NO: 3219050 - RNA, 19 nt, Artificial Sequence
  Description of Artificial Sequence: Synthetic oligonucleotide
agccuuuuagagcuauggg

SEQ ID NO: 3219051 - RNA, 19 nt, Artificial Sequence
  Description of Artificial Sequence: Synthetic oligonucleotide
gaauaagccccacugggga

SEQ ID NO: 3219052 - RNA, 19 nt, Artificial Sequence
  Description of Artificial Sequence: Synthetic oligonucleotide
uagaacaagucugagggaa

SEQ ID NO: 3219053 - RNA, 19 nt, Artificial Sequence
  Description of Artificial Sequence: Synthetic oligonucleotide
ucagacgauggccaugaga

SEQ ID NO: 3219054 - RNA, 19 nt, Artificial Sequence
  Description of Artificial Sequence: Synthetic oligonucleotide
ucugagggaaccugggcug

SEQ ID NO: 3219055 - RNA, 19 nt, Artificial Sequence
  Description of Artificial Sequence: Synthetic oligonucleotide
gggacuuagccauuaagag

SEQ ID NO: 3219056 - RNA, 19 nt, Artificial Sequence
  Description of Artificial Sequence: Synthetic oligonucleotide
aggcugagccuuuuagagc

SEQ ID NO: 3219057 - RNA, 19 nt, Artificial Sequence
  Description of Artificial Sequence: Synthetic oligonucleotide
gucauguuacagaauaagc

SEQ ID NO: 3219058 - RNA, 19 nt, Artificial Sequence
  Description of Artificial Sequence: Synthetic oligonucleotide
acauacccagggucaagcc

SEQ ID NO: 3219059 - RNA, 19 nt, Artificial Sequence
  Description of Artificial Sequence: Synthetic oligonucleotide
uucgcaagucauguuacag

SEQ ID NO: 3219060 - RNA, 19 nt, Artificial Sequence
  Description of Artificial Sequence: Synthetic oligonucleotide
cauuggugcaccuuagguc

SEQ ID NO: 3219061 - RNA, 19 nt, Artificial Sequence
  Description of Artificial Sequence: Synthetic oligonucleotide
cuuagugagcccuugggga

SEQ ID NO: 3219062 - RNA, 19 nt, Artificial Sequence
  Description of Artificial Sequence: Synthetic oligonucleotide
caugacuucagacgauggc

SEQ ID NO: 3219063 - RNA, 19 nt, Artificial Sequence
  Description of Artificial Sequence: Synthetic oligonucleotide
uguggaaggggugauaaau

SEQ ID NO: 3219064 - RNA, 19 nt, Artificial Sequence
  Description of Artificial Sequence: Synthetic oligonucleotide
cacagaaugaauagaacaa

SEQ ID NO: 3219065 - RNA, 19 nt, Artificial Sequence
  Description of Artificial Sequence: Synthetic oligonucleotide
aaaugguggugguggcagg

SEQ ID NO: 3219066 - RNA, 19 nt, Artificial Sequence
  Description of Artificial Sequence: Synthetic oligonucleotide
uauucccagguccaugacu

SEQ ID NO: 3219067 - RNA, 19 nt, Artificial Sequence
  Description of Artificial Sequence: Synthetic oligonucleotide
uggggauucuauucccagg

SEQ ID NO: 3219068 - RNA, 19 nt, Artificial Sequence
  Description of Artificial Sequence: Synthetic oligonucleotide
ucuaguugggccccagccu

SEQ ID NO: 3219069 - RNA, 19 nt, Artificial Sequence
  Description of Artificial Sequence: Synthetic oligonucleotide
uugucacaaggaaugggga

SEQ ID NO: 3219070 - RNA, 19 nt, Artificial Sequence
  Description of Artificial Sequence: Synthetic oligonucleotide
cugaggauuuaauuaacca

SEQ ID NO: 3219071 - RNA, 19 nt, Artificial Sequence
  Description of Artificial Sequence: Synthetic oligonucleotide
cccaaagggaucaaugugg

SEQ ID NO: 3219072 - RNA, 19 nt, Artificial Sequence
  Description of Artificial Sequence: Synthetic oligonucleotide
uuggggauucuauucccag

SEQ ID NO: 3219073 - RNA, 19 nt, Artificial Sequence
  Description of Artificial Sequence: Synthetic oligonucleotide
cugggaagccugcacagcg

SEQ ID NO: 3219074 - RNA, 19 nt, Artificial Sequence
  Description of Artificial Sequence: Synthetic oligonucleotide
aucaaugugggugcugggg

SEQ ID NO: 3219075 - RNA, 19 nt, Artificial Sequence
  Description of Artificial Sequence: Synthetic oligonucleotide
aguugcagugaagagggag

SEQ ID NO: 3219076 - RNA, 19 nt, Artificial Sequence
  Description of Artificial Sequence: Synthetic oligonucleotide
agaauaagccccacugggg

SEQ ID NO: 3219077 - RNA, 19 nt, Artificial Sequence
  Description of Artificial Sequence: Synthetic oligonucleotide
agccauaaccucugaaaug

SEQ ID NO: 3219078 - RNA, 19 nt, Artificial Sequence
  Description of Artificial Sequence: Synthetic oligonucleotide
gacggcuccaguugcagug

SEQ ID NO: 3219079 - RNA, 19 nt, Artificial Sequence
  Description of Artificial Sequence: Synthetic oligonucleotide
uuccggucuuguuaaacug

SEQ ID NO: 3219080 - RNA, 19 nt, Artificial Sequence
  Description of Artificial Sequence: Synthetic oligonucleotide
ucgcaagucauguuacaga

SEQ ID NO: 3219081 - RNA, 19 nt, Artificial Sequence
  Description of Artificial Sequence: Synthetic oligonucleotide
uuuggccucuggcuuagug

SEQ ID NO: 3219082 - RNA, 19 nt, Artificial Sequence
  Description of Artificial Sequence: Synthetic oligonucleotide
aggaggcgaagcuuguggg

SEQ ID NO: 3219083 - RNA, 19 nt, Artificial Sequence
  Description of Artificial Sequence: Synthetic oligonucleotide
uaaccucugaaaugacccc

SEQ ID NO: 3219084 - RNA, 19 nt, Artificial Sequence
  Description of Artificial Sequence: Synthetic oligonucleotide
uuacagaauaagccccacu

SEQ ID NO: 3219085 - RNA, 19 nt, Artificial Sequence
  Description of Artificial Sequence: Synthetic oligonucleotide
ugucacaaggaauggggaa

SEQ ID NO: 3219086 - RNA, 19 nt, Artificial Sequence
  Description of Artificial Sequence: Synthetic oligonucleotide
aggaacacagcaccagucu

SEQ ID NO: 3219087 - RNA, 19 nt, Artificial Sequence
  Description of Artificial Sequence: Synthetic oligonucleotide
caugagauugugaccuuug

SEQ ID NO: 3219088 - RNA, 19 nt, Artificial Sequence
  Description of Artificial Sequence: Synthetic oligonucleotide
cuuuugucacaaggaaugg

SEQ ID NO: 3219089 - RNA, 19 nt, Artificial Sequence
  Description of Artificial Sequence: Synthetic oligonucleotide
aauaagccccacuggggaa

SEQ ID NO: 3219090 - RNA, 19 nt, Artificial Sequence
  Description of Artificial Sequence: Synthetic oligonucleotide
guguuggggauucuauucc

SEQ ID NO: 3219091 - RNA, 19 nt, Artificial Sequence
  Description of Artificial Sequence: Synthetic oligonucleotide
agauauguaagaaauaugc

SEQ ID NO: 3219092 - RNA, 19 nt, Artificial Sequence
  Description of Artificial Sequence: Synthetic oligonucleotide
ugaaaaguaauccaggaca

SEQ ID NO: 3219093 - RNA, 19 nt, Artificial Sequence
  Description of Artificial Sequence: Synthetic oligonucleotide
ucuaaugaugaaaagaaug

SEQ ID NO: 3219094 - RNA, 19 nt, Artificial Sequence
  Description of Artificial Sequence: Synthetic oligonucleotide
uuuguaaauaacaagugca

SEQ ID NO: 3219095 - RNA, 19 nt, Artificial Sequence
  Description of Artificial Sequence: Synthetic oligonucleotide
auaguaaucagccaauggg

SEQ ID NO: 3219096 - RNA, 19 nt, Artificial Sequence
  Description of Artificial Sequence: Synthetic oligonucleotide
uuaagauucaagaaccucc

SEQ ID NO: 3219097 - RNA, 19 nt, Artificial Sequence
  Description of Artificial Sequence: Synthetic oligonucleotide
cuaaugaugaaaagaaugg

SEQ ID NO: 3219098 - RNA, 19 nt, Artificial Sequence
  Description of Artificial Sequence: Synthetic oligonucleotide
aacuccaaccaucugauuc

SEQ ID NO: 3219099 - RNA, 19 nt, Artificial Sequence
  Description of Artificial Sequence: Synthetic oligonucleotide
aauccaagagcugucaacc

SEQ ID NO: 3219100 - RNA, 19 nt, Artificial Sequence
  Description of Artificial Sequence: Synthetic oligonucleotide
uuuuguaaauaacaagugc

SEQ ID NO: 3219101 - RNA, 19 nt, Artificial Sequence
  Description of Artificial Sequence: Synthetic oligonucleotide
aaugagagggcuuccauag

SEQ ID NO: 3219102 - RNA, 19 nt, Artificial Sequence
  Description of Artificial Sequence: Synthetic oligonucleotide
guaucugugaguuaggugc

SEQ ID NO: 3219103 - RNA, 19 nt, Artificial Sequence
  Description of Artificial Sequence: Synthetic oligonucleotide
uuucuaaugaugaaaagaa

SEQ ID NO: 3219104 - RNA, 19 nt, Artificial Sequence
  Description of Artificial Sequence: Synthetic oligonucleotide
gacaguaugacauagcuuc

SEQ ID NO: 3219105 - RNA, 19 nt, Artificial Sequence
  Description of Artificial Sequence: Synthetic oligonucleotide
aaugggauaacuugagcag

SEQ ID NO: 3219106 - RNA, 19 nt, Artificial Sequence
  Description of Artificial Sequence: Synthetic oligonucleotide
acaaguaaagcauccacac

SEQ ID NO: 3219107 - RNA, 19 nt, Artificial Sequence
  Description of Artificial Sequence: Synthetic oligonucleotide
uucaugaucuuuaaagugc

SEQ ID NO: 3219108 - RNA, 19 nt, Artificial Sequence
  Description of Artificial Sequence: Synthetic oligonucleotide
uuuaucuugcucuucauga

SEQ ID NO: 3219109 - RNA, 19 nt, Artificial Sequence
  Description of Artificial Sequence: Synthetic oligonucleotide
cauuccauauaaaugagag

SEQ ID NO: 3219110 - RNA, 19 nt, Artificial Sequence
  Description of Artificial Sequence: Synthetic oligonucleotide
uuuauaacagaucccaagu

SEQ ID NO: 3219111 - RNA, 19 nt, Artificial Sequence
  Description of Artificial Sequence: Synthetic oligonucleotide
uuuaaagauauauacuagu

SEQ ID NO: 3219112 - RNA, 19 nt, Artificial Sequence
  Description of Artificial Sequence: Synthetic oligonucleotide
uucaaaaugggaauccaag

SEQ ID NO: 3219113 - RNA, 19 nt, Artificial Sequence
  Description of Artificial Sequence: Synthetic oligonucleotide
uauaguaaucagccaaugg

SEQ ID NO: 3219114 - RNA, 19 nt, Artificial Sequence
  Description of Artificial Sequence: Synthetic oligonucleotide
aaagauauguaagaaauau

SEQ ID NO: 3219115 - RNA, 19 nt, Artificial Sequence
  Description of Artificial Sequence: Synthetic oligonucleotide
ugauauaguaaucagccaa

SEQ ID NO: 3219116 - RNA, 19 nt, Artificial Sequence
  Description of Artificial Sequence: Synthetic oligonucleotide
aagaaugggcucuugagca

SEQ ID NO: 3219117 - RNA, 19 nt, Artificial Sequence
  Description of Artificial Sequence: Synthetic oligonucleotide
auucacugaagucucauuc

SEQ ID NO: 3219118 - RNA, 19 nt, Artificial Sequence
  Description of Artificial Sequence: Synthetic oligonucleotide
aauuaugguagggagaaug

SEQ ID NO: 3219119 - RNA, 19 nt, Artificial Sequence
  Description of Artificial Sequence: Synthetic oligonucleotide
cacacagaaauuaugguag

SEQ ID NO: 3219120 - RNA, 19 nt, Artificial Sequence
  Description of Artificial Sequence: Synthetic oligonucleotide
accaauacccuuuggaagg

SEQ ID NO: 3219121 - RNA, 19 nt, Artificial Sequence
  Description of Artificial Sequence: Synthetic oligonucleotide
uuacaaaagauauguaaga

SEQ ID NO: 3219122 - RNA, 19 nt, Artificial Sequence
  Description of Artificial Sequence: Synthetic oligonucleotide
aauguuagccucugcaucu

SEQ ID NO: 3219123 - RNA, 19 nt, Artificial Sequence
  Description of Artificial Sequence: Synthetic oligonucleotide
aggugcacuacccaugucc

SEQ ID NO: 3219124 - RNA, 19 nt, Artificial Sequence
  Description of Artificial Sequence: Synthetic oligonucleotide
uguugcuuucuaaugauga

SEQ ID NO: 3219125 - RNA, 19 nt, Artificial Sequence
  Description of Artificial Sequence: Synthetic oligonucleotide
ucaagaaccucccauggug

SEQ ID NO: 3219126 - RNA, 19 nt, Artificial Sequence
  Description of Artificial Sequence: Synthetic oligonucleotide
ucuggugccugauagauga

SEQ ID NO: 3219127 - RNA, 19 nt, Artificial Sequence
  Description of Artificial Sequence: Synthetic oligonucleotide
uuaucucggauaucuaccg

SEQ ID NO: 3219128 - RNA, 19 nt, Artificial Sequence
  Description of Artificial Sequence: Synthetic oligonucleotide
agagcugucaacccaagag

SEQ ID NO: 3219129 - RNA, 19 nt, Artificial Sequence
  Description of Artificial Sequence: Synthetic oligonucleotide
guuuauaacagaucccaag

SEQ ID NO: 3219130 - RNA, 19 nt, Artificial Sequence
  Description of Artificial Sequence: Synthetic oligonucleotide
gauaacuugagcaggagac

SEQ ID NO: 3219131 - RNA, 19 nt, Artificial Sequence
  Description of Artificial Sequence: Synthetic oligonucleotide
uaaugaugaaaagaauggg

SEQ ID NO: 3219132 - RNA, 19 nt, Artificial Sequence
  Description of Artificial Sequence: Synthetic oligonucleotide
uuuccuuuuggcuuuaggu

SEQ ID NO: 3219133 - RNA, 19 nt, Artificial Sequence
  Description of Artificial Sequence: Synthetic oligonucleotide
uucauuauuacauguccug

SEQ ID NO: 3219134 - RNA, 19 nt, Artificial Sequence
  Description of Artificial Sequence: Synthetic oligonucleotide
aacagauuaucucggauau

SEQ ID NO: 3219135 - RNA, 19 nt, Artificial Sequence
  Description of Artificial Sequence: Synthetic oligonucleotide
aucucggauaucuaccgcc

SEQ ID NO: 3219136 - RNA, 19 nt, Artificial Sequence
  Description of Artificial Sequence: Synthetic oligonucleotide
uaagauucaagaaccuccc

SEQ ID NO: 3219137 - RNA, 19 nt, Artificial Sequence
  Description of Artificial Sequence: Synthetic oligonucleotide
caaugauauaguaaucagc

SEQ ID NO: 3219138 - RNA, 19 nt, Artificial Sequence
  Description of Artificial Sequence: Synthetic oligonucleotide
auuaucucggauaucuacc

SEQ ID NO: 3219139 - RNA, 19 nt, Artificial Sequence
  Description of Artificial Sequence: Synthetic oligonucleotide
uucacugaagucucauucg

SEQ ID NO: 3219140 - RNA, 19 nt, Artificial Sequence
  Description of Artificial Sequence: Synthetic oligonucleotide
ggaaggaugauaucgacag

SEQ ID NO: 3219141 - RNA, 19 nt, Artificial Sequence
  Description of Artificial Sequence: Synthetic oligonucleotide
ucaugaucuuuaaagugcc

SEQ ID NO: 3219142 - RNA, 19 nt, Artificial Sequence
  Description of Artificial Sequence: Synthetic oligonucleotide
auauaaaugagagggcuuc

SEQ ID NO: 3219143 - RNA, 19 nt, Artificial Sequence
  Description of Artificial Sequence: Synthetic oligonucleotide
uuugucugaggucaacaag

SEQ ID NO: 3219144 - RNA, 19 nt, Artificial Sequence
  Description of Artificial Sequence: Synthetic oligonucleotide
agauauauacuaguguauc

SEQ ID NO: 3219145 - RNA, 19 nt, Artificial Sequence
  Description of Artificial Sequence: Synthetic oligonucleotide
uauacuaguguaucuguga

SEQ ID NO: 3219146 - RNA, 19 nt, Artificial Sequence
  Description of Artificial Sequence: Synthetic oligonucleotide
uugucugaggucaacaagu

SEQ ID NO: 3219147 - RNA, 19 nt, Artificial Sequence
  Description of Artificial Sequence: Synthetic oligonucleotide
aagugcauuccauauaaau

SEQ ID NO: 3219148 - RNA, 19 nt, Artificial Sequence
  Description of Artificial Sequence: Synthetic oligonucleotide
gaugauaucgacaguauga

SEQ ID NO: 3219149 - RNA, 19 nt, Artificial Sequence
  Description of Artificial Sequence: Synthetic oligonucleotide
uuuggaaggaugauaucga

SEQ ID NO: 3219150 - RNA, 19 nt, Artificial Sequence
  Description of Artificial Sequence: Synthetic oligonucleotide
aauaccaugcacugcagua

SEQ ID NO: 3219151 - RNA, 19 nt, Artificial Sequence
  Description of Artificial Sequence: Synthetic oligonucleotide
auguauucaacuccaacca

SEQ ID NO: 3219152 - RNA, 19 nt, Artificial Sequence
  Description of Artificial Sequence: Synthetic oligonucleotide
uuggcuuuagguuugacuu

SEQ ID NO: 3219153 - RNA, 19 nt, Artificial Sequence
  Description of Artificial Sequence: Synthetic oligonucleotide
uaguguaucugugaguuag

SEQ ID NO: 3219154 - RNA, 19 nt, Artificial Sequence
  Description of Artificial Sequence: Synthetic oligonucleotide
cuaccacuguucaaaaugg

SEQ ID NO: 3219155 - RNA, 19 nt, Artificial Sequence
  Description of Artificial Sequence: Synthetic oligonucleotide
cuuugucugauccacuggg

SEQ ID NO: 3219156 - RNA, 19 nt, Artificial Sequence
  Description of Artificial Sequence: Synthetic oligonucleotide
ucgacaguaugacauagcu

SEQ ID NO: 3219157 - RNA, 19 nt, Artificial Sequence
  Description of Artificial Sequence: Synthetic oligonucleotide
ugauagaugacuccagcaa

SEQ ID NO: 3219158 - RNA, 19 nt, Artificial Sequence
  Description of Artificial Sequence: Synthetic oligonucleotide
ugaguuaggugcacuaccc

SEQ ID NO: 3219159 - RNA, 19 nt, Artificial Sequence
  Description of Artificial Sequence: Synthetic oligonucleotide
ugcuuucuaaugaugaaaa

SEQ ID NO: 3219160 - RNA, 19 nt, Artificial Sequence
  Description of Artificial Sequence: Synthetic oligonucleotide
ucuggaguuuauaacagau

SEQ ID NO: 3219161 - RNA, 19 nt, Artificial Sequence
  Description of Artificial Sequence: Synthetic oligonucleotide
ugacggacaaggaaugugc

SEQ ID NO: 3219162 - RNA, 19 nt, Artificial Sequence
  Description of Artificial Sequence: Synthetic oligonucleotide
ugaucuuuaaagugccacc

SEQ ID NO: 3219163 - RNA, 19 nt, Artificial Sequence
  Description of Artificial Sequence: Synthetic oligonucleotide
ugacauagcuucaucaaaa

SEQ ID NO: 3219164 - RNA, 19 nt, Artificial Sequence
  Description of Artificial Sequence: Synthetic oligonucleotide
auacuaguguaucugugag

SEQ ID NO: 3219165 - RNA, 19 nt, Artificial Sequence
  Description of Artificial Sequence: Synthetic oligonucleotide
uuguaaauaacaagugcau

SEQ ID NO: 3219166 - RNA, 19 nt, Artificial Sequence
  Description of Artificial Sequence: Synthetic oligonucleotide
uaaagcauccacacgcugu

SEQ ID NO: 3219167 - RNA, 19 nt, Artificial Sequence
  Description of Artificial Sequence: Synthetic oligonucleotide
aaggauugcuucuuucuga

SEQ ID NO: 3219168 - RNA, 19 nt, Artificial Sequence
  Description of Artificial Sequence: Synthetic oligonucleotide
augauaucgacaguaugac

SEQ ID NO: 3219169 - RNA, 19 nt, Artificial Sequence
  Description of Artificial Sequence: Synthetic oligonucleotide
auauauacuaguguaucug

SEQ ID NO: 3219170 - RNA, 19 nt, Artificial Sequence
  Description of Artificial Sequence: Synthetic oligonucleotide
uuucuuguccacuauucac

SEQ ID NO: 3219171 - RNA, 19 nt, Artificial Sequence
  Description of Artificial Sequence: Synthetic oligonucleotide
acaagugcauuccauauaa

SEQ ID NO: 3219172 - RNA, 19 nt, Artificial Sequence
  Description of Artificial Sequence: Synthetic oligonucleotide
uuuuaagauucaagaaccu

SEQ ID NO: 3219173 - RNA, 19 nt, Artificial Sequence
  Description of Artificial Sequence: Synthetic oligonucleotide
uacauguccugucauaaaa

SEQ ID NO: 3219174 - RNA, 19 nt, Artificial Sequence
  Description of Artificial Sequence: Synthetic oligonucleotide
agagcuugguucuucuuuc

SEQ ID NO: 3219175 - RNA, 19 nt, Artificial Sequence
  Description of Artificial Sequence: Synthetic oligonucleotide
ugauucaagugcucuaaug

SEQ ID NO: 3219176 - RNA, 19 nt, Artificial Sequence
  Description of Artificial Sequence: Synthetic oligonucleotide
ucuuucuuguccacuauuc

SEQ ID NO: 3219177 - RNA, 19 nt, Artificial Sequence
  Description of Artificial Sequence: Synthetic oligonucleotide
gaguuuauaacagauccca

SEQ ID NO: 3219178 - RNA, 19 nt, Artificial Sequence
  Description of Artificial Sequence: Synthetic oligonucleotide
gaaauuaugguagggagaa

SEQ ID NO: 3219179 - RNA, 19 nt, Artificial Sequence
  Description of Artificial Sequence: Synthetic oligonucleotide
ucuccuucuccucagauuu

SEQ ID NO: 3219180 - RNA, 19 nt, Artificial Sequence
  Description of Artificial Sequence: Synthetic oligonucleotide
uagguuugacuuuaucuug

SEQ ID NO: 3219181 - RNA, 19 nt, Artificial Sequence
  Description of Artificial Sequence: Synthetic oligonucleotide
ucucggauaucuaccgccg

SEQ ID NO: 3219182 - RNA, 19 nt, Artificial Sequence
  Description of Artificial Sequence: Synthetic oligonucleotide
gacauagcuucaucaaaag

SEQ ID NO: 3219183 - RNA, 19 nt, Artificial Sequence
  Description of Artificial Sequence: Synthetic oligonucleotide
aacaaguaaagcauccaca

SEQ ID NO: 3219184 - RNA, 19 nt, Artificial Sequence
  Description of Artificial Sequence: Synthetic oligonucleotide
auuucacaguuucugggag

SEQ ID NO: 3219185 - RNA, 19 nt, Artificial Sequence
  Description of Artificial Sequence: Synthetic oligonucleotide
aaaguaauccaggacacua

SEQ ID NO: 3219186 - RNA, 19 nt, Artificial Sequence
  Description of Artificial Sequence: Synthetic oligonucleotide
aagauauguaagaaauaug

SEQ ID NO: 3219187 - RNA, 19 nt, Artificial Sequence
  Description of Artificial Sequence: Synthetic oligonucleotide
ugcugagguauagugacgg

SEQ ID NO: 3219188 - RNA, 19 nt, Artificial Sequence
  Description of Artificial Sequence: Synthetic oligonucleotide
augcacacagaaauuaugg

SEQ ID NO: 3219189 - RNA, 19 nt, Artificial Sequence
  Description of Artificial Sequence: Synthetic oligonucleotide
gaaaaguaauccaggacac

SEQ ID NO: 3219190 - RNA, 19 nt, Artificial Sequence
  Description of Artificial Sequence: Synthetic oligonucleotide
acuuuugcugaacaaauuu

SEQ ID NO: 3219191 - RNA, 19 nt, Artificial Sequence
  Description of Artificial Sequence: Synthetic oligonucleotide
aucuuugggacacacaagg

SEQ ID NO: 3219192 - RNA, 19 nt, Artificial Sequence
  Description of Artificial Sequence: Synthetic oligonucleotide
uuugggacacacaagggag

SEQ ID NO: 3219193 - RNA, 19 nt, Artificial Sequence
  Description of Artificial Sequence: Synthetic oligonucleotide
caagccuuugaaaagagag

SEQ ID NO: 3219194 - RNA, 19 nt, Artificial Sequence
  Description of Artificial Sequence: Synthetic oligonucleotide
aagggaguccagcaggccc

SEQ ID NO: 3219195 - RNA, 19 nt, Artificial Sequence
  Description of Artificial Sequence: Synthetic oligonucleotide
uucaccacugugcagggcg

SEQ ID NO: 3219196 - RNA, 19 nt, Artificial Sequence
  Description of Artificial Sequence: Synthetic oligonucleotide
ucaucuuugggacacacaa

SEQ ID NO: 3219197 - RNA, 19 nt, Artificial Sequence
  Description of Artificial Sequence: Synthetic oligonucleotide
uggacagaagacaggaggg

SEQ ID NO: 3219198 - RNA, 19 nt, Artificial Sequence
  Description of Artificial Sequence: Synthetic oligonucleotide
agacaggagggauagugcc

SEQ ID NO: 3219199 - RNA, 19 nt, Artificial Sequence
  Description of Artificial Sequence: Synthetic oligonucleotide
agcacuggggcucauggcc

SEQ ID NO: 3219200 - RNA, 19 nt, Artificial Sequence
  Description of Artificial Sequence: Synthetic oligonucleotide
agagaguccaguucugugg

SEQ ID NO: 3219201 - RNA, 19 nt, Artificial Sequence
  Description of Artificial Sequence: Synthetic oligonucleotide
cuggacagaagacaggagg

SEQ ID NO: 3219202 - RNA, 19 nt, Artificial Sequence
  Description of Artificial Sequence: Synthetic oligonucleotide
gaaugggugugcaaaaggg

SEQ ID NO: 3219203 - RNA, 19 nt, Artificial Sequence
  Description of Artificial Sequence: Synthetic oligonucleotide
ugaaaagagaguccaguuc

SEQ ID NO: 3219204 - RNA, 19 nt, Artificial Sequence
  Description of Artificial Sequence: Synthetic oligonucleotide
aaaagggagggagacgagg

SEQ ID NO: 3219205 - RNA, 19 nt, Artificial Sequence
  Description of Artificial Sequence: Synthetic oligonucleotide
agccuuugaaaagagaguc

SEQ ID NO: 3219206 - RNA, 19 nt, Artificial Sequence
  Description of Artificial Sequence: Synthetic oligonucleotide
agccucauccacuggaccc

SEQ ID NO: 3219207 - RNA, 19 nt, Artificial Sequence
  Description of Artificial Sequence: Synthetic oligonucleotide
uuugaaaagagaguccagu

SEQ ID NO: 3219208 - RNA, 19 nt, Artificial Sequence
  Description of Artificial Sequence: Synthetic oligonucleotide
ugguucaccacugugcagg

SEQ ID NO: 3219209 - RNA, 19 nt, Artificial Sequence
  Description of Artificial Sequence: Synthetic oligonucleotide
agagccaagccuuugaaaa

SEQ ID NO: 3219210 - RNA, 19 nt, Artificial Sequence
  Description of Artificial Sequence: Synthetic oligonucleotide
aagacaggagggauagugc

SEQ ID NO: 3219211 - RNA, 19 nt, Artificial Sequence
  Description of Artificial Sequence: Synthetic oligonucleotide
auagugccccuucagguac

SEQ ID NO: 3219212 - RNA, 19 nt, Artificial Sequence
  Description of Artificial Sequence: Synthetic oligonucleotide
gaagacaggagggauagug

SEQ ID NO: 3219213 - RNA, 19 nt, Artificial Sequence
  Description of Artificial Sequence: Synthetic oligonucleotide
gaaaagagaguccaguucu

SEQ ID NO: 3219214 - RNA, 19 nt, Artificial Sequence
  Description of Artificial Sequence: Synthetic oligonucleotide
ucugguucaccacugugca

SEQ ID NO: 3219215 - RNA, 19 nt, Artificial Sequence
  Description of Artificial Sequence: Synthetic oligonucleotide
ucuuugggacacacaaggg

SEQ ID NO: 3219216 - RNA, 19 nt, Artificial Sequence
  Description of Artificial Sequence: Synthetic oligonucleotide
aaagggagggagacgaggg

SEQ ID NO: 3219217 - RNA, 19 nt, Artificial Sequence
  Description of Artificial Sequence: Synthetic oligonucleotide
uggccuucgaucuggacag

SEQ ID NO: 3219218 - RNA, 19 nt, Artificial Sequence
  Description of Artificial Sequence: Synthetic oligonucleotide
gagaguccaguucuguggg

SEQ ID NO: 3219219 - RNA, 19 nt, Artificial Sequence
  Description of Artificial Sequence: Synthetic oligonucleotide
aagagaguccaguucugug

SEQ ID NO: 3219220 - RNA, 19 nt, Artificial Sequence
  Description of Artificial Sequence: Synthetic oligonucleotide
gaacaugagagggaauggg

SEQ ID NO: 3219221 - RNA, 19 nt, Artificial Sequence
  Description of Artificial Sequence: Synthetic oligonucleotide
cauggccucagccucaucc

SEQ ID NO: 3219222 - RNA, 19 nt, Artificial Sequence
  Description of Artificial Sequence: Synthetic oligonucleotide
ugggugugcaaaagggagg

SEQ ID NO: 3219223 - RNA, 19 nt, Artificial Sequence
  Description of Artificial Sequence: Synthetic oligonucleotide
ugugcaaaagggagggaga

SEQ ID NO: 3219224 - RNA, 19 nt, Artificial Sequence
  Description of Artificial Sequence: Synthetic oligonucleotide
auccacuggacccucaucu

SEQ ID NO: 3219225 - RNA, 19 nt, Artificial Sequence
  Description of Artificial Sequence: Synthetic oligonucleotide
acaggagggauagugcccc

SEQ ID NO: 3219226 - RNA, 19 nt, Artificial Sequence
  Description of Artificial Sequence: Synthetic oligonucleotide
cucugguucaccacugugc

SEQ ID NO: 3219227 - RNA, 19 nt, Artificial Sequence
  Description of Artificial Sequence: Synthetic oligonucleotide
guucccacugcacagugag

SEQ ID NO: 3219228 - RNA, 19 nt, Artificial Sequence
  Description of Artificial Sequence: Synthetic oligonucleotide
ucaggguucccacugcaca

SEQ ID NO: 3219229 - RNA, 19 nt, Artificial Sequence
  Description of Artificial Sequence: Synthetic oligonucleotide
gaggcugcagcacuggggc

SEQ ID NO: 3219230 - RNA, 19 nt, Artificial Sequence
  Description of Artificial Sequence: Synthetic oligonucleotide
ucccacugcacagugagag

SEQ ID NO: 3219231 - RNA, 19 nt, Artificial Sequence
  Description of Artificial Sequence: Synthetic oligonucleotide
cacaagggaguccagcagg

SEQ ID NO: 3219232 - RNA, 19 nt, Artificial Sequence
  Description of Artificial Sequence: Synthetic oligonucleotide
guggcuccagcucagaggc

SEQ ID NO: 3219233 - RNA, 19 nt, Artificial Sequence
  Description of Artificial Sequence: Synthetic oligonucleotide
acgaggguggccuucgauc

SEQ ID NO: 3219234 - RNA, 19 nt, Artificial Sequence
  Description of Artificial Sequence: Synthetic oligonucleotide
uguggguggcuccagcuca

SEQ ID NO: 3219235 - RNA, 19 nt, Artificial Sequence
  Description of Artificial Sequence: Synthetic oligonucleotide
uucgaucuggacagaagac

SEQ ID NO: 3219236 - RNA, 19 nt, Artificial Sequence
  Description of Artificial Sequence: Synthetic oligonucleotide
ugcacagugagagccaagc

SEQ ID NO: 3219237 - RNA, 19 nt, Artificial Sequence
  Description of Artificial Sequence: Synthetic oligonucleotide
uggacccucaucuuuggga

SEQ ID NO: 3219238 - RNA, 19 nt, Artificial Sequence
  Description of Artificial Sequence: Synthetic oligonucleotide
uugaaaagagaguccaguu

SEQ ID NO: 3219239 - RNA, 19 nt, Artificial Sequence
  Description of Artificial Sequence: Synthetic oligonucleotide
cuuugaaaagagaguccag

SEQ ID NO: 3219240 - RNA, 19 nt, Artificial Sequence
  Description of Artificial Sequence: Synthetic oligonucleotide
aguccagcaggccccaggg

SEQ ID NO: 3219241 - RNA, 19 nt, Artificial Sequence
  Description of Artificial Sequence: Synthetic oligonucleotide
aacaugagagggaaugggu

SEQ ID NO: 3219242 - RNA, 19 nt, Artificial Sequence
  Description of Artificial Sequence: Synthetic oligonucleotide
uccagcaggccccagggac

SEQ ID NO: 3219243 - RNA, 19 nt, Artificial Sequence
  Description of Artificial Sequence: Synthetic oligonucleotide
ggaaugggugugcaaaagg

SEQ ID NO: 3219244 - RNA, 19 nt, Artificial Sequence
  Description of Artificial Sequence: Synthetic oligonucleotide
aaugggugugcaaaaggga

SEQ ID NO: 3219245 - RNA, 19 nt, Artificial Sequence
  Description of Artificial Sequence: Synthetic oligonucleotide
ucgaucuggacagaagaca

SEQ ID NO: 3219246 - RNA, 19 nt, Artificial Sequence
  Description of Artificial Sequence: Synthetic oligonucleotide
gggacuuggucccuggucg

SEQ ID NO: 3219247 - RNA, 19 nt, Artificial Sequence
  Description of Artificial Sequence: Synthetic oligonucleotide
gagccaagccuuugaaaag

SEQ ID NO: 3219248 - RNA, 19 nt, Artificial Sequence
  Description of Artificial Sequence: Synthetic oligonucleotide
acccuggugucucugguuc

SEQ ID NO: 3219249 - RNA, 19 nt, Artificial Sequence
  Description of Artificial Sequence: Synthetic oligonucleotide
ucuggacagaagacaggag

SEQ ID NO: 3219250 - RNA, 19 nt, Artificial Sequence
  Description of Artificial Sequence: Synthetic oligonucleotide
acacacaagggaguccagc

SEQ ID NO: 3219251 - RNA, 19 nt, Artificial Sequence
  Description of Artificial Sequence: Synthetic oligonucleotide
cuucgaucuggacagaaga

SEQ ID NO: 3219252 - RNA, 19 nt, Artificial Sequence
  Description of Artificial Sequence: Synthetic oligonucleotide
aaagagaguccaguucugu

SEQ ID NO: 3219253 - RNA, 19 nt, Artificial Sequence
  Description of Artificial Sequence: Synthetic oligonucleotide
ucucugguucaccacugug

SEQ ID NO: 3219254 - RNA, 19 nt, Artificial Sequence
  Description of Artificial Sequence: Synthetic oligonucleotide
augggugugcaaaagggag

SEQ ID NO: 3219255 - RNA, 19 nt, Artificial Sequence
  Description of Artificial Sequence: Synthetic oligonucleotide
aguccaguucugugggugg

SEQ ID NO: 3219256 - RNA, 19 nt, Artificial Sequence
  Description of Artificial Sequence: Synthetic oligonucleotide
cagaagacaggagggauag

SEQ ID NO: 3219257 - RNA, 19 nt, Artificial Sequence
  Description of Artificial Sequence: Synthetic oligonucleotide
cuuugggacacacaaggga

SEQ ID NO: 3219258 - RNA, 19 nt, Artificial Sequence
  Description of Artificial Sequence: Synthetic oligonucleotide
gugugcaaaagggagggag

SEQ ID NO: 3219259 - RNA, 19 nt, Artificial Sequence
  Description of Artificial Sequence: Synthetic oligonucleotide
acugugcagggcgugaagg

SEQ ID NO: 3219260 - RNA, 19 nt, Artificial Sequence
  Description of Artificial Sequence: Synthetic oligonucleotide
aucuggacagaagacagga

SEQ ID NO: 3219261 - RNA, 19 nt, Artificial Sequence
  Description of Artificial Sequence: Synthetic oligonucleotide
acaagggaguccagcaggc

SEQ ID NO: 3219262 - RNA, 19 nt, Artificial Sequence
  Description of Artificial Sequence: Synthetic oligonucleotide
agggacuuggucccugguc

SEQ ID NO: 3219263 - RNA, 19 nt, Artificial Sequence
  Description of Artificial Sequence: Synthetic oligonucleotide
ugucucugguucaccacug

SEQ ID NO: 3219264 - RNA, 19 nt, Artificial Sequence
  Description of Artificial Sequence: Synthetic oligonucleotide
aagccuuugaaaagagagu

SEQ ID NO: 3219265 - RNA, 19 nt, Artificial Sequence
  Description of Artificial Sequence: Synthetic oligonucleotide
aaaagagaguccaguucug

SEQ ID NO: 3219266 - RNA, 19 nt, Artificial Sequence
  Description of Artificial Sequence: Synthetic oligonucleotide
uuggucccuggucggaggg

SEQ ID NO: 3219267 - RNA, 19 nt, Artificial Sequence
  Description of Artificial Sequence: Synthetic oligonucleotide
ugccccuucagguacccug

SEQ ID NO: 3219268 - RNA, 19 nt, Artificial Sequence
  Description of Artificial Sequence: Synthetic oligonucleotide
ugcaaaagggagggagacg

SEQ ID NO: 3219269 - RNA, 19 nt, Artificial Sequence
  Description of Artificial Sequence: Synthetic oligonucleotide
acacaagggaguccagcag

SEQ ID NO: 3219270 - RNA, 19 nt, Artificial Sequence
  Description of Artificial Sequence: Synthetic oligonucleotide
ugagagccaagccuuugaa

SEQ ID NO: 3219271 - RNA, 19 nt, Artificial Sequence
  Description of Artificial Sequence: Synthetic oligonucleotide
gaucuggacagaagacagg

SEQ ID NO: 3219272 - RNA, 19 nt, Artificial Sequence
  Description of Artificial Sequence: Synthetic oligonucleotide
caucuuugggacacacaag

SEQ ID NO: 3219273 - RNA, 19 nt, Artificial Sequence
  Description of Artificial Sequence: Synthetic oligonucleotide
guggccuucgaucuggaca

SEQ ID NO: 3219274 - RNA, 19 nt, Artificial Sequence
  Description of Artificial Sequence: Synthetic oligonucleotide
acaugagagggaaugggug

SEQ ID NO: 3219275 - RNA, 19 nt, Artificial Sequence
  Description of Artificial Sequence: Synthetic oligonucleotide
agggauagugccccuucag

SEQ ID NO: 3219276 - RNA, 19 nt, Artificial Sequence
  Description of Artificial Sequence: Synthetic oligonucleotide
acccucaucuuugggacac

SEQ ID NO: 3219277 - RNA, 19 nt, Artificial Sequence
  Description of Artificial Sequence: Synthetic oligonucleotide
ucagccucauccacuggac

SEQ ID NO: 3219278 - RNA, 19 nt, Artificial Sequence
  Description of Artificial Sequence: Synthetic oligonucleotide
uugggacacacaagggagu

SEQ ID NO: 3219279 - RNA, 19 nt, Artificial Sequence
  Description of Artificial Sequence: Synthetic oligonucleotide
acuggacccucaucuuugg

SEQ ID NO: 3219280 - RNA, 19 nt, Artificial Sequence
  Description of Artificial Sequence: Synthetic oligonucleotide
gguggcuccagcucagagg

SEQ ID NO: 3219281 - RNA, 19 nt, Artificial Sequence
  Description of Artificial Sequence: Synthetic oligonucleotide
gggaacaugagagggaaug

SEQ ID NO: 3219282 - RNA, 19 nt, Artificial Sequence
  Description of Artificial Sequence: Synthetic oligonucleotide
uggugucucugguucacca

SEQ ID NO: 3219283 - RNA, 19 nt, Artificial Sequence
  Description of Artificial Sequence: Synthetic oligonucleotide
gggauagugccccuucagg

SEQ ID NO: 3219284 - RNA, 19 nt, Artificial Sequence
  Description of Artificial Sequence: Synthetic oligonucleotide
ucuguggguggcuccagcu

SEQ ID NO: 3219285 - RNA, 19 nt, Artificial Sequence
  Description of Artificial Sequence: Synthetic oligonucleotide
agggaguccagcaggcccc

SEQ ID NO: 3219286 - RNA, 19 nt, Artificial Sequence
  Description of Artificial Sequence: Synthetic oligonucleotide
gaguccagcaggccccagg

SEQ ID NO: 3219287 - RNA, 19 nt, Artificial Sequence
  Description of Artificial Sequence: Synthetic oligonucleotide
aagggagggagacgagggu

SEQ ID NO: 3219288 - RNA, 19 nt, Artificial Sequence
  Description of Artificial Sequence: Synthetic oligonucleotide
gauagugccccuucaggua

SEQ ID NO: 3219289 - RNA, 19 nt, Artificial Sequence
  Description of Artificial Sequence: Synthetic oligonucleotide
cacuggacccucaucuuug

SEQ ID NO: 3219290 - RNA, 19 nt, Artificial Sequence
  Description of Artificial Sequence: Synthetic oligonucleotide
caggguucccacugcacag

SEQ ID NO: 3219291 - RNA, 19 nt, Artificial Sequence
  Description of Artificial Sequence: Synthetic oligonucleotide
uuugucaaaacuuacacag

SEQ ID NO: 3219292 - RNA, 19 nt, Artificial Sequence
  Description of Artificial Sequence: Synthetic oligonucleotide
aaaaguuuguuacagaugu

SEQ ID NO: 3219293 - RNA, 19 nt, Artificial Sequence
  Description of Artificial Sequence: Synthetic oligonucleotide
aaaagauagggccuguaac

SEQ ID NO: 3219294 - RNA, 19 nt, Artificial Sequence
  Description of Artificial Sequence: Synthetic oligonucleotide
uacucuuacaguuugacag

SEQ ID NO: 3219295 - RNA, 19 nt, Artificial Sequence
  Description of Artificial Sequence: Synthetic oligonucleotide
uauuaugagaaccaagcag

SEQ ID NO: 3219296 - RNA, 19 nt, Artificial Sequence
  Description of Artificial Sequence: Synthetic oligonucleotide
aaagggaaaguucaugagg

SEQ ID NO: 3219297 - RNA, 19 nt, Artificial Sequence
  Description of Artificial Sequence: Synthetic oligonucleotide
uauaaugauaaaaugagua

SEQ ID NO: 3219298 - RNA, 19 nt, Artificial Sequence
  Description of Artificial Sequence: Synthetic oligonucleotide
cacauaacuguuuaaaugg

SEQ ID NO: 3219299 - RNA, 19 nt, Artificial Sequence
  Description of Artificial Sequence: Synthetic oligonucleotide
uaugaaucaagaauguacc

SEQ ID NO: 3219300 - RNA, 19 nt, Artificial Sequence
  Description of Artificial Sequence: Synthetic oligonucleotide
ugagcuuaaaacuuguucc

SEQ ID NO: 3219301 - RNA, 19 nt, Artificial Sequence
  Description of Artificial Sequence: Synthetic oligonucleotide
ucuguuaaccaucugaaug

SEQ ID NO: 3219302 - RNA, 19 nt, Artificial Sequence
  Description of Artificial Sequence: Synthetic oligonucleotide
uuaucagcuaucaauaaug

SEQ ID NO: 3219303 - RNA, 19 nt, Artificial Sequence
  Description of Artificial Sequence: Synthetic oligonucleotide
aaacaagcauaucauuccc

SEQ ID NO: 3219304 - RNA, 19 nt, Artificial Sequence
  Description of Artificial Sequence: Synthetic oligonucleotide
aaguauuggccucugcacc

SEQ ID NO: 3219305 - RNA, 19 nt, Artificial Sequence
  Description of Artificial Sequence: Synthetic oligonucleotide
uuaaacaagcauaucauuc

SEQ ID NO: 3219306 - RNA, 19 nt, Artificial Sequence
  Description of Artificial Sequence: Synthetic oligonucleotide
ucuacuaacagaguaacug

SEQ ID NO: 3219307 - RNA, 19 nt, Artificial Sequence
  Description of Artificial Sequence: Synthetic oligonucleotide
gaauguaccauaagaaugg

SEQ ID NO: 3219308 - RNA, 19 nt, Artificial Sequence
  Description of Artificial Sequence: Synthetic oligonucleotide
guugagauuauauccauag

SEQ ID NO: 3219309 - RNA, 19 nt, Artificial Sequence
  Description of Artificial Sequence: Synthetic oligonucleotide
uaugcacuuucuuagaaag

SEQ ID NO: 3219310 - RNA, 19 nt, Artificial Sequence
  Description of Artificial Sequence: Synthetic oligonucleotide
aaagauagggccuguaaca

SEQ ID NO: 3219311 - RNA, 19 nt, Artificial Sequence
  Description of Artificial Sequence: Synthetic oligonucleotide
uuauuaauaguggaagggg

SEQ ID NO: 3219312 - RNA, 19 nt, Artificial Sequence
  Description of Artificial Sequence: Synthetic oligonucleotide
aaugcuauggaauaaucua

SEQ ID NO: 3219313 - RNA, 19 nt, Artificial Sequence
  Description of Artificial Sequence: Synthetic oligonucleotide
uaaacaagcauaucauucc

SEQ ID NO: 3219314 - RNA, 19 nt, Artificial Sequence
  Description of Artificial Sequence: Synthetic oligonucleotide
guguuaacaaauuauacac

SEQ ID NO: 3219315 - RNA, 19 nt, Artificial Sequence
  Description of Artificial Sequence: Synthetic oligonucleotide
aguguuaacaaauuauaca

SEQ ID NO: 3219316 - RNA, 19 nt, Artificial Sequence
  Description of Artificial Sequence: Synthetic oligonucleotide
acuaagcacauuuauaaug

SEQ ID NO: 3219317 - RNA, 19 nt, Artificial Sequence
  Description of Artificial Sequence: Synthetic oligonucleotide
ucuaagauugcauugcacu

SEQ ID NO: 3219318 - RNA, 19 nt, Artificial Sequence
  Description of Artificial Sequence: Synthetic oligonucleotide
aauaugaaaugaagagucc

SEQ ID NO: 3219319 - RNA, 19 nt, Artificial Sequence
  Description of Artificial Sequence: Synthetic oligonucleotide
acuaacauauaaccaugcc

SEQ ID NO: 3219320 - RNA, 19 nt, Artificial Sequence
  Description of Artificial Sequence: Synthetic oligonucleotide
uguaccauaagaauggauu

SEQ ID NO: 3219321 - RNA, 19 nt, Artificial Sequence
  Description of Artificial Sequence: Synthetic oligonucleotide
uuagaaagcgauauaaaua

SEQ ID NO: 3219322 - RNA, 19 nt, Artificial Sequence
  Description of Artificial Sequence: Synthetic oligonucleotide
aguuuuaacuaacauauaa

SEQ ID NO: 3219323 - RNA, 19 nt, Artificial Sequence
  Description of Artificial Sequence: Synthetic oligonucleotide
cuaaucauaagcaauuuca

SEQ ID NO: 3219324 - RNA, 19 nt, Artificial Sequence
  Description of Artificial Sequence: Synthetic oligonucleotide
augagcuuaaaacuuguuc

SEQ ID NO: 3219325 - RNA, 19 nt, Artificial Sequence
  Description of Artificial Sequence: Synthetic oligonucleotide
aguaacuggucucaaauug

SEQ ID NO: 3219326 - RNA, 19 nt, Artificial Sequence
  Description of Artificial Sequence: Synthetic oligonucleotide
uggaauuugccacuggacc

SEQ ID NO: 3219327 - RNA, 19 nt, Artificial Sequence
  Description of Artificial Sequence: Synthetic oligonucleotide
aagcgauauaaauauauaa

SEQ ID NO: 3219328 - RNA, 19 nt, Artificial Sequence
  Description of Artificial Sequence: Synthetic oligonucleotide
ucuaaauaagcaugcagga

SEQ ID NO: 3219329 - RNA, 19 nt, Artificial Sequence
  Description of Artificial Sequence: Synthetic oligonucleotide
uuuaauugguugcacagaa

SEQ ID NO: 3219330 - RNA, 19 nt, Artificial Sequence
  Description of Artificial Sequence: Synthetic oligonucleotide
aagaauguaccauaagaau

SEQ ID NO: 3219331 - RNA, 19 nt, Artificial Sequence
  Description of Artificial Sequence: Synthetic oligonucleotide
auuuacacauucuuaaagu

SEQ ID NO: 3219332 - RNA, 19 nt, Artificial Sequence
  Description of Artificial Sequence: Synthetic oligonucleotide
cucuaaaaugaaauaacag

SEQ ID NO: 3219333 - RNA, 19 nt, Artificial Sequence
  Description of Artificial Sequence: Synthetic oligonucleotide
uauuaauaguggaagggga

SEQ ID NO: 3219334 - RNA, 19 nt, Artificial Sequence
  Description of Artificial Sequence: Synthetic oligonucleotide
ucuaucucuacugugcagg

SEQ ID NO: 3219335 - RNA, 19 nt, Artificial Sequence
  Description of Artificial Sequence: Synthetic oligonucleotide
uucccauuuacaaauaaaa

SEQ ID NO: 3219336 - RNA, 19 nt, Artificial Sequence
  Description of Artificial Sequence: Synthetic oligonucleotide
gaacuaagcacauuuauaa

SEQ ID NO: 3219337 - RNA, 19 nt, Artificial Sequence
  Description of Artificial Sequence: Synthetic oligonucleotide
uucacuuguuuauauaucu

SEQ ID NO: 3219338 - RNA, 19 nt, Artificial Sequence
  Description of Artificial Sequence: Synthetic oligonucleotide
auguccaaaaguaaauugc

SEQ ID NO: 3219339 - RNA, 19 nt, Artificial Sequence
  Description of Artificial Sequence: Synthetic oligonucleotide
ugucuaaacagugaggaug

SEQ ID NO: 3219340 - RNA, 19 nt, Artificial Sequence
  Description of Artificial Sequence: Synthetic oligonucleotide
agcuaaaucacagauagcu

SEQ ID NO: 3219341 - RNA, 19 nt, Artificial Sequence
  Description of Artificial Sequence: Synthetic oligonucleotide
uucuaagaaaagauagggc

SEQ ID NO: 3219342 - RNA, 19 nt, Artificial Sequence
  Description of Artificial Sequence: Synthetic oligonucleotide
ugaugaucaaugaauuucu

SEQ ID NO: 3219343 - RNA, 19 nt, Artificial Sequence
  Description of Artificial Sequence: Synthetic oligonucleotide
ucgacgauaaaauagucau

SEQ ID NO: 3219344 - RNA, 19 nt, Artificial Sequence
  Description of Artificial Sequence: Synthetic oligonucleotide
uguccaaaaguaaauugca

SEQ ID NO: 3219345 - RNA, 19 nt, Artificial Sequence
  Description of Artificial Sequence: Synthetic oligonucleotide
aaggacuccgucauggagc

SEQ ID NO: 3219346 - RNA, 19 nt, Artificial Sequence
  Description of Artificial Sequence: Synthetic oligonucleotide
cauuuacacauucuuaaag

SEQ ID NO: 3219347 - RNA, 19 nt, Artificial Sequence
  Description of Artificial Sequence: Synthetic oligonucleotide
uguauuugaugaucaauga

SEQ ID NO: 3219348 - RNA, 19 nt, Artificial Sequence
  Description of Artificial Sequence: Synthetic oligonucleotide
uguccuaauagcccugcgg

SEQ ID NO: 3219349 - RNA, 19 nt, Artificial Sequence
  Description of Artificial Sequence: Synthetic oligonucleotide
ucauggagcaaacagcuaa

SEQ ID NO: 3219350 - RNA, 19 nt, Artificial Sequence
  Description of Artificial Sequence: Synthetic oligonucleotide
auauaucuaauggcaaccc

SEQ ID NO: 3219351 - RNA, 19 nt, Artificial Sequence
  Description of Artificial Sequence: Synthetic oligonucleotide
aaguuuguuacagauguga

SEQ ID NO: 3219352 - RNA, 19 nt, Artificial Sequence
  Description of Artificial Sequence: Synthetic oligonucleotide
cagauaaugaaacauuauc

SEQ ID NO: 3219353 - RNA, 19 nt, Artificial Sequence
  Description of Artificial Sequence: Synthetic oligonucleotide
aaugcauacaaacccuuau

SEQ ID NO: 3219354 - RNA, 19 nt, Artificial Sequence
  Description of Artificial Sequence: Synthetic oligonucleotide
ugcacucaaaauuauuaug

SEQ ID NO: 3219355 - RNA, 19 nt, Artificial Sequence
  Description of Artificial Sequence: Synthetic oligonucleotide
agaauguaccauaagaaug

SEQ ID NO: 3219356 - RNA, 19 nt, Artificial Sequence
  Description of Artificial Sequence: Synthetic oligonucleotide
ugagcccuaaaccuaaugu

SEQ ID NO: 3219357 - RNA, 19 nt, Artificial Sequence
  Description of Artificial Sequence: Synthetic oligonucleotide
uuaacacaguuuacuacag

SEQ ID NO: 3219358 - RNA, 19 nt, Artificial Sequence
  Description of Artificial Sequence: Synthetic oligonucleotide
agaucgagaacucuaaaau

SEQ ID NO: 3219359 - RNA, 19 nt, Artificial Sequence
  Description of Artificial Sequence: Synthetic oligonucleotide
aauuggguaugugauguag

SEQ ID NO: 3219360 - RNA, 19 nt, Artificial Sequence
  Description of Artificial Sequence: Synthetic oligonucleotide
cuugauagcaccauuuaca

SEQ ID NO: 3219361 - RNA, 19 nt, Artificial Sequence
  Description of Artificial Sequence: Synthetic oligonucleotide
ucagacauggagcaucaca

SEQ ID NO: 3219362 - RNA, 19 nt, Artificial Sequence
  Description of Artificial Sequence: Synthetic oligonucleotide
auuucuaagaaaagauagg

SEQ ID NO: 3219363 - RNA, 19 nt, Artificial Sequence
  Description of Artificial Sequence: Synthetic oligonucleotide
uguggcaauauaauuuuaa

SEQ ID NO: 3219364 - RNA, 19 nt, Artificial Sequence
  Description of Artificial Sequence: Synthetic oligonucleotide
ucuucuacuaacagaguaa

SEQ ID NO: 3219365 - RNA, 19 nt, Artificial Sequence
  Description of Artificial Sequence: Synthetic oligonucleotide
guaaauugcacaguaaauc

SEQ ID NO: 3219366 - RNA, 19 nt, Artificial Sequence
  Description of Artificial Sequence: Synthetic oligonucleotide
uugauagcaccauuuacac

SEQ ID NO: 3219367 - RNA, 19 nt, Artificial Sequence
  Description of Artificial Sequence: Synthetic oligonucleotide
augaguccuacucuuacag

SEQ ID NO: 3219368 - RNA, 19 nt, Artificial Sequence
  Description of Artificial Sequence: Synthetic oligonucleotide
cuaagcacauuuauaauga

SEQ ID NO: 3219369 - RNA, 19 nt, Artificial Sequence
  Description of Artificial Sequence: Synthetic oligonucleotide
agcacauuuauaaugauaa

SEQ ID NO: 3219370 - RNA, 19 nt, Artificial Sequence
  Description of Artificial Sequence: Synthetic oligonucleotide
cugggauaaaauuuaucag

SEQ ID NO: 3219371 - RNA, 19 nt, Artificial Sequence
  Description of Artificial Sequence: Synthetic oligonucleotide
uuugacagaaaugaauuau

SEQ ID NO: 3219372 - RNA, 19 nt, Artificial Sequence
  Description of Artificial Sequence: Synthetic oligonucleotide
gauguagaguguuaaauua

SEQ ID NO: 3219373 - RNA, 19 nt, Artificial Sequence
  Description of Artificial Sequence: Synthetic oligonucleotide
uuaauaguggaaggggaag

SEQ ID NO: 3219374 - RNA, 19 nt, Artificial Sequence
  Description of Artificial Sequence: Synthetic oligonucleotide
ugaacuaagcacauuuaua

SEQ ID NO: 3219375 - RNA, 19 nt, Artificial Sequence
  Description of Artificial Sequence: Synthetic oligonucleotide
aaagccccguugcugcugc

SEQ ID NO: 3219376 - RNA, 19 nt, Artificial Sequence
  Description of Artificial Sequence: Synthetic oligonucleotide
uguuccacaguuuucacuu

SEQ ID NO: 3219377 - RNA, 19 nt, Artificial Sequence
  Description of Artificial Sequence: Synthetic oligonucleotide
uauaucuaauggcaaccca

SEQ ID NO: 3219378 - RNA, 19 nt, Artificial Sequence
  Description of Artificial Sequence: Synthetic oligonucleotide
acuauuugucaaaacuuac

SEQ ID NO: 3219379 - RNA, 19 nt, Artificial Sequence
  Description of Artificial Sequence: Synthetic oligonucleotide
gauuauauccauagcuggc

SEQ ID NO: 3219380 - RNA, 19 nt, Artificial Sequence
  Description of Artificial Sequence: Synthetic oligonucleotide
acucaaaauuauuauguau

SEQ ID NO: 3219381 - RNA, 19 nt, Artificial Sequence
  Description of Artificial Sequence: Synthetic oligonucleotide
uaucagcuaucaauaaugu

SEQ ID NO: 3219382 - RNA, 19 nt, Artificial Sequence
  Description of Artificial Sequence: Synthetic oligonucleotide
acgauaaaauagucauuac

SEQ ID NO: 3219383 - RNA, 19 nt, Artificial Sequence
  Description of Artificial Sequence: Synthetic oligonucleotide
uuaccgaguauuagaaacu

SEQ ID NO: 3219384 - RNA, 19 nt, Artificial Sequence
  Description of Artificial Sequence: Synthetic oligonucleotide
caaauuaccgaguauuaga

SEQ ID NO: 3219385 - RNA, 19 nt, Artificial Sequence
  Description of Artificial Sequence: Synthetic oligonucleotide
uuugcagauuuauuagaga

SEQ ID NO: 3219386 - RNA, 19 nt, Artificial Sequence
  Description of Artificial Sequence: Synthetic oligonucleotide
uuaaaaugcaacguacuua

SEQ ID NO: 3219387 - RNA, 19 nt, Artificial Sequence
  Description of Artificial Sequence: Synthetic oligonucleotide
guuuuaacuaacauauaac

SEQ ID NO: 3219388 - RNA, 19 nt, Artificial Sequence
  Description of Artificial Sequence: Synthetic oligonucleotide
aaugaguccuacucuuaca

SEQ ID NO: 3219389 - RNA, 19 nt, Artificial Sequence
  Description of Artificial Sequence: Synthetic oligonucleotide
aauaacaguccaauguuaa

SEQ ID NO: 3219390 - RNA, 19 nt, Artificial Sequence
  Description of Artificial Sequence: Synthetic oligonucleotide
ugacaaagguagaucacac

SEQ ID NO: 3219391 - RNA, 19 nt, Artificial Sequence
  Description of Artificial Sequence: Synthetic oligonucleotide
aauuauaucaacugaagcu

SEQ ID NO: 3219392 - RNA, 19 nt, Artificial Sequence
  Description of Artificial Sequence: Synthetic oligonucleotide
aagcuauuaauuuacacag

SEQ ID NO: 3219393 - RNA, 19 nt, Artificial Sequence
  Description of Artificial Sequence: Synthetic oligonucleotide
augaauaaaagaaagaaac

SEQ ID NO: 3219394 - RNA, 19 nt, Artificial Sequence
  Description of Artificial Sequence: Synthetic oligonucleotide
auuacuucgacuuuucagg

SEQ ID NO: 3219395 - RNA, 19 nt, Artificial Sequence
  Description of Artificial Sequence: Synthetic oligonucleotide
uuagaaauuguuuccaagg

SEQ ID NO: 3219396 - RNA, 19 nt, Artificial Sequence
  Description of Artificial Sequence: Synthetic oligonucleotide
uaucguuccaaccagaaug

SEQ ID NO: 3219397 - RNA, 19 nt, Artificial Sequence
  Description of Artificial Sequence: Synthetic oligonucleotide
aauucuguuggcccagugc

SEQ ID NO: 3219398 - RNA, 19 nt, Artificial Sequence
  Description of Artificial Sequence: Synthetic oligonucleotide
auaaauaccaccaaguucu

SEQ ID NO: 3219399 - RNA, 19 nt, Artificial Sequence
  Description of Artificial Sequence: Synthetic oligonucleotide
aauaaucaaugccuugaac

SEQ ID NO: 3219400 - RNA, 19 nt, Artificial Sequence
  Description of Artificial Sequence: Synthetic oligonucleotide
guaguucucaccuuaaagg

SEQ ID NO: 3219401 - RNA, 19 nt, Artificial Sequence
  Description of Artificial Sequence: Synthetic oligonucleotide
uuguauauuuacaugauaa

SEQ ID NO: 3219402 - RNA, 19 nt, Artificial Sequence
  Description of Artificial Sequence: Synthetic oligonucleotide
uauauuuaagcuauuaauu

SEQ ID NO: 3219403 - RNA, 19 nt, Artificial Sequence
  Description of Artificial Sequence: Synthetic oligonucleotide
uucuauauccucuuuacug

SEQ ID NO: 3219404 - RNA, 19 nt, Artificial Sequence
  Description of Artificial Sequence: Synthetic oligonucleotide
uauaugauacuucacucug

SEQ ID NO: 3219405 - RNA, 19 nt, Artificial Sequence
  Description of Artificial Sequence: Synthetic oligonucleotide
aauuuugaaagcagcauuc

SEQ ID NO: 3219406 - RNA, 19 nt, Artificial Sequence
  Description of Artificial Sequence: Synthetic oligonucleotide
uuuacuuaguuuucuaaca

SEQ ID NO: 3219407 - RNA, 19 nt, Artificial Sequence
  Description of Artificial Sequence: Synthetic oligonucleotide
uuuugagagguauuugggg

SEQ ID NO: 3219408 - RNA, 19 nt, Artificial Sequence
  Description of Artificial Sequence: Synthetic oligonucleotide
acuuaguuuucuaacaagc

SEQ ID NO: 3219409 - RNA, 19 nt, Artificial Sequence
  Description of Artificial Sequence: Synthetic oligonucleotide
caaagcacauauuacuucg

SEQ ID NO: 3219410 - RNA, 19 nt, Artificial Sequence
  Description of Artificial Sequence: Synthetic oligonucleotide
agacuuacugcuucgggcc

SEQ ID NO: 3219411 - RNA, 19 nt, Artificial Sequence
  Description of Artificial Sequence: Synthetic oligonucleotide
uggaagcagacucaguugg

SEQ ID NO: 3219412 - RNA, 19 nt, Artificial Sequence
  Description of Artificial Sequence: Synthetic oligonucleotide
uuaucugacauguucgcag

SEQ ID NO: 3219413 - RNA, 19 nt, Artificial Sequence
  Description of Artificial Sequence: Synthetic oligonucleotide
uacauaagccuuuacuuag

SEQ ID NO: 3219414 - RNA, 19 nt, Artificial Sequence
  Description of Artificial Sequence: Synthetic oligonucleotide
acuauuagaguuuucuucu

SEQ ID NO: 3219415 - RNA, 19 nt, Artificial Sequence
  Description of Artificial Sequence: Synthetic oligonucleotide
aauaccaccaaguucuaau

SEQ ID NO: 3219416 - RNA, 19 nt, Artificial Sequence
  Description of Artificial Sequence: Synthetic oligonucleotide
aaugccuugaacauuccuc

SEQ ID NO: 3219417 - RNA, 19 nt, Artificial Sequence
  Description of Artificial Sequence: Synthetic oligonucleotide
gauaaauaccaccaaguuc

SEQ ID NO: 3219418 - RNA, 19 nt, Artificial Sequence
  Description of Artificial Sequence: Synthetic oligonucleotide
aacuguauaaugaauaaaa

SEQ ID NO: 3219419 - RNA, 19 nt, Artificial Sequence
  Description of Artificial Sequence: Synthetic oligonucleotide
uagucucuaauaaucaaug

SEQ ID NO: 3219420 - RNA, 19 nt, Artificial Sequence
  Description of Artificial Sequence: Synthetic oligonucleotide
uaaacuucaacagacuuac

SEQ ID NO: 3219421 - RNA, 19 nt, Artificial Sequence
  Description of Artificial Sequence: Synthetic oligonucleotide
ucagaaaccggucuugggc

SEQ ID NO: 3219422 - RNA, 19 nt, Artificial Sequence
  Description of Artificial Sequence: Synthetic oligonucleotide
agucuuuucugacagaacu

SEQ ID NO: 3219423 - RNA, 19 nt, Artificial Sequence
  Description of Artificial Sequence: Synthetic oligonucleotide
auuagaaauuguuuccaag

SEQ ID NO: 3219424 - RNA, 19 nt, Artificial Sequence
  Description of Artificial Sequence: Synthetic oligonucleotide
cuuuuaagccuccaugugg

SEQ ID NO: 3219425 - RNA, 19 nt, Artificial Sequence
  Description of Artificial Sequence: Synthetic oligonucleotide
aagcacauauuacuucgac

SEQ ID NO: 3219426 - RNA, 19 nt, Artificial Sequence
  Description of Artificial Sequence: Synthetic oligonucleotide
aucaacugaagcuccaggg

SEQ ID NO: 3219427 - RNA, 19 nt, Artificial Sequence
  Description of Artificial Sequence: Synthetic oligonucleotide
agucucuaauaaucaaugc

SEQ ID NO: 3219428 - RNA, 19 nt, Artificial Sequence
  Description of Artificial Sequence: Synthetic oligonucleotide
uaguuuguuaccuucuuug

SEQ ID NO: 3219429 - RNA, 19 nt, Artificial Sequence
  Description of Artificial Sequence: Synthetic oligonucleotide
aguaguucucaccuuaaag

SEQ ID NO: 3219430 - RNA, 19 nt, Artificial Sequence
  Description of Artificial Sequence: Synthetic oligonucleotide
agcuuguauauuuacauga

SEQ ID NO: 3219431 - RNA, 19 nt, Artificial Sequence
  Description of Artificial Sequence: Synthetic oligonucleotide
uuuuaagccuccaugugga

SEQ ID NO: 3219432 - RNA, 19 nt, Artificial Sequence
  Description of Artificial Sequence: Synthetic oligonucleotide
gguaauacaccuuaaagca

SEQ ID NO: 3219433 - RNA, 19 nt, Artificial Sequence
  Description of Artificial Sequence: Synthetic oligonucleotide
auauuuaagcuauuaauuu

SEQ ID NO: 3219434 - RNA, 19 nt, Artificial Sequence
  Description of Artificial Sequence: Synthetic oligonucleotide
caauuauaucaacugaagc

SEQ ID NO: 3219435 - RNA, 19 nt, Artificial Sequence
  Description of Artificial Sequence: Synthetic oligonucleotide
uuauaugauacuucacucu

SEQ ID NO: 3219436 - RNA, 19 nt, Artificial Sequence
  Description of Artificial Sequence: Synthetic oligonucleotide
caguagaucuagaaggugg

SEQ ID NO: 3219437 - RNA, 19 nt, Artificial Sequence
  Description of Artificial Sequence: Synthetic oligonucleotide
uaauauuugaaggaguuau

SEQ ID NO: 3219438 - RNA, 19 nt, Artificial Sequence
  Description of Artificial Sequence: Synthetic oligonucleotide
aacacgauugaguugcaga

SEQ ID NO: 3219439 - RNA, 19 nt, Artificial Sequence
  Description of Artificial Sequence: Synthetic oligonucleotide
acugcuucgggcccaagcc

SEQ ID NO: 3219440 - RNA, 19 nt, Artificial Sequence
  Description of Artificial Sequence: Synthetic oligonucleotide
gauugaguugcagauagag

SEQ ID NO: 3219441 - RNA, 19 nt, Artificial Sequence
  Description of Artificial Sequence: Synthetic oligonucleotide
uaaccguggagauaaauac

SEQ ID NO: 3219442 - RNA, 19 nt, Artificial Sequence
  Description of Artificial Sequence: Synthetic oligonucleotide
uuaacuguauaaugaauaa

SEQ ID NO: 3219443 - RNA, 19 nt, Artificial Sequence
  Description of Artificial Sequence: Synthetic oligonucleotide
uguucuucauuagaaauug

SEQ ID NO: 3219444 - RNA, 19 nt, Artificial Sequence
  Description of Artificial Sequence: Synthetic oligonucleotide
ucuaacaagcuauagucuc

SEQ ID NO: 3219445 - RNA, 19 nt, Artificial Sequence
  Description of Artificial Sequence: Synthetic oligonucleotide
gacuuuucaggucagcuug

SEQ ID NO: 3219446 - RNA, 19 nt, Artificial Sequence
  Description of Artificial Sequence: Synthetic oligonucleotide
aaugaauaaaagaaagaaa

SEQ ID NO: 3219447 - RNA, 19 nt, Artificial Sequence
  Description of Artificial Sequence: Synthetic oligonucleotide
uaauucuucagcugggcug

SEQ ID NO: 3219448 - RNA, 19 nt, Artificial Sequence
  Description of Artificial Sequence: Synthetic oligonucleotide
cagauagagaucuucacug

SEQ ID NO: 3219449 - RNA, 19 nt, Artificial Sequence
  Description of Artificial Sequence: Synthetic oligonucleotide
uaguucucaccuuaaaggc

SEQ ID NO: 3219450 - RNA, 19 nt, Artificial Sequence
  Description of Artificial Sequence: Synthetic oligonucleotide
uuugagagguauuuggggu

SEQ ID NO: 3219451 - RNA, 19 nt, Artificial Sequence
  Description of Artificial Sequence: Synthetic oligonucleotide
uuaguuuucuaacaagcua

SEQ ID NO: 3219452 - RNA, 19 nt, Artificial Sequence
  Description of Artificial Sequence: Synthetic oligonucleotide
aagaaagaaacacgauuga

SEQ ID NO: 3219453 - RNA, 19 nt, Artificial Sequence
  Description of Artificial Sequence: Synthetic oligonucleotide
gacaugucaaacaucacug

SEQ ID NO: 3219454 - RNA, 19 nt, Artificial Sequence
  Description of Artificial Sequence: Synthetic oligonucleotide
uaucaacugaagcuccagg

SEQ ID NO: 3219455 - RNA, 19 nt, Artificial Sequence
  Description of Artificial Sequence: Synthetic oligonucleotide
uguauauuuacaugauaaa

SEQ ID NO: 3219456 - RNA, 19 nt, Artificial Sequence
  Description of Artificial Sequence: Synthetic oligonucleotide
cuggucuuuuauaugauac

SEQ ID NO: 3219457 - RNA, 19 nt, Artificial Sequence
  Description of Artificial Sequence: Synthetic oligonucleotide
cauuauccaaggcauauac

SEQ ID NO: 3219458 - RNA, 19 nt, Artificial Sequence
  Description of Artificial Sequence: Synthetic oligonucleotide
uucccauuuucucucuugg

SEQ ID NO: 3219459 - RNA, 19 nt, Artificial Sequence
  Description of Artificial Sequence: Synthetic oligonucleotide
aucugucccacccaugugg

SEQ ID NO: 3219460 - RNA, 19 nt, Artificial Sequence
  Description of Artificial Sequence: Synthetic oligonucleotide
uacuuaguuuucuaacaag

SEQ ID NO: 3219461 - RNA, 19 nt, Artificial Sequence
  Description of Artificial Sequence: Synthetic oligonucleotide
uguaaacuucaacagacuu

SEQ ID NO: 3219462 - RNA, 19 nt, Artificial Sequence
  Description of Artificial Sequence: Synthetic oligonucleotide
uugaugauaaagcguacaa

SEQ ID NO: 3219463 - RNA, 19 nt, Artificial Sequence
  Description of Artificial Sequence: Synthetic oligonucleotide
aagcuauagucucuaauaa

SEQ ID NO: 3219464 - RNA, 19 nt, Artificial Sequence
  Description of Artificial Sequence: Synthetic oligonucleotide
uauuugggguaauacaccu

SEQ ID NO: 3219465 - RNA, 19 nt, Artificial Sequence
  Description of Artificial Sequence: Synthetic oligonucleotide
uuugggguaauacaccuua

SEQ ID NO: 3219466 - RNA, 19 nt, Artificial Sequence
  Description of Artificial Sequence: Synthetic oligonucleotide
agauagagaucuucacugg

SEQ ID NO: 3219467 - RNA, 19 nt, Artificial Sequence
  Description of Artificial Sequence: Synthetic oligonucleotide
uccagaauaguuuguuacc

SEQ ID NO: 3219468 - RNA, 19 nt, Artificial Sequence
  Description of Artificial Sequence: Synthetic oligonucleotide
ucuuggaacuucuuuccag

SEQ ID NO: 3219469 - RNA, 19 nt, Artificial Sequence
  Description of Artificial Sequence: Synthetic oligonucleotide
cuauuaauuuacacaguac

SEQ ID NO: 3219470 - RNA, 19 nt, Artificial Sequence
  Description of Artificial Sequence: Synthetic oligonucleotide
ugcgcauuuccuuuuagga

SEQ ID NO: 3219471 - RNA, 19 nt, Artificial Sequence
  Description of Artificial Sequence: Synthetic oligonucleotide
aguuuucuucucuccagac

SEQ ID NO: 3219472 - RNA, 19 nt, Artificial Sequence
  Description of Artificial Sequence: Synthetic oligonucleotide
aaccguggagauaaauacc

SEQ ID NO: 3219473 - RNA, 19 nt, Artificial Sequence
  Description of Artificial Sequence: Synthetic oligonucleotide
acuucgacuuuucagguca

SEQ ID NO: 3219474 - RNA, 19 nt, Artificial Sequence
  Description of Artificial Sequence: Synthetic oligonucleotide
uuaauuuacacaguacaua

SEQ ID NO: 3219475 - RNA, 19 nt, Artificial Sequence
  Description of Artificial Sequence: Synthetic oligonucleotide
ugacguuuugucaacacua

SEQ ID NO: 3219476 - RNA, 19 nt, Artificial Sequence
  Description of Artificial Sequence: Synthetic oligonucleotide
uuggcccagugccagaugg

SEQ ID NO: 3219477 - RNA, 19 nt, Artificial Sequence
  Description of Artificial Sequence: Synthetic oligonucleotide
ggaguuauguuucugagca

SEQ ID NO: 3219478 - RNA, 19 nt, Artificial Sequence
  Description of Artificial Sequence: Synthetic oligonucleotide
uguugcucggcuuaacucu

SEQ ID NO: 3219479 - RNA, 19 nt, Artificial Sequence
  Description of Artificial Sequence: Synthetic oligonucleotide
acuuguaaacuucaacaga

SEQ ID NO: 3219480 - RNA, 19 nt, Artificial Sequence
  Description of Artificial Sequence: Synthetic oligonucleotide
aucacugugauaggcuucc

SEQ ID NO: 3219481 - RNA, 19 nt, Artificial Sequence
  Description of Artificial Sequence: Synthetic oligonucleotide
uacaguagaucuagaaggu

SEQ ID NO: 3219482 - RNA, 19 nt, Artificial Sequence
  Description of Artificial Sequence: Synthetic oligonucleotide
aaagcguacaaaguccaug

SEQ ID NO: 3219483 - RNA, 19 nt, Artificial Sequence
  Description of Artificial Sequence: Synthetic oligonucleotide
uaugauacuucacucugau

SEQ ID NO: 3219484 - RNA, 19 nt, Artificial Sequence
  Description of Artificial Sequence: Synthetic oligonucleotide
uuuucgugacguuuuguca

SEQ ID NO: 3219485 - RNA, 19 nt, Artificial Sequence
  Description of Artificial Sequence: Synthetic oligonucleotide
uuucaucuuugaaucaacu

SEQ ID NO: 3219486 - RNA, 19 nt, Artificial Sequence
  Description of Artificial Sequence: Synthetic oligonucleotide
agcauucauuauccaaggc

SEQ ID NO: 3219487 - RNA, 19 nt, Artificial Sequence
  Description of Artificial Sequence: Synthetic oligonucleotide
uauauccucuuuacuggag

SEQ ID NO: 3219488 - RNA, 19 nt, Artificial Sequence
  Description of Artificial Sequence: Synthetic oligonucleotide
acuuucuucagauaauauu

SEQ ID NO: 3219489 - RNA, 19 nt, Artificial Sequence
  Description of Artificial Sequence: Synthetic oligonucleotide
uguuuucaagcuaggugcc

SEQ ID NO: 3219490 - RNA, 19 nt, Artificial Sequence
  Description of Artificial Sequence: Synthetic oligonucleotide
auauuugaaggaguuaugu

SEQ ID NO: 3219491 - RNA, 19 nt, Artificial Sequence
  Description of Artificial Sequence: Synthetic oligonucleotide
aaaacuguugccuagguag

SEQ ID NO: 3219492 - RNA, 19 nt, Artificial Sequence
  Description of Artificial Sequence: Synthetic oligonucleotide
cauagagccauuaauacag

SEQ ID NO: 3219493 - RNA, 19 nt, Artificial Sequence
  Description of Artificial Sequence: Synthetic oligonucleotide
agaaaaugaagaaagacuc

SEQ ID NO: 3219494 - RNA, 19 nt, Artificial Sequence
  Description of Artificial Sequence: Synthetic oligonucleotide
auuaauacagcacuucuug

SEQ ID NO: 3219495 - RNA, 19 nt, Artificial Sequence
  Description of Artificial Sequence: Synthetic oligonucleotide
aaggucaugacguucuggg

SEQ ID NO: 3219496 - RNA, 19 nt, Artificial Sequence
  Description of Artificial Sequence: Synthetic oligonucleotide
aucauagagccauuaauac

SEQ ID NO: 3219497 - RNA, 19 nt, Artificial Sequence
  Description of Artificial Sequence: Synthetic oligonucleotide
aauacagcacuucuugaag

SEQ ID NO: 3219498 - RNA, 19 nt, Artificial Sequence
  Description of Artificial Sequence: Synthetic oligonucleotide
gaggguaccaugcucaucg

SEQ ID NO: 3219499 - RNA, 19 nt, Artificial Sequence
  Description of Artificial Sequence: Synthetic oligonucleotide
ucggcacugauaaacaugg

SEQ ID NO: 3219500 - RNA, 19 nt, Artificial Sequence
  Description of Artificial Sequence: Synthetic oligonucleotide
aaaaugaagaaagacucca

SEQ ID NO: 3219501 - RNA, 19 nt, Artificial Sequence
  Description of Artificial Sequence: Synthetic oligonucleotide
ucgucugaaucauagagcc

SEQ ID NO: 3219502 - RNA, 19 nt, Artificial Sequence
  Description of Artificial Sequence: Synthetic oligonucleotide
uggcagauggcuaaaaggc

SEQ ID NO: 3219503 - RNA, 19 nt, Artificial Sequence
  Description of Artificial Sequence: Synthetic oligonucleotide
agguagaugaacucggcac

SEQ ID NO: 3219504 - RNA, 19 nt, Artificial Sequence
  Description of Artificial Sequence: Synthetic oligonucleotide
uucuugaaggucaugacgu

SEQ ID NO: 3219505 - RNA, 19 nt, Artificial Sequence
  Description of Artificial Sequence: Synthetic oligonucleotide
aucacgguguggcagaugg

SEQ ID NO: 3219506 - RNA, 19 nt, Artificial Sequence
  Description of Artificial Sequence: Synthetic oligonucleotide
acggguuccaggcauaugg

SEQ ID NO: 3219507 - RNA, 19 nt, Artificial Sequence
  Description of Artificial Sequence: Synthetic oligonucleotide
agcaagaugaggaaacccc

SEQ ID NO: 3219508 - RNA, 19 nt, Artificial Sequence
  Description of Artificial Sequence: Synthetic oligonucleotide
auaaacauggccaugggca

SEQ ID NO: 3219509 - RNA, 19 nt, Artificial Sequence
  Description of Artificial Sequence: Synthetic oligonucleotide
ucguaguacauacuaaggu

SEQ ID NO: 3219510 - RNA, 19 nt, Artificial Sequence
  Description of Artificial Sequence: Synthetic oligonucleotide
uuugccaucggcgaacggg

SEQ ID NO: 3219511 - RNA, 19 nt, Artificial Sequence
  Description of Artificial Sequence: Synthetic oligonucleotide
cuucuugaaggucaugacg

SEQ ID NO: 3219512 - RNA, 19 nt, Artificial Sequence
  Description of Artificial Sequence: Synthetic oligonucleotide
caucgucugaaucauagag

SEQ ID NO: 3219513 - RNA, 19 nt, Artificial Sequence
  Description of Artificial Sequence: Synthetic oligonucleotide
auacagcacuucuugaagg

SEQ ID NO: 3219514 - RNA, 19 nt, Artificial Sequence
  Description of Artificial Sequence: Synthetic oligonucleotide
uacuguauucuucuggccu

SEQ ID NO: 3219515 - RNA, 19 nt, Artificial Sequence
  Description of Artificial Sequence: Synthetic oligonucleotide
gauaaacauggccaugggc

SEQ ID NO: 3219516 - RNA, 19 nt, Artificial Sequence
  Description of Artificial Sequence: Synthetic oligonucleotide
uuauuguagaacuggaguu

SEQ ID NO: 3219517 - RNA, 19 nt, Artificial Sequence
  Description of Artificial Sequence: Synthetic oligonucleotide
ucauagagccauuaauaca

SEQ ID NO: 3219518 - RNA, 19 nt, Artificial Sequence
  Description of Artificial Sequence: Synthetic oligonucleotide
cucaucgucugaaucauag

SEQ ID NO: 3219519 - RNA, 19 nt, Artificial Sequence
  Description of Artificial Sequence: Synthetic oligonucleotide
guggcagauggcuaaaagg

SEQ ID NO: 3219520 - RNA, 19 nt, Artificial Sequence
  Description of Artificial Sequence: Synthetic oligonucleotide
acuggaguuugccaucggc

SEQ ID NO: 3219521 - RNA, 19 nt, Artificial Sequence
  Description of Artificial Sequence: Synthetic oligonucleotide
guaguacauacuaaggucc

SEQ ID NO: 3219522 - RNA, 19 nt, Artificial Sequence
  Description of Artificial Sequence: Synthetic oligonucleotide
augaacucggcacugauaa

SEQ ID NO: 3219523 - RNA, 19 nt, Artificial Sequence
  Description of Artificial Sequence: Synthetic oligonucleotide
aaucauagagccauuaaua

SEQ ID NO: 3219524 - RNA, 19 nt, Artificial Sequence
  Description of Artificial Sequence: Synthetic oligonucleotide
ugcacuacuguauucuucu

SEQ ID NO: 3219525 - RNA, 19 nt, Artificial Sequence
  Description of Artificial Sequence: Synthetic oligonucleotide
uggucauugaggcuggugu

SEQ ID NO: 3219526 - RNA, 19 nt, Artificial Sequence
  Description of Artificial Sequence: Synthetic oligonucleotide
cugauaaacauggccaugg

SEQ ID NO: 3219527 - RNA, 19 nt, Artificial Sequence
  Description of Artificial Sequence: Synthetic oligonucleotide
uugaaggucaugacguucu

SEQ ID NO: 3219528 - RNA, 19 nt, Artificial Sequence
  Description of Artificial Sequence: Synthetic oligonucleotide
cauacuaaggucccaguug

SEQ ID NO: 3219529 - RNA, 19 nt, Artificial Sequence
  Description of Artificial Sequence: Synthetic oligonucleotide
augaggaaaccccagaaaa

SEQ ID NO: 3219530 - RNA, 19 nt, Artificial Sequence
  Description of Artificial Sequence: Synthetic oligonucleotide
agcuccuuauuguagaacu

SEQ ID NO: 3219531 - RNA, 19 nt, Artificial Sequence
  Description of Artificial Sequence: Synthetic oligonucleotide
ugauaaacauggccauggg

SEQ ID NO: 3219532 - RNA, 19 nt, Artificial Sequence
  Description of Artificial Sequence: Synthetic oligonucleotide
gaaaaugaagaaagacucc

SEQ ID NO: 3219533 - RNA, 19 nt, Artificial Sequence
  Description of Artificial Sequence: Synthetic oligonucleotide
uauucuucuggccucgcac

SEQ ID NO: 3219534 - RNA, 19 nt, Artificial Sequence
  Description of Artificial Sequence: Synthetic oligonucleotide
auacuaaggucccaguuga

SEQ ID NO: 3219535 - RNA, 19 nt, Artificial Sequence
  Description of Artificial Sequence: Synthetic oligonucleotide
uuggcuggcauguccaggg

SEQ ID NO: 3219536 - RNA, 19 nt, Artificial Sequence
  Description of Artificial Sequence: Synthetic oligonucleotide
cucguaguacauacuaagg

SEQ ID NO: 3219537 - RNA, 19 nt, Artificial Sequence
  Description of Artificial Sequence: Synthetic oligonucleotide
uaauacagcacuucuugaa

SEQ ID NO: 3219538 - RNA, 19 nt, Artificial Sequence
  Description of Artificial Sequence: Synthetic oligonucleotide
augacacugagcaagauga

SEQ ID NO: 3219539 - RNA, 19 nt, Artificial Sequence
  Description of Artificial Sequence: Synthetic oligonucleotide
acuguauucuucuggccuc

SEQ ID NO: 3219540 - RNA, 19 nt, Artificial Sequence
  Description of Artificial Sequence: Synthetic oligonucleotide
uccgagaagauguacugca

SEQ ID NO: 3219541 - RNA, 19 nt, Artificial Sequence
  Description of Artificial Sequence: Synthetic oligonucleotide
uguggcagauggcuaaaag

SEQ ID NO: 3219542 - RNA, 19 nt, Artificial Sequence
  Description of Artificial Sequence: Synthetic oligonucleotide
auggguuccgcuuucggag

SEQ ID NO: 3219543 - RNA, 19 nt, Artificial Sequence
  Description of Artificial Sequence: Synthetic oligonucleotide
uuaauacagcacuucuuga

SEQ ID NO: 3219544 - RNA, 19 nt, Artificial Sequence
  Description of Artificial Sequence: Synthetic oligonucleotide
cuggaguuugccaucggcg

SEQ ID NO: 3219545 - RNA, 19 nt, Artificial Sequence
  Description of Artificial Sequence: Synthetic oligonucleotide
auucuucuggccucgcacg

SEQ ID NO: 3219546 - RNA, 19 nt, Artificial Sequence
  Description of Artificial Sequence: Synthetic oligonucleotide
gauguacugcaccuggccc

SEQ ID NO: 3219547 - RNA, 19 nt, Artificial Sequence
  Description of Artificial Sequence: Synthetic oligonucleotide
agagccauuaauacagcac

SEQ ID NO: 3219548 - RNA, 19 nt, Artificial Sequence
  Description of Artificial Sequence: Synthetic oligonucleotide
gaggaaaccccagaaaaug

SEQ ID NO: 3219549 - RNA, 19 nt, Artificial Sequence
  Description of Artificial Sequence: Synthetic oligonucleotide
uugccuagguagaugaacu

SEQ ID NO: 3219550 - RNA, 19 nt, Artificial Sequence
  Description of Artificial Sequence: Synthetic oligonucleotide
aaggcgccagaacuccugc

SEQ ID NO: 3219551 - RNA, 19 nt, Artificial Sequence
  Description of Artificial Sequence: Synthetic oligonucleotide
uaguacauacuaagguccc

SEQ ID NO: 3219552 - RNA, 19 nt, Artificial Sequence
  Description of Artificial Sequence: Synthetic oligonucleotide
cuuucggaggguaccaugc

SEQ ID NO: 3219553 - RNA, 19 nt, Artificial Sequence
  Description of Artificial Sequence: Synthetic oligonucleotide
aggggcucguaguacauac

SEQ ID NO: 3219554 - RNA, 19 nt, Artificial Sequence
  Description of Artificial Sequence: Synthetic oligonucleotide
ggcaccaugacacugagca

SEQ ID NO: 3219555 - RNA, 19 nt, Artificial Sequence
  Description of Artificial Sequence: Synthetic oligonucleotide
aagaugaggaaaccccaga

SEQ ID NO: 3219556 - RNA, 19 nt, Artificial Sequence
  Description of Artificial Sequence: Synthetic oligonucleotide
uagaacuggaguuugccau

SEQ ID NO: 3219557 - RNA, 19 nt, Artificial Sequence
  Description of Artificial Sequence: Synthetic oligonucleotide
cugagcaagaugaggaaac

SEQ ID NO: 3219558 - RNA, 19 nt, Artificial Sequence
  Description of Artificial Sequence: Synthetic oligonucleotide
uguagaacuggaguuugcc

SEQ ID NO: 3219559 - RNA, 19 nt, Artificial Sequence
  Description of Artificial Sequence: Synthetic oligonucleotide
uguccgagaagauguacug

SEQ ID NO: 3219560 - RNA, 19 nt, Artificial Sequence
  Description of Artificial Sequence: Synthetic oligonucleotide
gacacugagcaagaugagg

SEQ ID NO: 3219561 - RNA, 19 nt, Artificial Sequence
  Description of Artificial Sequence: Synthetic oligonucleotide
cacuacuguauucuucugg

SEQ ID NO: 3219562 - RNA, 19 nt, Artificial Sequence
  Description of Artificial Sequence: Synthetic oligonucleotide
aguguccccgucuuguccg

SEQ ID NO: 3219563 - RNA, 19 nt, Artificial Sequence
  Description of Artificial Sequence: Synthetic oligonucleotide
agaacuggaguuugccauc

SEQ ID NO: 3219564 - RNA, 19 nt, Artificial Sequence
  Description of Artificial Sequence: Synthetic oligonucleotide
uccuuauuguagaacugga

SEQ ID NO: 3219565 - RNA, 19 nt, Artificial Sequence
  Description of Artificial Sequence: Synthetic oligonucleotide
aaacauggccaugggcacc

SEQ ID NO: 3219566 - RNA, 19 nt, Artificial Sequence
  Description of Artificial Sequence: Synthetic oligonucleotide
aaccccagaaaaugaagaa

SEQ ID NO: 3219567 - RNA, 19 nt, Artificial Sequence
  Description of Artificial Sequence: Synthetic oligonucleotide
cuccuuauuguagaacugg

SEQ ID NO: 3219568 - RNA, 19 nt, Artificial Sequence
  Description of Artificial Sequence: Synthetic oligonucleotide
uuguccgagaagauguacu

SEQ ID NO: 3219569 - RNA, 19 nt, Artificial Sequence
  Description of Artificial Sequence: Synthetic oligonucleotide
uaaaaggcgccagaacucc

SEQ ID NO: 3219570 - RNA, 19 nt, Artificial Sequence
  Description of Artificial Sequence: Synthetic oligonucleotide
cuaaaaggcgccagaacuc

SEQ ID NO: 3219571 - RNA, 19 nt, Artificial Sequence
  Description of Artificial Sequence: Synthetic oligonucleotide
gaaaccccagaaaaugaag

SEQ ID NO: 3219572 - RNA, 19 nt, Artificial Sequence
  Description of Artificial Sequence: Synthetic oligonucleotide
gaacucggcacugauaaac

SEQ ID NO: 3219573 - RNA, 19 nt, Artificial Sequence
  Description of Artificial Sequence: Synthetic oligonucleotide
ucggaggguaccaugcuca

SEQ ID NO: 3219574 - RNA, 19 nt, Artificial Sequence
  Description of Artificial Sequence: Synthetic oligonucleotide
cuaaggucccaguugauga

SEQ ID NO: 3219575 - RNA, 19 nt, Artificial Sequence
  Description of Artificial Sequence: Synthetic oligonucleotide
augcucaucgucugaauca

SEQ ID NO: 3219576 - RNA, 19 nt, Artificial Sequence
  Description of Artificial Sequence: Synthetic oligonucleotide
uauggguuccgcuuucgga

SEQ ID NO: 3219577 - RNA, 19 nt, Artificial Sequence
  Description of Artificial Sequence: Synthetic oligonucleotide
uagguagaugaacucggca

SEQ ID NO: 3219578 - RNA, 19 nt, Artificial Sequence
  Description of Artificial Sequence: Synthetic oligonucleotide
ugaggaaaccccagaaaau

SEQ ID NO: 3219579 - RNA, 19 nt, Artificial Sequence
  Description of Artificial Sequence: Synthetic oligonucleotide
uguuucgggccuuggcugg

SEQ ID NO: 3219580 - RNA, 19 nt, Artificial Sequence
  Description of Artificial Sequence: Synthetic oligonucleotide
ggcacugauaaacauggcc

SEQ ID NO: 3219581 - RNA, 19 nt, Artificial Sequence
  Description of Artificial Sequence: Synthetic oligonucleotide
uggaguuugccaucggcga

SEQ ID NO: 3219582 - RNA, 19 nt, Artificial Sequence
  Description of Artificial Sequence: Synthetic oligonucleotide
uucugggucaguguccccg

SEQ ID NO: 3219583 - RNA, 19 nt, Artificial Sequence
  Description of Artificial Sequence: Synthetic oligonucleotide
cuuauuguagaacuggagu

SEQ ID NO: 3219584 - RNA, 19 nt, Artificial Sequence
  Description of Artificial Sequence: Synthetic oligonucleotide
caccaugacacugagcaag

SEQ ID NO: 3219585 - RNA, 19 nt, Artificial Sequence
  Description of Artificial Sequence: Synthetic oligonucleotide
uccagcuccuuauuguaga

SEQ ID NO: 3219586 - RNA, 19 nt, Artificial Sequence
  Description of Artificial Sequence: Synthetic oligonucleotide
uagagccauuaauacagca

SEQ ID NO: 3219587 - RNA, 19 nt, Artificial Sequence
  Description of Artificial Sequence: Synthetic oligonucleotide
uuccagcuccuuauuguag

SEQ ID NO: 3219588 - RNA, 19 nt, Artificial Sequence
  Description of Artificial Sequence: Synthetic oligonucleotide
caagaugaggaaaccccag

SEQ ID NO: 3219589 - RNA, 19 nt, Artificial Sequence
  Description of Artificial Sequence: Synthetic oligonucleotide
auuguagaacuggaguuug

SEQ ID NO: 3219590 - RNA, 19 nt, Artificial Sequence
  Description of Artificial Sequence: Synthetic oligonucleotide
ccccagaaaaugaagaaag

SEQ ID NO: 3219591 - RNA, 19 nt, Artificial Sequence
  Description of Artificial Sequence: Synthetic oligonucleotide
aaaggauuaggguugaaag

SEQ ID NO: 3219592 - RNA, 19 nt, Artificial Sequence
  Description of Artificial Sequence: Synthetic oligonucleotide
ugaauaucaucuuagcugg

SEQ ID NO: 3219593 - RNA, 19 nt, Artificial Sequence
  Description of Artificial Sequence: Synthetic oligonucleotide
aaaaguaaauuuugcuagc

SEQ ID NO: 3219594 - RNA, 19 nt, Artificial Sequence
  Description of Artificial Sequence: Synthetic oligonucleotide
uauaacugcuguaaggugg

SEQ ID NO: 3219595 - RNA, 19 nt, Artificial Sequence
  Description of Artificial Sequence: Synthetic oligonucleotide
aaugaccugagacuggggc

SEQ ID NO: 3219596 - RNA, 19 nt, Artificial Sequence
  Description of Artificial Sequence: Synthetic oligonucleotide
aauaguagguaucacauaa

SEQ ID NO: 3219597 - RNA, 19 nt, Artificial Sequence
  Description of Artificial Sequence: Synthetic oligonucleotide
uccuguauaauucucaaug

SEQ ID NO: 3219598 - RNA, 19 nt, Artificial Sequence
  Description of Artificial Sequence: Synthetic oligonucleotide
uuuauauucccauacaaaa

SEQ ID NO: 3219599 - RNA, 19 nt, Artificial Sequence
  Description of Artificial Sequence: Synthetic oligonucleotide
aguaaauuuugcuagcuag

SEQ ID NO: 3219600 - RNA, 19 nt, Artificial Sequence
  Description of Artificial Sequence: Synthetic oligonucleotide
uucuggauaacccugagcu

SEQ ID NO: 3219601 - RNA, 19 nt, Artificial Sequence
  Description of Artificial Sequence: Synthetic oligonucleotide
uuggugaaaaggauuaggg

SEQ ID NO: 3219602 - RNA, 19 nt, Artificial Sequence
  Description of Artificial Sequence: Synthetic oligonucleotide
uucagcaauaugaauauca

SEQ ID NO: 3219603 - RNA, 19 nt, Artificial Sequence
  Description of Artificial Sequence: Synthetic oligonucleotide
guuacuuuugcuuuggaug

SEQ ID NO: 3219604 - RNA, 19 nt, Artificial Sequence
  Description of Artificial Sequence: Synthetic oligonucleotide
uuagcuggaggccaggugg

SEQ ID NO: 3219605 - RNA, 19 nt, Artificial Sequence
  Description of Artificial Sequence: Synthetic oligonucleotide
aguacuuucagcaauauga

SEQ ID NO: 3219606 - RNA, 19 nt, Artificial Sequence
  Description of Artificial Sequence: Synthetic oligonucleotide
aggguugaaagacaguacc

SEQ ID NO: 3219607 - RNA, 19 nt, Artificial Sequence
  Description of Artificial Sequence: Synthetic oligonucleotide
agcaauaugaauaucaucu

SEQ ID NO: 3219608 - RNA, 19 nt, Artificial Sequence
  Description of Artificial Sequence: Synthetic oligonucleotide
uguauaauucucaaugcac

SEQ ID NO: 3219609 - RNA, 19 nt, Artificial Sequence
  Description of Artificial Sequence: Synthetic oligonucleotide
aauuuauauucccauacaa

SEQ ID NO: 3219610 - RNA, 19 nt, Artificial Sequence
  Description of Artificial Sequence: Synthetic oligonucleotide
auaugaauaucaucuuagc

SEQ ID NO: 3219611 - RNA, 19 nt, Artificial Sequence
  Description of Artificial Sequence: Synthetic oligonucleotide
agaacuggcccucugaagg

SEQ ID NO: 3219612 - RNA, 19 nt, Artificial Sequence
  Description of Artificial Sequence: Synthetic oligonucleotide
uaaauagcuucauucuugg

SEQ ID NO: 3219613 - RNA, 19 nt, Artificial Sequence
  Description of Artificial Sequence: Synthetic oligonucleotide
ugucuuacuucucugcagg

SEQ ID NO: 3219614 - RNA, 19 nt, Artificial Sequence
  Description of Artificial Sequence: Synthetic oligonucleotide
aggcaaaaugaccugagac

SEQ ID NO: 3219615 - RNA, 19 nt, Artificial Sequence
  Description of Artificial Sequence: Synthetic oligonucleotide
aaauuuauauucccauaca

SEQ ID NO: 3219616 - RNA, 19 nt, Artificial Sequence
  Description of Artificial Sequence: Synthetic oligonucleotide
ugagacuggggccacaggg

SEQ ID NO: 3219617 - RNA, 19 nt, Artificial Sequence
  Description of Artificial Sequence: Synthetic oligonucleotide
ucauucuuggugaaaagga

SEQ ID NO: 3219618 - RNA, 19 nt, Artificial Sequence
  Description of Artificial Sequence: Synthetic oligonucleotide
ucucaaugcaccuacagaa

SEQ ID NO: 3219619 - RNA, 19 nt, Artificial Sequence
  Description of Artificial Sequence: Synthetic oligonucleotide
acugcuguaaggugggagc

SEQ ID NO: 3219620 - RNA, 19 nt, Artificial Sequence
  Description of Artificial Sequence: Synthetic oligonucleotide
aaagacaguaccucaacaa

SEQ ID NO: 3219621 - RNA, 19 nt, Artificial Sequence
  Description of Artificial Sequence: Synthetic oligonucleotide
aguaagucugccuucacug

SEQ ID NO: 3219622 - RNA, 19 nt, Artificial Sequence
  Description of Artificial Sequence: Synthetic oligonucleotide
aaaaugaccugagacuggg

SEQ ID NO: 3219623 - RNA, 19 nt, Artificial Sequence
  Description of Artificial Sequence: Synthetic oligonucleotide
aguaauuaucugcagcgag

SEQ ID NO: 3219624 - RNA, 19 nt, Artificial Sequence
  Description of Artificial Sequence: Synthetic oligonucleotide
ugaucuguuggcaucuuag

SEQ ID NO: 3219625 - RNA, 19 nt, Artificial Sequence
  Description of Artificial Sequence: Synthetic oligonucleotide
ucucacacuggacagaacu

SEQ ID NO: 3219626 - RNA, 19 nt, Artificial Sequence
  Description of Artificial Sequence: Synthetic oligonucleotide
uucauucuuggugaaaagg

SEQ ID NO: 3219627 - RNA, 19 nt, Artificial Sequence
  Description of Artificial Sequence: Synthetic oligonucleotide
acuucugagaaguaagucu

SEQ ID NO: 3219628 - RNA, 19 nt, Artificial Sequence
  Description of Artificial Sequence: Synthetic oligonucleotide
auagcuucauucuugguga

SEQ ID NO: 3219629 - RNA, 19 nt, Artificial Sequence
  Description of Artificial Sequence: Synthetic oligonucleotide
uagacaugcagcauuuccc

SEQ ID NO: 3219630 - RNA, 19 nt, Artificial Sequence
  Description of Artificial Sequence: Synthetic oligonucleotide
ucagugaucucugugacug

SEQ ID NO: 3219631 - RNA, 19 nt, Artificial Sequence
  Description of Artificial Sequence: Synthetic oligonucleotide
uaauucucaaugcaccuac

SEQ ID NO: 3219632 - RNA, 19 nt, Artificial Sequence
  Description of Artificial Sequence: Synthetic oligonucleotide
aaaaccucuucgcaacgag

SEQ ID NO: 3219633 - RNA, 19 nt, Artificial Sequence
  Description of Artificial Sequence: Synthetic oligonucleotide
aguagucaguacuuucagc

SEQ ID NO: 3219634 - RNA, 19 nt, Artificial Sequence
  Description of Artificial Sequence: Synthetic oligonucleotide
uaucaucuuagcuggaggc

SEQ ID NO: 3219635 - RNA, 19 nt, Artificial Sequence
  Description of Artificial Sequence: Synthetic oligonucleotide
ucaaugcaccuacagaaug

SEQ ID NO: 3219636 - RNA, 19 nt, Artificial Sequence
  Description of Artificial Sequence: Synthetic oligonucleotide
guagguaucacauaacaaa

SEQ ID NO: 3219637 - RNA, 19 nt, Artificial Sequence
  Description of Artificial Sequence: Synthetic oligonucleotide
uaagucugccuucacuggg

SEQ ID NO: 3219638 - RNA, 19 nt, Artificial Sequence
  Description of Artificial Sequence: Synthetic oligonucleotide
ugcaccuacagaaugggcu

SEQ ID NO: 3219639 - RNA, 19 nt, Artificial Sequence
  Description of Artificial Sequence: Synthetic oligonucleotide
uauaauucucaaugcaccu

SEQ ID NO: 3219640 - RNA, 19 nt, Artificial Sequence
  Description of Artificial Sequence: Synthetic oligonucleotide
guagucaguacuuucagca

SEQ ID NO: 3219641 - RNA, 19 nt, Artificial Sequence
  Description of Artificial Sequence: Synthetic oligonucleotide
uuuggaugcuggcacuugg

SEQ ID NO: 3219642 - RNA, 19 nt, Artificial Sequence
  Description of Artificial Sequence: Synthetic oligonucleotide
aaugcaccuacagaauggg

SEQ ID NO: 3219643 - RNA, 19 nt, Artificial Sequence
  Description of Artificial Sequence: Synthetic oligonucleotide
ugagaaguaagucugccuu

SEQ ID NO: 3219644 - RNA, 19 nt, Artificial Sequence
  Description of Artificial Sequence: Synthetic oligonucleotide
guauaauucucaaugcacc

SEQ ID NO: 3219645 - RNA, 19 nt, Artificial Sequence
  Description of Artificial Sequence: Synthetic oligonucleotide
cugcauaggaagcagagug

SEQ ID NO: 3219646 - RNA, 19 nt, Artificial Sequence
  Description of Artificial Sequence: Synthetic oligonucleotide
gugacuaggaucaccaggg

SEQ ID NO: 3219647 - RNA, 19 nt, Artificial Sequence
  Description of Artificial Sequence: Synthetic oligonucleotide
uuuugcuagcuagacaugc

SEQ ID NO: 3219648 - RNA, 19 nt, Artificial Sequence
  Description of Artificial Sequence: Synthetic oligonucleotide
aaaguaaauuuugcuagcu

SEQ ID NO: 3219649 - RNA, 19 nt, Artificial Sequence
  Description of Artificial Sequence: Synthetic oligonucleotide
augaccugagacuggggcc

SEQ ID NO: 3219650 - RNA, 19 nt, Artificial Sequence
  Description of Artificial Sequence: Synthetic oligonucleotide
cuagacaugcagcauuucc

SEQ ID NO: 3219651 - RNA, 19 nt, Artificial Sequence
  Description of Artificial Sequence: Synthetic oligonucleotide
aagacaguaccucaacaaa

SEQ ID NO: 3219652 - RNA, 19 nt, Artificial Sequence
  Description of Artificial Sequence: Synthetic oligonucleotide
uagguaucacauaacaaau

SEQ ID NO: 3219653 - RNA, 19 nt, Artificial Sequence
  Description of Artificial Sequence: Synthetic oligonucleotide
uucuuggugaaaaggauua

SEQ ID NO: 3219654 - RNA, 19 nt, Artificial Sequence
  Description of Artificial Sequence: Synthetic oligonucleotide
auaacccugagcuucgugu

SEQ ID NO: 3219655 - RNA, 19 nt, Artificial Sequence
  Description of Artificial Sequence: Synthetic oligonucleotide
caaugcaccuacagaaugg

SEQ ID NO: 3219656 - RNA, 19 nt, Artificial Sequence
  Description of Artificial Sequence: Synthetic oligonucleotide
ugugucuuacuucucugca

SEQ ID NO: 3219657 - RNA, 19 nt, Artificial Sequence
  Description of Artificial Sequence: Synthetic oligonucleotide
cugacuucugagaaguaag

SEQ ID NO: 3219658 - RNA, 19 nt, Artificial Sequence
  Description of Artificial Sequence: Synthetic oligonucleotide
ugucuuuggcuauaacugc

SEQ ID NO: 3219659 - RNA, 19 nt, Artificial Sequence
  Description of Artificial Sequence: Synthetic oligonucleotide
uuaggguugaaagacagua

SEQ ID NO: 3219660 - RNA, 19 nt, Artificial Sequence
  Description of Artificial Sequence: Synthetic oligonucleotide
aaguaagucugccuucacu

SEQ ID NO: 3219661 - RNA, 19 nt, Artificial Sequence
  Description of Artificial Sequence: Synthetic oligonucleotide
agugcugcaauggcgagcg

SEQ ID NO: 3219662 - RNA, 19 nt, Artificial Sequence
  Description of Artificial Sequence: Synthetic oligonucleotide
uccugcauaggaagcagag

SEQ ID NO: 3219663 - RNA, 19 nt, Artificial Sequence
  Description of Artificial Sequence: Synthetic oligonucleotide
aaaccucuucgcaacgagc

SEQ ID NO: 3219664 - RNA, 19 nt, Artificial Sequence
  Description of Artificial Sequence: Synthetic oligonucleotide
ucaggcaaaaugaccugag

SEQ ID NO: 3219665 - RNA, 19 nt, Artificial Sequence
  Description of Artificial Sequence: Synthetic oligonucleotide
ugaaagacaguaccucaac

SEQ ID NO: 3219666 - RNA, 19 nt, Artificial Sequence
  Description of Artificial Sequence: Synthetic oligonucleotide
cuuggugaaaaggauuagg

SEQ ID NO: 3219667 - RNA, 19 nt, Artificial Sequence
  Description of Artificial Sequence: Synthetic oligonucleotide
auuaucugcagcgaguagu

SEQ ID NO: 3219668 - RNA, 19 nt, Artificial Sequence
  Description of Artificial Sequence: Synthetic oligonucleotide
gugaaaaggauuaggguug

SEQ ID NO: 3219669 - RNA, 19 nt, Artificial Sequence
  Description of Artificial Sequence: Synthetic oligonucleotide
aucaucuuagcuggaggcc

SEQ ID NO: 3219670 - RNA, 19 nt, Artificial Sequence
  Description of Artificial Sequence: Synthetic oligonucleotide
acuuucagcaauaugaaua

SEQ ID NO: 3219671 - RNA, 19 nt, Artificial Sequence
  Description of Artificial Sequence: Synthetic oligonucleotide
uggauaacccugagcuucg

SEQ ID NO: 3219672 - RNA, 19 nt, Artificial Sequence
  Description of Artificial Sequence: Synthetic oligonucleotide
uggugaaaaggauuagggu

SEQ ID NO: 3219673 - RNA, 19 nt, Artificial Sequence
  Description of Artificial Sequence: Synthetic oligonucleotide
uugaaagacaguaccucaa

SEQ ID NO: 3219674 - RNA, 19 nt, Artificial Sequence
  Description of Artificial Sequence: Synthetic oligonucleotide
ggagccaguaauuaucugc

SEQ ID NO: 3219675 - RNA, 19 nt, Artificial Sequence
  Description of Artificial Sequence: Synthetic oligonucleotide
uuugcuuuggaugcuggca

SEQ ID NO: 3219676 - RNA, 19 nt, Artificial Sequence
  Description of Artificial Sequence: Synthetic oligonucleotide
aucugcagcgaguagucag

SEQ ID NO: 3219677 - RNA, 19 nt, Artificial Sequence
  Description of Artificial Sequence: Synthetic oligonucleotide
uuggcuauaacugcuguaa

SEQ ID NO: 3219678 - RNA, 19 nt, Artificial Sequence
  Description of Artificial Sequence: Synthetic oligonucleotide
acaugcagcauuucccaag

SEQ ID NO: 3219679 - RNA, 19 nt, Artificial Sequence
  Description of Artificial Sequence: Synthetic oligonucleotide
gaguagucaguacuuucag

SEQ ID NO: 3219680 - RNA, 19 nt, Artificial Sequence
  Description of Artificial Sequence: Synthetic oligonucleotide
ucuuuggcuauaacugcug

SEQ ID NO: 3219681 - RNA, 19 nt, Artificial Sequence
  Description of Artificial Sequence: Synthetic oligonucleotide
gacuaggaucaccagggcc

SEQ ID NO: 3219682 - RNA, 19 nt, Artificial Sequence
  Description of Artificial Sequence: Synthetic oligonucleotide
acugggugugucuucagug

SEQ ID NO: 3219683 - RNA, 19 nt, Artificial Sequence
  Description of Artificial Sequence: Synthetic oligonucleotide
guaagucugccuucacugg

SEQ ID NO: 3219684 - RNA, 19 nt, Artificial Sequence
  Description of Artificial Sequence: Synthetic oligonucleotide
uugcuuuggaugcuggcac

SEQ ID NO: 3219685 - RNA, 19 nt, Artificial Sequence
  Description of Artificial Sequence: Synthetic oligonucleotide
uacagaaugggcugggaau

SEQ ID NO: 3219686 - RNA, 19 nt, Artificial Sequence
  Description of Artificial Sequence: Synthetic oligonucleotide
gaaagacaguaccucaaca

SEQ ID NO: 3219687 - RNA, 19 nt, Artificial Sequence
  Description of Artificial Sequence: Synthetic oligonucleotide
ucacugacuucugagaagu

SEQ ID NO: 3219688 - RNA, 19 nt, Artificial Sequence
  Description of Artificial Sequence: Synthetic oligonucleotide
ugacuucugagaaguaagu

SEQ ID NO: 3219689 - RNA, 19 nt, Artificial Sequence
  Description of Artificial Sequence: Synthetic oligonucleotide
guugaaagacaguaccuca

SEQ ID NO: 3219690 - RNA, 19 nt, Artificial Sequence
  Description of Artificial Sequence: Synthetic oligonucleotide
aaugggcugggaauaguag

SEQ ID NO: 3219691 - RNA, 19 nt, Artificial Sequence
  Description of Artificial Sequence: Synthetic oligonucleotide
uuuaguaauaaauaucggg

SEQ ID NO: 3219692 - RNA, 19 nt, Artificial Sequence
  Description of Artificial Sequence: Synthetic oligonucleotide
aaaguauuugcacacuugc

SEQ ID NO: 3219693 - RNA, 19 nt, Artificial Sequence
  Description of Artificial Sequence: Synthetic oligonucleotide
aaaauuacagugaucaccc

SEQ ID NO: 3219694 - RNA, 19 nt, Artificial Sequence
  Description of Artificial Sequence: Synthetic oligonucleotide
ugugauaaaacuugcaagg

SEQ ID NO: 3219695 - RNA, 19 nt, Artificial Sequence
  Description of Artificial Sequence: Synthetic oligonucleotide
aucaugaucaaacuuacac

SEQ ID NO: 3219696 - RNA, 19 nt, Artificial Sequence
  Description of Artificial Sequence: Synthetic oligonucleotide
aauacaggcaguucucucc

SEQ ID NO: 3219697 - RNA, 19 nt, Artificial Sequence
  Description of Artificial Sequence: Synthetic oligonucleotide
uuaguaauaaauaucggga

SEQ ID NO: 3219698 - RNA, 19 nt, Artificial Sequence
  Description of Artificial Sequence: Synthetic oligonucleotide
auugaugaagccuugacuc

SEQ ID NO: 3219699 - RNA, 19 nt, Artificial Sequence
  Description of Artificial Sequence: Synthetic oligonucleotide
auaauacuuacacauuucc

SEQ ID NO: 3219700 - RNA, 19 nt, Artificial Sequence
  Description of Artificial Sequence: Synthetic oligonucleotide
aauacauuuccuuucaaga

SEQ ID NO: 3219701 - RNA, 19 nt, Artificial Sequence
  Description of Artificial Sequence: Synthetic oligonucleotide
uuuuagucuauuuacauga

SEQ ID NO: 3219702 - RNA, 19 nt, Artificial Sequence
  Description of Artificial Sequence: Synthetic oligonucleotide
aguaauaaauaucgggagc

SEQ ID NO: 3219703 - RNA, 19 nt, Artificial Sequence
  Description of Artificial Sequence: Synthetic oligonucleotide
ucauuaugcaaauacaggc

SEQ ID NO: 3219704 - RNA, 19 nt, Artificial Sequence
  Description of Artificial Sequence: Synthetic oligonucleotide
ucuucaaaagucuugacca

SEQ ID NO: 3219705 - RNA, 19 nt, Artificial Sequence
  Description of Artificial Sequence: Synthetic oligonucleotide
aucacaaccacacaggaag

SEQ ID NO: 3219706 - RNA, 19 nt, Artificial Sequence
  Description of Artificial Sequence: Synthetic oligonucleotide
auuuacaugacuucuuuuc

SEQ ID NO: 3219707 - RNA, 19 nt, Artificial Sequence
  Description of Artificial Sequence: Synthetic oligonucleotide
aauaaauaucgggagcugc

SEQ ID NO: 3219708 - RNA, 19 nt, Artificial Sequence
  Description of Artificial Sequence: Synthetic oligonucleotide
uuguacauaauacuuacac

SEQ ID NO: 3219709 - RNA, 19 nt, Artificial Sequence
  Description of Artificial Sequence: Synthetic oligonucleotide
aauacuuacacauuuccuu

SEQ ID NO: 3219710 - RNA, 19 nt, Artificial Sequence
  Description of Artificial Sequence: Synthetic oligonucleotide
uaucucugcaucaugauca

SEQ ID NO: 3219711 - RNA, 19 nt, Artificial Sequence
  Description of Artificial Sequence: Synthetic oligonucleotide
aacauuuuguuccugugug

SEQ ID NO: 3219712 - RNA, 19 nt, Artificial Sequence
  Description of Artificial Sequence: Synthetic oligonucleotide
aguauccaaaacucuagcc

SEQ ID NO: 3219713 - RNA, 19 nt, Artificial Sequence
  Description of Artificial Sequence: Synthetic oligonucleotide
cuuucaagaaaguauuugc

SEQ ID NO: 3219714 - RNA, 19 nt, Artificial Sequence
  Description of Artificial Sequence: Synthetic oligonucleotide
aacuauuccaagucgcuag

SEQ ID NO: 3219715 - RNA, 19 nt, Artificial Sequence
  Description of Artificial Sequence: Synthetic oligonucleotide
uuuuaguaauaaauaucgg

SEQ ID NO: 3219716 - RNA, 19 nt, Artificial Sequence
  Description of Artificial Sequence: Synthetic oligonucleotide
acagugaucacccugauaa

SEQ ID NO: 3219717 - RNA, 19 nt, Artificial Sequence
  Description of Artificial Sequence: Synthetic oligonucleotide
uuuucaguauccaaaacuc

SEQ ID NO: 3219718 - RNA, 19 nt, Artificial Sequence
  Description of Artificial Sequence: Synthetic oligonucleotide
uugaccaggaauuagauuu

SEQ ID NO: 3219719 - RNA, 19 nt, Artificial Sequence
  Description of Artificial Sequence: Synthetic oligonucleotide
caugaucaaacuuacacug

SEQ ID NO: 3219720 - RNA, 19 nt, Artificial Sequence
  Description of Artificial Sequence: Synthetic oligonucleotide
uuagauuuguccucuauac

SEQ ID NO: 3219721 - RNA, 19 nt, Artificial Sequence
  Description of Artificial Sequence: Synthetic oligonucleotide
guauucauuaugcaaauac

SEQ ID NO: 3219722 - RNA, 19 nt, Artificial Sequence
  Description of Artificial Sequence: Synthetic oligonucleotide
auuaugcaaauacaggcag

SEQ ID NO: 3219723 - RNA, 19 nt, Artificial Sequence
  Description of Artificial Sequence: Synthetic oligonucleotide
uaguaauaaauaucgggag

SEQ ID NO: 3219724 - RNA, 19 nt, Artificial Sequence
  Description of Artificial Sequence: Synthetic oligonucleotide
aauuacagugaucacccug

SEQ ID NO: 3219725 - RNA, 19 nt, Artificial Sequence
  Description of Artificial Sequence: Synthetic oligonucleotide
aaaacuugcaaggguauuc

SEQ ID NO: 3219726 - RNA, 19 nt, Artificial Sequence
  Description of Artificial Sequence: Synthetic oligonucleotide
ucaagaaaguauuugcaca

SEQ ID NO: 3219727 - RNA, 19 nt, Artificial Sequence
  Description of Artificial Sequence: Synthetic oligonucleotide
uauucauuaugcaaauaca

SEQ ID NO: 3219728 - RNA, 19 nt, Artificial Sequence
  Description of Artificial Sequence: Synthetic oligonucleotide
auuuguccucuauacaagc

SEQ ID NO: 3219729 - RNA, 19 nt, Artificial Sequence
  Description of Artificial Sequence: Synthetic oligonucleotide
uaauacauuuccuuucaag

SEQ ID NO: 3219730 - RNA, 19 nt, Artificial Sequence
  Description of Artificial Sequence: Synthetic oligonucleotide
ugcaaauacaggcaguucu

SEQ ID NO: 3219731 - RNA, 19 nt, Artificial Sequence
  Description of Artificial Sequence: Synthetic oligonucleotide
uuuccuuucaagaaaguau

SEQ ID NO: 3219732 - RNA, 19 nt, Artificial Sequence
  Description of Artificial Sequence: Synthetic oligonucleotide
uuucaagaaaguauuugca

SEQ ID NO: 3219733 - RNA, 19 nt, Artificial Sequence
  Description of Artificial Sequence: Synthetic oligonucleotide
ugugugauaaaacuugcaa

SEQ ID NO: 3219734 - RNA, 19 nt, Artificial Sequence
  Description of Artificial Sequence: Synthetic oligonucleotide
ccugauaacauuuuguucc

SEQ ID NO: 3219735 - RNA, 19 nt, Artificial Sequence
  Description of Artificial Sequence: Synthetic oligonucleotide
aacucuagccaacaguucu

SEQ ID NO: 3219736 - RNA, 19 nt, Artificial Sequence
  Description of Artificial Sequence: Synthetic oligonucleotide
uguguuucugcagucagcg

SEQ ID NO: 3219737 - RNA, 19 nt, Artificial Sequence
  Description of Artificial Sequence: Synthetic oligonucleotide
uuuacaugacuucuuuuca

SEQ ID NO: 3219738 - RNA, 19 nt, Artificial Sequence
  Description of Artificial Sequence: Synthetic oligonucleotide
uccugugugauaaaacuug

SEQ ID NO: 3219739 - RNA, 19 nt, Artificial Sequence
  Description of Artificial Sequence: Synthetic oligonucleotide
aaauaucgggagcugcacg

SEQ ID NO: 3219740 - RNA, 19 nt, Artificial Sequence
  Description of Artificial Sequence: Synthetic oligonucleotide
aaaagucuugaccaggaau

SEQ ID NO: 3219741 - RNA, 19 nt, Artificial Sequence
  Description of Artificial Sequence: Synthetic oligonucleotide
ggugcauuaacugagaacc

SEQ ID NO: 3219742 - RNA, 19 nt, Artificial Sequence
  Description of Artificial Sequence: Synthetic oligonucleotide
ucaguauccaaaacucuag

SEQ ID NO: 3219743 - RNA, 19 nt, Artificial Sequence
  Description of Artificial Sequence: Synthetic oligonucleotide
uguuucugcagucagcgga

SEQ ID NO: 3219744 - RNA, 19 nt, Artificial Sequence
  Description of Artificial Sequence: Synthetic oligonucleotide
ugcaucaugaucaaacuua

SEQ ID NO: 3219745 - RNA, 19 nt, Artificial Sequence
  Description of Artificial Sequence: Synthetic oligonucleotide
aaauacaggcaguucucuc

SEQ ID NO: 3219746 - RNA, 19 nt, Artificial Sequence
  Description of Artificial Sequence: Synthetic oligonucleotide
uguacauaauacuuacaca

SEQ ID NO: 3219747 - RNA, 19 nt, Artificial Sequence
  Description of Artificial Sequence: Synthetic oligonucleotide
uucaagaaaguauuugcac

SEQ ID NO: 3219748 - RNA, 19 nt, Artificial Sequence
  Description of Artificial Sequence: Synthetic oligonucleotide
augacuucuuuucaguauc

SEQ ID NO: 3219749 - RNA, 19 nt, Artificial Sequence
  Description of Artificial Sequence: Synthetic oligonucleotide
ucuccuuuggugcaguacc

SEQ ID NO: 3219750 - RNA, 19 nt, Artificial Sequence
  Description of Artificial Sequence: Synthetic oligonucleotide
aauaucgggagcugcacgu

SEQ ID NO: 3219751 - RNA, 19 nt, Artificial Sequence
  Description of Artificial Sequence: Synthetic oligonucleotide
auucauuaugcaaauacag

SEQ ID NO: 3219752 - RNA, 19 nt, Artificial Sequence
  Description of Artificial Sequence: Synthetic oligonucleotide
agaaccucgaacuauucca

SEQ ID NO: 3219753 - RNA, 19 nt, Artificial Sequence
  Description of Artificial Sequence: Synthetic oligonucleotide
aucaaacuuacacuggucu

SEQ ID NO: 3219754 - RNA, 19 nt, Artificial Sequence
  Description of Artificial Sequence: Synthetic oligonucleotide
ugauaaaacuugcaagggu

SEQ ID NO: 3219755 - RNA, 19 nt, Artificial Sequence
  Description of Artificial Sequence: Synthetic oligonucleotide
gugugauaaaacuugcaag

SEQ ID NO: 3219756 - RNA, 19 nt, Artificial Sequence
  Description of Artificial Sequence: Synthetic oligonucleotide
ucaugaucaaacuuacacu

SEQ ID NO: 3219757 - RNA, 19 nt, Artificial Sequence
  Description of Artificial Sequence: Synthetic oligonucleotide
agauuuguccucuauacaa

SEQ ID NO: 3219758 - RNA, 19 nt, Artificial Sequence
  Description of Artificial Sequence: Synthetic oligonucleotide
aaggguauucauuaugcaa

SEQ ID NO: 3219759 - RNA, 19 nt, Artificial Sequence
  Description of Artificial Sequence: Synthetic oligonucleotide
uagucuauuuacaugacuu

SEQ ID NO: 3219760 - RNA, 19 nt, Artificial Sequence
  Description of Artificial Sequence: Synthetic oligonucleotide
aggaauuagauuuguccuc

SEQ ID NO: 3219761 - RNA, 19 nt, Artificial Sequence
  Description of Artificial Sequence: Synthetic oligonucleotide
caagaaaguauuugcacac

SEQ ID NO: 3219762 - RNA, 19 nt, Artificial Sequence
  Description of Artificial Sequence: Synthetic oligonucleotide
ugaucaaacuuacacuggu

SEQ ID NO: 3219763 - RNA, 19 nt, Artificial Sequence
  Description of Artificial Sequence: Synthetic oligonucleotide
uaauacuuacacauuuccu

SEQ ID NO: 3219764 - RNA, 19 nt, Artificial Sequence
  Description of Artificial Sequence: Synthetic oligonucleotide
agucuauuuacaugacuuc

SEQ ID NO: 3219765 - RNA, 19 nt, Artificial Sequence
  Description of Artificial Sequence: Synthetic oligonucleotide
cuugacucauccuuacacg

SEQ ID NO: 3219766 - RNA, 19 nt, Artificial Sequence
  Description of Artificial Sequence: Synthetic oligonucleotide
uuacaugacuucuuuucag

SEQ ID NO: 3219767 - RNA, 19 nt, Artificial Sequence
  Description of Artificial Sequence: Synthetic oligonucleotide
uacauuuccuuucaagaaa

SEQ ID NO: 3219768 - RNA, 19 nt, Artificial Sequence
  Description of Artificial Sequence: Synthetic oligonucleotide
aaaacucuagccaacaguu

SEQ ID NO: 3219769 - RNA, 19 nt, Artificial Sequence
  Description of Artificial Sequence: Synthetic oligonucleotide
acaguucuuguguuucugc

SEQ ID NO: 3219770 - RNA, 19 nt, Artificial Sequence
  Description of Artificial Sequence: Synthetic oligonucleotide
gacucauccuuacacgagg

SEQ ID NO: 3219771 - RNA, 19 nt, Artificial Sequence
  Description of Artificial Sequence: Synthetic oligonucleotide
ucgaacuauuccaagucgc

SEQ ID NO: 3219772 - RNA, 19 nt, Artificial Sequence
  Description of Artificial Sequence: Synthetic oligonucleotide
uuuuguuccugugugauaa

SEQ ID NO: 3219773 - RNA, 19 nt, Artificial Sequence
  Description of Artificial Sequence: Synthetic oligonucleotide
acuauuccaagucgcuagc

SEQ ID NO: 3219774 - RNA, 19 nt, Artificial Sequence
  Description of Artificial Sequence: Synthetic oligonucleotide
gucuucaaaagucuugacc

SEQ ID NO: 3219775 - RNA, 19 nt, Artificial Sequence
  Description of Artificial Sequence: Synthetic oligonucleotide
uauccaaaacucuagccaa

SEQ ID NO: 3219776 - RNA, 19 nt, Artificial Sequence
  Description of Artificial Sequence: Synthetic oligonucleotide
acauaauacuuacacauuu

SEQ ID NO: 3219777 - RNA, 19 nt, Artificial Sequence
  Description of Artificial Sequence: Synthetic oligonucleotide
uucaguauccaaaacucua

SEQ ID NO: 3219778 - RNA, 19 nt, Artificial Sequence
  Description of Artificial Sequence: Synthetic oligonucleotide
uaacauuuuguuccugugu

SEQ ID NO: 3219779 - RNA, 19 nt, Artificial Sequence
  Description of Artificial Sequence: Synthetic oligonucleotide
uuagucuauuuacaugacu

SEQ ID NO: 3219780 - RNA, 19 nt, Artificial Sequence
  Description of Artificial Sequence: Synthetic oligonucleotide
guauccaaaacucuagcca

SEQ ID NO: 3219781 - RNA, 19 nt, Artificial Sequence
  Description of Artificial Sequence: Synthetic oligonucleotide
aguauuugcacacuugcuu

SEQ ID NO: 3219782 - RNA, 19 nt, Artificial Sequence
  Description of Artificial Sequence: Synthetic oligonucleotide
augaagccuugacucaucc

SEQ ID NO: 3219783 - RNA, 19 nt, Artificial Sequence
  Description of Artificial Sequence: Synthetic oligonucleotide
guacauaauacuuacacau

SEQ ID NO: 3219784 - RNA, 19 nt, Artificial Sequence
  Description of Artificial Sequence: Synthetic oligonucleotide
aaagucuugaccaggaauu

SEQ ID NO: 3219785 - RNA, 19 nt, Artificial Sequence
  Description of Artificial Sequence: Synthetic oligonucleotide
aauuagauuuguccucuau

SEQ ID NO: 3219786 - RNA, 19 nt, Artificial Sequence
  Description of Artificial Sequence: Synthetic oligonucleotide
aggugcauuaacugagaac

SEQ ID NO: 3219787 - RNA, 19 nt, Artificial Sequence
  Description of Artificial Sequence: Synthetic oligonucleotide
cacgugaucacaaccacac

SEQ ID NO: 3219788 - RNA, 19 nt, Artificial Sequence
  Description of Artificial Sequence: Synthetic oligonucleotide
ugaucacaaccacacagga

SEQ ID NO: 3219789 - RNA, 19 nt, Artificial Sequence
  Description of Artificial Sequence: Synthetic oligonucleotide
auuccaagucgcuagccag

SEQ ID NO: 3219790 - RNA, 19 nt, Artificial Sequence
  Description of Artificial Sequence: Synthetic oligonucleotide
uugacucauccuuacacga

SEQ ID NO: 3219791 - RNA, 19 nt, Artificial Sequence
  Description of Artificial Sequence: Synthetic oligonucleotide
acugaaguguuacagaggg

SEQ ID NO: 3219792 - RNA, 19 nt, Artificial Sequence
  Description of Artificial Sequence: Synthetic oligonucleotide
aagaaacucuccuuccugc

SEQ ID NO: 3219793 - RNA, 19 nt, Artificial Sequence
  Description of Artificial Sequence: Synthetic oligonucleotide
ucuggcuugagcuauuugg

SEQ ID NO: 3219794 - RNA, 19 nt, Artificial Sequence
  Description of Artificial Sequence: Synthetic oligonucleotide
auuaagaaacucuccuucc

SEQ ID NO: 3219795 - RNA, 19 nt, Artificial Sequence
  Description of Artificial Sequence: Synthetic oligonucleotide
uaugccguggggcagaugc

SEQ ID NO: 3219796 - RNA, 19 nt, Artificial Sequence
  Description of Artificial Sequence: Synthetic oligonucleotide
aagacgguuguguagggag

SEQ ID NO: 3219797 - RNA, 19 nt, Artificial Sequence
  Description of Artificial Sequence: Synthetic oligonucleotide
agggagaggauuaagaaac

SEQ ID NO: 3219798 - RNA, 19 nt, Artificial Sequence
  Description of Artificial Sequence: Synthetic oligonucleotide
agcuauuugggccaggcuc

SEQ ID NO: 3219799 - RNA, 19 nt, Artificial Sequence
  Description of Artificial Sequence: Synthetic oligonucleotide
ugacugaaguguuacagag

SEQ ID NO: 3219800 - RNA, 19 nt, Artificial Sequence
  Description of Artificial Sequence: Synthetic oligonucleotide
ucuggaugaaucuuuggcc

SEQ ID NO: 3219801 - RNA, 19 nt, Artificial Sequence
  Description of Artificial Sequence: Synthetic oligonucleotide
gaaucuuuggccugccugg

SEQ ID NO: 3219802 - RNA, 19 nt, Artificial Sequence
  Description of Artificial Sequence: Synthetic oligonucleotide
gauuaagaaacucuccuuc

SEQ ID NO: 3219803 - RNA, 19 nt, Artificial Sequence
  Description of Artificial Sequence: Synthetic oligonucleotide
ugaaguguuacagagggcu

SEQ ID NO: 3219804 - RNA, 19 nt, Artificial Sequence
  Description of Artificial Sequence: Synthetic oligonucleotide
uccauucucugcauguugg

SEQ ID NO: 3219805 - RNA, 19 nt, Artificial Sequence
  Description of Artificial Sequence: Synthetic oligonucleotide
uguagggagaggauuaaga

SEQ ID NO: 3219806 - RNA, 19 nt, Artificial Sequence
  Description of Artificial Sequence: Synthetic oligonucleotide
aaguguuacagagggcugc

SEQ ID NO: 3219807 - RNA, 19 nt, Artificial Sequence
  Description of Artificial Sequence: Synthetic oligonucleotide
ugaaucuuuggccugccug

SEQ ID NO: 3219808 - RNA, 19 nt, Artificial Sequence
  Description of Artificial Sequence: Synthetic oligonucleotide
aggauuaagaaacucuccu

SEQ ID NO: 3219809 - RNA, 19 nt, Artificial Sequence
  Description of Artificial Sequence: Synthetic oligonucleotide
acaagcaggugaccaagcc

SEQ ID NO: 3219810 - RNA, 19 nt, Artificial Sequence
  Description of Artificial Sequence: Synthetic oligonucleotide
uaagaaacucuccuuccug

SEQ ID NO: 3219811 - RNA, 19 nt, Artificial Sequence
  Description of Artificial Sequence: Synthetic oligonucleotide
agaggauuaagaaacucuc

SEQ ID NO: 3219812 - RNA, 19 nt, Artificial Sequence
  Description of Artificial Sequence: Synthetic oligonucleotide
uuaagaaacucuccuuccu

SEQ ID NO: 3219813 - RNA, 19 nt, Artificial Sequence
  Description of Artificial Sequence: Synthetic oligonucleotide
aaacucuccuuccugcuca

SEQ ID NO: 3219814 - RNA, 19 nt, Artificial Sequence
  Description of Artificial Sequence: Synthetic oligonucleotide
auuccagcccacuuguggg

SEQ ID NO: 3219815 - RNA, 19 nt, Artificial Sequence
  Description of Artificial Sequence: Synthetic oligonucleotide
cucuggaugaaucuuuggc

SEQ ID NO: 3219816 - RNA, 19 nt, Artificial Sequence
  Description of Artificial Sequence: Synthetic oligonucleotide
agugacugaaguguuacag

SEQ ID NO: 3219817 - RNA, 19 nt, Artificial Sequence
  Description of Artificial Sequence: Synthetic oligonucleotide
ugcaccucuguccagguga

SEQ ID NO: 3219818 - RNA, 19 nt, Artificial Sequence
  Description of Artificial Sequence: Synthetic oligonucleotide
auuugggccaggcucucgc

SEQ ID NO: 3219819 - RNA, 19 nt, Artificial Sequence
  Description of Artificial Sequence: Synthetic oligonucleotide
uguuacagagggcugcucu

SEQ ID NO: 3219820 - RNA, 19 nt, Artificial Sequence
  Description of Artificial Sequence: Synthetic oligonucleotide
gagacaggagcacaagcag

SEQ ID NO: 3219821 - RNA, 19 nt, Artificial Sequence
  Description of Artificial Sequence: Synthetic oligonucleotide
ucuuuggccugccuggugc

SEQ ID NO: 3219822 - RNA, 19 nt, Artificial Sequence
  Description of Artificial Sequence: Synthetic oligonucleotide
accucuguccaggugaugc

SEQ ID NO: 3219823 - RNA, 19 nt, Artificial Sequence
  Description of Artificial Sequence: Synthetic oligonucleotide
auucucugcauguuggcug

SEQ ID NO: 3219824 - RNA, 19 nt, Artificial Sequence
  Description of Artificial Sequence: Synthetic oligonucleotide
aagccaucggcucuggccu

SEQ ID NO: 3219825 - RNA, 19 nt, Artificial Sequence
  Description of Artificial Sequence: Synthetic oligonucleotide
cuggcuugagcuauuuggg

SEQ ID NO: 3219826 - RNA, 19 nt, Artificial Sequence
  Description of Artificial Sequence: Synthetic oligonucleotide
cauuccagcccacuugugg

SEQ ID NO: 3219827 - RNA, 19 nt, Artificial Sequence
  Description of Artificial Sequence: Synthetic oligonucleotide
ucugcauguuggcugcagg

SEQ ID NO: 3219828 - RNA, 19 nt, Artificial Sequence
  Description of Artificial Sequence: Synthetic oligonucleotide
uugggagugacugaagugu

SEQ ID NO: 3219829 - RNA, 19 nt, Artificial Sequence
  Description of Artificial Sequence: Synthetic oligonucleotide
ugcuuuggcauuuggggug

SEQ ID NO: 3219830 - RNA, 19 nt, Artificial Sequence
  Description of Artificial Sequence: Synthetic oligonucleotide
aggugaccaagccaucggc

SEQ ID NO: 3219831 - RNA, 19 nt, Artificial Sequence
  Description of Artificial Sequence: Synthetic oligonucleotide
ugcaggaggcugaaccugg

SEQ ID NO: 3219832 - RNA, 19 nt, Artificial Sequence
  Description of Artificial Sequence: Synthetic oligonucleotide
caagccaucggcucuggcc

SEQ ID NO: 3219833 - RNA, 19 nt, Artificial Sequence
  Description of Artificial Sequence: Synthetic oligonucleotide
aaccuggcugcgaagacgg

SEQ ID NO: 3219834 - RNA, 19 nt, Artificial Sequence
  Description of Artificial Sequence: Synthetic oligonucleotide
cauguuggcugcaggaggc

SEQ ID NO: 3219835 - RNA, 19 nt, Artificial Sequence
  Description of Artificial Sequence: Synthetic oligonucleotide
ccugcuuuggcauuugggg

SEQ ID NO: 3219836 - RNA, 19 nt, Artificial Sequence
  Description of Artificial Sequence: Synthetic oligonucleotide
gagagacaggagcacaagc

SEQ ID NO: 3219837 - RNA, 19 nt, Artificial Sequence
  Description of Artificial Sequence: Synthetic oligonucleotide
caggugaugccaaggagag

SEQ ID NO: 3219838 - RNA, 19 nt, Artificial Sequence
  Description of Artificial Sequence: Synthetic oligonucleotide
uagggagaggauuaagaaa

SEQ ID NO: 3219839 - RNA, 19 nt, Artificial Sequence
  Description of Artificial Sequence: Synthetic oligonucleotide
uggggcagaugccagguug

SEQ ID NO: 3219840 - RNA, 19 nt, Artificial Sequence
  Description of Artificial Sequence: Synthetic oligonucleotide
uccaggugaugccaaggag

SEQ ID NO: 3219841 - RNA, 19 nt, Artificial Sequence
  Description of Artificial Sequence: Synthetic oligonucleotide
ugcgaagacgguuguguag

SEQ ID NO: 3219842 - RNA, 19 nt, Artificial Sequence
  Description of Artificial Sequence: Synthetic oligonucleotide
ugaugccaaggagagacag

SEQ ID NO: 3219843 - RNA, 19 nt, Artificial Sequence
  Description of Artificial Sequence: Synthetic oligonucleotide
gaggauuaagaaacucucc

SEQ ID NO: 3219844 - RNA, 19 nt, Artificial Sequence
  Description of Artificial Sequence: Synthetic oligonucleotide
cucuccuuccugcucaggg

SEQ ID NO: 3219845 - RNA, 19 nt, Artificial Sequence
  Description of Artificial Sequence: Synthetic oligonucleotide
uuguguagggagaggauua

SEQ ID NO: 3219846 - RNA, 19 nt, Artificial Sequence
  Description of Artificial Sequence: Synthetic oligonucleotide
ggugaugccaaggagagac

SEQ ID NO: 3219847 - RNA, 19 nt, Artificial Sequence
  Description of Artificial Sequence: Synthetic oligonucleotide
gcagaugccagguugggag

SEQ ID NO: 3219848 - RNA, 19 nt, Artificial Sequence
  Description of Artificial Sequence: Synthetic oligonucleotide
uucucugcauguuggcugc

SEQ ID NO: 3219849 - RNA, 19 nt, Artificial Sequence
  Description of Artificial Sequence: Synthetic oligonucleotide
uuacagagggcugcucugg

SEQ ID NO: 3219850 - RNA, 19 nt, Artificial Sequence
  Description of Artificial Sequence: Synthetic oligonucleotide
gacugaaguguuacagagg

SEQ ID NO: 3219851 - RNA, 19 nt, Artificial Sequence
  Description of Artificial Sequence: Synthetic oligonucleotide
aggaggcugaaccuggcug

SEQ ID NO: 3219852 - RNA, 19 nt, Artificial Sequence
  Description of Artificial Sequence: Synthetic oligonucleotide
aagcaggugaccaagccau

SEQ ID NO: 3219853 - RNA, 19 nt, Artificial Sequence
  Description of Artificial Sequence: Synthetic oligonucleotide
ugugggguaugccgugggg

SEQ ID NO: 3219854 - RNA, 19 nt, Artificial Sequence
  Description of Artificial Sequence: Synthetic oligonucleotide
guugggagugacugaagug

SEQ ID NO: 3219855 - RNA, 19 nt, Artificial Sequence
  Description of Artificial Sequence: Synthetic oligonucleotide
agcuggacccugcuuuggc

SEQ ID NO: 3219856 - RNA, 19 nt, Artificial Sequence
  Description of Artificial Sequence: Synthetic oligonucleotide
guagggagaggauuaagaa

SEQ ID NO: 3219857 - RNA, 19 nt, Artificial Sequence
  Description of Artificial Sequence: Synthetic oligonucleotide
cugcucagggcuuggagag

SEQ ID NO: 3219858 - RNA, 19 nt, Artificial Sequence
  Description of Artificial Sequence: Synthetic oligonucleotide
ugagcuauuugggccaggc

SEQ ID NO: 3219859 - RNA, 19 nt, Artificial Sequence
  Description of Artificial Sequence: Synthetic oligonucleotide
gaaccuggcugcgaagacg

SEQ ID NO: 3219860 - RNA, 19 nt, Artificial Sequence
  Description of Artificial Sequence: Synthetic oligonucleotide
agagacaggagcacaagca

SEQ ID NO: 3219861 - RNA, 19 nt, Artificial Sequence
  Description of Artificial Sequence: Synthetic oligonucleotide
uggaugaaucuuuggccug

SEQ ID NO: 3219862 - RNA, 19 nt, Artificial Sequence
  Description of Artificial Sequence: Synthetic oligonucleotide
ugcauguuggcugcaggag

SEQ ID NO: 3219863 - RNA, 19 nt, Artificial Sequence
  Description of Artificial Sequence: Synthetic oligonucleotide
cauuuggggugucugcacc

SEQ ID NO: 3219864 - RNA, 19 nt, Artificial Sequence
  Description of Artificial Sequence: Synthetic oligonucleotide
aggagcacaagcaggugac

SEQ ID NO: 3219865 - RNA, 19 nt, Artificial Sequence
  Description of Artificial Sequence: Synthetic oligonucleotide
gaugccaaggagagacagg

SEQ ID NO: 3219866 - RNA, 19 nt, Artificial Sequence
  Description of Artificial Sequence: Synthetic oligonucleotide
ucuccuuccugcucagggc

SEQ ID NO: 3219867 - RNA, 19 nt, Artificial Sequence
  Description of Artificial Sequence: Synthetic oligonucleotide
uggcuugagcuauuugggc

SEQ ID NO: 3219868 - RNA, 19 nt, Artificial Sequence
  Description of Artificial Sequence: Synthetic oligonucleotide
ucagggcuuggagagcugg

SEQ ID NO: 3219869 - RNA, 19 nt, Artificial Sequence
  Description of Artificial Sequence: Synthetic oligonucleotide
augccaaggagagacagga

SEQ ID NO: 3219870 - RNA, 19 nt, Artificial Sequence
  Description of Artificial Sequence: Synthetic oligonucleotide
uggccucccagacccaggg

SEQ ID NO: 3219871 - RNA, 19 nt, Artificial Sequence
  Description of Artificial Sequence: Synthetic oligonucleotide
agcugcacauuccagccca

SEQ ID NO: 3219872 - RNA, 19 nt, Artificial Sequence
  Description of Artificial Sequence: Synthetic oligonucleotide
agaaacucuccuuccugcu

SEQ ID NO: 3219873 - RNA, 19 nt, Artificial Sequence
  Description of Artificial Sequence: Synthetic oligonucleotide
ggugucugcaccucugucc

SEQ ID NO: 3219874 - RNA, 19 nt, Artificial Sequence
  Description of Artificial Sequence: Synthetic oligonucleotide
ucucgcuccaguccauucu

SEQ ID NO: 3219875 - RNA, 19 nt, Artificial Sequence
  Description of Artificial Sequence: Synthetic oligonucleotide
guuacagagggcugcucug

SEQ ID NO: 3219876 - RNA, 19 nt, Artificial Sequence
  Description of Artificial Sequence: Synthetic oligonucleotide
cuggcugcgaagacgguug

SEQ ID NO: 3219877 - RNA, 19 nt, Artificial Sequence
  Description of Artificial Sequence: Synthetic oligonucleotide
gccaaggagagacaggagc

SEQ ID NO: 3219878 - RNA, 19 nt, Artificial Sequence
  Description of Artificial Sequence: Synthetic oligonucleotide
uuccagcccacuugugggg

SEQ ID NO: 3219879 - RNA, 19 nt, Artificial Sequence
  Description of Artificial Sequence: Synthetic oligonucleotide
uguccaggugaugccaagg

SEQ ID NO: 3219880 - RNA, 19 nt, Artificial Sequence
  Description of Artificial Sequence: Synthetic oligonucleotide
agacaggagcacaagcagg

SEQ ID NO: 3219881 - RNA, 19 nt, Artificial Sequence
  Description of Artificial Sequence: Synthetic oligonucleotide
ugaccaagccaucggcucu

SEQ ID NO: 3219882 - RNA, 19 nt, Artificial Sequence
  Description of Artificial Sequence: Synthetic oligonucleotide
uugugggguaugccguggg

SEQ ID NO: 3219883 - RNA, 19 nt, Artificial Sequence
  Description of Artificial Sequence: Synthetic oligonucleotide
ggcuugagcuauuugggcc

SEQ ID NO: 3219884 - RNA, 19 nt, Artificial Sequence
  Description of Artificial Sequence: Synthetic oligonucleotide
uccugcucagggcuuggag

SEQ ID NO: 3219885 - RNA, 19 nt, Artificial Sequence
  Description of Artificial Sequence: Synthetic oligonucleotide
uggugcugcaggcauggcu

SEQ ID NO: 3219886 - RNA, 19 nt, Artificial Sequence
  Description of Artificial Sequence: Synthetic oligonucleotide
aaggagagacaggagcaca

SEQ ID NO: 3219887 - RNA, 19 nt, Artificial Sequence
  Description of Artificial Sequence: Synthetic oligonucleotide
gaaacucuccuuccugcuc

SEQ ID NO: 3219888 - RNA, 19 nt, Artificial Sequence
  Description of Artificial Sequence: Synthetic oligonucleotide
ugggguaugccguggggca

SEQ ID NO: 3219889 - RNA, 19 nt, Artificial Sequence
  Description of Artificial Sequence: Synthetic oligonucleotide
gagaggauuaagaaacucu

SEQ ID NO: 3219890 - RNA, 19 nt, Artificial Sequence
  Description of Artificial Sequence: Synthetic oligonucleotide
ggcugcaggaggcugaacc

SEQ ID NO: 3219891 - RNA, 19 nt, Artificial Sequence
  Description of Artificial Sequence: Synthetic oligonucleotide
auuaauaugaagcaaaaca

SEQ ID NO: 3219892 - RNA, 19 nt, Artificial Sequence
  Description of Artificial Sequence: Synthetic oligonucleotide
uuaauaugaagcaaaacac

SEQ ID NO: 3219893 - RNA, 19 nt, Artificial Sequence
  Description of Artificial Sequence: Synthetic oligonucleotide
aaaggugauuaacuaauac

SEQ ID NO: 3219894 - RNA, 19 nt, Artificial Sequence
  Description of Artificial Sequence: Synthetic oligonucleotide
aauugguagguuuugagcu

SEQ ID NO: 3219895 - RNA, 19 nt, Artificial Sequence
  Description of Artificial Sequence: Synthetic oligonucleotide
aucauugucaaucacuggg

SEQ ID NO: 3219896 - RNA, 19 nt, Artificial Sequence
  Description of Artificial Sequence: Synthetic oligonucleotide
ucugcauugccucagaucu

SEQ ID NO: 3219897 - RNA, 19 nt, Artificial Sequence
  Description of Artificial Sequence: Synthetic oligonucleotide
uagguuuugagcuagaaaa

SEQ ID NO: 3219898 - RNA, 19 nt, Artificial Sequence
  Description of Artificial Sequence: Synthetic oligonucleotide
gauuaacuaauacaaauca

SEQ ID NO: 3219899 - RNA, 19 nt, Artificial Sequence
  Description of Artificial Sequence: Synthetic oligonucleotide
aaauggagagagugaaagc

SEQ ID NO: 3219900 - RNA, 19 nt, Artificial Sequence
  Description of Artificial Sequence: Synthetic oligonucleotide
ugaucuuuuacuuauuacu

SEQ ID NO: 3219901 - RNA, 19 nt, Artificial Sequence
  Description of Artificial Sequence: Synthetic oligonucleotide
acuaaauucucaugagccc

SEQ ID NO: 3219902 - RNA, 19 nt, Artificial Sequence
  Description of Artificial Sequence: Synthetic oligonucleotide
aaggugauuaacuaauaca

SEQ ID NO: 3219903 - RNA, 19 nt, Artificial Sequence
  Description of Artificial Sequence: Synthetic oligonucleotide
uuuuacuuauuacugugcc

SEQ ID NO: 3219904 - RNA, 19 nt, Artificial Sequence
  Description of Artificial Sequence: Synthetic oligonucleotide
agaaaauuuagcugagcac

SEQ ID NO: 3219905 - RNA, 19 nt, Artificial Sequence
  Description of Artificial Sequence: Synthetic oligonucleotide
aauuaauaugaagcaaaac

SEQ ID NO: 3219906 - RNA, 19 nt, Artificial Sequence
  Description of Artificial Sequence: Synthetic oligonucleotide
uaugaagcaaaacaccuga

SEQ ID NO: 3219907 - RNA, 19 nt, Artificial Sequence
  Description of Artificial Sequence: Synthetic oligonucleotide
uaaauggagagagugaaag

SEQ ID NO: 3219908 - RNA, 19 nt, Artificial Sequence
  Description of Artificial Sequence: Synthetic oligonucleotide
acaaaugugagcugagggg

SEQ ID NO: 3219909 - RNA, 19 nt, Artificial Sequence
  Description of Artificial Sequence: Synthetic oligonucleotide
ugaaugauuucauucauuc

SEQ ID NO: 3219910 - RNA, 19 nt, Artificial Sequence
  Description of Artificial Sequence: Synthetic oligonucleotide
agugcugcuagcuucuggc

SEQ ID NO: 3219911 - RNA, 19 nt, Artificial Sequence
  Description of Artificial Sequence: Synthetic oligonucleotide
auaaugucuguguaauugg

SEQ ID NO: 3219912 - RNA, 19 nt, Artificial Sequence
  Description of Artificial Sequence: Synthetic oligonucleotide
auuacugugccuaacagag

SEQ ID NO: 3219913 - RNA, 19 nt, Artificial Sequence
  Description of Artificial Sequence: Synthetic oligonucleotide
gacuaaauucucaugagcc

SEQ ID NO: 3219914 - RNA, 19 nt, Artificial Sequence
  Description of Artificial Sequence: Synthetic oligonucleotide
uguguaaauggagagagug

SEQ ID NO: 3219915 - RNA, 19 nt, Artificial Sequence
  Description of Artificial Sequence: Synthetic oligonucleotide
ucuuuuacuuauuacugug

SEQ ID NO: 3219916 - RNA, 19 nt, Artificial Sequence
  Description of Artificial Sequence: Synthetic oligonucleotide
acuuguucccuucugagag

SEQ ID NO: 3219917 - RNA, 19 nt, Artificial Sequence
  Description of Artificial Sequence: Synthetic oligonucleotide
uucuucuagacuaaauucu

SEQ ID NO: 3219918 - RNA, 19 nt, Artificial Sequence
  Description of Artificial Sequence: Synthetic oligonucleotide
uagacagucccacagaccu

SEQ ID NO: 3219919 - RNA, 19 nt, Artificial Sequence
  Description of Artificial Sequence: Synthetic oligonucleotide
ucauucauuccuuuguuca

SEQ ID NO: 3219920 - RNA, 19 nt, Artificial Sequence
  Description of Artificial Sequence: Synthetic oligonucleotide
aauuuagcugagcacuuug

SEQ ID NO: 3219921 - RNA, 19 nt, Artificial Sequence
  Description of Artificial Sequence: Synthetic oligonucleotide
auuugugccaaugaaaucu

SEQ ID NO: 3219922 - RNA, 19 nt, Artificial Sequence
  Description of Artificial Sequence: Synthetic oligonucleotide
acuugaaugauuucauuca

SEQ ID NO: 3219923 - RNA, 19 nt, Artificial Sequence
  Description of Artificial Sequence: Synthetic oligonucleotide
ucaugcauucacuuguucc

SEQ ID NO: 3219924 - RNA, 19 nt, Artificial Sequence
  Description of Artificial Sequence: Synthetic oligonucleotide
cuagcuucuggcaaugucc

SEQ ID NO: 3219925 - RNA, 19 nt, Artificial Sequence
  Description of Artificial Sequence: Synthetic oligonucleotide
augucuguguaauugguag

SEQ ID NO: 3219926 - RNA, 19 nt, Artificial Sequence
  Description of Artificial Sequence: Synthetic oligonucleotide
uugagcuagaaaauuuagc

SEQ ID NO: 3219927 - RNA, 19 nt, Artificial Sequence
  Description of Artificial Sequence: Synthetic oligonucleotide
uggacugagagauagugcu

SEQ ID NO: 3219928 - RNA, 19 nt, Artificial Sequence
  Description of Artificial Sequence: Synthetic oligonucleotide
aguguugauggacucuggc

SEQ ID NO: 3219929 - RNA, 19 nt, Artificial Sequence
  Description of Artificial Sequence: Synthetic oligonucleotide
acuguguaaauggagagag

SEQ ID NO: 3219930 - RNA, 19 nt, Artificial Sequence
  Description of Artificial Sequence: Synthetic oligonucleotide
uuuaauuaauaugaagcaa

SEQ ID NO: 3219931 - RNA, 19 nt, Artificial Sequence
  Description of Artificial Sequence: Synthetic oligonucleotide
caugcauucacuuguuccc

SEQ ID NO: 3219932 - RNA, 19 nt, Artificial Sequence
  Description of Artificial Sequence: Synthetic oligonucleotide
aucaacaaaaugaaccaac

SEQ ID NO: 3219933 - RNA, 19 nt, Artificial Sequence
  Description of Artificial Sequence: Synthetic oligonucleotide
gacccuggaguguugaugg

SEQ ID NO: 3219934 - RNA, 19 nt, Artificial Sequence
  Description of Artificial Sequence: Synthetic oligonucleotide
ucaaauaaugucuguguaa

SEQ ID NO: 3219935 - RNA, 19 nt, Artificial Sequence
  Description of Artificial Sequence: Synthetic oligonucleotide
aaugugagcugaggggucc

SEQ ID NO: 3219936 - RNA, 19 nt, Artificial Sequence
  Description of Artificial Sequence: Synthetic oligonucleotide
uaacagagcaugcacuagc

SEQ ID NO: 3219937 - RNA, 19 nt, Artificial Sequence
  Description of Artificial Sequence: Synthetic oligonucleotide
agcugucaugguuugaaac

SEQ ID NO: 3219938 - RNA, 19 nt, Artificial Sequence
  Description of Artificial Sequence: Synthetic oligonucleotide
accucugacaaaugugagc

SEQ ID NO: 3219939 - RNA, 19 nt, Artificial Sequence
  Description of Artificial Sequence: Synthetic oligonucleotide
gaagcaaaacaccugaucu

SEQ ID NO: 3219940 - RNA, 19 nt, Artificial Sequence
  Description of Artificial Sequence: Synthetic oligonucleotide
uagacuaaauucucaugag

SEQ ID NO: 3219941 - RNA, 19 nt, Artificial Sequence
  Description of Artificial Sequence: Synthetic oligonucleotide
uguaaauggagagagugaa

SEQ ID NO: 3219942 - RNA, 19 nt, Artificial Sequence
  Description of Artificial Sequence: Synthetic oligonucleotide
uuucuuggguaacaggugu

SEQ ID NO: 3219943 - RNA, 19 nt, Artificial Sequence
  Description of Artificial Sequence: Synthetic oligonucleotide
uauuacugugccuaacaga

SEQ ID NO: 3219944 - RNA, 19 nt, Artificial Sequence
  Description of Artificial Sequence: Synthetic oligonucleotide
gaaaauuuagcugagcacu

SEQ ID NO: 3219945 - RNA, 19 nt, Artificial Sequence
  Description of Artificial Sequence: Synthetic oligonucleotide
uucugagagcaaaaccagg

SEQ ID NO: 3219946 - RNA, 19 nt, Artificial Sequence
  Description of Artificial Sequence: Synthetic oligonucleotide
gacacugucacagucaaca

SEQ ID NO: 3219947 - RNA, 19 nt, Artificial Sequence
  Description of Artificial Sequence: Synthetic oligonucleotide
guaauugguagguuuugag

SEQ ID NO: 3219948 - RNA, 19 nt, Artificial Sequence
  Description of Artificial Sequence: Synthetic oligonucleotide
uuccuuuguucauucaugc

SEQ ID NO: 3219949 - RNA, 19 nt, Artificial Sequence
  Description of Artificial Sequence: Synthetic oligonucleotide
ucuagacuaaauucucaug

SEQ ID NO: 3219950 - RNA, 19 nt, Artificial Sequence
  Description of Artificial Sequence: Synthetic oligonucleotide
ugaagcaaaacaccugauc

SEQ ID NO: 3219951 - RNA, 19 nt, Artificial Sequence
  Description of Artificial Sequence: Synthetic oligonucleotide
gagcccuuuaauuaauaug

SEQ ID NO: 3219952 - RNA, 19 nt, Artificial Sequence
  Description of Artificial Sequence: Synthetic oligonucleotide
gaauugauagcaggauugg

SEQ ID NO: 3219953 - RNA, 19 nt, Artificial Sequence
  Description of Artificial Sequence: Synthetic oligonucleotide
uugauagcaggauugggaa

SEQ ID NO: 3219954 - RNA, 19 nt, Artificial Sequence
  Description of Artificial Sequence: Synthetic oligonucleotide
ucugacaaaugugagcuga

SEQ ID NO: 3219955 - RNA, 19 nt, Artificial Sequence
  Description of Artificial Sequence: Synthetic oligonucleotide
ucauguguaucauugucaa

SEQ ID NO: 3219956 - RNA, 19 nt, Artificial Sequence
  Description of Artificial Sequence: Synthetic oligonucleotide
ucauucaugcauucacuug

SEQ ID NO: 3219957 - RNA, 19 nt, Artificial Sequence
  Description of Artificial Sequence: Synthetic oligonucleotide
uccacggacacugucacag

SEQ ID NO: 3219958 - RNA, 19 nt, Artificial Sequence
  Description of Artificial Sequence: Synthetic oligonucleotide
uaucauugucaaucacugg

SEQ ID NO: 3219959 - RNA, 19 nt, Artificial Sequence
  Description of Artificial Sequence: Synthetic oligonucleotide
cuucaaagacccuggagug

SEQ ID NO: 3219960 - RNA, 19 nt, Artificial Sequence
  Description of Artificial Sequence: Synthetic oligonucleotide
cuucugagagcaaaaccag

SEQ ID NO: 3219961 - RNA, 19 nt, Artificial Sequence
  Description of Artificial Sequence: Synthetic oligonucleotide
uguguaauugguagguuuu

SEQ ID NO: 3219962 - RNA, 19 nt, Artificial Sequence
  Description of Artificial Sequence: Synthetic oligonucleotide
aggugauuaacuaauacaa

SEQ ID NO: 3219963 - RNA, 19 nt, Artificial Sequence
  Description of Artificial Sequence: Synthetic oligonucleotide
ugccaaugaaaucucuugu

SEQ ID NO: 3219964 - RNA, 19 nt, Artificial Sequence
  Description of Artificial Sequence: Synthetic oligonucleotide
gauagcaggauugggaaca

SEQ ID NO: 3219965 - RNA, 19 nt, Artificial Sequence
  Description of Artificial Sequence: Synthetic oligonucleotide
uagcuguucaaauaauguc

SEQ ID NO: 3219966 - RNA, 19 nt, Artificial Sequence
  Description of Artificial Sequence: Synthetic oligonucleotide
uaaugucuguguaauuggu

SEQ ID NO: 3219967 - RNA, 19 nt, Artificial Sequence
  Description of Artificial Sequence: Synthetic oligonucleotide
ucuggcccuucacaggugg

SEQ ID NO: 3219968 - RNA, 19 nt, Artificial Sequence
  Description of Artificial Sequence: Synthetic oligonucleotide
cuuagacagucccacagac

SEQ ID NO: 3219969 - RNA, 19 nt, Artificial Sequence
  Description of Artificial Sequence: Synthetic oligonucleotide
uucuagacuaaauucucau

SEQ ID NO: 3219970 - RNA, 19 nt, Artificial Sequence
  Description of Artificial Sequence: Synthetic oligonucleotide
auuuagcugagcacuuugc

SEQ ID NO: 3219971 - RNA, 19 nt, Artificial Sequence
  Description of Artificial Sequence: Synthetic oligonucleotide
agcuguucaaauaaugucu

SEQ ID NO: 3219972 - RNA, 19 nt, Artificial Sequence
  Description of Artificial Sequence: Synthetic oligonucleotide
uuagacagucccacagacc

SEQ ID NO: 3219973 - RNA, 19 nt, Artificial Sequence
  Description of Artificial Sequence: Synthetic oligonucleotide
auugauagcaggauuggga

SEQ ID NO: 3219974 - RNA, 19 nt, Artificial Sequence
  Description of Artificial Sequence: Synthetic oligonucleotide
ucccaucugaauuuccuca

SEQ ID NO: 3219975 - RNA, 19 nt, Artificial Sequence
  Description of Artificial Sequence: Synthetic oligonucleotide
aaaucucuugucccaucug

SEQ ID NO: 3219976 - RNA, 19 nt, Artificial Sequence
  Description of Artificial Sequence: Synthetic oligonucleotide
cugaucuuuuacuuauuac

SEQ ID NO: 3219977 - RNA, 19 nt, Artificial Sequence
  Description of Artificial Sequence: Synthetic oligonucleotide
cuccucaucuuuaaggguc

SEQ ID NO: 3219978 - RNA, 19 nt, Artificial Sequence
  Description of Artificial Sequence: Synthetic oligonucleotide
agagggguaggcuggccgc

SEQ ID NO: 3219979 - RNA, 19 nt, Artificial Sequence
  Description of Artificial Sequence: Synthetic oligonucleotide
uagcuucuggcaauguccc

SEQ ID NO: 3219980 - RNA, 19 nt, Artificial Sequence
  Description of Artificial Sequence: Synthetic oligonucleotide
ucaugagcccuuuaauuaa

SEQ ID NO: 3219981 - RNA, 19 nt, Artificial Sequence
  Description of Artificial Sequence: Synthetic oligonucleotide
aguggacugagagauagug

SEQ ID NO: 3219982 - RNA, 19 nt, Artificial Sequence
  Description of Artificial Sequence: Synthetic oligonucleotide
acaguuguccugcuggcug

SEQ ID NO: 3219983 - RNA, 19 nt, Artificial Sequence
  Description of Artificial Sequence: Synthetic oligonucleotide
ugucccaucugaauuuccu

SEQ ID NO: 3219984 - RNA, 19 nt, Artificial Sequence
  Description of Artificial Sequence: Synthetic oligonucleotide
ugugccuaacagagcaugc

SEQ ID NO: 3219985 - RNA, 19 nt, Artificial Sequence
  Description of Artificial Sequence: Synthetic oligonucleotide
ucucaugagcccuuuaauu

SEQ ID NO: 3219986 - RNA, 19 nt, Artificial Sequence
  Description of Artificial Sequence: Synthetic oligonucleotide
aagcaaaacaccugaucuu

SEQ ID NO: 3219987 - RNA, 19 nt, Artificial Sequence
  Description of Artificial Sequence: Synthetic oligonucleotide
ggaauugauagcaggauug

SEQ ID NO: 3219988 - RNA, 19 nt, Artificial Sequence
  Description of Artificial Sequence: Synthetic oligonucleotide
aaugaaccaacaaggaauu

SEQ ID NO: 3219989 - RNA, 19 nt, Artificial Sequence
  Description of Artificial Sequence: Synthetic oligonucleotide
ugacaaaugugagcugagg

SEQ ID NO: 3219990 - RNA, 19 nt, Artificial Sequence
  Description of Artificial Sequence: Synthetic oligonucleotide
gaucugccagccaugauug

SEQ ID NO: 3219991 - RNA, 19 nt, Artificial Sequence
  Description of Artificial Sequence: Synthetic oligonucleotide
aaaaugagaguuaagaacc

SEQ ID NO: 3219992 - RNA, 19 nt, Artificial Sequence
  Description of Artificial Sequence: Synthetic oligonucleotide
gaaacuuuuauauaggcug

SEQ ID NO: 3219993 - RNA, 19 nt, Artificial Sequence
  Description of Artificial Sequence: Synthetic oligonucleotide
aagaauaauaucuaagaca

SEQ ID NO: 3219994 - RNA, 19 nt, Artificial Sequence
  Description of Artificial Sequence: Synthetic oligonucleotide
ucuguauuaaauaaaauaa

SEQ ID NO: 3219995 - RNA, 19 nt, Artificial Sequence
  Description of Artificial Sequence: Synthetic oligonucleotide
aagaaacuuuuauauaggc

SEQ ID NO: 3219996 - RNA, 19 nt, Artificial Sequence
  Description of Artificial Sequence: Synthetic oligonucleotide
acaguaauaagucaucuac

SEQ ID NO: 3219997 - RNA, 19 nt, Artificial Sequence
  Description of Artificial Sequence: Synthetic oligonucleotide
aaaauuuagcagcuuaguc

SEQ ID NO: 3219998 - RNA, 19 nt, Artificial Sequence
  Description of Artificial Sequence: Synthetic oligonucleotide
aucuagauaacuuaggcag

SEQ ID NO: 3219999 - RNA, 19 nt, Artificial Sequence
  Description of Artificial Sequence: Synthetic oligonucleotide
aauuuaucaacuucaguug

SEQ ID NO: 3220000 - RNA, 19 nt, Artificial Sequence
  Description of Artificial Sequence: Synthetic oligonucleotide
cacaacacgacauaaaagg

SEQ ID NO: 3220001 - RNA, 19 nt, Artificial Sequence
  Description of Artificial Sequence: Synthetic oligonucleotide
aaucugucaauucuguuuc

SEQ ID NO: 3220002 - RNA, 19 nt, Artificial Sequence
  Description of Artificial Sequence: Synthetic oligonucleotide
uaagacagaagacacuugg

SEQ ID NO: 3220003 - RNA, 19 nt, Artificial Sequence
  Description of Artificial Sequence: Synthetic oligonucleotide
aaucaaaaguucuuaagca

SEQ ID NO: 3220004 - RNA, 19 nt, Artificial Sequence
  Description of Artificial Sequence: Synthetic oligonucleotide
agaucuagauaacuuaggc

SEQ ID NO: 3220005 - RNA, 19 nt, Artificial Sequence
  Description of Artificial Sequence: Synthetic oligonucleotide
aauaauaucuaagacagaa

SEQ ID NO: 3220006 - RNA, 19 nt, Artificial Sequence
  Description of Artificial Sequence: Synthetic oligonucleotide
aaaacuucaccaaauguac

SEQ ID NO: 3220007 - RNA, 19 nt, Artificial Sequence
  Description of Artificial Sequence: Synthetic oligonucleotide
acaaauuaagaauaauauc

SEQ ID NO: 3220008 - RNA, 19 nt, Artificial Sequence
  Description of Artificial Sequence: Synthetic oligonucleotide
aaaguguaugcucuucccc

SEQ ID NO: 3220009 - RNA, 19 nt, Artificial Sequence
  Description of Artificial Sequence: Synthetic oligonucleotide
aaaugagggaccauuaugg

SEQ ID NO: 3220010 - RNA, 19 nt, Artificial Sequence
  Description of Artificial Sequence: Synthetic oligonucleotide
ugguuuuaaguuaugaagc

SEQ ID NO: 3220011 - RNA, 19 nt, Artificial Sequence
  Description of Artificial Sequence: Synthetic oligonucleotide
auagccaaaauccugucac

SEQ ID NO: 3220012 - RNA, 19 nt, Artificial Sequence
  Description of Artificial Sequence: Synthetic oligonucleotide
auuccaauaaauuaccucu

SEQ ID NO: 3220013 - RNA, 19 nt, Artificial Sequence
  Description of Artificial Sequence: Synthetic oligonucleotide
aguaguauaccuuaguacu

SEQ ID NO: 3220014 - RNA, 19 nt, Artificial Sequence
  Description of Artificial Sequence: Synthetic oligonucleotide
uucaaagaaacuuuuauau

SEQ ID NO: 3220015 - RNA, 19 nt, Artificial Sequence
  Description of Artificial Sequence: Synthetic oligonucleotide
uguauugucagaaaaggaa

SEQ ID NO: 3220016 - RNA, 19 nt, Artificial Sequence
  Description of Artificial Sequence: Synthetic oligonucleotide
auuauggaaguauaucugg

SEQ ID NO: 3220017 - RNA, 19 nt, Artificial Sequence
  Description of Artificial Sequence: Synthetic oligonucleotide
uauaccuuaguacuaaaac

SEQ ID NO: 3220018 - RNA, 19 nt, Artificial Sequence
  Description of Artificial Sequence: Synthetic oligonucleotide
uauagaacauuuuaaauua

SEQ ID NO: 3220019 - RNA, 19 nt, Artificial Sequence
  Description of Artificial Sequence: Synthetic oligonucleotide
uauuaaauaaaauaacauu

SEQ ID NO: 3220020 - RNA, 19 nt, Artificial Sequence
  Description of Artificial Sequence: Synthetic oligonucleotide
aaguauaucucagaugacg

SEQ ID NO: 3220021 - RNA, 19 nt, Artificial Sequence
  Description of Artificial Sequence: Synthetic oligonucleotide
cuuuuauauaggcugaggg

SEQ ID NO: 3220022 - RNA, 19 nt, Artificial Sequence
  Description of Artificial Sequence: Synthetic oligonucleotide
aaauauauguucaagagua

SEQ ID NO: 3220023 - RNA, 19 nt, Artificial Sequence
  Description of Artificial Sequence: Synthetic oligonucleotide
uuaagaaccaugacaaaug

SEQ ID NO: 3220024 - RNA, 19 nt, Artificial Sequence
  Description of Artificial Sequence: Synthetic oligonucleotide
ugagggaccauuauggaag

SEQ ID NO: 3220025 - RNA, 19 nt, Artificial Sequence
  Description of Artificial Sequence: Synthetic oligonucleotide
uuuaaaguauaucucagau

SEQ ID NO: 3220026 - RNA, 19 nt, Artificial Sequence
  Description of Artificial Sequence: Synthetic oligonucleotide
ucacuguggaauaugaaag

SEQ ID NO: 3220027 - RNA, 19 nt, Artificial Sequence
  Description of Artificial Sequence: Synthetic oligonucleotide
agugguaugugucagcuuc

SEQ ID NO: 3220028 - RNA, 19 nt, Artificial Sequence
  Description of Artificial Sequence: Synthetic oligonucleotide
uaagaauaauaucuaagac

SEQ ID NO: 3220029 - RNA, 19 nt, Artificial Sequence
  Description of Artificial Sequence: Synthetic oligonucleotide
uaugaagcaaaauaaaaua

SEQ ID NO: 3220030 - RNA, 19 nt, Artificial Sequence
  Description of Artificial Sequence: Synthetic oligonucleotide
ugucagaaaaggaauauac

SEQ ID NO: 3220031 - RNA, 19 nt, Artificial Sequence
  Description of Artificial Sequence: Synthetic oligonucleotide
uuaugaagcaaaauaaaau

SEQ ID NO: 3220032 - RNA, 19 nt, Artificial Sequence
  Description of Artificial Sequence: Synthetic oligonucleotide
agaaccaugacaaaugagg

SEQ ID NO: 3220033 - RNA, 19 nt, Artificial Sequence
  Description of Artificial Sequence: Synthetic oligonucleotide
aaaauuaugaguauucaau

SEQ ID NO: 3220034 - RNA, 19 nt, Artificial Sequence
  Description of Artificial Sequence: Synthetic oligonucleotide
caaauuaagaauaauaucu

SEQ ID NO: 3220035 - RNA, 19 nt, Artificial Sequence
  Description of Artificial Sequence: Synthetic oligonucleotide
uccauuaccuuucugagac

SEQ ID NO: 3220036 - RNA, 19 nt, Artificial Sequence
  Description of Artificial Sequence: Synthetic oligonucleotide
aacuuaggcagucagcaag

SEQ ID NO: 3220037 - RNA, 19 nt, Artificial Sequence
  Description of Artificial Sequence: Synthetic oligonucleotide
agaguuaagaaccaugaca

SEQ ID NO: 3220038 - RNA, 19 nt, Artificial Sequence
  Description of Artificial Sequence: Synthetic oligonucleotide
uuuuauauaggcugagggc

SEQ ID NO: 3220039 - RNA, 19 nt, Artificial Sequence
  Description of Artificial Sequence: Synthetic oligonucleotide
uuuauauaggcugagggca

SEQ ID NO: 3220040 - RNA, 19 nt, Artificial Sequence
  Description of Artificial Sequence: Synthetic oligonucleotide
aauagaaccaaugggguug

SEQ ID NO: 3220041 - RNA, 19 nt, Artificial Sequence
  Description of Artificial Sequence: Synthetic oligonucleotide
caugguauuaucacugugg

SEQ ID NO: 3220042 - RNA, 19 nt, Artificial Sequence
  Description of Artificial Sequence: Synthetic oligonucleotide
ugaauuuaugacaugguau

SEQ ID NO: 3220043 - RNA, 19 nt, Artificial Sequence
  Description of Artificial Sequence: Synthetic oligonucleotide
agaaagucacuucuaaguc

SEQ ID NO: 3220044 - RNA, 19 nt, Artificial Sequence
  Description of Artificial Sequence: Synthetic oligonucleotide
ugagaguuaagaaccauga

SEQ ID NO: 3220045 - RNA, 19 nt, Artificial Sequence
  Description of Artificial Sequence: Synthetic oligonucleotide
aauuaacaguaauaaguca

SEQ ID NO: 3220046 - RNA, 19 nt, Artificial Sequence
  Description of Artificial Sequence: Synthetic oligonucleotide
aauuuagcagcuuagucua

SEQ ID NO: 3220047 - RNA, 19 nt, Artificial Sequence
  Description of Artificial Sequence: Synthetic oligonucleotide
uugugaaguaguaaaauuc

SEQ ID NO: 3220048 - RNA, 19 nt, Artificial Sequence
  Description of Artificial Sequence: Synthetic oligonucleotide
uggaauaugaaaguguaug

SEQ ID NO: 3220049 - RNA, 19 nt, Artificial Sequence
  Description of Artificial Sequence: Synthetic oligonucleotide
uguacaacauaacucugcc

SEQ ID NO: 3220050 - RNA, 19 nt, Artificial Sequence
  Description of Artificial Sequence: Synthetic oligonucleotide
aaauagaaacguccaguag

SEQ ID NO: 3220051 - RNA, 19 nt, Artificial Sequence
  Description of Artificial Sequence: Synthetic oligonucleotide
aucuguauuaaauaaaaua

SEQ ID NO: 3220052 - RNA, 19 nt, Artificial Sequence
  Description of Artificial Sequence: Synthetic oligonucleotide
uuauaaacacgccuaucag

SEQ ID NO: 3220053 - RNA, 19 nt, Artificial Sequence
  Description of Artificial Sequence: Synthetic oligonucleotide
uaagucaucuacaucagaa

SEQ ID NO: 3220054 - RNA, 19 nt, Artificial Sequence
  Description of Artificial Sequence: Synthetic oligonucleotide
aaaauagaaacguccagua

SEQ ID NO: 3220055 - RNA, 19 nt, Artificial Sequence
  Description of Artificial Sequence: Synthetic oligonucleotide
uucauuccaauaaauuacc

SEQ ID NO: 3220056 - RNA, 19 nt, Artificial Sequence
  Description of Artificial Sequence: Synthetic oligonucleotide
ucagaaaaggaauauacuu

SEQ ID NO: 3220057 - RNA, 19 nt, Artificial Sequence
  Description of Artificial Sequence: Synthetic oligonucleotide
ucauuugugaaguaguaaa

SEQ ID NO: 3220058 - RNA, 19 nt, Artificial Sequence
  Description of Artificial Sequence: Synthetic oligonucleotide
uguucaagaguauaaacau

SEQ ID NO: 3220059 - RNA, 19 nt, Artificial Sequence
  Description of Artificial Sequence: Synthetic oligonucleotide
uauaaacacgccuaucagc

SEQ ID NO: 3220060 - RNA, 19 nt, Artificial Sequence
  Description of Artificial Sequence: Synthetic oligonucleotide
uuaaaguauaucucagaug

SEQ ID NO: 3220061 - RNA, 19 nt, Artificial Sequence
  Description of Artificial Sequence: Synthetic oligonucleotide
guuguauugucagaaaagg

SEQ ID NO: 3220062 - RNA, 19 nt, Artificial Sequence
  Description of Artificial Sequence: Synthetic oligonucleotide
agucaucuacaucagaaag

SEQ ID NO: 3220063 - RNA, 19 nt, Artificial Sequence
  Description of Artificial Sequence: Synthetic oligonucleotide
acauaacucugccagacuc

SEQ ID NO: 3220064 - RNA, 19 nt, Artificial Sequence
  Description of Artificial Sequence: Synthetic oligonucleotide
uccaguucuuauaaacacg

SEQ ID NO: 3220065 - RNA, 19 nt, Artificial Sequence
  Description of Artificial Sequence: Synthetic oligonucleotide
ugugucagcuucaccaugg

SEQ ID NO: 3220066 - RNA, 19 nt, Artificial Sequence
  Description of Artificial Sequence: Synthetic oligonucleotide
cuguauuaaauaaaauaac

SEQ ID NO: 3220067 - RNA, 19 nt, Artificial Sequence
  Description of Artificial Sequence: Synthetic oligonucleotide
ucuguuucugguaaagugu

SEQ ID NO: 3220068 - RNA, 19 nt, Artificial Sequence
  Description of Artificial Sequence: Synthetic oligonucleotide
ucauucuucauuugugaag

SEQ ID NO: 3220069 - RNA, 19 nt, Artificial Sequence
  Description of Artificial Sequence: Synthetic oligonucleotide
ugaucugaauuuaugacau

SEQ ID NO: 3220070 - RNA, 19 nt, Artificial Sequence
  Description of Artificial Sequence: Synthetic oligonucleotide
uaggcagucagcaaguaga

SEQ ID NO: 3220071 - RNA, 19 nt, Artificial Sequence
  Description of Artificial Sequence: Synthetic oligonucleotide
uucuguuucugguaaagug

SEQ ID NO: 3220072 - RNA, 19 nt, Artificial Sequence
  Description of Artificial Sequence: Synthetic oligonucleotide
ugugaucugaauuuaugac

SEQ ID NO: 3220073 - RNA, 19 nt, Artificial Sequence
  Description of Artificial Sequence: Synthetic oligonucleotide
aaaucuguauuaaauaaaa

SEQ ID NO: 3220074 - RNA, 19 nt, Artificial Sequence
  Description of Artificial Sequence: Synthetic oligonucleotide
aguucauuccaauaaauua

SEQ ID NO: 3220075 - RNA, 19 nt, Artificial Sequence
  Description of Artificial Sequence: Synthetic oligonucleotide
auuuaaaauauaaauuaca

SEQ ID NO: 3220076 - RNA, 19 nt, Artificial Sequence
  Description of Artificial Sequence: Synthetic oligonucleotide
aguaauaagucaucuacau

SEQ ID NO: 3220077 - RNA, 19 nt, Artificial Sequence
  Description of Artificial Sequence: Synthetic oligonucleotide
ucaaaaguucuuaagcaau

SEQ ID NO: 3220078 - RNA, 19 nt, Artificial Sequence
  Description of Artificial Sequence: Synthetic oligonucleotide
uauucaauccauuaccuuu

SEQ ID NO: 3220079 - RNA, 19 nt, Artificial Sequence
  Description of Artificial Sequence: Synthetic oligonucleotide
guaugugucagcuucacca

SEQ ID NO: 3220080 - RNA, 19 nt, Artificial Sequence
  Description of Artificial Sequence: Synthetic oligonucleotide
uaaauuaccucuccaguuc

SEQ ID NO: 3220081 - RNA, 19 nt, Artificial Sequence
  Description of Artificial Sequence: Synthetic oligonucleotide
uauguucaagaguauaaac

SEQ ID NO: 3220082 - RNA, 19 nt, Artificial Sequence
  Description of Artificial Sequence: Synthetic oligonucleotide
aauccugucacaacacgac

SEQ ID NO: 3220083 - RNA, 19 nt, Artificial Sequence
  Description of Artificial Sequence: Synthetic oligonucleotide
cuuauaaacacgccuauca

SEQ ID NO: 3220084 - RNA, 19 nt, Artificial Sequence
  Description of Artificial Sequence: Synthetic oligonucleotide
acuuaguucauuccaauaa

SEQ ID NO: 3220085 - RNA, 19 nt, Artificial Sequence
  Description of Artificial Sequence: Synthetic oligonucleotide
ucacaacacgacauaaaag

SEQ ID NO: 3220086 - RNA, 19 nt, Artificial Sequence
  Description of Artificial Sequence: Synthetic oligonucleotide
aacuucaccaaauguacaa

SEQ ID NO: 3220087 - RNA, 19 nt, Artificial Sequence
  Description of Artificial Sequence: Synthetic oligonucleotide
aucagcacaaauuaagaau

SEQ ID NO: 3220088 - RNA, 19 nt, Artificial Sequence
  Description of Artificial Sequence: Synthetic oligonucleotide
uuaucacuguggaauauga

SEQ ID NO: 3220089 - RNA, 19 nt, Artificial Sequence
  Description of Artificial Sequence: Synthetic oligonucleotide
auaacaugugaucugaauu

SEQ ID NO: 3220090 - RNA, 19 nt, Artificial Sequence
  Description of Artificial Sequence: Synthetic oligonucleotide
aauucuguuucugguaaag

SEQ ID NO: 3220091 - RNA, 19 nt, Artificial Sequence
  Description of Artificial Sequence: Synthetic oligonucleotide
aaagcuuugauugagaaac

SEQ ID NO: 3220092 - RNA, 19 nt, Artificial Sequence
  Description of Artificial Sequence: Synthetic oligonucleotide
aaugagaaagcuuugauug

SEQ ID NO: 3220093 - RNA, 19 nt, Artificial Sequence
  Description of Artificial Sequence: Synthetic oligonucleotide
gaaaagaagaaugagaaag

SEQ ID NO: 3220094 - RNA, 19 nt, Artificial Sequence
  Description of Artificial Sequence: Synthetic oligonucleotide
ucaaaagccccuaagacag

SEQ ID NO: 3220095 - RNA, 19 nt, Artificial Sequence
  Description of Artificial Sequence: Synthetic oligonucleotide
aaaagaagaaugagaaagc

SEQ ID NO: 3220096 - RNA, 19 nt, Artificial Sequence
  Description of Artificial Sequence: Synthetic oligonucleotide
uuugugaaugagaagggag

SEQ ID NO: 3220097 - RNA, 19 nt, Artificial Sequence
  Description of Artificial Sequence: Synthetic oligonucleotide
uuccaaagcacucugcagg

SEQ ID NO: 3220098 - RNA, 19 nt, Artificial Sequence
  Description of Artificial Sequence: Synthetic oligonucleotide
ugauugagaaacuggagag

SEQ ID NO: 3220099 - RNA, 19 nt, Artificial Sequence
  Description of Artificial Sequence: Synthetic oligonucleotide
cauaaccugagucagacag

SEQ ID NO: 3220100 - RNA, 19 nt, Artificial Sequence
  Description of Artificial Sequence: Synthetic oligonucleotide
uugauugagaaacuggaga

SEQ ID NO: 3220101 - RNA, 19 nt, Artificial Sequence
  Description of Artificial Sequence: Synthetic oligonucleotide
cacuuugugaaugagaagg

SEQ ID NO: 3220102 - RNA, 19 nt, Artificial Sequence
  Description of Artificial Sequence: Synthetic oligonucleotide
accugagucagacagaguc

SEQ ID NO: 3220103 - RNA, 19 nt, Artificial Sequence
  Description of Artificial Sequence: Synthetic oligonucleotide
agaggaaacagacuaagcu

SEQ ID NO: 3220104 - RNA, 19 nt, Artificial Sequence
  Description of Artificial Sequence: Synthetic oligonucleotide
agaggcacgagauggaaac

SEQ ID NO: 3220105 - RNA, 19 nt, Artificial Sequence
  Description of Artificial Sequence: Synthetic oligonucleotide
uacuugacccucaaaagcc

SEQ ID NO: 3220106 - RNA, 19 nt, Artificial Sequence
  Description of Artificial Sequence: Synthetic oligonucleotide
aagccccuaagacagugcc

SEQ ID NO: 3220107 - RNA, 19 nt, Artificial Sequence
  Description of Artificial Sequence: Synthetic oligonucleotide
aagacagugccacuucuuc

SEQ ID NO: 3220108 - RNA, 19 nt, Artificial Sequence
  Description of Artificial Sequence: Synthetic oligonucleotide
uuugauugagaaacuggag

SEQ ID NO: 3220109 - RNA, 19 nt, Artificial Sequence
  Description of Artificial Sequence: Synthetic oligonucleotide
uccauaauuguccagggau

SEQ ID NO: 3220110 - RNA, 19 nt, Artificial Sequence
  Description of Artificial Sequence: Synthetic oligonucleotide
uugugaaugagaagggagc

SEQ ID NO: 3220111 - RNA, 19 nt, Artificial Sequence
  Description of Artificial Sequence: Synthetic oligonucleotide
aacuggagaggaaacagac

SEQ ID NO: 3220112 - RNA, 19 nt, Artificial Sequence
  Description of Artificial Sequence: Synthetic oligonucleotide
aaagaagaaugagaaagcu

SEQ ID NO: 3220113 - RNA, 19 nt, Artificial Sequence
  Description of Artificial Sequence: Synthetic oligonucleotide
auggaaaccaucuuccucu

SEQ ID NO: 3220114 - RNA, 19 nt, Artificial Sequence
  Description of Artificial Sequence: Synthetic oligonucleotide
uccuacuugacccucaaaa

SEQ ID NO: 3220115 - RNA, 19 nt, Artificial Sequence
  Description of Artificial Sequence: Synthetic oligonucleotide
auccuaaggguccagggac

SEQ ID NO: 3220116 - RNA, 19 nt, Artificial Sequence
  Description of Artificial Sequence: Synthetic oligonucleotide
agcggaaagaguccuuucc

SEQ ID NO: 3220117 - RNA, 19 nt, Artificial Sequence
  Description of Artificial Sequence: Synthetic oligonucleotide
uaaggguccagggacaugg

SEQ ID NO: 3220118 - RNA, 19 nt, Artificial Sequence
  Description of Artificial Sequence: Synthetic oligonucleotide
aauuguccagggauggagc

SEQ ID NO: 3220119 - RNA, 19 nt, Artificial Sequence
  Description of Artificial Sequence: Synthetic oligonucleotide
cuacuugacccucaaaagc

SEQ ID NO: 3220120 - RNA, 19 nt, Artificial Sequence
  Description of Artificial Sequence: Synthetic oligonucleotide
aaagaguccuuuccgggug

SEQ ID NO: 3220121 - RNA, 19 nt, Artificial Sequence
  Description of Artificial Sequence: Synthetic oligonucleotide
ucuuccaaagcacucugca

SEQ ID NO: 3220122 - RNA, 19 nt, Artificial Sequence
  Description of Artificial Sequence: Synthetic oligonucleotide
gaaacuggagaggaaacag

SEQ ID NO: 3220123 - RNA, 19 nt, Artificial Sequence
  Description of Artificial Sequence: Synthetic oligonucleotide
agaagggagcccuaucugg

SEQ ID NO: 3220124 - RNA, 19 nt, Artificial Sequence
  Description of Artificial Sequence: Synthetic oligonucleotide
ucucuaaccucccaguccu

SEQ ID NO: 3220125 - RNA, 19 nt, Artificial Sequence
  Description of Artificial Sequence: Synthetic oligonucleotide
uccuccauaauuguccagg

SEQ ID NO: 3220126 - RNA, 19 nt, Artificial Sequence
  Description of Artificial Sequence: Synthetic oligonucleotide
ugagaagggagcccuaucu

SEQ ID NO: 3220127 - RNA, 19 nt, Artificial Sequence
  Description of Artificial Sequence: Synthetic oligonucleotide
auauccuaaggguccaggg

SEQ ID NO: 3220128 - RNA, 19 nt, Artificial Sequence
  Description of Artificial Sequence: Synthetic oligonucleotide
ugggagaggcacgagaugg

SEQ ID NO: 3220129 - RNA, 19 nt, Artificial Sequence
  Description of Artificial Sequence: Synthetic oligonucleotide
agaagaaugagaaagcuuu

SEQ ID NO: 3220130 - RNA, 19 nt, Artificial Sequence
  Description of Artificial Sequence: Synthetic oligonucleotide
agacagugccacuucuucc

SEQ ID NO: 3220131 - RNA, 19 nt, Artificial Sequence
  Description of Artificial Sequence: Synthetic oligonucleotide
cuuugauugagaaacugga

SEQ ID NO: 3220132 - RNA, 19 nt, Artificial Sequence
  Description of Artificial Sequence: Synthetic oligonucleotide
ugagaaagcuuugauugag

SEQ ID NO: 3220133 - RNA, 19 nt, Artificial Sequence
  Description of Artificial Sequence: Synthetic oligonucleotide
aggaaacagacuaagcuuc

SEQ ID NO: 3220134 - RNA, 19 nt, Artificial Sequence
  Description of Artificial Sequence: Synthetic oligonucleotide
aaacagacuaagcuucuaa

SEQ ID NO: 3220135 - RNA, 19 nt, Artificial Sequence
  Description of Artificial Sequence: Synthetic oligonucleotide
ugccacuucuuccaaagca

SEQ ID NO: 3220136 - RNA, 19 nt, Artificial Sequence
  Description of Artificial Sequence: Synthetic oligonucleotide
aacagacuaagcuucuaaa

SEQ ID NO: 3220137 - RNA, 19 nt, Artificial Sequence
  Description of Artificial Sequence: Synthetic oligonucleotide
aggaaaagaagaaugagaa

SEQ ID NO: 3220138 - RNA, 19 nt, Artificial Sequence
  Description of Artificial Sequence: Synthetic oligonucleotide
caguccuccauaauugucc

SEQ ID NO: 3220139 - RNA, 19 nt, Artificial Sequence
  Description of Artificial Sequence: Synthetic oligonucleotide
aagggagcccuaucugggc

SEQ ID NO: 3220140 - RNA, 19 nt, Artificial Sequence
  Description of Artificial Sequence: Synthetic oligonucleotide
gagauggaaaccaucuucc

SEQ ID NO: 3220141 - RNA, 19 nt, Artificial Sequence
  Description of Artificial Sequence: Synthetic oligonucleotide
agugccacuucuuccaaag

SEQ ID NO: 3220142 - RNA, 19 nt, Artificial Sequence
  Description of Artificial Sequence: Synthetic oligonucleotide
uaauuguccagggauggag

SEQ ID NO: 3220143 - RNA, 19 nt, Artificial Sequence
  Description of Artificial Sequence: Synthetic oligonucleotide
auuguccagggauggagcg

SEQ ID NO: 3220144 - RNA, 19 nt, Artificial Sequence
  Description of Artificial Sequence: Synthetic oligonucleotide
cauaauuguccagggaugg

SEQ ID NO: 3220145 - RNA, 19 nt, Artificial Sequence
  Description of Artificial Sequence: Synthetic oligonucleotide
gauugagaaacuggagagg

SEQ ID NO: 3220146 - RNA, 19 nt, Artificial Sequence
  Description of Artificial Sequence: Synthetic oligonucleotide
uaaccugagucagacagag

SEQ ID NO: 3220147 - RNA, 19 nt, Artificial Sequence
  Description of Artificial Sequence: Synthetic oligonucleotide
gaaaccaucuuccucucuc

SEQ ID NO: 3220148 - RNA, 19 nt, Artificial Sequence
  Description of Artificial Sequence: Synthetic oligonucleotide
ugugaaugagaagggagcc

SEQ ID NO: 3220149 - RNA, 19 nt, Artificial Sequence
  Description of Artificial Sequence: Synthetic oligonucleotide
auugagaaacuggagagga

SEQ ID NO: 3220150 - RNA, 19 nt, Artificial Sequence
  Description of Artificial Sequence: Synthetic oligonucleotide
ucagacagagucucugacc

SEQ ID NO: 3220151 - RNA, 19 nt, Artificial Sequence
  Description of Artificial Sequence: Synthetic oligonucleotide
ucugcaggcauaaccugag

SEQ ID NO: 3220152 - RNA, 19 nt, Artificial Sequence
  Description of Artificial Sequence: Synthetic oligonucleotide
agagucucugaccacccgg

SEQ ID NO: 3220153 - RNA, 19 nt, Artificial Sequence
  Description of Artificial Sequence: Synthetic oligonucleotide
uauccuaaggguccaggga

SEQ ID NO: 3220154 - RNA, 19 nt, Artificial Sequence
  Description of Artificial Sequence: Synthetic oligonucleotide
cuuccucucucuaaccucc

SEQ ID NO: 3220155 - RNA, 19 nt, Artificial Sequence
  Description of Artificial Sequence: Synthetic oligonucleotide
ucccaguccuccauaauug

SEQ ID NO: 3220156 - RNA, 19 nt, Artificial Sequence
  Description of Artificial Sequence: Synthetic oligonucleotide
aagaaugagaaagcuuuga

SEQ ID NO: 3220157 - RNA, 19 nt, Artificial Sequence
  Description of Artificial Sequence: Synthetic oligonucleotide
ugaaugagaagggagcccu

SEQ ID NO: 3220158 - RNA, 19 nt, Artificial Sequence
  Description of Artificial Sequence: Synthetic oligonucleotide
ugagaaacuggagaggaaa

SEQ ID NO: 3220159 - RNA, 19 nt, Artificial Sequence
  Description of Artificial Sequence: Synthetic oligonucleotide
agaaagcuuugauugagaa

SEQ ID NO: 3220160 - RNA, 19 nt, Artificial Sequence
  Description of Artificial Sequence: Synthetic oligonucleotide
agaaugagaaagcuuugau

SEQ ID NO: 3220161 - RNA, 19 nt, Artificial Sequence
  Description of Artificial Sequence: Synthetic oligonucleotide
gauggaaaccaucuuccuc

SEQ ID NO: 3220162 - RNA, 19 nt, Artificial Sequence
  Description of Artificial Sequence: Synthetic oligonucleotide
ggcaacuccuacuugaccc

SEQ ID NO: 3220163 - RNA, 19 nt, Artificial Sequence
  Description of Artificial Sequence: Synthetic oligonucleotide
aaaagccccuaagacagug

SEQ ID NO: 3220164 - RNA, 19 nt, Artificial Sequence
  Description of Artificial Sequence: Synthetic oligonucleotide
gauauccuaaggguccagg

SEQ ID NO: 3220165 - RNA, 19 nt, Artificial Sequence
  Description of Artificial Sequence: Synthetic oligonucleotide
caggaaaagaagaaugaga

SEQ ID NO: 3220166 - RNA, 19 nt, Artificial Sequence
  Description of Artificial Sequence: Synthetic oligonucleotide
cucaaaagccccuaagaca

SEQ ID NO: 3220167 - RNA, 19 nt, Artificial Sequence
  Description of Artificial Sequence: Synthetic oligonucleotide
ucucugaccacccgggagu

SEQ ID NO: 3220168 - RNA, 19 nt, Artificial Sequence
  Description of Artificial Sequence: Synthetic oligonucleotide
uccaaagcacucugcaggc

SEQ ID NO: 3220169 - RNA, 19 nt, Artificial Sequence
  Description of Artificial Sequence: Synthetic oligonucleotide
aaaccaucuuccucucucu

SEQ ID NO: 3220170 - RNA, 19 nt, Artificial Sequence
  Description of Artificial Sequence: Synthetic oligonucleotide
ugcaggcauaaccugaguc

SEQ ID NO: 3220171 - RNA, 19 nt, Artificial Sequence
  Description of Artificial Sequence: Synthetic oligonucleotide
guuggcaacuccuacuuga

SEQ ID NO: 3220172 - RNA, 19 nt, Artificial Sequence
  Description of Artificial Sequence: Synthetic oligonucleotide
ggaaagaguccuuuccggg

SEQ ID NO: 3220173 - RNA, 19 nt, Artificial Sequence
  Description of Artificial Sequence: Synthetic oligonucleotide
gaagggagcccuaucuggg

SEQ ID NO: 3220174 - RNA, 19 nt, Artificial Sequence
  Description of Artificial Sequence: Synthetic oligonucleotide
ucugggccaggaaaagaag

SEQ ID NO: 3220175 - RNA, 19 nt, Artificial Sequence
  Description of Artificial Sequence: Synthetic oligonucleotide
aaagccccuaagacagugc

SEQ ID NO: 3220176 - RNA, 19 nt, Artificial Sequence
  Description of Artificial Sequence: Synthetic oligonucleotide
gacagugccacuucuucca

SEQ ID NO: 3220177 - RNA, 19 nt, Artificial Sequence
  Description of Artificial Sequence: Synthetic oligonucleotide
agggagcccuaucugggcc

SEQ ID NO: 3220178 - RNA, 19 nt, Artificial Sequence
  Description of Artificial Sequence: Synthetic oligonucleotide
gacagagucucugaccacc

SEQ ID NO: 3220179 - RNA, 19 nt, Artificial Sequence
  Description of Artificial Sequence: Synthetic oligonucleotide
acuuugugaaugagaaggg

SEQ ID NO: 3220180 - RNA, 19 nt, Artificial Sequence
  Description of Artificial Sequence: Synthetic oligonucleotide
gguccagggacauggaggg

SEQ ID NO: 3220181 - RNA, 19 nt, Artificial Sequence
  Description of Artificial Sequence: Synthetic oligonucleotide
cuuccaaagcacucugcag

SEQ ID NO: 3220182 - RNA, 19 nt, Artificial Sequence
  Description of Artificial Sequence: Synthetic oligonucleotide
cucucuaaccucccagucc

SEQ ID NO: 3220183 - RNA, 19 nt, Artificial Sequence
  Description of Artificial Sequence: Synthetic oligonucleotide
acuugacccucaaaagccc

SEQ ID NO: 3220184 - RNA, 19 nt, Artificial Sequence
  Description of Artificial Sequence: Synthetic oligonucleotide
augagaaagcuuugauuga

SEQ ID NO: 3220185 - RNA, 19 nt, Artificial Sequence
  Description of Artificial Sequence: Synthetic oligonucleotide
aguccuuuccggguguugg

SEQ ID NO: 3220186 - RNA, 19 nt, Artificial Sequence
  Description of Artificial Sequence: Synthetic oligonucleotide
cuugacccucaaaagcccc

SEQ ID NO: 3220187 - RNA, 19 nt, Artificial Sequence
  Description of Artificial Sequence: Synthetic oligonucleotide
gaagaaugagaaagcuuug

SEQ ID NO: 3220188 - RNA, 19 nt, Artificial Sequence
  Description of Artificial Sequence: Synthetic oligonucleotide
ugggccaggaaaagaagaa

SEQ ID NO: 3220189 - RNA, 19 nt, Artificial Sequence
  Description of Artificial Sequence: Synthetic oligonucleotide
gagaagggagcccuaucug

SEQ ID NO: 3220190 - RNA, 19 nt, Artificial Sequence
  Description of Artificial Sequence: Synthetic oligonucleotide
aucuuccucucucuaaccu

SEQ ID NO: 3220191 - RNA, 19 nt, Artificial Sequence
  Description of Artificial Sequence: Synthetic oligonucleotide
gaaauuugcaucuagacag

SEQ ID NO: 3220192 - RNA, 19 nt, Artificial Sequence
  Description of Artificial Sequence: Synthetic oligonucleotide
aacaaaacaaacccgaaag

SEQ ID NO: 3220193 - RNA, 19 nt, Artificial Sequence
  Description of Artificial Sequence: Synthetic oligonucleotide
ugaacaaacaaaacaaacc

SEQ ID NO: 3220194 - RNA, 19 nt, Artificial Sequence
  Description of Artificial Sequence: Synthetic oligonucleotide
gaacaaacaaaacaaaccc

SEQ ID NO: 3220195 - RNA, 19 nt, Artificial Sequence
  Description of Artificial Sequence: Synthetic oligonucleotide
gagucagacauuuauaagg

SEQ ID NO: 3220196 - RNA, 19 nt, Artificial Sequence
  Description of Artificial Sequence: Synthetic oligonucleotide
aaaguguucucguugccgc

SEQ ID NO: 3220197 - RNA, 19 nt, Artificial Sequence
  Description of Artificial Sequence: Synthetic oligonucleotide
uuugcaucuagacagaacu

SEQ ID NO: 3220198 - RNA, 19 nt, Artificial Sequence
  Description of Artificial Sequence: Synthetic oligonucleotide
auuuauaaggacuggacag

SEQ ID NO: 3220199 - RNA, 19 nt, Artificial Sequence
  Description of Artificial Sequence: Synthetic oligonucleotide
ucagacauuuauaaggacu

SEQ ID NO: 3220200 - RNA, 19 nt, Artificial Sequence
  Description of Artificial Sequence: Synthetic oligonucleotide
acgaaauuugcaucuagac

SEQ ID NO: 3220201 - RNA, 19 nt, Artificial Sequence
  Description of Artificial Sequence: Synthetic oligonucleotide
gaacugaacaaacaaaaca

SEQ ID NO: 3220202 - RNA, 19 nt, Artificial Sequence
  Description of Artificial Sequence: Synthetic oligonucleotide
uuagggagagcucagaguc

SEQ ID NO: 3220203 - RNA, 19 nt, Artificial Sequence
  Description of Artificial Sequence: Synthetic oligonucleotide
aacaaacaaaacaaacccg

SEQ ID NO: 3220204 - RNA, 19 nt, Artificial Sequence
  Description of Artificial Sequence: Synthetic oligonucleotide
cuagggaacuccuuuaggg

SEQ ID NO: 3220205 - RNA, 19 nt, Artificial Sequence
  Description of Artificial Sequence: Synthetic oligonucleotide
gacuggacaguucagagug

SEQ ID NO: 3220206 - RNA, 19 nt, Artificial Sequence
  Description of Artificial Sequence: Synthetic oligonucleotide
aagagaagcaggaagcuag

SEQ ID NO: 3220207 - RNA, 19 nt, Artificial Sequence
  Description of Artificial Sequence: Synthetic oligonucleotide
aacugaacaaacaaaacaa

SEQ ID NO: 3220208 - RNA, 19 nt, Artificial Sequence
  Description of Artificial Sequence: Synthetic oligonucleotide
agagugugggaagagaagc

SEQ ID NO: 3220209 - RNA, 19 nt, Artificial Sequence
  Description of Artificial Sequence: Synthetic oligonucleotide
ugggaagagaagcaggaag

SEQ ID NO: 3220210 - RNA, 19 nt, Artificial Sequence
  Description of Artificial Sequence: Synthetic oligonucleotide
aucuagacagaacugaaca

SEQ ID NO: 3220211 - RNA, 19 nt, Artificial Sequence
  Description of Artificial Sequence: Synthetic oligonucleotide
cugaacaaacaaaacaaac

SEQ ID NO: 3220212 - RNA, 19 nt, Artificial Sequence
  Description of Artificial Sequence: Synthetic oligonucleotide
aaaacaaacccgaaagugu

SEQ ID NO: 3220213 - RNA, 19 nt, Artificial Sequence
  Description of Artificial Sequence: Synthetic oligonucleotide
aaacaaaacaaacccgaaa

SEQ ID NO: 3220214 - RNA, 19 nt, Artificial Sequence
  Description of Artificial Sequence: Synthetic oligonucleotide
agaagcaggaagcuagggg

SEQ ID NO: 3220215 - RNA, 19 nt, Artificial Sequence
  Description of Artificial Sequence: Synthetic oligonucleotide
gauccaacgccccuuagcc

SEQ ID NO: 3220216 - RNA, 19 nt, Artificial Sequence
  Description of Artificial Sequence: Synthetic oligonucleotide
auaaggacuggacaguuca

SEQ ID NO: 3220217 - RNA, 19 nt, Artificial Sequence
  Description of Artificial Sequence: Synthetic oligonucleotide
cagacauuuauaaggacug

SEQ ID NO: 3220218 - RNA, 19 nt, Artificial Sequence
  Description of Artificial Sequence: Synthetic oligonucleotide
aaacccgaaaguguucucg

SEQ ID NO: 3220219 - RNA, 19 nt, Artificial Sequence
  Description of Artificial Sequence: Synthetic oligonucleotide
aacuccuuuagggagagcu

SEQ ID NO: 3220220 - RNA, 19 nt, Artificial Sequence
  Description of Artificial Sequence: Synthetic oligonucleotide
acauuuauaaggacuggac

SEQ ID NO: 3220221 - RNA, 19 nt, Artificial Sequence
  Description of Artificial Sequence: Synthetic oligonucleotide
caaaacaaacccgaaagug

SEQ ID NO: 3220222 - RNA, 19 nt, Artificial Sequence
  Description of Artificial Sequence: Synthetic oligonucleotide
uuagccagacaucuccucc

SEQ ID NO: 3220223 - RNA, 19 nt, Artificial Sequence
  Description of Artificial Sequence: Synthetic oligonucleotide
ugugggaagagaagcagga

SEQ ID NO: 3220224 - RNA, 19 nt, Artificial Sequence
  Description of Artificial Sequence: Synthetic oligonucleotide
uagacagaacugaacaaac

SEQ ID NO: 3220225 - RNA, 19 nt, Artificial Sequence
  Description of Artificial Sequence: Synthetic oligonucleotide
agagcucagagucagacau

SEQ ID NO: 3220226 - RNA, 19 nt, Artificial Sequence
  Description of Artificial Sequence: Synthetic oligonucleotide
aggaacgaaauuugcaucu

SEQ ID NO: 3220227 - RNA, 19 nt, Artificial Sequence
  Description of Artificial Sequence: Synthetic oligonucleotide
acaaacaaaacaaacccga

SEQ ID NO: 3220228 - RNA, 19 nt, Artificial Sequence
  Description of Artificial Sequence: Synthetic oligonucleotide
gaaaguguucucguugccg

SEQ ID NO: 3220229 - RNA, 19 nt, Artificial Sequence
  Description of Artificial Sequence: Synthetic oligonucleotide
agagucagacauuuauaag

SEQ ID NO: 3220230 - RNA, 19 nt, Artificial Sequence
  Description of Artificial Sequence: Synthetic oligonucleotide
gacagaacugaacaaacaa

SEQ ID NO: 3220231 - RNA, 19 nt, Artificial Sequence
  Description of Artificial Sequence: Synthetic oligonucleotide
uccaacgccccuuagccag

SEQ ID NO: 3220232 - RNA, 19 nt, Artificial Sequence
  Description of Artificial Sequence: Synthetic oligonucleotide
agaacugaacaaacaaaac

SEQ ID NO: 3220233 - RNA, 19 nt, Artificial Sequence
  Description of Artificial Sequence: Synthetic oligonucleotide
ucagagugugggaagagaa

SEQ ID NO: 3220234 - RNA, 19 nt, Artificial Sequence
  Description of Artificial Sequence: Synthetic oligonucleotide
acaaaacaaacccgaaagu

SEQ ID NO: 3220235 - RNA, 19 nt, Artificial Sequence
  Description of Artificial Sequence: Synthetic oligonucleotide
agggaacuccuuuagggag

SEQ ID NO: 3220236 - RNA, 19 nt, Artificial Sequence
  Description of Artificial Sequence: Synthetic oligonucleotide
gaacgaaauuugcaucuag

SEQ ID NO: 3220237 - RNA, 19 nt, Artificial Sequence
  Description of Artificial Sequence: Synthetic oligonucleotide
uuuauaaggacuggacagu

SEQ ID NO: 3220238 - RNA, 19 nt, Artificial Sequence
  Description of Artificial Sequence: Synthetic oligonucleotide
uuuagggagagcucagagu

SEQ ID NO: 3220239 - RNA, 19 nt, Artificial Sequence
  Description of Artificial Sequence: Synthetic oligonucleotide
ugcaucuagacagaacuga

SEQ ID NO: 3220240 - RNA, 19 nt, Artificial Sequence
  Description of Artificial Sequence: Synthetic oligonucleotide
ucuagacagaacugaacaa

SEQ ID NO: 3220241 - RNA, 19 nt, Artificial Sequence
  Description of Artificial Sequence: Synthetic oligonucleotide
cagaacugaacaaacaaaa

SEQ ID NO: 3220242 - RNA, 19 nt, Artificial Sequence
  Description of Artificial Sequence: Synthetic oligonucleotide
cuuuagggagagcucagag

SEQ ID NO: 3220243 - RNA, 19 nt, Artificial Sequence
  Description of Artificial Sequence: Synthetic oligonucleotide
cauuuauaaggacuggaca

SEQ ID NO: 3220244 - RNA, 19 nt, Artificial Sequence
  Description of Artificial Sequence: Synthetic oligonucleotide
gaagcaggaagcuaggggu

SEQ ID NO: 3220245 - RNA, 19 nt, Artificial Sequence
  Description of Artificial Sequence: Synthetic oligonucleotide
aggacuggacaguucagag

SEQ ID NO: 3220246 - RNA, 19 nt, Artificial Sequence
  Description of Artificial Sequence: Synthetic oligonucleotide
agcggguaggagcaggaac

SEQ ID NO: 3220247 - RNA, 19 nt, Artificial Sequence
  Description of Artificial Sequence: Synthetic oligonucleotide
agacaucuccucccgcugc

SEQ ID NO: 3220248 - RNA, 19 nt, Artificial Sequence
  Description of Artificial Sequence: Synthetic oligonucleotide
ucucguugccgcuggaucc

SEQ ID NO: 3220249 - RNA, 19 nt, Artificial Sequence
  Description of Artificial Sequence: Synthetic oligonucleotide
aacgaaauuugcaucuaga

SEQ ID NO: 3220250 - RNA, 19 nt, Artificial Sequence
  Description of Artificial Sequence: Synthetic oligonucleotide
uagggaacuccuuuaggga

SEQ ID NO: 3220251 - RNA, 19 nt, Artificial Sequence
  Description of Artificial Sequence: Synthetic oligonucleotide
cucagcagcgugcagcucc

SEQ ID NO: 3220252 - RNA, 19 nt, Artificial Sequence
  Description of Artificial Sequence: Synthetic oligonucleotide
guugccgcuggauccaacg

SEQ ID NO: 3220253 - RNA, 19 nt, Artificial Sequence
  Description of Artificial Sequence: Synthetic oligonucleotide
ugcuccuuguuccugcgca

SEQ ID NO: 3220254 - RNA, 19 nt, Artificial Sequence
  Description of Artificial Sequence: Synthetic oligonucleotide
ucagagucagacauuuaua

SEQ ID NO: 3220255 - RNA, 19 nt, Artificial Sequence
  Description of Artificial Sequence: Synthetic oligonucleotide
gaagcuaggggugcagggg

SEQ ID NO: 3220256 - RNA, 19 nt, Artificial Sequence
  Description of Artificial Sequence: Synthetic oligonucleotide
aaacaaacccgaaaguguu

SEQ ID NO: 3220257 - RNA, 19 nt, Artificial Sequence
  Description of Artificial Sequence: Synthetic oligonucleotide
uugcaucuagacagaacug

SEQ ID NO: 3220258 - RNA, 19 nt, Artificial Sequence
  Description of Artificial Sequence: Synthetic oligonucleotide
uggacaguucagagugugg

SEQ ID NO: 3220259 - RNA, 19 nt, Artificial Sequence
  Description of Artificial Sequence: Synthetic oligonucleotide
aacccgaaaguguucucgu

SEQ ID NO: 3220260 - RNA, 19 nt, Artificial Sequence
  Description of Artificial Sequence: Synthetic oligonucleotide
aacaaacccgaaaguguuc

SEQ ID NO: 3220261 - RNA, 19 nt, Artificial Sequence
  Description of Artificial Sequence: Synthetic oligonucleotide
gacauuuauaaggacugga

SEQ ID NO: 3220262 - RNA, 19 nt, Artificial Sequence
  Description of Artificial Sequence: Synthetic oligonucleotide
agucagacauuuauaagga

SEQ ID NO: 3220263 - RNA, 19 nt, Artificial Sequence
  Description of Artificial Sequence: Synthetic oligonucleotide
aagcuaggggugcagggga

SEQ ID NO: 3220264 - RNA, 19 nt, Artificial Sequence
  Description of Artificial Sequence: Synthetic oligonucleotide
caucuagacagaacugaac

SEQ ID NO: 3220265 - RNA, 19 nt, Artificial Sequence
  Description of Artificial Sequence: Synthetic oligonucleotide
auuugcaucuagacagaac

SEQ ID NO: 3220266 - RNA, 19 nt, Artificial Sequence
  Description of Artificial Sequence: Synthetic oligonucleotide
uaaggacuggacaguucag

SEQ ID NO: 3220267 - RNA, 19 nt, Artificial Sequence
  Description of Artificial Sequence: Synthetic oligonucleotide
cagagucagacauuuauaa

SEQ ID NO: 3220268 - RNA, 19 nt, Artificial Sequence
  Description of Artificial Sequence: Synthetic oligonucleotide
agugugggaagagaagcag

SEQ ID NO: 3220269 - RNA, 19 nt, Artificial Sequence
  Description of Artificial Sequence: Synthetic oligonucleotide
uauaaggacuggacaguuc

SEQ ID NO: 3220270 - RNA, 19 nt, Artificial Sequence
  Description of Artificial Sequence: Synthetic oligonucleotide
uccugcgcaccucagcagc

SEQ ID NO: 3220271 - RNA, 19 nt, Artificial Sequence
  Description of Artificial Sequence: Synthetic oligonucleotide
agacauuuauaaggacugg

SEQ ID NO: 3220272 - RNA, 19 nt, Artificial Sequence
  Description of Artificial Sequence: Synthetic oligonucleotide
aaggacuggacaguucaga

SEQ ID NO: 3220273 - RNA, 19 nt, Artificial Sequence
  Description of Artificial Sequence: Synthetic oligonucleotide
ugccgcuggauccaacgcc

SEQ ID NO: 3220274 - RNA, 19 nt, Artificial Sequence
  Description of Artificial Sequence: Synthetic oligonucleotide
ggacaguucagaguguggg

SEQ ID NO: 3220275 - RNA, 19 nt, Artificial Sequence
  Description of Artificial Sequence: Synthetic oligonucleotide
uguuccugcgcaccucagc

SEQ ID NO: 3220276 - RNA, 19 nt, Artificial Sequence
  Description of Artificial Sequence: Synthetic oligonucleotide
aaauuugcaucuagacaga

SEQ ID NO: 3220277 - RNA, 19 nt, Artificial Sequence
  Description of Artificial Sequence: Synthetic oligonucleotide
uucucguugccgcuggauc

SEQ ID NO: 3220278 - RNA, 19 nt, Artificial Sequence
  Description of Artificial Sequence: Synthetic oligonucleotide
uagccagacaucuccuccc

SEQ ID NO: 3220279 - RNA, 19 nt, Artificial Sequence
  Description of Artificial Sequence: Synthetic oligonucleotide
uccuuuagggagagcucag

SEQ ID NO: 3220280 - RNA, 19 nt, Artificial Sequence
  Description of Artificial Sequence: Synthetic oligonucleotide
caggaacgaaauuugcauc

SEQ ID NO: 3220281 - RNA, 19 nt, Artificial Sequence
  Description of Artificial Sequence: Synthetic oligonucleotide
acaaacccgaaaguguucu

SEQ ID NO: 3220282 - RNA, 19 nt, Artificial Sequence
  Description of Artificial Sequence: Synthetic oligonucleotide
aggagcaggaacgaaauuu

SEQ ID NO: 3220283 - RNA, 19 nt, Artificial Sequence
  Description of Artificial Sequence: Synthetic oligonucleotide
agcaggaagcuaggggugc

SEQ ID NO: 3220284 - RNA, 19 nt, Artificial Sequence
  Description of Artificial Sequence: Synthetic oligonucleotide
caggggagcggguaggagc

SEQ ID NO: 3220285 - RNA, 19 nt, Artificial Sequence
  Description of Artificial Sequence: Synthetic oligonucleotide
cagagugugggaagagaag

SEQ ID NO: 3220286 - RNA, 19 nt, Artificial Sequence
  Description of Artificial Sequence: Synthetic oligonucleotide
aauuugcaucuagacagaa

SEQ ID NO: 3220287 - RNA, 19 nt, Artificial Sequence
  Description of Artificial Sequence: Synthetic oligonucleotide
gagaagcaggaagcuaggg

SEQ ID NO: 3220288 - RNA, 19 nt, Artificial Sequence
  Description of Artificial Sequence: Synthetic oligonucleotide
gggaagagaagcaggaagc

SEQ ID NO: 3220289 - RNA, 19 nt, Artificial Sequence
  Description of Artificial Sequence: Synthetic oligonucleotide
uuauaaggacuggacaguu

SEQ ID NO: 3220290 - RNA, 19 nt, Artificial Sequence
  Description of Artificial Sequence: Synthetic oligonucleotide
ucccgcugcuccuuguucc

SEQ ID NO: 3220291 - RNA, 19 nt, Artificial Sequence
  Description of Artificial Sequence: Synthetic oligonucleotide
aauauuaucaucuucccau

SEQ ID NO: 3220292 - RNA, 19 nt, Artificial Sequence
  Description of Artificial Sequence: Synthetic oligonucleotide
uucaauauuaucaucuucc

SEQ ID NO: 3220293 - RNA, 19 nt, Artificial Sequence
  Description of Artificial Sequence: Synthetic oligonucleotide
augagugaaguucacaugc

SEQ ID NO: 3220294 - RNA, 19 nt, Artificial Sequence
  Description of Artificial Sequence: Synthetic oligonucleotide
uuuguagagacucuucugg

SEQ ID NO: 3220295 - RNA, 19 nt, Artificial Sequence
  Description of Artificial Sequence: Synthetic oligonucleotide
auuuguaaccuauagaagu

SEQ ID NO: 3220296 - RNA, 19 nt, Artificial Sequence
  Description of Artificial Sequence: Synthetic oligonucleotide
uucuucaauauuaucaucu

SEQ ID NO: 3220297 - RNA, 19 nt, Artificial Sequence
  Description of Artificial Sequence: Synthetic oligonucleotide
aucacaucuuuguagagac

SEQ ID NO: 3220298 - RNA, 19 nt, Artificial Sequence
  Description of Artificial Sequence: Synthetic oligonucleotide
gaagugagguuccugaagg

SEQ ID NO: 3220299 - RNA, 19 nt, Artificial Sequence
  Description of Artificial Sequence: Synthetic oligonucleotide
gaaguucacaugcacaucc

SEQ ID NO: 3220300 - RNA, 19 nt, Artificial Sequence
  Description of Artificial Sequence: Synthetic oligonucleotide
uuuguaaccuauagaagug

SEQ ID NO: 3220301 - RNA, 19 nt, Artificial Sequence
  Description of Artificial Sequence: Synthetic oligonucleotide
uaaccuauagaagugaggu

SEQ ID NO: 3220302 - RNA, 19 nt, Artificial Sequence
  Description of Artificial Sequence: Synthetic oligonucleotide
accuauagaagugagguuc

SEQ ID NO: 3220303 - RNA, 19 nt, Artificial Sequence
  Description of Artificial Sequence: Synthetic oligonucleotide
ugcacauccucauagguca

SEQ ID NO: 3220304 - RNA, 19 nt, Artificial Sequence
  Description of Artificial Sequence: Synthetic oligonucleotide
ucuucaugagugaaguuca

SEQ ID NO: 3220305 - RNA, 19 nt, Artificial Sequence
  Description of Artificial Sequence: Synthetic oligonucleotide
uguaaccuauagaagugag

SEQ ID NO: 3220306 - RNA, 19 nt, Artificial Sequence
  Description of Artificial Sequence: Synthetic oligonucleotide
ucaauauuaucaucuuccc

SEQ ID NO: 3220307 - RNA, 19 nt, Artificial Sequence
  Description of Artificial Sequence: Synthetic oligonucleotide
ucuuuguagagacucuucu

SEQ ID NO: 3220308 - RNA, 19 nt, Artificial Sequence
  Description of Artificial Sequence: Synthetic oligonucleotide
uguucuucaauauuaucau

SEQ ID NO: 3220309 - RNA, 19 nt, Artificial Sequence
  Description of Artificial Sequence: Synthetic oligonucleotide
uuaucaucuucccauuugu

SEQ ID NO: 3220310 - RNA, 19 nt, Artificial Sequence
  Description of Artificial Sequence: Synthetic oligonucleotide
auagaagugagguuccuga

SEQ ID NO: 3220311 - RNA, 19 nt, Artificial Sequence
  Description of Artificial Sequence: Synthetic oligonucleotide
auuaucaucuucccauuug

SEQ ID NO: 3220312 - RNA, 19 nt, Artificial Sequence
  Description of Artificial Sequence: Synthetic oligonucleotide
ucaucuucccauuuguaac

SEQ ID NO: 3220313 - RNA, 19 nt, Artificial Sequence
  Description of Artificial Sequence: Synthetic oligonucleotide
ucaugagugaaguucacau

SEQ ID NO: 3220314 - RNA, 19 nt, Artificial Sequence
  Description of Artificial Sequence: Synthetic oligonucleotide
ucccauuuguaaccuauag

SEQ ID NO: 3220315 - RNA, 19 nt, Artificial Sequence
  Description of Artificial Sequence: Synthetic oligonucleotide
ggucacugcauccauagcg

SEQ ID NO: 3220316 - RNA, 19 nt, Artificial Sequence
  Description of Artificial Sequence: Synthetic oligonucleotide
uuguagagacucuucuggg

SEQ ID NO: 3220317 - RNA, 19 nt, Artificial Sequence
  Description of Artificial Sequence: Synthetic oligonucleotide
cauuuguaaccuauagaag

SEQ ID NO: 3220318 - RNA, 19 nt, Artificial Sequence
  Description of Artificial Sequence: Synthetic oligonucleotide
uaggucacugcauccauag

SEQ ID NO: 3220319 - RNA, 19 nt, Artificial Sequence
  Description of Artificial Sequence: Synthetic oligonucleotide
aguguucuucaauauuauc

SEQ ID NO: 3220320 - RNA, 19 nt, Artificial Sequence
  Description of Artificial Sequence: Synthetic oligonucleotide
aagguuuccagcaucacau

SEQ ID NO: 3220321 - RNA, 19 nt, Artificial Sequence
  Description of Artificial Sequence: Synthetic oligonucleotide
uccagcaucacaucuuugu

SEQ ID NO: 3220322 - RNA, 19 nt, Artificial Sequence
  Description of Artificial Sequence: Synthetic oligonucleotide
agcaucacaucuuuguaga

SEQ ID NO: 3220323 - RNA, 19 nt, Artificial Sequence
  Description of Artificial Sequence: Synthetic oligonucleotide
guguucuucaauauuauca

SEQ ID NO: 3220324 - RNA, 19 nt, Artificial Sequence
  Description of Artificial Sequence: Synthetic oligonucleotide
gaaggguccagcaaagccc

SEQ ID NO: 3220325 - RNA, 19 nt, Artificial Sequence
  Description of Artificial Sequence: Synthetic oligonucleotide
agaagugagguuccugaag

SEQ ID NO: 3220326 - RNA, 19 nt, Artificial Sequence
  Description of Artificial Sequence: Synthetic oligonucleotide
caucuucccauuuguaacc

SEQ ID NO: 3220327 - RNA, 19 nt, Artificial Sequence
  Description of Artificial Sequence: Synthetic oligonucleotide
cacaugcacauccucauag

SEQ ID NO: 3220328 - RNA, 19 nt, Artificial Sequence
  Description of Artificial Sequence: Synthetic oligonucleotide
uguagagacucuucuggga

SEQ ID NO: 3220329 - RNA, 19 nt, Artificial Sequence
  Description of Artificial Sequence: Synthetic oligonucleotide
aucaucuucccauuuguaa

SEQ ID NO: 3220330 - RNA, 19 nt, Artificial Sequence
  Description of Artificial Sequence: Synthetic oligonucleotide
uuccugaagguuuccagca

SEQ ID NO: 3220331 - RNA, 19 nt, Artificial Sequence
  Description of Artificial Sequence: Synthetic oligonucleotide
cucuucaugagugaaguuc

SEQ ID NO: 3220332 - RNA, 19 nt, Artificial Sequence
  Description of Artificial Sequence: Synthetic oligonucleotide
cuuuguagagacucuucug

SEQ ID NO: 3220333 - RNA, 19 nt, Artificial Sequence
  Description of Artificial Sequence: Synthetic oligonucleotide
aguucacaugcacauccuc

SEQ ID NO: 3220334 - RNA, 19 nt, Artificial Sequence
  Description of Artificial Sequence: Synthetic oligonucleotide
acaugcacauccucauagg

SEQ ID NO: 3220335 - RNA, 19 nt, Artificial Sequence
  Description of Artificial Sequence: Synthetic oligonucleotide
guuccugaagguuuccagc

SEQ ID NO: 3220336 - RNA, 19 nt, Artificial Sequence
  Description of Artificial Sequence: Synthetic oligonucleotide
cagcaucacaucuuuguag

SEQ ID NO: 3220337 - RNA, 19 nt, Artificial Sequence
  Description of Artificial Sequence: Synthetic oligonucleotide
cuucaauauuaucaucuuc

SEQ ID NO: 3220338 - RNA, 19 nt, Artificial Sequence
  Description of Artificial Sequence: Synthetic oligonucleotide
cacaucuuuguagagacuc

SEQ ID NO: 3220339 - RNA, 19 nt, Artificial Sequence
  Description of Artificial Sequence: Synthetic oligonucleotide
guaaccuauagaagugagg

SEQ ID NO: 3220340 - RNA, 19 nt, Artificial Sequence
  Description of Artificial Sequence: Synthetic oligonucleotide
gaagguuuccagcaucaca

SEQ ID NO: 3220341 - RNA, 19 nt, Artificial Sequence
  Description of Artificial Sequence: Synthetic oligonucleotide
auccucauaggucacugca

SEQ ID NO: 3220342 - RNA, 19 nt, Artificial Sequence
  Description of Artificial Sequence: Synthetic oligonucleotide
ugagugaaguucacaugca

SEQ ID NO: 3220343 - RNA, 19 nt, Artificial Sequence
  Description of Artificial Sequence: Synthetic oligonucleotide
aaagcccacucuucaugag

SEQ ID NO: 3220344 - RNA, 19 nt, Artificial Sequence
  Description of Artificial Sequence: Synthetic oligonucleotide
caugagugaaguucacaug

SEQ ID NO: 3220345 - RNA, 19 nt, Artificial Sequence
  Description of Artificial Sequence: Synthetic oligonucleotide
ccauuuguaaccuauagaa

SEQ ID NO: 3220346 - RNA, 19 nt, Artificial Sequence
  Description of Artificial Sequence: Synthetic oligonucleotide
cucauaggucacugcaucc

SEQ ID NO: 3220347 - RNA, 19 nt, Artificial Sequence
  Description of Artificial Sequence: Synthetic oligonucleotide
aagcccacucuucaugagu

SEQ ID NO: 3220348 - RNA, 19 nt, Artificial Sequence
  Description of Artificial Sequence: Synthetic oligonucleotide
uauagaagugagguuccug

SEQ ID NO: 3220349 - RNA, 19 nt, Artificial Sequence
  Description of Artificial Sequence: Synthetic oligonucleotide
ucuucaauauuaucaucuu

SEQ ID NO: 3220350 - RNA, 19 nt, Artificial Sequence
  Description of Artificial Sequence: Synthetic oligonucleotide
agagacucuucugggaagg

SEQ ID NO: 3220351 - RNA, 19 nt, Artificial Sequence
  Description of Artificial Sequence: Synthetic oligonucleotide
uucacaugcacauccucau

SEQ ID NO: 3220352 - RNA, 19 nt, Artificial Sequence
  Description of Artificial Sequence: Synthetic oligonucleotide
uagagacucuucugggaag

SEQ ID NO: 3220353 - RNA, 19 nt, Artificial Sequence
  Description of Artificial Sequence: Synthetic oligonucleotide
gagugaaguucacaugcac

SEQ ID NO: 3220354 - RNA, 19 nt, Artificial Sequence
  Description of Artificial Sequence: Synthetic oligonucleotide
uuguaaccuauagaaguga

SEQ ID NO: 3220355 - RNA, 19 nt, Artificial Sequence
  Description of Artificial Sequence: Synthetic oligonucleotide
ucauaggucacugcaucca

SEQ ID NO: 3220356 - RNA, 19 nt, Artificial Sequence
  Description of Artificial Sequence: Synthetic oligonucleotide
ugggaaggguccagcaaag

SEQ ID NO: 3220357 - RNA, 19 nt, Artificial Sequence
  Description of Artificial Sequence: Synthetic oligonucleotide
uuuccagcaucacaucuuu

SEQ ID NO: 3220358 - RNA, 19 nt, Artificial Sequence
  Description of Artificial Sequence: Synthetic oligonucleotide
uauuaucaucuucccauuu

SEQ ID NO: 3220359 - RNA, 19 nt, Artificial Sequence
  Description of Artificial Sequence: Synthetic oligonucleotide
uccagcaaagcccacucuu

SEQ ID NO: 3220360 - RNA, 19 nt, Artificial Sequence
  Description of Artificial Sequence: Synthetic oligonucleotide
aagugagguuccugaaggu

SEQ ID NO: 3220361 - RNA, 19 nt, Artificial Sequence
  Description of Artificial Sequence: Synthetic oligonucleotide
ggaaggguccagcaaagcc

SEQ ID NO: 3220362 - RNA, 19 nt, Artificial Sequence
  Description of Artificial Sequence: Synthetic oligonucleotide
acucuucugggaagggucc

SEQ ID NO: 3220363 - RNA, 19 nt, Artificial Sequence
  Description of Artificial Sequence: Synthetic oligonucleotide
agugaaguucacaugcaca

SEQ ID NO: 3220364 - RNA, 19 nt, Artificial Sequence
  Description of Artificial Sequence: Synthetic oligonucleotide
ugagguuccugaagguuuc

SEQ ID NO: 3220365 - RNA, 19 nt, Artificial Sequence
  Description of Artificial Sequence: Synthetic oligonucleotide
uucaugagugaaguucaca

SEQ ID NO: 3220366 - RNA, 19 nt, Artificial Sequence
  Description of Artificial Sequence: Synthetic oligonucleotide
augcacauccucauagguc

SEQ ID NO: 3220367 - RNA, 19 nt, Artificial Sequence
  Description of Artificial Sequence: Synthetic oligonucleotide
aaccuauagaagugagguu

SEQ ID NO: 3220368 - RNA, 19 nt, Artificial Sequence
  Description of Artificial Sequence: Synthetic oligonucleotide
caauauuaucaucuuccca

SEQ ID NO: 3220369 - RNA, 19 nt, Artificial Sequence
  Description of Artificial Sequence: Synthetic oligonucleotide
guagagacucuucugggaa

SEQ ID NO: 3220370 - RNA, 19 nt, Artificial Sequence
  Description of Artificial Sequence: Synthetic oligonucleotide
auauuaucaucuucccauu

SEQ ID NO: 3220371 - RNA, 19 nt, Artificial Sequence
  Description of Artificial Sequence: Synthetic oligonucleotide
ucugggaaggguccagcaa

SEQ ID NO: 3220372 - RNA, 19 nt, Artificial Sequence
  Description of Artificial Sequence: Synthetic oligonucleotide
uaucaucuucccauuugua

SEQ ID NO: 3220373 - RNA, 19 nt, Artificial Sequence
  Description of Artificial Sequence: Synthetic oligonucleotide
guucuucaauauuaucauc

SEQ ID NO: 3220374 - RNA, 19 nt, Artificial Sequence
  Description of Artificial Sequence: Synthetic oligonucleotide
aucuuuguagagacucuuc

SEQ ID NO: 3220375 - RNA, 19 nt, Artificial Sequence
  Description of Artificial Sequence: Synthetic oligonucleotide
aggucacugcauccauagc

SEQ ID NO: 3220376 - RNA, 19 nt, Artificial Sequence
  Description of Artificial Sequence: Synthetic oligonucleotide
aaggguccagcaaagccca

SEQ ID NO: 3220377 - RNA, 19 nt, Artificial Sequence
  Description of Artificial Sequence: Synthetic oligonucleotide
gacucuucugggaaggguc

SEQ ID NO: 3220378 - RNA, 19 nt, Artificial Sequence
  Description of Artificial Sequence: Synthetic oligonucleotide
gguuccugaagguuuccag

SEQ ID NO: 3220379 - RNA, 19 nt, Artificial Sequence
  Description of Artificial Sequence: Synthetic oligonucleotide
uucugggaaggguccagca

SEQ ID NO: 3220380 - RNA, 19 nt, Artificial Sequence
  Description of Artificial Sequence: Synthetic oligonucleotide
uagaagugagguuccugaa

SEQ ID NO: 3220381 - RNA, 19 nt, Artificial Sequence
  Description of Artificial Sequence: Synthetic oligonucleotide
uccucauaggucacugcau

SEQ ID NO: 3220382 - RNA, 19 nt, Artificial Sequence
  Description of Artificial Sequence: Synthetic oligonucleotide
agguuuccagcaucacauc

SEQ ID NO: 3220383 - RNA, 19 nt, Artificial Sequence
  Description of Artificial Sequence: Synthetic oligonucleotide
guucacaugcacauccuca

SEQ ID NO: 3220384 - RNA, 19 nt, Artificial Sequence
  Description of Artificial Sequence: Synthetic oligonucleotide
caaagcccacucuucauga

SEQ ID NO: 3220385 - RNA, 19 nt, Artificial Sequence
  Description of Artificial Sequence: Synthetic oligonucleotide
cugaagguuuccagcauca

SEQ ID NO: 3220386 - RNA, 19 nt, Artificial Sequence
  Description of Artificial Sequence: Synthetic oligonucleotide
gugaaguucacaugcacau

SEQ ID NO: 3220387 - RNA, 19 nt, Artificial Sequence
  Description of Artificial Sequence: Synthetic oligonucleotide
ccuauagaagugagguucc

SEQ ID NO: 3220388 - RNA, 19 nt, Artificial Sequence
  Description of Artificial Sequence: Synthetic oligonucleotide
acauccucauaggucacug

SEQ ID NO: 3220389 - RNA, 19 nt, Artificial Sequence
  Description of Artificial Sequence: Synthetic oligonucleotide
cuucaugagugaaguucac

SEQ ID NO: 3220390 - RNA, 19 nt, Artificial Sequence
  Description of Artificial Sequence: Synthetic oligonucleotide
ucacaucuuuguagagacu

SEQ ID NO: 3220391 - RNA, 19 nt, Artificial Sequence
  Description of Artificial Sequence: Synthetic oligonucleotide
uuugaucucaaccagaugu

SEQ ID NO: 3220392 - RNA, 19 nt, Artificial Sequence
  Description of Artificial Sequence: Synthetic oligonucleotide
auaucuccaaacuucuugc

SEQ ID NO: 3220393 - RNA, 19 nt, Artificial Sequence
  Description of Artificial Sequence: Synthetic oligonucleotide
uuucuguuugaucucaacc

SEQ ID NO: 3220394 - RNA, 19 nt, Artificial Sequence
  Description of Artificial Sequence: Synthetic oligonucleotide
uuuaacucguucaucaggu

SEQ ID NO: 3220395 - RNA, 19 nt, Artificial Sequence
  Description of Artificial Sequence: Synthetic oligonucleotide
gaaguucugcuuuaacucg

SEQ ID NO: 3220396 - RNA, 19 nt, Artificial Sequence
  Description of Artificial Sequence: Synthetic oligonucleotide
ucguucaucagguucaugc

SEQ ID NO: 3220397 - RNA, 19 nt, Artificial Sequence
  Description of Artificial Sequence: Synthetic oligonucleotide
uucuguuugaucucaacca

SEQ ID NO: 3220398 - RNA, 19 nt, Artificial Sequence
  Description of Artificial Sequence: Synthetic oligonucleotide
ugaaguucugcuuuaacuc

SEQ ID NO: 3220399 - RNA, 19 nt, Artificial Sequence
  Description of Artificial Sequence: Synthetic oligonucleotide
ucuguuugaucucaaccag

SEQ ID NO: 3220400 - RNA, 19 nt, Artificial Sequence
  Description of Artificial Sequence: Synthetic oligonucleotide
ugcuuuaacucguucauca

SEQ ID NO: 3220401 - RNA, 19 nt, Artificial Sequence
  Description of Artificial Sequence: Synthetic oligonucleotide
uucauguguuuucuguacg

SEQ ID NO: 3220402 - RNA, 19 nt, Artificial Sequence
  Description of Artificial Sequence: Synthetic oligonucleotide
cuuuaacucguucaucagg

SEQ ID NO: 3220403 - RNA, 19 nt, Artificial Sequence
  Description of Artificial Sequence: Synthetic oligonucleotide
aaacuucuugcugauggcg

SEQ ID NO: 3220404 - RNA, 19 nt, Artificial Sequence
  Description of Artificial Sequence: Synthetic oligonucleotide
ucuccaaacuucuugcuga

SEQ ID NO: 3220405 - RNA, 19 nt, Artificial Sequence
  Description of Artificial Sequence: Synthetic oligonucleotide
cauaucuccaaacuucuug

SEQ ID NO: 3220406 - RNA, 19 nt, Artificial Sequence
  Description of Artificial Sequence: Synthetic oligonucleotide
gaugucuuucuuuugcuga

SEQ ID NO: 3220407 - RNA, 19 nt, Artificial Sequence
  Description of Artificial Sequence: Synthetic oligonucleotide
uuucuguacgcaguugugg

SEQ ID NO: 3220408 - RNA, 19 nt, Artificial Sequence
  Description of Artificial Sequence: Synthetic oligonucleotide
uguuugaucucaaccagau

SEQ ID NO: 3220409 - RNA, 19 nt, Artificial Sequence
  Description of Artificial Sequence: Synthetic oligonucleotide
uguguuuucuguacgcagu

SEQ ID NO: 3220410 - RNA, 19 nt, Artificial Sequence
  Description of Artificial Sequence: Synthetic oligonucleotide
uucugcuuuaacucguuca

SEQ ID NO: 3220411 - RNA, 19 nt, Artificial Sequence
  Description of Artificial Sequence: Synthetic oligonucleotide
uuucauguguuuucuguac

SEQ ID NO: 3220412 - RNA, 19 nt, Artificial Sequence
  Description of Artificial Sequence: Synthetic oligonucleotide
ugucaugccagcuucugcu

SEQ ID NO: 3220413 - RNA, 19 nt, Artificial Sequence
  Description of Artificial Sequence: Synthetic oligonucleotide
augucuuucuuuugcugac

SEQ ID NO: 3220414 - RNA, 19 nt, Artificial Sequence
  Description of Artificial Sequence: Synthetic oligonucleotide
ucugcuuuaacucguucau

SEQ ID NO: 3220415 - RNA, 19 nt, Artificial Sequence
  Description of Artificial Sequence: Synthetic oligonucleotide
auuacuggaagcugcugug

SEQ ID NO: 3220416 - RNA, 19 nt, Artificial Sequence
  Description of Artificial Sequence: Synthetic oligonucleotide
ucauguguuuucuguacgc

SEQ ID NO: 3220417 - RNA, 19 nt, Artificial Sequence
  Description of Artificial Sequence: Synthetic oligonucleotide
ucugcugaaguucugcuuu

SEQ ID NO: 3220418 - RNA, 19 nt, Artificial Sequence
  Description of Artificial Sequence: Synthetic oligonucleotide
aacuucuugcugauggcgg

SEQ ID NO: 3220419 - RNA, 19 nt, Artificial Sequence
  Description of Artificial Sequence: Synthetic oligonucleotide
acuggaagcugcuguggcc

SEQ ID NO: 3220420 - RNA, 19 nt, Artificial Sequence
  Description of Artificial Sequence: Synthetic oligonucleotide
uaacucguucaucagguuc

SEQ ID NO: 3220421 - RNA, 19 nt, Artificial Sequence
  Description of Artificial Sequence: Synthetic oligonucleotide
caugccaaguuucuguuug

SEQ ID NO: 3220422 - RNA, 19 nt, Artificial Sequence
  Description of Artificial Sequence: Synthetic oligonucleotide
ccaaacuucuugcugaugg

SEQ ID NO: 3220423 - RNA, 19 nt, Artificial Sequence
  Description of Artificial Sequence: Synthetic oligonucleotide
uuuucuguacgcaguugug

SEQ ID NO: 3220424 - RNA, 19 nt, Artificial Sequence
  Description of Artificial Sequence: Synthetic oligonucleotide
aaccagaugucuuucuuuu

SEQ ID NO: 3220425 - RNA, 19 nt, Artificial Sequence
  Description of Artificial Sequence: Synthetic oligonucleotide
auguguuuucuguacgcag

SEQ ID NO: 3220426 - RNA, 19 nt, Artificial Sequence
  Description of Artificial Sequence: Synthetic oligonucleotide
uucaucagguucaugccaa

SEQ ID NO: 3220427 - RNA, 19 nt, Artificial Sequence
  Description of Artificial Sequence: Synthetic oligonucleotide
augucaugccagcuucugc

SEQ ID NO: 3220428 - RNA, 19 nt, Artificial Sequence
  Description of Artificial Sequence: Synthetic oligonucleotide
aacucguucaucagguuca

SEQ ID NO: 3220429 - RNA, 19 nt, Artificial Sequence
  Description of Artificial Sequence: Synthetic oligonucleotide
ugcaugucaugccagcuuc

SEQ ID NO: 3220430 - RNA, 19 nt, Artificial Sequence
  Description of Artificial Sequence: Synthetic oligonucleotide
uucuguacgcaguuguggu

SEQ ID NO: 3220431 - RNA, 19 nt, Artificial Sequence
  Description of Artificial Sequence: Synthetic oligonucleotide
uguggucugcaugucaugc

SEQ ID NO: 3220432 - RNA, 19 nt, Artificial Sequence
  Description of Artificial Sequence: Synthetic oligonucleotide
aucuccaaacuucuugcug

SEQ ID NO: 3220433 - RNA, 19 nt, Artificial Sequence
  Description of Artificial Sequence: Synthetic oligonucleotide
agaugucuuucuuuugcug

SEQ ID NO: 3220434 - RNA, 19 nt, Artificial Sequence
  Description of Artificial Sequence: Synthetic oligonucleotide
auggcucaggguuucaugu

SEQ ID NO: 3220435 - RNA, 19 nt, Artificial Sequence
  Description of Artificial Sequence: Synthetic oligonucleotide
uggucugcaugucaugcca

SEQ ID NO: 3220436 - RNA, 19 nt, Artificial Sequence
  Description of Artificial Sequence: Synthetic oligonucleotide
ucagguucaugccaaguuu

SEQ ID NO: 3220437 - RNA, 19 nt, Artificial Sequence
  Description of Artificial Sequence: Synthetic oligonucleotide
uugaucucaaccagauguc

SEQ ID NO: 3220438 - RNA, 19 nt, Artificial Sequence
  Description of Artificial Sequence: Synthetic oligonucleotide
uacuggaagcugcuguggc

SEQ ID NO: 3220439 - RNA, 19 nt, Artificial Sequence
  Description of Artificial Sequence: Synthetic oligonucleotide
caaacuucuugcugauggc

SEQ ID NO: 3220440 - RNA, 19 nt, Artificial Sequence
  Description of Artificial Sequence: Synthetic oligonucleotide
uuacuggaagcugcugugg

SEQ ID NO: 3220441 - RNA, 19 nt, Artificial Sequence
  Description of Artificial Sequence: Synthetic oligonucleotide
aaguuucuguuugaucuca

SEQ ID NO: 3220442 - RNA, 19 nt, Artificial Sequence
  Description of Artificial Sequence: Synthetic oligonucleotide
agcugcuguggccuucugc

SEQ ID NO: 3220443 - RNA, 19 nt, Artificial Sequence
  Description of Artificial Sequence: Synthetic oligonucleotide
ugcuguggccuucugcccc

SEQ ID NO: 3220444 - RNA, 19 nt, Artificial Sequence
  Description of Artificial Sequence: Synthetic oligonucleotide
ucaaccagaugucuuucuu

SEQ ID NO: 3220445 - RNA, 19 nt, Artificial Sequence
  Description of Artificial Sequence: Synthetic oligonucleotide
uaucuccaaacuucuugcu

SEQ ID NO: 3220446 - RNA, 19 nt, Artificial Sequence
  Description of Artificial Sequence: Synthetic oligonucleotide
aucagguucaugccaaguu

SEQ ID NO: 3220447 - RNA, 19 nt, Artificial Sequence
  Description of Artificial Sequence: Synthetic oligonucleotide
gcugcuguggccuucugcc

SEQ ID NO: 3220448 - RNA, 19 nt, Artificial Sequence
  Description of Artificial Sequence: Synthetic oligonucleotide
cagguucaugccaaguuuc

SEQ ID NO: 3220449 - RNA, 19 nt, Artificial Sequence
  Description of Artificial Sequence: Synthetic oligonucleotide
aguuguggucugcauguca

SEQ ID NO: 3220450 - RNA, 19 nt, Artificial Sequence
  Description of Artificial Sequence: Synthetic oligonucleotide
ugaucucaaccagaugucu

SEQ ID NO: 3220451 - RNA, 19 nt, Artificial Sequence
  Description of Artificial Sequence: Synthetic oligonucleotide
ucaugccagcuucugcuga

SEQ ID NO: 3220452 - RNA, 19 nt, Artificial Sequence
  Description of Artificial Sequence: Synthetic oligonucleotide
gugcccacauuacuggaag

SEQ ID NO: 3220453 - RNA, 19 nt, Artificial Sequence
  Description of Artificial Sequence: Synthetic oligonucleotide
guucaucagguucaugcca

SEQ ID NO: 3220454 - RNA, 19 nt, Artificial Sequence
  Description of Artificial Sequence: Synthetic oligonucleotide
aucucaaccagaugucuuu

SEQ ID NO: 3220455 - RNA, 19 nt, Artificial Sequence
  Description of Artificial Sequence: Synthetic oligonucleotide
caaguuucuguuugaucuc

SEQ ID NO: 3220456 - RNA, 19 nt, Artificial Sequence
  Description of Artificial Sequence: Synthetic oligonucleotide
cugaaguucugcuuuaacu

SEQ ID NO: 3220457 - RNA, 19 nt, Artificial Sequence
  Description of Artificial Sequence: Synthetic oligonucleotide
gauggcggugcccacauua

SEQ ID NO: 3220458 - RNA, 19 nt, Artificial Sequence
  Description of Artificial Sequence: Synthetic oligonucleotide
guuucuguuugaucucaac

SEQ ID NO: 3220459 - RNA, 19 nt, Artificial Sequence
  Description of Artificial Sequence: Synthetic oligonucleotide
ccagaugucuuucuuuugc

SEQ ID NO: 3220460 - RNA, 19 nt, Artificial Sequence
  Description of Artificial Sequence: Synthetic oligonucleotide
aaguucugcuuuaacucgu

SEQ ID NO: 3220461 - RNA, 19 nt, Artificial Sequence
  Description of Artificial Sequence: Synthetic oligonucleotide
guuuucuguacgcaguugu

SEQ ID NO: 3220462 - RNA, 19 nt, Artificial Sequence
  Description of Artificial Sequence: Synthetic oligonucleotide
uucaugccaaguuucuguu

SEQ ID NO: 3220463 - RNA, 19 nt, Artificial Sequence
  Description of Artificial Sequence: Synthetic oligonucleotide
acuucuugcugauggcggu

SEQ ID NO: 3220464 - RNA, 19 nt, Artificial Sequence
  Description of Artificial Sequence: Synthetic oligonucleotide
caggguuucauguguuuuc

SEQ ID NO: 3220465 - RNA, 19 nt, Artificial Sequence
  Description of Artificial Sequence: Synthetic oligonucleotide
ugccccgcauggcucaggg

SEQ ID NO: 3220466 - RNA, 19 nt, Artificial Sequence
  Description of Artificial Sequence: Synthetic oligonucleotide
uguuuucuguacgcaguug

SEQ ID NO: 3220467 - RNA, 19 nt, Artificial Sequence
  Description of Artificial Sequence: Synthetic oligonucleotide
ucaucagguucaugccaag

SEQ ID NO: 3220468 - RNA, 19 nt, Artificial Sequence
  Description of Artificial Sequence: Synthetic oligonucleotide
cauggcucaggguuucaug

SEQ ID NO: 3220469 - RNA, 19 nt, Artificial Sequence
  Description of Artificial Sequence: Synthetic oligonucleotide
ccaaguuucuguuugaucu

SEQ ID NO: 3220470 - RNA, 19 nt, Artificial Sequence
  Description of Artificial Sequence: Synthetic oligonucleotide
guucaugccaaguuucugu

SEQ ID NO: 3220471 - RNA, 19 nt, Artificial Sequence
  Description of Artificial Sequence: Synthetic oligonucleotide
guuugaucucaaccagaug

SEQ ID NO: 3220472 - RNA, 19 nt, Artificial Sequence
  Description of Artificial Sequence: Synthetic oligonucleotide
guuucauguguuuucugua

SEQ ID NO: 3220473 - RNA, 19 nt, Artificial Sequence
  Description of Artificial Sequence: Synthetic oligonucleotide
ccacauuacuggaagcugc

SEQ ID NO: 3220474 - RNA, 19 nt, Artificial Sequence
  Description of Artificial Sequence: Synthetic oligonucleotide
ucuguacgcaguugugguc

SEQ ID NO: 3220475 - RNA, 19 nt, Artificial Sequence
  Description of Artificial Sequence: Synthetic oligonucleotide
accagaugucuuucuuuug

SEQ ID NO: 3220476 - RNA, 19 nt, Artificial Sequence
  Description of Artificial Sequence: Synthetic oligonucleotide
uugcugauggcggugccca

SEQ ID NO: 3220477 - RNA, 19 nt, Artificial Sequence
  Description of Artificial Sequence: Synthetic oligonucleotide
ucugcaugucaugccagcu

SEQ ID NO: 3220478 - RNA, 19 nt, Artificial Sequence
  Description of Artificial Sequence: Synthetic oligonucleotide
uggccuucugccccgcaug

SEQ ID NO: 3220479 - RNA, 19 nt, Artificial Sequence
  Description of Artificial Sequence: Synthetic oligonucleotide
uucuugcugauggcggugc

SEQ ID NO: 3220480 - RNA, 19 nt, Artificial Sequence
  Description of Artificial Sequence: Synthetic oligonucleotide
ucuugcugauggcggugcc

SEQ ID NO: 3220481 - RNA, 19 nt, Artificial Sequence
  Description of Artificial Sequence: Synthetic oligonucleotide
gucugcaugucaugccagc

SEQ ID NO: 3220482 - RNA, 19 nt, Artificial Sequence
  Description of Artificial Sequence: Synthetic oligonucleotide
guggucugcaugucaugcc

SEQ ID NO: 3220483 - RNA, 19 nt, Artificial Sequence
  Description of Artificial Sequence: Synthetic oligonucleotide
uggcucaggguuucaugug

SEQ ID NO: 3220484 - RNA, 19 nt, Artificial Sequence
  Description of Artificial Sequence: Synthetic oligonucleotide
ucauaucuccaaacuucuu

SEQ ID NO: 3220485 - RNA, 19 nt, Artificial Sequence
  Description of Artificial Sequence: Synthetic oligonucleotide
uuguggucugcaugucaug

SEQ ID NO: 3220486 - RNA, 19 nt, Artificial Sequence
  Description of Artificial Sequence: Synthetic oligonucleotide
ugcccacauuacuggaagc

SEQ ID NO: 3220487 - RNA, 19 nt, Artificial Sequence
  Description of Artificial Sequence: Synthetic oligonucleotide
uucugcugaaguucugcuu

SEQ ID NO: 3220488 - RNA, 19 nt, Artificial Sequence
  Description of Artificial Sequence: Synthetic oligonucleotide
gcuuuaacucguucaucag

SEQ ID NO: 3220489 - RNA, 19 nt, Artificial Sequence
  Description of Artificial Sequence: Synthetic oligonucleotide
cuguuugaucucaaccaga

SEQ ID NO: 3220490 - RNA, 19 nt, Artificial Sequence
  Description of Artificial Sequence: Synthetic oligonucleotide
aggguuucauguguuuucu

SEQ ID NO: 3220491 - RNA, 19 nt, Artificial Sequence
  Description of Artificial Sequence: Synthetic oligonucleotide
auauuuacaugccagaccc

SEQ ID NO: 3220492 - RNA, 19 nt, Artificial Sequence
  Description of Artificial Sequence: Synthetic oligonucleotide
aauauuuacaugccagacc

SEQ ID NO: 3220493 - RNA, 19 nt, Artificial Sequence
  Description of Artificial Sequence: Synthetic oligonucleotide
ucauugaauauuuacaugc

SEQ ID NO: 3220494 - RNA, 19 nt, Artificial Sequence
  Description of Artificial Sequence: Synthetic oligonucleotide
uucaucaaaauucuucugg

SEQ ID NO: 3220495 - RNA, 19 nt, Artificial Sequence
  Description of Artificial Sequence: Synthetic oligonucleotide
aaauguuacagguuggaca

SEQ ID NO: 3220496 - RNA, 19 nt, Artificial Sequence
  Description of Artificial Sequence: Synthetic oligonucleotide
agaugcagccuuuaggucc

SEQ ID NO: 3220497 - RNA, 19 nt, Artificial Sequence
  Description of Artificial Sequence: Synthetic oligonucleotide
aauguuacagguuggacau

SEQ ID NO: 3220498 - RNA, 19 nt, Artificial Sequence
  Description of Artificial Sequence: Synthetic oligonucleotide
uuuccagucacguaauagg

SEQ ID NO: 3220499 - RNA, 19 nt, Artificial Sequence
  Description of Artificial Sequence: Synthetic oligonucleotide
uguaccuugggaaagccag

SEQ ID NO: 3220500 - RNA, 19 nt, Artificial Sequence
  Description of Artificial Sequence: Synthetic oligonucleotide
aacauugugacaggauucc

SEQ ID NO: 3220501 - RNA, 19 nt, Artificial Sequence
  Description of Artificial Sequence: Synthetic oligonucleotide
auagcaaccguccgggucc

SEQ ID NO: 3220502 - RNA, 19 nt, Artificial Sequence
  Description of Artificial Sequence: Synthetic oligonucleotide
ugcauaguugccaucacag

SEQ ID NO: 3220503 - RNA, 19 nt, Artificial Sequence
  Description of Artificial Sequence: Synthetic oligonucleotide
uugaacuucagcaccuugg

SEQ ID NO: 3220504 - RNA, 19 nt, Artificial Sequence
  Description of Artificial Sequence: Synthetic oligonucleotide
ucaaaauucuucuggauuc

SEQ ID NO: 3220505 - RNA, 19 nt, Artificial Sequence
  Description of Artificial Sequence: Synthetic oligonucleotide
ugagguugaagcaacuggc

SEQ ID NO: 3220506 - RNA, 19 nt, Artificial Sequence
  Description of Artificial Sequence: Synthetic oligonucleotide
caggccaucagaaagcagg

SEQ ID NO: 3220507 - RNA, 19 nt, Artificial Sequence
  Description of Artificial Sequence: Synthetic oligonucleotide
gaguccaacauugugacag

SEQ ID NO: 3220508 - RNA, 19 nt, Artificial Sequence
  Description of Artificial Sequence: Synthetic oligonucleotide
cauaguugccaucacaggc

SEQ ID NO: 3220509 - RNA, 19 nt, Artificial Sequence
  Description of Artificial Sequence: Synthetic oligonucleotide
gaguggaucacacauuacc

SEQ ID NO: 3220510 - RNA, 19 nt, Artificial Sequence
  Description of Artificial Sequence: Synthetic oligonucleotide
agaggugccagugucaagc

SEQ ID NO: 3220511 - RNA, 19 nt, Artificial Sequence
  Description of Artificial Sequence: Synthetic oligonucleotide
cuggauucccuccagauag

SEQ ID NO: 3220512 - RNA, 19 nt, Artificial Sequence
  Description of Artificial Sequence: Synthetic oligonucleotide
gaagcaacuggcugcauag

SEQ ID NO: 3220513 - RNA, 19 nt, Artificial Sequence
  Description of Artificial Sequence: Synthetic oligonucleotide
uuacccaaauguuacaggu

SEQ ID NO: 3220514 - RNA, 19 nt, Artificial Sequence
  Description of Artificial Sequence: Synthetic oligonucleotide
uguagaaacauggugcuga

SEQ ID NO: 3220515 - RNA, 19 nt, Artificial Sequence
  Description of Artificial Sequence: Synthetic oligonucleotide
agccuuuagguccugaguc

SEQ ID NO: 3220516 - RNA, 19 nt, Artificial Sequence
  Description of Artificial Sequence: Synthetic oligonucleotide
aggaguccaacauugugac

SEQ ID NO: 3220517 - RNA, 19 nt, Artificial Sequence
  Description of Artificial Sequence: Synthetic oligonucleotide
aguggaucacacauuaccc

SEQ ID NO: 3220518 - RNA, 19 nt, Artificial Sequence
  Description of Artificial Sequence: Synthetic oligonucleotide
uucauugaauauuuacaug

SEQ ID NO: 3220519 - RNA, 19 nt, Artificial Sequence
  Description of Artificial Sequence: Synthetic oligonucleotide
auuacccaaauguuacagg

SEQ ID NO: 3220520 - RNA, 19 nt, Artificial Sequence
  Description of Artificial Sequence: Synthetic oligonucleotide
cugucuguugcuuggaagg

SEQ ID NO: 3220521 - RNA, 19 nt, Artificial Sequence
  Description of Artificial Sequence: Synthetic oligonucleotide
uauagcagcugucacugug

SEQ ID NO: 3220522 - RNA, 19 nt, Artificial Sequence
  Description of Artificial Sequence: Synthetic oligonucleotide
ucuguugcuuggaagggag

SEQ ID NO: 3220523 - RNA, 19 nt, Artificial Sequence
  Description of Artificial Sequence: Synthetic oligonucleotide
cauugaauauuuacaugcc

SEQ ID NO: 3220524 - RNA, 19 nt, Artificial Sequence
  Description of Artificial Sequence: Synthetic oligonucleotide
auugaauauuuacaugcca

SEQ ID NO: 3220525 - RNA, 19 nt, Artificial Sequence
  Description of Artificial Sequence: Synthetic oligonucleotide
agcauuucggccuuggccu

SEQ ID NO: 3220526 - RNA, 19 nt, Artificial Sequence
  Description of Artificial Sequence: Synthetic oligonucleotide
acccaaauguuacagguug

SEQ ID NO: 3220527 - RNA, 19 nt, Artificial Sequence
  Description of Artificial Sequence: Synthetic oligonucleotide
aggggcacccuguagaaac

SEQ ID NO: 3220528 - RNA, 19 nt, Artificial Sequence
  Description of Artificial Sequence: Synthetic oligonucleotide
ugaacuucagcaccuuggc

SEQ ID NO: 3220529 - RNA, 19 nt, Artificial Sequence
  Description of Artificial Sequence: Synthetic oligonucleotide
auuccacagacuucuuccc

SEQ ID NO: 3220530 - RNA, 19 nt, Artificial Sequence
  Description of Artificial Sequence: Synthetic oligonucleotide
uuccagucacguaauaggc

SEQ ID NO: 3220531 - RNA, 19 nt, Artificial Sequence
  Description of Artificial Sequence: Synthetic oligonucleotide
cucacaggccaucagaaag

SEQ ID NO: 3220532 - RNA, 19 nt, Artificial Sequence
  Description of Artificial Sequence: Synthetic oligonucleotide
uaguccaccagccuauagc

SEQ ID NO: 3220533 - RNA, 19 nt, Artificial Sequence
  Description of Artificial Sequence: Synthetic oligonucleotide
agcuucaucaaaauucuuc

SEQ ID NO: 3220534 - RNA, 19 nt, Artificial Sequence
  Description of Artificial Sequence: Synthetic oligonucleotide
uuucucacaggccaucaga

SEQ ID NO: 3220535 - RNA, 19 nt, Artificial Sequence
  Description of Artificial Sequence: Synthetic oligonucleotide
acuucagcaccuuggcagc

SEQ ID NO: 3220536 - RNA, 19 nt, Artificial Sequence
  Description of Artificial Sequence: Synthetic oligonucleotide
cuuauagcagcugucacug

SEQ ID NO: 3220537 - RNA, 19 nt, Artificial Sequence
  Description of Artificial Sequence: Synthetic oligonucleotide
uggcacuccaccuucaugu

SEQ ID NO: 3220538 - RNA, 19 nt, Artificial Sequence
  Description of Artificial Sequence: Synthetic oligonucleotide
uccagauaguccaccagcc

SEQ ID NO: 3220539 - RNA, 19 nt, Artificial Sequence
  Description of Artificial Sequence: Synthetic oligonucleotide
gaauauuuacaugccagac

SEQ ID NO: 3220540 - RNA, 19 nt, Artificial Sequence
  Description of Artificial Sequence: Synthetic oligonucleotide
aguuuguuacauucggcug

SEQ ID NO: 3220541 - RNA, 19 nt, Artificial Sequence
  Description of Artificial Sequence: Synthetic oligonucleotide
uggcauuugucgcaggccc

SEQ ID NO: 3220542 - RNA, 19 nt, Artificial Sequence
  Description of Artificial Sequence: Synthetic oligonucleotide
uuugucgcaggcccgacga

SEQ ID NO: 3220543 - RNA, 19 nt, Artificial Sequence
  Description of Artificial Sequence: Synthetic oligonucleotide
ucucaggucaggcuggcca

SEQ ID NO: 3220544 - RNA, 19 nt, Artificial Sequence
  Description of Artificial Sequence: Synthetic oligonucleotide
ugugacaggauuccacaga

SEQ ID NO: 3220545 - RNA, 19 nt, Artificial Sequence
  Description of Artificial Sequence: Synthetic oligonucleotide
caugccagacccauguacc

SEQ ID NO: 3220546 - RNA, 19 nt, Artificial Sequence
  Description of Artificial Sequence: Synthetic oligonucleotide
ucacaggccaucagaaagc

SEQ ID NO: 3220547 - RNA, 19 nt, Artificial Sequence
  Description of Artificial Sequence: Synthetic oligonucleotide
uccuuaucaacaccauccc

SEQ ID NO: 3220548 - RNA, 19 nt, Artificial Sequence
  Description of Artificial Sequence: Synthetic oligonucleotide
uagguccugagucaggcca

SEQ ID NO: 3220549 - RNA, 19 nt, Artificial Sequence
  Description of Artificial Sequence: Synthetic oligonucleotide
auucggcuggcauuugucg

SEQ ID NO: 3220550 - RNA, 19 nt, Artificial Sequence
  Description of Artificial Sequence: Synthetic oligonucleotide
uuuagguccugagucaggc

SEQ ID NO: 3220551 - RNA, 19 nt, Artificial Sequence
  Description of Artificial Sequence: Synthetic oligonucleotide
ugccaggaguccaacauug

SEQ ID NO: 3220552 - RNA, 19 nt, Artificial Sequence
  Description of Artificial Sequence: Synthetic oligonucleotide
uguugcuuggaagggagag

SEQ ID NO: 3220553 - RNA, 19 nt, Artificial Sequence
  Description of Artificial Sequence: Synthetic oligonucleotide
caacuggcugcauaguugc

SEQ ID NO: 3220554 - RNA, 19 nt, Artificial Sequence
  Description of Artificial Sequence: Synthetic oligonucleotide
uccagucacguaauaggcc

SEQ ID NO: 3220555 - RNA, 19 nt, Artificial Sequence
  Description of Artificial Sequence: Synthetic oligonucleotide
uauagcaaccguccggguc

SEQ ID NO: 3220556 - RNA, 19 nt, Artificial Sequence
  Description of Artificial Sequence: Synthetic oligonucleotide
aguccaccagccuauagca

SEQ ID NO: 3220557 - RNA, 19 nt, Artificial Sequence
  Description of Artificial Sequence: Synthetic oligonucleotide
ugugccaggaguccaacau

SEQ ID NO: 3220558 - RNA, 19 nt, Artificial Sequence
  Description of Artificial Sequence: Synthetic oligonucleotide
caagcugucuguugcuugg

SEQ ID NO: 3220559 - RNA, 19 nt, Artificial Sequence
  Description of Artificial Sequence: Synthetic oligonucleotide
uccaccagccuauagcaac

SEQ ID NO: 3220560 - RNA, 19 nt, Artificial Sequence
  Description of Artificial Sequence: Synthetic oligonucleotide
cagccuauagcaaccgucc

SEQ ID NO: 3220561 - RNA, 19 nt, Artificial Sequence
  Description of Artificial Sequence: Synthetic oligonucleotide
cucacaguugaacuucagc

SEQ ID NO: 3220562 - RNA, 19 nt, Artificial Sequence
  Description of Artificial Sequence: Synthetic oligonucleotide
uguuacauucggcuggcau

SEQ ID NO: 3220563 - RNA, 19 nt, Artificial Sequence
  Description of Artificial Sequence: Synthetic oligonucleotide
uugcuuggaagggagagug

SEQ ID NO: 3220564 - RNA, 19 nt, Artificial Sequence
  Description of Artificial Sequence: Synthetic oligonucleotide
caacauugugacaggauuc

SEQ ID NO: 3220565 - RNA, 19 nt, Artificial Sequence
  Description of Artificial Sequence: Synthetic oligonucleotide
agucaggccaccuuuucca

SEQ ID NO: 3220566 - RNA, 19 nt, Artificial Sequence
  Description of Artificial Sequence: Synthetic oligonucleotide
uucucacaggccaucagaa

SEQ ID NO: 3220567 - RNA, 19 nt, Artificial Sequence
  Description of Artificial Sequence: Synthetic oligonucleotide
auagcagcugucacugugc

SEQ ID NO: 3220568 - RNA, 19 nt, Artificial Sequence
  Description of Artificial Sequence: Synthetic oligonucleotide
gugucaagcugucuguugc

SEQ ID NO: 3220569 - RNA, 19 nt, Artificial Sequence
  Description of Artificial Sequence: Synthetic oligonucleotide
uggaucacacauuacccaa

SEQ ID NO: 3220570 - RNA, 19 nt, Artificial Sequence
  Description of Artificial Sequence: Synthetic oligonucleotide
cauugaucuguccaucaug

SEQ ID NO: 3220571 - RNA, 19 nt, Artificial Sequence
  Description of Artificial Sequence: Synthetic oligonucleotide
cccuguagaaacauggugc

SEQ ID NO: 3220572 - RNA, 19 nt, Artificial Sequence
  Description of Artificial Sequence: Synthetic oligonucleotide
cagcauuucggccuuggcc

SEQ ID NO: 3220573 - RNA, 19 nt, Artificial Sequence
  Description of Artificial Sequence: Synthetic oligonucleotide
uugugacaggauuccacag

SEQ ID NO: 3220574 - RNA, 19 nt, Artificial Sequence
  Description of Artificial Sequence: Synthetic oligonucleotide
aggcuggccauccucauug

SEQ ID NO: 3220575 - RNA, 19 nt, Artificial Sequence
  Description of Artificial Sequence: Synthetic oligonucleotide
ucaagcugucuguugcuug

SEQ ID NO: 3220576 - RNA, 19 nt, Artificial Sequence
  Description of Artificial Sequence: Synthetic oligonucleotide
gugacaggauuccacagac

SEQ ID NO: 3220577 - RNA, 19 nt, Artificial Sequence
  Description of Artificial Sequence: Synthetic oligonucleotide
cuucaucaaaauucuucug

SEQ ID NO: 3220578 - RNA, 19 nt, Artificial Sequence
  Description of Artificial Sequence: Synthetic oligonucleotide
uaccuugggaaagccaggg

SEQ ID NO: 3220579 - RNA, 19 nt, Artificial Sequence
  Description of Artificial Sequence: Synthetic oligonucleotide
uaguugccaucacaggccc

SEQ ID NO: 3220580 - RNA, 19 nt, Artificial Sequence
  Description of Artificial Sequence: Synthetic oligonucleotide
ugucuguugcuuggaaggg

SEQ ID NO: 3220581 - RNA, 19 nt, Artificial Sequence
  Description of Artificial Sequence: Synthetic oligonucleotide
uuuguuacauucggcuggc

SEQ ID NO: 3220582 - RNA, 19 nt, Artificial Sequence
  Description of Artificial Sequence: Synthetic oligonucleotide
cugguaguggcacuccacc

SEQ ID NO: 3220583 - RNA, 19 nt, Artificial Sequence
  Description of Artificial Sequence: Synthetic oligonucleotide
agacccauguaccuuggga

SEQ ID NO: 3220584 - RNA, 19 nt, Artificial Sequence
  Description of Artificial Sequence: Synthetic oligonucleotide
gagaguggaucacacauua

SEQ ID NO: 3220585 - RNA, 19 nt, Artificial Sequence
  Description of Artificial Sequence: Synthetic oligonucleotide
uucggcuggcauuugucgc

SEQ ID NO: 3220586 - RNA, 19 nt, Artificial Sequence
  Description of Artificial Sequence: Synthetic oligonucleotide
ugaagcaacuggcugcaua

SEQ ID NO: 3220587 - RNA, 19 nt, Artificial Sequence
  Description of Artificial Sequence: Synthetic oligonucleotide
aguccaacauugugacagg

SEQ ID NO: 3220588 - RNA, 19 nt, Artificial Sequence
  Description of Artificial Sequence: Synthetic oligonucleotide
gucgaccaggccuucauug

SEQ ID NO: 3220589 - RNA, 19 nt, Artificial Sequence
  Description of Artificial Sequence: Synthetic oligonucleotide
ggcagaugcagccuuuagg

SEQ ID NO: 3220590 - RNA, 19 nt, Artificial Sequence
  Description of Artificial Sequence: Synthetic oligonucleotide
guagaaacauggugcugag

SEQ ID NO: 3220591 - RNA, 19 nt, Artificial Sequence
  Description of Artificial Sequence: Synthetic oligonucleotide
aauaaccucauuuugaugg

SEQ ID NO: 3220592 - RNA, 19 nt, Artificial Sequence
  Description of Artificial Sequence: Synthetic oligonucleotide
aauuggaacaaguuuaggc

SEQ ID NO: 3220593 - RNA, 19 nt, Artificial Sequence
  Description of Artificial Sequence: Synthetic oligonucleotide
acuguuuuaagucucaagc

SEQ ID NO: 3220594 - RNA, 19 nt, Artificial Sequence
  Description of Artificial Sequence: Synthetic oligonucleotide
aaguucagcguucuaaucc

SEQ ID NO: 3220595 - RNA, 19 nt, Artificial Sequence
  Description of Artificial Sequence: Synthetic oligonucleotide
uuuugaacgagcaaaacgc

SEQ ID NO: 3220596 - RNA, 19 nt, Artificial Sequence
  Description of Artificial Sequence: Synthetic oligonucleotide
auuuguaaaucuuaguaac

SEQ ID NO: 3220597 - RNA, 19 nt, Artificial Sequence
  Description of Artificial Sequence: Synthetic oligonucleotide
uuuaucuuuacauuuagga

SEQ ID NO: 3220598 - RNA, 19 nt, Artificial Sequence
  Description of Artificial Sequence: Synthetic oligonucleotide
aaauuucuucucuaacucc

SEQ ID NO: 3220599 - RNA, 19 nt, Artificial Sequence
  Description of Artificial Sequence: Synthetic oligonucleotide
uauuaaugagcucagaccu

SEQ ID NO: 3220600 - RNA, 19 nt, Artificial Sequence
  Description of Artificial Sequence: Synthetic oligonucleotide
aaaccaucagucuuuaauc

SEQ ID NO: 3220601 - RNA, 19 nt, Artificial Sequence
  Description of Artificial Sequence: Synthetic oligonucleotide
ugaaauucaucccuaagag

SEQ ID NO: 3220602 - RNA, 19 nt, Artificial Sequence
  Description of Artificial Sequence: Synthetic oligonucleotide
uuaaucuucagauucauau

SEQ ID NO: 3220603 - RNA, 19 nt, Artificial Sequence
  Description of Artificial Sequence: Synthetic oligonucleotide
uuuacuauuuaucuuuaca

SEQ ID NO: 3220604 - RNA, 19 nt, Artificial Sequence
  Description of Artificial Sequence: Synthetic oligonucleotide
aaaaccaucagucuuuaau

SEQ ID NO: 3220605 - RNA, 19 nt, Artificial Sequence
  Description of Artificial Sequence: Synthetic oligonucleotide
uaaaauaagagguuuaauu

SEQ ID NO: 3220606 - RNA, 19 nt, Artificial Sequence
  Description of Artificial Sequence: Synthetic oligonucleotide
uggaauuaagucuaaagac

SEQ ID NO: 3220607 - RNA, 19 nt, Artificial Sequence
  Description of Artificial Sequence: Synthetic oligonucleotide
gaugaauaugacuucuccg

SEQ ID NO: 3220608 - RNA, 19 nt, Artificial Sequence
  Description of Artificial Sequence: Synthetic oligonucleotide
uuuucugaaauucaucccu

SEQ ID NO: 3220609 - RNA, 19 nt, Artificial Sequence
  Description of Artificial Sequence: Synthetic oligonucleotide
aaucuuaguaacuuuacua

SEQ ID NO: 3220610 - RNA, 19 nt, Artificial Sequence
  Description of Artificial Sequence: Synthetic oligonucleotide
acgcauguaauuaauaacc

SEQ ID NO: 3220611 - RNA, 19 nt, Artificial Sequence
  Description of Artificial Sequence: Synthetic oligonucleotide
cuagacaaaaccaucaguc

SEQ ID NO: 3220612 - RNA, 19 nt, Artificial Sequence
  Description of Artificial Sequence: Synthetic oligonucleotide
uuaauuggaacaaguuuag

SEQ ID NO: 3220613 - RNA, 19 nt, Artificial Sequence
  Description of Artificial Sequence: Synthetic oligonucleotide
aaaggagagaauaugauaa

SEQ ID NO: 3220614 - RNA, 19 nt, Artificial Sequence
  Description of Artificial Sequence: Synthetic oligonucleotide
auuggaacaaguuuaggcu

SEQ ID NO: 3220615 - RNA, 19 nt, Artificial Sequence
  Description of Artificial Sequence: Synthetic oligonucleotide
cuggagauaacuuguaugc

SEQ ID NO: 3220616 - RNA, 19 nt, Artificial Sequence
  Description of Artificial Sequence: Synthetic oligonucleotide
uguuguuccaccuucauua

SEQ ID NO: 3220617 - RNA, 19 nt, Artificial Sequence
  Description of Artificial Sequence: Synthetic oligonucleotide
acugugaaagcauaggaug

SEQ ID NO: 3220618 - RNA, 19 nt, Artificial Sequence
  Description of Artificial Sequence: Synthetic oligonucleotide
cuuuauaaaauccuguuga

SEQ ID NO: 3220619 - RNA, 19 nt, Artificial Sequence
  Description of Artificial Sequence: Synthetic oligonucleotide
aaagacugcauguacucug

SEQ ID NO: 3220620 - RNA, 19 nt, Artificial Sequence
  Description of Artificial Sequence: Synthetic oligonucleotide
uuacuauuuaucuuuacau

SEQ ID NO: 3220621 - RNA, 19 nt, Artificial Sequence
  Description of Artificial Sequence: Synthetic oligonucleotide
aauccugaaguguucuuuc

SEQ ID NO: 3220622 - RNA, 19 nt, Artificial Sequence
  Description of Artificial Sequence: Synthetic oligonucleotide
uaugauaaaaugcuucaaa

SEQ ID NO: 3220623 - RNA, 19 nt, Artificial Sequence
  Description of Artificial Sequence: Synthetic oligonucleotide
guauuaaugagcucagacc

SEQ ID NO: 3220624 - RNA, 19 nt, Artificial Sequence
  Description of Artificial Sequence: Synthetic oligonucleotide
aaacgcauguaauuaauaa

SEQ ID NO: 3220625 - RNA, 19 nt, Artificial Sequence
  Description of Artificial Sequence: Synthetic oligonucleotide
uuagguaccacuucucagc

SEQ ID NO: 3220626 - RNA, 19 nt, Artificial Sequence
  Description of Artificial Sequence: Synthetic oligonucleotide
aauuaagucuaaagacugc

SEQ ID NO: 3220627 - RNA, 19 nt, Artificial Sequence
  Description of Artificial Sequence: Synthetic oligonucleotide
uucauuaauuggaacaagu

SEQ ID NO: 3220628 - RNA, 19 nt, Artificial Sequence
  Description of Artificial Sequence: Synthetic oligonucleotide
uccuuuucagccaagcuca

SEQ ID NO: 3220629 - RNA, 19 nt, Artificial Sequence
  Description of Artificial Sequence: Synthetic oligonucleotide
guagucuguauuucaaugg

SEQ ID NO: 3220630 - RNA, 19 nt, Artificial Sequence
  Description of Artificial Sequence: Synthetic oligonucleotide
gaauuaagucuaaagacug

SEQ ID NO: 3220631 - RNA, 19 nt, Artificial Sequence
  Description of Artificial Sequence: Synthetic oligonucleotide
uguagucuguauuucaaug

SEQ ID NO: 3220632 - RNA, 19 nt, Artificial Sequence
  Description of Artificial Sequence: Synthetic oligonucleotide
augaauaugacuucuccgu

SEQ ID NO: 3220633 - RNA, 19 nt, Artificial Sequence
  Description of Artificial Sequence: Synthetic oligonucleotide
acaaguuuaggcuuuguga

SEQ ID NO: 3220634 - RNA, 19 nt, Artificial Sequence
  Description of Artificial Sequence: Synthetic oligonucleotide
uuuacauuuaggaacugua

SEQ ID NO: 3220635 - RNA, 19 nt, Artificial Sequence
  Description of Artificial Sequence: Synthetic oligonucleotide
aaaguucagcguucuaauc

SEQ ID NO: 3220636 - RNA, 19 nt, Artificial Sequence
  Description of Artificial Sequence: Synthetic oligonucleotide
uguuuguugaaauuucuuc

SEQ ID NO: 3220637 - RNA, 19 nt, Artificial Sequence
  Description of Artificial Sequence: Synthetic oligonucleotide
uuagaaguucuguuguucc

SEQ ID NO: 3220638 - RNA, 19 nt, Artificial Sequence
  Description of Artificial Sequence: Synthetic oligonucleotide
aagucaugggccuuuauaa

SEQ ID NO: 3220639 - RNA, 19 nt, Artificial Sequence
  Description of Artificial Sequence: Synthetic oligonucleotide
ugaaccacagacugcaacc

SEQ ID NO: 3220640 - RNA, 19 nt, Artificial Sequence
  Description of Artificial Sequence: Synthetic oligonucleotide
aauaagagguuuaauuugu

SEQ ID NO: 3220641 - RNA, 19 nt, Artificial Sequence
  Description of Artificial Sequence: Synthetic oligonucleotide
uuuguaaaucuuaguaacu

SEQ ID NO: 3220642 - RNA, 19 nt, Artificial Sequence
  Description of Artificial Sequence: Synthetic oligonucleotide
aacuuguaugcucaugugu

SEQ ID NO: 3220643 - RNA, 19 nt, Artificial Sequence
  Description of Artificial Sequence: Synthetic oligonucleotide
ugaacgagcaaaacgcaug

SEQ ID NO: 3220644 - RNA, 19 nt, Artificial Sequence
  Description of Artificial Sequence: Synthetic oligonucleotide
ucagucuuuaaucuucaga

SEQ ID NO: 3220645 - RNA, 19 nt, Artificial Sequence
  Description of Artificial Sequence: Synthetic oligonucleotide
uguagaguguugaugguac

SEQ ID NO: 3220646 - RNA, 19 nt, Artificial Sequence
  Description of Artificial Sequence: Synthetic oligonucleotide
aaccuagucaccgacuuuc

SEQ ID NO: 3220647 - RNA, 19 nt, Artificial Sequence
  Description of Artificial Sequence: Synthetic oligonucleotide
uuucuaaacugugaaagca

SEQ ID NO: 3220648 - RNA, 19 nt, Artificial Sequence
  Description of Artificial Sequence: Synthetic oligonucleotide
ucugaggaggucauguuug

SEQ ID NO: 3220649 - RNA, 19 nt, Artificial Sequence
  Description of Artificial Sequence: Synthetic oligonucleotide
ucuaguaauucucuguuuu

SEQ ID NO: 3220650 - RNA, 19 nt, Artificial Sequence
  Description of Artificial Sequence: Synthetic oligonucleotide
uuuagguaccacuucucag

SEQ ID NO: 3220651 - RNA, 19 nt, Artificial Sequence
  Description of Artificial Sequence: Synthetic oligonucleotide
accuucauuaauuggaaca

SEQ ID NO: 3220652 - RNA, 19 nt, Artificial Sequence
  Description of Artificial Sequence: Synthetic oligonucleotide
agagguuuaauuuguaaau

SEQ ID NO: 3220653 - RNA, 19 nt, Artificial Sequence
  Description of Artificial Sequence: Synthetic oligonucleotide
aaccucauuuugauggugc

SEQ ID NO: 3220654 - RNA, 19 nt, Artificial Sequence
  Description of Artificial Sequence: Synthetic oligonucleotide
auuaauuggaacaaguuua

SEQ ID NO: 3220655 - RNA, 19 nt, Artificial Sequence
  Description of Artificial Sequence: Synthetic oligonucleotide
auuuguucuaguaauucuc

SEQ ID NO: 3220656 - RNA, 19 nt, Artificial Sequence
  Description of Artificial Sequence: Synthetic oligonucleotide
aaccaucagucuuuaaucu

SEQ ID NO: 3220657 - RNA, 19 nt, Artificial Sequence
  Description of Artificial Sequence: Synthetic oligonucleotide
aaguacaugccugagguga

SEQ ID NO: 3220658 - RNA, 19 nt, Artificial Sequence
  Description of Artificial Sequence: Synthetic oligonucleotide
uguucuaguaauucucugu

SEQ ID NO: 3220659 - RNA, 19 nt, Artificial Sequence
  Description of Artificial Sequence: Synthetic oligonucleotide
uucuagacaaaaccaucag

SEQ ID NO: 3220660 - RNA, 19 nt, Artificial Sequence
  Description of Artificial Sequence: Synthetic oligonucleotide
aucuuaguaacuuuacuau

SEQ ID NO: 3220661 - RNA, 19 nt, Artificial Sequence
  Description of Artificial Sequence: Synthetic oligonucleotide
cuugaaagcaggcaucuac

SEQ ID NO: 3220662 - RNA, 19 nt, Artificial Sequence
  Description of Artificial Sequence: Synthetic oligonucleotide
aauuucuucucuaacuccu

SEQ ID NO: 3220663 - RNA, 19 nt, Artificial Sequence
  Description of Artificial Sequence: Synthetic oligonucleotide
aaagacuuuugguuuucug

SEQ ID NO: 3220664 - RNA, 19 nt, Artificial Sequence
  Description of Artificial Sequence: Synthetic oligonucleotide
cuuucuaaacugugaaagc

SEQ ID NO: 3220665 - RNA, 19 nt, Artificial Sequence
  Description of Artificial Sequence: Synthetic oligonucleotide
ucuagacaaaaccaucagu

SEQ ID NO: 3220666 - RNA, 19 nt, Artificial Sequence
  Description of Artificial Sequence: Synthetic oligonucleotide
cauaacacaaaccuuauua

SEQ ID NO: 3220667 - RNA, 19 nt, Artificial Sequence
  Description of Artificial Sequence: Synthetic oligonucleotide
guaacuuuacuauuuaucu

SEQ ID NO: 3220668 - RNA, 19 nt, Artificial Sequence
  Description of Artificial Sequence: Synthetic oligonucleotide
uguagcuuuagguaccacu

SEQ ID NO: 3220669 - RNA, 19 nt, Artificial Sequence
  Description of Artificial Sequence: Synthetic oligonucleotide
aauucuggaauuaagucua

SEQ ID NO: 3220670 - RNA, 19 nt, Artificial Sequence
  Description of Artificial Sequence: Synthetic oligonucleotide
uguggcagguucuagacaa

SEQ ID NO: 3220671 - RNA, 19 nt, Artificial Sequence
  Description of Artificial Sequence: Synthetic oligonucleotide
uugaaauuucuucucuaac

SEQ ID NO: 3220672 - RNA, 19 nt, Artificial Sequence
  Description of Artificial Sequence: Synthetic oligonucleotide
uuucugucuggucauuaag

SEQ ID NO: 3220673 - RNA, 19 nt, Artificial Sequence
  Description of Artificial Sequence: Synthetic oligonucleotide
ugucuguagcuuuagguac

SEQ ID NO: 3220674 - RNA, 19 nt, Artificial Sequence
  Description of Artificial Sequence: Synthetic oligonucleotide
aacccaaaguccaaccugg

SEQ ID NO: 3220675 - RNA, 19 nt, Artificial Sequence
  Description of Artificial Sequence: Synthetic oligonucleotide
uuaaugagcucagaccucc

SEQ ID NO: 3220676 - RNA, 19 nt, Artificial Sequence
  Description of Artificial Sequence: Synthetic oligonucleotide
cuaaacugugaaagcauag

SEQ ID NO: 3220677 - RNA, 19 nt, Artificial Sequence
  Description of Artificial Sequence: Synthetic oligonucleotide
ugucuggucauuaaguguu

SEQ ID NO: 3220678 - RNA, 19 nt, Artificial Sequence
  Description of Artificial Sequence: Synthetic oligonucleotide
aacuccuuuucagccaagc

SEQ ID NO: 3220679 - RNA, 19 nt, Artificial Sequence
  Description of Artificial Sequence: Synthetic oligonucleotide
ucuuucauguuucgauaag

SEQ ID NO: 3220680 - RNA, 19 nt, Artificial Sequence
  Description of Artificial Sequence: Synthetic oligonucleotide
agauguaaauucugccuuc

SEQ ID NO: 3220681 - RNA, 19 nt, Artificial Sequence
  Description of Artificial Sequence: Synthetic oligonucleotide
gaauucuggaauuaagucu

SEQ ID NO: 3220682 - RNA, 19 nt, Artificial Sequence
  Description of Artificial Sequence: Synthetic oligonucleotide
cucuaacuccuuuucagcc

SEQ ID NO: 3220683 - RNA, 19 nt, Artificial Sequence
  Description of Artificial Sequence: Synthetic oligonucleotide
caaccuggaaccuagucac

SEQ ID NO: 3220684 - RNA, 19 nt, Artificial Sequence
  Description of Artificial Sequence: Synthetic oligonucleotide
accgacuuucuguugaguc

SEQ ID NO: 3220685 - RNA, 19 nt, Artificial Sequence
  Description of Artificial Sequence: Synthetic oligonucleotide
ucauuaauuggaacaaguu

SEQ ID NO: 3220686 - RNA, 19 nt, Artificial Sequence
  Description of Artificial Sequence: Synthetic oligonucleotide
uuuauaaaauccuguugau

SEQ ID NO: 3220687 - RNA, 19 nt, Artificial Sequence
  Description of Artificial Sequence: Synthetic oligonucleotide
uaaguguuuucugaaauuc

SEQ ID NO: 3220688 - RNA, 19 nt, Artificial Sequence
  Description of Artificial Sequence: Synthetic oligonucleotide
cagauucauauuuugccag

SEQ ID NO: 3220689 - RNA, 19 nt, Artificial Sequence
  Description of Artificial Sequence: Synthetic oligonucleotide
gaucaauuuguaaauccug

SEQ ID NO: 3220690 - RNA, 19 nt, Artificial Sequence
  Description of Artificial Sequence: Synthetic oligonucleotide
uuuuaagucucaagccucu

SEQ ID NO: 3220691 - RNA, 19 nt, Artificial Sequence
  Description of Artificial Sequence: Synthetic oligonucleotide
uccuugaccaccaugaggc

SEQ ID NO: 3220692 - RNA, 19 nt, Artificial Sequence
  Description of Artificial Sequence: Synthetic oligonucleotide
gucaaaugcaaccaggaag

SEQ ID NO: 3220693 - RNA, 19 nt, Artificial Sequence
  Description of Artificial Sequence: Synthetic oligonucleotide
uggacauucaccuucacuc

SEQ ID NO: 3220694 - RNA, 19 nt, Artificial Sequence
  Description of Artificial Sequence: Synthetic oligonucleotide
uccagaacuugucaaaugc

SEQ ID NO: 3220695 - RNA, 19 nt, Artificial Sequence
  Description of Artificial Sequence: Synthetic oligonucleotide
aaugcaaccaggaagccug

SEQ ID NO: 3220696 - RNA, 19 nt, Artificial Sequence
  Description of Artificial Sequence: Synthetic oligonucleotide
uugaaagugcggaucgugg

SEQ ID NO: 3220697 - RNA, 19 nt, Artificial Sequence
  Description of Artificial Sequence: Synthetic oligonucleotide
ugggguaggggauaggagg

SEQ ID NO: 3220698 - RNA, 19 nt, Artificial Sequence
  Description of Artificial Sequence: Synthetic oligonucleotide
cuugucaaaugcaaccagg

SEQ ID NO: 3220699 - RNA, 19 nt, Artificial Sequence
  Description of Artificial Sequence: Synthetic oligonucleotide
acguuguuaaagcagggag

SEQ ID NO: 3220700 - RNA, 19 nt, Artificial Sequence
  Description of Artificial Sequence: Synthetic oligonucleotide
uucacucccucucugauac

SEQ ID NO: 3220701 - RNA, 19 nt, Artificial Sequence
  Description of Artificial Sequence: Synthetic oligonucleotide
aaagcagggagcguugggg

SEQ ID NO: 3220702 - RNA, 19 nt, Artificial Sequence
  Description of Artificial Sequence: Synthetic oligonucleotide
aucguggacauucaccuuc

SEQ ID NO: 3220703 - RNA, 19 nt, Artificial Sequence
  Description of Artificial Sequence: Synthetic oligonucleotide
uccuccuugaccaccauga

SEQ ID NO: 3220704 - RNA, 19 nt, Artificial Sequence
  Description of Artificial Sequence: Synthetic oligonucleotide
ucugauacagcgguggagc

SEQ ID NO: 3220705 - RNA, 19 nt, Artificial Sequence
  Description of Artificial Sequence: Synthetic oligonucleotide
ucaugcaggggcauucgcg

SEQ ID NO: 3220706 - RNA, 19 nt, Artificial Sequence
  Description of Artificial Sequence: Synthetic oligonucleotide
uugucaaaugcaaccagga

SEQ ID NO: 3220707 - RNA, 19 nt, Artificial Sequence
  Description of Artificial Sequence: Synthetic oligonucleotide
cagagggcuaccuucaugc

SEQ ID NO: 3220708 - RNA, 19 nt, Artificial Sequence
  Description of Artificial Sequence: Synthetic oligonucleotide
uccauguuugaaaggcccg

SEQ ID NO: 3220709 - RNA, 19 nt, Artificial Sequence
  Description of Artificial Sequence: Synthetic oligonucleotide
uccuccauguuugaaaggc

SEQ ID NO: 3220710 - RNA, 19 nt, Artificial Sequence
  Description of Artificial Sequence: Synthetic oligonucleotide
cuccauguuugaaaggccc

SEQ ID NO: 3220711 - RNA, 19 nt, Artificial Sequence
  Description of Artificial Sequence: Synthetic oligonucleotide
ucuuacugcgccccgggcc

SEQ ID NO: 3220712 - RNA, 19 nt, Artificial Sequence
  Description of Artificial Sequence: Synthetic oligonucleotide
agaacuugucaaaugcaac

SEQ ID NO: 3220713 - RNA, 19 nt, Artificial Sequence
  Description of Artificial Sequence: Synthetic oligonucleotide
uugaccaccaugaggcggc

SEQ ID NO: 3220714 - RNA, 19 nt, Artificial Sequence
  Description of Artificial Sequence: Synthetic oligonucleotide
aggaagccugugcagacac

SEQ ID NO: 3220715 - RNA, 19 nt, Artificial Sequence
  Description of Artificial Sequence: Synthetic oligonucleotide
uccgcguccuccuugacca

SEQ ID NO: 3220716 - RNA, 19 nt, Artificial Sequence
  Description of Artificial Sequence: Synthetic oligonucleotide
cauaguuccagaacuuguc

SEQ ID NO: 3220717 - RNA, 19 nt, Artificial Sequence
  Description of Artificial Sequence: Synthetic oligonucleotide
uaaagcagggagcguuggg

SEQ ID NO: 3220718 - RNA, 19 nt, Artificial Sequence
  Description of Artificial Sequence: Synthetic oligonucleotide
cucccucucugauacagcg

SEQ ID NO: 3220719 - RNA, 19 nt, Artificial Sequence
  Description of Artificial Sequence: Synthetic oligonucleotide
auaguuccagaacuuguca

SEQ ID NO: 3220720 - RNA, 19 nt, Artificial Sequence
  Description of Artificial Sequence: Synthetic oligonucleotide
ugaaagugcggaucgugga

SEQ ID NO: 3220721 - RNA, 19 nt, Artificial Sequence
  Description of Artificial Sequence: Synthetic oligonucleotide
auucgcgugagcacguugc

SEQ ID NO: 3220722 - RNA, 19 nt, Artificial Sequence
  Description of Artificial Sequence: Synthetic oligonucleotide
uccgccacguuguuaaagc

SEQ ID NO: 3220723 - RNA, 19 nt, Artificial Sequence
  Description of Artificial Sequence: Synthetic oligonucleotide
gaagccugugcagacaccc

SEQ ID NO: 3220724 - RNA, 19 nt, Artificial Sequence
  Description of Artificial Sequence: Synthetic oligonucleotide
ucguccgcccuucaggaag

SEQ ID NO: 3220725 - RNA, 19 nt, Artificial Sequence
  Description of Artificial Sequence: Synthetic oligonucleotide
agcgggucgaagcuguagg

SEQ ID NO: 3220726 - RNA, 19 nt, Artificial Sequence
  Description of Artificial Sequence: Synthetic oligonucleotide
gaguacagggccagcagcg

SEQ ID NO: 3220727 - RNA, 19 nt, Artificial Sequence
  Description of Artificial Sequence: Synthetic oligonucleotide
ugucaaaugcaaccaggaa

SEQ ID NO: 3220728 - RNA, 19 nt, Artificial Sequence
  Description of Artificial Sequence: Synthetic oligonucleotide
aaaugcaaccaggaagccu

SEQ ID NO: 3220729 - RNA, 19 nt, Artificial Sequence
  Description of Artificial Sequence: Synthetic oligonucleotide
gaaagugcggaucguggac

SEQ ID NO: 3220730 - RNA, 19 nt, Artificial Sequence
  Description of Artificial Sequence: Synthetic oligonucleotide
uuaaagcagggagcguugg

SEQ ID NO: 3220731 - RNA, 19 nt, Artificial Sequence
  Description of Artificial Sequence: Synthetic oligonucleotide
uacuccgccacguuguuaa

SEQ ID NO: 3220732 - RNA, 19 nt, Artificial Sequence
  Description of Artificial Sequence: Synthetic oligonucleotide
aaccaggaagccugugcag

SEQ ID NO: 3220733 - RNA, 19 nt, Artificial Sequence
  Description of Artificial Sequence: Synthetic oligonucleotide
gagggcuaccuucaugcag

SEQ ID NO: 3220734 - RNA, 19 nt, Artificial Sequence
  Description of Artificial Sequence: Synthetic oligonucleotide
gauacagcgguggagcuca

SEQ ID NO: 3220735 - RNA, 19 nt, Artificial Sequence
  Description of Artificial Sequence: Synthetic oligonucleotide
uggagguucccgccgaggc

SEQ ID NO: 3220736 - RNA, 19 nt, Artificial Sequence
  Description of Artificial Sequence: Synthetic oligonucleotide
caugaggcggcggagacgc

SEQ ID NO: 3220737 - RNA, 19 nt, Artificial Sequence
  Description of Artificial Sequence: Synthetic oligonucleotide
uuccagaacuugucaaaug

SEQ ID NO: 3220738 - RNA, 19 nt, Artificial Sequence
  Description of Artificial Sequence: Synthetic oligonucleotide
aaagugcggaucguggaca

SEQ ID NO: 3220739 - RNA, 19 nt, Artificial Sequence
  Description of Artificial Sequence: Synthetic oligonucleotide
ggagcugacguccaggcgc

SEQ ID NO: 3220740 - RNA, 19 nt, Artificial Sequence
  Description of Artificial Sequence: Synthetic oligonucleotide
uugggguaggggauaggag

SEQ ID NO: 3220741 - RNA, 19 nt, Artificial Sequence
  Description of Artificial Sequence: Synthetic oligonucleotide
agccugugcagacaccccg

SEQ ID NO: 3220742 - RNA, 19 nt, Artificial Sequence
  Description of Artificial Sequence: Synthetic oligonucleotide
cuuacugcgccccgggccc

SEQ ID NO: 3220743 - RNA, 19 nt, Artificial Sequence
  Description of Artificial Sequence: Synthetic oligonucleotide
aguuccagaacuugucaaa

SEQ ID NO: 3220744 - RNA, 19 nt, Artificial Sequence
  Description of Artificial Sequence: Synthetic oligonucleotide
gagguucccgccgaggccg

SEQ ID NO: 3220745 - RNA, 19 nt, Artificial Sequence
  Description of Artificial Sequence: Synthetic oligonucleotide
aagcagggagcguuggggu

SEQ ID NO: 3220746 - RNA, 19 nt, Artificial Sequence
  Description of Artificial Sequence: Synthetic oligonucleotide
uaguuccagaacuugucaa

SEQ ID NO: 3220747 - RNA, 19 nt, Artificial Sequence
  Description of Artificial Sequence: Synthetic oligonucleotide
gauaggaggaaggcgcggc

SEQ ID NO: 3220748 - RNA, 19 nt, Artificial Sequence
  Description of Artificial Sequence: Synthetic oligonucleotide
uucgcgugagcacguugcg

SEQ ID NO: 3220749 - RNA, 19 nt, Artificial Sequence
  Description of Artificial Sequence: Synthetic oligonucleotide
uguaggagcugacguccag

SEQ ID NO: 3220750 - RNA, 19 nt, Artificial Sequence
  Description of Artificial Sequence: Synthetic oligonucleotide
cuugaccaccaugaggcgg

SEQ ID NO: 3220751 - RNA, 19 nt, Artificial Sequence
  Description of Artificial Sequence: Synthetic oligonucleotide
agucccuugaaagugcgga

SEQ ID NO: 3220752 - RNA, 19 nt, Artificial Sequence
  Description of Artificial Sequence: Synthetic oligonucleotide
cuugaaagugcggaucgug

SEQ ID NO: 3220753 - RNA, 19 nt, Artificial Sequence
  Description of Artificial Sequence: Synthetic oligonucleotide
uucaugcaggggcauucgc

SEQ ID NO: 3220754 - RNA, 19 nt, Artificial Sequence
  Description of Artificial Sequence: Synthetic oligonucleotide
cuucuuacugcgccccggg

SEQ ID NO: 3220755 - RNA, 19 nt, Artificial Sequence
  Description of Artificial Sequence: Synthetic oligonucleotide
ucucugauacagcggugga

SEQ ID NO: 3220756 - RNA, 19 nt, Artificial Sequence
  Description of Artificial Sequence: Synthetic oligonucleotide
ucgcgcuccuccauguuug

SEQ ID NO: 3220757 - RNA, 19 nt, Artificial Sequence
  Description of Artificial Sequence: Synthetic oligonucleotide
ggaucguccgcccuucagg

SEQ ID NO: 3220758 - RNA, 19 nt, Artificial Sequence
  Description of Artificial Sequence: Synthetic oligonucleotide
uaggggauaggaggaaggc

SEQ ID NO: 3220759 - RNA, 19 nt, Artificial Sequence
  Description of Artificial Sequence: Synthetic oligonucleotide
aggggauaggaggaaggcg

SEQ ID NO: 3220760 - RNA, 19 nt, Artificial Sequence
  Description of Artificial Sequence: Synthetic oligonucleotide
ugcaggggcauucgcguga

SEQ ID NO: 3220761 - RNA, 19 nt, Artificial Sequence
  Description of Artificial Sequence: Synthetic oligonucleotide
ucaccuucacucccucucu

SEQ ID NO: 3220762 - RNA, 19 nt, Artificial Sequence
  Description of Artificial Sequence: Synthetic oligonucleotide
gaucguccgcccuucagga

SEQ ID NO: 3220763 - RNA, 19 nt, Artificial Sequence
  Description of Artificial Sequence: Synthetic oligonucleotide
uugcguggcgccuucuuac

SEQ ID NO: 3220764 - RNA, 19 nt, Artificial Sequence
  Description of Artificial Sequence: Synthetic oligonucleotide
ggggauaggaggaaggcgc

SEQ ID NO: 3220765 - RNA, 19 nt, Artificial Sequence
  Description of Artificial Sequence: Synthetic oligonucleotide
ucguggacauucaccuuca

SEQ ID NO: 3220766 - RNA, 19 nt, Artificial Sequence
  Description of Artificial Sequence: Synthetic oligonucleotide
gaugcgcucgggaucuggg

SEQ ID NO: 3220767 - RNA, 19 nt, Artificial Sequence
  Description of Artificial Sequence: Synthetic oligonucleotide
ugcgcucgggaucuggggu

SEQ ID NO: 3220768 - RNA, 19 nt, Artificial Sequence
  Description of Artificial Sequence: Synthetic oligonucleotide
aagccugugcagacacccc

SEQ ID NO: 3220769 - RNA, 19 nt, Artificial Sequence
  Description of Artificial Sequence: Synthetic oligonucleotide
guuaaagcagggagcguug

SEQ ID NO: 3220770 - RNA, 19 nt, Artificial Sequence
  Description of Artificial Sequence: Synthetic oligonucleotide
ucgggaucuggggugggcg

SEQ ID NO: 3220771 - RNA, 19 nt, Artificial Sequence
  Description of Artificial Sequence: Synthetic oligonucleotide
ugcagacaccccgaagucc

SEQ ID NO: 3220772 - RNA, 19 nt, Artificial Sequence
  Description of Artificial Sequence: Synthetic oligonucleotide
gccacguuguuaaagcagg

SEQ ID NO: 3220773 - RNA, 19 nt, Artificial Sequence
  Description of Artificial Sequence: Synthetic oligonucleotide
guaggagcugacguccagg

SEQ ID NO: 3220774 - RNA, 19 nt, Artificial Sequence
  Description of Artificial Sequence: Synthetic oligonucleotide
ggacauucaccuucacucc

SEQ ID NO: 3220775 - RNA, 19 nt, Artificial Sequence
  Description of Artificial Sequence: Synthetic oligonucleotide
aagcucucguacuccgcca

SEQ ID NO: 3220776 - RNA, 19 nt, Artificial Sequence
  Description of Artificial Sequence: Synthetic oligonucleotide
uccaggcgcgggcugggcg

SEQ ID NO: 3220777 - RNA, 19 nt, Artificial Sequence
  Description of Artificial Sequence: Synthetic oligonucleotide
uggagcucacccagagggc

SEQ ID NO: 3220778 - RNA, 19 nt, Artificial Sequence
  Description of Artificial Sequence: Synthetic oligonucleotide
aggaggaaggcgcggcgag

SEQ ID NO: 3220779 - RNA, 19 nt, Artificial Sequence
  Description of Artificial Sequence: Synthetic oligonucleotide
caaccaggaagccugugca

SEQ ID NO: 3220780 - RNA, 19 nt, Artificial Sequence
  Description of Artificial Sequence: Synthetic oligonucleotide
gggucgaagcuguaggagc

SEQ ID NO: 3220781 - RNA, 19 nt, Artificial Sequence
  Description of Artificial Sequence: Synthetic oligonucleotide
cucguacuccgccacguug

SEQ ID NO: 3220782 - RNA, 19 nt, Artificial Sequence
  Description of Artificial Sequence: Synthetic oligonucleotide
cguuguuaaagcagggagc

SEQ ID NO: 3220783 - RNA, 19 nt, Artificial Sequence
  Description of Artificial Sequence: Synthetic oligonucleotide
aagugcggaucguggacau

SEQ ID NO: 3220784 - RNA, 19 nt, Artificial Sequence
  Description of Artificial Sequence: Synthetic oligonucleotide
uucuuacugcgccccgggc

SEQ ID NO: 3220785 - RNA, 19 nt, Artificial Sequence
  Description of Artificial Sequence: Synthetic oligonucleotide
ggagcguugggguagggga

SEQ ID NO: 3220786 - RNA, 19 nt, Artificial Sequence
  Description of Artificial Sequence: Synthetic oligonucleotide
uggucgaggugccggcucc

SEQ ID NO: 3220787 - RNA, 19 nt, Artificial Sequence
  Description of Artificial Sequence: Synthetic oligonucleotide
cacucccucucugauacag

SEQ ID NO: 3220788 - RNA, 19 nt, Artificial Sequence
  Description of Artificial Sequence: Synthetic oligonucleotide
aggggcauucgcgugagca

SEQ ID NO: 3220789 - RNA, 19 nt, Artificial Sequence
  Description of Artificial Sequence: Synthetic oligonucleotide
guggcgccuucuuacugcg

SEQ ID NO: 3220790 - RNA, 19 nt, Artificial Sequence
  Description of Artificial Sequence: Synthetic oligonucleotide
ucgagccccggccgcaccg

SEQ ID NO: 3220791 - RNA, 19 nt, Artificial Sequence
  Description of Artificial Sequence: Synthetic oligonucleotide
uugcagaugacauacacgg

SEQ ID NO: 3220792 - RNA, 19 nt, Artificial Sequence
  Description of Artificial Sequence: Synthetic oligonucleotide
gacugcaggacccugacgg

SEQ ID NO: 3220793 - RNA, 19 nt, Artificial Sequence
  Description of Artificial Sequence: Synthetic oligonucleotide
uuugcagaugacauacacg

SEQ ID NO: 3220794 - RNA, 19 nt, Artificial Sequence
  Description of Artificial Sequence: Synthetic oligonucleotide
aauuuugguggcccaggcc

SEQ ID NO: 3220795 - RNA, 19 nt, Artificial Sequence
  Description of Artificial Sequence: Synthetic oligonucleotide
aguacuguggaaaugccgc

SEQ ID NO: 3220796 - RNA, 19 nt, Artificial Sequence
  Description of Artificial Sequence: Synthetic oligonucleotide
ugucccuucaguacugugg

SEQ ID NO: 3220797 - RNA, 19 nt, Artificial Sequence
  Description of Artificial Sequence: Synthetic oligonucleotide
uucaguacuguggaaaugc

SEQ ID NO: 3220798 - RNA, 19 nt, Artificial Sequence
  Description of Artificial Sequence: Synthetic oligonucleotide
auuuugguggcccaggcca

SEQ ID NO: 3220799 - RNA, 19 nt, Artificial Sequence
  Description of Artificial Sequence: Synthetic oligonucleotide
augacauacacggacagag

SEQ ID NO: 3220800 - RNA, 19 nt, Artificial Sequence
  Description of Artificial Sequence: Synthetic oligonucleotide
cuuucugggagucauuccc

SEQ ID NO: 3220801 - RNA, 19 nt, Artificial Sequence
  Description of Artificial Sequence: Synthetic oligonucleotide
ucuggcacugccguuaagg

SEQ ID NO: 3220802 - RNA, 19 nt, Artificial Sequence
  Description of Artificial Sequence: Synthetic oligonucleotide
ugccgcaucaauuuuggug

SEQ ID NO: 3220803 - RNA, 19 nt, Artificial Sequence
  Description of Artificial Sequence: Synthetic oligonucleotide
aucccggacgguuagagag

SEQ ID NO: 3220804 - RNA, 19 nt, Artificial Sequence
  Description of Artificial Sequence: Synthetic oligonucleotide
aaugccgcaucaauuuugg

SEQ ID NO: 3220805 - RNA, 19 nt, Artificial Sequence
  Description of Artificial Sequence: Synthetic oligonucleotide
acacggacagagcagcccc

SEQ ID NO: 3220806 - RNA, 19 nt, Artificial Sequence
  Description of Artificial Sequence: Synthetic oligonucleotide
gccgcaucaauuuuggugg

SEQ ID NO: 3220807 - RNA, 19 nt, Artificial Sequence
  Description of Artificial Sequence: Synthetic oligonucleotide
gacauacacggacagagca

SEQ ID NO: 3220808 - RNA, 19 nt, Artificial Sequence
  Description of Artificial Sequence: Synthetic oligonucleotide
ugccguuaaggacugcagg

SEQ ID NO: 3220809 - RNA, 19 nt, Artificial Sequence
  Description of Artificial Sequence: Synthetic oligonucleotide
gacccugacggcuuucugg

SEQ ID NO: 3220810 - RNA, 19 nt, Artificial Sequence
  Description of Artificial Sequence: Synthetic oligonucleotide
agaugacauacacggacag

SEQ ID NO: 3220811 - RNA, 19 nt, Artificial Sequence
  Description of Artificial Sequence: Synthetic oligonucleotide
ucaauuuugguggcccagg

SEQ ID NO: 3220812 - RNA, 19 nt, Artificial Sequence
  Description of Artificial Sequence: Synthetic oligonucleotide
guuugcagaugacauacac

SEQ ID NO: 3220813 - RNA, 19 nt, Artificial Sequence
  Description of Artificial Sequence: Synthetic oligonucleotide
aagggcgugcggcaggcgg

SEQ ID NO: 3220814 - RNA, 19 nt, Artificial Sequence
  Description of Artificial Sequence: Synthetic oligonucleotide
cuguuugcagaugacauac

SEQ ID NO: 3220815 - RNA, 19 nt, Artificial Sequence
  Description of Artificial Sequence: Synthetic oligonucleotide
uuucugggagucauucccc

SEQ ID NO: 3220816 - RNA, 19 nt, Artificial Sequence
  Description of Artificial Sequence: Synthetic oligonucleotide
aaaugccgcaucaauuuug

SEQ ID NO: 3220817 - RNA, 19 nt, Artificial Sequence
  Description of Artificial Sequence: Synthetic oligonucleotide
ucaguacuguggaaaugcc

SEQ ID NO: 3220818 - RNA, 19 nt, Artificial Sequence
  Description of Artificial Sequence: Synthetic oligonucleotide
caguacuguggaaaugccg

SEQ ID NO: 3220819 - RNA, 19 nt, Artificial Sequence
  Description of Artificial Sequence: Synthetic oligonucleotide
acuguggaaaugccgcauc

SEQ ID NO: 3220820 - RNA, 19 nt, Artificial Sequence
  Description of Artificial Sequence: Synthetic oligonucleotide
acccugacggcuuucuggg

SEQ ID NO: 3220821 - RNA, 19 nt, Artificial Sequence
  Description of Artificial Sequence: Synthetic oligonucleotide
cauacacggacagagcagc

SEQ ID NO: 3220822 - RNA, 19 nt, Artificial Sequence
  Description of Artificial Sequence: Synthetic oligonucleotide
gagucauuccccuguuugc

SEQ ID NO: 3220823 - RNA, 19 nt, Artificial Sequence
  Description of Artificial Sequence: Synthetic oligonucleotide
caggcugucggcauccccg

SEQ ID NO: 3220824 - RNA, 19 nt, Artificial Sequence
  Description of Artificial Sequence: Synthetic oligonucleotide
uggaaaugccgcaucaauu

SEQ ID NO: 3220825 - RNA, 19 nt, Artificial Sequence
  Description of Artificial Sequence: Synthetic oligonucleotide
guuaaggacugcaggaccc

SEQ ID NO: 3220826 - RNA, 19 nt, Artificial Sequence
  Description of Artificial Sequence: Synthetic oligonucleotide
uuccccuguuugcagauga

SEQ ID NO: 3220827 - RNA, 19 nt, Artificial Sequence
  Description of Artificial Sequence: Synthetic oligonucleotide
ugacauacacggacagagc

SEQ ID NO: 3220828 - RNA, 19 nt, Artificial Sequence
  Description of Artificial Sequence: Synthetic oligonucleotide
gauggcaagggcgugcggc

SEQ ID NO: 3220829 - RNA, 19 nt, Artificial Sequence
  Description of Artificial Sequence: Synthetic oligonucleotide
aggagcgccaggcugucgg

SEQ ID NO: 3220830 - RNA, 19 nt, Artificial Sequence
  Description of Artificial Sequence: Synthetic oligonucleotide
gcagaugacauacacggac

SEQ ID NO: 3220831 - RNA, 19 nt, Artificial Sequence
  Description of Artificial Sequence: Synthetic oligonucleotide
uuagagagcccagcucugg

SEQ ID NO: 3220832 - RNA, 19 nt, Artificial Sequence
  Description of Artificial Sequence: Synthetic oligonucleotide
acugcaggacccugacggc

SEQ ID NO: 3220833 - RNA, 19 nt, Artificial Sequence
  Description of Artificial Sequence: Synthetic oligonucleotide
agagcagccccuucccgcg

SEQ ID NO: 3220834 - RNA, 19 nt, Artificial Sequence
  Description of Artificial Sequence: Synthetic oligonucleotide
ugcggcaggcggcagaugu

SEQ ID NO: 3220835 - RNA, 19 nt, Artificial Sequence
  Description of Artificial Sequence: Synthetic oligonucleotide
ggagucauuccccuguuug

SEQ ID NO: 3220836 - RNA, 19 nt, Artificial Sequence
  Description of Artificial Sequence: Synthetic oligonucleotide
aggacugcaggacccugac

SEQ ID NO: 3220837 - RNA, 19 nt, Artificial Sequence
  Description of Artificial Sequence: Synthetic oligonucleotide
caauuuugguggcccaggc

SEQ ID NO: 3220838 - RNA, 19 nt, Artificial Sequence
  Description of Artificial Sequence: Synthetic oligonucleotide
gacagagcagccccuuccc

SEQ ID NO: 3220839 - RNA, 19 nt, Artificial Sequence
  Description of Artificial Sequence: Synthetic oligonucleotide
ucauuccccuguuugcaga

SEQ ID NO: 3220840 - RNA, 19 nt, Artificial Sequence
  Description of Artificial Sequence: Synthetic oligonucleotide
uagagagcccagcucuggc

SEQ ID NO: 3220841 - RNA, 19 nt, Artificial Sequence
  Description of Artificial Sequence: Synthetic oligonucleotide
uguuugcagaugacauaca

SEQ ID NO: 3220842 - RNA, 19 nt, Artificial Sequence
  Description of Artificial Sequence: Synthetic oligonucleotide
ccgacaauaucccggacgg

SEQ ID NO: 3220843 - RNA, 19 nt, Artificial Sequence
  Description of Artificial Sequence: Synthetic oligonucleotide
aucaauuuugguggcccag

SEQ ID NO: 3220844 - RNA, 19 nt, Artificial Sequence
  Description of Artificial Sequence: Synthetic oligonucleotide
acgguuagagagcccagcu

SEQ ID NO: 3220845 - RNA, 19 nt, Artificial Sequence
  Description of Artificial Sequence: Synthetic oligonucleotide
ugcagaugacauacacgga

SEQ ID NO: 3220846 - RNA, 19 nt, Artificial Sequence
  Description of Artificial Sequence: Synthetic oligonucleotide
auaucccggacgguuagag

SEQ ID NO: 3220847 - RNA, 19 nt, Artificial Sequence
  Description of Artificial Sequence: Synthetic oligonucleotide
caauaucccggacgguuag

SEQ ID NO: 3220848 - RNA, 19 nt, Artificial Sequence
  Description of Artificial Sequence: Synthetic oligonucleotide
acagagcagccccuucccg

SEQ ID NO: 3220849 - RNA, 19 nt, Artificial Sequence
  Description of Artificial Sequence: Synthetic oligonucleotide
cuucucuccccggagggcg

SEQ ID NO: 3220850 - RNA, 19 nt, Artificial Sequence
  Description of Artificial Sequence: Synthetic oligonucleotide
cagagcagccccuucccgc

SEQ ID NO: 3220851 - RNA, 19 nt, Artificial Sequence
  Description of Artificial Sequence: Synthetic oligonucleotide
gagagcccagcucuggcac

SEQ ID NO: 3220852 - RNA, 19 nt, Artificial Sequence
  Description of Artificial Sequence: Synthetic oligonucleotide
gucauuccccuguuugcag

SEQ ID NO: 3220853 - RNA, 19 nt, Artificial Sequence
  Description of Artificial Sequence: Synthetic oligonucleotide
acauacacggacagagcag

SEQ ID NO: 3220854 - RNA, 19 nt, Artificial Sequence
  Description of Artificial Sequence: Synthetic oligonucleotide
guuccagcuugcucagggg

SEQ ID NO: 3220855 - RNA, 19 nt, Artificial Sequence
  Description of Artificial Sequence: Synthetic oligonucleotide
uacacggacagagcagccc

SEQ ID NO: 3220856 - RNA, 19 nt, Artificial Sequence
  Description of Artificial Sequence: Synthetic oligonucleotide
uccgcuucucuccccggag

SEQ ID NO: 3220857 - RNA, 19 nt, Artificial Sequence
  Description of Artificial Sequence: Synthetic oligonucleotide
aggcugucggcauccccgc

SEQ ID NO: 3220858 - RNA, 19 nt, Artificial Sequence
  Description of Artificial Sequence: Synthetic oligonucleotide
uucugggagucauuccccu

SEQ ID NO: 3220859 - RNA, 19 nt, Artificial Sequence
  Description of Artificial Sequence: Synthetic oligonucleotide
cagaugacauacacggaca

SEQ ID NO: 3220860 - RNA, 19 nt, Artificial Sequence
  Description of Artificial Sequence: Synthetic oligonucleotide
agucauuccccuguuugca

SEQ ID NO: 3220861 - RNA, 19 nt, Artificial Sequence
  Description of Artificial Sequence: Synthetic oligonucleotide
auccccgcguuccagcuug

SEQ ID NO: 3220862 - RNA, 19 nt, Artificial Sequence
  Description of Artificial Sequence: Synthetic oligonucleotide
agagagcccagcucuggca

SEQ ID NO: 3220863 - RNA, 19 nt, Artificial Sequence
  Description of Artificial Sequence: Synthetic oligonucleotide
uggcacugccguuaaggac

SEQ ID NO: 3220864 - RNA, 19 nt, Artificial Sequence
  Description of Artificial Sequence: Synthetic oligonucleotide
accuccgcuucucuccccg

SEQ ID NO: 3220865 - RNA, 19 nt, Artificial Sequence
  Description of Artificial Sequence: Synthetic oligonucleotide
gucccuucaguacugugga

SEQ ID NO: 3220866 - RNA, 19 nt, Artificial Sequence
  Description of Artificial Sequence: Synthetic oligonucleotide
ucugggagucauuccccug

SEQ ID NO: 3220867 - RNA, 19 nt, Artificial Sequence
  Description of Artificial Sequence: Synthetic oligonucleotide
acugccguuaaggacugca

SEQ ID NO: 3220868 - RNA, 19 nt, Artificial Sequence
  Description of Artificial Sequence: Synthetic oligonucleotide
auacacggacagagcagcc

SEQ ID NO: 3220869 - RNA, 19 nt, Artificial Sequence
  Description of Artificial Sequence: Synthetic oligonucleotide
gguuagagagcccagcucu

SEQ ID NO: 3220870 - RNA, 19 nt, Artificial Sequence
  Description of Artificial Sequence: Synthetic oligonucleotide
gacgguuagagagcccagc

SEQ ID NO: 3220871 - RNA, 19 nt, Artificial Sequence
  Description of Artificial Sequence: Synthetic oligonucleotide
cugccguuaaggacugcag

SEQ ID NO: 3220872 - RNA, 19 nt, Artificial Sequence
  Description of Artificial Sequence: Synthetic oligonucleotide
ucccggacgguuagagagc

SEQ ID NO: 3220873 - RNA, 19 nt, Artificial Sequence
  Description of Artificial Sequence: Synthetic oligonucleotide
uuaaggacugcaggacccu

SEQ ID NO: 3220874 - RNA, 19 nt, Artificial Sequence
  Description of Artificial Sequence: Synthetic oligonucleotide
cccgacaauaucccggacg

SEQ ID NO: 3220875 - RNA, 19 nt, Artificial Sequence
  Description of Artificial Sequence: Synthetic oligonucleotide
gaugacauacacggacaga

SEQ ID NO: 3220876 - RNA, 19 nt, Artificial Sequence
  Description of Artificial Sequence: Synthetic oligonucleotide
uguggaaaugccgcaucaa

SEQ ID NO: 3220877 - RNA, 19 nt, Artificial Sequence
  Description of Artificial Sequence: Synthetic oligonucleotide
uuuugguggcccaggccau

SEQ ID NO: 3220878 - RNA, 19 nt, Artificial Sequence
  Description of Artificial Sequence: Synthetic oligonucleotide
uaucccggacgguuagaga

SEQ ID NO: 3220879 - RNA, 19 nt, Artificial Sequence
  Description of Artificial Sequence: Synthetic oligonucleotide
gcaucaauuuugguggccc

SEQ ID NO: 3220880 - RNA, 19 nt, Artificial Sequence
  Description of Artificial Sequence: Synthetic oligonucleotide
aauaucccggacgguuaga

SEQ ID NO: 3220881 - RNA, 19 nt, Artificial Sequence
  Description of Artificial Sequence: Synthetic oligonucleotide
auggcaagggcgugcggca

SEQ ID NO: 3220882 - RNA, 19 nt, Artificial Sequence
  Description of Artificial Sequence: Synthetic oligonucleotide
cuucaguacuguggaaaug

SEQ ID NO: 3220883 - RNA, 19 nt, Artificial Sequence
  Description of Artificial Sequence: Synthetic oligonucleotide
ggacagagcagccccuucc

SEQ ID NO: 3220884 - RNA, 19 nt, Artificial Sequence
  Description of Artificial Sequence: Synthetic oligonucleotide
aaggacugcaggacccuga

SEQ ID NO: 3220885 - RNA, 19 nt, Artificial Sequence
  Description of Artificial Sequence: Synthetic oligonucleotide
uaaggacugcaggacccug

SEQ ID NO: 3220886 - RNA, 19 nt, Artificial Sequence
  Description of Artificial Sequence: Synthetic oligonucleotide
guacuguggaaaugccgca

SEQ ID NO: 3220887 - RNA, 19 nt, Artificial Sequence
  Description of Artificial Sequence: Synthetic oligonucleotide
gccguuaaggacugcagga

SEQ ID NO: 3220888 - RNA, 19 nt, Artificial Sequence
  Description of Artificial Sequence: Synthetic oligonucleotide
guuagagagcccagcucug

SEQ ID NO: 3220889 - RNA, 19 nt, Artificial Sequence
  Description of Artificial Sequence: Synthetic oligonucleotide
gacaauaucccggacgguu

SEQ ID NO: 3220890 - RNA, 19 nt, Artificial Sequence
  Description of Artificial Sequence: Synthetic oligonucleotide
agcagccccuucccgcgac

SEQ ID NO: 3220891 - RNA, 19 nt, Artificial Sequence
  Description of Artificial Sequence: Synthetic oligonucleotide
uguauauaaauauacaggg

SEQ ID NO: 3220892 - RNA, 19 nt, Artificial Sequence
  Description of Artificial Sequence: Synthetic oligonucleotide
aaaauuacaauauaggaga

SEQ ID NO: 3220893 - RNA, 19 nt, Artificial Sequence
  Description of Artificial Sequence: Synthetic oligonucleotide
uauaaaauuacaauauagg

SEQ ID NO: 3220894 - RNA, 19 nt, Artificial Sequence
  Description of Artificial Sequence: Synthetic oligonucleotide
gauuguauaaaacacagcc

SEQ ID NO: 3220895 - RNA, 19 nt, Artificial Sequence
  Description of Artificial Sequence: Synthetic oligonucleotide
uaaaauuacaauauaggag

SEQ ID NO: 3220896 - RNA, 19 nt, Artificial Sequence
  Description of Artificial Sequence: Synthetic oligonucleotide
aaauugaucacauagguau

SEQ ID NO: 3220897 - RNA, 19 nt, Artificial Sequence
  Description of Artificial Sequence: Synthetic oligonucleotide
uauauaaauauacagggac

SEQ ID NO: 3220898 - RNA, 19 nt, Artificial Sequence
  Description of Artificial Sequence: Synthetic oligonucleotide
cagaguauagauaagaggg

SEQ ID NO: 3220899 - RNA, 19 nt, Artificial Sequence
  Description of Artificial Sequence: Synthetic oligonucleotide
acaacuagcaaauugauca

SEQ ID NO: 3220900 - RNA, 19 nt, Artificial Sequence
  Description of Artificial Sequence: Synthetic oligonucleotide
uguguauauaaauauacag

SEQ ID NO: 3220901 - RNA, 19 nt, Artificial Sequence
  Description of Artificial Sequence: Synthetic oligonucleotide
aauauaggagauaagcagc

SEQ ID NO: 3220902 - RNA, 19 nt, Artificial Sequence
  Description of Artificial Sequence: Synthetic oligonucleotide
aaacuuaccaugcauauga

SEQ ID NO: 3220903 - RNA, 19 nt, Artificial Sequence
  Description of Artificial Sequence: Synthetic oligonucleotide
uaugacaccacuauuagac

SEQ ID NO: 3220904 - RNA, 19 nt, Artificial Sequence
  Description of Artificial Sequence: Synthetic oligonucleotide
gagaaguacaaguagaaag

SEQ ID NO: 3220905 - RNA, 19 nt, Artificial Sequence
  Description of Artificial Sequence: Synthetic oligonucleotide
auaaaauuacaauauagga

SEQ ID NO: 3220906 - RNA, 19 nt, Artificial Sequence
  Description of Artificial Sequence: Synthetic oligonucleotide
aaauaugaccaccacaaug

SEQ ID NO: 3220907 - RNA, 19 nt, Artificial Sequence
  Description of Artificial Sequence: Synthetic oligonucleotide
uagcaaauugaucacauag

SEQ ID NO: 3220908 - RNA, 19 nt, Artificial Sequence
  Description of Artificial Sequence: Synthetic oligonucleotide
aguacaaguagaaagggcc

SEQ ID NO: 3220909 - RNA, 19 nt, Artificial Sequence
  Description of Artificial Sequence: Synthetic oligonucleotide
aaaugagaaguacaaguag

SEQ ID NO: 3220910 - RNA, 19 nt, Artificial Sequence
  Description of Artificial Sequence: Synthetic oligonucleotide
ugaaaugagaaguacaagu

SEQ ID NO: 3220911 - RNA, 19 nt, Artificial Sequence
  Description of Artificial Sequence: Synthetic oligonucleotide
uuguauaaaacacagccac

SEQ ID NO: 3220912 - RNA, 19 nt, Artificial Sequence
  Description of Artificial Sequence: Synthetic oligonucleotide
uacaauauaggagauaagc

SEQ ID NO: 3220913 - RNA, 19 nt, Artificial Sequence
  Description of Artificial Sequence: Synthetic oligonucleotide
auaagcagcaguaugaaac

SEQ ID NO: 3220914 - RNA, 19 nt, Artificial Sequence
  Description of Artificial Sequence: Synthetic oligonucleotide
aucacauagguauccaugc

SEQ ID NO: 3220915 - RNA, 19 nt, Artificial Sequence
  Description of Artificial Sequence: Synthetic oligonucleotide
cuuaccaugcauaugacac

SEQ ID NO: 3220916 - RNA, 19 nt, Artificial Sequence
  Description of Artificial Sequence: Synthetic oligonucleotide
ucagaguauagauaagagg

SEQ ID NO: 3220917 - RNA, 19 nt, Artificial Sequence
  Description of Artificial Sequence: Synthetic oligonucleotide
caauauaggagauaagcag

SEQ ID NO: 3220918 - RNA, 19 nt, Artificial Sequence
  Description of Artificial Sequence: Synthetic oligonucleotide
acuaugguuucucagagag

SEQ ID NO: 3220919 - RNA, 19 nt, Artificial Sequence
  Description of Artificial Sequence: Synthetic oligonucleotide
agcaguaugaaacuuacca

SEQ ID NO: 3220920 - RNA, 19 nt, Artificial Sequence
  Description of Artificial Sequence: Synthetic oligonucleotide
uaaaacacagccaccaucu

SEQ ID NO: 3220921 - RNA, 19 nt, Artificial Sequence
  Description of Artificial Sequence: Synthetic oligonucleotide
accacuauuagacacaacu

SEQ ID NO: 3220922 - RNA, 19 nt, Artificial Sequence
  Description of Artificial Sequence: Synthetic oligonucleotide
aauaugaccaccacaauga

SEQ ID NO: 3220923 - RNA, 19 nt, Artificial Sequence
  Description of Artificial Sequence: Synthetic oligonucleotide
guauaaaauuacaauauag

SEQ ID NO: 3220924 - RNA, 19 nt, Artificial Sequence
  Description of Artificial Sequence: Synthetic oligonucleotide
auagauaagaggguugagc

SEQ ID NO: 3220925 - RNA, 19 nt, Artificial Sequence
  Description of Artificial Sequence: Synthetic oligonucleotide
agaguauaaaauuacaaua

SEQ ID NO: 3220926 - RNA, 19 nt, Artificial Sequence
  Description of Artificial Sequence: Synthetic oligonucleotide
guguauauaaauauacagg

SEQ ID NO: 3220927 - RNA, 19 nt, Artificial Sequence
  Description of Artificial Sequence: Synthetic oligonucleotide
auauaaauauacagggacc

SEQ ID NO: 3220928 - RNA, 19 nt, Artificial Sequence
  Description of Artificial Sequence: Synthetic oligonucleotide
uuuacuucugcauuccuca

SEQ ID NO: 3220929 - RNA, 19 nt, Artificial Sequence
  Description of Artificial Sequence: Synthetic oligonucleotide
uagauaagaggguugagca

SEQ ID NO: 3220930 - RNA, 19 nt, Artificial Sequence
  Description of Artificial Sequence: Synthetic oligonucleotide
ucuuccuucugcacuaugg

SEQ ID NO: 3220931 - RNA, 19 nt, Artificial Sequence
  Description of Artificial Sequence: Synthetic oligonucleotide
uauaaauauacagggacca

SEQ ID NO: 3220932 - RNA, 19 nt, Artificial Sequence
  Description of Artificial Sequence: Synthetic oligonucleotide
aaaucacagaaauagugau

SEQ ID NO: 3220933 - RNA, 19 nt, Artificial Sequence
  Description of Artificial Sequence: Synthetic oligonucleotide
auaaaacacagccaccauc

SEQ ID NO: 3220934 - RNA, 19 nt, Artificial Sequence
  Description of Artificial Sequence: Synthetic oligonucleotide
aguaugaaacuuaccaugc

SEQ ID NO: 3220935 - RNA, 19 nt, Artificial Sequence
  Description of Artificial Sequence: Synthetic oligonucleotide
agaaguacaaguagaaagg

SEQ ID NO: 3220936 - RNA, 19 nt, Artificial Sequence
  Description of Artificial Sequence: Synthetic oligonucleotide
acuauuagacacaacuagc

SEQ ID NO: 3220937 - RNA, 19 nt, Artificial Sequence
  Description of Artificial Sequence: Synthetic oligonucleotide
ucagagaguauaaaauuac

SEQ ID NO: 3220938 - RNA, 19 nt, Artificial Sequence
  Description of Artificial Sequence: Synthetic oligonucleotide
cugcaaaucacagaaauag

SEQ ID NO: 3220939 - RNA, 19 nt, Artificial Sequence
  Description of Artificial Sequence: Synthetic oligonucleotide
auuacaauauaggagauaa

SEQ ID NO: 3220940 - RNA, 19 nt, Artificial Sequence
  Description of Artificial Sequence: Synthetic oligonucleotide
uuagacacaacuagcaaau

SEQ ID NO: 3220941 - RNA, 19 nt, Artificial Sequence
  Description of Artificial Sequence: Synthetic oligonucleotide
aaugaaaugagaaguacaa

SEQ ID NO: 3220942 - RNA, 19 nt, Artificial Sequence
  Description of Artificial Sequence: Synthetic oligonucleotide
aaguacaaguagaaagggc

SEQ ID NO: 3220943 - RNA, 19 nt, Artificial Sequence
  Description of Artificial Sequence: Synthetic oligonucleotide
auugaucacauagguaucc

SEQ ID NO: 3220944 - RNA, 19 nt, Artificial Sequence
  Description of Artificial Sequence: Synthetic oligonucleotide
cacuauuagacacaacuag

SEQ ID NO: 3220945 - RNA, 19 nt, Artificial Sequence
  Description of Artificial Sequence: Synthetic oligonucleotide
accacaaugaaaugagaag

SEQ ID NO: 3220946 - RNA, 19 nt, Artificial Sequence
  Description of Artificial Sequence: Synthetic oligonucleotide
aaugagaaguacaaguaga

SEQ ID NO: 3220947 - RNA, 19 nt, Artificial Sequence
  Description of Artificial Sequence: Synthetic oligonucleotide
aucacagaaauagugauca

SEQ ID NO: 3220948 - RNA, 19 nt, Artificial Sequence
  Description of Artificial Sequence: Synthetic oligonucleotide
uuuuaccacaccauaauuu

SEQ ID NO: 3220949 - RNA, 19 nt, Artificial Sequence
  Description of Artificial Sequence: Synthetic oligonucleotide
uucucagagaguauaaaau

SEQ ID NO: 3220950 - RNA, 19 nt, Artificial Sequence
  Description of Artificial Sequence: Synthetic oligonucleotide
gaaguacaaguagaaaggg

SEQ ID NO: 3220951 - RNA, 19 nt, Artificial Sequence
  Description of Artificial Sequence: Synthetic oligonucleotide
uauuuuaccacaccauaau

SEQ ID NO: 3220952 - RNA, 19 nt, Artificial Sequence
  Description of Artificial Sequence: Synthetic oligonucleotide
uguauaaaacacagccacc

SEQ ID NO: 3220953 - RNA, 19 nt, Artificial Sequence
  Description of Artificial Sequence: Synthetic oligonucleotide
uuccucagaguauagauaa

SEQ ID NO: 3220954 - RNA, 19 nt, Artificial Sequence
  Description of Artificial Sequence: Synthetic oligonucleotide
aaacacagccaccaucuug

SEQ ID NO: 3220955 - RNA, 19 nt, Artificial Sequence
  Description of Artificial Sequence: Synthetic oligonucleotide
acaaugaaaugagaaguac

SEQ ID NO: 3220956 - RNA, 19 nt, Artificial Sequence
  Description of Artificial Sequence: Synthetic oligonucleotide
acuucugcauuccucagag

SEQ ID NO: 3220957 - RNA, 19 nt, Artificial Sequence
  Description of Artificial Sequence: Synthetic oligonucleotide
auuagacacaacuagcaaa

SEQ ID NO: 3220958 - RNA, 19 nt, Artificial Sequence
  Description of Artificial Sequence: Synthetic oligonucleotide
caguaugaaacuuaccaug

SEQ ID NO: 3220959 - RNA, 19 nt, Artificial Sequence
  Description of Artificial Sequence: Synthetic oligonucleotide
uaugaaacuuaccaugcau

SEQ ID NO: 3220960 - RNA, 19 nt, Artificial Sequence
  Description of Artificial Sequence: Synthetic oligonucleotide
aaguagaaagggccuuucg

SEQ ID NO: 3220961 - RNA, 19 nt, Artificial Sequence
  Description of Artificial Sequence: Synthetic oligonucleotide
uaugguuucucagagagua

SEQ ID NO: 3220962 - RNA, 19 nt, Artificial Sequence
  Description of Artificial Sequence: Synthetic oligonucleotide
aagaggguugagcaaaggu

SEQ ID NO: 3220963 - RNA, 19 nt, Artificial Sequence
  Description of Artificial Sequence: Synthetic oligonucleotide
uucugcauuccucagagua

SEQ ID NO: 3220964 - RNA, 19 nt, Artificial Sequence
  Description of Artificial Sequence: Synthetic oligonucleotide
agacacaacuagcaaauug

SEQ ID NO: 3220965 - RNA, 19 nt, Artificial Sequence
  Description of Artificial Sequence: Synthetic oligonucleotide
aaucacagaaauagugauc

SEQ ID NO: 3220966 - RNA, 19 nt, Artificial Sequence
  Description of Artificial Sequence: Synthetic oligonucleotide
uuucucagagaguauaaaa

SEQ ID NO: 3220967 - RNA, 19 nt, Artificial Sequence
  Description of Artificial Sequence: Synthetic oligonucleotide
uuuaccacaccauaauuuu

SEQ ID NO: 3220968 - RNA, 19 nt, Artificial Sequence
  Description of Artificial Sequence: Synthetic oligonucleotide
ucauauuuuaccacaccau

SEQ ID NO: 3220969 - RNA, 19 nt, Artificial Sequence
  Description of Artificial Sequence: Synthetic oligonucleotide
cauaugacaccacuauuag

SEQ ID NO: 3220970 - RNA, 19 nt, Artificial Sequence
  Description of Artificial Sequence: Synthetic oligonucleotide
cucagaguauagauaagag

SEQ ID NO: 3220971 - RNA, 19 nt, Artificial Sequence
  Description of Artificial Sequence: Synthetic oligonucleotide
uagguauccaugcaggcaa

SEQ ID NO: 3220972 - RNA, 19 nt, Artificial Sequence
  Description of Artificial Sequence: Synthetic oligonucleotide
ugcacuaugguuucucaga

SEQ ID NO: 3220973 - RNA, 19 nt, Artificial Sequence
  Description of Artificial Sequence: Synthetic oligonucleotide
aaguuucaacaguggcugc

SEQ ID NO: 3220974 - RNA, 19 nt, Artificial Sequence
  Description of Artificial Sequence: Synthetic oligonucleotide
ucccgauuguauaaaacac

SEQ ID NO: 3220975 - RNA, 19 nt, Artificial Sequence
  Description of Artificial Sequence: Synthetic oligonucleotide
aguauaaaauuacaauaua

SEQ ID NO: 3220976 - RNA, 19 nt, Artificial Sequence
  Description of Artificial Sequence: Synthetic oligonucleotide
uauuagacacaacuagcaa

SEQ ID NO: 3220977 - RNA, 19 nt, Artificial Sequence
  Description of Artificial Sequence: Synthetic oligonucleotide
ugaaacuuaccaugcauau

SEQ ID NO: 3220978 - RNA, 19 nt, Artificial Sequence
  Description of Artificial Sequence: Synthetic oligonucleotide
aaaagguugguggacgugu

SEQ ID NO: 3220979 - RNA, 19 nt, Artificial Sequence
  Description of Artificial Sequence: Synthetic oligonucleotide
uuuuacuucugcauuccuc

SEQ ID NO: 3220980 - RNA, 19 nt, Artificial Sequence
  Description of Artificial Sequence: Synthetic oligonucleotide
aguagaaagggccuuucgu

SEQ ID NO: 3220981 - RNA, 19 nt, Artificial Sequence
  Description of Artificial Sequence: Synthetic oligonucleotide
cuauuagacacaacuagca

SEQ ID NO: 3220982 - RNA, 19 nt, Artificial Sequence
  Description of Artificial Sequence: Synthetic oligonucleotide
agcaaauugaucacauagg

SEQ ID NO: 3220983 - RNA, 19 nt, Artificial Sequence
  Description of Artificial Sequence: Synthetic oligonucleotide
aacacagccaccaucuugu

SEQ ID NO: 3220984 - RNA, 19 nt, Artificial Sequence
  Description of Artificial Sequence: Synthetic oligonucleotide
caaguuucaacaguggcug

SEQ ID NO: 3220985 - RNA, 19 nt, Artificial Sequence
  Description of Artificial Sequence: Synthetic oligonucleotide
caaaucacagaaauaguga

SEQ ID NO: 3220986 - RNA, 19 nt, Artificial Sequence
  Description of Artificial Sequence: Synthetic oligonucleotide
ucucagagaguauaaaauu

SEQ ID NO: 3220987 - RNA, 19 nt, Artificial Sequence
  Description of Artificial Sequence: Synthetic oligonucleotide
gacacaacuagcaaauuga

SEQ ID NO: 3220988 - RNA, 19 nt, Artificial Sequence
  Description of Artificial Sequence: Synthetic oligonucleotide
aauugaucacauagguauc

SEQ ID NO: 3220989 - RNA, 19 nt, Artificial Sequence
  Description of Artificial Sequence: Synthetic oligonucleotide
auaggagauaagcagcagu

SEQ ID NO: 3220990 - RNA, 19 nt, Artificial Sequence
  Description of Artificial Sequence: Synthetic oligonucleotide
augaccaccacaaugaaau

SEQ ID NO: 3220991 - RNA, 19 nt, Artificial Sequence
  Description of Artificial Sequence: Synthetic oligonucleotide
aagauuauaauauaaacac

SEQ ID NO: 3220992 - RNA, 19 nt, Artificial Sequence
  Description of Artificial Sequence: Synthetic oligonucleotide
aaaauugugagcuaauugc

SEQ ID NO: 3220993 - RNA, 19 nt, Artificial Sequence
  Description of Artificial Sequence: Synthetic oligonucleotide
aauacuggcaauuugaaac

SEQ ID NO: 3220994 - RNA, 19 nt, Artificial Sequence
  Description of Artificial Sequence: Synthetic oligonucleotide
uauaauauaaacacaaacg

SEQ ID NO: 3220995 - RNA, 19 nt, Artificial Sequence
  Description of Artificial Sequence: Synthetic oligonucleotide
ucuaaaucaaauuagaacc

SEQ ID NO: 3220996 - RNA, 19 nt, Artificial Sequence
  Description of Artificial Sequence: Synthetic oligonucleotide
aaggcauuaaccuauaaac

SEQ ID NO: 3220997 - RNA, 19 nt, Artificial Sequence
  Description of Artificial Sequence: Synthetic oligonucleotide
ugaaauauuaauuugcugc

SEQ ID NO: 3220998 - RNA, 19 nt, Artificial Sequence
  Description of Artificial Sequence: Synthetic oligonucleotide
agaacauuaauacaguccc

SEQ ID NO: 3220999 - RNA, 19 nt, Artificial Sequence
  Description of Artificial Sequence: Synthetic oligonucleotide
aauuguagcguucucauuc

SEQ ID NO: 3221000 - RNA, 19 nt, Artificial Sequence
  Description of Artificial Sequence: Synthetic oligonucleotide
ugagagaacauuaauacag

SEQ ID NO: 3221001 - RNA, 19 nt, Artificial Sequence
  Description of Artificial Sequence: Synthetic oligonucleotide
aagacaaagaaauaucaag

SEQ ID NO: 3221002 - RNA, 19 nt, Artificial Sequence
  Description of Artificial Sequence: Synthetic oligonucleotide
uauuauaauaaacuguggc

SEQ ID NO: 3221003 - RNA, 19 nt, Artificial Sequence
  Description of Artificial Sequence: Synthetic oligonucleotide
acugagagaacauuaauac

SEQ ID NO: 3221004 - RNA, 19 nt, Artificial Sequence
  Description of Artificial Sequence: Synthetic oligonucleotide
aauauaaacacaaacguga

SEQ ID NO: 3221005 - RNA, 19 nt, Artificial Sequence
  Description of Artificial Sequence: Synthetic oligonucleotide
uaaggaacuauuuuaaaag

SEQ ID NO: 3221006 - RNA, 19 nt, Artificial Sequence
  Description of Artificial Sequence: Synthetic oligonucleotide
uuauaauauaaacacaaac

SEQ ID NO: 3221007 - RNA, 19 nt, Artificial Sequence
  Description of Artificial Sequence: Synthetic oligonucleotide
aauaucaaguuucuaaugu

SEQ ID NO: 3221008 - RNA, 19 nt, Artificial Sequence
  Description of Artificial Sequence: Synthetic oligonucleotide
ucauucaccauuuggaugg

SEQ ID NO: 3221009 - RNA, 19 nt, Artificial Sequence
  Description of Artificial Sequence: Synthetic oligonucleotide
auaauauaaacacaaacgu

SEQ ID NO: 3221010 - RNA, 19 nt, Artificial Sequence
  Description of Artificial Sequence: Synthetic oligonucleotide
aaguuucuaauguugguac

SEQ ID NO: 3221011 - RNA, 19 nt, Artificial Sequence
  Description of Artificial Sequence: Synthetic oligonucleotide
uuugaaacuagcaacaaaa

SEQ ID NO: 3221012 - RNA, 19 nt, Artificial Sequence
  Description of Artificial Sequence: Synthetic oligonucleotide
uguacgauugcacagaagu

SEQ ID NO: 3221013 - RNA, 19 nt, Artificial Sequence
  Description of Artificial Sequence: Synthetic oligonucleotide
uggcauaacaaacugagag

SEQ ID NO: 3221014 - RNA, 19 nt, Artificial Sequence
  Description of Artificial Sequence: Synthetic oligonucleotide
aagauaagaagacaaagaa

SEQ ID NO: 3221015 - RNA, 19 nt, Artificial Sequence
  Description of Artificial Sequence: Synthetic oligonucleotide
aaagauuauaauauaaaca

SEQ ID NO: 3221016 - RNA, 19 nt, Artificial Sequence
  Description of Artificial Sequence: Synthetic oligonucleotide
aaugcucuaaaucaaauua

SEQ ID NO: 3221017 - RNA, 19 nt, Artificial Sequence
  Description of Artificial Sequence: Synthetic oligonucleotide
aacaaaagcagccaaagua

SEQ ID NO: 3221018 - RNA, 19 nt, Artificial Sequence
  Description of Artificial Sequence: Synthetic oligonucleotide
auuguaacugcuuaagaag

SEQ ID NO: 3221019 - RNA, 19 nt, Artificial Sequence
  Description of Artificial Sequence: Synthetic oligonucleotide
uaauauaaacacaaacgug

SEQ ID NO: 3221020 - RNA, 19 nt, Artificial Sequence
  Description of Artificial Sequence: Synthetic oligonucleotide
uaagauggaagauaagaag

SEQ ID NO: 3221021 - RNA, 19 nt, Artificial Sequence
  Description of Artificial Sequence: Synthetic oligonucleotide
auuauaauaaacuguggca

SEQ ID NO: 3221022 - RNA, 19 nt, Artificial Sequence
  Description of Artificial Sequence: Synthetic oligonucleotide
uaaugaaagauauuguaac

SEQ ID NO: 3221023 - RNA, 19 nt, Artificial Sequence
  Description of Artificial Sequence: Synthetic oligonucleotide
aauauuaauuugcugcacu

SEQ ID NO: 3221024 - RNA, 19 nt, Artificial Sequence
  Description of Artificial Sequence: Synthetic oligonucleotide
auaaacacaaacgugauga

SEQ ID NO: 3221025 - RNA, 19 nt, Artificial Sequence
  Description of Artificial Sequence: Synthetic oligonucleotide
caaagauuauaauauaaac

SEQ ID NO: 3221026 - RNA, 19 nt, Artificial Sequence
  Description of Artificial Sequence: Synthetic oligonucleotide
caaagaaauaucaaguuuc

SEQ ID NO: 3221027 - RNA, 19 nt, Artificial Sequence
  Description of Artificial Sequence: Synthetic oligonucleotide
ugaaacuagcaacaaaagc

SEQ ID NO: 3221028 - RNA, 19 nt, Artificial Sequence
  Description of Artificial Sequence: Synthetic oligonucleotide
aauguugguacuguguacg

SEQ ID NO: 3221029 - RNA, 19 nt, Artificial Sequence
  Description of Artificial Sequence: Synthetic oligonucleotide
uauuuuaaaaguccuuuga

SEQ ID NO: 3221030 - RNA, 19 nt, Artificial Sequence
  Description of Artificial Sequence: Synthetic oligonucleotide
aaugaaagauauuguaacu

SEQ ID NO: 3221031 - RNA, 19 nt, Artificial Sequence
  Description of Artificial Sequence: Synthetic oligonucleotide
uuugaaauauuaauuugcu

SEQ ID NO: 3221032 - RNA, 19 nt, Artificial Sequence
  Description of Artificial Sequence: Synthetic oligonucleotide
agaaauaucaaguuucuaa

SEQ ID NO: 3221033 - RNA, 19 nt, Artificial Sequence
  Description of Artificial Sequence: Synthetic oligonucleotide
uuuacaaacaguggaaaag

SEQ ID NO: 3221034 - RNA, 19 nt, Artificial Sequence
  Description of Artificial Sequence: Synthetic oligonucleotide
uuauuauaauaaacugugg

SEQ ID NO: 3221035 - RNA, 19 nt, Artificial Sequence
  Description of Artificial Sequence: Synthetic oligonucleotide
agcuaauugcaauuguagc

SEQ ID NO: 3221036 - RNA, 19 nt, Artificial Sequence
  Description of Artificial Sequence: Synthetic oligonucleotide
ugaaagauauuguaacugc

SEQ ID NO: 3221037 - RNA, 19 nt, Artificial Sequence
  Description of Artificial Sequence: Synthetic oligonucleotide
acuuugaaugcucuaaauc

SEQ ID NO: 3221038 - RNA, 19 nt, Artificial Sequence
  Description of Artificial Sequence: Synthetic oligonucleotide
aaauaucaaguuucuaaug

SEQ ID NO: 3221039 - RNA, 19 nt, Artificial Sequence
  Description of Artificial Sequence: Synthetic oligonucleotide
acaacauacacacaaagau

SEQ ID NO: 3221040 - RNA, 19 nt, Artificial Sequence
  Description of Artificial Sequence: Synthetic oligonucleotide
cucuaaaucaaauuagaac

SEQ ID NO: 3221041 - RNA, 19 nt, Artificial Sequence
  Description of Artificial Sequence: Synthetic oligonucleotide
aauacagucccaggaaggc

SEQ ID NO: 3221042 - RNA, 19 nt, Artificial Sequence
  Description of Artificial Sequence: Synthetic oligonucleotide
uauaaugaaagauauugua

SEQ ID NO: 3221043 - RNA, 19 nt, Artificial Sequence
  Description of Artificial Sequence: Synthetic oligonucleotide
acagaaguaauuuaaaguu

SEQ ID NO: 3221044 - RNA, 19 nt, Artificial Sequence
  Description of Artificial Sequence: Synthetic oligonucleotide
gauuauaauauaaacacaa

SEQ ID NO: 3221045 - RNA, 19 nt, Artificial Sequence
  Description of Artificial Sequence: Synthetic oligonucleotide
uuauaauaaacuguggcac

SEQ ID NO: 3221046 - RNA, 19 nt, Artificial Sequence
  Description of Artificial Sequence: Synthetic oligonucleotide
uuaauacagucccaggaag

SEQ ID NO: 3221047 - RNA, 19 nt, Artificial Sequence
  Description of Artificial Sequence: Synthetic oligonucleotide
aauacaguuacugccauga

SEQ ID NO: 3221048 - RNA, 19 nt, Artificial Sequence
  Description of Artificial Sequence: Synthetic oligonucleotide
ccuauaaacacguauaacc

SEQ ID NO: 3221049 - RNA, 19 nt, Artificial Sequence
  Description of Artificial Sequence: Synthetic oligonucleotide
uuuuaaggaacuauuuuaa

SEQ ID NO: 3221050 - RNA, 19 nt, Artificial Sequence
  Description of Artificial Sequence: Synthetic oligonucleotide
auaaacacguauaaccacc

SEQ ID NO: 3221051 - RNA, 19 nt, Artificial Sequence
  Description of Artificial Sequence: Synthetic oligonucleotide
cuaaaucaaauuagaaccc

SEQ ID NO: 3221052 - RNA, 19 nt, Artificial Sequence
  Description of Artificial Sequence: Synthetic oligonucleotide
aacauuaauacagucccag

SEQ ID NO: 3221053 - RNA, 19 nt, Artificial Sequence
  Description of Artificial Sequence: Synthetic oligonucleotide
uuaaggaacuauuuuaaaa

SEQ ID NO: 3221054 - RNA, 19 nt, Artificial Sequence
  Description of Artificial Sequence: Synthetic oligonucleotide
uuguaacugcuuaagaagc

SEQ ID NO: 3221055 - RNA, 19 nt, Artificial Sequence
  Description of Artificial Sequence: Synthetic oligonucleotide
uaucaaguuucuaauguug

SEQ ID NO: 3221056 - RNA, 19 nt, Artificial Sequence
  Description of Artificial Sequence: Synthetic oligonucleotide
uuugcugcacuuuacaaac

SEQ ID NO: 3221057 - RNA, 19 nt, Artificial Sequence
  Description of Artificial Sequence: Synthetic oligonucleotide
aagaagacaaagaaauauc

SEQ ID NO: 3221058 - RNA, 19 nt, Artificial Sequence
  Description of Artificial Sequence: Synthetic oligonucleotide
uucucauucaccauuugga

SEQ ID NO: 3221059 - RNA, 19 nt, Artificial Sequence
  Description of Artificial Sequence: Synthetic oligonucleotide
uauuguaacugcuuaagaa

SEQ ID NO: 3221060 - RNA, 19 nt, Artificial Sequence
  Description of Artificial Sequence: Synthetic oligonucleotide
uuaaccuauaaacacguau

SEQ ID NO: 3221061 - RNA, 19 nt, Artificial Sequence
  Description of Artificial Sequence: Synthetic oligonucleotide
aaggaacuauuuuaaaagu

SEQ ID NO: 3221062 - RNA, 19 nt, Artificial Sequence
  Description of Artificial Sequence: Synthetic oligonucleotide
cuuugaaugcucuaaauca

SEQ ID NO: 3221063 - RNA, 19 nt, Artificial Sequence
  Description of Artificial Sequence: Synthetic oligonucleotide
uuuuaaaaguccuuugaaa

SEQ ID NO: 3221064 - RNA, 19 nt, Artificial Sequence
  Description of Artificial Sequence: Synthetic oligonucleotide
uaaacuguggcacuacugu

SEQ ID NO: 3221065 - RNA, 19 nt, Artificial Sequence
  Description of Artificial Sequence: Synthetic oligonucleotide
acuagcaacaaaagcagcc

SEQ ID NO: 3221066 - RNA, 19 nt, Artificial Sequence
  Description of Artificial Sequence: Synthetic oligonucleotide
gaaauauuaauuugcugca

SEQ ID NO: 3221067 - RNA, 19 nt, Artificial Sequence
  Description of Artificial Sequence: Synthetic oligonucleotide
uuuggauggcauaacaaac

SEQ ID NO: 3221068 - RNA, 19 nt, Artificial Sequence
  Description of Artificial Sequence: Synthetic oligonucleotide
auaacaaacugagagaaca

SEQ ID NO: 3221069 - RNA, 19 nt, Artificial Sequence
  Description of Artificial Sequence: Synthetic oligonucleotide
aaauauuaauuugcugcac

SEQ ID NO: 3221070 - RNA, 19 nt, Artificial Sequence
  Description of Artificial Sequence: Synthetic oligonucleotide
ugcacuuuacaaacagugg

SEQ ID NO: 3221071 - RNA, 19 nt, Artificial Sequence
  Description of Artificial Sequence: Synthetic oligonucleotide
aagauggaagauaagaaga

SEQ ID NO: 3221072 - RNA, 19 nt, Artificial Sequence
  Description of Artificial Sequence: Synthetic oligonucleotide
ugugguauccuuuauuuaa

SEQ ID NO: 3221073 - RNA, 19 nt, Artificial Sequence
  Description of Artificial Sequence: Synthetic oligonucleotide
gauaagaagacaaagaaau

SEQ ID NO: 3221074 - RNA, 19 nt, Artificial Sequence
  Description of Artificial Sequence: Synthetic oligonucleotide
gcuauaaugaaagauauug

SEQ ID NO: 3221075 - RNA, 19 nt, Artificial Sequence
  Description of Artificial Sequence: Synthetic oligonucleotide
gcuaauugcaauuguagcg

SEQ ID NO: 3221076 - RNA, 19 nt, Artificial Sequence
  Description of Artificial Sequence: Synthetic oligonucleotide
uaagaagacaaagaaauau

SEQ ID NO: 3221077 - RNA, 19 nt, Artificial Sequence
  Description of Artificial Sequence: Synthetic oligonucleotide
aguaagauggaagauaaga

SEQ ID NO: 3221078 - RNA, 19 nt, Artificial Sequence
  Description of Artificial Sequence: Synthetic oligonucleotide
gauauuguaacugcuuaag

SEQ ID NO: 3221079 - RNA, 19 nt, Artificial Sequence
  Description of Artificial Sequence: Synthetic oligonucleotide
uugaaacuagcaacaaaag

SEQ ID NO: 3221080 - RNA, 19 nt, Artificial Sequence
  Description of Artificial Sequence: Synthetic oligonucleotide
ucuaauguugguacugugu

SEQ ID NO: 3221081 - RNA, 19 nt, Artificial Sequence
  Description of Artificial Sequence: Synthetic oligonucleotide
aacauacacacaaagauua

SEQ ID NO: 3221082 - RNA, 19 nt, Artificial Sequence
  Description of Artificial Sequence: Synthetic oligonucleotide
agagaacauuaauacaguc

SEQ ID NO: 3221083 - RNA, 19 nt, Artificial Sequence
  Description of Artificial Sequence: Synthetic oligonucleotide
gagaacauuaauacagucc

SEQ ID NO: 3221084 - RNA, 19 nt, Artificial Sequence
  Description of Artificial Sequence: Synthetic oligonucleotide
caaacaguggaaaagaaaa

SEQ ID NO: 3221085 - RNA, 19 nt, Artificial Sequence
  Description of Artificial Sequence: Synthetic oligonucleotide
aaaguaagauggaagauaa

SEQ ID NO: 3221086 - RNA, 19 nt, Artificial Sequence
  Description of Artificial Sequence: Synthetic oligonucleotide
uacaguuacugccaugagc

SEQ ID NO: 3221087 - RNA, 19 nt, Artificial Sequence
  Description of Artificial Sequence: Synthetic oligonucleotide
aagauauuguaacugcuua

SEQ ID NO: 3221088 - RNA, 19 nt, Artificial Sequence
  Description of Artificial Sequence: Synthetic oligonucleotide
ugcacacauacacacaaca

SEQ ID NO: 3221089 - RNA, 19 nt, Artificial Sequence
  Description of Artificial Sequence: Synthetic oligonucleotide
uaaccuauaaacacguaua

SEQ ID NO: 3221090 - RNA, 19 nt, Artificial Sequence
  Description of Artificial Sequence: Synthetic oligonucleotide
aacacaaacgugaugaaaa

SEQ ID NO: 3221091 - RNA, 19 nt, Artificial Sequence
  Description of Artificial Sequence: Synthetic oligonucleotide
aaauuugaggagcagguag

SEQ ID NO: 3221092 - RNA, 19 nt, Artificial Sequence
  Description of Artificial Sequence: Synthetic oligonucleotide
aaagaaaacccagugguac

SEQ ID NO: 3221093 - RNA, 19 nt, Artificial Sequence
  Description of Artificial Sequence: Synthetic oligonucleotide
gauucucugaauuucauug

SEQ ID NO: 3221094 - RNA, 19 nt, Artificial Sequence
  Description of Artificial Sequence: Synthetic oligonucleotide
aaggucaauuuucaaauuc

SEQ ID NO: 3221095 - RNA, 19 nt, Artificial Sequence
  Description of Artificial Sequence: Synthetic oligonucleotide
uguauugagaugcaguggc

SEQ ID NO: 3221096 - RNA, 19 nt, Artificial Sequence
  Description of Artificial Sequence: Synthetic oligonucleotide
uccagaauguuccaugugg

SEQ ID NO: 3221097 - RNA, 19 nt, Artificial Sequence
  Description of Artificial Sequence: Synthetic oligonucleotide
agaaagaaaacccaguggu

SEQ ID NO: 3221098 - RNA, 19 nt, Artificial Sequence
  Description of Artificial Sequence: Synthetic oligonucleotide
cuaaauaucugcaagguca

SEQ ID NO: 3221099 - RNA, 19 nt, Artificial Sequence
  Description of Artificial Sequence: Synthetic oligonucleotide
aagaaaacccagugguacc

SEQ ID NO: 3221100 - RNA, 19 nt, Artificial Sequence
  Description of Artificial Sequence: Synthetic oligonucleotide
uaguaagaccagaagaggg

SEQ ID NO: 3221101 - RNA, 19 nt, Artificial Sequence
  Description of Artificial Sequence: Synthetic oligonucleotide
ugggaaaagaaagaaaacc

SEQ ID NO: 3221102 - RNA, 19 nt, Artificial Sequence
  Description of Artificial Sequence: Synthetic oligonucleotide
auuggauucugacuugucg

SEQ ID NO: 3221103 - RNA, 19 nt, Artificial Sequence
  Description of Artificial Sequence: Synthetic oligonucleotide
ucaauuuucaaauuccuuu

SEQ ID NO: 3221104 - RNA, 19 nt, Artificial Sequence
  Description of Artificial Sequence: Synthetic oligonucleotide
uuucauuggauucugacuu

SEQ ID NO: 3221105 - RNA, 19 nt, Artificial Sequence
  Description of Artificial Sequence: Synthetic oligonucleotide
ucaaaauuugaggagcagg

SEQ ID NO: 3221106 - RNA, 19 nt, Artificial Sequence
  Description of Artificial Sequence: Synthetic oligonucleotide
ugaauuucugucccauugg

SEQ ID NO: 3221107 - RNA, 19 nt, Artificial Sequence
  Description of Artificial Sequence: Synthetic oligonucleotide
uaccuaaauaucugcaagg

SEQ ID NO: 3221108 - RNA, 19 nt, Artificial Sequence
  Description of Artificial Sequence: Synthetic oligonucleotide
auuucugucccauuggcug

SEQ ID NO: 3221109 - RNA, 19 nt, Artificial Sequence
  Description of Artificial Sequence: Synthetic oligonucleotide
agaauguuccauguggggc

SEQ ID NO: 3221110 - RNA, 19 nt, Artificial Sequence
  Description of Artificial Sequence: Synthetic oligonucleotide
ugcuguuguauugagaugc

SEQ ID NO: 3221111 - RNA, 19 nt, Artificial Sequence
  Description of Artificial Sequence: Synthetic oligonucleotide
uuucccacaguauuguuug

SEQ ID NO: 3221112 - RNA, 19 nt, Artificial Sequence
  Description of Artificial Sequence: Synthetic oligonucleotide
guuguauugagaugcagug

SEQ ID NO: 3221113 - RNA, 19 nt, Artificial Sequence
  Description of Artificial Sequence: Synthetic oligonucleotide
uugaggagcagguaguaag

SEQ ID NO: 3221114 - RNA, 19 nt, Artificial Sequence
  Description of Artificial Sequence: Synthetic oligonucleotide
uguuguauugagaugcagu

SEQ ID NO: 3221115 - RNA, 19 nt, Artificial Sequence
  Description of Artificial Sequence: Synthetic oligonucleotide
agagaggucacacagugca

SEQ ID NO: 3221116 - RNA, 19 nt, Artificial Sequence
  Description of Artificial Sequence: Synthetic oligonucleotide
cacagugcagucuuggugg

SEQ ID NO: 3221117 - RNA, 19 nt, Artificial Sequence
  Description of Artificial Sequence: Synthetic oligonucleotide
agugcuguuguauugagau

SEQ ID NO: 3221118 - RNA, 19 nt, Artificial Sequence
  Description of Artificial Sequence: Synthetic oligonucleotide
ugucucuauggaccgaugg

SEQ ID NO: 3221119 - RNA, 19 nt, Artificial Sequence
  Description of Artificial Sequence: Synthetic oligonucleotide
auugagaugcaguggcggc

SEQ ID NO: 3221120 - RNA, 19 nt, Artificial Sequence
  Description of Artificial Sequence: Synthetic oligonucleotide
uuuucuuucccacaguauu

SEQ ID NO: 3221121 - RNA, 19 nt, Artificial Sequence
  Description of Artificial Sequence: Synthetic oligonucleotide
ucugaauuucauuggauuc

SEQ ID NO: 3221122 - RNA, 19 nt, Artificial Sequence
  Description of Artificial Sequence: Synthetic oligonucleotide
ucccaucaaaauuugagga

SEQ ID NO: 3221123 - RNA, 19 nt, Artificial Sequence
  Description of Artificial Sequence: Synthetic oligonucleotide
uuggauucugacuugucgc

SEQ ID NO: 3221124 - RNA, 19 nt, Artificial Sequence
  Description of Artificial Sequence: Synthetic oligonucleotide
auucucugaauuucauugg

SEQ ID NO: 3221125 - RNA, 19 nt, Artificial Sequence
  Description of Artificial Sequence: Synthetic oligonucleotide
uguggggcacuuuaguggg

SEQ ID NO: 3221126 - RNA, 19 nt, Artificial Sequence
  Description of Artificial Sequence: Synthetic oligonucleotide
agguaguaagaccagaaga

SEQ ID NO: 3221127 - RNA, 19 nt, Artificial Sequence
  Description of Artificial Sequence: Synthetic oligonucleotide
aggucaauuuucaaauucc

SEQ ID NO: 3221128 - RNA, 19 nt, Artificial Sequence
  Description of Artificial Sequence: Synthetic oligonucleotide
uuucuuucccacaguauug

SEQ ID NO: 3221129 - RNA, 19 nt, Artificial Sequence
  Description of Artificial Sequence: Synthetic oligonucleotide
ucugcaaggucaauuuuca

SEQ ID NO: 3221130 - RNA, 19 nt, Artificial Sequence
  Description of Artificial Sequence: Synthetic oligonucleotide
cucccaucaaaauuugagg

SEQ ID NO: 3221131 - RNA, 19 nt, Artificial Sequence
  Description of Artificial Sequence: Synthetic oligonucleotide
ugugauucucugaauuuca

SEQ ID NO: 3221132 - RNA, 19 nt, Artificial Sequence
  Description of Artificial Sequence: Synthetic oligonucleotide
auguggggcacuuuagugg

SEQ ID NO: 3221133 - RNA, 19 nt, Artificial Sequence
  Description of Artificial Sequence: Synthetic oligonucleotide
uauugagaugcaguggcgg

SEQ ID NO: 3221134 - RNA, 19 nt, Artificial Sequence
  Description of Artificial Sequence: Synthetic oligonucleotide
aauuugggauggccgacuc

SEQ ID NO: 3221135 - RNA, 19 nt, Artificial Sequence
  Description of Artificial Sequence: Synthetic oligonucleotide
aguggcugagcccuugccc

SEQ ID NO: 3221136 - RNA, 19 nt, Artificial Sequence
  Description of Artificial Sequence: Synthetic oligonucleotide
aggagcagguaguaagacc

SEQ ID NO: 3221137 - RNA, 19 nt, Artificial Sequence
  Description of Artificial Sequence: Synthetic oligonucleotide
acaguauuguuuguucccc

SEQ ID NO: 3221138 - RNA, 19 nt, Artificial Sequence
  Description of Artificial Sequence: Synthetic oligonucleotide
ugcaaggucaauuuucaaa

SEQ ID NO: 3221139 - RNA, 19 nt, Artificial Sequence
  Description of Artificial Sequence: Synthetic oligonucleotide
gaauuucugucccauuggc

SEQ ID NO: 3221140 - RNA, 19 nt, Artificial Sequence
  Description of Artificial Sequence: Synthetic oligonucleotide
uauuguuuguuccccuccc

SEQ ID NO: 3221141 - RNA, 19 nt, Artificial Sequence
  Description of Artificial Sequence: Synthetic oligonucleotide
aguauuguuuguuccccuc

SEQ ID NO: 3221142 - RNA, 19 nt, Artificial Sequence
  Description of Artificial Sequence: Synthetic oligonucleotide
uucucugaauuucauugga

SEQ ID NO: 3221143 - RNA, 19 nt, Artificial Sequence
  Description of Artificial Sequence: Synthetic oligonucleotide
uugggaaaagaaagaaaac

SEQ ID NO: 3221144 - RNA, 19 nt, Artificial Sequence
  Description of Artificial Sequence: Synthetic oligonucleotide
caacagagaggucacacag

SEQ ID NO: 3221145 - RNA, 19 nt, Artificial Sequence
  Description of Artificial Sequence: Synthetic oligonucleotide
uuggcugugauucucugaa

SEQ ID NO: 3221146 - RNA, 19 nt, Artificial Sequence
  Description of Artificial Sequence: Synthetic oligonucleotide
gguaguaagaccagaagag

SEQ ID NO: 3221147 - RNA, 19 nt, Artificial Sequence
  Description of Artificial Sequence: Synthetic oligonucleotide
uaagaccagaagagggagg

SEQ ID NO: 3221148 - RNA, 19 nt, Artificial Sequence
  Description of Artificial Sequence: Synthetic oligonucleotide
aauaucugcaaggucaauu

SEQ ID NO: 3221149 - RNA, 19 nt, Artificial Sequence
  Description of Artificial Sequence: Synthetic oligonucleotide
uaaauaucugcaaggucaa

SEQ ID NO: 3221150 - RNA, 19 nt, Artificial Sequence
  Description of Artificial Sequence: Synthetic oligonucleotide
gggaaaagaaagaaaaccc

SEQ ID NO: 3221151 - RNA, 19 nt, Artificial Sequence
  Description of Artificial Sequence: Synthetic oligonucleotide
cacaguauuguuuguuccc

SEQ ID NO: 3221152 - RNA, 19 nt, Artificial Sequence
  Description of Artificial Sequence: Synthetic oligonucleotide
guaguaagaccagaagagg

SEQ ID NO: 3221153 - RNA, 19 nt, Artificial Sequence
  Description of Artificial Sequence: Synthetic oligonucleotide
ugugcuugucucuauggac

SEQ ID NO: 3221154 - RNA, 19 nt, Artificial Sequence
  Description of Artificial Sequence: Synthetic oligonucleotide
uuguauugagaugcagugg

SEQ ID NO: 3221155 - RNA, 19 nt, Artificial Sequence
  Description of Artificial Sequence: Synthetic oligonucleotide
cacuuuagugggcagagug

SEQ ID NO: 3221156 - RNA, 19 nt, Artificial Sequence
  Description of Artificial Sequence: Synthetic oligonucleotide
gaauguuccauguggggca

SEQ ID NO: 3221157 - RNA, 19 nt, Artificial Sequence
  Description of Artificial Sequence: Synthetic oligonucleotide
ucccauuugggaaaagaaa

SEQ ID NO: 3221158 - RNA, 19 nt, Artificial Sequence
  Description of Artificial Sequence: Synthetic oligonucleotide
ugguaccuaaauaucugca

SEQ ID NO: 3221159 - RNA, 19 nt, Artificial Sequence
  Description of Artificial Sequence: Synthetic oligonucleotide
aagaccagaagagggagga

SEQ ID NO: 3221160 - RNA, 19 nt, Artificial Sequence
  Description of Artificial Sequence: Synthetic oligonucleotide
uucccauuugggaaaagaa

SEQ ID NO: 3221161 - RNA, 19 nt, Artificial Sequence
  Description of Artificial Sequence: Synthetic oligonucleotide
uuugggauggccgacucca

SEQ ID NO: 3221162 - RNA, 19 nt, Artificial Sequence
  Description of Artificial Sequence: Synthetic oligonucleotide
uggaccgauggaauuuggg

SEQ ID NO: 3221163 - RNA, 19 nt, Artificial Sequence
  Description of Artificial Sequence: Synthetic oligonucleotide
uggaauuugggauggccga

SEQ ID NO: 3221164 - RNA, 19 nt, Artificial Sequence
  Description of Artificial Sequence: Synthetic oligonucleotide
ugcuugucucuauggaccg

SEQ ID NO: 3221165 - RNA, 19 nt, Artificial Sequence
  Description of Artificial Sequence: Synthetic oligonucleotide
cccauuugggaaaagaaag

SEQ ID NO: 3221166 - RNA, 19 nt, Artificial Sequence
  Description of Artificial Sequence: Synthetic oligonucleotide
ucugacuugucgcugucgu

SEQ ID NO: 3221167 - RNA, 19 nt, Artificial Sequence
  Description of Artificial Sequence: Synthetic oligonucleotide
acucccaucaaaauuugag

SEQ ID NO: 3221168 - RNA, 19 nt, Artificial Sequence
  Description of Artificial Sequence: Synthetic oligonucleotide
cucccuugaauuucugucc

SEQ ID NO: 3221169 - RNA, 19 nt, Artificial Sequence
  Description of Artificial Sequence: Synthetic oligonucleotide
ugaauuucauuggauucug

SEQ ID NO: 3221170 - RNA, 19 nt, Artificial Sequence
  Description of Artificial Sequence: Synthetic oligonucleotide
aauuugaggagcagguagu

SEQ ID NO: 3221171 - RNA, 19 nt, Artificial Sequence
  Description of Artificial Sequence: Synthetic oligonucleotide
auaucugcaaggucaauuu

SEQ ID NO: 3221172 - RNA, 19 nt, Artificial Sequence
  Description of Artificial Sequence: Synthetic oligonucleotide
ucccuugaauuucuguccc

SEQ ID NO: 3221173 - RNA, 19 nt, Artificial Sequence
  Description of Artificial Sequence: Synthetic oligonucleotide
gauggaauuugggauggcc

SEQ ID NO: 3221174 - RNA, 19 nt, Artificial Sequence
  Description of Artificial Sequence: Synthetic oligonucleotide
gacuccagaauguuccaug

SEQ ID NO: 3221175 - RNA, 19 nt, Artificial Sequence
  Description of Artificial Sequence: Synthetic oligonucleotide
ugaggagcagguaguaaga

SEQ ID NO: 3221176 - RNA, 19 nt, Artificial Sequence
  Description of Artificial Sequence: Synthetic oligonucleotide
uguuuguuccccucccuug

SEQ ID NO: 3221177 - RNA, 19 nt, Artificial Sequence
  Description of Artificial Sequence: Synthetic oligonucleotide
auggaauuugggauggccg

SEQ ID NO: 3221178 - RNA, 19 nt, Artificial Sequence
  Description of Artificial Sequence: Synthetic oligonucleotide
cuuuagugggcagaguggc

SEQ ID NO: 3221179 - RNA, 19 nt, Artificial Sequence
  Description of Artificial Sequence: Synthetic oligonucleotide
accgauggaauuugggaug

SEQ ID NO: 3221180 - RNA, 19 nt, Artificial Sequence
  Description of Artificial Sequence: Synthetic oligonucleotide
ugggcagaguggcugagcc

SEQ ID NO: 3221181 - RNA, 19 nt, Artificial Sequence
  Description of Artificial Sequence: Synthetic oligonucleotide
auuugggauggccgacucc

SEQ ID NO: 3221182 - RNA, 19 nt, Artificial Sequence
  Description of Artificial Sequence: Synthetic oligonucleotide
ugugccuucuucccauuug

SEQ ID NO: 3221183 - RNA, 19 nt, Artificial Sequence
  Description of Artificial Sequence: Synthetic oligonucleotide
aguggcggcagcucucccc

SEQ ID NO: 3221184 - RNA, 19 nt, Artificial Sequence
  Description of Artificial Sequence: Synthetic oligonucleotide
cagaauguuccaugugggg

SEQ ID NO: 3221185 - RNA, 19 nt, Artificial Sequence
  Description of Artificial Sequence: Synthetic oligonucleotide
acacagugcagucuuggug

SEQ ID NO: 3221186 - RNA, 19 nt, Artificial Sequence
  Description of Artificial Sequence: Synthetic oligonucleotide
accagaagagggaggagcc

SEQ ID NO: 3221187 - RNA, 19 nt, Artificial Sequence
  Description of Artificial Sequence: Synthetic oligonucleotide
aauguuccauguggggcac

SEQ ID NO: 3221188 - RNA, 19 nt, Artificial Sequence
  Description of Artificial Sequence: Synthetic oligonucleotide
gauggccgacuccagaaug

SEQ ID NO: 3221189 - RNA, 19 nt, Artificial Sequence
  Description of Artificial Sequence: Synthetic oligonucleotide
guauuguuuguuccccucc

SEQ ID NO: 3221190 - RNA, 19 nt, Artificial Sequence
  Description of Artificial Sequence: Synthetic oligonucleotide
cauguggggcacuuuagug

SEQ ID NO: 3221191 - RNA, 19 nt, Artificial Sequence
  Description of Artificial Sequence: Synthetic oligonucleotide
aaugaaguaacagugacac

SEQ ID NO: 3221192 - RNA, 19 nt, Artificial Sequence
  Description of Artificial Sequence: Synthetic oligonucleotide
aacagugacacugauaacc

SEQ ID NO: 3221193 - RNA, 19 nt, Artificial Sequence
  Description of Artificial Sequence: Synthetic oligonucleotide
aagacuggaauucuuagag

SEQ ID NO: 3221194 - RNA, 19 nt, Artificial Sequence
  Description of Artificial Sequence: Synthetic oligonucleotide
ugaaguucuacaauggaag

SEQ ID NO: 3221195 - RNA, 19 nt, Artificial Sequence
  Description of Artificial Sequence: Synthetic oligonucleotide
aagaucacagacaucaacc

SEQ ID NO: 3221196 - RNA, 19 nt, Artificial Sequence
  Description of Artificial Sequence: Synthetic oligonucleotide
aaagaucacagacaucaac

SEQ ID NO: 3221197 - RNA, 19 nt, Artificial Sequence
  Description of Artificial Sequence: Synthetic oligonucleotide
uggaaaugaaguaacagug

SEQ ID NO: 3221198 - RNA, 19 nt, Artificial Sequence
  Description of Artificial Sequence: Synthetic oligonucleotide
uuuauuccaaagaucacag

SEQ ID NO: 3221199 - RNA, 19 nt, Artificial Sequence
  Description of Artificial Sequence: Synthetic oligonucleotide
uauuccaaagaucacagac

SEQ ID NO: 3221200 - RNA, 19 nt, Artificial Sequence
  Description of Artificial Sequence: Synthetic oligonucleotide
aauucuuagaggcacagaa

SEQ ID NO: 3221201 - RNA, 19 nt, Artificial Sequence
  Description of Artificial Sequence: Synthetic oligonucleotide
ugaaguaacagugacacug

SEQ ID NO: 3221202 - RNA, 19 nt, Artificial Sequence
  Description of Artificial Sequence: Synthetic oligonucleotide
uuugagcugaagaagacug

SEQ ID NO: 3221203 - RNA, 19 nt, Artificial Sequence
  Description of Artificial Sequence: Synthetic oligonucleotide
uuuggaaacuuccugaagu

SEQ ID NO: 3221204 - RNA, 19 nt, Artificial Sequence
  Description of Artificial Sequence: Synthetic oligonucleotide
aagacauuuuauuccaaag

SEQ ID NO: 3221205 - RNA, 19 nt, Artificial Sequence
  Description of Artificial Sequence: Synthetic oligonucleotide
cauuuuauuccaaagauca

SEQ ID NO: 3221206 - RNA, 19 nt, Artificial Sequence
  Description of Artificial Sequence: Synthetic oligonucleotide
uuugguuuugagcugaaga

SEQ ID NO: 3221207 - RNA, 19 nt, Artificial Sequence
  Description of Artificial Sequence: Synthetic oligonucleotide
aagcgcagcauuuggaaac

SEQ ID NO: 3221208 - RNA, 19 nt, Artificial Sequence
  Description of Artificial Sequence: Synthetic oligonucleotide
agcagaagacauuuuauuc

SEQ ID NO: 3221209 - RNA, 19 nt, Artificial Sequence
  Description of Artificial Sequence: Synthetic oligonucleotide
gacuggaauucuuagaggc

SEQ ID NO: 3221210 - RNA, 19 nt, Artificial Sequence
  Description of Artificial Sequence: Synthetic oligonucleotide
guaacagugacacugauaa

SEQ ID NO: 3221211 - RNA, 19 nt, Artificial Sequence
  Description of Artificial Sequence: Synthetic oligonucleotide
aaaucucugcuuucuuccc

SEQ ID NO: 3221212 - RNA, 19 nt, Artificial Sequence
  Description of Artificial Sequence: Synthetic oligonucleotide
gacaucaaccuccacagag

SEQ ID NO: 3221213 - RNA, 19 nt, Artificial Sequence
  Description of Artificial Sequence: Synthetic oligonucleotide
aucacagacaucaaccucc

SEQ ID NO: 3221214 - RNA, 19 nt, Artificial Sequence
  Description of Artificial Sequence: Synthetic oligonucleotide
gaaaucucugcuuucuucc

SEQ ID NO: 3221215 - RNA, 19 nt, Artificial Sequence
  Description of Artificial Sequence: Synthetic oligonucleotide
ucuacaauggaaguuggag

SEQ ID NO: 3221216 - RNA, 19 nt, Artificial Sequence
  Description of Artificial Sequence: Synthetic oligonucleotide
uuuuauuccaaagaucaca

SEQ ID NO: 3221217 - RNA, 19 nt, Artificial Sequence
  Description of Artificial Sequence: Synthetic oligonucleotide
gaaaugaaguaacagugac

SEQ ID NO: 3221218 - RNA, 19 nt, Artificial Sequence
  Description of Artificial Sequence: Synthetic oligonucleotide
uuggaaaugaaguaacagu

SEQ ID NO: 3221219 - RNA, 19 nt, Artificial Sequence
  Description of Artificial Sequence: Synthetic oligonucleotide
gaagguauugguugaauac

SEQ ID NO: 3221220 - RNA, 19 nt, Artificial Sequence
  Description of Artificial Sequence: Synthetic oligonucleotide
uuuggaaaugaaguaacag

SEQ ID NO: 3221221 - RNA, 19 nt, Artificial Sequence
  Description of Artificial Sequence: Synthetic oligonucleotide
uuggagaagguauugguug

SEQ ID NO: 3221222 - RNA, 19 nt, Artificial Sequence
  Description of Artificial Sequence: Synthetic oligonucleotide
uacuccauauaguaaauga

SEQ ID NO: 3221223 - RNA, 19 nt, Artificial Sequence
  Description of Artificial Sequence: Synthetic oligonucleotide
uugaauacuccauauagua

SEQ ID NO: 3221224 - RNA, 19 nt, Artificial Sequence
  Description of Artificial Sequence: Synthetic oligonucleotide
gguugaauacuccauauag

SEQ ID NO: 3221225 - RNA, 19 nt, Artificial Sequence
  Description of Artificial Sequence: Synthetic oligonucleotide
aagacuuuccuucuuugga

SEQ ID NO: 3221226 - RNA, 19 nt, Artificial Sequence
  Description of Artificial Sequence: Synthetic oligonucleotide
uucuuagaggcacagaaau

SEQ ID NO: 3221227 - RNA, 19 nt, Artificial Sequence
  Description of Artificial Sequence: Synthetic oligonucleotide
ucuuuggaaaugaaguaac

SEQ ID NO: 3221228 - RNA, 19 nt, Artificial Sequence
  Description of Artificial Sequence: Synthetic oligonucleotide
gaauacuccauauaguaaa

SEQ ID NO: 3221229 - RNA, 19 nt, Artificial Sequence
  Description of Artificial Sequence: Synthetic oligonucleotide
aaccaauccacuuuucuaa

SEQ ID NO: 3221230 - RNA, 19 nt, Artificial Sequence
  Description of Artificial Sequence: Synthetic oligonucleotide
agaaaucucugcuuucuuc

SEQ ID NO: 3221231 - RNA, 19 nt, Artificial Sequence
  Description of Artificial Sequence: Synthetic oligonucleotide
acagagcgauccuagaaac

SEQ ID NO: 3221232 - RNA, 19 nt, Artificial Sequence
  Description of Artificial Sequence: Synthetic oligonucleotide
uacaauggaaguuggagaa

SEQ ID NO: 3221233 - RNA, 19 nt, Artificial Sequence
  Description of Artificial Sequence: Synthetic oligonucleotide
agacauuuuauuccaaaga

SEQ ID NO: 3221234 - RNA, 19 nt, Artificial Sequence
  Description of Artificial Sequence: Synthetic oligonucleotide
aaaaucccaaaguagccau

SEQ ID NO: 3221235 - RNA, 19 nt, Artificial Sequence
  Description of Artificial Sequence: Synthetic oligonucleotide
acagacaucaaccuccaca

SEQ ID NO: 3221236 - RNA, 19 nt, Artificial Sequence
  Description of Artificial Sequence: Synthetic oligonucleotide
uccugaaguucuacaaugg

SEQ ID NO: 3221237 - RNA, 19 nt, Artificial Sequence
  Description of Artificial Sequence: Synthetic oligonucleotide
acacugauaaccaauccac

SEQ ID NO: 3221238 - RNA, 19 nt, Artificial Sequence
  Description of Artificial Sequence: Synthetic oligonucleotide
aguucuacaauggaaguug

SEQ ID NO: 3221239 - RNA, 19 nt, Artificial Sequence
  Description of Artificial Sequence: Synthetic oligonucleotide
cagacaucaaccuccacag

SEQ ID NO: 3221240 - RNA, 19 nt, Artificial Sequence
  Description of Artificial Sequence: Synthetic oligonucleotide
ucugcuuucuucccaagac

SEQ ID NO: 3221241 - RNA, 19 nt, Artificial Sequence
  Description of Artificial Sequence: Synthetic oligonucleotide
uuccugaaguucuacaaug

SEQ ID NO: 3221242 - RNA, 19 nt, Artificial Sequence
  Description of Artificial Sequence: Synthetic oligonucleotide
uccuucuuuggaaaugaag

SEQ ID NO: 3221243 - RNA, 19 nt, Artificial Sequence
  Description of Artificial Sequence: Synthetic oligonucleotide
uccauauaguaaaugaguu

SEQ ID NO: 3221244 - RNA, 19 nt, Artificial Sequence
  Description of Artificial Sequence: Synthetic oligonucleotide
uuccaaagaucacagacau

SEQ ID NO: 3221245 - RNA, 19 nt, Artificial Sequence
  Description of Artificial Sequence: Synthetic oligonucleotide
uuucuaagcaagcgcagca

SEQ ID NO: 3221246 - RNA, 19 nt, Artificial Sequence
  Description of Artificial Sequence: Synthetic oligonucleotide
uugguuuugagcugaagaa

SEQ ID NO: 3221247 - RNA, 19 nt, Artificial Sequence
  Description of Artificial Sequence: Synthetic oligonucleotide
agaagacuggaauucuuag

SEQ ID NO: 3221248 - RNA, 19 nt, Artificial Sequence
  Description of Artificial Sequence: Synthetic oligonucleotide
uggaaguuggagaagguau

SEQ ID NO: 3221249 - RNA, 19 nt, Artificial Sequence
  Description of Artificial Sequence: Synthetic oligonucleotide
ugaauacuccauauaguaa

SEQ ID NO: 3221250 - RNA, 19 nt, Artificial Sequence
  Description of Artificial Sequence: Synthetic oligonucleotide
uccacuuuucuaagcaagc

SEQ ID NO: 3221251 - RNA, 19 nt, Artificial Sequence
  Description of Artificial Sequence: Synthetic oligonucleotide
agcauuuggaaacuuccug

SEQ ID NO: 3221252 - RNA, 19 nt, Artificial Sequence
  Description of Artificial Sequence: Synthetic oligonucleotide
cuucccaagacuuuccuuc

SEQ ID NO: 3221253 - RNA, 19 nt, Artificial Sequence
  Description of Artificial Sequence: Synthetic oligonucleotide
gacacugauaaccaaucca

SEQ ID NO: 3221254 - RNA, 19 nt, Artificial Sequence
  Description of Artificial Sequence: Synthetic oligonucleotide
aagguauugguugaauacu

SEQ ID NO: 3221255 - RNA, 19 nt, Artificial Sequence
  Description of Artificial Sequence: Synthetic oligonucleotide
auaaccaauccacuuuucu

SEQ ID NO: 3221256 - RNA, 19 nt, Artificial Sequence
  Description of Artificial Sequence: Synthetic oligonucleotide
uugagcugaagaagacugg

SEQ ID NO: 3221257 - RNA, 19 nt, Artificial Sequence
  Description of Artificial Sequence: Synthetic oligonucleotide
aagcaagcgcagcauuugg

SEQ ID NO: 3221258 - RNA, 19 nt, Artificial Sequence
  Description of Artificial Sequence: Synthetic oligonucleotide
caauggaaguuggagaagg

SEQ ID NO: 3221259 - RNA, 19 nt, Artificial Sequence
  Description of Artificial Sequence: Synthetic oligonucleotide
aaccuccacagagcgaucc

SEQ ID NO: 3221260 - RNA, 19 nt, Artificial Sequence
  Description of Artificial Sequence: Synthetic oligonucleotide
ucccaaaguagccaucagc

SEQ ID NO: 3221261 - RNA, 19 nt, Artificial Sequence
  Description of Artificial Sequence: Synthetic oligonucleotide
acauuuuauuccaaagauc

SEQ ID NO: 3221262 - RNA, 19 nt, Artificial Sequence
  Description of Artificial Sequence: Synthetic oligonucleotide
aaguuggagaagguauugg

SEQ ID NO: 3221263 - RNA, 19 nt, Artificial Sequence
  Description of Artificial Sequence: Synthetic oligonucleotide
gcagaagacauuuuauucc

SEQ ID NO: 3221264 - RNA, 19 nt, Artificial Sequence
  Description of Artificial Sequence: Synthetic oligonucleotide
caagacuuuccuucuuugg

SEQ ID NO: 3221265 - RNA, 19 nt, Artificial Sequence
  Description of Artificial Sequence: Synthetic oligonucleotide
caucaaccuccacagagcg

SEQ ID NO: 3221266 - RNA, 19 nt, Artificial Sequence
  Description of Artificial Sequence: Synthetic oligonucleotide
gacauuuuauuccaaagau

SEQ ID NO: 3221267 - RNA, 19 nt, Artificial Sequence
  Description of Artificial Sequence: Synthetic oligonucleotide
cacuuuucuaagcaagcgc

SEQ ID NO: 3221268 - RNA, 19 nt, Artificial Sequence
  Description of Artificial Sequence: Synthetic oligonucleotide
aguuggagaagguauuggu

SEQ ID NO: 3221269 - RNA, 19 nt, Artificial Sequence
  Description of Artificial Sequence: Synthetic oligonucleotide
agacuggaauucuuagagg

SEQ ID NO: 3221270 - RNA, 19 nt, Artificial Sequence
  Description of Artificial Sequence: Synthetic oligonucleotide
uauugguugaauacuccau

SEQ ID NO: 3221271 - RNA, 19 nt, Artificial Sequence
  Description of Artificial Sequence: Synthetic oligonucleotide
ucagcagaagacauuuuau

SEQ ID NO: 3221272 - RNA, 19 nt, Artificial Sequence
  Description of Artificial Sequence: Synthetic oligonucleotide
aaucccaaaguagccauca

SEQ ID NO: 3221273 - RNA, 19 nt, Artificial Sequence
  Description of Artificial Sequence: Synthetic oligonucleotide
uucuuuggaaaugaaguaa

SEQ ID NO: 3221274 - RNA, 19 nt, Artificial Sequence
  Description of Artificial Sequence: Synthetic oligonucleotide
auuuggaaacuuccugaag

SEQ ID NO: 3221275 - RNA, 19 nt, Artificial Sequence
  Description of Artificial Sequence: Synthetic oligonucleotide
ugguuuugagcugaagaag

SEQ ID NO: 3221276 - RNA, 19 nt, Artificial Sequence
  Description of Artificial Sequence: Synthetic oligonucleotide
ugacacugauaaccaaucc

SEQ ID NO: 3221277 - RNA, 19 nt, Artificial Sequence
  Description of Artificial Sequence: Synthetic oligonucleotide
ugauaaccaauccacuuuu

SEQ ID NO: 3221278 - RNA, 19 nt, Artificial Sequence
  Description of Artificial Sequence: Synthetic oligonucleotide
aacuuccugaaguucuaca

SEQ ID NO: 3221279 - RNA, 19 nt, Artificial Sequence
  Description of Artificial Sequence: Synthetic oligonucleotide
agaucacagacaucaaccu

SEQ ID NO: 3221280 - RNA, 19 nt, Artificial Sequence
  Description of Artificial Sequence: Synthetic oligonucleotide
aaaugaaguaacagugaca

SEQ ID NO: 3221281 - RNA, 19 nt, Artificial Sequence
  Description of Artificial Sequence: Synthetic oligonucleotide
agagcgauccuagaaacug

SEQ ID NO: 3221282 - RNA, 19 nt, Artificial Sequence
  Description of Artificial Sequence: Synthetic oligonucleotide
uuuucuaagcaagcgcagc

SEQ ID NO: 3221283 - RNA, 19 nt, Artificial Sequence
  Description of Artificial Sequence: Synthetic oligonucleotide
acuuuucuaagcaagcgca

SEQ ID NO: 3221284 - RNA, 19 nt, Artificial Sequence
  Description of Artificial Sequence: Synthetic oligonucleotide
aaaguagccaucagcagaa

SEQ ID NO: 3221285 - RNA, 19 nt, Artificial Sequence
  Description of Artificial Sequence: Synthetic oligonucleotide
ucaaccuccacagagcgau

SEQ ID NO: 3221286 - RNA, 19 nt, Artificial Sequence
  Description of Artificial Sequence: Synthetic oligonucleotide
aaacuuccugaaguucuac

SEQ ID NO: 3221287 - RNA, 19 nt, Artificial Sequence
  Description of Artificial Sequence: Synthetic oligonucleotide
aaucucugcuuucuuccca

SEQ ID NO: 3221288 - RNA, 19 nt, Artificial Sequence
  Description of Artificial Sequence: Synthetic oligonucleotide
acaucaaccuccacagagc

SEQ ID NO: 3221289 - RNA, 19 nt, Artificial Sequence
  Description of Artificial Sequence: Synthetic oligonucleotide
aauccacuuuucuaagcaa

SEQ ID NO: 3221290 - RNA, 19 nt, Artificial Sequence
  Description of Artificial Sequence: Synthetic oligonucleotide
uuuccuucuuuggaaauga

SEQ ID NO: 3221291 - RNA, 19 nt, Artificial Sequence
  Description of Artificial Sequence: Synthetic oligonucleotide
aaucucuaaacauuuuccc

SEQ ID NO: 3221292 - RNA, 19 nt, Artificial Sequence
  Description of Artificial Sequence: Synthetic oligonucleotide
gauaauguaaucucuaaac

SEQ ID NO: 3221293 - RNA, 19 nt, Artificial Sequence
  Description of Artificial Sequence: Synthetic oligonucleotide
auauguaugguaaacauuc

SEQ ID NO: 3221294 - RNA, 19 nt, Artificial Sequence
  Description of Artificial Sequence: Synthetic oligonucleotide
aaacauuccuccuccaagg

SEQ ID NO: 3221295 - RNA, 19 nt, Artificial Sequence
  Description of Artificial Sequence: Synthetic oligonucleotide
ggucacauaaucuucaugg

SEQ ID NO: 3221296 - RNA, 19 nt, Artificial Sequence
  Description of Artificial Sequence: Synthetic oligonucleotide
uucauugagaccaggaaug

SEQ ID NO: 3221297 - RNA, 19 nt, Artificial Sequence
  Description of Artificial Sequence: Synthetic oligonucleotide
uaaucucuaaacauuuucc

SEQ ID NO: 3221298 - RNA, 19 nt, Artificial Sequence
  Description of Artificial Sequence: Synthetic oligonucleotide
aucucuaaacauuuucccc

SEQ ID NO: 3221299 - RNA, 19 nt, Artificial Sequence
  Description of Artificial Sequence: Synthetic oligonucleotide
uuugguaugauagggacag

SEQ ID NO: 3221300 - RNA, 19 nt, Artificial Sequence
  Description of Artificial Sequence: Synthetic oligonucleotide
aauuucuucugaaacagag

SEQ ID NO: 3221301 - RNA, 19 nt, Artificial Sequence
  Description of Artificial Sequence: Synthetic oligonucleotide
ucugaaacagagaagauuu

SEQ ID NO: 3221302 - RNA, 19 nt, Artificial Sequence
  Description of Artificial Sequence: Synthetic oligonucleotide
ucuucugaaacagagaaga

SEQ ID NO: 3221303 - RNA, 19 nt, Artificial Sequence
  Description of Artificial Sequence: Synthetic oligonucleotide
auggaaaauauguauaugu

SEQ ID NO: 3221304 - RNA, 19 nt, Artificial Sequence
  Description of Artificial Sequence: Synthetic oligonucleotide
uucucuauggucuacuagc

SEQ ID NO: 3221305 - RNA, 19 nt, Artificial Sequence
  Description of Artificial Sequence: Synthetic oligonucleotide
aaggagcacacucucuugc

SEQ ID NO: 3221306 - RNA, 19 nt, Artificial Sequence
  Description of Artificial Sequence: Synthetic oligonucleotide
aaacauuuuccccacccag

SEQ ID NO: 3221307 - RNA, 19 nt, Artificial Sequence
  Description of Artificial Sequence: Synthetic oligonucleotide
ugcguuuugacuacaagca

SEQ ID NO: 3221308 - RNA, 19 nt, Artificial Sequence
  Description of Artificial Sequence: Synthetic oligonucleotide
uaaacauuccuccuccaag

SEQ ID NO: 3221309 - RNA, 19 nt, Artificial Sequence
  Description of Artificial Sequence: Synthetic oligonucleotide
uuggauauuucucucaagu

SEQ ID NO: 3221310 - RNA, 19 nt, Artificial Sequence
  Description of Artificial Sequence: Synthetic oligonucleotide
aauauguauauguauggua

SEQ ID NO: 3221311 - RNA, 19 nt, Artificial Sequence
  Description of Artificial Sequence: Synthetic oligonucleotide
ugaaacagagaagauuugg

SEQ ID NO: 3221312 - RNA, 19 nt, Artificial Sequence
  Description of Artificial Sequence: Synthetic oligonucleotide
cuaccuguaacccaaagug

SEQ ID NO: 3221313 - RNA, 19 nt, Artificial Sequence
  Description of Artificial Sequence: Synthetic oligonucleotide
auaauguaaucucuaaaca

SEQ ID NO: 3221314 - RNA, 19 nt, Artificial Sequence
  Description of Artificial Sequence: Synthetic oligonucleotide
aguaauuucuucugaaaca

SEQ ID NO: 3221315 - RNA, 19 nt, Artificial Sequence
  Description of Artificial Sequence: Synthetic oligonucleotide
cuuaaaucauagucuaugc

SEQ ID NO: 3221316 - RNA, 19 nt, Artificial Sequence
  Description of Artificial Sequence: Synthetic oligonucleotide
agcagcauuuguuuugacc

SEQ ID NO: 3221317 - RNA, 19 nt, Artificial Sequence
  Description of Artificial Sequence: Synthetic oligonucleotide
ucucuaaacauuuucccca

SEQ ID NO: 3221318 - RNA, 19 nt, Artificial Sequence
  Description of Artificial Sequence: Synthetic oligonucleotide
ggauauuucucucaagugg

SEQ ID NO: 3221319 - RNA, 19 nt, Artificial Sequence
  Description of Artificial Sequence: Synthetic oligonucleotide
uaaaucauagucuaugcuu

SEQ ID NO: 3221320 - RNA, 19 nt, Artificial Sequence
  Description of Artificial Sequence: Synthetic oligonucleotide
agugucuuccaccaccacc

SEQ ID NO: 3221321 - RNA, 19 nt, Artificial Sequence
  Description of Artificial Sequence: Synthetic oligonucleotide
auagucuaugcuugagucc

SEQ ID NO: 3221322 - RNA, 19 nt, Artificial Sequence
  Description of Artificial Sequence: Synthetic oligonucleotide
ucuauggucuacuagcaca

SEQ ID NO: 3221323 - RNA, 19 nt, Artificial Sequence
  Description of Artificial Sequence: Synthetic oligonucleotide
uaauguaaucucuaaacau

SEQ ID NO: 3221324 - RNA, 19 nt, Artificial Sequence
  Description of Artificial Sequence: Synthetic oligonucleotide
ucacauaaucuucaugggc

SEQ ID NO: 3221325 - RNA, 19 nt, Artificial Sequence
  Description of Artificial Sequence: Synthetic oligonucleotide
uugcguuuugacuacaagc

SEQ ID NO: 3221326 - RNA, 19 nt, Artificial Sequence
  Description of Artificial Sequence: Synthetic oligonucleotide
ucuacuagcacacacuguu

SEQ ID NO: 3221327 - RNA, 19 nt, Artificial Sequence
  Description of Artificial Sequence: Synthetic oligonucleotide
aaaucauagucuaugcuug

SEQ ID NO: 3221328 - RNA, 19 nt, Artificial Sequence
  Description of Artificial Sequence: Synthetic oligonucleotide
gaguaauuucuucugaaac

SEQ ID NO: 3221329 - RNA, 19 nt, Artificial Sequence
  Description of Artificial Sequence: Synthetic oligonucleotide
uuaaaucauagucuaugcu

SEQ ID NO: 3221330 - RNA, 19 nt, Artificial Sequence
  Description of Artificial Sequence: Synthetic oligonucleotide
gcagcauuuguuuugaccg

SEQ ID NO: 3221331 - RNA, 19 nt, Artificial Sequence
  Description of Artificial Sequence: Synthetic oligonucleotide
accuucucugacuugaagg

SEQ ID NO: 3221332 - RNA, 19 nt, Artificial Sequence
  Description of Artificial Sequence: Synthetic oligonucleotide
uguaugguaaacauuccuc

SEQ ID NO: 3221333 - RNA, 19 nt, Artificial Sequence
  Description of Artificial Sequence: Synthetic oligonucleotide
agcacuauggaaaauaugu

SEQ ID NO: 3221334 - RNA, 19 nt, Artificial Sequence
  Description of Artificial Sequence: Synthetic oligonucleotide
uggggcuuaaaucauaguc

SEQ ID NO: 3221335 - RNA, 19 nt, Artificial Sequence
  Description of Artificial Sequence: Synthetic oligonucleotide
guaauuucuucugaaacag

SEQ ID NO: 3221336 - RNA, 19 nt, Artificial Sequence
  Description of Artificial Sequence: Synthetic oligonucleotide
acagagaagauuugguuug

SEQ ID NO: 3221337 - RNA, 19 nt, Artificial Sequence
  Description of Artificial Sequence: Synthetic oligonucleotide
auuugguuugcguuuugac

SEQ ID NO: 3221338 - RNA, 19 nt, Artificial Sequence
  Description of Artificial Sequence: Synthetic oligonucleotide
uuugguuugcguuuugacu

SEQ ID NO: 3221339 - RNA, 19 nt, Artificial Sequence
  Description of Artificial Sequence: Synthetic oligonucleotide
uuugauaauguaaucucua

SEQ ID NO: 3221340 - RNA, 19 nt, Artificial Sequence
  Description of Artificial Sequence: Synthetic oligonucleotide
uaugauagggacagugucu

SEQ ID NO: 3221341 - RNA, 19 nt, Artificial Sequence
  Description of Artificial Sequence: Synthetic oligonucleotide
uugacgaguaauuucuucu

SEQ ID NO: 3221342 - RNA, 19 nt, Artificial Sequence
  Description of Artificial Sequence: Synthetic oligonucleotide
uguauauguaugguaaaca

SEQ ID NO: 3221343 - RNA, 19 nt, Artificial Sequence
  Description of Artificial Sequence: Synthetic oligonucleotide
aagcuaauccuugggauuc

SEQ ID NO: 3221344 - RNA, 19 nt, Artificial Sequence
  Description of Artificial Sequence: Synthetic oligonucleotide
uugacuacaagcagcauuu

SEQ ID NO: 3221345 - RNA, 19 nt, Artificial Sequence
  Description of Artificial Sequence: Synthetic oligonucleotide
aaacagagaagauuugguu

SEQ ID NO: 3221346 - RNA, 19 nt, Artificial Sequence
  Description of Artificial Sequence: Synthetic oligonucleotide
aacauuccuccuccaaggg

SEQ ID NO: 3221347 - RNA, 19 nt, Artificial Sequence
  Description of Artificial Sequence: Synthetic oligonucleotide
aaauauguauauguauggu

SEQ ID NO: 3221348 - RNA, 19 nt, Artificial Sequence
  Description of Artificial Sequence: Synthetic oligonucleotide
uuugacuacaagcagcauu

SEQ ID NO: 3221349 - RNA, 19 nt, Artificial Sequence
  Description of Artificial Sequence: Synthetic oligonucleotide
uucucugacuugaaggagc

SEQ ID NO: 3221350 - RNA, 19 nt, Artificial Sequence
  Description of Artificial Sequence: Synthetic oligonucleotide
ucucaagugguccugccgc

SEQ ID NO: 3221351 - RNA, 19 nt, Artificial Sequence
  Description of Artificial Sequence: Synthetic oligonucleotide
ugauaauguaaucucuaaa

SEQ ID NO: 3221352 - RNA, 19 nt, Artificial Sequence
  Description of Artificial Sequence: Synthetic oligonucleotide
uaugcuugaguccuccucu

SEQ ID NO: 3221353 - RNA, 19 nt, Artificial Sequence
  Description of Artificial Sequence: Synthetic oligonucleotide
cauagucuaugcuugaguc

SEQ ID NO: 3221354 - RNA, 19 nt, Artificial Sequence
  Description of Artificial Sequence: Synthetic oligonucleotide
ugguaaacauuccuccucc

SEQ ID NO: 3221355 - RNA, 19 nt, Artificial Sequence
  Description of Artificial Sequence: Synthetic oligonucleotide
uugguuugcguuuugacua

SEQ ID NO: 3221356 - RNA, 19 nt, Artificial Sequence
  Description of Artificial Sequence: Synthetic oligonucleotide
uuucucuauggucuacuag

SEQ ID NO: 3221357 - RNA, 19 nt, Artificial Sequence
  Description of Artificial Sequence: Synthetic oligonucleotide
augguaaacauuccuccuc

SEQ ID NO: 3221358 - RNA, 19 nt, Artificial Sequence
  Description of Artificial Sequence: Synthetic oligonucleotide
uguggucacauaaucuuca

SEQ ID NO: 3221359 - RNA, 19 nt, Artificial Sequence
  Description of Artificial Sequence: Synthetic oligonucleotide
aucuuguggucacauaauc

SEQ ID NO: 3221360 - RNA, 19 nt, Artificial Sequence
  Description of Artificial Sequence: Synthetic oligonucleotide
uccaguuggauauuucucu

SEQ ID NO: 3221361 - RNA, 19 nt, Artificial Sequence
  Description of Artificial Sequence: Synthetic oligonucleotide
auguauauguaugguaaac

SEQ ID NO: 3221362 - RNA, 19 nt, Artificial Sequence
  Description of Artificial Sequence: Synthetic oligonucleotide
acacuguucauugagacca

SEQ ID NO: 3221363 - RNA, 19 nt, Artificial Sequence
  Description of Artificial Sequence: Synthetic oligonucleotide
ucuuguggucacauaaucu

SEQ ID NO: 3221364 - RNA, 19 nt, Artificial Sequence
  Description of Artificial Sequence: Synthetic oligonucleotide
uuugcguuuugacuacaag

SEQ ID NO: 3221365 - RNA, 19 nt, Artificial Sequence
  Description of Artificial Sequence: Synthetic oligonucleotide
gaaugcugaggucaccccg

SEQ ID NO: 3221366 - RNA, 19 nt, Artificial Sequence
  Description of Artificial Sequence: Synthetic oligonucleotide
auggucuacuagcacacac

SEQ ID NO: 3221367 - RNA, 19 nt, Artificial Sequence
  Description of Artificial Sequence: Synthetic oligonucleotide
ucuccuuugguaugauagg

SEQ ID NO: 3221368 - RNA, 19 nt, Artificial Sequence
  Description of Artificial Sequence: Synthetic oligonucleotide
guaaucucuaaacauuuuc

SEQ ID NO: 3221369 - RNA, 19 nt, Artificial Sequence
  Description of Artificial Sequence: Synthetic oligonucleotide
uggauauuucucucaagug

SEQ ID NO: 3221370 - RNA, 19 nt, Artificial Sequence
  Description of Artificial Sequence: Synthetic oligonucleotide
uggaaaauauguauaugua

SEQ ID NO: 3221371 - RNA, 19 nt, Artificial Sequence
  Description of Artificial Sequence: Synthetic oligonucleotide
gacagugucuuccaccacc

SEQ ID NO: 3221372 - RNA, 19 nt, Artificial Sequence
  Description of Artificial Sequence: Synthetic oligonucleotide
uguucauugagaccaggaa

SEQ ID NO: 3221373 - RNA, 19 nt, Artificial Sequence
  Description of Artificial Sequence: Synthetic oligonucleotide
uauguaugguaaacauucc

SEQ ID NO: 3221374 - RNA, 19 nt, Artificial Sequence
  Description of Artificial Sequence: Synthetic oligonucleotide
uccuugggauuccaguugg

SEQ ID NO: 3221375 - RNA, 19 nt, Artificial Sequence
  Description of Artificial Sequence: Synthetic oligonucleotide
agggacagugucuuccacc

SEQ ID NO: 3221376 - RNA, 19 nt, Artificial Sequence
  Description of Artificial Sequence: Synthetic oligonucleotide
uacuagcacacacuguuca

SEQ ID NO: 3221377 - RNA, 19 nt, Artificial Sequence
  Description of Artificial Sequence: Synthetic oligonucleotide
uauauguaugguaaacauu

SEQ ID NO: 3221378 - RNA, 19 nt, Artificial Sequence
  Description of Artificial Sequence: Synthetic oligonucleotide
uauuccuuucucuaugguc

SEQ ID NO: 3221379 - RNA, 19 nt, Artificial Sequence
  Description of Artificial Sequence: Synthetic oligonucleotide
agggucacaaucuuguggu

SEQ ID NO: 3221380 - RNA, 19 nt, Artificial Sequence
  Description of Artificial Sequence: Synthetic oligonucleotide
auuccaguuggauauuucu

SEQ ID NO: 3221381 - RNA, 19 nt, Artificial Sequence
  Description of Artificial Sequence: Synthetic oligonucleotide
aaaguguccguauuccuuu

SEQ ID NO: 3221382 - RNA, 19 nt, Artificial Sequence
  Description of Artificial Sequence: Synthetic oligonucleotide
uaaacauuuuccccaccca

SEQ ID NO: 3221383 - RNA, 19 nt, Artificial Sequence
  Description of Artificial Sequence: Synthetic oligonucleotide
gauagggacagugucuucc

SEQ ID NO: 3221384 - RNA, 19 nt, Artificial Sequence
  Description of Artificial Sequence: Synthetic oligonucleotide
acauuuuccccacccagag

SEQ ID NO: 3221385 - RNA, 19 nt, Artificial Sequence
  Description of Artificial Sequence: Synthetic oligonucleotide
auauguauauguaugguaa

SEQ ID NO: 3221386 - RNA, 19 nt, Artificial Sequence
  Description of Artificial Sequence: Synthetic oligonucleotide
acaagcagcauuuguuuug

SEQ ID NO: 3221387 - RNA, 19 nt, Artificial Sequence
  Description of Artificial Sequence: Synthetic oligonucleotide
ugaagcuaauccuugggau

SEQ ID NO: 3221388 - RNA, 19 nt, Artificial Sequence
  Description of Artificial Sequence: Synthetic oligonucleotide
uucuucugaaacagagaag

SEQ ID NO: 3221389 - RNA, 19 nt, Artificial Sequence
  Description of Artificial Sequence: Synthetic oligonucleotide
aauccuugggauuccaguu

SEQ ID NO: 3221390 - RNA, 19 nt, Artificial Sequence
  Description of Artificial Sequence: Synthetic oligonucleotide
uauggaaaauauguauaug

SEQ ID NO: 3221391 - RNA, 19 nt, Artificial Sequence
  Description of Artificial Sequence: Synthetic oligonucleotide
aauuugauaacuuaaaaca

SEQ ID NO: 3221392 - RNA, 19 nt, Artificial Sequence
  Description of Artificial Sequence: Synthetic oligonucleotide
aaacuugacaguuaguuac

SEQ ID NO: 3221393 - RNA, 19 nt, Artificial Sequence
  Description of Artificial Sequence: Synthetic oligonucleotide
gaugcuauggauaagauag

SEQ ID NO: 3221394 - RNA, 19 nt, Artificial Sequence
  Description of Artificial Sequence: Synthetic oligonucleotide
ugugacauuacuaacauca

SEQ ID NO: 3221395 - RNA, 19 nt, Artificial Sequence
  Description of Artificial Sequence: Synthetic oligonucleotide
aauuuauuaaaauuuaaaa

SEQ ID NO: 3221396 - RNA, 19 nt, Artificial Sequence
  Description of Artificial Sequence: Synthetic oligonucleotide
  modified_base (10)..(10): a, c, u, g, unknown or other
uauuaagaancuuugauuc

SEQ ID NO: 3221397 - RNA, 19 nt, Artificial Sequence
  Description of Artificial Sequence: Synthetic oligonucleotide
uugauaacuuaaaacaucg

SEQ ID NO: 3221398 - RNA, 19 nt, Artificial Sequence
  Description of Artificial Sequence: Synthetic oligonucleotide
ucauaaguaaucaacauac

SEQ ID NO: 3221399 - RNA, 19 nt, Artificial Sequence
  Description of Artificial Sequence: Synthetic oligonucleotide
aaaauugauuuucuccugc

SEQ ID NO: 3221400 - RNA, 19 nt, Artificial Sequence
  Description of Artificial Sequence: Synthetic oligonucleotide
aaaauaauuuauuaaaauu

SEQ ID NO: 3221401 - RNA, 19 nt, Artificial Sequence
  Description of Artificial Sequence: Synthetic oligonucleotide
auuaaaauaauuuauuaaa

SEQ ID NO: 3221402 - RNA, 19 nt, Artificial Sequence
  Description of Artificial Sequence: Synthetic oligonucleotide
gauaacuuaaaacaucggc

SEQ ID NO: 3221403 - RNA, 19 nt, Artificial Sequence
  Description of Artificial Sequence: Synthetic oligonucleotide
aaaaugugacauuacuaac

SEQ ID NO: 3221404 - RNA, 19 nt, Artificial Sequence
  Description of Artificial Sequence: Synthetic oligonucleotide
uuaguuacaaauuuuggcu

SEQ ID NO: 3221405 - RNA, 19 nt, Artificial Sequence
  Description of Artificial Sequence: Synthetic oligonucleotide
caaauuuuggcuuugcuag

SEQ ID NO: 3221406 - RNA, 19 nt, Artificial Sequence
  Description of Artificial Sequence: Synthetic oligonucleotide
aaguaaucaacauacaaau

SEQ ID NO: 3221407 - RNA, 19 nt, Artificial Sequence
  Description of Artificial Sequence: Synthetic oligonucleotide
ucuguuaauagcaauugcc

SEQ ID NO: 3221408 - RNA, 19 nt, Artificial Sequence
  Description of Artificial Sequence: Synthetic oligonucleotide
gugacagaagacuagaugg

SEQ ID NO: 3221409 - RNA, 19 nt, Artificial Sequence
  Description of Artificial Sequence: Synthetic oligonucleotide
aagacuagauggaugaugc

SEQ ID NO: 3221410 - RNA, 19 nt, Artificial Sequence
  Description of Artificial Sequence: Synthetic oligonucleotide
uuuucauaaguaaucaaca

SEQ ID NO: 3221411 - RNA, 19 nt, Artificial Sequence
  Description of Artificial Sequence: Synthetic oligonucleotide
aaaacaucggcagugauug

SEQ ID NO: 3221412 - RNA, 19 nt, Artificial Sequence
  Description of Artificial Sequence: Synthetic oligonucleotide
uuaaaauaauuuauuaaaa

SEQ ID NO: 3221413 - RNA, 19 nt, Artificial Sequence
  Description of Artificial Sequence: Synthetic oligonucleotide
  modified_base (9)..(9): a, c, u, g, unknown or other
auuaagaancuuugauucc

SEQ ID NO: 3221414 - RNA, 19 nt, Artificial Sequence
  Description of Artificial Sequence: Synthetic oligonucleotide
aaauaauuuauuaaaauuu

SEQ ID NO: 3221415 - RNA, 19 nt, Artificial Sequence
  Description of Artificial Sequence: Synthetic oligonucleotide
gaauuugauaacuuaaaac

SEQ ID NO: 3221416 - RNA, 19 nt, Artificial Sequence
  Description of Artificial Sequence: Synthetic oligonucleotide
agagcuuuucucuggaucc

SEQ ID NO: 3221417 - RNA, 19 nt, Artificial Sequence
  Description of Artificial Sequence: Synthetic oligonucleotide
aagauagauguacagaaga

SEQ ID NO: 3221418 - RNA, 19 nt, Artificial Sequence
  Description of Artificial Sequence: Synthetic oligonucleotide
guaaucaacauacaaauuc

SEQ ID NO: 3221419 - RNA, 19 nt, Artificial Sequence
  Description of Artificial Sequence: Synthetic oligonucleotide
uaacuuaaaacaucggcag

SEQ ID NO: 3221420 - RNA, 19 nt, Artificial Sequence
  Description of Artificial Sequence: Synthetic oligonucleotide
uaauuuauuaaaauuuaaa

SEQ ID NO: 3221421 - RNA, 19 nt, Artificial Sequence
  Description of Artificial Sequence: Synthetic oligonucleotide
uaaguaaucaacauacaaa

SEQ ID NO: 3221422 - RNA, 19 nt, Artificial Sequence
  Description of Artificial Sequence: Synthetic oligonucleotide
auucucuugaauuugauaa

SEQ ID NO: 3221423 - RNA, 19 nt, Artificial Sequence
  Description of Artificial Sequence: Synthetic oligonucleotide
uaaaauaauuuauuaaaau

SEQ ID NO: 3221424 - RNA, 19 nt, Artificial Sequence
  Description of Artificial Sequence: Synthetic oligonucleotide
agaagaccaaacuugacag

SEQ ID NO: 3221425 - RNA, 19 nt, Artificial Sequence
  Description of Artificial Sequence: Synthetic oligonucleotide
guuaguuacaaauuuuggc

SEQ ID NO: 3221426 - RNA, 19 nt, Artificial Sequence
  Description of Artificial Sequence: Synthetic oligonucleotide
uuugcugaagacuaggaga

SEQ ID NO: 3221427 - RNA, 19 nt, Artificial Sequence
  Description of Artificial Sequence: Synthetic oligonucleotide
aaacagaccauuccgauaa

SEQ ID NO: 3221428 - RNA, 19 nt, Artificial Sequence
  Description of Artificial Sequence: Synthetic oligonucleotide
  modified_base (14)..(14): a, c, u, g, unknown or other
ugguuauuaagaancuuug

SEQ ID NO: 3221429 - RNA, 19 nt, Artificial Sequence
  Description of Artificial Sequence: Synthetic oligonucleotide
aaauuuuggcuuugcuagc

SEQ ID NO: 3221430 - RNA, 19 nt, Artificial Sequence
  Description of Artificial Sequence: Synthetic oligonucleotide
auggauaagauagauguac

SEQ ID NO: 3221431 - RNA, 19 nt, Artificial Sequence
  Description of Artificial Sequence: Synthetic oligonucleotide
auaagauagauguacagaa

SEQ ID NO: 3221432 - RNA, 19 nt, Artificial Sequence
  Description of Artificial Sequence: Synthetic oligonucleotide
uaaucaacauacaaauucu

SEQ ID NO: 3221433 - RNA, 19 nt, Artificial Sequence
  Description of Artificial Sequence: Synthetic oligonucleotide
ugacauuacuaacaucacg

SEQ ID NO: 3221434 - RNA, 19 nt, Artificial Sequence
  Description of Artificial Sequence: Synthetic oligonucleotide
uuugauaacuuaaaacauc

SEQ ID NO: 3221435 - RNA, 19 nt, Artificial Sequence
  Description of Artificial Sequence: Synthetic oligonucleotide
aauagcaauugccacaaaa

SEQ ID NO: 3221436 - RNA, 19 nt, Artificial Sequence
  Description of Artificial Sequence: Synthetic oligonucleotide
uugacaguuaguuacaaau

SEQ ID NO: 3221437 - RNA, 19 nt, Artificial Sequence
  Description of Artificial Sequence: Synthetic oligonucleotide
ugauuugcaaagugguucg

SEQ ID NO: 3221438 - RNA, 19 nt, Artificial Sequence
  Description of Artificial Sequence: Synthetic oligonucleotide
uuugauuccucucuguuaa

SEQ ID NO: 3221439 - RNA, 19 nt, Artificial Sequence
  Description of Artificial Sequence: Synthetic oligonucleotide
uuuucucuggaucccauag

SEQ ID NO: 3221440 - RNA, 19 nt, Artificial Sequence
  Description of Artificial Sequence: Synthetic oligonucleotide
aaugugacauuacuaacau

SEQ ID NO: 3221441 - RNA, 19 nt, Artificial Sequence
  Description of Artificial Sequence: Synthetic oligonucleotide
  modified_base (11)..(11): a, c, u, g, unknown or other
uuauuaagaancuuugauu

SEQ ID NO: 3221442 - RNA, 19 nt, Artificial Sequence
  Description of Artificial Sequence: Synthetic oligonucleotide
aauaauuuauuaaaauuua

SEQ ID NO: 3221443 - RNA, 19 nt, Artificial Sequence
  Description of Artificial Sequence: Synthetic oligonucleotide
ugaauuugauaacuuaaaa

SEQ ID NO: 3221444 - RNA, 19 nt, Artificial Sequence
  Description of Artificial Sequence: Synthetic oligonucleotide
auuacuaacaucacgagau

SEQ ID NO: 3221445 - RNA, 19 nt, Artificial Sequence
  Description of Artificial Sequence: Synthetic oligonucleotide
auaaguaaucaacauacaa

SEQ ID NO: 3221446 - RNA, 19 nt, Artificial Sequence
  Description of Artificial Sequence: Synthetic oligonucleotide
aacauacaaauucucuuga

SEQ ID NO: 3221447 - RNA, 19 nt, Artificial Sequence
  Description of Artificial Sequence: Synthetic oligonucleotide
aucacgagaugacagacag

SEQ ID NO: 3221448 - RNA, 19 nt, Artificial Sequence
  Description of Artificial Sequence: Synthetic oligonucleotide
uaacaucacgagaugacag

SEQ ID NO: 3221449 - RNA, 19 nt, Artificial Sequence
  Description of Artificial Sequence: Synthetic oligonucleotide
uaagauagauguacagaag

SEQ ID NO: 3221450 - RNA, 19 nt, Artificial Sequence
  Description of Artificial Sequence: Synthetic oligonucleotide
uguacagaagaccaaacuu

SEQ ID NO: 3221451 - RNA, 19 nt, Artificial Sequence
  Description of Artificial Sequence: Synthetic oligonucleotide
gaucccauaguuccugucg

SEQ ID NO: 3221452 - RNA, 19 nt, Artificial Sequence
  Description of Artificial Sequence: Synthetic oligonucleotide
ugauuggagaguuugcuga

SEQ ID NO: 3221453 - RNA, 19 nt, Artificial Sequence
  Description of Artificial Sequence: Synthetic oligonucleotide
auuccucucuguuaauagc

SEQ ID NO: 3221454 - RNA, 19 nt, Artificial Sequence
  Description of Artificial Sequence: Synthetic oligonucleotide
aaaugugacauuacuaaca

SEQ ID NO: 3221455 - RNA, 19 nt, Artificial Sequence
  Description of Artificial Sequence: Synthetic oligonucleotide
cuucugauuugcaaagugg

SEQ ID NO: 3221456 - RNA, 19 nt, Artificial Sequence
  Description of Artificial Sequence: Synthetic oligonucleotide
cuauggauaagauagaugu

SEQ ID NO: 3221457 - RNA, 19 nt, Artificial Sequence
  Description of Artificial Sequence: Synthetic oligonucleotide
uuugcuagcaguugaaaau

SEQ ID NO: 3221458 - RNA, 19 nt, Artificial Sequence
  Description of Artificial Sequence: Synthetic oligonucleotide
gauagauguacagaagacc

SEQ ID NO: 3221459 - RNA, 19 nt, Artificial Sequence
  Description of Artificial Sequence: Synthetic oligonucleotide
gacauuacuaacaucacga

SEQ ID NO: 3221460 - RNA, 19 nt, Artificial Sequence
  Description of Artificial Sequence: Synthetic oligonucleotide
aguugaaaauuuuaaacuu

SEQ ID NO: 3221461 - RNA, 19 nt, Artificial Sequence
  Description of Artificial Sequence: Synthetic oligonucleotide
uucugauuugcaaaguggu

SEQ ID NO: 3221462 - RNA, 19 nt, Artificial Sequence
  Description of Artificial Sequence: Synthetic oligonucleotide
auaacuuaaaacaucggca

SEQ ID NO: 3221463 - RNA, 19 nt, Artificial Sequence
  Description of Artificial Sequence: Synthetic oligonucleotide
uugaauuugauaacuuaaa

SEQ ID NO: 3221464 - RNA, 19 nt, Artificial Sequence
  Description of Artificial Sequence: Synthetic oligonucleotide
ugauaacuuaaaacaucgg

SEQ ID NO: 3221465 - RNA, 19 nt, Artificial Sequence
  Description of Artificial Sequence: Synthetic oligonucleotide
uucauaaguaaucaacaua

SEQ ID NO: 3221466 - RNA, 19 nt, Artificial Sequence
  Description of Artificial Sequence: Synthetic oligonucleotide
  modified_base (5)..(5): a, c, u, g, unknown or other
agaancuuugauuccucuc

SEQ ID NO: 3221467 - RNA, 19 nt, Artificial Sequence
  Description of Artificial Sequence: Synthetic oligonucleotide
auacaaauucucuugaauu

SEQ ID NO: 3221468 - RNA, 19 nt, Artificial Sequence
  Description of Artificial Sequence: Synthetic oligonucleotide
gauuccucucuguuaauag

SEQ ID NO: 3221469 - RNA, 19 nt, Artificial Sequence
  Description of Artificial Sequence: Synthetic oligonucleotide
cucuggaucccauaguucc

SEQ ID NO: 3221470 - RNA, 19 nt, Artificial Sequence
  Description of Artificial Sequence: Synthetic oligonucleotide
uguuaauagcaauugccac

SEQ ID NO: 3221471 - RNA, 19 nt, Artificial Sequence
  Description of Artificial Sequence: Synthetic oligonucleotide
  modified_base (15)..(15): a, c, u, g, unknown or other
uugguuauuaagaancuuu

SEQ ID NO: 3221472 - RNA, 19 nt, Artificial Sequence
  Description of Artificial Sequence: Synthetic oligonucleotide
uugaaaauuuuaaacuuuu

SEQ ID NO: 3221473 - RNA, 19 nt, Artificial Sequence
  Description of Artificial Sequence: Synthetic oligonucleotide
aaauugauuuucuccugcu

SEQ ID NO: 3221474 - RNA, 19 nt, Artificial Sequence
  Description of Artificial Sequence: Synthetic oligonucleotide
caacauacaaauucucuug

SEQ ID NO: 3221475 - RNA, 19 nt, Artificial Sequence
  Description of Artificial Sequence: Synthetic oligonucleotide
cauuaaaauaauuuauuaa

SEQ ID NO: 3221476 - RNA, 19 nt, Artificial Sequence
  Description of Artificial Sequence: Synthetic oligonucleotide
uacagaagaccaaacuuga

SEQ ID NO: 3221477 - RNA, 19 nt, Artificial Sequence
  Description of Artificial Sequence: Synthetic oligonucleotide
  modified_base (8)..(8): a, c, u, g, unknown or other
uuaagaancuuugauuccu

SEQ ID NO: 3221478 - RNA, 19 nt, Artificial Sequence
  Description of Artificial Sequence: Synthetic oligonucleotide
aaucaacauacaaauucuc

SEQ ID NO: 3221479 - RNA, 19 nt, Artificial Sequence
  Description of Artificial Sequence: Synthetic oligonucleotide
agaccauuccgauaacagg

SEQ ID NO: 3221480 - RNA, 19 nt, Artificial Sequence
  Description of Artificial Sequence: Synthetic oligonucleotide
  modified_base (3)..(3): a, c, u, g, unknown or other
aancuuugauuccucucug

SEQ ID NO: 3221481 - RNA, 19 nt, Artificial Sequence
  Description of Artificial Sequence: Synthetic oligonucleotide
caguuaguuacaaauuuug

SEQ ID NO: 3221482 - RNA, 19 nt, Artificial Sequence
  Description of Artificial Sequence: Synthetic oligonucleotide
ucaacauacaaauucucuu

SEQ ID NO: 3221483 - RNA, 19 nt, Artificial Sequence
  Description of Artificial Sequence: Synthetic oligonucleotide
guuaauagcaauugccaca

SEQ ID NO: 3221484 - RNA, 19 nt, Artificial Sequence
  Description of Artificial Sequence: Synthetic oligonucleotide
agugguucgugucugaggu

SEQ ID NO: 3221485 - RNA, 19 nt, Artificial Sequence
  Description of Artificial Sequence: Synthetic oligonucleotide
uuccucucuguuaauagca

SEQ ID NO: 3221486 - RNA, 19 nt, Artificial Sequence
  Description of Artificial Sequence: Synthetic oligonucleotide
agucaugucuccuuggaga

SEQ ID NO: 3221487 - RNA, 19 nt, Artificial Sequence
  Description of Artificial Sequence: Synthetic oligonucleotide
auagauguacagaagacca

SEQ ID NO: 3221488 - RNA, 19 nt, Artificial Sequence
  Description of Artificial Sequence: Synthetic oligonucleotide
uuugcaaagugguucgugu

SEQ ID NO: 3221489 - RNA, 19 nt, Artificial Sequence
  Description of Artificial Sequence: Synthetic oligonucleotide
uuucauaaguaaucaacau

SEQ ID NO: 3221490 - RNA, 19 nt, Artificial Sequence
  Description of Artificial Sequence: Synthetic oligonucleotide
acagacaggugacagaaga

SEQ ID NO: 3221491 - RNA, 19 nt, Artificial Sequence
  Description of Artificial Sequence: Synthetic oligonucleotide
ugucuuaagauguagagag

SEQ ID NO: 3221492 - RNA, 19 nt, Artificial Sequence
  Description of Artificial Sequence: Synthetic oligonucleotide
aacaccuacgucuaggagg

SEQ ID NO: 3221493 - RNA, 19 nt, Artificial Sequence
  Description of Artificial Sequence: Synthetic oligonucleotide
aaagaaagcagagucagag

SEQ ID NO: 3221494 - RNA, 19 nt, Artificial Sequence
  Description of Artificial Sequence: Synthetic oligonucleotide
uuaaaagccaaacaccuac

SEQ ID NO: 3221495 - RNA, 19 nt, Artificial Sequence
  Description of Artificial Sequence: Synthetic oligonucleotide
gaagugacaaguuagugac

SEQ ID NO: 3221496 - RNA, 19 nt, Artificial Sequence
  Description of Artificial Sequence: Synthetic oligonucleotide
aagccaaacaccuacgucu

SEQ ID NO: 3221497 - RNA, 19 nt, Artificial Sequence
  Description of Artificial Sequence: Synthetic oligonucleotide
aaucccaugugcuaauguc

SEQ ID NO: 3221498 - RNA, 19 nt, Artificial Sequence
  Description of Artificial Sequence: Synthetic oligonucleotide
ucacaaagaaagcagaguc

SEQ ID NO: 3221499 - RNA, 19 nt, Artificial Sequence
  Description of Artificial Sequence: Synthetic oligonucleotide
aagaaagcagagucagagc

SEQ ID NO: 3221500 - RNA, 19 nt, Artificial Sequence
  Description of Artificial Sequence: Synthetic oligonucleotide
aaagccaaacaccuacguc

SEQ ID NO: 3221501 - RNA, 19 nt, Artificial Sequence
  Description of Artificial Sequence: Synthetic oligonucleotide
agaaagcagagucagagcu

SEQ ID NO: 3221502 - RNA, 19 nt, Artificial Sequence
  Description of Artificial Sequence: Synthetic oligonucleotide
gaugggcucacaaagaaag

SEQ ID NO: 3221503 - RNA, 19 nt, Artificial Sequence
  Description of Artificial Sequence: Synthetic oligonucleotide
uguggaccuauuccgaugg

SEQ ID NO: 3221504 - RNA, 19 nt, Artificial Sequence
  Description of Artificial Sequence: Synthetic oligonucleotide
agagucagagcugaguucc

SEQ ID NO: 3221505 - RNA, 19 nt, Artificial Sequence
  Description of Artificial Sequence: Synthetic oligonucleotide
cugaguuccccuuaaaagc

SEQ ID NO: 3221506 - RNA, 19 nt, Artificial Sequence
  Description of Artificial Sequence: Synthetic oligonucleotide
uauugcaucuucuggagug

SEQ ID NO: 3221507 - RNA, 19 nt, Artificial Sequence
  Description of Artificial Sequence: Synthetic oligonucleotide
acugucuuaagauguagag

SEQ ID NO: 3221508 - RNA, 19 nt, Artificial Sequence
  Description of Artificial Sequence: Synthetic oligonucleotide
uuaagauguagagagguca

SEQ ID NO: 3221509 - RNA, 19 nt, Artificial Sequence
  Description of Artificial Sequence: Synthetic oligonucleotide
uggaguggcacuguaaugg

SEQ ID NO: 3221510 - RNA, 19 nt, Artificial Sequence
  Description of Artificial Sequence: Synthetic oligonucleotide
uaggguuggcucaugauag

SEQ ID NO: 3221511 - RNA, 19 nt, Artificial Sequence
  Description of Artificial Sequence: Synthetic oligonucleotide
ugaguuccccuuaaaagcc

SEQ ID NO: 3221512 - RNA, 19 nt, Artificial Sequence
  Description of Artificial Sequence: Synthetic oligonucleotide
ugugcuaaugucugggaag

SEQ ID NO: 3221513 - RNA, 19 nt, Artificial Sequence
  Description of Artificial Sequence: Synthetic oligonucleotide
agucuguggaccuauuccg

SEQ ID NO: 3221514 - RNA, 19 nt, Artificial Sequence
  Description of Artificial Sequence: Synthetic oligonucleotide
uaaaagccaaacaccuacg

SEQ ID NO: 3221515 - RNA, 19 nt, Artificial Sequence
  Description of Artificial Sequence: Synthetic oligonucleotide
uuccuauugcaucuucugg

SEQ ID NO: 3221516 - RNA, 19 nt, Artificial Sequence
  Description of Artificial Sequence: Synthetic oligonucleotide
uuagugacugucuuaagau

SEQ ID NO: 3221517 - RNA, 19 nt, Artificial Sequence
  Description of Artificial Sequence: Synthetic oligonucleotide
acaaagaaagcagagucag

SEQ ID NO: 3221518 - RNA, 19 nt, Artificial Sequence
  Description of Artificial Sequence: Synthetic oligonucleotide
ucuuaagauguagagaggu

SEQ ID NO: 3221519 - RNA, 19 nt, Artificial Sequence
  Description of Artificial Sequence: Synthetic oligonucleotide
uagucuguggaccuauucc

SEQ ID NO: 3221520 - RNA, 19 nt, Artificial Sequence
  Description of Artificial Sequence: Synthetic oligonucleotide
uuccgaugggcucacaaag

SEQ ID NO: 3221521 - RNA, 19 nt, Artificial Sequence
  Description of Artificial Sequence: Synthetic oligonucleotide
gaguucaaaucccaugugc

SEQ ID NO: 3221522 - RNA, 19 nt, Artificial Sequence
  Description of Artificial Sequence: Synthetic oligonucleotide
aaaagccaaacaccuacgu

SEQ ID NO: 3221523 - RNA, 19 nt, Artificial Sequence
  Description of Artificial Sequence: Synthetic oligonucleotide
cugugcagaguucaaaucc

SEQ ID NO: 3221524 - RNA, 19 nt, Artificial Sequence
  Description of Artificial Sequence: Synthetic oligonucleotide
ugugcagaguucaaauccc

SEQ ID NO: 3221525 - RNA, 19 nt, Artificial Sequence
  Description of Artificial Sequence: Synthetic oligonucleotide
uccuauugcaucuucugga

SEQ ID NO: 3221526 - RNA, 19 nt, Artificial Sequence
  Description of Artificial Sequence: Synthetic oligonucleotide
aacucucagagacugugca

SEQ ID NO: 3221527 - RNA, 19 nt, Artificial Sequence
  Description of Artificial Sequence: Synthetic oligonucleotide
agauguagagaggucacac

SEQ ID NO: 3221528 - RNA, 19 nt, Artificial Sequence
  Description of Artificial Sequence: Synthetic oligonucleotide
ucagagacugugcagaguu

SEQ ID NO: 3221529 - RNA, 19 nt, Artificial Sequence
  Description of Artificial Sequence: Synthetic oligonucleotide
uuaggguuggcucaugaua

SEQ ID NO: 3221530 - RNA, 19 nt, Artificial Sequence
  Description of Artificial Sequence: Synthetic oligonucleotide
cugggaagugacaaguuag

SEQ ID NO: 3221531 - RNA, 19 nt, Artificial Sequence
  Description of Artificial Sequence: Synthetic oligonucleotide
agugacaaguuagugacug

SEQ ID NO: 3221532 - RNA, 19 nt, Artificial Sequence
  Description of Artificial Sequence: Synthetic oligonucleotide
aaagcagagucagagcuga

SEQ ID NO: 3221533 - RNA, 19 nt, Artificial Sequence
  Description of Artificial Sequence: Synthetic oligonucleotide
uaagauguagagaggucac

SEQ ID NO: 3221534 - RNA, 19 nt, Artificial Sequence
  Description of Artificial Sequence: Synthetic oligonucleotide
acugugcagaguucaaauc

SEQ ID NO: 3221535 - RNA, 19 nt, Artificial Sequence
  Description of Artificial Sequence: Synthetic oligonucleotide
aaugucugggaagugacaa

SEQ ID NO: 3221536 - RNA, 19 nt, Artificial Sequence
  Description of Artificial Sequence: Synthetic oligonucleotide
ucaugauagucuguggacc

SEQ ID NO: 3221537 - RNA, 19 nt, Artificial Sequence
  Description of Artificial Sequence: Synthetic oligonucleotide
guuagugacugucuuaaga

SEQ ID NO: 3221538 - RNA, 19 nt, Artificial Sequence
  Description of Artificial Sequence: Synthetic oligonucleotide
auagucuguggaccuauuc

SEQ ID NO: 3221539 - RNA, 19 nt, Artificial Sequence
  Description of Artificial Sequence: Synthetic oligonucleotide
aaacaccuacgucuaggag

SEQ ID NO: 3221540 - RNA, 19 nt, Artificial Sequence
  Description of Artificial Sequence: Synthetic oligonucleotide
aaaucccaugugcuaaugu

SEQ ID NO: 3221541 - RNA, 19 nt, Artificial Sequence
  Description of Artificial Sequence: Synthetic oligonucleotide
cuaaugucugggaagugac

SEQ ID NO: 3221542 - RNA, 19 nt, Artificial Sequence
  Description of Artificial Sequence: Synthetic oligonucleotide
guagagaggucacacuucc

SEQ ID NO: 3221543 - RNA, 19 nt, Artificial Sequence
  Description of Artificial Sequence: Synthetic oligonucleotide
aaguuagugacugucuuaa

SEQ ID NO: 3221544 - RNA, 19 nt, Artificial Sequence
  Description of Artificial Sequence: Synthetic oligonucleotide
ucuggaguggcacuguaau

SEQ ID NO: 3221545 - RNA, 19 nt, Artificial Sequence
  Description of Artificial Sequence: Synthetic oligonucleotide
uuuuaggguuggcucauga

SEQ ID NO: 3221546 - RNA, 19 nt, Artificial Sequence
  Description of Artificial Sequence: Synthetic oligonucleotide
gcugaguuccccuuaaaag

SEQ ID NO: 3221547 - RNA, 19 nt, Artificial Sequence
  Description of Artificial Sequence: Synthetic oligonucleotide
ucuaggaggaggcucuccu

SEQ ID NO: 3221548 - RNA, 19 nt, Artificial Sequence
  Description of Artificial Sequence: Synthetic oligonucleotide
cucaugauagucuguggac

SEQ ID NO: 3221549 - RNA, 19 nt, Artificial Sequence
  Description of Artificial Sequence: Synthetic oligonucleotide
uccccuuaaaagccaaaca

SEQ ID NO: 3221550 - RNA, 19 nt, Artificial Sequence
  Description of Artificial Sequence: Synthetic oligonucleotide
agugacugucuuaagaugu

SEQ ID NO: 3221551 - RNA, 19 nt, Artificial Sequence
  Description of Artificial Sequence: Synthetic oligonucleotide
ucccaugugcuaaugucug

SEQ ID NO: 3221552 - RNA, 19 nt, Artificial Sequence
  Description of Artificial Sequence: Synthetic oligonucleotide
cuuccuauugcaucuucug

SEQ ID NO: 3221553 - RNA, 19 nt, Artificial Sequence
  Description of Artificial Sequence: Synthetic oligonucleotide
gaggucacacuuccuauug

SEQ ID NO: 3221554 - RNA, 19 nt, Artificial Sequence
  Description of Artificial Sequence: Synthetic oligonucleotide
uagugacugucuuaagaug

SEQ ID NO: 3221555 - RNA, 19 nt, Artificial Sequence
  Description of Artificial Sequence: Synthetic oligonucleotide
guuggcucaugauagucug

SEQ ID NO: 3221556 - RNA, 19 nt, Artificial Sequence
  Description of Artificial Sequence: Synthetic oligonucleotide
aguggcacuguaauggguc

SEQ ID NO: 3221557 - RNA, 19 nt, Artificial Sequence
  Description of Artificial Sequence: Synthetic oligonucleotide
uucaaaucccaugugcuaa

SEQ ID NO: 3221558 - RNA, 19 nt, Artificial Sequence
  Description of Artificial Sequence: Synthetic oligonucleotide
ucugggaagugacaaguua

SEQ ID NO: 3221559 - RNA, 19 nt, Artificial Sequence
  Description of Artificial Sequence: Synthetic oligonucleotide
uguagagaggucacacuuc

SEQ ID NO: 3221560 - RNA, 19 nt, Artificial Sequence
  Description of Artificial Sequence: Synthetic oligonucleotide
aggucacacuuccuauugc

SEQ ID NO: 3221561 - RNA, 19 nt, Artificial Sequence
  Description of Artificial Sequence: Synthetic oligonucleotide
ugggcucacaaagaaagca

SEQ ID NO: 3221562 - RNA, 19 nt, Artificial Sequence
  Description of Artificial Sequence: Synthetic oligonucleotide
ucacacuuccuauugcauc

SEQ ID NO: 3221563 - RNA, 19 nt, Artificial Sequence
  Description of Artificial Sequence: Synthetic oligonucleotide
auguagagaggucacacuu

SEQ ID NO: 3221564 - RNA, 19 nt, Artificial Sequence
  Description of Artificial Sequence: Synthetic oligonucleotide
cuuaagauguagagagguc

SEQ ID NO: 3221565 - RNA, 19 nt, Artificial Sequence
  Description of Artificial Sequence: Synthetic oligonucleotide
ugggaagugacaaguuagu

SEQ ID NO: 3221566 - RNA, 19 nt, Artificial Sequence
  Description of Artificial Sequence: Synthetic oligonucleotide
uauuccgaugggcucacaa

SEQ ID NO: 3221567 - RNA, 19 nt, Artificial Sequence
  Description of Artificial Sequence: Synthetic oligonucleotide
ugucugggaagugacaagu

SEQ ID NO: 3221568 - RNA, 19 nt, Artificial Sequence
  Description of Artificial Sequence: Synthetic oligonucleotide
aguucaaaucccaugugcu

SEQ ID NO: 3221569 - RNA, 19 nt, Artificial Sequence
  Description of Artificial Sequence: Synthetic oligonucleotide
ggaagugacaaguuaguga

SEQ ID NO: 3221570 - RNA, 19 nt, Artificial Sequence
  Description of Artificial Sequence: Synthetic oligonucleotide
uaggaggaggcucuccuac

SEQ ID NO: 3221571 - RNA, 19 nt, Artificial Sequence
  Description of Artificial Sequence: Synthetic oligonucleotide
agaguucaaaucccaugug

SEQ ID NO: 3221572 - RNA, 19 nt, Artificial Sequence
  Description of Artificial Sequence: Synthetic oligonucleotide
ugacaaguuagugacuguc

SEQ ID NO: 3221573 - RNA, 19 nt, Artificial Sequence
  Description of Artificial Sequence: Synthetic oligonucleotide
agagaggucacacuuccua

SEQ ID NO: 3221574 - RNA, 19 nt, Artificial Sequence
  Description of Artificial Sequence: Synthetic oligonucleotide
aggaggaggcucuccuacc

SEQ ID NO: 3221575 - RNA, 19 nt, Artificial Sequence
  Description of Artificial Sequence: Synthetic oligonucleotide
ucucagagacugugcagag

SEQ ID NO: 3221576 - RNA, 19 nt, Artificial Sequence
  Description of Artificial Sequence: Synthetic oligonucleotide
uaaugucugggaagugaca

SEQ ID NO: 3221577 - RNA, 19 nt, Artificial Sequence
  Description of Artificial Sequence: Synthetic oligonucleotide
acaaguuagugacugucuu

SEQ ID NO: 3221578 - RNA, 19 nt, Artificial Sequence
  Description of Artificial Sequence: Synthetic oligonucleotide
ugacugucuuaagauguag

SEQ ID NO: 3221579 - RNA, 19 nt, Artificial Sequence
  Description of Artificial Sequence: Synthetic oligonucleotide
cccuuaaaagccaaacacc

SEQ ID NO: 3221580 - RNA, 19 nt, Artificial Sequence
  Description of Artificial Sequence: Synthetic oligonucleotide
auugcaucuucuggagugg

SEQ ID NO: 3221581 - RNA, 19 nt, Artificial Sequence
  Description of Artificial Sequence: Synthetic oligonucleotide
cacaaagaaagcagaguca

SEQ ID NO: 3221582 - RNA, 19 nt, Artificial Sequence
  Description of Artificial Sequence: Synthetic oligonucleotide
uccgaugggcucacaaaga

SEQ ID NO: 3221583 - RNA, 19 nt, Artificial Sequence
  Description of Artificial Sequence: Synthetic oligonucleotide
agucagagcugaguucccc

SEQ ID NO: 3221584 - RNA, 19 nt, Artificial Sequence
  Description of Artificial Sequence: Synthetic oligonucleotide
acucucagagacugugcag

SEQ ID NO: 3221585 - RNA, 19 nt, Artificial Sequence
  Description of Artificial Sequence: Synthetic oligonucleotide
uggcucaugauagucugug

SEQ ID NO: 3221586 - RNA, 19 nt, Artificial Sequence
  Description of Artificial Sequence: Synthetic oligonucleotide
gaaagcagagucagagcug

SEQ ID NO: 3221587 - RNA, 19 nt, Artificial Sequence
  Description of Artificial Sequence: Synthetic oligonucleotide
agagacugugcagaguuca

SEQ ID NO: 3221588 - RNA, 19 nt, Artificial Sequence
  Description of Artificial Sequence: Synthetic oligonucleotide
uuuaggguuggcucaugau

SEQ ID NO: 3221589 - RNA, 19 nt, Artificial Sequence
  Description of Artificial Sequence: Synthetic oligonucleotide
uuccccuuaaaagccaaac

SEQ ID NO: 3221590 - RNA, 19 nt, Artificial Sequence
  Description of Artificial Sequence: Synthetic oligonucleotide
accuacgucuaggaggagg

SEQ ID NO: 3221591 - RNA, 19 nt, Artificial Sequence
  Description of Artificial Sequence: Synthetic oligonucleotide
aauauauacugacugagcc

SEQ ID NO: 3221592 - RNA, 19 nt, Artificial Sequence
  Description of Artificial Sequence: Synthetic oligonucleotide
uuagugaucaccaagaacc

SEQ ID NO: 3221593 - RNA, 19 nt, Artificial Sequence
  Description of Artificial Sequence: Synthetic oligonucleotide
aacaguaucuccuauguac

SEQ ID NO: 3221594 - RNA, 19 nt, Artificial Sequence
  Description of Artificial Sequence: Synthetic oligonucleotide
aauacaacaauucguauug

SEQ ID NO: 3221595 - RNA, 19 nt, Artificial Sequence
  Description of Artificial Sequence: Synthetic oligonucleotide
aauaccuaaucuugcagcc

SEQ ID NO: 3221596 - RNA, 19 nt, Artificial Sequence
  Description of Artificial Sequence: Synthetic oligonucleotide
aacuauuucuauuuuaaga

SEQ ID NO: 3221597 - RNA, 19 nt, Artificial Sequence
  Description of Artificial Sequence: Synthetic oligonucleotide
uccaaauauauacugacug

SEQ ID NO: 3221598 - RNA, 19 nt, Artificial Sequence
  Description of Artificial Sequence: Synthetic oligonucleotide
ucuuccucgaccuugagag

SEQ ID NO: 3221599 - RNA, 19 nt, Artificial Sequence
  Description of Artificial Sequence: Synthetic oligonucleotide
uuuaucagcagauuuauaa

SEQ ID NO: 3221600 - RNA, 19 nt, Artificial Sequence
  Description of Artificial Sequence: Synthetic oligonucleotide
uaaauuuguaauauuuuca

SEQ ID NO: 3221601 - RNA, 19 nt, Artificial Sequence
  Description of Artificial Sequence: Synthetic oligonucleotide
aauccagucacuccugugg

SEQ ID NO: 3221602 - RNA, 19 nt, Artificial Sequence
  Description of Artificial Sequence: Synthetic oligonucleotide
uugaauagcaacuugcugu

SEQ ID NO: 3221603 - RNA, 19 nt, Artificial Sequence
  Description of Artificial Sequence: Synthetic oligonucleotide
aaauuuacugaacacccug

SEQ ID NO: 3221604 - RNA, 19 nt, Artificial Sequence
  Description of Artificial Sequence: Synthetic oligonucleotide
uguuugaauagcaacuugc

SEQ ID NO: 3221605 - RNA, 19 nt, Artificial Sequence
  Description of Artificial Sequence: Synthetic oligonucleotide
acgaacgagacucauauuc

SEQ ID NO: 3221606 - RNA, 19 nt, Artificial Sequence
  Description of Artificial Sequence: Synthetic oligonucleotide
aauauauaaauccuuuguu

SEQ ID NO: 3221607 - RNA, 19 nt, Artificial Sequence
  Description of Artificial Sequence: Synthetic oligonucleotide
uuugauaucacagacaauu

SEQ ID NO: 3221608 - RNA, 19 nt, Artificial Sequence
  Description of Artificial Sequence: Synthetic oligonucleotide
aauuucacaccacacauau

SEQ ID NO: 3221609 - RNA, 19 nt, Artificial Sequence
  Description of Artificial Sequence: Synthetic oligonucleotide
ugguaauuugauaucacag

SEQ ID NO: 3221610 - RNA, 19 nt, Artificial Sequence
  Description of Artificial Sequence: Synthetic oligonucleotide
agcugagaaaugcugaagc

SEQ ID NO: 3221611 - RNA, 19 nt, Artificial Sequence
  Description of Artificial Sequence: Synthetic oligonucleotide
uucuugaacaucaugagau

SEQ ID NO: 3221612 - RNA, 19 nt, Artificial Sequence
  Description of Artificial Sequence: Synthetic oligonucleotide
acugugagugcuuuggggc

SEQ ID NO: 3221613 - RNA, 19 nt, Artificial Sequence
  Description of Artificial Sequence: Synthetic oligonucleotide
uaaucuugcagccucaacu

SEQ ID NO: 3221614 - RNA, 19 nt, Artificial Sequence
  Description of Artificial Sequence: Synthetic oligonucleotide
uuuacauuguaauccagca

SEQ ID NO: 3221615 - RNA, 19 nt, Artificial Sequence
  Description of Artificial Sequence: Synthetic oligonucleotide
gagauuagcaucuucuggc

SEQ ID NO: 3221616 - RNA, 19 nt, Artificial Sequence
  Description of Artificial Sequence: Synthetic oligonucleotide
caucaugagauuucgaccc

SEQ ID NO: 3221617 - RNA, 19 nt, Artificial Sequence
  Description of Artificial Sequence: Synthetic oligonucleotide
aacacagauguguaucuuc

SEQ ID NO: 3221618 - RNA, 19 nt, Artificial Sequence
  Description of Artificial Sequence: Synthetic oligonucleotide
aggaacuuuguuaagaacg

SEQ ID NO: 3221619 - RNA, 19 nt, Artificial Sequence
  Description of Artificial Sequence: Synthetic oligonucleotide
uagaaauccaacaguaucu

SEQ ID NO: 3221620 - RNA, 19 nt, Artificial Sequence
  Description of Artificial Sequence: Synthetic oligonucleotide
acagguacaauaccuaauc

SEQ ID NO: 3221621 - RNA, 19 nt, Artificial Sequence
  Description of Artificial Sequence: Synthetic oligonucleotide
ucuucuaaggucuucauua

SEQ ID NO: 3221622 - RNA, 19 nt, Artificial Sequence
  Description of Artificial Sequence: Synthetic oligonucleotide
uucacaacugcauaaaguc

SEQ ID NO: 3221623 - RNA, 19 nt, Artificial Sequence
  Description of Artificial Sequence: Synthetic oligonucleotide
cuuaagaacuucuugaaca

SEQ ID NO: 3221624 - RNA, 19 nt, Artificial Sequence
  Description of Artificial Sequence: Synthetic oligonucleotide
uuuuguacauuuaaugaaa

SEQ ID NO: 3221625 - RNA, 19 nt, Artificial Sequence
  Description of Artificial Sequence: Synthetic oligonucleotide
aacaggaaguuuuaaauuu

SEQ ID NO: 3221626 - RNA, 19 nt, Artificial Sequence
  Description of Artificial Sequence: Synthetic oligonucleotide
uugucuucacuuuggaugg

SEQ ID NO: 3221627 - RNA, 19 nt, Artificial Sequence
  Description of Artificial Sequence: Synthetic oligonucleotide
uuagugauuguuauaauuu

SEQ ID NO: 3221628 - RNA, 19 nt, Artificial Sequence
  Description of Artificial Sequence: Synthetic oligonucleotide
uguacauuuaaugaaauuu

SEQ ID NO: 3221629 - RNA, 19 nt, Artificial Sequence
  Description of Artificial Sequence: Synthetic oligonucleotide
uagaaauucagauuguaau

SEQ ID NO: 3221630 - RNA, 19 nt, Artificial Sequence
  Description of Artificial Sequence: Synthetic oligonucleotide
aagucaacaugcuucuuag

SEQ ID NO: 3221631 - RNA, 19 nt, Artificial Sequence
  Description of Artificial Sequence: Synthetic oligonucleotide
aggacauaaauuuacauuu

SEQ ID NO: 3221632 - RNA, 19 nt, Artificial Sequence
  Description of Artificial Sequence: Synthetic oligonucleotide
uuguuaagaacguaggcac

SEQ ID NO: 3221633 - RNA, 19 nt, Artificial Sequence
  Description of Artificial Sequence: Synthetic oligonucleotide
cauauugcaucuuuauugc

SEQ ID NO: 3221634 - RNA, 19 nt, Artificial Sequence
  Description of Artificial Sequence: Synthetic oligonucleotide
auaaucauccaucaccaug

SEQ ID NO: 3221635 - RNA, 19 nt, Artificial Sequence
  Description of Artificial Sequence: Synthetic oligonucleotide
ucuaaggucuucauuauau

SEQ ID NO: 3221636 - RNA, 19 nt, Artificial Sequence
  Description of Artificial Sequence: Synthetic oligonucleotide
uguacaguaaucauuucau

SEQ ID NO: 3221637 - RNA, 19 nt, Artificial Sequence
  Description of Artificial Sequence: Synthetic oligonucleotide
aaaacacagauguguaucu

SEQ ID NO: 3221638 - RNA, 19 nt, Artificial Sequence
  Description of Artificial Sequence: Synthetic oligonucleotide
aaggacauaaauuuacauu

SEQ ID NO: 3221639 - RNA, 19 nt, Artificial Sequence
  Description of Artificial Sequence: Synthetic oligonucleotide
aacugugagugcuuugggg

SEQ ID NO: 3221640 - RNA, 19 nt, Artificial Sequence
  Description of Artificial Sequence: Synthetic oligonucleotide
uguaaucgauaaaacaaac

SEQ ID NO: 3221641 - RNA, 19 nt, Artificial Sequence
  Description of Artificial Sequence: Synthetic oligonucleotide
uauugaaaucuauacgcug

SEQ ID NO: 3221642 - RNA, 19 nt, Artificial Sequence
  Description of Artificial Sequence: Synthetic oligonucleotide
cuuuacauuguaauccagc

SEQ ID NO: 3221643 - RNA, 19 nt, Artificial Sequence
  Description of Artificial Sequence: Synthetic oligonucleotide
uacggcuucacuaauuuac

SEQ ID NO: 3221644 - RNA, 19 nt, Artificial Sequence
  Description of Artificial Sequence: Synthetic oligonucleotide
uauaaacaguuagaaaucc

SEQ ID NO: 3221645 - RNA, 19 nt, Artificial Sequence
  Description of Artificial Sequence: Synthetic oligonucleotide
auuuuguacauuuaaugaa

SEQ ID NO: 3221646 - RNA, 19 nt, Artificial Sequence
  Description of Artificial Sequence: Synthetic oligonucleotide
ucgaaugucagucuacgga

SEQ ID NO: 3221647 - RNA, 19 nt, Artificial Sequence
  Description of Artificial Sequence: Synthetic oligonucleotide
ucuaucacguuuaaauggu

SEQ ID NO: 3221648 - RNA, 19 nt, Artificial Sequence
  Description of Artificial Sequence: Synthetic oligonucleotide
ucuacggagacuuucuuac

SEQ ID NO: 3221649 - RNA, 19 nt, Artificial Sequence
  Description of Artificial Sequence: Synthetic oligonucleotide
aagacgauguuuaacagga

SEQ ID NO: 3221650 - RNA, 19 nt, Artificial Sequence
  Description of Artificial Sequence: Synthetic oligonucleotide
uacggagacuuucuuacgg

SEQ ID NO: 3221651 - RNA, 19 nt, Artificial Sequence
  Description of Artificial Sequence: Synthetic oligonucleotide
ugaaccauuccauauugca

SEQ ID NO: 3221652 - RNA, 19 nt, Artificial Sequence
  Description of Artificial Sequence: Synthetic oligonucleotide
cauauaugaauuuaaaugu

SEQ ID NO: 3221653 - RNA, 19 nt, Artificial Sequence
  Description of Artificial Sequence: Synthetic oligonucleotide
aauguuuaccucagggaac

SEQ ID NO: 3221654 - RNA, 19 nt, Artificial Sequence
  Description of Artificial Sequence: Synthetic oligonucleotide
caauauuucagcuggugac

SEQ ID NO: 3221655 - RNA, 19 nt, Artificial Sequence
  Description of Artificial Sequence: Synthetic oligonucleotide
ugagauuucgacccugagc

SEQ ID NO: 3221656 - RNA, 19 nt, Artificial Sequence
  Description of Artificial Sequence: Synthetic oligonucleotide
uuagaaauucagauuguaa

SEQ ID NO: 3221657 - RNA, 19 nt, Artificial Sequence
  Description of Artificial Sequence: Synthetic oligonucleotide
ugugagaucuucuaagguc

SEQ ID NO: 3221658 - RNA, 19 nt, Artificial Sequence
  Description of Artificial Sequence: Synthetic oligonucleotide
uuauguuucugagugaacu

SEQ ID NO: 3221659 - RNA, 19 nt, Artificial Sequence
  Description of Artificial Sequence: Synthetic oligonucleotide
uuguaaucgauaaaacaaa

SEQ ID NO: 3221660 - RNA, 19 nt, Artificial Sequence
  Description of Artificial Sequence: Synthetic oligonucleotide
guaaucauuucauuucccc

SEQ ID NO: 3221661 - RNA, 19 nt, Artificial Sequence
  Description of Artificial Sequence: Synthetic oligonucleotide
uuuagugauuguuauaauu

SEQ ID NO: 3221662 - RNA, 19 nt, Artificial Sequence
  Description of Artificial Sequence: Synthetic oligonucleotide
cauuuuguacauuuaauga

SEQ ID NO: 3221663 - RNA, 19 nt, Artificial Sequence
  Description of Artificial Sequence: Synthetic oligonucleotide
ugauaucuguagccgacgg

SEQ ID NO: 3221664 - RNA, 19 nt, Artificial Sequence
  Description of Artificial Sequence: Synthetic oligonucleotide
aaugaauccuccaacugug

SEQ ID NO: 3221665 - RNA, 19 nt, Artificial Sequence
  Description of Artificial Sequence: Synthetic oligonucleotide
aucgauaaaacaaacauua

SEQ ID NO: 3221666 - RNA, 19 nt, Artificial Sequence
  Description of Artificial Sequence: Synthetic oligonucleotide
aaucuuguagaaacuauca

SEQ ID NO: 3221667 - RNA, 19 nt, Artificial Sequence
  Description of Artificial Sequence: Synthetic oligonucleotide
aaauggucaggacucaaaa

SEQ ID NO: 3221668 - RNA, 19 nt, Artificial Sequence
  Description of Artificial Sequence: Synthetic oligonucleotide
uuugacucgucauuccaag

SEQ ID NO: 3221669 - RNA, 19 nt, Artificial Sequence
  Description of Artificial Sequence: Synthetic oligonucleotide
cucaacuuguaacugacug

SEQ ID NO: 3221670 - RNA, 19 nt, Artificial Sequence
  Description of Artificial Sequence: Synthetic oligonucleotide
uaucauacaggcauacuau

SEQ ID NO: 3221671 - RNA, 19 nt, Artificial Sequence
  Description of Artificial Sequence: Synthetic oligonucleotide
acaauuaugagauguguuu

SEQ ID NO: 3221672 - RNA, 19 nt, Artificial Sequence
  Description of Artificial Sequence: Synthetic oligonucleotide
cacaacugcauaaagucac

SEQ ID NO: 3221673 - RNA, 19 nt, Artificial Sequence
  Description of Artificial Sequence: Synthetic oligonucleotide
caagacgauguuuaacagg

SEQ ID NO: 3221674 - RNA, 19 nt, Artificial Sequence
  Description of Artificial Sequence: Synthetic oligonucleotide
uuuguucccucuaucacgu

SEQ ID NO: 3221675 - RNA, 19 nt, Artificial Sequence
  Description of Artificial Sequence: Synthetic oligonucleotide
uugguaauuugauaucaca

SEQ ID NO: 3221676 - RNA, 19 nt, Artificial Sequence
  Description of Artificial Sequence: Synthetic oligonucleotide
acgagacucauauucaucu

SEQ ID NO: 3221677 - RNA, 19 nt, Artificial Sequence
  Description of Artificial Sequence: Synthetic oligonucleotide
cuuuguuaagaacguaggc

SEQ ID NO: 3221678 - RNA, 19 nt, Artificial Sequence
  Description of Artificial Sequence: Synthetic oligonucleotide
auagacgguaccuugggcu

SEQ ID NO: 3221679 - RNA, 19 nt, Artificial Sequence
  Description of Artificial Sequence: Synthetic oligonucleotide
uucacuuuggauggugugg

SEQ ID NO: 3221680 - RNA, 19 nt, Artificial Sequence
  Description of Artificial Sequence: Synthetic oligonucleotide
uuccaucuaacauucagaa

SEQ ID NO: 3221681 - RNA, 19 nt, Artificial Sequence
  Description of Artificial Sequence: Synthetic oligonucleotide
auuuacugaacacccuguc

SEQ ID NO: 3221682 - RNA, 19 nt, Artificial Sequence
  Description of Artificial Sequence: Synthetic oligonucleotide
uuuacugaacacccugucu

SEQ ID NO: 3221683 - RNA, 19 nt, Artificial Sequence
  Description of Artificial Sequence: Synthetic oligonucleotide
aggacauggucuuuccucg

SEQ ID NO: 3221684 - RNA, 19 nt, Artificial Sequence
  Description of Artificial Sequence: Synthetic oligonucleotide
auugcuuccuguuucuucu

SEQ ID NO: 3221685 - RNA, 19 nt, Artificial Sequence
  Description of Artificial Sequence: Synthetic oligonucleotide
gacgauguuuaacaggaac

SEQ ID NO: 3221686 - RNA, 19 nt, Artificial Sequence
  Description of Artificial Sequence: Synthetic oligonucleotide
uucacuaauuuacuguaau

SEQ ID NO: 3221687 - RNA, 19 nt, Artificial Sequence
  Description of Artificial Sequence: Synthetic oligonucleotide
uacagcguaguguugcucc

SEQ ID NO: 3221688 - RNA, 19 nt, Artificial Sequence
  Description of Artificial Sequence: Synthetic oligonucleotide
aaaacaaacauuacauaua

SEQ ID NO: 3221689 - RNA, 19 nt, Artificial Sequence
  Description of Artificial Sequence: Synthetic oligonucleotide
uacaauaccuaaucuugca

SEQ ID NO: 3221690 - RNA, 19 nt, Artificial Sequence
  Description of Artificial Sequence: Synthetic oligonucleotide
uuacugaacacccugucuu

SEQ ID NO: 3221691 - RNA, 19 nt, Artificial Sequence
  Description of Artificial Sequence: Synthetic oligonucleotide
cuaaauaaaacuuuuaaag

SEQ ID NO: 3221692 - RNA, 19 nt, Artificial Sequence
  Description of Artificial Sequence: Synthetic oligonucleotide
acaauuaacagucacaaac

SEQ ID NO: 3221693 - RNA, 19 nt, Artificial Sequence
  Description of Artificial Sequence: Synthetic oligonucleotide
aacaauugcuuucuaaugc

SEQ ID NO: 3221694 - RNA, 19 nt, Artificial Sequence
  Description of Artificial Sequence: Synthetic oligonucleotide
aaaaucaccaauuuaaaga

SEQ ID NO: 3221695 - RNA, 19 nt, Artificial Sequence
  Description of Artificial Sequence: Synthetic oligonucleotide
uaaaagacaaccuugacca

SEQ ID NO: 3221696 - RNA, 19 nt, Artificial Sequence
  Description of Artificial Sequence: Synthetic oligonucleotide
aauguauuaucauugagca

SEQ ID NO: 3221697 - RNA, 19 nt, Artificial Sequence
  Description of Artificial Sequence: Synthetic oligonucleotide
uauauauauauauauaugu

SEQ ID NO: 3221698 - RNA, 19 nt, Artificial Sequence
  Description of Artificial Sequence: Synthetic oligonucleotide
aauauguauauauauauau

SEQ ID NO: 3221699 - RNA, 19 nt, Artificial Sequence
  Description of Artificial Sequence: Synthetic oligonucleotide
aaauaaaacuuuuaaagaa

SEQ ID NO: 3221700 - RNA, 19 nt, Artificial Sequence
  Description of Artificial Sequence: Synthetic oligonucleotide
aaacuuuuaaagaauauuc

SEQ ID NO: 3221701 - RNA, 19 nt, Artificial Sequence
  Description of Artificial Sequence: Synthetic oligonucleotide
aaugcuaagucuucggagg

SEQ ID NO: 3221702 - RNA, 19 nt, Artificial Sequence
  Description of Artificial Sequence: Synthetic oligonucleotide
uugguuaucacugagcucg

SEQ ID NO: 3221703 - RNA, 19 nt, Artificial Sequence
  Description of Artificial Sequence: Synthetic oligonucleotide
uauauauauauauaugugu

SEQ ID NO: 3221704 - RNA, 19 nt, Artificial Sequence
  Description of Artificial Sequence: Synthetic oligonucleotide
uaaauaaaacuuuuaaaga

SEQ ID NO: 3221705 - RNA, 19 nt, Artificial Sequence
  Description of Artificial Sequence: Synthetic oligonucleotide
uguauauauauauauauau

SEQ ID NO: 3221706 - RNA, 19 nt, Artificial Sequence
  Description of Artificial Sequence: Synthetic oligonucleotide
ucaguaaacauaaauguga

SEQ ID NO: 3221707 - RNA, 19 nt, Artificial Sequence
  Description of Artificial Sequence: Synthetic oligonucleotide
aagaacuccacacuggguc

SEQ ID NO: 3221708 - RNA, 19 nt, Artificial Sequence
  Description of Artificial Sequence: Synthetic oligonucleotide
uauaaaaguguacaagaag

SEQ ID NO: 3221709 - RNA, 19 nt, Artificial Sequence
  Description of Artificial Sequence: Synthetic oligonucleotide
ucaauauaaaacuuuauau

SEQ ID NO: 3221710 - RNA, 19 nt, Artificial Sequence
  Description of Artificial Sequence: Synthetic oligonucleotide
ucugaacacaccaauaaag

SEQ ID NO: 3221711 - RNA, 19 nt, Artificial Sequence
  Description of Artificial Sequence: Synthetic oligonucleotide
auaaauuccauguugaaau

SEQ ID NO: 3221712 - RNA, 19 nt, Artificial Sequence
  Description of Artificial Sequence: Synthetic oligonucleotide
uguauuaucauugagcagu

SEQ ID NO: 3221713 - RNA, 19 nt, Artificial Sequence
  Description of Artificial Sequence: Synthetic oligonucleotide
uucaauuuuauuaaauuaa

SEQ ID NO: 3221714 - RNA, 19 nt, Artificial Sequence
  Description of Artificial Sequence: Synthetic oligonucleotide
uauguauauauauauauau

SEQ ID NO: 3221715 - RNA, 19 nt, Artificial Sequence
  Description of Artificial Sequence: Synthetic oligonucleotide
aacaccuuaacuuucuucu

SEQ ID NO: 3221716 - RNA, 19 nt, Artificial Sequence
  Description of Artificial Sequence: Synthetic oligonucleotide
ugaccuuuagcuaucaaag

SEQ ID NO: 3221717 - RNA, 19 nt, Artificial Sequence
  Description of Artificial Sequence: Synthetic oligonucleotide
uugcaaaacaaaauuauga

SEQ ID NO: 3221718 - RNA, 19 nt, Artificial Sequence
  Description of Artificial Sequence: Synthetic oligonucleotide
agaauauucuaccauuuuc

SEQ ID NO: 3221719 - RNA, 19 nt, Artificial Sequence
  Description of Artificial Sequence: Synthetic oligonucleotide
ugagcuuacaucaacacaa

SEQ ID NO: 3221720 - RNA, 19 nt, Artificial Sequence
  Description of Artificial Sequence: Synthetic oligonucleotide
aaaucaccaauuuaaagaa

SEQ ID NO: 3221721 - RNA, 19 nt, Artificial Sequence
  Description of Artificial Sequence: Synthetic oligonucleotide
aaaaucuaguaaaauaaag

SEQ ID NO: 3221722 - RNA, 19 nt, Artificial Sequence
  Description of Artificial Sequence: Synthetic oligonucleotide
aaaucaacagguaugagcu

SEQ ID NO: 3221723 - RNA, 19 nt, Artificial Sequence
  Description of Artificial Sequence: Synthetic oligonucleotide
uauuugugccauaugagag

SEQ ID NO: 3221724 - RNA, 19 nt, Artificial Sequence
  Description of Artificial Sequence: Synthetic oligonucleotide
aucaguuagaugaauaagc

SEQ ID NO: 3221725 - RNA, 19 nt, Artificial Sequence
  Description of Artificial Sequence: Synthetic oligonucleotide
ucaguuagaugaauaagcc

SEQ ID NO: 3221726 - RNA, 19 nt, Artificial Sequence
  Description of Artificial Sequence: Synthetic oligonucleotide
uucaauauaaaacuuuaua

SEQ ID NO: 3221727 - RNA, 19 nt, Artificial Sequence
  Description of Artificial Sequence: Synthetic oligonucleotide
aaacaauugcuuucuaaug

SEQ ID NO: 3221728 - RNA, 19 nt, Artificial Sequence
  Description of Artificial Sequence: Synthetic oligonucleotide
caaauugcaaaucucauuc

SEQ ID NO: 3221729 - RNA, 19 nt, Artificial Sequence
  Description of Artificial Sequence: Synthetic oligonucleotide
aacuauauacaagugaagu

SEQ ID NO: 3221730 - RNA, 19 nt, Artificial Sequence
  Description of Artificial Sequence: Synthetic oligonucleotide
acaccaauaaagcaaaugu

SEQ ID NO: 3221731 - RNA, 19 nt, Artificial Sequence
  Description of Artificial Sequence: Synthetic oligonucleotide
aaugaccaaaggcacuugg

SEQ ID NO: 3221732 - RNA, 19 nt, Artificial Sequence
  Description of Artificial Sequence: Synthetic oligonucleotide
ucuauuugugccauaugag

SEQ ID NO: 3221733 - RNA, 19 nt, Artificial Sequence
  Description of Artificial Sequence: Synthetic oligonucleotide
cacgcuacuauuauaaaag

SEQ ID NO: 3221734 - RNA, 19 nt, Artificial Sequence
  Description of Artificial Sequence: Synthetic oligonucleotide
auaguaguauuauguacac

SEQ ID NO: 3221735 - RNA, 19 nt, Artificial Sequence
  Description of Artificial Sequence: Synthetic oligonucleotide
uauauauauauaugugugu

SEQ ID NO: 3221736 - RNA, 19 nt, Artificial Sequence
  Description of Artificial Sequence: Synthetic oligonucleotide
acuauauacaagugaagug

SEQ ID NO: 3221737 - RNA, 19 nt, Artificial Sequence
  Description of Artificial Sequence: Synthetic oligonucleotide
auauauauauauaugugug

SEQ ID NO: 3221738 - RNA, 19 nt, Artificial Sequence
  Description of Artificial Sequence: Synthetic oligonucleotide
aaccaccaagucuugcugc

SEQ ID NO: 3221739 - RNA, 19 nt, Artificial Sequence
  Description of Artificial Sequence: Synthetic oligonucleotide
aaagcuuuggaauccagua

SEQ ID NO: 3221740 - RNA, 19 nt, Artificial Sequence
  Description of Artificial Sequence: Synthetic oligonucleotide
aaaugcauggugucaccgg

SEQ ID NO: 3221741 - RNA, 19 nt, Artificial Sequence
  Description of Artificial Sequence: Synthetic oligonucleotide
uucuguaaacauucgacug

SEQ ID NO: 3221742 - RNA, 19 nt, Artificial Sequence
  Description of Artificial Sequence: Synthetic oligonucleotide
auauauauauaugugugug

SEQ ID NO: 3221743 - RNA, 19 nt, Artificial Sequence
  Description of Artificial Sequence: Synthetic oligonucleotide
aauaaaacuuuuaaagaau

SEQ ID NO: 3221744 - RNA, 19 nt, Artificial Sequence
  Description of Artificial Sequence: Synthetic oligonucleotide
uaaacaguuguacuuugca

SEQ ID NO: 3221745 - RNA, 19 nt, Artificial Sequence
  Description of Artificial Sequence: Synthetic oligonucleotide
aaaacuuuuaaagaauauu

SEQ ID NO: 3221746 - RNA, 19 nt, Artificial Sequence
  Description of Artificial Sequence: Synthetic oligonucleotide
ucuuccguccagaaagugg

SEQ ID NO: 3221747 - RNA, 19 nt, Artificial Sequence
  Description of Artificial Sequence: Synthetic oligonucleotide
auaauagugguagaaaaca

SEQ ID NO: 3221748 - RNA, 19 nt, Artificial Sequence
  Description of Artificial Sequence: Synthetic oligonucleotide
uacgcaagcacgaaaacaa

SEQ ID NO: 3221749 - RNA, 19 nt, Artificial Sequence
  Description of Artificial Sequence: Synthetic oligonucleotide
ucccuaauuacauuagaug

SEQ ID NO: 3221750 - RNA, 19 nt, Artificial Sequence
  Description of Artificial Sequence: Synthetic oligonucleotide
aaauacauuuggcaaugga

SEQ ID NO: 3221751 - RNA, 19 nt, Artificial Sequence
  Description of Artificial Sequence: Synthetic oligonucleotide
ugaauaagccaaagaaaca

SEQ ID NO: 3221752 - RNA, 19 nt, Artificial Sequence
  Description of Artificial Sequence: Synthetic oligonucleotide
aacccuuaaagcaacaaca

SEQ ID NO: 3221753 - RNA, 19 nt, Artificial Sequence
  Description of Artificial Sequence: Synthetic oligonucleotide
ugaacacaccaauaaagca

SEQ ID NO: 3221754 - RNA, 19 nt, Artificial Sequence
  Description of Artificial Sequence: Synthetic oligonucleotide
uuugggaagaaaauccuau

SEQ ID NO: 3221755 - RNA, 19 nt, Artificial Sequence
  Description of Artificial Sequence: Synthetic oligonucleotide
auauauauauauauaugug

SEQ ID NO: 3221756 - RNA, 19 nt, Artificial Sequence
  Description of Artificial Sequence: Synthetic oligonucleotide
auaugcucaaaauuuauuu

SEQ ID NO: 3221757 - RNA, 19 nt, Artificial Sequence
  Description of Artificial Sequence: Synthetic oligonucleotide
aauuguuauaaaacuauau

SEQ ID NO: 3221758 - RNA, 19 nt, Artificial Sequence
  Description of Artificial Sequence: Synthetic oligonucleotide
aaagugcaccuaaaggggc

SEQ ID NO: 3221759 - RNA, 19 nt, Artificial Sequence
  Description of Artificial Sequence: Synthetic oligonucleotide
auaaaagacucccuaauua

SEQ ID NO: 3221760 - RNA, 19 nt, Artificial Sequence
  Description of Artificial Sequence: Synthetic oligonucleotide
uugaccaaagcuuuggaau

SEQ ID NO: 3221761 - RNA, 19 nt, Artificial Sequence
  Description of Artificial Sequence: Synthetic oligonucleotide
guauauauauauauauaug

SEQ ID NO: 3221762 - RNA, 19 nt, Artificial Sequence
  Description of Artificial Sequence: Synthetic oligonucleotide
cacaacuuaacacucuccc

SEQ ID NO: 3221763 - RNA, 19 nt, Artificial Sequence
  Description of Artificial Sequence: Synthetic oligonucleotide
auauauaugugugugugug

SEQ ID NO: 3221764 - RNA, 19 nt, Artificial Sequence
  Description of Artificial Sequence: Synthetic oligonucleotide
gccaaagaaacauuuaugc

SEQ ID NO: 3221765 - RNA, 19 nt, Artificial Sequence
  Description of Artificial Sequence: Synthetic oligonucleotide
agcuauaaaaguuaauaua

SEQ ID NO: 3221766 - RNA, 19 nt, Artificial Sequence
  Description of Artificial Sequence: Synthetic oligonucleotide
uaauagugguagaaaacac

SEQ ID NO: 3221767 - RNA, 19 nt, Artificial Sequence
  Description of Artificial Sequence: Synthetic oligonucleotide
aaugugaaacuucaauaua

SEQ ID NO: 3221768 - RNA, 19 nt, Artificial Sequence
  Description of Artificial Sequence: Synthetic oligonucleotide
cucaguaaacauaaaugug

SEQ ID NO: 3221769 - RNA, 19 nt, Artificial Sequence
  Description of Artificial Sequence: Synthetic oligonucleotide
uaaaacuuuuaaagaauau

SEQ ID NO: 3221770 - RNA, 19 nt, Artificial Sequence
  Description of Artificial Sequence: Synthetic oligonucleotide
uuaaacaguuguacuuugc

SEQ ID NO: 3221771 - RNA, 19 nt, Artificial Sequence
  Description of Artificial Sequence: Synthetic oligonucleotide
agcaaggugaugcaguucu

SEQ ID NO: 3221772 - RNA, 19 nt, Artificial Sequence
  Description of Artificial Sequence: Synthetic oligonucleotide
aauauucuaccauuuucuu

SEQ ID NO: 3221773 - RNA, 19 nt, Artificial Sequence
  Description of Artificial Sequence: Synthetic oligonucleotide
uaagacauaacaguuuauc

SEQ ID NO: 3221774 - RNA, 19 nt, Artificial Sequence
  Description of Artificial Sequence: Synthetic oligonucleotide
aaugcauggugucaccggu

SEQ ID NO: 3221775 - RNA, 19 nt, Artificial Sequence
  Description of Artificial Sequence: Synthetic oligonucleotide
caauauaaaacuuuauaua

SEQ ID NO: 3221776 - RNA, 19 nt, Artificial Sequence
  Description of Artificial Sequence: Synthetic oligonucleotide
aaccaaauugcaaaucuca

SEQ ID NO: 3221777 - RNA, 19 nt, Artificial Sequence
  Description of Artificial Sequence: Synthetic oligonucleotide
uagcuauaaaaguuaauau

SEQ ID NO: 3221778 - RNA, 19 nt, Artificial Sequence
  Description of Artificial Sequence: Synthetic oligonucleotide
auuauguacacauggcaaa

SEQ ID NO: 3221779 - RNA, 19 nt, Artificial Sequence
  Description of Artificial Sequence: Synthetic oligonucleotide
uaugcucaaaauuuauuua

SEQ ID NO: 3221780 - RNA, 19 nt, Artificial Sequence
  Description of Artificial Sequence: Synthetic oligonucleotide
gagcaggagaaccaauggg

SEQ ID NO: 3221781 - RNA, 19 nt, Artificial Sequence
  Description of Artificial Sequence: Synthetic oligonucleotide
acaauugcuuucuaaugca

SEQ ID NO: 3221782 - RNA, 19 nt, Artificial Sequence
  Description of Artificial Sequence: Synthetic oligonucleotide
aggagaaccaauggggcgc

SEQ ID NO: 3221783 - RNA, 19 nt, Artificial Sequence
  Description of Artificial Sequence: Synthetic oligonucleotide
auucuaauauggccauugg

SEQ ID NO: 3221784 - RNA, 19 nt, Artificial Sequence
  Description of Artificial Sequence: Synthetic oligonucleotide
uaguuagcuauaaaaguua

SEQ ID NO: 3221785 - RNA, 19 nt, Artificial Sequence
  Description of Artificial Sequence: Synthetic oligonucleotide
augcuaagucuucggaggc

SEQ ID NO: 3221786 - RNA, 19 nt, Artificial Sequence
  Description of Artificial Sequence: Synthetic oligonucleotide
accaauuuaaagaaugcca

SEQ ID NO: 3221787 - RNA, 19 nt, Artificial Sequence
  Description of Artificial Sequence: Synthetic oligonucleotide
gguuuaacaagccccagcc

SEQ ID NO: 3221788 - RNA, 19 nt, Artificial Sequence
  Description of Artificial Sequence: Synthetic oligonucleotide
aaacuauauacaagugaag

SEQ ID NO: 3221789 - RNA, 19 nt, Artificial Sequence
  Description of Artificial Sequence: Synthetic oligonucleotide
aaagcuugcccuaggugac

SEQ ID NO: 3221790 - RNA, 19 nt, Artificial Sequence
  Description of Artificial Sequence: Synthetic oligonucleotide
aauguuauguauguucauu

SEQ ID NO: 3221791 - RNA, 19 nt, Artificial Sequence
  Description of Artificial Sequence: Synthetic oligonucleotide
cuugguaagaaccacagcc

SEQ ID NO: 3221792 - RNA, 19 nt, Artificial Sequence
  Description of Artificial Sequence: Synthetic oligonucleotide
ucuccgauccuucaaauug

SEQ ID NO: 3221793 - RNA, 19 nt, Artificial Sequence
  Description of Artificial Sequence: Synthetic oligonucleotide
agaaccacagcccuccggc

SEQ ID NO: 3221794 - RNA, 19 nt, Artificial Sequence
  Description of Artificial Sequence: Synthetic oligonucleotide
ucaaauugggcagcgaagg

SEQ ID NO: 3221795 - RNA, 19 nt, Artificial Sequence
  Description of Artificial Sequence: Synthetic oligonucleotide
agagagaagucguucuugc

SEQ ID NO: 3221796 - RNA, 19 nt, Artificial Sequence
  Description of Artificial Sequence: Synthetic oligonucleotide
ucuuccacuaccaacggac

SEQ ID NO: 3221797 - RNA, 19 nt, Artificial Sequence
  Description of Artificial Sequence: Synthetic oligonucleotide
gauccuucaaauugggcag

SEQ ID NO: 3221798 - RNA, 19 nt, Artificial Sequence
  Description of Artificial Sequence: Synthetic oligonucleotide
cuaccaacggacuagguac

SEQ ID NO: 3221799 - RNA, 19 nt, Artificial Sequence
  Description of Artificial Sequence: Synthetic oligonucleotide
ucagggacgcugcugaagg

SEQ ID NO: 3221800 - RNA, 19 nt, Artificial Sequence
  Description of Artificial Sequence: Synthetic oligonucleotide
uaucauagugcccuggccu

SEQ ID NO: 3221801 - RNA, 19 nt, Artificial Sequence
  Description of Artificial Sequence: Synthetic oligonucleotide
uucaaauugggcagcgaag

SEQ ID NO: 3221802 - RNA, 19 nt, Artificial Sequence
  Description of Artificial Sequence: Synthetic oligonucleotide
acuguugcgcaccagguag

SEQ ID NO: 3221803 - RNA, 19 nt, Artificial Sequence
  Description of Artificial Sequence: Synthetic oligonucleotide
uugguaagaaccacagccc

SEQ ID NO: 3221804 - RNA, 19 nt, Artificial Sequence
  Description of Artificial Sequence: Synthetic oligonucleotide
uugcgcaccagguagcugg

SEQ ID NO: 3221805 - RNA, 19 nt, Artificial Sequence
  Description of Artificial Sequence: Synthetic oligonucleotide
uccaggucuaucauagugc

SEQ ID NO: 3221806 - RNA, 19 nt, Artificial Sequence
  Description of Artificial Sequence: Synthetic oligonucleotide
agcuacagaguccggaugg

SEQ ID NO: 3221807 - RNA, 19 nt, Artificial Sequence
  Description of Artificial Sequence: Synthetic oligonucleotide
acggacuagguacauacuc

SEQ ID NO: 3221808 - RNA, 19 nt, Artificial Sequence
  Description of Artificial Sequence: Synthetic oligonucleotide
uccuugguaagaaccacag

SEQ ID NO: 3221809 - RNA, 19 nt, Artificial Sequence
  Description of Artificial Sequence: Synthetic oligonucleotide
acuagguacauacucuucu

SEQ ID NO: 3221810 - RNA, 19 nt, Artificial Sequence
  Description of Artificial Sequence: Synthetic oligonucleotide
ugggguucccagcagaaag

SEQ ID NO: 3221811 - RNA, 19 nt, Artificial Sequence
  Description of Artificial Sequence: Synthetic oligonucleotide
ucuaucauagugcccuggc

SEQ ID NO: 3221812 - RNA, 19 nt, Artificial Sequence
  Description of Artificial Sequence: Synthetic oligonucleotide
cuagguuccaugcccaggg

SEQ ID NO: 3221813 - RNA, 19 nt, Artificial Sequence
  Description of Artificial Sequence: Synthetic oligonucleotide
uuugcauagccggagcagg

SEQ ID NO: 3221814 - RNA, 19 nt, Artificial Sequence
  Description of Artificial Sequence: Synthetic oligonucleotide
aagucguucuugcuggucu

SEQ ID NO: 3221815 - RNA, 19 nt, Artificial Sequence
  Description of Artificial Sequence: Synthetic oligonucleotide
uuuccagaggcagugcugg

SEQ ID NO: 3221816 - RNA, 19 nt, Artificial Sequence
  Description of Artificial Sequence: Synthetic oligonucleotide
gugaugcacgauuucaggg

SEQ ID NO: 3221817 - RNA, 19 nt, Artificial Sequence
  Description of Artificial Sequence: Synthetic oligonucleotide
uacuuguguuccuuguccg

SEQ ID NO: 3221818 - RNA, 19 nt, Artificial Sequence
  Description of Artificial Sequence: Synthetic oligonucleotide
ugaugcacgauuucaggga

SEQ ID NO: 3221819 - RNA, 19 nt, Artificial Sequence
  Description of Artificial Sequence: Synthetic oligonucleotide
uagugaugcacgauuucag

SEQ ID NO: 3221820 - RNA, 19 nt, Artificial Sequence
  Description of Artificial Sequence: Synthetic oligonucleotide
caacggacuagguacauac

SEQ ID NO: 3221821 - RNA, 19 nt, Artificial Sequence
  Description of Artificial Sequence: Synthetic oligonucleotide
auuucagggacgcugcuga

SEQ ID NO: 3221822 - RNA, 19 nt, Artificial Sequence
  Description of Artificial Sequence: Synthetic oligonucleotide
gagggagagagagaagucg

SEQ ID NO: 3221823 - RNA, 19 nt, Artificial Sequence
  Description of Artificial Sequence: Synthetic oligonucleotide
aagggugggcuguucuggc

SEQ ID NO: 3221824 - RNA, 19 nt, Artificial Sequence
  Description of Artificial Sequence: Synthetic oligonucleotide
ccuucuuccacuaccaacg

SEQ ID NO: 3221825 - RNA, 19 nt, Artificial Sequence
  Description of Artificial Sequence: Synthetic oligonucleotide
ucuugagggagagagagaa

SEQ ID NO: 3221826 - RNA, 19 nt, Artificial Sequence
  Description of Artificial Sequence: Synthetic oligonucleotide
uagagcagggacaugugcu

SEQ ID NO: 3221827 - RNA, 19 nt, Artificial Sequence
  Description of Artificial Sequence: Synthetic oligonucleotide
auccaggucuaucauagug

SEQ ID NO: 3221828 - RNA, 19 nt, Artificial Sequence
  Description of Artificial Sequence: Synthetic oligonucleotide
aguccggauggccacaggg

SEQ ID NO: 3221829 - RNA, 19 nt, Artificial Sequence
  Description of Artificial Sequence: Synthetic oligonucleotide
gaccugguuuuccagaggc

SEQ ID NO: 3221830 - RNA, 19 nt, Artificial Sequence
  Description of Artificial Sequence: Synthetic oligonucleotide
guucccagcagaaagccgg

SEQ ID NO: 3221831 - RNA, 19 nt, Artificial Sequence
  Description of Artificial Sequence: Synthetic oligonucleotide
aagaaccacagcccuccgg

SEQ ID NO: 3221832 - RNA, 19 nt, Artificial Sequence
  Description of Artificial Sequence: Synthetic oligonucleotide
uggcccaacacauacuugu

SEQ ID NO: 3221833 - RNA, 19 nt, Artificial Sequence
  Description of Artificial Sequence: Synthetic oligonucleotide
ugugcaugaagcccugacu

SEQ ID NO: 3221834 - RNA, 19 nt, Artificial Sequence
  Description of Artificial Sequence: Synthetic oligonucleotide
caacacauacuuguguucc

SEQ ID NO: 3221835 - RNA, 19 nt, Artificial Sequence
  Description of Artificial Sequence: Synthetic oligonucleotide
aucauagugcccuggccuc

SEQ ID NO: 3221836 - RNA, 19 nt, Artificial Sequence
  Description of Artificial Sequence: Synthetic oligonucleotide
aggucuaucauagugcccu

SEQ ID NO: 3221837 - RNA, 19 nt, Artificial Sequence
  Description of Artificial Sequence: Synthetic oligonucleotide
ugguaagaaccacagcccu

SEQ ID NO: 3221838 - RNA, 19 nt, Artificial Sequence
  Description of Artificial Sequence: Synthetic oligonucleotide
uacagaguccggauggcca

SEQ ID NO: 3221839 - RNA, 19 nt, Artificial Sequence
  Description of Artificial Sequence: Synthetic oligonucleotide
uccgauccuucaaauuggg

SEQ ID NO: 3221840 - RNA, 19 nt, Artificial Sequence
  Description of Artificial Sequence: Synthetic oligonucleotide
augugcaugaagcccugac

SEQ ID NO: 3221841 - RNA, 19 nt, Artificial Sequence
  Description of Artificial Sequence: Synthetic oligonucleotide
ucuuugcauagccggagca

SEQ ID NO: 3221842 - RNA, 19 nt, Artificial Sequence
  Description of Artificial Sequence: Synthetic oligonucleotide
agagcagggacaugugcuc

SEQ ID NO: 3221843 - RNA, 19 nt, Artificial Sequence
  Description of Artificial Sequence: Synthetic oligonucleotide
guaagaaccacagcccucc

SEQ ID NO: 3221844 - RNA, 19 nt, Artificial Sequence
  Description of Artificial Sequence: Synthetic oligonucleotide
uguuccuuguccgggacag

SEQ ID NO: 3221845 - RNA, 19 nt, Artificial Sequence
  Description of Artificial Sequence: Synthetic oligonucleotide
guucuugcuggucucacug

SEQ ID NO: 3221846 - RNA, 19 nt, Artificial Sequence
  Description of Artificial Sequence: Synthetic oligonucleotide
gaugcacgauuucagggac

SEQ ID NO: 3221847 - RNA, 19 nt, Artificial Sequence
  Description of Artificial Sequence: Synthetic oligonucleotide
cuccgauccuucaaauugg

SEQ ID NO: 3221848 - RNA, 19 nt, Artificial Sequence
  Description of Artificial Sequence: Synthetic oligonucleotide
acaaagcuggauccagguc

SEQ ID NO: 3221849 - RNA, 19 nt, Artificial Sequence
  Description of Artificial Sequence: Synthetic oligonucleotide
cuuuaugggcagcuugcgg

SEQ ID NO: 3221850 - RNA, 19 nt, Artificial Sequence
  Description of Artificial Sequence: Synthetic oligonucleotide
ucuccucccggccagguga

SEQ ID NO: 3221851 - RNA, 19 nt, Artificial Sequence
  Description of Artificial Sequence: Synthetic oligonucleotide
ucuucuccgauccuucaaa

SEQ ID NO: 3221852 - RNA, 19 nt, Artificial Sequence
  Description of Artificial Sequence: Synthetic oligonucleotide
aacacauacuuguguuccu

SEQ ID NO: 3221853 - RNA, 19 nt, Artificial Sequence
  Description of Artificial Sequence: Synthetic oligonucleotide
agguagcuggccucuuugc

SEQ ID NO: 3221854 - RNA, 19 nt, Artificial Sequence
  Description of Artificial Sequence: Synthetic oligonucleotide
ucuggcccaacacauacuu

SEQ ID NO: 3221855 - RNA, 19 nt, Artificial Sequence
  Description of Artificial Sequence: Synthetic oligonucleotide
gaagggugggcuguucugg

SEQ ID NO: 3221856 - RNA, 19 nt, Artificial Sequence
  Description of Artificial Sequence: Synthetic oligonucleotide
agugcccuggccucacagc

SEQ ID NO: 3221857 - RNA, 19 nt, Artificial Sequence
  Description of Artificial Sequence: Synthetic oligonucleotide
cugcucuugagggagagag

SEQ ID NO: 3221858 - RNA, 19 nt, Artificial Sequence
  Description of Artificial Sequence: Synthetic oligonucleotide
acuaccaacggacuaggua

SEQ ID NO: 3221859 - RNA, 19 nt, Artificial Sequence
  Description of Artificial Sequence: Synthetic oligonucleotide
uccggcaggugacaaagcu

SEQ ID NO: 3221860 - RNA, 19 nt, Artificial Sequence
  Description of Artificial Sequence: Synthetic oligonucleotide
aaagccggggagguagccg

SEQ ID NO: 3221861 - RNA, 19 nt, Artificial Sequence
  Description of Artificial Sequence: Synthetic oligonucleotide
ugcaugaagcccugacugc

SEQ ID NO: 3221862 - RNA, 19 nt, Artificial Sequence
  Description of Artificial Sequence: Synthetic oligonucleotide
acauacuuguguuccuugu

SEQ ID NO: 3221863 - RNA, 19 nt, Artificial Sequence
  Description of Artificial Sequence: Synthetic oligonucleotide
ugcacgauuucagggacgc

SEQ ID NO: 3221864 - RNA, 19 nt, Artificial Sequence
  Description of Artificial Sequence: Synthetic oligonucleotide
ucuguucggcugauggccc

SEQ ID NO: 3221865 - RNA, 19 nt, Artificial Sequence
  Description of Artificial Sequence: Synthetic oligonucleotide
cuaucauagugcccuggcc

SEQ ID NO: 3221866 - RNA, 19 nt, Artificial Sequence
  Description of Artificial Sequence: Synthetic oligonucleotide
ugcuggaucuguccacucc

SEQ ID NO: 3221867 - RNA, 19 nt, Artificial Sequence
  Description of Artificial Sequence: Synthetic oligonucleotide
ugguuuuccagaggcagug

SEQ ID NO: 3221868 - RNA, 19 nt, Artificial Sequence
  Description of Artificial Sequence: Synthetic oligonucleotide
guagagcagggacaugugc

SEQ ID NO: 3221869 - RNA, 19 nt, Artificial Sequence
  Description of Artificial Sequence: Synthetic oligonucleotide
ggauccaggucuaucauag

SEQ ID NO: 3221870 - RNA, 19 nt, Artificial Sequence
  Description of Artificial Sequence: Synthetic oligonucleotide
ucggcugauggccccgugg

SEQ ID NO: 3221871 - RNA, 19 nt, Artificial Sequence
  Description of Artificial Sequence: Synthetic oligonucleotide
cacgauuucagggacgcug

SEQ ID NO: 3221872 - RNA, 19 nt, Artificial Sequence
  Description of Artificial Sequence: Synthetic oligonucleotide
ggcaguucuucuccgaucc

SEQ ID NO: 3221873 - RNA, 19 nt, Artificial Sequence
  Description of Artificial Sequence: Synthetic oligonucleotide
agguagccgucccuucucc

SEQ ID NO: 3221874 - RNA, 19 nt, Artificial Sequence
  Description of Artificial Sequence: Synthetic oligonucleotide
ucacuguugcgcaccaggu

SEQ ID NO: 3221875 - RNA, 19 nt, Artificial Sequence
  Description of Artificial Sequence: Synthetic oligonucleotide
cagaccugguuuuccagag

SEQ ID NO: 3221876 - RNA, 19 nt, Artificial Sequence
  Description of Artificial Sequence: Synthetic oligonucleotide
ugaagggugggcuguucug

SEQ ID NO: 3221877 - RNA, 19 nt, Artificial Sequence
  Description of Artificial Sequence: Synthetic oligonucleotide
caaauugggcagcgaaggc

SEQ ID NO: 3221878 - RNA, 19 nt, Artificial Sequence
  Description of Artificial Sequence: Synthetic oligonucleotide
gucuguucggcugauggcc

SEQ ID NO: 3221879 - RNA, 19 nt, Artificial Sequence
  Description of Artificial Sequence: Synthetic oligonucleotide
cugacuugggguucccagc

SEQ ID NO: 3221880 - RNA, 19 nt, Artificial Sequence
  Description of Artificial Sequence: Synthetic oligonucleotide
cugacugcucuugagggag

SEQ ID NO: 3221881 - RNA, 19 nt, Artificial Sequence
  Description of Artificial Sequence: Synthetic oligonucleotide
uggccucuuugcauagccg

SEQ ID NO: 3221882 - RNA, 19 nt, Artificial Sequence
  Description of Artificial Sequence: Synthetic oligonucleotide
ggccucuuugcauagccgg

SEQ ID NO: 3221883 - RNA, 19 nt, Artificial Sequence
  Description of Artificial Sequence: Synthetic oligonucleotide
caaagcuggauccaggucu

SEQ ID NO: 3221884 - RNA, 19 nt, Artificial Sequence
  Description of Artificial Sequence: Synthetic oligonucleotide
uccuucaaauugggcagcg

SEQ ID NO: 3221885 - RNA, 19 nt, Artificial Sequence
  Description of Artificial Sequence: Synthetic oligonucleotide
agcagggacaugugcuccg

SEQ ID NO: 3221886 - RNA, 19 nt, Artificial Sequence
  Description of Artificial Sequence: Synthetic oligonucleotide
ugagggagagagagaaguc

SEQ ID NO: 3221887 - RNA, 19 nt, Artificial Sequence
  Description of Artificial Sequence: Synthetic oligonucleotide
agucguucuugcuggucuc

SEQ ID NO: 3221888 - RNA, 19 nt, Artificial Sequence
  Description of Artificial Sequence: Synthetic oligonucleotide
cuucaaauugggcagcgaa

SEQ ID NO: 3221889 - RNA, 19 nt, Artificial Sequence
  Description of Artificial Sequence: Synthetic oligonucleotide
cauacuuguguuccuuguc

SEQ ID NO: 3221890 - RNA, 19 nt, Artificial Sequence
  Description of Artificial Sequence: Synthetic oligonucleotide
augcccaggggcuuggcug

SEQ ID NO: 3221891 - RNA, 19 nt, Artificial Sequence
  Description of Artificial Sequence: Synthetic oligonucleotide
uaaagugguacccaaagcg

SEQ ID NO: 3221892 - RNA, 19 nt, Artificial Sequence
  Description of Artificial Sequence: Synthetic oligonucleotide
uuuagcacagccaugagcc

SEQ ID NO: 3221893 - RNA, 19 nt, Artificial Sequence
  Description of Artificial Sequence: Synthetic oligonucleotide
uuauuuacuaggaaauggg

SEQ ID NO: 3221894 - RNA, 19 nt, Artificial Sequence
  Description of Artificial Sequence: Synthetic oligonucleotide
uuuauuuacuaggaaaugg

SEQ ID NO: 3221895 - RNA, 19 nt, Artificial Sequence
  Description of Artificial Sequence: Synthetic oligonucleotide
agggauuuuauuuacuagg

SEQ ID NO: 3221896 - RNA, 19 nt, Artificial Sequence
  Description of Artificial Sequence: Synthetic oligonucleotide
aauagagggacacugcucu

SEQ ID NO: 3221897 - RNA, 19 nt, Artificial Sequence
  Description of Artificial Sequence: Synthetic oligonucleotide
gauguuaucucucuuuugc

SEQ ID NO: 3221898 - RNA, 19 nt, Artificial Sequence
  Description of Artificial Sequence: Synthetic oligonucleotide
uguaaagugguacccaaag

SEQ ID NO: 3221899 - RNA, 19 nt, Artificial Sequence
  Description of Artificial Sequence: Synthetic oligonucleotide
uuuacuaggaaaugggaga

SEQ ID NO: 3221900 - RNA, 19 nt, Artificial Sequence
  Description of Artificial Sequence: Synthetic oligonucleotide
uuggauucaauguucaagc

SEQ ID NO: 3221901 - RNA, 19 nt, Artificial Sequence
  Description of Artificial Sequence: Synthetic oligonucleotide
gaugaaguuggauucaaug

SEQ ID NO: 3221902 - RNA, 19 nt, Artificial Sequence
  Description of Artificial Sequence: Synthetic oligonucleotide
gauuuuauuuacuaggaaa

SEQ ID NO: 3221903 - RNA, 19 nt, Artificial Sequence
  Description of Artificial Sequence: Synthetic oligonucleotide
acugcucuagcacaguggc

SEQ ID NO: 3221904 - RNA, 19 nt, Artificial Sequence
  Description of Artificial Sequence: Synthetic oligonucleotide
uaggaaaugggagagauga

SEQ ID NO: 3221905 - RNA, 19 nt, Artificial Sequence
  Description of Artificial Sequence: Synthetic oligonucleotide
aggaguuauauguccaggc

SEQ ID NO: 3221906 - RNA, 19 nt, Artificial Sequence
  Description of Artificial Sequence: Synthetic oligonucleotide
aauguucaagcucuggaga

SEQ ID NO: 3221907 - RNA, 19 nt, Artificial Sequence
  Description of Artificial Sequence: Synthetic oligonucleotide
auuguuccgggucauggcc

SEQ ID NO: 3221908 - RNA, 19 nt, Artificial Sequence
  Description of Artificial Sequence: Synthetic oligonucleotide
aagggauuuuauuuacuag

SEQ ID NO: 3221909 - RNA, 19 nt, Artificial Sequence
  Description of Artificial Sequence: Synthetic oligonucleotide
uccuuguuguguaaagugg

SEQ ID NO: 3221910 - RNA, 19 nt, Artificial Sequence
  Description of Artificial Sequence: Synthetic oligonucleotide
acagccaugagcccugugc

SEQ ID NO: 3221911 - RNA, 19 nt, Artificial Sequence
  Description of Artificial Sequence: Synthetic oligonucleotide
caaagcggacaauagaggg

SEQ ID NO: 3221912 - RNA, 19 nt, Artificial Sequence
  Description of Artificial Sequence: Synthetic oligonucleotide
gaugaggaguuauaugucc

SEQ ID NO: 3221913 - RNA, 19 nt, Artificial Sequence
  Description of Artificial Sequence: Synthetic oligonucleotide
ucaauguucaagcucugga

SEQ ID NO: 3221914 - RNA, 19 nt, Artificial Sequence
  Description of Artificial Sequence: Synthetic oligonucleotide
uauuuacuaggaaauggga

SEQ ID NO: 3221915 - RNA, 19 nt, Artificial Sequence
  Description of Artificial Sequence: Synthetic oligonucleotide
aagcggacaauagagggac

SEQ ID NO: 3221916 - RNA, 19 nt, Artificial Sequence
  Description of Artificial Sequence: Synthetic oligonucleotide
aaagggauuuuauuuacua

SEQ ID NO: 3221917 - RNA, 19 nt, Artificial Sequence
  Description of Artificial Sequence: Synthetic oligonucleotide
aaagugguacccaaagcgg

SEQ ID NO: 3221918 - RNA, 19 nt, Artificial Sequence
  Description of Artificial Sequence: Synthetic oligonucleotide
aucucuugcugguauaagg

SEQ ID NO: 3221919 - RNA, 19 nt, Artificial Sequence
  Description of Artificial Sequence: Synthetic oligonucleotide
aacugccuuuagcacagcc

SEQ ID NO: 3221920 - RNA, 19 nt, Artificial Sequence
  Description of Artificial Sequence: Synthetic oligonucleotide
augaaguuggauucaaugu

SEQ ID NO: 3221921 - RNA, 19 nt, Artificial Sequence
  Description of Artificial Sequence: Synthetic oligonucleotide
uguuguguaaagugguacc

SEQ ID NO: 3221922 - RNA, 19 nt, Artificial Sequence
  Description of Artificial Sequence: Synthetic oligonucleotide
auguucaagcucuggagac

SEQ ID NO: 3221923 - RNA, 19 nt, Artificial Sequence
  Description of Artificial Sequence: Synthetic oligonucleotide
aaaugggagagaugaggag

SEQ ID NO: 3221924 - RNA, 19 nt, Artificial Sequence
  Description of Artificial Sequence: Synthetic oligonucleotide
uguuaucucucuuuugcug

SEQ ID NO: 3221925 - RNA, 19 nt, Artificial Sequence
  Description of Artificial Sequence: Synthetic oligonucleotide
ugaaguuggauucaauguu

SEQ ID NO: 3221926 - RNA, 19 nt, Artificial Sequence
  Description of Artificial Sequence: Synthetic oligonucleotide
gagaugaggaguuauaugu

SEQ ID NO: 3221927 - RNA, 19 nt, Artificial Sequence
  Description of Artificial Sequence: Synthetic oligonucleotide
cuugcugguauaaggacag

SEQ ID NO: 3221928 - RNA, 19 nt, Artificial Sequence
  Description of Artificial Sequence: Synthetic oligonucleotide
ucucuugcugguauaagga

SEQ ID NO: 3221929 - RNA, 19 nt, Artificial Sequence
  Description of Artificial Sequence: Synthetic oligonucleotide
aaugggagagaugaggagu

SEQ ID NO: 3221930 - RNA, 19 nt, Artificial Sequence
  Description of Artificial Sequence: Synthetic oligonucleotide
ucuugcugguauaaggaca

SEQ ID NO: 3221931 - RNA, 19 nt, Artificial Sequence
  Description of Artificial Sequence: Synthetic oligonucleotide
uuuuauuuacuaggaaaug

SEQ ID NO: 3221932 - RNA, 19 nt, Artificial Sequence
  Description of Artificial Sequence: Synthetic oligonucleotide
auuuacuaggaaaugggag

SEQ ID NO: 3221933 - RNA, 19 nt, Artificial Sequence
  Description of Artificial Sequence: Synthetic oligonucleotide
ugagaguggcauuuucccg

SEQ ID NO: 3221934 - RNA, 19 nt, Artificial Sequence
  Description of Artificial Sequence: Synthetic oligonucleotide
auuuuauuuacuaggaaau

SEQ ID NO: 3221935 - RNA, 19 nt, Artificial Sequence
  Description of Artificial Sequence: Synthetic oligonucleotide
guuggauucaauguucaag

SEQ ID NO: 3221936 - RNA, 19 nt, Artificial Sequence
  Description of Artificial Sequence: Synthetic oligonucleotide
caauguucaagcucuggag

SEQ ID NO: 3221937 - RNA, 19 nt, Artificial Sequence
  Description of Artificial Sequence: Synthetic oligonucleotide
uuacuaggaaaugggagag

SEQ ID NO: 3221938 - RNA, 19 nt, Artificial Sequence
  Description of Artificial Sequence: Synthetic oligonucleotide
agugagaguggcauuuucc

SEQ ID NO: 3221939 - RNA, 19 nt, Artificial Sequence
  Description of Artificial Sequence: Synthetic oligonucleotide
ucauuguuccgggucaugg

SEQ ID NO: 3221940 - RNA, 19 nt, Artificial Sequence
  Description of Artificial Sequence: Synthetic oligonucleotide
uauauguccaggccucuca

SEQ ID NO: 3221941 - RNA, 19 nt, Artificial Sequence
  Description of Artificial Sequence: Synthetic oligonucleotide
acaguggccauuuccaucu

SEQ ID NO: 3221942 - RNA, 19 nt, Artificial Sequence
  Description of Artificial Sequence: Synthetic oligonucleotide
agggacacugcucuagcac

SEQ ID NO: 3221943 - RNA, 19 nt, Artificial Sequence
  Description of Artificial Sequence: Synthetic oligonucleotide
cuuuagcacagccaugagc

SEQ ID NO: 3221944 - RNA, 19 nt, Artificial Sequence
  Description of Artificial Sequence: Synthetic oligonucleotide
agagaugaggaguuauaug

SEQ ID NO: 3221945 - RNA, 19 nt, Artificial Sequence
  Description of Artificial Sequence: Synthetic oligonucleotide
acaauagagggacacugcu

SEQ ID NO: 3221946 - RNA, 19 nt, Artificial Sequence
  Description of Artificial Sequence: Synthetic oligonucleotide
ugcugaugaaguuggauuc

SEQ ID NO: 3221947 - RNA, 19 nt, Artificial Sequence
  Description of Artificial Sequence: Synthetic oligonucleotide
aguuauauguccaggccuc

SEQ ID NO: 3221948 - RNA, 19 nt, Artificial Sequence
  Description of Artificial Sequence: Synthetic oligonucleotide
gauucaauguucaagcucu

SEQ ID NO: 3221949 - RNA, 19 nt, Artificial Sequence
  Description of Artificial Sequence: Synthetic oligonucleotide
ugaggaguuauauguccag

SEQ ID NO: 3221950 - RNA, 19 nt, Artificial Sequence
  Description of Artificial Sequence: Synthetic oligonucleotide
ugcucuagcacaguggcca

SEQ ID NO: 3221951 - RNA, 19 nt, Artificial Sequence
  Description of Artificial Sequence: Synthetic oligonucleotide
ucccgaacugccuuuagca

SEQ ID NO: 3221952 - RNA, 19 nt, Artificial Sequence
  Description of Artificial Sequence: Synthetic oligonucleotide
aguggcauuuucccgaacu

SEQ ID NO: 3221953 - RNA, 19 nt, Artificial Sequence
  Description of Artificial Sequence: Synthetic oligonucleotide
ugugcugcugaugaaguug

SEQ ID NO: 3221954 - RNA, 19 nt, Artificial Sequence
  Description of Artificial Sequence: Synthetic oligonucleotide
gugagaguggcauuuuccc

SEQ ID NO: 3221955 - RNA, 19 nt, Artificial Sequence
  Description of Artificial Sequence: Synthetic oligonucleotide
agagggacacugcucuagc

SEQ ID NO: 3221956 - RNA, 19 nt, Artificial Sequence
  Description of Artificial Sequence: Synthetic oligonucleotide
guccuuguuguguaaagug

SEQ ID NO: 3221957 - RNA, 19 nt, Artificial Sequence
  Description of Artificial Sequence: Synthetic oligonucleotide
ugguugucuacacggagcu

SEQ ID NO: 3221958 - RNA, 19 nt, Artificial Sequence
  Description of Artificial Sequence: Synthetic oligonucleotide
ucaagcucuggagacuacg

SEQ ID NO: 3221959 - RNA, 19 nt, Artificial Sequence
  Description of Artificial Sequence: Synthetic oligonucleotide
ggaaaugggagagaugagg

SEQ ID NO: 3221960 - RNA, 19 nt, Artificial Sequence
  Description of Artificial Sequence: Synthetic oligonucleotide
guaaagugguacccaaagc

SEQ ID NO: 3221961 - RNA, 19 nt, Artificial Sequence
  Description of Artificial Sequence: Synthetic oligonucleotide
cucucuuuugcugucggcg

SEQ ID NO: 3221962 - RNA, 19 nt, Artificial Sequence
  Description of Artificial Sequence: Synthetic oligonucleotide
aguggccauuuccaucucc

SEQ ID NO: 3221963 - RNA, 19 nt, Artificial Sequence
  Description of Artificial Sequence: Synthetic oligonucleotide
uguguaaagugguacccaa

SEQ ID NO: 3221964 - RNA, 19 nt, Artificial Sequence
  Description of Artificial Sequence: Synthetic oligonucleotide
gaaaugggagagaugagga

SEQ ID NO: 3221965 - RNA, 19 nt, Artificial Sequence
  Description of Artificial Sequence: Synthetic oligonucleotide
uucaauguucaagcucugg

SEQ ID NO: 3221966 - RNA, 19 nt, Artificial Sequence
  Description of Artificial Sequence: Synthetic oligonucleotide
uacccaaagcggacaauag

SEQ ID NO: 3221967 - RNA, 19 nt, Artificial Sequence
  Description of Artificial Sequence: Synthetic oligonucleotide
uagcacaguggccauuucc

SEQ ID NO: 3221968 - RNA, 19 nt, Artificial Sequence
  Description of Artificial Sequence: Synthetic oligonucleotide
aaggacaggugauguuauc

SEQ ID NO: 3221969 - RNA, 19 nt, Artificial Sequence
  Description of Artificial Sequence: Synthetic oligonucleotide
gagaguggcauuuucccga

SEQ ID NO: 3221970 - RNA, 19 nt, Artificial Sequence
  Description of Artificial Sequence: Synthetic oligonucleotide
ucucuuuugcugucggcgc

SEQ ID NO: 3221971 - RNA, 19 nt, Artificial Sequence
  Description of Artificial Sequence: Synthetic oligonucleotide
ugauguuaucucucuuuug

SEQ ID NO: 3221972 - RNA, 19 nt, Artificial Sequence
  Description of Artificial Sequence: Synthetic oligonucleotide
auguccaggccucucaucu

SEQ ID NO: 3221973 - RNA, 19 nt, Artificial Sequence
  Description of Artificial Sequence: Synthetic oligonucleotide
ugcgucaccaggccacugg

SEQ ID NO: 3221974 - RNA, 19 nt, Artificial Sequence
  Description of Artificial Sequence: Synthetic oligonucleotide
caagcucuggagacuacgg

SEQ ID NO: 3221975 - RNA, 19 nt, Artificial Sequence
  Description of Artificial Sequence: Synthetic oligonucleotide
ucuccacugcgucaccagg

SEQ ID NO: 3221976 - RNA, 19 nt, Artificial Sequence
  Description of Artificial Sequence: Synthetic oligonucleotide
cuacacggagcucagugag

SEQ ID NO: 3221977 - RNA, 19 nt, Artificial Sequence
  Description of Artificial Sequence: Synthetic oligonucleotide
cugguugucuacacggagc

SEQ ID NO: 3221978 - RNA, 19 nt, Artificial Sequence
  Description of Artificial Sequence: Synthetic oligonucleotide
ugguauaaggacaggugau

SEQ ID NO: 3221979 - RNA, 19 nt, Artificial Sequence
  Description of Artificial Sequence: Synthetic oligonucleotide
gaaguuggauucaauguuc

SEQ ID NO: 3221980 - RNA, 19 nt, Artificial Sequence
  Description of Artificial Sequence: Synthetic oligonucleotide
gucuacacggagcucagug

SEQ ID NO: 3221981 - RNA, 19 nt, Artificial Sequence
  Description of Artificial Sequence: Synthetic oligonucleotide
guuguguaaagugguaccc

SEQ ID NO: 3221982 - RNA, 19 nt, Artificial Sequence
  Description of Artificial Sequence: Synthetic oligonucleotide
gaggaguuauauguccagg

SEQ ID NO: 3221983 - RNA, 19 nt, Artificial Sequence
  Description of Artificial Sequence: Synthetic oligonucleotide
ucuacacggagcucaguga

SEQ ID NO: 3221984 - RNA, 19 nt, Artificial Sequence
  Description of Artificial Sequence: Synthetic oligonucleotide
uuguuguguaaagugguac

SEQ ID NO: 3221985 - RNA, 19 nt, Artificial Sequence
  Description of Artificial Sequence: Synthetic oligonucleotide
aaaagggauuuuauuuacu

SEQ ID NO: 3221986 - RNA, 19 nt, Artificial Sequence
  Description of Artificial Sequence: Synthetic oligonucleotide
uuuccaucuccacugcguc

SEQ ID NO: 3221987 - RNA, 19 nt, Artificial Sequence
  Description of Artificial Sequence: Synthetic oligonucleotide
cugguauaaggacagguga

SEQ ID NO: 3221988 - RNA, 19 nt, Artificial Sequence
  Description of Artificial Sequence: Synthetic oligonucleotide
cccaaagcggacaauagag

SEQ ID NO: 3221989 - RNA, 19 nt, Artificial Sequence
  Description of Artificial Sequence: Synthetic oligonucleotide
aaagcggacaauagaggga

SEQ ID NO: 3221990 - RNA, 19 nt, Artificial Sequence
  Description of Artificial Sequence: Synthetic oligonucleotide
ggaguuauauguccaggcc

SEQ ID NO: 3221991 - RNA, 19 nt, Artificial Sequence
  Description of Artificial Sequence: Synthetic oligonucleotide
aauugaucaaccuucaauc

SEQ ID NO: 3221992 - RNA, 19 nt, Artificial Sequence
  Description of Artificial Sequence: Synthetic oligonucleotide
uauauauauauauauauau

SEQ ID NO: 3221993 - RNA, 19 nt, Artificial Sequence
  Description of Artificial Sequence: Synthetic oligonucleotide
uauauauauauauauuuca

SEQ ID NO: 3221994 - RNA, 19 nt, Artificial Sequence
  Description of Artificial Sequence: Synthetic oligonucleotide
cauauguauacacagauag

SEQ ID NO: 3221995 - RNA, 19 nt, Artificial Sequence
  Description of Artificial Sequence: Synthetic oligonucleotide
uauacauauauauauauau

SEQ ID NO: 3221996 - RNA, 19 nt, Artificial Sequence
  Description of Artificial Sequence: Synthetic oligonucleotide
aguaaagucagccugagga

SEQ ID NO: 3221997 - RNA, 19 nt, Artificial Sequence
  Description of Artificial Sequence: Synthetic oligonucleotide
uauauauauauauauauuu

SEQ ID NO: 3221998 - RNA, 19 nt, Artificial Sequence
  Description of Artificial Sequence: Synthetic oligonucleotide
auugauauauuauacauau

SEQ ID NO: 3221999 - RNA, 19 nt, Artificial Sequence
  Description of Artificial Sequence: Synthetic oligonucleotide
auauauauauauuucauau

SEQ ID NO: 3222000 - RNA, 19 nt, Artificial Sequence
  Description of Artificial Sequence: Synthetic oligonucleotide
gaugcugugagcaaguugg

SEQ ID NO: 3222001 - RNA, 19 nt, Artificial Sequence
  Description of Artificial Sequence: Synthetic oligonucleotide
gaggcaacaucuuaaaccg

SEQ ID NO: 3222002 - RNA, 19 nt, Artificial Sequence
  Description of Artificial Sequence: Synthetic oligonucleotide
cuuaaagucaaaagcagag

SEQ ID NO: 3222003 - RNA, 19 nt, Artificial Sequence
  Description of Artificial Sequence: Synthetic oligonucleotide
uuuacagugaacacugcag

SEQ ID NO: 3222004 - RNA, 19 nt, Artificial Sequence
  Description of Artificial Sequence: Synthetic oligonucleotide
uacauauauauauauauau

SEQ ID NO: 3222005 - RNA, 19 nt, Artificial Sequence
  Description of Artificial Sequence: Synthetic oligonucleotide
aacuaccaugucuaugucc

SEQ ID NO: 3222006 - RNA, 19 nt, Artificial Sequence
  Description of Artificial Sequence: Synthetic oligonucleotide
aaauugaucaaccuucaau

SEQ ID NO: 3222007 - RNA, 19 nt, Artificial Sequence
  Description of Artificial Sequence: Synthetic oligonucleotide
aaauaccuacucuacauga

SEQ ID NO: 3222008 - RNA, 19 nt, Artificial Sequence
  Description of Artificial Sequence: Synthetic oligonucleotide
uuauacaggacuuggaccu

SEQ ID NO: 3222009 - RNA, 19 nt, Artificial Sequence
  Description of Artificial Sequence: Synthetic oligonucleotide
uagcucaucauuuugcucc

SEQ ID NO: 3222010 - RNA, 19 nt, Artificial Sequence
  Description of Artificial Sequence: Synthetic oligonucleotide
auuauacauauauauauau

SEQ ID NO: 3222011 - RNA, 19 nt, Artificial Sequence
  Description of Artificial Sequence: Synthetic oligonucleotide
auauauauauauauauuuc

SEQ ID NO: 3222012 - RNA, 19 nt, Artificial Sequence
  Description of Artificial Sequence: Synthetic oligonucleotide
cacugauuuacacacaagg

SEQ ID NO: 3222013 - RNA, 19 nt, Artificial Sequence
  Description of Artificial Sequence: Synthetic oligonucleotide
aaaauaccuacucuacaug

SEQ ID NO: 3222014 - RNA, 19 nt, Artificial Sequence
  Description of Artificial Sequence: Synthetic oligonucleotide
uaagauguccuacuugacc

SEQ ID NO: 3222015 - RNA, 19 nt, Artificial Sequence
  Description of Artificial Sequence: Synthetic oligonucleotide
uacucuacaugauagaaaa

SEQ ID NO: 3222016 - RNA, 19 nt, Artificial Sequence
  Description of Artificial Sequence: Synthetic oligonucleotide
uauaaccagcccaaacugg

SEQ ID NO: 3222017 - RNA, 19 nt, Artificial Sequence
  Description of Artificial Sequence: Synthetic oligonucleotide
aagugaguuccauagucag

SEQ ID NO: 3222018 - RNA, 19 nt, Artificial Sequence
  Description of Artificial Sequence: Synthetic oligonucleotide
cacacauacacacacacac

SEQ ID NO: 3222019 - RNA, 19 nt, Artificial Sequence
  Description of Artificial Sequence: Synthetic oligonucleotide
uauauauauauauuucaua

SEQ ID NO: 3222020 - RNA, 19 nt, Artificial Sequence
  Description of Artificial Sequence: Synthetic oligonucleotide
aaccagcccaaacuggggc

SEQ ID NO: 3222021 - RNA, 19 nt, Artificial Sequence
  Description of Artificial Sequence: Synthetic oligonucleotide
acugauuuacacacaaggc

SEQ ID NO: 3222022 - RNA, 19 nt, Artificial Sequence
  Description of Artificial Sequence: Synthetic oligonucleotide
uacacacacacacacacac

SEQ ID NO: 3222023 - RNA, 19 nt, Artificial Sequence
  Description of Artificial Sequence: Synthetic oligonucleotide
gaccagaucccacauaugc

SEQ ID NO: 3222024 - RNA, 19 nt, Artificial Sequence
  Description of Artificial Sequence: Synthetic oligonucleotide
cauacacacacacacacac

SEQ ID NO: 3222025 - RNA, 19 nt, Artificial Sequence
  Description of Artificial Sequence: Synthetic oligonucleotide
ugucuuuccagaacuacca

SEQ ID NO: 3222026 - RNA, 19 nt, Artificial Sequence
  Description of Artificial Sequence: Synthetic oligonucleotide
uguggagucuauaaccagc

SEQ ID NO: 3222027 - RNA, 19 nt, Artificial Sequence
  Description of Artificial Sequence: Synthetic oligonucleotide
uuauacauauauauauaua

SEQ ID NO: 3222028 - RNA, 19 nt, Artificial Sequence
  Description of Artificial Sequence: Synthetic oligonucleotide
uccuacuugaccucuagga

SEQ ID NO: 3222029 - RNA, 19 nt, Artificial Sequence
  Description of Artificial Sequence: Synthetic oligonucleotide
uacacagauaguuuucucu

SEQ ID NO: 3222030 - RNA, 19 nt, Artificial Sequence
  Description of Artificial Sequence: Synthetic oligonucleotide
uccaguauugauauauuau

SEQ ID NO: 3222031 - RNA, 19 nt, Artificial Sequence
  Description of Artificial Sequence: Synthetic oligonucleotide
uauugauauauuauacaua

SEQ ID NO: 3222032 - RNA, 19 nt, Artificial Sequence
  Description of Artificial Sequence: Synthetic oligonucleotide
ugaccucuaggauggaugg

SEQ ID NO: 3222033 - RNA, 19 nt, Artificial Sequence
  Description of Artificial Sequence: Synthetic oligonucleotide
agagucuggacaaagaaug

SEQ ID NO: 3222034 - RNA, 19 nt, Artificial Sequence
  Description of Artificial Sequence: Synthetic oligonucleotide
gaaauugaucuccuccugc

SEQ ID NO: 3222035 - RNA, 19 nt, Artificial Sequence
  Description of Artificial Sequence: Synthetic oligonucleotide
cacacacacacacacagcc

SEQ ID NO: 3222036 - RNA, 19 nt, Artificial Sequence
  Description of Artificial Sequence: Synthetic oligonucleotide
cacacacacacauacacac

SEQ ID NO: 3222037 - RNA, 19 nt, Artificial Sequence
  Description of Artificial Sequence: Synthetic oligonucleotide
ugacacaugggacaggauc

SEQ ID NO: 3222038 - RNA, 19 nt, Artificial Sequence
  Description of Artificial Sequence: Synthetic oligonucleotide
cauauauauauauauauau

SEQ ID NO: 3222039 - RNA, 19 nt, Artificial Sequence
  Description of Artificial Sequence: Synthetic oligonucleotide
gacuuaaagucaaaagcag

SEQ ID NO: 3222040 - RNA, 19 nt, Artificial Sequence
  Description of Artificial Sequence: Synthetic oligonucleotide
ucuuaaaccguaguguaga

SEQ ID NO: 3222041 - RNA, 19 nt, Artificial Sequence
  Description of Artificial Sequence: Synthetic oligonucleotide
uugaccucuaggauggaug

SEQ ID NO: 3222042 - RNA, 19 nt, Artificial Sequence
  Description of Artificial Sequence: Synthetic oligonucleotide
ugagagucuggacaaagaa

SEQ ID NO: 3222043 - RNA, 19 nt, Artificial Sequence
  Description of Artificial Sequence: Synthetic oligonucleotide
acacacacagccuauggug

SEQ ID NO: 3222044 - RNA, 19 nt, Artificial Sequence
  Description of Artificial Sequence: Synthetic oligonucleotide
cacacacacacacacauac

SEQ ID NO: 3222045 - RNA, 19 nt, Artificial Sequence
  Description of Artificial Sequence: Synthetic oligonucleotide
cacacacacacacacacag

SEQ ID NO: 3222046 - RNA, 19 nt, Artificial Sequence
  Description of Artificial Sequence: Synthetic oligonucleotide
uccauuuagcucaucauuu

SEQ ID NO: 3222047 - RNA, 19 nt, Artificial Sequence
  Description of Artificial Sequence: Synthetic oligonucleotide
ucaacaugagcacucuggu

SEQ ID NO: 3222048 - RNA, 19 nt, Artificial Sequence
  Description of Artificial Sequence: Synthetic oligonucleotide
caugcacacacacacacac

SEQ ID NO: 3222049 - RNA, 19 nt, Artificial Sequence
  Description of Artificial Sequence: Synthetic oligonucleotide
uguuucagaggccuagacu

SEQ ID NO: 3222050 - RNA, 19 nt, Artificial Sequence
  Description of Artificial Sequence: Synthetic oligonucleotide
cacauacacacacacacac

SEQ ID NO: 3222051 - RNA, 19 nt, Artificial Sequence
  Description of Artificial Sequence: Synthetic oligonucleotide
auugaucaaccuucaaucu

SEQ ID NO: 3222052 - RNA, 19 nt, Artificial Sequence
  Description of Artificial Sequence: Synthetic oligonucleotide
agagaaggaaauuuuguuu

SEQ ID NO: 3222053 - RNA, 19 nt, Artificial Sequence
  Description of Artificial Sequence: Synthetic oligonucleotide
cuauaaccagcccaaacug

SEQ ID NO: 3222054 - RNA, 19 nt, Artificial Sequence
  Description of Artificial Sequence: Synthetic oligonucleotide
auugguguguuucccagug

SEQ ID NO: 3222055 - RNA, 19 nt, Artificial Sequence
  Description of Artificial Sequence: Synthetic oligonucleotide
uacauucauacuugugugc

SEQ ID NO: 3222056 - RNA, 19 nt, Artificial Sequence
  Description of Artificial Sequence: Synthetic oligonucleotide
gucaacaugagcacucugg

SEQ ID NO: 3222057 - RNA, 19 nt, Artificial Sequence
  Description of Artificial Sequence: Synthetic oligonucleotide
ugcacacacacacacacau

SEQ ID NO: 3222058 - RNA, 19 nt, Artificial Sequence
  Description of Artificial Sequence: Synthetic oligonucleotide
cacacacacacacauacac

SEQ ID NO: 3222059 - RNA, 19 nt, Artificial Sequence
  Description of Artificial Sequence: Synthetic oligonucleotide
gagcugacgaguuacugug

SEQ ID NO: 3222060 - RNA, 19 nt, Artificial Sequence
  Description of Artificial Sequence: Synthetic oligonucleotide
aacuggggcuaagaugucc

SEQ ID NO: 3222061 - RNA, 19 nt, Artificial Sequence
  Description of Artificial Sequence: Synthetic oligonucleotide
gacacaugggacaggaucc

SEQ ID NO: 3222062 - RNA, 19 nt, Artificial Sequence
  Description of Artificial Sequence: Synthetic oligonucleotide
ugauugguguguuucccag

SEQ ID NO: 3222063 - RNA, 19 nt, Artificial Sequence
  Description of Artificial Sequence: Synthetic oligonucleotide
caggccacaagccuuauac

SEQ ID NO: 3222064 - RNA, 19 nt, Artificial Sequence
  Description of Artificial Sequence: Synthetic oligonucleotide
caaacuggggcuaagaugu

SEQ ID NO: 3222065 - RNA, 19 nt, Artificial Sequence
  Description of Artificial Sequence: Synthetic oligonucleotide
cacacacacacacacacac

SEQ ID NO: 3222066 - RNA, 19 nt, Artificial Sequence
  Description of Artificial Sequence: Synthetic oligonucleotide
cacacacacauacacacac

SEQ ID NO: 3222067 - RNA, 19 nt, Artificial Sequence
  Description of Artificial Sequence: Synthetic oligonucleotide
ugugugagagucuggacaa

SEQ ID NO: 3222068 - RNA, 19 nt, Artificial Sequence
  Description of Artificial Sequence: Synthetic oligonucleotide
auaaccagcccaaacuggg

SEQ ID NO: 3222069 - RNA, 19 nt, Artificial Sequence
  Description of Artificial Sequence: Synthetic oligonucleotide
cauacuugugugcacacuc

SEQ ID NO: 3222070 - RNA, 19 nt, Artificial Sequence
  Description of Artificial Sequence: Synthetic oligonucleotide
uccaccuaccuacucacca

SEQ ID NO: 3222071 - RNA, 19 nt, Artificial Sequence
  Description of Artificial Sequence: Synthetic oligonucleotide
auauauauauauauuucau

SEQ ID NO: 3222072 - RNA, 19 nt, Artificial Sequence
  Description of Artificial Sequence: Synthetic oligonucleotide
cucaugcacacacacacac

SEQ ID NO: 3222073 - RNA, 19 nt, Artificial Sequence
  Description of Artificial Sequence: Synthetic oligonucleotide
ucuggugggagaaggcuug

SEQ ID NO: 3222074 - RNA, 19 nt, Artificial Sequence
  Description of Artificial Sequence: Synthetic oligonucleotide
uuucccaaggcaguaaagu

SEQ ID NO: 3222075 - RNA, 19 nt, Artificial Sequence
  Description of Artificial Sequence: Synthetic oligonucleotide
cacacacauacacacacac

SEQ ID NO: 3222076 - RNA, 19 nt, Artificial Sequence
  Description of Artificial Sequence: Synthetic oligonucleotide
acuaccaugucuaugucca

SEQ ID NO: 3222077 - RNA, 19 nt, Artificial Sequence
  Description of Artificial Sequence: Synthetic oligonucleotide
guggcuccggaccagaucc

SEQ ID NO: 3222078 - RNA, 19 nt, Artificial Sequence
  Description of Artificial Sequence: Synthetic oligonucleotide
uugaucaaccuucaaucua

SEQ ID NO: 3222079 - RNA, 19 nt, Artificial Sequence
  Description of Artificial Sequence: Synthetic oligonucleotide
uuuucucucuggaaaguau

SEQ ID NO: 3222080 - RNA, 19 nt, Artificial Sequence
  Description of Artificial Sequence: Synthetic oligonucleotide
caugucaacaugagcacuc

SEQ ID NO: 3222081 - RNA, 19 nt, Artificial Sequence
  Description of Artificial Sequence: Synthetic oligonucleotide
aaaauugaucaaccuucaa

SEQ ID NO: 3222082 - RNA, 19 nt, Artificial Sequence
  Description of Artificial Sequence: Synthetic oligonucleotide
gaacuagcugcccuagccc

SEQ ID NO: 3222083 - RNA, 19 nt, Artificial Sequence
  Description of Artificial Sequence: Synthetic oligonucleotide
ugugagagucuggacaaag

SEQ ID NO: 3222084 - RNA, 19 nt, Artificial Sequence
  Description of Artificial Sequence: Synthetic oligonucleotide
uuaaaccguaguguagaag

SEQ ID NO: 3222085 - RNA, 19 nt, Artificial Sequence
  Description of Artificial Sequence: Synthetic oligonucleotide
auauauauauauauauaua

SEQ ID NO: 3222086 - RNA, 19 nt, Artificial Sequence
  Description of Artificial Sequence: Synthetic oligonucleotide
uaaccagcccaaacugggg

SEQ ID NO: 3222087 - RNA, 19 nt, Artificial Sequence
  Description of Artificial Sequence: Synthetic oligonucleotide
auauauauauauauauauu

SEQ ID NO: 3222088 - RNA, 19 nt, Artificial Sequence
  Description of Artificial Sequence: Synthetic oligonucleotide
accguaguguagaagguac

SEQ ID NO: 3222089 - RNA, 19 nt, Artificial Sequence
  Description of Artificial Sequence: Synthetic oligonucleotide
ucagaggccuagacuauug

SEQ ID NO: 3222090 - RNA, 19 nt, Artificial Sequence
  Description of Artificial Sequence: Synthetic oligonucleotide
agagacaggccacaagccu

SEQ ID NO: 3222091 - RNA, 19 nt, Artificial Sequence
  Description of Artificial Sequence: Synthetic oligonucleotide
aaaaguacaauacagcaca

SEQ ID NO: 3222092 - RNA, 19 nt, Artificial Sequence
  Description of Artificial Sequence: Synthetic oligonucleotide
uuuaauaaaagcaccauga

SEQ ID NO: 3222093 - RNA, 19 nt, Artificial Sequence
  Description of Artificial Sequence: Synthetic oligonucleotide
uuuaugaaugcacaaaucc

SEQ ID NO: 3222094 - RNA, 19 nt, Artificial Sequence
  Description of Artificial Sequence: Synthetic oligonucleotide
aauaaaaucacucuaucaa

SEQ ID NO: 3222095 - RNA, 19 nt, Artificial Sequence
  Description of Artificial Sequence: Synthetic oligonucleotide
augaagaccauauaaacac

SEQ ID NO: 3222096 - RNA, 19 nt, Artificial Sequence
  Description of Artificial Sequence: Synthetic oligonucleotide
uuaucuacaacacuaaucu

SEQ ID NO: 3222097 - RNA, 19 nt, Artificial Sequence
  Description of Artificial Sequence: Synthetic oligonucleotide
aauauuaguauccacauua

SEQ ID NO: 3222098 - RNA, 19 nt, Artificial Sequence
  Description of Artificial Sequence: Synthetic oligonucleotide
aaauauuggguuuagaaaa

SEQ ID NO: 3222099 - RNA, 19 nt, Artificial Sequence
  Description of Artificial Sequence: Synthetic oligonucleotide
aaagcagauauauggaccg

SEQ ID NO: 3222100 - RNA, 19 nt, Artificial Sequence
  Description of Artificial Sequence: Synthetic oligonucleotide
auuacuuauaaguaguguc

SEQ ID NO: 3222101 - RNA, 19 nt, Artificial Sequence
  Description of Artificial Sequence: Synthetic oligonucleotide
auuuaaaugguaucaacuc

SEQ ID NO: 3222102 - RNA, 19 nt, Artificial Sequence
  Description of Artificial Sequence: Synthetic oligonucleotide
uggaguuaaaauuaaaucu

SEQ ID NO: 3222103 - RNA, 19 nt, Artificial Sequence
  Description of Artificial Sequence: Synthetic oligonucleotide
augaccauaauauucacag

SEQ ID NO: 3222104 - RNA, 19 nt, Artificial Sequence
  Description of Artificial Sequence: Synthetic oligonucleotide
uaauacaugauaaacugga

SEQ ID NO: 3222105 - RNA, 19 nt, Artificial Sequence
  Description of Artificial Sequence: Synthetic oligonucleotide
aaaagcagauauauggacc

SEQ ID NO: 3222106 - RNA, 19 nt, Artificial Sequence
  Description of Artificial Sequence: Synthetic oligonucleotide
caauuauucagacacaagc

SEQ ID NO: 3222107 - RNA, 19 nt, Artificial Sequence
  Description of Artificial Sequence: Synthetic oligonucleotide
aauguuagauuacuaaacu

SEQ ID NO: 3222108 - RNA, 19 nt, Artificial Sequence
  Description of Artificial Sequence: Synthetic oligonucleotide
auggaguuaaaauuaaauc

SEQ ID NO: 3222109 - RNA, 19 nt, Artificial Sequence
  Description of Artificial Sequence: Synthetic oligonucleotide
uaauuaaaugaacucaaug

SEQ ID NO: 3222110 - RNA, 19 nt, Artificial Sequence
  Description of Artificial Sequence: Synthetic oligonucleotide
uaguuaaaggggaaaaggg

SEQ ID NO: 3222111 - RNA, 19 nt, Artificial Sequence
  Description of Artificial Sequence: Synthetic oligonucleotide
uauuuaauuuuccagauuu

SEQ ID NO: 3222112 - RNA, 19 nt, Artificial Sequence
  Description of Artificial Sequence: Synthetic oligonucleotide
uauaacagcaaugaaaugu

SEQ ID NO: 3222113 - RNA, 19 nt, Artificial Sequence
  Description of Artificial Sequence: Synthetic oligonucleotide
aaauaaaaucacucuauca

SEQ ID NO: 3222114 - RNA, 19 nt, Artificial Sequence
  Description of Artificial Sequence: Synthetic oligonucleotide
gauauauggaccguuauag

SEQ ID NO: 3222115 - RNA, 19 nt, Artificial Sequence
  Description of Artificial Sequence: Synthetic oligonucleotide
uccauguuaguuaaagggg

SEQ ID NO: 3222116 - RNA, 19 nt, Artificial Sequence
  Description of Artificial Sequence: Synthetic oligonucleotide
aguaacgacaacuuuauga

SEQ ID NO: 3222117 - RNA, 19 nt, Artificial Sequence
  Description of Artificial Sequence: Synthetic oligonucleotide
aaugugaagaccccaaacu

SEQ ID NO: 3222118 - RNA, 19 nt, Artificial Sequence
  Description of Artificial Sequence: Synthetic oligonucleotide
acuauuguaguucacuuag

SEQ ID NO: 3222119 - RNA, 19 nt, Artificial Sequence
  Description of Artificial Sequence: Synthetic oligonucleotide
aaugcuaaacaagagaccu

SEQ ID NO: 3222120 - RNA, 19 nt, Artificial Sequence
  Description of Artificial Sequence: Synthetic oligonucleotide
aacaugaagucacacaaca

SEQ ID NO: 3222121 - RNA, 19 nt, Artificial Sequence
  Description of Artificial Sequence: Synthetic oligonucleotide
ugcacuuauauacaaacac

SEQ ID NO: 3222122 - RNA, 19 nt, Artificial Sequence
  Description of Artificial Sequence: Synthetic oligonucleotide
uauaaaguuauuuaauuuu

SEQ ID NO: 3222123 - RNA, 19 nt, Artificial Sequence
  Description of Artificial Sequence: Synthetic oligonucleotide
auacuguucaucuuaguuc

SEQ ID NO: 3222124 - RNA, 19 nt, Artificial Sequence
  Description of Artificial Sequence: Synthetic oligonucleotide
uuuaaaugguaucaacuca

SEQ ID NO: 3222125 - RNA, 19 nt, Artificial Sequence
  Description of Artificial Sequence: Synthetic oligonucleotide
aaauauaaacaugaaguca

SEQ ID NO: 3222126 - RNA, 19 nt, Artificial Sequence
  Description of Artificial Sequence: Synthetic oligonucleotide
uuucaacauaauuaaauga

SEQ ID NO: 3222127 - RNA, 19 nt, Artificial Sequence
  Description of Artificial Sequence: Synthetic oligonucleotide
uuuugaauggugcuggucu

SEQ ID NO: 3222128 - RNA, 19 nt, Artificial Sequence
  Description of Artificial Sequence: Synthetic oligonucleotide
gaccaauacacucuuaaag

SEQ ID NO: 3222129 - RNA, 19 nt, Artificial Sequence
  Description of Artificial Sequence: Synthetic oligonucleotide
aauggucuggucucuuugc

SEQ ID NO: 3222130 - RNA, 19 nt, Artificial Sequence
  Description of Artificial Sequence: Synthetic oligonucleotide
ugagagaugaagacgaaga

SEQ ID NO: 3222131 - RNA, 19 nt, Artificial Sequence
  Description of Artificial Sequence: Synthetic oligonucleotide
uuaacuuagcaacacauua

SEQ ID NO: 3222132 - RNA, 19 nt, Artificial Sequence
  Description of Artificial Sequence: Synthetic oligonucleotide
aauacacucuuaaagauga

SEQ ID NO: 3222133 - RNA, 19 nt, Artificial Sequence
  Description of Artificial Sequence: Synthetic oligonucleotide
gaaaugcuaaacaagagac

SEQ ID NO: 3222134 - RNA, 19 nt, Artificial Sequence
  Description of Artificial Sequence: Synthetic oligonucleotide
uggaguuucauucugaauu

SEQ ID NO: 3222135 - RNA, 19 nt, Artificial Sequence
  Description of Artificial Sequence: Synthetic oligonucleotide
aaacuaauguuagugaugu

SEQ ID NO: 3222136 - RNA, 19 nt, Artificial Sequence
  Description of Artificial Sequence: Synthetic oligonucleotide
uuacuuauaaguagugucu

SEQ ID NO: 3222137 - RNA, 19 nt, Artificial Sequence
  Description of Artificial Sequence: Synthetic oligonucleotide
uucuugaauuuguacaacg

SEQ ID NO: 3222138 - RNA, 19 nt, Artificial Sequence
  Description of Artificial Sequence: Synthetic oligonucleotide
uaugcacuuauauacaaac

SEQ ID NO: 3222139 - RNA, 19 nt, Artificial Sequence
  Description of Artificial Sequence: Synthetic oligonucleotide
auuuauacaugugaccagc

SEQ ID NO: 3222140 - RNA, 19 nt, Artificial Sequence
  Description of Artificial Sequence: Synthetic oligonucleotide
uaauuuuccagauuuguaa

SEQ ID NO: 3222141 - RNA, 19 nt, Artificial Sequence
  Description of Artificial Sequence: Synthetic oligonucleotide
uuuauacugauucucaauu

SEQ ID NO: 3222142 - RNA, 19 nt, Artificial Sequence
  Description of Artificial Sequence: Synthetic oligonucleotide
aucagcaucauguuaaaca

SEQ ID NO: 3222143 - RNA, 19 nt, Artificial Sequence
  Description of Artificial Sequence: Synthetic oligonucleotide
ugaaauucugaucugcagu

SEQ ID NO: 3222144 - RNA, 19 nt, Artificial Sequence
  Description of Artificial Sequence: Synthetic oligonucleotide
aaguauuucaacauaauua

SEQ ID NO: 3222145 - RNA, 19 nt, Artificial Sequence
  Description of Artificial Sequence: Synthetic oligonucleotide
cuuagauuccaauuugggc

SEQ ID NO: 3222146 - RNA, 19 nt, Artificial Sequence
  Description of Artificial Sequence: Synthetic oligonucleotide
ucagcauuccuauaaauaa

SEQ ID NO: 3222147 - RNA, 19 nt, Artificial Sequence
  Description of Artificial Sequence: Synthetic oligonucleotide
aaaugcuaaacaagagacc

SEQ ID NO: 3222148 - RNA, 19 nt, Artificial Sequence
  Description of Artificial Sequence: Synthetic oligonucleotide
cuuaaagcaaaguaacgac

SEQ ID NO: 3222149 - RNA, 19 nt, Artificial Sequence
  Description of Artificial Sequence: Synthetic oligonucleotide
uuaugaaugcacaaauccu

SEQ ID NO: 3222150 - RNA, 19 nt, Artificial Sequence
  Description of Artificial Sequence: Synthetic oligonucleotide
uagacaauuuuauacuuug

SEQ ID NO: 3222151 - RNA, 19 nt, Artificial Sequence
  Description of Artificial Sequence: Synthetic oligonucleotide
uuggguucuguacauaugc

SEQ ID NO: 3222152 - RNA, 19 nt, Artificial Sequence
  Description of Artificial Sequence: Synthetic oligonucleotide
uaagagacguuuaagugac

SEQ ID NO: 3222153 - RNA, 19 nt, Artificial Sequence
  Description of Artificial Sequence: Synthetic oligonucleotide
uaaacuaauguuagugaug

SEQ ID NO: 3222154 - RNA, 19 nt, Artificial Sequence
  Description of Artificial Sequence: Synthetic oligonucleotide
aaaguuuugcauuucuaaa

SEQ ID NO: 3222155 - RNA, 19 nt, Artificial Sequence
  Description of Artificial Sequence: Synthetic oligonucleotide
aaugaaauguuagauuacu

SEQ ID NO: 3222156 - RNA, 19 nt, Artificial Sequence
  Description of Artificial Sequence: Synthetic oligonucleotide
aagucuauaugcauuauca

SEQ ID NO: 3222157 - RNA, 19 nt, Artificial Sequence
  Description of Artificial Sequence: Synthetic oligonucleotide
uuuuccacugcacagaauu

SEQ ID NO: 3222158 - RNA, 19 nt, Artificial Sequence
  Description of Artificial Sequence: Synthetic oligonucleotide
auuaucuacaacacuaauc

SEQ ID NO: 3222159 - RNA, 19 nt, Artificial Sequence
  Description of Artificial Sequence: Synthetic oligonucleotide
aacgacaacuuuaugaaug

SEQ ID NO: 3222160 - RNA, 19 nt, Artificial Sequence
  Description of Artificial Sequence: Synthetic oligonucleotide
aaguuuugcauuucuaaau

SEQ ID NO: 3222161 - RNA, 19 nt, Artificial Sequence
  Description of Artificial Sequence: Synthetic oligonucleotide
cauuauaaauuuuaaagaa

SEQ ID NO: 3222162 - RNA, 19 nt, Artificial Sequence
  Description of Artificial Sequence: Synthetic oligonucleotide
aaagucugccuucaguuca

SEQ ID NO: 3222163 - RNA, 19 nt, Artificial Sequence
  Description of Artificial Sequence: Synthetic oligonucleotide
acgacaacuuuaugaaugc

SEQ ID NO: 3222164 - RNA, 19 nt, Artificial Sequence
  Description of Artificial Sequence: Synthetic oligonucleotide
uuagguuuuagccuuucac

SEQ ID NO: 3222165 - RNA, 19 nt, Artificial Sequence
  Description of Artificial Sequence: Synthetic oligonucleotide
auuacaaaagugaauagga

SEQ ID NO: 3222166 - RNA, 19 nt, Artificial Sequence
  Description of Artificial Sequence: Synthetic oligonucleotide
aauaaggucacagaauaaa

SEQ ID NO: 3222167 - RNA, 19 nt, Artificial Sequence
  Description of Artificial Sequence: Synthetic oligonucleotide
uauauggaccguuauagaa

SEQ ID NO: 3222168 - RNA, 19 nt, Artificial Sequence
  Description of Artificial Sequence: Synthetic oligonucleotide
uuacccuuugacaaggcug

SEQ ID NO: 3222169 - RNA, 19 nt, Artificial Sequence
  Description of Artificial Sequence: Synthetic oligonucleotide
uacugaaaucuuuauagac

SEQ ID NO: 3222170 - RNA, 19 nt, Artificial Sequence
  Description of Artificial Sequence: Synthetic oligonucleotide
gauuguguuaguuuugcuc

SEQ ID NO: 3222171 - RNA, 19 nt, Artificial Sequence
  Description of Artificial Sequence: Synthetic oligonucleotide
gaaauauuggguuuagaaa

SEQ ID NO: 3222172 - RNA, 19 nt, Artificial Sequence
  Description of Artificial Sequence: Synthetic oligonucleotide
aauggaguuaaaauuaaau

SEQ ID NO: 3222173 - RNA, 19 nt, Artificial Sequence
  Description of Artificial Sequence: Synthetic oligonucleotide
uuuaauuuuccagauuugu

SEQ ID NO: 3222174 - RNA, 19 nt, Artificial Sequence
  Description of Artificial Sequence: Synthetic oligonucleotide
aauacacuacauaucuggg

SEQ ID NO: 3222175 - RNA, 19 nt, Artificial Sequence
  Description of Artificial Sequence: Synthetic oligonucleotide
aaguacaauacagcacacc

SEQ ID NO: 3222176 - RNA, 19 nt, Artificial Sequence
  Description of Artificial Sequence: Synthetic oligonucleotide
uacuguucaucuuaguucu

SEQ ID NO: 3222177 - RNA, 19 nt, Artificial Sequence
  Description of Artificial Sequence: Synthetic oligonucleotide
caagguguaagaacuauug

SEQ ID NO: 3222178 - RNA, 19 nt, Artificial Sequence
  Description of Artificial Sequence: Synthetic oligonucleotide
ugacuuauaaaggacaaaa

SEQ ID NO: 3222179 - RNA, 19 nt, Artificial Sequence
  Description of Artificial Sequence: Synthetic oligonucleotide
cacugcacagaauuuaagg

SEQ ID NO: 3222180 - RNA, 19 nt, Artificial Sequence
  Description of Artificial Sequence: Synthetic oligonucleotide
aacagcaaugaaauguuag

SEQ ID NO: 3222181 - RNA, 19 nt, Artificial Sequence
  Description of Artificial Sequence: Synthetic oligonucleotide
cauguugcauuguauacag

SEQ ID NO: 3222182 - RNA, 19 nt, Artificial Sequence
  Description of Artificial Sequence: Synthetic oligonucleotide
cuaauguuagugauguaac

SEQ ID NO: 3222183 - RNA, 19 nt, Artificial Sequence
  Description of Artificial Sequence: Synthetic oligonucleotide
uuuauacuuugaaacaaau

SEQ ID NO: 3222184 - RNA, 19 nt, Artificial Sequence
  Description of Artificial Sequence: Synthetic oligonucleotide
aaaaggggauuucauuucu

SEQ ID NO: 3222185 - RNA, 19 nt, Artificial Sequence
  Description of Artificial Sequence: Synthetic oligonucleotide
uuugugguggccacuacug

SEQ ID NO: 3222186 - RNA, 19 nt, Artificial Sequence
  Description of Artificial Sequence: Synthetic oligonucleotide
uuuuauacuuugaaacaaa

SEQ ID NO: 3222187 - RNA, 19 nt, Artificial Sequence
  Description of Artificial Sequence: Synthetic oligonucleotide
ucaauuauucagacacaag

SEQ ID NO: 3222188 - RNA, 19 nt, Artificial Sequence
  Description of Artificial Sequence: Synthetic oligonucleotide
auugcaaaacaauuaaguu

SEQ ID NO: 3222189 - RNA, 19 nt, Artificial Sequence
  Description of Artificial Sequence: Synthetic oligonucleotide
cucacaaaauauaaacaug

SEQ ID NO: 3222190 - RNA, 19 nt, Artificial Sequence
  Description of Artificial Sequence: Synthetic oligonucleotide
acauuagguggcaaaaggc

SEQ ID NO: 3222191 - RNA, 19 nt, Artificial Sequence
  Description of Artificial Sequence: Synthetic oligonucleotide
uacaggaacaguuugaugg

SEQ ID NO: 3222192 - RNA, 19 nt, Artificial Sequence
  Description of Artificial Sequence: Synthetic oligonucleotide
auagaugaaauccuucucc

SEQ ID NO: 3222193 - RNA, 19 nt, Artificial Sequence
  Description of Artificial Sequence: Synthetic oligonucleotide
uucuucuucagucagaucu

SEQ ID NO: 3222194 - RNA, 19 nt, Artificial Sequence
  Description of Artificial Sequence: Synthetic oligonucleotide
auaaauucuucuuucuccc

SEQ ID NO: 3222195 - RNA, 19 nt, Artificial Sequence
  Description of Artificial Sequence: Synthetic oligonucleotide
aacaguuugaugguggacc

SEQ ID NO: 3222196 - RNA, 19 nt, Artificial Sequence
  Description of Artificial Sequence: Synthetic oligonucleotide
uuugacuucauauuccaag

SEQ ID NO: 3222197 - RNA, 19 nt, Artificial Sequence
  Description of Artificial Sequence: Synthetic oligonucleotide
uuuaaagacucauuuagcu

SEQ ID NO: 3222198 - RNA, 19 nt, Artificial Sequence
  Description of Artificial Sequence: Synthetic oligonucleotide
ucuucuaucucgaaguacc

SEQ ID NO: 3222199 - RNA, 19 nt, Artificial Sequence
  Description of Artificial Sequence: Synthetic oligonucleotide
ucaguagcaucuuugaucc

SEQ ID NO: 3222200 - RNA, 19 nt, Artificial Sequence
  Description of Artificial Sequence: Synthetic oligonucleotide
uaaagacucauuuagcucu

SEQ ID NO: 3222201 - RNA, 19 nt, Artificial Sequence
  Description of Artificial Sequence: Synthetic oligonucleotide
aacaagagccaucauuuuc

SEQ ID NO: 3222202 - RNA, 19 nt, Artificial Sequence
  Description of Artificial Sequence: Synthetic oligonucleotide
aaauucuucuuucucccuc

SEQ ID NO: 3222203 - RNA, 19 nt, Artificial Sequence
  Description of Artificial Sequence: Synthetic oligonucleotide
uccuuuuggaguucaaugg

SEQ ID NO: 3222204 - RNA, 19 nt, Artificial Sequence
  Description of Artificial Sequence: Synthetic oligonucleotide
ucaaacuucuuuaaagacu

SEQ ID NO: 3222205 - RNA, 19 nt, Artificial Sequence
  Description of Artificial Sequence: Synthetic oligonucleotide
acucauuuagcucuuugac

SEQ ID NO: 3222206 - RNA, 19 nt, Artificial Sequence
  Description of Artificial Sequence: Synthetic oligonucleotide
uagccauucaucuucuugg

SEQ ID NO: 3222207 - RNA, 19 nt, Artificial Sequence
  Description of Artificial Sequence: Synthetic oligonucleotide
ucuucuuucucccucaccu

SEQ ID NO: 3222208 - RNA, 19 nt, Artificial Sequence
  Description of Artificial Sequence: Synthetic oligonucleotide
uuuucuaucuccuuugcaa

SEQ ID NO: 3222209 - RNA, 19 nt, Artificial Sequence
  Description of Artificial Sequence: Synthetic oligonucleotide
ugaaguuccagcauaucca

SEQ ID NO: 3222210 - RNA, 19 nt, Artificial Sequence
  Description of Artificial Sequence: Synthetic oligonucleotide
ugcaauuuguacaggaaca

SEQ ID NO: 3222211 - RNA, 19 nt, Artificial Sequence
  Description of Artificial Sequence: Synthetic oligonucleotide
caaacuucuuuaaagacuc

SEQ ID NO: 3222212 - RNA, 19 nt, Artificial Sequence
  Description of Artificial Sequence: Synthetic oligonucleotide
uucuguauuacuuccuugc

SEQ ID NO: 3222213 - RNA, 19 nt, Artificial Sequence
  Description of Artificial Sequence: Synthetic oligonucleotide
agauaaauucuucuuucuc

SEQ ID NO: 3222214 - RNA, 19 nt, Artificial Sequence
  Description of Artificial Sequence: Synthetic oligonucleotide
accacgucauccuucaggc

SEQ ID NO: 3222215 - RNA, 19 nt, Artificial Sequence
  Description of Artificial Sequence: Synthetic oligonucleotide
cuugcgauaauguucuccc

SEQ ID NO: 3222216 - RNA, 19 nt, Artificial Sequence
  Description of Artificial Sequence: Synthetic oligonucleotide
auauccaguuucuugauca

SEQ ID NO: 3222217 - RNA, 19 nt, Artificial Sequence
  Description of Artificial Sequence: Synthetic oligonucleotide
ucuauccuggaacugcagg

SEQ ID NO: 3222218 - RNA, 19 nt, Artificial Sequence
  Description of Artificial Sequence: Synthetic oligonucleotide
ugcaggagaagauaaauuc

SEQ ID NO: 3222219 - RNA, 19 nt, Artificial Sequence
  Description of Artificial Sequence: Synthetic oligonucleotide
cagcucagcaacaagagcc

SEQ ID NO: 3222220 - RNA, 19 nt, Artificial Sequence
  Description of Artificial Sequence: Synthetic oligonucleotide
uggguuuugccucugagcu

SEQ ID NO: 3222221 - RNA, 19 nt, Artificial Sequence
  Description of Artificial Sequence: Synthetic oligonucleotide
ucuguauuacuuccuugcg

SEQ ID NO: 3222222 - RNA, 19 nt, Artificial Sequence
  Description of Artificial Sequence: Synthetic oligonucleotide
ucauuuagcucuuugacuu

SEQ ID NO: 3222223 - RNA, 19 nt, Artificial Sequence
  Description of Artificial Sequence: Synthetic oligonucleotide
aagauaaauucuucuuucu

SEQ ID NO: 3222224 - RNA, 19 nt, Artificial Sequence
  Description of Artificial Sequence: Synthetic oligonucleotide
ucuucagucagaucuuucc

SEQ ID NO: 3222225 - RNA, 19 nt, Artificial Sequence
  Description of Artificial Sequence: Synthetic oligonucleotide
uugcucauagaugaaaucc

SEQ ID NO: 3222226 - RNA, 19 nt, Artificial Sequence
  Description of Artificial Sequence: Synthetic oligonucleotide
uuuuggaguucaaugguca

SEQ ID NO: 3222227 - RNA, 19 nt, Artificial Sequence
  Description of Artificial Sequence: Synthetic oligonucleotide
uuuugguagccauucaucu

SEQ ID NO: 3222228 - RNA, 19 nt, Artificial Sequence
  Description of Artificial Sequence: Synthetic oligonucleotide
uguauuacuuccuugcgau

SEQ ID NO: 3222229 - RNA, 19 nt, Artificial Sequence
  Description of Artificial Sequence: Synthetic oligonucleotide
cuuuaaagacucauuuagc

SEQ ID NO: 3222230 - RNA, 19 nt, Artificial Sequence
  Description of Artificial Sequence: Synthetic oligonucleotide
uccuuugcaauuuguacag

SEQ ID NO: 3222231 - RNA, 19 nt, Artificial Sequence
  Description of Artificial Sequence: Synthetic oligonucleotide
uggaguucaauggucaggg

SEQ ID NO: 3222232 - RNA, 19 nt, Artificial Sequence
  Description of Artificial Sequence: Synthetic oligonucleotide
aguaccuucuagccagucc

SEQ ID NO: 3222233 - RNA, 19 nt, Artificial Sequence
  Description of Artificial Sequence: Synthetic oligonucleotide
uugaugguggaccacguca

SEQ ID NO: 3222234 - RNA, 19 nt, Artificial Sequence
  Description of Artificial Sequence: Synthetic oligonucleotide
ucauggacagcucagcaac

SEQ ID NO: 3222235 - RNA, 19 nt, Artificial Sequence
  Description of Artificial Sequence: Synthetic oligonucleotide
ucucguauuucucuguugu

SEQ ID NO: 3222236 - RNA, 19 nt, Artificial Sequence
  Description of Artificial Sequence: Synthetic oligonucleotide
cugaaguuccagcauaucc

SEQ ID NO: 3222237 - RNA, 19 nt, Artificial Sequence
  Description of Artificial Sequence: Synthetic oligonucleotide
uuucucaguagcaucuuug

SEQ ID NO: 3222238 - RNA, 19 nt, Artificial Sequence
  Description of Artificial Sequence: Synthetic oligonucleotide
gucacuugcucauagauga

SEQ ID NO: 3222239 - RNA, 19 nt, Artificial Sequence
  Description of Artificial Sequence: Synthetic oligonucleotide
uugcaauuuguacaggaac

SEQ ID NO: 3222240 - RNA, 19 nt, Artificial Sequence
  Description of Artificial Sequence: Synthetic oligonucleotide
ucaucuucuuggcuaagag

SEQ ID NO: 3222241 - RNA, 19 nt, Artificial Sequence
  Description of Artificial Sequence: Synthetic oligonucleotide
agcauauccaguuucuuga

SEQ ID NO: 3222242 - RNA, 19 nt, Artificial Sequence
  Description of Artificial Sequence: Synthetic oligonucleotide
ucuaucucgaaguaccuuc

SEQ ID NO: 3222243 - RNA, 19 nt, Artificial Sequence
  Description of Artificial Sequence: Synthetic oligonucleotide
uuccuugcgauaauguucu

SEQ ID NO: 3222244 - RNA, 19 nt, Artificial Sequence
  Description of Artificial Sequence: Synthetic oligonucleotide
uuaaagacucauuuagcuc

SEQ ID NO: 3222245 - RNA, 19 nt, Artificial Sequence
  Description of Artificial Sequence: Synthetic oligonucleotide
cucaguagcaucuuugauc

SEQ ID NO: 3222246 - RNA, 19 nt, Artificial Sequence
  Description of Artificial Sequence: Synthetic oligonucleotide
uugacuucauauuccaaga

SEQ ID NO: 3222247 - RNA, 19 nt, Artificial Sequence
  Description of Artificial Sequence: Synthetic oligonucleotide
uguuucauggacagcucag

SEQ ID NO: 3222248 - RNA, 19 nt, Artificial Sequence
  Description of Artificial Sequence: Synthetic oligonucleotide
uucuuuuccaucucuauuu

SEQ ID NO: 3222249 - RNA, 19 nt, Artificial Sequence
  Description of Artificial Sequence: Synthetic oligonucleotide
ucucgaaguaccuucuagc

SEQ ID NO: 3222250 - RNA, 19 nt, Artificial Sequence
  Description of Artificial Sequence: Synthetic oligonucleotide
aauuuguacaggaacaguu

SEQ ID NO: 3222251 - RNA, 19 nt, Artificial Sequence
  Description of Artificial Sequence: Synthetic oligonucleotide
uuucccuggaaugaagcgg

SEQ ID NO: 3222252 - RNA, 19 nt, Artificial Sequence
  Description of Artificial Sequence: Synthetic oligonucleotide
ucuuugacuucauauucca

SEQ ID NO: 3222253 - RNA, 19 nt, Artificial Sequence
  Description of Artificial Sequence: Synthetic oligonucleotide
uugguagccauucaucuuc

SEQ ID NO: 3222254 - RNA, 19 nt, Artificial Sequence
  Description of Artificial Sequence: Synthetic oligonucleotide
ucuccuuugcaauuuguac

SEQ ID NO: 3222255 - RNA, 19 nt, Artificial Sequence
  Description of Artificial Sequence: Synthetic oligonucleotide
uucucuguuguagugguag

SEQ ID NO: 3222256 - RNA, 19 nt, Artificial Sequence
  Description of Artificial Sequence: Synthetic oligonucleotide
aguguguccuccuugcaag

SEQ ID NO: 3222257 - RNA, 19 nt, Artificial Sequence
  Description of Artificial Sequence: Synthetic oligonucleotide
uuuguucucaaacuucuuu

SEQ ID NO: 3222258 - RNA, 19 nt, Artificial Sequence
  Description of Artificial Sequence: Synthetic oligonucleotide
uucauauuccaagacagaa

SEQ ID NO: 3222259 - RNA, 19 nt, Artificial Sequence
  Description of Artificial Sequence: Synthetic oligonucleotide
ucguauuucucuguuguag

SEQ ID NO: 3222260 - RNA, 19 nt, Artificial Sequence
  Description of Artificial Sequence: Synthetic oligonucleotide
agcugcuucugcuuggacg

SEQ ID NO: 3222261 - RNA, 19 nt, Artificial Sequence
  Description of Artificial Sequence: Synthetic oligonucleotide
cucgaaguaccuucuagcc

SEQ ID NO: 3222262 - RNA, 19 nt, Artificial Sequence
  Description of Artificial Sequence: Synthetic oligonucleotide
uagaugaaauccuucucca

SEQ ID NO: 3222263 - RNA, 19 nt, Artificial Sequence
  Description of Artificial Sequence: Synthetic oligonucleotide
ugcucauagaugaaauccu

SEQ ID NO: 3222264 - RNA, 19 nt, Artificial Sequence
  Description of Artificial Sequence: Synthetic oligonucleotide
uuugcaauuuguacaggaa

SEQ ID NO: 3222265 - RNA, 19 nt, Artificial Sequence
  Description of Artificial Sequence: Synthetic oligonucleotide
uuucauggacagcucagca

SEQ ID NO: 3222266 - RNA, 19 nt, Artificial Sequence
  Description of Artificial Sequence: Synthetic oligonucleotide
aguaacuucuccuccuucu

SEQ ID NO: 3222267 - RNA, 19 nt, Artificial Sequence
  Description of Artificial Sequence: Synthetic oligonucleotide
aguuugaugguggaccacg

SEQ ID NO: 3222268 - RNA, 19 nt, Artificial Sequence
  Description of Artificial Sequence: Synthetic oligonucleotide
cuggaauuccagcagcucc

SEQ ID NO: 3222269 - RNA, 19 nt, Artificial Sequence
  Description of Artificial Sequence: Synthetic oligonucleotide
uauuacuuccuugcgauaa

SEQ ID NO: 3222270 - RNA, 19 nt, Artificial Sequence
  Description of Artificial Sequence: Synthetic oligonucleotide
uuucuugaucauuucuucu

SEQ ID NO: 3222271 - RNA, 19 nt, Artificial Sequence
  Description of Artificial Sequence: Synthetic oligonucleotide
ucauauuccaagacagaau

SEQ ID NO: 3222272 - RNA, 19 nt, Artificial Sequence
  Description of Artificial Sequence: Synthetic oligonucleotide
gucagggcuuguuucaugg

SEQ ID NO: 3222273 - RNA, 19 nt, Artificial Sequence
  Description of Artificial Sequence: Synthetic oligonucleotide
cuccuuuuggaguucaaug

SEQ ID NO: 3222274 - RNA, 19 nt, Artificial Sequence
  Description of Artificial Sequence: Synthetic oligonucleotide
uucuagccaguccuucucg

SEQ ID NO: 3222275 - RNA, 19 nt, Artificial Sequence
  Description of Artificial Sequence: Synthetic oligonucleotide
uccaguuucuugaucauuu

SEQ ID NO: 3222276 - RNA, 19 nt, Artificial Sequence
  Description of Artificial Sequence: Synthetic oligonucleotide
agccauucaucuucuuggc

SEQ ID NO: 3222277 - RNA, 19 nt, Artificial Sequence
  Description of Artificial Sequence: Synthetic oligonucleotide
uauuccaagacagaauuuu

SEQ ID NO: 3222278 - RNA, 19 nt, Artificial Sequence
  Description of Artificial Sequence: Synthetic oligonucleotide
ucagucagaucuuucccug

SEQ ID NO: 3222279 - RNA, 19 nt, Artificial Sequence
  Description of Artificial Sequence: Synthetic oligonucleotide
augaagcggacuuuguucu

SEQ ID NO: 3222280 - RNA, 19 nt, Artificial Sequence
  Description of Artificial Sequence: Synthetic oligonucleotide
uuguacaggaacaguuuga

SEQ ID NO: 3222281 - RNA, 19 nt, Artificial Sequence
  Description of Artificial Sequence: Synthetic oligonucleotide
uuguuucauggacagcuca

SEQ ID NO: 3222282 - RNA, 19 nt, Artificial Sequence
  Description of Artificial Sequence: Synthetic oligonucleotide
uuucuauccuggaacugca

SEQ ID NO: 3222283 - RNA, 19 nt, Artificial Sequence
  Description of Artificial Sequence: Synthetic oligonucleotide
auuucucuguuguaguggu

SEQ ID NO: 3222284 - RNA, 19 nt, Artificial Sequence
  Description of Artificial Sequence: Synthetic oligonucleotide
uucuccaguaacuucuccu

SEQ ID NO: 3222285 - RNA, 19 nt, Artificial Sequence
  Description of Artificial Sequence: Synthetic oligonucleotide
ucuguuguagugguaggcc

SEQ ID NO: 3222286 - RNA, 19 nt, Artificial Sequence
  Description of Artificial Sequence: Synthetic oligonucleotide
ucauuuucucaguagcauc

SEQ ID NO: 3222287 - RNA, 19 nt, Artificial Sequence
  Description of Artificial Sequence: Synthetic oligonucleotide
ucgaaguaccuucuagcca

SEQ ID NO: 3222288 - RNA, 19 nt, Artificial Sequence
  Description of Artificial Sequence: Synthetic oligonucleotide
uucuuuaaagacucauuua

SEQ ID NO: 3222289 - RNA, 19 nt, Artificial Sequence
  Description of Artificial Sequence: Synthetic oligonucleotide
caucuucuuggcuaagagc

SEQ ID NO: 3222290 - RNA, 19 nt, Artificial Sequence
  Description of Artificial Sequence: Synthetic oligonucleotide
uucucaguagcaucuuuga

SEQ ID NO: 3222291 - RNA, 19 nt, Artificial Sequence
  Description of Artificial Sequence: Synthetic oligonucleotide
uuaacauagacacaccugg

SEQ ID NO: 3222292 - RNA, 19 nt, Artificial Sequence
  Description of Artificial Sequence: Synthetic oligonucleotide
aaacgugaugcucagaaac

SEQ ID NO: 3222293 - RNA, 19 nt, Artificial Sequence
  Description of Artificial Sequence: Synthetic oligonucleotide
gauauuugugaucaaaucc

SEQ ID NO: 3222294 - RNA, 19 nt, Artificial Sequence
  Description of Artificial Sequence: Synthetic oligonucleotide
auggaaaauucucugaggc

SEQ ID NO: 3222295 - RNA, 19 nt, Artificial Sequence
  Description of Artificial Sequence: Synthetic oligonucleotide
uguuaaaaugguaaggaug

SEQ ID NO: 3222296 - RNA, 19 nt, Artificial Sequence
  Description of Artificial Sequence: Synthetic oligonucleotide
uuggaagugaucuucaucc

SEQ ID NO: 3222297 - RNA, 19 nt, Artificial Sequence
  Description of Artificial Sequence: Synthetic oligonucleotide
agagccaagaaguugcucc

SEQ ID NO: 3222298 - RNA, 19 nt, Artificial Sequence
  Description of Artificial Sequence: Synthetic oligonucleotide
gauacuucaggucuaaggc

SEQ ID NO: 3222299 - RNA, 19 nt, Artificial Sequence
  Description of Artificial Sequence: Synthetic oligonucleotide
cauaccacuacuuauauuc

SEQ ID NO: 3222300 - RNA, 19 nt, Artificial Sequence
  Description of Artificial Sequence: Synthetic oligonucleotide
caaaauaugacuucccagc

SEQ ID NO: 3222301 - RNA, 19 nt, Artificial Sequence
  Description of Artificial Sequence: Synthetic oligonucleotide
gauacauuccacaucaucc

SEQ ID NO: 3222302 - RNA, 19 nt, Artificial Sequence
  Description of Artificial Sequence: Synthetic oligonucleotide
ucaagagccaagaaguugc

SEQ ID NO: 3222303 - RNA, 19 nt, Artificial Sequence
  Description of Artificial Sequence: Synthetic oligonucleotide
aaaaugguaaggaugagca

SEQ ID NO: 3222304 - RNA, 19 nt, Artificial Sequence
  Description of Artificial Sequence: Synthetic oligonucleotide
ugucggauaauucaaugag

SEQ ID NO: 3222305 - RNA, 19 nt, Artificial Sequence
  Description of Artificial Sequence: Synthetic oligonucleotide
uuggguaaaacacagaauu

SEQ ID NO: 3222306 - RNA, 19 nt, Artificial Sequence
  Description of Artificial Sequence: Synthetic oligonucleotide
uaagcuuugggccugagaa

SEQ ID NO: 3222307 - RNA, 19 nt, Artificial Sequence
  Description of Artificial Sequence: Synthetic oligonucleotide
uucauguuauaaaugcucc

SEQ ID NO: 3222308 - RNA, 19 nt, Artificial Sequence
  Description of Artificial Sequence: Synthetic oligonucleotide
uuugguucauucccaaagg

SEQ ID NO: 3222309 - RNA, 19 nt, Artificial Sequence
  Description of Artificial Sequence: Synthetic oligonucleotide
auuaugagaccguagacca

SEQ ID NO: 3222310 - RNA, 19 nt, Artificial Sequence
  Description of Artificial Sequence: Synthetic oligonucleotide
agauauuugugaucaaauc

SEQ ID NO: 3222311 - RNA, 19 nt, Artificial Sequence
  Description of Artificial Sequence: Synthetic oligonucleotide
uugaaauugaaaagaucag

SEQ ID NO: 3222312 - RNA, 19 nt, Artificial Sequence
  Description of Artificial Sequence: Synthetic oligonucleotide
ucaucauuuggguaaaaca

SEQ ID NO: 3222313 - RNA, 19 nt, Artificial Sequence
  Description of Artificial Sequence: Synthetic oligonucleotide
aauuaauccaccugggguu

SEQ ID NO: 3222314 - RNA, 19 nt, Artificial Sequence
  Description of Artificial Sequence: Synthetic oligonucleotide
uaagaugggcuucagauau

SEQ ID NO: 3222315 - RNA, 19 nt, Artificial Sequence
  Description of Artificial Sequence: Synthetic oligonucleotide
uauucguaaacuuggucag

SEQ ID NO: 3222316 - RNA, 19 nt, Artificial Sequence
  Description of Artificial Sequence: Synthetic oligonucleotide
aagaaguugcuccagugca

SEQ ID NO: 3222317 - RNA, 19 nt, Artificial Sequence
  Description of Artificial Sequence: Synthetic oligonucleotide
ucggauaauucaaugaggu

SEQ ID NO: 3222318 - RNA, 19 nt, Artificial Sequence
  Description of Artificial Sequence: Synthetic oligonucleotide
aauaaacgcugcuacuuug

SEQ ID NO: 3222319 - RNA, 19 nt, Artificial Sequence
  Description of Artificial Sequence: Synthetic oligonucleotide
aacaguauggagagagugc

SEQ ID NO: 3222320 - RNA, 19 nt, Artificial Sequence
  Description of Artificial Sequence: Synthetic oligonucleotide
caagauuuuacucaguuga

SEQ ID NO: 3222321 - RNA, 19 nt, Artificial Sequence
  Description of Artificial Sequence: Synthetic oligonucleotide
gagguugcauaauacagag

SEQ ID NO: 3222322 - RNA, 19 nt, Artificial Sequence
  Description of Artificial Sequence: Synthetic oligonucleotide
ucuacuugccauauuuacc

SEQ ID NO: 3222323 - RNA, 19 nt, Artificial Sequence
  Description of Artificial Sequence: Synthetic oligonucleotide
agugauguugacuagcaga

SEQ ID NO: 3222324 - RNA, 19 nt, Artificial Sequence
  Description of Artificial Sequence: Synthetic oligonucleotide
aaggcaagcagcuccacug

SEQ ID NO: 3222325 - RNA, 19 nt, Artificial Sequence
  Description of Artificial Sequence: Synthetic oligonucleotide
uagucguuauaccugauac

SEQ ID NO: 3222326 - RNA, 19 nt, Artificial Sequence
  Description of Artificial Sequence: Synthetic oligonucleotide
acaguauggagagagugcc

SEQ ID NO: 3222327 - RNA, 19 nt, Artificial Sequence
  Description of Artificial Sequence: Synthetic oligonucleotide
cauauuuaccccaaaugac

SEQ ID NO: 3222328 - RNA, 19 nt, Artificial Sequence
  Description of Artificial Sequence: Synthetic oligonucleotide
aaugccaccaguccuauua

SEQ ID NO: 3222329 - RNA, 19 nt, Artificial Sequence
  Description of Artificial Sequence: Synthetic oligonucleotide
auuguuaaaaugguaagga

SEQ ID NO: 3222330 - RNA, 19 nt, Artificial Sequence
  Description of Artificial Sequence: Synthetic oligonucleotide
ugaaugacaauuucccaca

SEQ ID NO: 3222331 - RNA, 19 nt, Artificial Sequence
  Description of Artificial Sequence: Synthetic oligonucleotide
uauaccugauacuucaggu

SEQ ID NO: 3222332 - RNA, 19 nt, Artificial Sequence
  Description of Artificial Sequence: Synthetic oligonucleotide
ugacuagcagagucgaugg

SEQ ID NO: 3222333 - RNA, 19 nt, Artificial Sequence
  Description of Artificial Sequence: Synthetic oligonucleotide
gagaaagacaucauucucc

SEQ ID NO: 3222334 - RNA, 19 nt, Artificial Sequence
  Description of Artificial Sequence: Synthetic oligonucleotide
ugcaaaauaugacuuccca

SEQ ID NO: 3222335 - RNA, 19 nt, Artificial Sequence
  Description of Artificial Sequence: Synthetic oligonucleotide
aaggaagggaggcucauca

SEQ ID NO: 3222336 - RNA, 19 nt, Artificial Sequence
  Description of Artificial Sequence: Synthetic oligonucleotide
aaagcaaguccaucauguc

SEQ ID NO: 3222337 - RNA, 19 nt, Artificial Sequence
  Description of Artificial Sequence: Synthetic oligonucleotide
uaaaaugguaaggaugagc

SEQ ID NO: 3222338 - RNA, 19 nt, Artificial Sequence
  Description of Artificial Sequence: Synthetic oligonucleotide
aagcaaguccaucaugucu

SEQ ID NO: 3222339 - RNA, 19 nt, Artificial Sequence
  Description of Artificial Sequence: Synthetic oligonucleotide
ucuaaggccuaagaagugg

SEQ ID NO: 3222340 - RNA, 19 nt, Artificial Sequence
  Description of Artificial Sequence: Synthetic oligonucleotide
uugguuuacgauacauucc

SEQ ID NO: 3222341 - RNA, 19 nt, Artificial Sequence
  Description of Artificial Sequence: Synthetic oligonucleotide
cuuaacauagacacaccug

SEQ ID NO: 3222342 - RNA, 19 nt, Artificial Sequence
  Description of Artificial Sequence: Synthetic oligonucleotide
ugacguaagccgaagcugc

SEQ ID NO: 3222343 - RNA, 19 nt, Artificial Sequence
  Description of Artificial Sequence: Synthetic oligonucleotide
cauuaugagaccguagacc

SEQ ID NO: 3222344 - RNA, 19 nt, Artificial Sequence
  Description of Artificial Sequence: Synthetic oligonucleotide
agugggaaggaacaguaug

SEQ ID NO: 3222345 - RNA, 19 nt, Artificial Sequence
  Description of Artificial Sequence: Synthetic oligonucleotide
auaccugauacuucagguc

SEQ ID NO: 3222346 - RNA, 19 nt, Artificial Sequence
  Description of Artificial Sequence: Synthetic oligonucleotide
agaaaauuaaaggcaagca

SEQ ID NO: 3222347 - RNA, 19 nt, Artificial Sequence
  Description of Artificial Sequence: Synthetic oligonucleotide
gauuuuacucaguugaaua

SEQ ID NO: 3222348 - RNA, 19 nt, Artificial Sequence
  Description of Artificial Sequence: Synthetic oligonucleotide
cauggaaaauucucugagg

SEQ ID NO: 3222349 - RNA, 19 nt, Artificial Sequence
  Description of Artificial Sequence: Synthetic oligonucleotide
auuuuacucaguugaauau

SEQ ID NO: 3222350 - RNA, 19 nt, Artificial Sequence
  Description of Artificial Sequence: Synthetic oligonucleotide
agaccguagaccauggcgc

SEQ ID NO: 3222351 - RNA, 19 nt, Artificial Sequence
  Description of Artificial Sequence: Synthetic oligonucleotide
cuaguagucguuauaccug

SEQ ID NO: 3222352 - RNA, 19 nt, Artificial Sequence
  Description of Artificial Sequence: Synthetic oligonucleotide
ugagaaagacaucauucuc

SEQ ID NO: 3222353 - RNA, 19 nt, Artificial Sequence
  Description of Artificial Sequence: Synthetic oligonucleotide
aaauccacgugaaaggccu

SEQ ID NO: 3222354 - RNA, 19 nt, Artificial Sequence
  Description of Artificial Sequence: Synthetic oligonucleotide
uuugaguucauagcugccc

SEQ ID NO: 3222355 - RNA, 19 nt, Artificial Sequence
  Description of Artificial Sequence: Synthetic oligonucleotide
aauuaaaggcaagcagcuc

SEQ ID NO: 3222356 - RNA, 19 nt, Artificial Sequence
  Description of Artificial Sequence: Synthetic oligonucleotide
guugcuccagugcacaagg

SEQ ID NO: 3222357 - RNA, 19 nt, Artificial Sequence
  Description of Artificial Sequence: Synthetic oligonucleotide
uuggugcuguggcauaucg

SEQ ID NO: 3222358 - RNA, 19 nt, Artificial Sequence
  Description of Artificial Sequence: Synthetic oligonucleotide
ugggcuucagauauuugug

SEQ ID NO: 3222359 - RNA, 19 nt, Artificial Sequence
  Description of Artificial Sequence: Synthetic oligonucleotide
ucaugcugcaaaauaugac

SEQ ID NO: 3222360 - RNA, 19 nt, Artificial Sequence
  Description of Artificial Sequence: Synthetic oligonucleotide
ucaguggaggacccgagug

SEQ ID NO: 3222361 - RNA, 19 nt, Artificial Sequence
  Description of Artificial Sequence: Synthetic oligonucleotide
uucucugaggccaucaaua

SEQ ID NO: 3222362 - RNA, 19 nt, Artificial Sequence
  Description of Artificial Sequence: Synthetic oligonucleotide
augucuugggcucuuaagu

SEQ ID NO: 3222363 - RNA, 19 nt, Artificial Sequence
  Description of Artificial Sequence: Synthetic oligonucleotide
cucuuuggagccuaauagc

SEQ ID NO: 3222364 - RNA, 19 nt, Artificial Sequence
  Description of Artificial Sequence: Synthetic oligonucleotide
auacauuccacaucauccu

SEQ ID NO: 3222365 - RNA, 19 nt, Artificial Sequence
  Description of Artificial Sequence: Synthetic oligonucleotide
gaacaguauggagagagug

SEQ ID NO: 3222366 - RNA, 19 nt, Artificial Sequence
  Description of Artificial Sequence: Synthetic oligonucleotide
aaaacaacagggccccuaa

SEQ ID NO: 3222367 - RNA, 19 nt, Artificial Sequence
  Description of Artificial Sequence: Synthetic oligonucleotide
ucucugaggccaucaauag

SEQ ID NO: 3222368 - RNA, 19 nt, Artificial Sequence
  Description of Artificial Sequence: Synthetic oligonucleotide
cucuacuugccauauuuac

SEQ ID NO: 3222369 - RNA, 19 nt, Artificial Sequence
  Description of Artificial Sequence: Synthetic oligonucleotide
ucauguuauaaaugcucca

SEQ ID NO: 3222370 - RNA, 19 nt, Artificial Sequence
  Description of Artificial Sequence: Synthetic oligonucleotide
uggaacagugggaaggaac

SEQ ID NO: 3222371 - RNA, 19 nt, Artificial Sequence
  Description of Artificial Sequence: Synthetic oligonucleotide
gaggauacaugcgaccagg

SEQ ID NO: 3222372 - RNA, 19 nt, Artificial Sequence
  Description of Artificial Sequence: Synthetic oligonucleotide
aguauggagagagugccag

SEQ ID NO: 3222373 - RNA, 19 nt, Artificial Sequence
  Description of Artificial Sequence: Synthetic oligonucleotide
ugguaauucauggcgagcu

SEQ ID NO: 3222374 - RNA, 19 nt, Artificial Sequence
  Description of Artificial Sequence: Synthetic oligonucleotide
acgugaugcucagaaaccc

SEQ ID NO: 3222375 - RNA, 19 nt, Artificial Sequence
  Description of Artificial Sequence: Synthetic oligonucleotide
uggucuaaaugccaccagu

SEQ ID NO: 3222376 - RNA, 19 nt, Artificial Sequence
  Description of Artificial Sequence: Synthetic oligonucleotide
aauggcugucggauaauuc

SEQ ID NO: 3222377 - RNA, 19 nt, Artificial Sequence
  Description of Artificial Sequence: Synthetic oligonucleotide
uuguuaaaaugguaaggau

SEQ ID NO: 3222378 - RNA, 19 nt, Artificial Sequence
  Description of Artificial Sequence: Synthetic oligonucleotide
auagugggcacugaacauc

SEQ ID NO: 3222379 - RNA, 19 nt, Artificial Sequence
  Description of Artificial Sequence: Synthetic oligonucleotide
uaguagucguuauaccuga

SEQ ID NO: 3222380 - RNA, 19 nt, Artificial Sequence
  Description of Artificial Sequence: Synthetic oligonucleotide
uucguaaacuuggucagug

SEQ ID NO: 3222381 - RNA, 19 nt, Artificial Sequence
  Description of Artificial Sequence: Synthetic oligonucleotide
caagaagcggaaucgauga

SEQ ID NO: 3222382 - RNA, 19 nt, Artificial Sequence
  Description of Artificial Sequence: Synthetic oligonucleotide
gcucuuuggagccuaauag

SEQ ID NO: 3222383 - RNA, 19 nt, Artificial Sequence
  Description of Artificial Sequence: Synthetic oligonucleotide
cuggcagccacaaaauuuc

SEQ ID NO: 3222384 - RNA, 19 nt, Artificial Sequence
  Description of Artificial Sequence: Synthetic oligonucleotide
gaccagacacauuugguuc

SEQ ID NO: 3222385 - RNA, 19 nt, Artificial Sequence
  Description of Artificial Sequence: Synthetic oligonucleotide
uccgcucucaacaucaguu

SEQ ID NO: 3222386 - RNA, 19 nt, Artificial Sequence
  Description of Artificial Sequence: Synthetic oligonucleotide
aauacucguucugucucuc

SEQ ID NO: 3222387 - RNA, 19 nt, Artificial Sequence
  Description of Artificial Sequence: Synthetic oligonucleotide
uaacauagacacaccugga

SEQ ID NO: 3222388 - RNA, 19 nt, Artificial Sequence
  Description of Artificial Sequence: Synthetic oligonucleotide
caugcgggcaaugugcugg

SEQ ID NO: 3222389 - RNA, 19 nt, Artificial Sequence
  Description of Artificial Sequence: Synthetic oligonucleotide
gcaaaauaugacuucccag

SEQ ID NO: 3222390 - RNA, 19 nt, Artificial Sequence
  Description of Artificial Sequence: Synthetic oligonucleotide
gucggauaauucaaugagg

SEQ ID NO: 3222391 - RNA, 19 nt, Artificial Sequence
  Description of Artificial Sequence: Synthetic oligonucleotide
aacauuucuuguuagauac

SEQ ID NO: 3222392 - RNA, 19 nt, Artificial Sequence
  Description of Artificial Sequence: Synthetic oligonucleotide
aacaauaucagucuggaca

SEQ ID NO: 3222393 - RNA, 19 nt, Artificial Sequence
  Description of Artificial Sequence: Synthetic oligonucleotide
aaaaccaacaauaucaguc

SEQ ID NO: 3222394 - RNA, 19 nt, Artificial Sequence
  Description of Artificial Sequence: Synthetic oligonucleotide
guuagauacaaacugaacc

SEQ ID NO: 3222395 - RNA, 19 nt, Artificial Sequence
  Description of Artificial Sequence: Synthetic oligonucleotide
acaucauugaguuagaaga

SEQ ID NO: 3222396 - RNA, 19 nt, Artificial Sequence
  Description of Artificial Sequence: Synthetic oligonucleotide
uauguuucaagacagacuc

SEQ ID NO: 3222397 - RNA, 19 nt, Artificial Sequence
  Description of Artificial Sequence: Synthetic oligonucleotide
ucuuguuagauacaaacug

SEQ ID NO: 3222398 - RNA, 19 nt, Artificial Sequence
  Description of Artificial Sequence: Synthetic oligonucleotide
aguuagaagaccauggucc

SEQ ID NO: 3222399 - RNA, 19 nt, Artificial Sequence
  Description of Artificial Sequence: Synthetic oligonucleotide
ucuuauguagucaaggcug

SEQ ID NO: 3222400 - RNA, 19 nt, Artificial Sequence
  Description of Artificial Sequence: Synthetic oligonucleotide
uuagauacaaacugaacca

SEQ ID NO: 3222401 - RNA, 19 nt, Artificial Sequence
  Description of Artificial Sequence: Synthetic oligonucleotide
uagaacaucauugaguuag

SEQ ID NO: 3222402 - RNA, 19 nt, Artificial Sequence
  Description of Artificial Sequence: Synthetic oligonucleotide
uguaacauccccacuaucc

SEQ ID NO: 3222403 - RNA, 19 nt, Artificial Sequence
  Description of Artificial Sequence: Synthetic oligonucleotide
aagacagacucuuauguag

SEQ ID NO: 3222404 - RNA, 19 nt, Artificial Sequence
  Description of Artificial Sequence: Synthetic oligonucleotide
uugaguuagaagaccaugg

SEQ ID NO: 3222405 - RNA, 19 nt, Artificial Sequence
  Description of Artificial Sequence: Synthetic oligonucleotide
uuucuuguuagauacaaac

SEQ ID NO: 3222406 - RNA, 19 nt, Artificial Sequence
  Description of Artificial Sequence: Synthetic oligonucleotide
ugaacuuuggaucacaaua

SEQ ID NO: 3222407 - RNA, 19 nt, Artificial Sequence
  Description of Artificial Sequence: Synthetic oligonucleotide
aaaccuguaacauccccac

SEQ ID NO: 3222408 - RNA, 19 nt, Artificial Sequence
  Description of Artificial Sequence: Synthetic oligonucleotide
aacaucauugaguuagaag

SEQ ID NO: 3222409 - RNA, 19 nt, Artificial Sequence
  Description of Artificial Sequence: Synthetic oligonucleotide
uacaaacugaaccaguagc

SEQ ID NO: 3222410 - RNA, 19 nt, Artificial Sequence
  Description of Artificial Sequence: Synthetic oligonucleotide
uauaaagagggaaacauuu

SEQ ID NO: 3222411 - RNA, 19 nt, Artificial Sequence
  Description of Artificial Sequence: Synthetic oligonucleotide
uaucagucuggacagaaag

SEQ ID NO: 3222412 - RNA, 19 nt, Artificial Sequence
  Description of Artificial Sequence: Synthetic oligonucleotide
aaaccaacaauaucagucu

SEQ ID NO: 3222413 - RNA, 19 nt, Artificial Sequence
  Description of Artificial Sequence: Synthetic oligonucleotide
aauccaaaccuguaacauc

SEQ ID NO: 3222414 - RNA, 19 nt, Artificial Sequence
  Description of Artificial Sequence: Synthetic oligonucleotide
agacagauccuauaaagag

SEQ ID NO: 3222415 - RNA, 19 nt, Artificial Sequence
  Description of Artificial Sequence: Synthetic oligonucleotide
uucucuguuacacugugcc

SEQ ID NO: 3222416 - RNA, 19 nt, Artificial Sequence
  Description of Artificial Sequence: Synthetic oligonucleotide
acucuuauguagucaaggc

SEQ ID NO: 3222417 - RNA, 19 nt, Artificial Sequence
  Description of Artificial Sequence: Synthetic oligonucleotide
acaauaucagucuggacag

SEQ ID NO: 3222418 - RNA, 19 nt, Artificial Sequence
  Description of Artificial Sequence: Synthetic oligonucleotide
ucaagacagacucuuaugu

SEQ ID NO: 3222419 - RNA, 19 nt, Artificial Sequence
  Description of Artificial Sequence: Synthetic oligonucleotide
uaaagagggaaacauuucu

SEQ ID NO: 3222420 - RNA, 19 nt, Artificial Sequence
  Description of Artificial Sequence: Synthetic oligonucleotide
auuauguuucaagacagac

SEQ ID NO: 3222421 - RNA, 19 nt, Artificial Sequence
  Description of Artificial Sequence: Synthetic oligonucleotide
aagagggaaacauuucuug

SEQ ID NO: 3222422 - RNA, 19 nt, Artificial Sequence
  Description of Artificial Sequence: Synthetic oligonucleotide
aauacuucucuccauccca

SEQ ID NO: 3222423 - RNA, 19 nt, Artificial Sequence
  Description of Artificial Sequence: Synthetic oligonucleotide
caagacagauccuauaaag

SEQ ID NO: 3222424 - RNA, 19 nt, Artificial Sequence
  Description of Artificial Sequence: Synthetic oligonucleotide
ucuagaacaucauugaguu

SEQ ID NO: 3222425 - RNA, 19 nt, Artificial Sequence
  Description of Artificial Sequence: Synthetic oligonucleotide
uucuagaacaucauugagu

SEQ ID NO: 3222426 - RNA, 19 nt, Artificial Sequence
  Description of Artificial Sequence: Synthetic oligonucleotide
acaauacuucucuccaucc

SEQ ID NO: 3222427 - RNA, 19 nt, Artificial Sequence
  Description of Artificial Sequence: Synthetic oligonucleotide
auccaaaccuguaacaucc

SEQ ID NO: 3222428 - RNA, 19 nt, Artificial Sequence
  Description of Artificial Sequence: Synthetic oligonucleotide
ugugccauuauguuucaag

SEQ ID NO: 3222429 - RNA, 19 nt, Artificial Sequence
  Description of Artificial Sequence: Synthetic oligonucleotide
uguaaauccaaaccuguaa

SEQ ID NO: 3222430 - RNA, 19 nt, Artificial Sequence
  Description of Artificial Sequence: Synthetic oligonucleotide
aagaccaugguccuucugu

SEQ ID NO: 3222431 - RNA, 19 nt, Artificial Sequence
  Description of Artificial Sequence: Synthetic oligonucleotide
acagauccuauaaagaggg

SEQ ID NO: 3222432 - RNA, 19 nt, Artificial Sequence
  Description of Artificial Sequence: Synthetic oligonucleotide
ccuucugucaccaagacag

SEQ ID NO: 3222433 - RNA, 19 nt, Artificial Sequence
  Description of Artificial Sequence: Synthetic oligonucleotide
cuuuggaucacaauacuuc

SEQ ID NO: 3222434 - RNA, 19 nt, Artificial Sequence
  Description of Artificial Sequence: Synthetic oligonucleotide
gaucacaauacuucucucc

SEQ ID NO: 3222435 - RNA, 19 nt, Artificial Sequence
  Description of Artificial Sequence: Synthetic oligonucleotide
ucauugaguuagaagacca

SEQ ID NO: 3222436 - RNA, 19 nt, Artificial Sequence
  Description of Artificial Sequence: Synthetic oligonucleotide
uuauguuucaagacagacu

SEQ ID NO: 3222437 - RNA, 19 nt, Artificial Sequence
  Description of Artificial Sequence: Synthetic oligonucleotide
uggaucacaauacuucucu

SEQ ID NO: 3222438 - RNA, 19 nt, Artificial Sequence
  Description of Artificial Sequence: Synthetic oligonucleotide
agaaaguggugucagguug

SEQ ID NO: 3222439 - RNA, 19 nt, Artificial Sequence
  Description of Artificial Sequence: Synthetic oligonucleotide
agguuguaaauccaaaccu

SEQ ID NO: 3222440 - RNA, 19 nt, Artificial Sequence
  Description of Artificial Sequence: Synthetic oligonucleotide
aucauugaguuagaagacc

SEQ ID NO: 3222441 - RNA, 19 nt, Artificial Sequence
  Description of Artificial Sequence: Synthetic oligonucleotide
uucuuguuagauacaaacu

SEQ ID NO: 3222442 - RNA, 19 nt, Artificial Sequence
  Description of Artificial Sequence: Synthetic oligonucleotide
gacagauccuauaaagagg

SEQ ID NO: 3222443 - RNA, 19 nt, Artificial Sequence
  Description of Artificial Sequence: Synthetic oligonucleotide
cugucaccaagacagaucc

SEQ ID NO: 3222444 - RNA, 19 nt, Artificial Sequence
  Description of Artificial Sequence: Synthetic oligonucleotide
uuuggaucacaauacuucu

SEQ ID NO: 3222445 - RNA, 19 nt, Artificial Sequence
  Description of Artificial Sequence: Synthetic oligonucleotide
cagguuguaaauccaaacc

SEQ ID NO: 3222446 - RNA, 19 nt, Artificial Sequence
  Description of Artificial Sequence: Synthetic oligonucleotide
uaaauccaaaccuguaaca

SEQ ID NO: 3222447 - RNA, 19 nt, Artificial Sequence
  Description of Artificial Sequence: Synthetic oligonucleotide
uuacacugugccauuaugu

SEQ ID NO: 3222448 - RNA, 19 nt, Artificial Sequence
  Description of Artificial Sequence: Synthetic oligonucleotide
ucaaggcuggccuugaacu

SEQ ID NO: 3222449 - RNA, 19 nt, Artificial Sequence
  Description of Artificial Sequence: Synthetic oligonucleotide
guaaauccaaaccuguaac

SEQ ID NO: 3222450 - RNA, 19 nt, Artificial Sequence
  Description of Artificial Sequence: Synthetic oligonucleotide
gacucuuauguagucaagg

SEQ ID NO: 3222451 - RNA, 19 nt, Artificial Sequence
  Description of Artificial Sequence: Synthetic oligonucleotide
cuuauguagucaaggcugg

SEQ ID NO: 3222452 - RNA, 19 nt, Artificial Sequence
  Description of Artificial Sequence: Synthetic oligonucleotide
ucagucuggacagaaagug

SEQ ID NO: 3222453 - RNA, 19 nt, Artificial Sequence
  Description of Artificial Sequence: Synthetic oligonucleotide
uuguuagauacaaacugaa

SEQ ID NO: 3222454 - RNA, 19 nt, Artificial Sequence
  Description of Artificial Sequence: Synthetic oligonucleotide
aaacauuucuuguuagaua

SEQ ID NO: 3222455 - RNA, 19 nt, Artificial Sequence
  Description of Artificial Sequence: Synthetic oligonucleotide
uguuagauacaaacugaac

SEQ ID NO: 3222456 - RNA, 19 nt, Artificial Sequence
  Description of Artificial Sequence: Synthetic oligonucleotide
uuucaagacagacucuuau

SEQ ID NO: 3222457 - RNA, 19 nt, Artificial Sequence
  Description of Artificial Sequence: Synthetic oligonucleotide
ucagguuguaaauccaaac

SEQ ID NO: 3222458 - RNA, 19 nt, Artificial Sequence
  Description of Artificial Sequence: Synthetic oligonucleotide
aucacaauacuucucucca

SEQ ID NO: 3222459 - RNA, 19 nt, Artificial Sequence
  Description of Artificial Sequence: Synthetic oligonucleotide
aacuuuggaucacaauacu

SEQ ID NO: 3222460 - RNA, 19 nt, Artificial Sequence
  Description of Artificial Sequence: Synthetic oligonucleotide
aaacugaaccaguagcaaa

SEQ ID NO: 3222461 - RNA, 19 nt, Artificial Sequence
  Description of Artificial Sequence: Synthetic oligonucleotide
aaauccaaaccuguaacau

SEQ ID NO: 3222462 - RNA, 19 nt, Artificial Sequence
  Description of Artificial Sequence: Synthetic oligonucleotide
auacaaacugaaccaguag

SEQ ID NO: 3222463 - RNA, 19 nt, Artificial Sequence
  Description of Artificial Sequence: Synthetic oligonucleotide
ugaguuagaagaccauggu

SEQ ID NO: 3222464 - RNA, 19 nt, Artificial Sequence
  Description of Artificial Sequence: Synthetic oligonucleotide
uucaagacagacucuuaug

SEQ ID NO: 3222465 - RNA, 19 nt, Artificial Sequence
  Description of Artificial Sequence: Synthetic oligonucleotide
accaugguccuucugucac

SEQ ID NO: 3222466 - RNA, 19 nt, Artificial Sequence
  Description of Artificial Sequence: Synthetic oligonucleotide
gaacuuuggaucacaauac

SEQ ID NO: 3222467 - RNA, 19 nt, Artificial Sequence
  Description of Artificial Sequence: Synthetic oligonucleotide
aacauccccacuauccuuc

SEQ ID NO: 3222468 - RNA, 19 nt, Artificial Sequence
  Description of Artificial Sequence: Synthetic oligonucleotide
cuuguuagauacaaacuga

SEQ ID NO: 3222469 - RNA, 19 nt, Artificial Sequence
  Description of Artificial Sequence: Synthetic oligonucleotide
uagauacaaacugaaccag

SEQ ID NO: 3222470 - RNA, 19 nt, Artificial Sequence
  Description of Artificial Sequence: Synthetic oligonucleotide
aaccaacaauaucagucug

SEQ ID NO: 3222471 - RNA, 19 nt, Artificial Sequence
  Description of Artificial Sequence: Synthetic oligonucleotide
aguggugucagguuguaaa

SEQ ID NO: 3222472 - RNA, 19 nt, Artificial Sequence
  Description of Artificial Sequence: Synthetic oligonucleotide
cacugugccauuauguuuc

SEQ ID NO: 3222473 - RNA, 19 nt, Artificial Sequence
  Description of Artificial Sequence: Synthetic oligonucleotide
aagacagauccuauaaaga

SEQ ID NO: 3222474 - RNA, 19 nt, Artificial Sequence
  Description of Artificial Sequence: Synthetic oligonucleotide
auccuauaaagagggaaac

SEQ ID NO: 3222475 - RNA, 19 nt, Artificial Sequence
  Description of Artificial Sequence: Synthetic oligonucleotide
caucauugaguuagaagac

SEQ ID NO: 3222476 - RNA, 19 nt, Artificial Sequence
  Description of Artificial Sequence: Synthetic oligonucleotide
uggccuugaacuuuggauc

SEQ ID NO: 3222477 - RNA, 19 nt, Artificial Sequence
  Description of Artificial Sequence: Synthetic oligonucleotide
uucucuccaucccaggucu

SEQ ID NO: 3222478 - RNA, 19 nt, Artificial Sequence
  Description of Artificial Sequence: Synthetic oligonucleotide
auugaguuagaagaccaug

SEQ ID NO: 3222479 - RNA, 19 nt, Artificial Sequence
  Description of Artificial Sequence: Synthetic oligonucleotide
aauaucagucuggacagaa

SEQ ID NO: 3222480 - RNA, 19 nt, Artificial Sequence
  Description of Artificial Sequence: Synthetic oligonucleotide
ugguccuucugucaccaag

SEQ ID NO: 3222481 - RNA, 19 nt, Artificial Sequence
  Description of Artificial Sequence: Synthetic oligonucleotide
ggugucagguuguaaaucc

SEQ ID NO: 3222482 - RNA, 19 nt, Artificial Sequence
  Description of Artificial Sequence: Synthetic oligonucleotide
uauguagucaaggcuggcc

SEQ ID NO: 3222483 - RNA, 19 nt, Artificial Sequence
  Description of Artificial Sequence: Synthetic oligonucleotide
agagggaaacauuucuugu

SEQ ID NO: 3222484 - RNA, 19 nt, Artificial Sequence
  Description of Artificial Sequence: Synthetic oligonucleotide
auaaagagggaaacauuuc

SEQ ID NO: 3222485 - RNA, 19 nt, Artificial Sequence
  Description of Artificial Sequence: Synthetic oligonucleotide
auccuucucuguuacacug

SEQ ID NO: 3222486 - RNA, 19 nt, Artificial Sequence
  Description of Artificial Sequence: Synthetic oligonucleotide
ugccauuauguuucaagac

SEQ ID NO: 3222487 - RNA, 19 nt, Artificial Sequence
  Description of Artificial Sequence: Synthetic oligonucleotide
accaagacagauccuauaa

SEQ ID NO: 3222488 - RNA, 19 nt, Artificial Sequence
  Description of Artificial Sequence: Synthetic oligonucleotide
gaguuagaagaccaugguc

SEQ ID NO: 3222489 - RNA, 19 nt, Artificial Sequence
  Description of Artificial Sequence: Synthetic oligonucleotide
cuauccuucucuguuacac

SEQ ID NO: 3222490 - RNA, 19 nt, Artificial Sequence
  Description of Artificial Sequence: Synthetic oligonucleotide
ucugucaccaagacagauc

SEQ ID NO: 3222491 - RNA, 19 nt, Artificial Sequence
  Description of Artificial Sequence: Synthetic oligonucleotide
aauaugaacaucuuaaggg

SEQ ID NO: 3222492 - RNA, 19 nt, Artificial Sequence
  Description of Artificial Sequence: Synthetic oligonucleotide
aaaugauccaaauuccacc

SEQ ID NO: 3222493 - RNA, 19 nt, Artificial Sequence
  Description of Artificial Sequence: Synthetic oligonucleotide
aauuuugaaaugcuguuac

SEQ ID NO: 3222494 - RNA, 19 nt, Artificial Sequence
  Description of Artificial Sequence: Synthetic oligonucleotide
aaauaugaacaucuuaagg

SEQ ID NO: 3222495 - RNA, 19 nt, Artificial Sequence
  Description of Artificial Sequence: Synthetic oligonucleotide
auuaaaacaauaugcugcc

SEQ ID NO: 3222496 - RNA, 19 nt, Artificial Sequence
  Description of Artificial Sequence: Synthetic oligonucleotide
aaugaguacccauuauucc

SEQ ID NO: 3222497 - RNA, 19 nt, Artificial Sequence
  Description of Artificial Sequence: Synthetic oligonucleotide
aaaacauacauguauacau

SEQ ID NO: 3222498 - RNA, 19 nt, Artificial Sequence
  Description of Artificial Sequence: Synthetic oligonucleotide
aaugugcagguguagagac

SEQ ID NO: 3222499 - RNA, 19 nt, Artificial Sequence
  Description of Artificial Sequence: Synthetic oligonucleotide
uauauugagcacauaauca

SEQ ID NO: 3222500 - RNA, 19 nt, Artificial Sequence
  Description of Artificial Sequence: Synthetic oligonucleotide
auagugagugguuuuaagc

SEQ ID NO: 3222501 - RNA, 19 nt, Artificial Sequence
  Description of Artificial Sequence: Synthetic oligonucleotide
auaugaacaucuuaagggg

SEQ ID NO: 3222502 - RNA, 19 nt, Artificial Sequence
  Description of Artificial Sequence: Synthetic oligonucleotide
uacauuaaaacaauaugcu

SEQ ID NO: 3222503 - RNA, 19 nt, Artificial Sequence
  Description of Artificial Sequence: Synthetic oligonucleotide
cuaguuaagauuuuaagca

SEQ ID NO: 3222504 - RNA, 19 nt, Artificial Sequence
  Description of Artificial Sequence: Synthetic oligonucleotide
gauguuaugugguuauggg

SEQ ID NO: 3222505 - RNA, 19 nt, Artificial Sequence
  Description of Artificial Sequence: Synthetic oligonucleotide
uuaauugauggcaaagugu

SEQ ID NO: 3222506 - RNA, 19 nt, Artificial Sequence
  Description of Artificial Sequence: Synthetic oligonucleotide
uaauugauggcaaaguguc

SEQ ID NO: 3222507 - RNA, 19 nt, Artificial Sequence
  Description of Artificial Sequence: Synthetic oligonucleotide
agugcugcauccucgaagc

SEQ ID NO: 3222508 - RNA, 19 nt, Artificial Sequence
  Description of Artificial Sequence: Synthetic oligonucleotide
agaccuaggaaccugggac

SEQ ID NO: 3222509 - RNA, 19 nt, Artificial Sequence
  Description of Artificial Sequence: Synthetic oligonucleotide
  modified_base (15)..(15): a, c, u, g, unknown or other
  modified_base (19)..(19): a, c, u, g, unknown or other
aaagaagaaagaaanaaan

SEQ ID NO: 3222510 - RNA, 19 nt, Artificial Sequence
  Description of Artificial Sequence: Synthetic oligonucleotide
uuguauauugagcacauaa

SEQ ID NO: 3222511 - RNA, 19 nt, Artificial Sequence
  Description of Artificial Sequence: Synthetic oligonucleotide
aaggauaggaauuuugaaa

SEQ ID NO: 3222512 - RNA, 19 nt, Artificial Sequence
  Description of Artificial Sequence: Synthetic oligonucleotide
uaaauaugaacaucuuaag

SEQ ID NO: 3222513 - RNA, 19 nt, Artificial Sequence
  Description of Artificial Sequence: Synthetic oligonucleotide
uuuaagcaaauauacauua

SEQ ID NO: 3222514 - RNA, 19 nt, Artificial Sequence
  Description of Artificial Sequence: Synthetic oligonucleotide
uguagugagagacccagag

SEQ ID NO: 3222515 - RNA, 19 nt, Artificial Sequence
  Description of Artificial Sequence: Synthetic oligonucleotide
uuuaccuuggaguugccag

SEQ ID NO: 3222516 - RNA, 19 nt, Artificial Sequence
  Description of Artificial Sequence: Synthetic oligonucleotide
cuaaauaugaacaucuuaa

SEQ ID NO: 3222517 - RNA, 19 nt, Artificial Sequence
  Description of Artificial Sequence: Synthetic oligonucleotide
aaaauacaccaaucacagc

SEQ ID NO: 3222518 - RNA, 19 nt, Artificial Sequence
  Description of Artificial Sequence: Synthetic oligonucleotide
gauaggaauuuugaaaugc

SEQ ID NO: 3222519 - RNA, 19 nt, Artificial Sequence
  Description of Artificial Sequence: Synthetic oligonucleotide
aauaaccuaguuaagauuu

SEQ ID NO: 3222520 - RNA, 19 nt, Artificial Sequence
  Description of Artificial Sequence: Synthetic oligonucleotide
aggaacaagguccaaguuc

SEQ ID NO: 3222521 - RNA, 19 nt, Artificial Sequence
  Description of Artificial Sequence: Synthetic oligonucleotide
gugaaaaugaaacugcuuc

SEQ ID NO: 3222522 - RNA, 19 nt, Artificial Sequence
  Description of Artificial Sequence: Synthetic oligonucleotide
uaagccagggucauaaaca

SEQ ID NO: 3222523 - RNA, 19 nt, Artificial Sequence
  Description of Artificial Sequence: Synthetic oligonucleotide
gagcacauaaucauggcgg

SEQ ID NO: 3222524 - RNA, 19 nt, Artificial Sequence
  Description of Artificial Sequence: Synthetic oligonucleotide
ugccuaaauaugaacaucu

SEQ ID NO: 3222525 - RNA, 19 nt, Artificial Sequence
  Description of Artificial Sequence: Synthetic oligonucleotide
acauuaaaacaauaugcug

SEQ ID NO: 3222526 - RNA, 19 nt, Artificial Sequence
  Description of Artificial Sequence: Synthetic oligonucleotide
ggucauaagagauagugag

SEQ ID NO: 3222527 - RNA, 19 nt, Artificial Sequence
  Description of Artificial Sequence: Synthetic oligonucleotide
uuccaaugcaccaagugca

SEQ ID NO: 3222528 - RNA, 19 nt, Artificial Sequence
  Description of Artificial Sequence: Synthetic oligonucleotide
acgaucaaccucuacuggc

SEQ ID NO: 3222529 - RNA, 19 nt, Artificial Sequence
  Description of Artificial Sequence: Synthetic oligonucleotide
aaacacugucccuccaucg

SEQ ID NO: 3222530 - RNA, 19 nt, Artificial Sequence
  Description of Artificial Sequence: Synthetic oligonucleotide
uauuaaaugcgacauuuua

SEQ ID NO: 3222531 - RNA, 19 nt, Artificial Sequence
  Description of Artificial Sequence: Synthetic oligonucleotide
aaguauuauuaaaugcgac

SEQ ID NO: 3222532 - RNA, 19 nt, Artificial Sequence
  Description of Artificial Sequence: Synthetic oligonucleotide
agguaacagacucugagag

SEQ ID NO: 3222533 - RNA, 19 nt, Artificial Sequence
  Description of Artificial Sequence: Synthetic oligonucleotide
uguuaugugguuauggguu

SEQ ID NO: 3222534 - RNA, 19 nt, Artificial Sequence
  Description of Artificial Sequence: Synthetic oligonucleotide
ugaaaaugaaacugcuuca

SEQ ID NO: 3222535 - RNA, 19 nt, Artificial Sequence
  Description of Artificial Sequence: Synthetic oligonucleotide
aggauaggaauuuugaaau

SEQ ID NO: 3222536 - RNA, 19 nt, Artificial Sequence
  Description of Artificial Sequence: Synthetic oligonucleotide
cuggcauagaccuaggaac

SEQ ID NO: 3222537 - RNA, 19 nt, Artificial Sequence
  Description of Artificial Sequence: Synthetic oligonucleotide
ggucaaaugauccaaauuc

SEQ ID NO: 3222538 - RNA, 19 nt, Artificial Sequence
  Description of Artificial Sequence: Synthetic oligonucleotide
guauauugagcacauaauc

SEQ ID NO: 3222539 - RNA, 19 nt, Artificial Sequence
  Description of Artificial Sequence: Synthetic oligonucleotide
ugauguuaugugguuaugg

SEQ ID NO: 3222540 - RNA, 19 nt, Artificial Sequence
  Description of Artificial Sequence: Synthetic oligonucleotide
aacacugucccuccaucgg

SEQ ID NO: 3222541 - RNA, 19 nt, Artificial Sequence
  Description of Artificial Sequence: Synthetic oligonucleotide
ugcugccuaaauaugaaca

SEQ ID NO: 3222542 - RNA, 19 nt, Artificial Sequence
  Description of Artificial Sequence: Synthetic oligonucleotide
ugcuucuugaugauccagg

SEQ ID NO: 3222543 - RNA, 19 nt, Artificial Sequence
  Description of Artificial Sequence: Synthetic oligonucleotide
aguagguccaguaaucugg

SEQ ID NO: 3222544 - RNA, 19 nt, Artificial Sequence
  Description of Artificial Sequence: Synthetic oligonucleotide
aauuugacugcauuccaau

SEQ ID NO: 3222545 - RNA, 19 nt, Artificial Sequence
  Description of Artificial Sequence: Synthetic oligonucleotide
aucacgaucaaccucuacu

SEQ ID NO: 3222546 - RNA, 19 nt, Artificial Sequence
  Description of Artificial Sequence: Synthetic oligonucleotide
accuaguuaagauuuuaag

SEQ ID NO: 3222547 - RNA, 19 nt, Artificial Sequence
  Description of Artificial Sequence: Synthetic oligonucleotide
uguauauugagcacauaau

SEQ ID NO: 3222548 - RNA, 19 nt, Artificial Sequence
  Description of Artificial Sequence: Synthetic oligonucleotide
aggaugagcggacaguacg

SEQ ID NO: 3222549 - RNA, 19 nt, Artificial Sequence
  Description of Artificial Sequence: Synthetic oligonucleotide
aaaagugauguuauguggu

SEQ ID NO: 3222550 - RNA, 19 nt, Artificial Sequence
  Description of Artificial Sequence: Synthetic oligonucleotide
uccgaaacugcucaagcug

SEQ ID NO: 3222551 - RNA, 19 nt, Artificial Sequence
  Description of Artificial Sequence: Synthetic oligonucleotide
auauugagcacauaaucau

SEQ ID NO: 3222552 - RNA, 19 nt, Artificial Sequence
  Description of Artificial Sequence: Synthetic oligonucleotide
aagauuuuaagcaaauaua

SEQ ID NO: 3222553 - RNA, 19 nt, Artificial Sequence
  Description of Artificial Sequence: Synthetic oligonucleotide
ucucaggugauucaucacu

SEQ ID NO: 3222554 - RNA, 19 nt, Artificial Sequence
  Description of Artificial Sequence: Synthetic oligonucleotide
ccuaguuaagauuuuaagc

SEQ ID NO: 3222555 - RNA, 19 nt, Artificial Sequence
  Description of Artificial Sequence: Synthetic oligonucleotide
uuaagccagggucauaaac

SEQ ID NO: 3222556 - RNA, 19 nt, Artificial Sequence
  Description of Artificial Sequence: Synthetic oligonucleotide
accaaucacagccaaacca

SEQ ID NO: 3222557 - RNA, 19 nt, Artificial Sequence
  Description of Artificial Sequence: Synthetic oligonucleotide
ucacgaucaaccucuacug

SEQ ID NO: 3222558 - RNA, 19 nt, Artificial Sequence
  Description of Artificial Sequence: Synthetic oligonucleotide
aauugauggcaaagugucc

SEQ ID NO: 3222559 - RNA, 19 nt, Artificial Sequence
  Description of Artificial Sequence: Synthetic oligonucleotide
uuugaaaugcuguuacaaa

SEQ ID NO: 3222560 - RNA, 19 nt, Artificial Sequence
  Description of Artificial Sequence: Synthetic oligonucleotide
aauuccacgaggaaugagu

SEQ ID NO: 3222561 - RNA, 19 nt, Artificial Sequence
  Description of Artificial Sequence: Synthetic oligonucleotide
uaaucauggcggaaggaug

SEQ ID NO: 3222562 - RNA, 19 nt, Artificial Sequence
  Description of Artificial Sequence: Synthetic oligonucleotide
augaguacccauuauucca

SEQ ID NO: 3222563 - RNA, 19 nt, Artificial Sequence
  Description of Artificial Sequence: Synthetic oligonucleotide
uccacgaggaaugaguacc

SEQ ID NO: 3222564 - RNA, 19 nt, Artificial Sequence
  Description of Artificial Sequence: Synthetic oligonucleotide
cuuacuggcauagaccuag

SEQ ID NO: 3222565 - RNA, 19 nt, Artificial Sequence
  Description of Artificial Sequence: Synthetic oligonucleotide
accuuacuggcauagaccu

SEQ ID NO: 3222566 - RNA, 19 nt, Artificial Sequence
  Description of Artificial Sequence: Synthetic oligonucleotide
uguccuugugcuuaauuga

SEQ ID NO: 3222567 - RNA, 19 nt, Artificial Sequence
  Description of Artificial Sequence: Synthetic oligonucleotide
cuccaucggauguugaugg

SEQ ID NO: 3222568 - RNA, 19 nt, Artificial Sequence
  Description of Artificial Sequence: Synthetic oligonucleotide
cugacuuaucuguagaauc

SEQ ID NO: 3222569 - RNA, 19 nt, Artificial Sequence
  Description of Artificial Sequence: Synthetic oligonucleotide
uuuuaagccagggucauaa

SEQ ID NO: 3222570 - RNA, 19 nt, Artificial Sequence
  Description of Artificial Sequence: Synthetic oligonucleotide
uugacugcauuccaaugca

SEQ ID NO: 3222571 - RNA, 19 nt, Artificial Sequence
  Description of Artificial Sequence: Synthetic oligonucleotide
uguuuaccuagcuuuaaaa

SEQ ID NO: 3222572 - RNA, 19 nt, Artificial Sequence
  Description of Artificial Sequence: Synthetic oligonucleotide
uuauuccagauguggaggc

SEQ ID NO: 3222573 - RNA, 19 nt, Artificial Sequence
  Description of Artificial Sequence: Synthetic oligonucleotide
ucaucuuuaccuuggaguu

SEQ ID NO: 3222574 - RNA, 19 nt, Artificial Sequence
  Description of Artificial Sequence: Synthetic oligonucleotide
uggcauagaccuaggaacc

SEQ ID NO: 3222575 - RNA, 19 nt, Artificial Sequence
  Description of Artificial Sequence: Synthetic oligonucleotide
gaaugaguacccauuauuc

SEQ ID NO: 3222576 - RNA, 19 nt, Artificial Sequence
  Description of Artificial Sequence: Synthetic oligonucleotide
ugcauuccaaugcaccaag

SEQ ID NO: 3222577 - RNA, 19 nt, Artificial Sequence
  Description of Artificial Sequence: Synthetic oligonucleotide
accccaagcaucaauggcc

SEQ ID NO: 3222578 - RNA, 19 nt, Artificial Sequence
  Description of Artificial Sequence: Synthetic oligonucleotide
aaucugggcagguaggcau

SEQ ID NO: 3222579 - RNA, 19 nt, Artificial Sequence
  Description of Artificial Sequence: Synthetic oligonucleotide
uugcuuuacaaggauagga

SEQ ID NO: 3222580 - RNA, 19 nt, Artificial Sequence
  Description of Artificial Sequence: Synthetic oligonucleotide
auaagagauagugaguggu

SEQ ID NO: 3222581 - RNA, 19 nt, Artificial Sequence
  Description of Artificial Sequence: Synthetic oligonucleotide
uucaucuccaagucuuugc

SEQ ID NO: 3222582 - RNA, 19 nt, Artificial Sequence
  Description of Artificial Sequence: Synthetic oligonucleotide
cauaagagauagugagugg

SEQ ID NO: 3222583 - RNA, 19 nt, Artificial Sequence
  Description of Artificial Sequence: Synthetic oligonucleotide
cauagaccuaggaaccugg

SEQ ID NO: 3222584 - RNA, 19 nt, Artificial Sequence
  Description of Artificial Sequence: Synthetic oligonucleotide
aauaugcugccuaaauaug

SEQ ID NO: 3222585 - RNA, 19 nt, Artificial Sequence
  Description of Artificial Sequence: Synthetic oligonucleotide
agaggggugguguagugag

SEQ ID NO: 3222586 - RNA, 19 nt, Artificial Sequence
  Description of Artificial Sequence: Synthetic oligonucleotide
ucuacuggcugcuucuuga

SEQ ID NO: 3222587 - RNA, 19 nt, Artificial Sequence
  Description of Artificial Sequence: Synthetic oligonucleotide
uugggcuucacuuguauau

SEQ ID NO: 3222588 - RNA, 19 nt, Artificial Sequence
  Description of Artificial Sequence: Synthetic oligonucleotide
aucuuaaggggugacuugg

SEQ ID NO: 3222589 - RNA, 19 nt, Artificial Sequence
  Description of Artificial Sequence: Synthetic oligonucleotide
ucaucuccaagucuuugcu

SEQ ID NO: 3222590 - RNA, 19 nt, Artificial Sequence
  Description of Artificial Sequence: Synthetic oligonucleotide
uaagacucgguuccgaguu

SEQ ID NO: 3222591 - RNA, 19 nt, Artificial Sequence
  Description of Artificial Sequence: Synthetic oligonucleotide
uuuggugucuggcauuugg

SEQ ID NO: 3222592 - RNA, 19 nt, Artificial Sequence
  Description of Artificial Sequence: Synthetic oligonucleotide
cuuaggaggacacuuuggg

SEQ ID NO: 3222593 - RNA, 19 nt, Artificial Sequence
  Description of Artificial Sequence: Synthetic oligonucleotide
uuggaggacacuuuggugu

SEQ ID NO: 3222594 - RNA, 19 nt, Artificial Sequence
  Description of Artificial Sequence: Synthetic oligonucleotide
uuaggaggacacuuugggg

SEQ ID NO: 3222595 - RNA, 19 nt, Artificial Sequence
  Description of Artificial Sequence: Synthetic oligonucleotide
ugcagcagccuccagagcu

SEQ ID NO: 3222596 - RNA, 19 nt, Artificial Sequence
  Description of Artificial Sequence: Synthetic oligonucleotide
cacagcagccaccagaccc

SEQ ID NO: 3222597 - RNA, 19 nt, Artificial Sequence
  Description of Artificial Sequence: Synthetic oligonucleotide
uuggugucuggcauuuggg

SEQ ID NO: 3222598 - RNA, 19 nt, Artificial Sequence
  Description of Artificial Sequence: Synthetic oligonucleotide
uuuggaggacacuuuggug

SEQ ID NO: 3222599 - RNA, 19 nt, Artificial Sequence
  Description of Artificial Sequence: Synthetic oligonucleotide
ugcagcacgaugacacagg

SEQ ID NO: 3222600 - RNA, 19 nt, Artificial Sequence
  Description of Artificial Sequence: Synthetic oligonucleotide
gugucuggcauuugggagg

SEQ ID NO: 3222601 - RNA, 19 nt, Artificial Sequence
  Description of Artificial Sequence: Synthetic oligonucleotide
agccuccagagcuggaacc

SEQ ID NO: 3222602 - RNA, 19 nt, Artificial Sequence
  Description of Artificial Sequence: Synthetic oligonucleotide
uccagagcuggaaccacag

SEQ ID NO: 3222603 - RNA, 19 nt, Artificial Sequence
  Description of Artificial Sequence: Synthetic oligonucleotide
gacacuuuggugucuggca

SEQ ID NO: 3222604 - RNA, 19 nt, Artificial Sequence
  Description of Artificial Sequence: Synthetic oligonucleotide
acagcagccaccagacccc

SEQ ID NO: 3222605 - RNA, 19 nt, Artificial Sequence
  Description of Artificial Sequence: Synthetic oligonucleotide
ugucuggcauuugggaggg

SEQ ID NO: 3222606 - RNA, 19 nt, Artificial Sequence
  Description of Artificial Sequence: Synthetic oligonucleotide
cagagcuggaaccacagca

SEQ ID NO: 3222607 - RNA, 19 nt, Artificial Sequence
  Description of Artificial Sequence: Synthetic oligonucleotide
uggugucuggcauuuggga

SEQ ID NO: 3222608 - RNA, 19 nt, Artificial Sequence
  Description of Artificial Sequence: Synthetic oligonucleotide
ucuggcauuugggagggca

SEQ ID NO: 3222609 - RNA, 19 nt, Artificial Sequence
  Description of Artificial Sequence: Synthetic oligonucleotide
ggugucuggcauuugggag

SEQ ID NO: 3222610 - RNA, 19 nt, Artificial Sequence
  Description of Artificial Sequence: Synthetic oligonucleotide
acuuaggaggacacuuugg

SEQ ID NO: 3222611 - RNA, 19 nt, Artificial Sequence
  Description of Artificial Sequence: Synthetic oligonucleotide
agcuggaaccacagcagcc

SEQ ID NO: 3222612 - RNA, 19 nt, Artificial Sequence
  Description of Artificial Sequence: Synthetic oligonucleotide
cacuuuggaggacacuuug

SEQ ID NO: 3222613 - RNA, 19 nt, Artificial Sequence
  Description of Artificial Sequence: Synthetic oligonucleotide
gaccccaggcugcagcacg

SEQ ID NO: 3222614 - RNA, 19 nt, Artificial Sequence
  Description of Artificial Sequence: Synthetic oligonucleotide
agagcuggaaccacagcag

SEQ ID NO: 3222615 - RNA, 19 nt, Artificial Sequence
  Description of Artificial Sequence: Synthetic oligonucleotide
gagcuggaaccacagcagc

SEQ ID NO: 3222616 - RNA, 19 nt, Artificial Sequence
  Description of Artificial Sequence: Synthetic oligonucleotide
cagagcuggagccacagca

SEQ ID NO: 3222617 - RNA, 19 nt, Artificial Sequence
  Description of Artificial Sequence: Synthetic oligonucleotide
acuuuggaggacacuuugg

SEQ ID NO: 3222618 - RNA, 19 nt, Artificial Sequence
  Description of Artificial Sequence: Synthetic oligonucleotide
cacuuaggaggacacuuug

SEQ ID NO: 3222619 - RNA, 19 nt, Artificial Sequence
  Description of Artificial Sequence: Synthetic oligonucleotide
agccacagcagccaccaga

SEQ ID NO: 3222620 - RNA, 19 nt, Artificial Sequence
  Description of Artificial Sequence: Synthetic oligonucleotide
acacuuuggugucuggcau

SEQ ID NO: 3222621 - RNA, 19 nt, Artificial Sequence
  Description of Artificial Sequence: Synthetic oligonucleotide
gagcuggagccacagcagc

SEQ ID NO: 3222622 - RNA, 19 nt, Artificial Sequence
  Description of Artificial Sequence: Synthetic oligonucleotide
gcugcagcagccuccagag

SEQ ID NO: 3222623 - RNA, 19 nt, Artificial Sequence
  Description of Artificial Sequence: Synthetic oligonucleotide
agcugcagcagccuccaga

SEQ ID NO: 3222624 - RNA, 19 nt, Artificial Sequence
  Description of Artificial Sequence: Synthetic oligonucleotide
cagagcugcagcagccucc

SEQ ID NO: 3222625 - RNA, 19 nt, Artificial Sequence
  Description of Artificial Sequence: Synthetic oligonucleotide
agcuggagccacagcagcc

SEQ ID NO: 3222626 - RNA, 19 nt, Artificial Sequence
  Description of Artificial Sequence: Synthetic oligonucleotide
uggaggacacuuugguguc

SEQ ID NO: 3222627 - RNA, 19 nt, Artificial Sequence
  Description of Artificial Sequence: Synthetic oligonucleotide
gcagcacgaugacacaggg

SEQ ID NO: 3222628 - RNA, 19 nt, Artificial Sequence
  Description of Artificial Sequence: Synthetic oligonucleotide
agagcuggagccacagcag

SEQ ID NO: 3222629 - RNA, 19 nt, Artificial Sequence
  Description of Artificial Sequence: Synthetic oligonucleotide
cuggcauuugggagggcac

SEQ ID NO: 3222630 - RNA, 19 nt, Artificial Sequence
  Description of Artificial Sequence: Synthetic oligonucleotide
cuggaaccacagcagcccc

SEQ ID NO: 3222631 - RNA, 19 nt, Artificial Sequence
  Description of Artificial Sequence: Synthetic oligonucleotide
gaggacacuuuggugucug

SEQ ID NO: 3222632 - RNA, 19 nt, Artificial Sequence
  Description of Artificial Sequence: Synthetic oligonucleotide
cagcacgaugacacagggg

SEQ ID NO: 3222633 - RNA, 19 nt, Artificial Sequence
  Description of Artificial Sequence: Synthetic oligonucleotide
aggacacuuuggugucugg

SEQ ID NO: 3222634 - RNA, 19 nt, Artificial Sequence
  Description of Artificial Sequence: Synthetic oligonucleotide
ggcugcagcacgaugacac

SEQ ID NO: 3222635 - RNA, 19 nt, Artificial Sequence
  Description of Artificial Sequence: Synthetic oligonucleotide
uggagccacagcagccacc

SEQ ID NO: 3222636 - RNA, 19 nt, Artificial Sequence
  Description of Artificial Sequence: Synthetic oligonucleotide
gcagccaccagaccccagg

SEQ ID NO: 3222637 - RNA, 19 nt, Artificial Sequence
  Description of Artificial Sequence: Synthetic oligonucleotide
cuuuggaggacacuuuggu

SEQ ID NO: 3222638 - RNA, 19 nt, Artificial Sequence
  Description of Artificial Sequence: Synthetic oligonucleotide
cugcagcacgaugacacag

SEQ ID NO: 3222639 - RNA, 19 nt, Artificial Sequence
  Description of Artificial Sequence: Synthetic oligonucleotide
gccaccagaccccaggcug

SEQ ID NO: 3222640 - RNA, 19 nt, Artificial Sequence
  Description of Artificial Sequence: Synthetic oligonucleotide
uggcauuugggagggcacu

SEQ ID NO: 3222641 - RNA, 19 nt, Artificial Sequence
  Description of Artificial Sequence: Synthetic oligonucleotide
gcuggaaccacagcagccc

SEQ ID NO: 3222642 - RNA, 19 nt, Artificial Sequence
  Description of Artificial Sequence: Synthetic oligonucleotide
acuuuggugucuggcauuu

SEQ ID NO: 3222643 - RNA, 19 nt, Artificial Sequence
  Description of Artificial Sequence: Synthetic oligonucleotide
agagcugcagcagccucca

SEQ ID NO: 3222644 - RNA, 19 nt, Artificial Sequence
  Description of Artificial Sequence: Synthetic oligonucleotide
caggcugcagcacgaugac

SEQ ID NO: 3222645 - RNA, 19 nt, Artificial Sequence
  Description of Artificial Sequence: Synthetic oligonucleotide
ggacacuuuggugucuggc

SEQ ID NO: 3222646 - RNA, 19 nt, Artificial Sequence
  Description of Artificial Sequence: Synthetic oligonucleotide
cagccaccagaccccaggc

SEQ ID NO: 3222647 - RNA, 19 nt, Artificial Sequence
  Description of Artificial Sequence: Synthetic oligonucleotide
cagccuccagagcuggaac

SEQ ID NO: 3222648 - RNA, 19 nt, Artificial Sequence
  Description of Artificial Sequence: Synthetic oligonucleotide
ccaggcugcagcacgauga

SEQ ID NO: 3222649 - RNA, 19 nt, Artificial Sequence
  Description of Artificial Sequence: Synthetic oligonucleotide
agccaccagaccccaggcu

SEQ ID NO: 3222650 - RNA, 19 nt, Artificial Sequence
  Description of Artificial Sequence: Synthetic oligonucleotide
cuccagagcuggaaccaca

SEQ ID NO: 3222651 - RNA, 19 nt, Artificial Sequence
  Description of Artificial Sequence: Synthetic oligonucleotide
cuggagccacagcagccac

SEQ ID NO: 3222652 - RNA, 19 nt, Artificial Sequence
  Description of Artificial Sequence: Synthetic oligonucleotide
agaccccaggcugcagcac

SEQ ID NO: 3222653 - RNA, 19 nt, Artificial Sequence
  Description of Artificial Sequence: Synthetic oligonucleotide
ggagccacagcagccacca

SEQ ID NO: 3222654 - RNA, 19 nt, Artificial Sequence
  Description of Artificial Sequence: Synthetic oligonucleotide
gccacagcagccaccagac

SEQ ID NO: 3222655 - RNA, 19 nt, Artificial Sequence
  Description of Artificial Sequence: Synthetic oligonucleotide
cagcagccuccagagcugg

SEQ ID NO: 3222656 - RNA, 19 nt, Artificial Sequence
  Description of Artificial Sequence: Synthetic oligonucleotide
cagaccccaggcugcagca

SEQ ID NO: 3222657 - RNA, 19 nt, Artificial Sequence
  Description of Artificial Sequence: Synthetic oligonucleotide
ccagaccccaggcugcagc

SEQ ID NO: 3222658 - RNA, 19 nt, Artificial Sequence
  Description of Artificial Sequence: Synthetic oligonucleotide
ccaccagaccccaggcugc

SEQ ID NO: 3222659 - RNA, 19 nt, Artificial Sequence
  Description of Artificial Sequence: Synthetic oligonucleotide
cugcagcagccuccagagc

SEQ ID NO: 3222660 - RNA, 19 nt, Artificial Sequence
  Description of Artificial Sequence: Synthetic oligonucleotide
cuuuggugucuggcauuug

SEQ ID NO: 3222661 - RNA, 19 nt, Artificial Sequence
  Description of Artificial Sequence: Synthetic oligonucleotide
ggcacuuuggaggacacuu

SEQ ID NO: 3222662 - RNA, 19 nt, Artificial Sequence
  Description of Artificial Sequence: Synthetic oligonucleotide
gagccacagcagccaccag

SEQ ID NO: 3222663 - RNA, 19 nt, Artificial Sequence
  Description of Artificial Sequence: Synthetic oligonucleotide
ggggcacuuaggaggacac

SEQ ID NO: 3222664 - RNA, 19 nt, Artificial Sequence
  Description of Artificial Sequence: Synthetic oligonucleotide
ccagagcuggaaccacagc

SEQ ID NO: 3222665 - RNA, 19 nt, Artificial Sequence
  Description of Artificial Sequence: Synthetic oligonucleotide
gcuggagccacagcagcca

SEQ ID NO: 3222666 - RNA, 19 nt, Artificial Sequence
  Description of Artificial Sequence: Synthetic oligonucleotide
ggcacuuaggaggacacuu

SEQ ID NO: 3222667 - RNA, 19 nt, Artificial Sequence
  Description of Artificial Sequence: Synthetic oligonucleotide
gcugcagcacgaugacaca

SEQ ID NO: 3222668 - RNA, 19 nt, Artificial Sequence
  Description of Artificial Sequence: Synthetic oligonucleotide
aggcugcagcacgaugaca

SEQ ID NO: 3222669 - RNA, 19 nt, Artificial Sequence
  Description of Artificial Sequence: Synthetic oligonucleotide
gcagcagccuccagagcug

SEQ ID NO: 3222670 - RNA, 19 nt, Artificial Sequence
  Description of Artificial Sequence: Synthetic oligonucleotide
gagcugcagcagccuccag

SEQ ID NO: 3222671 - RNA, 19 nt, Artificial Sequence
  Description of Artificial Sequence: Synthetic oligonucleotide
ccagagcugcagcagccuc

SEQ ID NO: 3222672 - RNA, 19 nt, Artificial Sequence
  Description of Artificial Sequence: Synthetic oligonucleotide
accagaccccaggcugcag

SEQ ID NO: 3222673 - RNA, 19 nt, Artificial Sequence
  Description of Artificial Sequence: Synthetic oligonucleotide
gccuccagagcuggaacca

SEQ ID NO: 3222674 - RNA, 19 nt, Artificial Sequence
  Description of Artificial Sequence: Synthetic oligonucleotide
cccagagcuggagccacag

SEQ ID NO: 3222675 - RNA, 19 nt, Artificial Sequence
  Description of Artificial Sequence: Synthetic oligonucleotide
accccaggcugcagcacga

SEQ ID NO: 3222676 - RNA, 19 nt, Artificial Sequence
  Description of Artificial Sequence: Synthetic oligonucleotide
ccagagcuggagccacagc

SEQ ID NO: 3222677 - RNA, 19 nt, Artificial Sequence
  Description of Artificial Sequence: Synthetic oligonucleotide
cacuuuggugucuggcauu

SEQ ID NO: 3222678 - RNA, 19 nt, Artificial Sequence
  Description of Artificial Sequence: Synthetic oligonucleotide
agcagccaccagaccccag

SEQ ID NO: 3222679 - RNA, 19 nt, Artificial Sequence
  Description of Artificial Sequence: Synthetic oligonucleotide
gcagccuccagagcuggaa

SEQ ID NO: 3222680 - RNA, 19 nt, Artificial Sequence
  Description of Artificial Sequence: Synthetic oligonucleotide
cccaggcugcagcacgaug

SEQ ID NO: 3222681 - RNA, 19 nt, Artificial Sequence
  Description of Artificial Sequence: Synthetic oligonucleotide
ggggcacuuuggaggacac

SEQ ID NO: 3222682 - RNA, 19 nt, Artificial Sequence
  Description of Artificial Sequence: Synthetic oligonucleotide
ccacagcagccaccagacc

SEQ ID NO: 3222683 - RNA, 19 nt, Artificial Sequence
  Description of Artificial Sequence: Synthetic oligonucleotide
ccuccagagcuggaaccac

SEQ ID NO: 3222684 - RNA, 19 nt, Artificial Sequence
  Description of Artificial Sequence: Synthetic oligonucleotide
caccagaccccaggcugca

SEQ ID NO: 3222685 - RNA, 19 nt, Artificial Sequence
  Description of Artificial Sequence: Synthetic oligonucleotide
agcagccuccagagcugga

SEQ ID NO: 3222686 - RNA, 19 nt, Artificial Sequence
  Description of Artificial Sequence: Synthetic oligonucleotide
gucuggcauuugggagggc

SEQ ID NO: 3222687 - RNA, 19 nt, Artificial Sequence
  Description of Artificial Sequence: Synthetic oligonucleotide
cagcagccaccagacccca

SEQ ID NO: 3222688 - RNA, 19 nt, Artificial Sequence
  Description of Artificial Sequence: Synthetic oligonucleotide
gcacuuaggaggacacuuu

SEQ ID NO: 3222689 - RNA, 19 nt, Artificial Sequence
  Description of Artificial Sequence: Synthetic oligonucleotide
ggaggacacuuuggugucu

SEQ ID NO: 3222690 - RNA, 19 nt, Artificial Sequence
  Description of Artificial Sequence: Synthetic oligonucleotide
ggcauuugggagggcacuu

SEQ ID NO: 3222691 - RNA, 19 nt, Artificial Sequence
  Description of Artificial Sequence: Synthetic oligonucleotide
auuuauuuauuauauaagc

SEQ ID NO: 3222692 - RNA, 19 nt, Artificial Sequence
  Description of Artificial Sequence: Synthetic oligonucleotide
uuauuuauuauauaagcag

SEQ ID NO: 3222693 - RNA, 19 nt, Artificial Sequence
  Description of Artificial Sequence: Synthetic oligonucleotide
uuauuauauaagcagagug

SEQ ID NO: 3222694 - RNA, 19 nt, Artificial Sequence
  Description of Artificial Sequence: Synthetic oligonucleotide
uauuuauuuauuauauaag

SEQ ID NO: 3222695 - RNA, 19 nt, Artificial Sequence
  Description of Artificial Sequence: Synthetic oligonucleotide
uuauuuauuuauuauauaa

SEQ ID NO: 3222696 - RNA, 19 nt, Artificial Sequence
  Description of Artificial Sequence: Synthetic oligonucleotide
uuuauuuauuauauaagca

SEQ ID NO: 3222697 - RNA, 19 nt, Artificial Sequence
  Description of Artificial Sequence: Synthetic oligonucleotide
uauauaagcagaguguugg

SEQ ID NO: 3222698 - RNA, 19 nt, Artificial Sequence
  Description of Artificial Sequence: Synthetic oligonucleotide
uuuuauuuauuuauuauau

SEQ ID NO: 3222699 - RNA, 19 nt, Artificial Sequence
  Description of Artificial Sequence: Synthetic oligonucleotide
uuuuauuuuauuuauuuau

SEQ ID NO: 3222700 - RNA, 19 nt, Artificial Sequence
  Description of Artificial Sequence: Synthetic oligonucleotide
uauuuauuauauaagcaga

SEQ ID NO: 3222701 - RNA, 19 nt, Artificial Sequence
  Description of Artificial Sequence: Synthetic oligonucleotide
uauuauauaagcagagugu

SEQ ID NO: 3222702 - RNA, 19 nt, Artificial Sequence
  Description of Artificial Sequence: Synthetic oligonucleotide
uuugagaccagccuggucu

SEQ ID NO: 3222703 - RNA, 19 nt, Artificial Sequence
  Description of Artificial Sequence: Synthetic oligonucleotide
uuuauuuuauuuuauuuau

SEQ ID NO: 3222704 - RNA, 19 nt, Artificial Sequence
  Description of Artificial Sequence: Synthetic oligonucleotide
  modified_base (4)..(4): a, c, u, g, unknown or other
  modified_base (9)..(9): a, c, u, g, unknown or other
  modified_base (14)..(14): a, c, u, g, unknown or other
uuunuuuunuuuunuuuua

SEQ ID NO: 3222705 - RNA, 19 nt, Artificial Sequence
  Description of Artificial Sequence: Synthetic oligonucleotide
  modified_base (4)..(4): a, c, u, g, unknown or other
  modified_base (9)..(9): a, c, u, g, unknown or other
uuunuuuunuuuuauuuua

SEQ ID NO: 3222706 - RNA, 19 nt, Artificial Sequence
  Description of Artificial Sequence: Synthetic oligonucleotide
uuuaguuccagcacucggg

SEQ ID NO: 3222707 - RNA, 19 nt, Artificial Sequence
  Description of Artificial Sequence: Synthetic oligonucleotide
  modified_base (4)..(4): a, c, u, g, unknown or other
uuunuuuuauuuuauuuua

SEQ ID NO: 3222708 - RNA, 19 nt, Artificial Sequence
  Description of Artificial Sequence: Synthetic oligonucleotide
uuuuauuuuauuuuauuua

SEQ ID NO: 3222709 - RNA, 19 nt, Artificial Sequence
  Description of Artificial Sequence: Synthetic oligonucleotide
  modified_base (5)..(5): a, c, u, g, unknown or other
  modified_base (10)..(10): a, c, u, g, unknown or other
  modified_base (15)..(15): a, c, u, g, unknown or other
uuuunuuuunuuuunuuuu

SEQ ID NO: 3222710 - RNA, 19 nt, Artificial Sequence
  Description of Artificial Sequence: Synthetic oligonucleotide
  modified_base (5)..(5): a, c, u, g, unknown or other
  modified_base (10)..(10): a, c, u, g, unknown or other
uuuunuuuunuuuuauuuu

SEQ ID NO: 3222711 - RNA, 19 nt, Artificial Sequence
  Description of Artificial Sequence: Synthetic oligonucleotide
  modified_base (5)..(5): a, c, u, g, unknown or other
uuuunuuuuauuuuauuuu

SEQ ID NO: 3222712 - RNA, 19 nt, Artificial Sequence
  Description of Artificial Sequence: Synthetic oligonucleotide
auaagcagaguguuggugg

SEQ ID NO: 3222713 - RNA, 19 nt, Artificial Sequence
  Description of Artificial Sequence: Synthetic oligonucleotide
uauuuuauuuuauuuauuu

SEQ ID NO: 3222714 - RNA, 19 nt, Artificial Sequence
  Description of Artificial Sequence: Synthetic oligonucleotide
uauuuuauuuauuuauuau

SEQ ID NO: 3222715 - RNA, 19 nt, Artificial Sequence
  Description of Artificial Sequence: Synthetic oligonucleotide
uguguuugagaccagccug

SEQ ID NO: 3222716 - RNA, 19 nt, Artificial Sequence
  Description of Artificial Sequence: Synthetic oligonucleotide
auuuuauuuauuuauuaua

SEQ ID NO: 3222717 - RNA, 19 nt, Artificial Sequence
  Description of Artificial Sequence: Synthetic oligonucleotide
uuuauuuuauuuauuuauu

SEQ ID NO: 3222718 - RNA, 19 nt, Artificial Sequence
  Description of Artificial Sequence: Synthetic oligonucleotide
uuauuuuauuuauuuauua

SEQ ID NO: 3222719 - RNA, 19 nt, Artificial Sequence
  Description of Artificial Sequence: Synthetic oligonucleotide
auuuauuauauaagcagag

SEQ ID NO: 3222720 - RNA, 19 nt, Artificial Sequence
  Description of Artificial Sequence: Synthetic oligonucleotide
aguuccagcacucgggagg

SEQ ID NO: 3222721 - RNA, 19 nt, Artificial Sequence
  Description of Artificial Sequence: Synthetic oligonucleotide
  modified_base (3)..(3): a, c, u, g, unknown or other
  modified_base (8)..(8): a, c, u, g, unknown or other
  modified_base (13)..(13): a, c, u, g, unknown or other
uunuuuunuuuunuuuuau

SEQ ID NO: 3222722 - RNA, 19 nt, Artificial Sequence
  Description of Artificial Sequence: Synthetic oligonucleotide
  modified_base (3)..(3): a, c, u, g, unknown or other
  modified_base (8)..(8): a, c, u, g, unknown or other
uunuuuunuuuuauuuuau

SEQ ID NO: 3222723 - RNA, 19 nt, Artificial Sequence
  Description of Artificial Sequence: Synthetic oligonucleotide
  modified_base (3)..(3): a, c, u, g, unknown or other
uunuuuuauuuuauuuuau

SEQ ID NO: 3222724 - RNA, 19 nt, Artificial Sequence
  Description of Artificial Sequence: Synthetic oligonucleotide
uuauauaagcagaguguug

SEQ ID NO: 3222725 - RNA, 19 nt, Artificial Sequence
  Description of Artificial Sequence: Synthetic oligonucleotide
  modified_base (2)..(2): a, c, u, g, unknown or other
  modified_base (7)..(7): a, c, u, g, unknown or other
  modified_base (12)..(12): a, c, u, g, unknown or other
unuuuunuuuunuuuuauu

SEQ ID NO: 3222726 - RNA, 19 nt, Artificial Sequence
  Description of Artificial Sequence: Synthetic oligonucleotide
  modified_base (2)..(2): a, c, u, g, unknown or other
  modified_base (7)..(7): a, c, u, g, unknown or other
unuuuunuuuuauuuuauu

SEQ ID NO: 3222727 - RNA, 19 nt, Artificial Sequence
  Description of Artificial Sequence: Synthetic oligonucleotide
  modified_base (2)..(2): a, c, u, g, unknown or other
unuuuuauuuuauuuuauu

SEQ ID NO: 3222728 - RNA, 19 nt, Artificial Sequence
  Description of Artificial Sequence: Synthetic oligonucleotide
uuuauuuauuuauuauaua

SEQ ID NO: 3222729 - RNA, 19 nt, Artificial Sequence
  Description of Artificial Sequence: Synthetic oligonucleotide
uuuauuauauaagcagagu

SEQ ID NO: 3222730 - RNA, 19 nt, Artificial Sequence
  Description of Artificial Sequence: Synthetic oligonucleotide
ucuguguuugagaccagcc

SEQ ID NO: 3222731 - RNA, 19 nt, Artificial Sequence
  Description of Artificial Sequence: Synthetic oligonucleotide
uacagaguguaguuccagg

SEQ ID NO: 3222732 - RNA, 19 nt, Artificial Sequence
  Description of Artificial Sequence: Synthetic oligonucleotide
gucuacagaguguaguucc

SEQ ID NO: 3222733 - RNA, 19 nt, Artificial Sequence
  Description of Artificial Sequence: Synthetic oligonucleotide
auuuuauuuuauuuauuua

SEQ ID NO: 3222734 - RNA, 19 nt, Artificial Sequence
  Description of Artificial Sequence: Synthetic oligonucleotide
cuuuaguuccagcacucgg

SEQ ID NO: 3222735 - RNA, 19 nt, Artificial Sequence
  Description of Artificial Sequence: Synthetic oligonucleotide
aguuccaggacagcaaggg

SEQ ID NO: 3222736 - RNA, 19 nt, Artificial Sequence
  Description of Artificial Sequence: Synthetic oligonucleotide
agaguguaguuccaggaca

SEQ ID NO: 3222737 - RNA, 19 nt, Artificial Sequence
  Description of Artificial Sequence: Synthetic oligonucleotide
uuauuuuauuuuauuuauu

SEQ ID NO: 3222738 - RNA, 19 nt, Artificial Sequence
  Description of Artificial Sequence: Synthetic oligonucleotide
uuaguuccagcacucggga

SEQ ID NO: 3222739 - RNA, 19 nt, Artificial Sequence
  Description of Artificial Sequence: Synthetic oligonucleotide
auuauauaagcagaguguu

SEQ ID NO: 3222740 - RNA, 19 nt, Artificial Sequence
  Description of Artificial Sequence: Synthetic oligonucleotide
aucucuguguuugagacca

SEQ ID NO: 3222741 - RNA, 19 nt, Artificial Sequence
  Description of Artificial Sequence: Synthetic oligonucleotide
augccuuuaguuccagcac

SEQ ID NO: 3222742 - RNA, 19 nt, Artificial Sequence
  Description of Artificial Sequence: Synthetic oligonucleotide
accagccuggucuacagag

SEQ ID NO: 3222743 - RNA, 19 nt, Artificial Sequence
  Description of Artificial Sequence: Synthetic oligonucleotide
uauaagcagaguguuggug

SEQ ID NO: 3222744 - RNA, 19 nt, Artificial Sequence
  Description of Artificial Sequence: Synthetic oligonucleotide
uguaguuccaggacagcaa

SEQ ID NO: 3222745 - RNA, 19 nt, Artificial Sequence
  Description of Artificial Sequence: Synthetic oligonucleotide
gaguguugguggcacaugc

SEQ ID NO: 3222746 - RNA, 19 nt, Artificial Sequence
  Description of Artificial Sequence: Synthetic oligonucleotide
guaguuccaggacagcaag

SEQ ID NO: 3222747 - RNA, 19 nt, Artificial Sequence
  Description of Artificial Sequence: Synthetic oligonucleotide
acagaguguaguuccagga

SEQ ID NO: 3222748 - RNA, 19 nt, Artificial Sequence
  Description of Artificial Sequence: Synthetic oligonucleotide
ugccuuuaguuccagcacu

SEQ ID NO: 3222749 - RNA, 19 nt, Artificial Sequence
  Description of Artificial Sequence: Synthetic oligonucleotide
caugccuuuaguuccagca

SEQ ID NO: 3222750 - RNA, 19 nt, Artificial Sequence
  Description of Artificial Sequence: Synthetic oligonucleotide
uaagcagaguguugguggc

SEQ ID NO: 3222751 - RNA, 19 nt, Artificial Sequence
  Description of Artificial Sequence: Synthetic oligonucleotide
ggcacaugccuuuaguucc

SEQ ID NO: 3222752 - RNA, 19 nt, Artificial Sequence
  Description of Artificial Sequence: Synthetic oligonucleotide
ucuacagaguguaguucca

SEQ ID NO: 3222753 - RNA, 19 nt, Artificial Sequence
  Description of Artificial Sequence: Synthetic oligonucleotide
uaguuccaggacagcaagg

SEQ ID NO: 3222754 - RNA, 19 nt, Artificial Sequence
  Description of Artificial Sequence: Synthetic oligonucleotide
ggaucucuguguuugagac

SEQ ID NO: 3222755 - RNA, 19 nt, Artificial Sequence
  Description of Artificial Sequence: Synthetic oligonucleotide
uggcacaugccuuuaguuc

SEQ ID NO: 3222756 - RNA, 19 nt, Artificial Sequence
  Description of Artificial Sequence: Synthetic oligonucleotide
gaguguaguuccaggacag

SEQ ID NO: 3222757 - RNA, 19 nt, Artificial Sequence
  Description of Artificial Sequence: Synthetic oligonucleotide
uggaucucuguguuugaga

SEQ ID NO: 3222758 - RNA, 19 nt, Artificial Sequence
  Description of Artificial Sequence: Synthetic oligonucleotide
gaucucuguguuugagacc

SEQ ID NO: 3222759 - RNA, 19 nt, Artificial Sequence
  Description of Artificial Sequence: Synthetic oligonucleotide
acaugccuuuaguuccagc

SEQ ID NO: 3222760 - RNA, 19 nt, Artificial Sequence
  Description of Artificial Sequence: Synthetic oligonucleotide
guguuugagaccagccugg

SEQ ID NO: 3222761 - RNA, 19 nt, Artificial Sequence
  Description of Artificial Sequence: Synthetic oligonucleotide
agcagaguguugguggcac

SEQ ID NO: 3222762 - RNA, 19 nt, Artificial Sequence
  Description of Artificial Sequence: Synthetic oligonucleotide
auauaagcagaguguuggu

SEQ ID NO: 3222763 - RNA, 19 nt, Artificial Sequence
  Description of Artificial Sequence: Synthetic oligonucleotide
aguguugguggcacaugcc

SEQ ID NO: 3222764 - RNA, 19 nt, Artificial Sequence
  Description of Artificial Sequence: Synthetic oligonucleotide
cagaguguaguuccaggac

SEQ ID NO: 3222765 - RNA, 19 nt, Artificial Sequence
  Description of Artificial Sequence: Synthetic oligonucleotide
agguggaucucuguguuug

SEQ ID NO: 3222766 - RNA, 19 nt, Artificial Sequence
  Description of Artificial Sequence: Synthetic oligonucleotide
aguguaguuccaggacagc

SEQ ID NO: 3222767 - RNA, 19 nt, Artificial Sequence
  Description of Artificial Sequence: Synthetic oligonucleotide
uggucuacagaguguaguu

SEQ ID NO: 3222768 - RNA, 19 nt, Artificial Sequence
  Description of Artificial Sequence: Synthetic oligonucleotide
agaccagccuggucuacag

SEQ ID NO: 3222769 - RNA, 19 nt, Artificial Sequence
  Description of Artificial Sequence: Synthetic oligonucleotide
aggcagguggaucucugug

SEQ ID NO: 3222770 - RNA, 19 nt, Artificial Sequence
  Description of Artificial Sequence: Synthetic oligonucleotide
cagccuggucuacagagug

SEQ ID NO: 3222771 - RNA, 19 nt, Artificial Sequence
  Description of Artificial Sequence: Synthetic oligonucleotide
uguugguggcacaugccuu

SEQ ID NO: 3222772 - RNA, 19 nt, Artificial Sequence
  Description of Artificial Sequence: Synthetic oligonucleotide
uaguuccagcacucgggag

SEQ ID NO: 3222773 - RNA, 19 nt, Artificial Sequence
  Description of Artificial Sequence: Synthetic oligonucleotide
uccagcacucgggaggcag

SEQ ID NO: 3222774 - RNA, 19 nt, Artificial Sequence
  Description of Artificial Sequence: Synthetic oligonucleotide
acucgggaggcagaggcag

SEQ ID NO: 3222775 - RNA, 19 nt, Artificial Sequence
  Description of Artificial Sequence: Synthetic oligonucleotide
gggaggcagaggcaggugg

SEQ ID NO: 3222776 - RNA, 19 nt, Artificial Sequence
  Description of Artificial Sequence: Synthetic oligonucleotide
cuacagaguguaguuccag

SEQ ID NO: 3222777 - RNA, 19 nt, Artificial Sequence
  Description of Artificial Sequence: Synthetic oligonucleotide
cucuguguuugagaccagc

SEQ ID NO: 3222778 - RNA, 19 nt, Artificial Sequence
  Description of Artificial Sequence: Synthetic oligonucleotide
gcacucgggaggcagaggc

SEQ ID NO: 3222779 - RNA, 19 nt, Artificial Sequence
  Description of Artificial Sequence: Synthetic oligonucleotide
guguaguuccaggacagca

SEQ ID NO: 3222780 - RNA, 19 nt, Artificial Sequence
  Description of Artificial Sequence: Synthetic oligonucleotide
ugguggcacaugccuuuag

SEQ ID NO: 3222781 - RNA, 19 nt, Artificial Sequence
  Description of Artificial Sequence: Synthetic oligonucleotide
guuccagcacucgggaggc

SEQ ID NO: 3222782 - RNA, 19 nt, Artificial Sequence
  Description of Artificial Sequence: Synthetic oligonucleotide
guggaucucuguguuugag

SEQ ID NO: 3222783 - RNA, 19 nt, Artificial Sequence
  Description of Artificial Sequence: Synthetic oligonucleotide
uguuugagaccagccuggu

SEQ ID NO: 3222784 - RNA, 19 nt, Artificial Sequence
  Description of Artificial Sequence: Synthetic oligonucleotide
ucucuguguuugagaccag

SEQ ID NO: 3222785 - RNA, 19 nt, Artificial Sequence
  Description of Artificial Sequence: Synthetic oligonucleotide
uugagaccagccuggucua

SEQ ID NO: 3222786 - RNA, 19 nt, Artificial Sequence
  Description of Artificial Sequence: Synthetic oligonucleotide
aagcagaguguugguggca

SEQ ID NO: 3222787 - RNA, 19 nt, Artificial Sequence
  Description of Artificial Sequence: Synthetic oligonucleotide
guguugguggcacaugccu

SEQ ID NO: 3222788 - RNA, 19 nt, Artificial Sequence
  Description of Artificial Sequence: Synthetic oligonucleotide
cucgggaggcagaggcagg

SEQ ID NO: 3222789 - RNA, 19 nt, Artificial Sequence
  Description of Artificial Sequence: Synthetic oligonucleotide
agaguguugguggcacaug

SEQ ID NO: 3222790 - RNA, 19 nt, Artificial Sequence
  Description of Artificial Sequence: Synthetic oligonucleotide
aggcagaggcagguggauc

SEQ ID NO: 3222791 - RNA, 19 nt, Artificial Sequence
  Description of Artificial Sequence: Synthetic oligonucleotide
auacuuuaaacuuuuaggc

SEQ ID NO: 3222792 - RNA, 19 nt, Artificial Sequence
  Description of Artificial Sequence: Synthetic oligonucleotide
uauguauauacauugcacg

SEQ ID NO: 3222793 - RNA, 19 nt, Artificial Sequence
  Description of Artificial Sequence: Synthetic oligonucleotide
auuucuaguagucacugcc

SEQ ID NO: 3222794 - RNA, 19 nt, Artificial Sequence
  Description of Artificial Sequence: Synthetic oligonucleotide
aaaccaagagcuuugaaug

SEQ ID NO: 3222795 - RNA, 19 nt, Artificial Sequence
  Description of Artificial Sequence: Synthetic oligonucleotide
uguaucaauauacacuggg

SEQ ID NO: 3222796 - RNA, 19 nt, Artificial Sequence
  Description of Artificial Sequence: Synthetic oligonucleotide
aauacauggguuuccauag

SEQ ID NO: 3222797 - RNA, 19 nt, Artificial Sequence
  Description of Artificial Sequence: Synthetic oligonucleotide
aacauaauuagcuuauaug

SEQ ID NO: 3222798 - RNA, 19 nt, Artificial Sequence
  Description of Artificial Sequence: Synthetic oligonucleotide
auaauuagcuuauaugggg

SEQ ID NO: 3222799 - RNA, 19 nt, Artificial Sequence
  Description of Artificial Sequence: Synthetic oligonucleotide
ucaauuaucuaacaagccc

SEQ ID NO: 3222800 - RNA, 19 nt, Artificial Sequence
  Description of Artificial Sequence: Synthetic oligonucleotide
agaguugcaaaccaagagc

SEQ ID NO: 3222801 - RNA, 19 nt, Artificial Sequence
  Description of Artificial Sequence: Synthetic oligonucleotide
uaaacuuuuaggcacaggu

SEQ ID NO: 3222802 - RNA, 19 nt, Artificial Sequence
  Description of Artificial Sequence: Synthetic oligonucleotide
ucaauauacacugggaugg

SEQ ID NO: 3222803 - RNA, 19 nt, Artificial Sequence
  Description of Artificial Sequence: Synthetic oligonucleotide
aauaugcugucccauguac

SEQ ID NO: 3222804 - RNA, 19 nt, Artificial Sequence
  Description of Artificial Sequence: Synthetic oligonucleotide
auucaauuaucuaacaagc

SEQ ID NO: 3222805 - RNA, 19 nt, Artificial Sequence
  Description of Artificial Sequence: Synthetic oligonucleotide
uuuaauugugcauauguga

SEQ ID NO: 3222806 - RNA, 19 nt, Artificial Sequence
  Description of Artificial Sequence: Synthetic oligonucleotide
uguaagaaccaccacuagg

SEQ ID NO: 3222807 - RNA, 19 nt, Artificial Sequence
  Description of Artificial Sequence: Synthetic oligonucleotide
uaugucuguaucaauauac

SEQ ID NO: 3222808 - RNA, 19 nt, Artificial Sequence
  Description of Artificial Sequence: Synthetic oligonucleotide
aagaaccaccacuaggggc

SEQ ID NO: 3222809 - RNA, 19 nt, Artificial Sequence
  Description of Artificial Sequence: Synthetic oligonucleotide
aaaggucagaagcauacag

SEQ ID NO: 3222810 - RNA, 19 nt, Artificial Sequence
  Description of Artificial Sequence: Synthetic oligonucleotide
uuuaggcacagguaaaagg

SEQ ID NO: 3222811 - RNA, 19 nt, Artificial Sequence
  Description of Artificial Sequence: Synthetic oligonucleotide
aaccacauuaaaugccugc

SEQ ID NO: 3222812 - RNA, 19 nt, Artificial Sequence
  Description of Artificial Sequence: Synthetic oligonucleotide
uuaauugugcauaugugac

SEQ ID NO: 3222813 - RNA, 19 nt, Artificial Sequence
  Description of Artificial Sequence: Synthetic oligonucleotide
auauuaaauggccacauga

SEQ ID NO: 3222814 - RNA, 19 nt, Artificial Sequence
  Description of Artificial Sequence: Synthetic oligonucleotide
aauggcagcagaugaagag

SEQ ID NO: 3222815 - RNA, 19 nt, Artificial Sequence
  Description of Artificial Sequence: Synthetic oligonucleotide
uuaucuaacaagcccuggg

SEQ ID NO: 3222816 - RNA, 19 nt, Artificial Sequence
  Description of Artificial Sequence: Synthetic oligonucleotide
cauaauuagcuuauauggg

SEQ ID NO: 3222817 - RNA, 19 nt, Artificial Sequence
  Description of Artificial Sequence: Synthetic oligonucleotide
auguauauacauugcacgg

SEQ ID NO: 3222818 - RNA, 19 nt, Artificial Sequence
  Description of Artificial Sequence: Synthetic oligonucleotide
aacuuuuaggcacagguaa

SEQ ID NO: 3222819 - RNA, 19 nt, Artificial Sequence
  Description of Artificial Sequence: Synthetic oligonucleotide
uaaaaggucagaagcauac

SEQ ID NO: 3222820 - RNA, 19 nt, Artificial Sequence
  Description of Artificial Sequence: Synthetic oligonucleotide
uguucuauauguauauaca

SEQ ID NO: 3222821 - RNA, 19 nt, Artificial Sequence
  Description of Artificial Sequence: Synthetic oligonucleotide
acauacauaggcuggacuc

SEQ ID NO: 3222822 - RNA, 19 nt, Artificial Sequence
  Description of Artificial Sequence: Synthetic oligonucleotide
auagaguugaagaaggaac

SEQ ID NO: 3222823 - RNA, 19 nt, Artificial Sequence
  Description of Artificial Sequence: Synthetic oligonucleotide
ugaggauucaauuaucuaa

SEQ ID NO: 3222824 - RNA, 19 nt, Artificial Sequence
  Description of Artificial Sequence: Synthetic oligonucleotide
aguaaaauacuauguaggu

SEQ ID NO: 3222825 - RNA, 19 nt, Artificial Sequence
  Description of Artificial Sequence: Synthetic oligonucleotide
uugaagagaauacaugggu

SEQ ID NO: 3222826 - RNA, 19 nt, Artificial Sequence
  Description of Artificial Sequence: Synthetic oligonucleotide
ucauugauuccccucuugg

SEQ ID NO: 3222827 - RNA, 19 nt, Artificial Sequence
  Description of Artificial Sequence: Synthetic oligonucleotide
ucuuguuuuggucuggcug

SEQ ID NO: 3222828 - RNA, 19 nt, Artificial Sequence
  Description of Artificial Sequence: Synthetic oligonucleotide
uaguuaugggauaaugucc

SEQ ID NO: 3222829 - RNA, 19 nt, Artificial Sequence
  Description of Artificial Sequence: Synthetic oligonucleotide
uaauuagcuuauauggggc

SEQ ID NO: 3222830 - RNA, 19 nt, Artificial Sequence
  Description of Artificial Sequence: Synthetic oligonucleotide
cuugaaccacauuaaaugc

SEQ ID NO: 3222831 - RNA, 19 nt, Artificial Sequence
  Description of Artificial Sequence: Synthetic oligonucleotide
auauacauugcacgggcac

SEQ ID NO: 3222832 - RNA, 19 nt, Artificial Sequence
  Description of Artificial Sequence: Synthetic oligonucleotide
acuagagaggcagugaugg

SEQ ID NO: 3222833 - RNA, 19 nt, Artificial Sequence
  Description of Artificial Sequence: Synthetic oligonucleotide
uauguagguguaaggauag

SEQ ID NO: 3222834 - RNA, 19 nt, Artificial Sequence
  Description of Artificial Sequence: Synthetic oligonucleotide
auuugagcaaaguacauau

SEQ ID NO: 3222835 - RNA, 19 nt, Artificial Sequence
  Description of Artificial Sequence: Synthetic oligonucleotide
gaugguuucccagauagag

SEQ ID NO: 3222836 - RNA, 19 nt, Artificial Sequence
  Description of Artificial Sequence: Synthetic oligonucleotide
uaagugugcauauuugagc

SEQ ID NO: 3222837 - RNA, 19 nt, Artificial Sequence
  Description of Artificial Sequence: Synthetic oligonucleotide
auauguauauacauugcac

SEQ ID NO: 3222838 - RNA, 19 nt, Artificial Sequence
  Description of Artificial Sequence: Synthetic oligonucleotide
uggaaucauacuuuaaacu

SEQ ID NO: 3222839 - RNA, 19 nt, Artificial Sequence
  Description of Artificial Sequence: Synthetic oligonucleotide
ucggguuugagcaugccag

SEQ ID NO: 3222840 - RNA, 19 nt, Artificial Sequence
  Description of Artificial Sequence: Synthetic oligonucleotide
gaauggaauacagacagug

SEQ ID NO: 3222841 - RNA, 19 nt, Artificial Sequence
  Description of Artificial Sequence: Synthetic oligonucleotide
uggauuuggaaucauacuu

SEQ ID NO: 3222842 - RNA, 19 nt, Artificial Sequence
  Description of Artificial Sequence: Synthetic oligonucleotide
uugagcaaaguacauauua

SEQ ID NO: 3222843 - RNA, 19 nt, Artificial Sequence
  Description of Artificial Sequence: Synthetic oligonucleotide
guaaugaggaccuuguuga

SEQ ID NO: 3222844 - RNA, 19 nt, Artificial Sequence
  Description of Artificial Sequence: Synthetic oligonucleotide
uugagaguugcaaaccaag

SEQ ID NO: 3222845 - RNA, 19 nt, Artificial Sequence
  Description of Artificial Sequence: Synthetic oligonucleotide
ugaaccacauuaaaugccu

SEQ ID NO: 3222846 - RNA, 19 nt, Artificial Sequence
  Description of Artificial Sequence: Synthetic oligonucleotide
uuccauagauuucuaguag

SEQ ID NO: 3222847 - RNA, 19 nt, Artificial Sequence
  Description of Artificial Sequence: Synthetic oligonucleotide
uguaagugugcauauuuga

SEQ ID NO: 3222848 - RNA, 19 nt, Artificial Sequence
  Description of Artificial Sequence: Synthetic oligonucleotide
gagaguugcaaaccaagag

SEQ ID NO: 3222849 - RNA, 19 nt, Artificial Sequence
  Description of Artificial Sequence: Synthetic oligonucleotide
uuugagacuggacuuguga

SEQ ID NO: 3222850 - RNA, 19 nt, Artificial Sequence
  Description of Artificial Sequence: Synthetic oligonucleotide
uagaguugaagaaggaacu

SEQ ID NO: 3222851 - RNA, 19 nt, Artificial Sequence
  Description of Artificial Sequence: Synthetic oligonucleotide
aauuagcuuauauggggca

SEQ ID NO: 3222852 - RNA, 19 nt, Artificial Sequence
  Description of Artificial Sequence: Synthetic oligonucleotide
guaguuaugggauaauguc

SEQ ID NO: 3222853 - RNA, 19 nt, Artificial Sequence
  Description of Artificial Sequence: Synthetic oligonucleotide
uauuaaauggccacaugau

SEQ ID NO: 3222854 - RNA, 19 nt, Artificial Sequence
  Description of Artificial Sequence: Synthetic oligonucleotide
cuuguugagaguugcaaac

SEQ ID NO: 3222855 - RNA, 19 nt, Artificial Sequence
  Description of Artificial Sequence: Synthetic oligonucleotide
auggccacaugauaaacag

SEQ ID NO: 3222856 - RNA, 19 nt, Artificial Sequence
  Description of Artificial Sequence: Synthetic oligonucleotide
ucccagauagaguugaaga

SEQ ID NO: 3222857 - RNA, 19 nt, Artificial Sequence
  Description of Artificial Sequence: Synthetic oligonucleotide
aagagaauacauggguuuc

SEQ ID NO: 3222858 - RNA, 19 nt, Artificial Sequence
  Description of Artificial Sequence: Synthetic oligonucleotide
cagacgguguugaagaugc

SEQ ID NO: 3222859 - RNA, 19 nt, Artificial Sequence
  Description of Artificial Sequence: Synthetic oligonucleotide
uuuccauagauuucuagua

SEQ ID NO: 3222860 - RNA, 19 nt, Artificial Sequence
  Description of Artificial Sequence: Synthetic oligonucleotide
uaagaaccaccacuagggg

SEQ ID NO: 3222861 - RNA, 19 nt, Artificial Sequence
  Description of Artificial Sequence: Synthetic oligonucleotide
aaggucagaagcauacagg

SEQ ID NO: 3222862 - RNA, 19 nt, Artificial Sequence
  Description of Artificial Sequence: Synthetic oligonucleotide
uuauauggggcaucucucc

SEQ ID NO: 3222863 - RNA, 19 nt, Artificial Sequence
  Description of Artificial Sequence: Synthetic oligonucleotide
ugagcaaaguacauauuaa

SEQ ID NO: 3222864 - RNA, 19 nt, Artificial Sequence
  Description of Artificial Sequence: Synthetic oligonucleotide
auggcuauuuaauugugca

SEQ ID NO: 3222865 - RNA, 19 nt, Artificial Sequence
  Description of Artificial Sequence: Synthetic oligonucleotide
auuaaaugccugccagugg

SEQ ID NO: 3222866 - RNA, 19 nt, Artificial Sequence
  Description of Artificial Sequence: Synthetic oligonucleotide
accacauuaaaugccugcc

SEQ ID NO: 3222867 - RNA, 19 nt, Artificial Sequence
  Description of Artificial Sequence: Synthetic oligonucleotide
uaggcuggacucaaagggg

SEQ ID NO: 3222868 - RNA, 19 nt, Artificial Sequence
  Description of Artificial Sequence: Synthetic oligonucleotide
uauugucuaaauauacaua

SEQ ID NO: 3222869 - RNA, 19 nt, Artificial Sequence
  Description of Artificial Sequence: Synthetic oligonucleotide
auacuauguagguguaagg

SEQ ID NO: 3222870 - RNA, 19 nt, Artificial Sequence
  Description of Artificial Sequence: Synthetic oligonucleotide
aagagcuuugaauggauuu

SEQ ID NO: 3222871 - RNA, 19 nt, Artificial Sequence
  Description of Artificial Sequence: Synthetic oligonucleotide
uugagcagagauccagagg

SEQ ID NO: 3222872 - RNA, 19 nt, Artificial Sequence
  Description of Artificial Sequence: Synthetic oligonucleotide
auugaagagaauacauggg

SEQ ID NO: 3222873 - RNA, 19 nt, Artificial Sequence
  Description of Artificial Sequence: Synthetic oligonucleotide
guuugagcaugccagcagg

SEQ ID NO: 3222874 - RNA, 19 nt, Artificial Sequence
  Description of Artificial Sequence: Synthetic oligonucleotide
aggucagaagcauacagga

SEQ ID NO: 3222875 - RNA, 19 nt, Artificial Sequence
  Description of Artificial Sequence: Synthetic oligonucleotide
aacagaauaugcuguccca

SEQ ID NO: 3222876 - RNA, 19 nt, Artificial Sequence
  Description of Artificial Sequence: Synthetic oligonucleotide
acuaagucuggacacgucu

SEQ ID NO: 3222877 - RNA, 19 nt, Artificial Sequence
  Description of Artificial Sequence: Synthetic oligonucleotide
acugcuuagaaaagggcac

SEQ ID NO: 3222878 - RNA, 19 nt, Artificial Sequence
  Description of Artificial Sequence: Synthetic oligonucleotide
agguuccccauguauuucc

SEQ ID NO: 3222879 - RNA, 19 nt, Artificial Sequence
  Description of Artificial Sequence: Synthetic oligonucleotide
accuauugucuaaauauac

SEQ ID NO: 3222880 - RNA, 19 nt, Artificial Sequence
  Description of Artificial Sequence: Synthetic oligonucleotide
aagucuggacacgucuucc

SEQ ID NO: 3222881 - RNA, 19 nt, Artificial Sequence
  Description of Artificial Sequence: Synthetic oligonucleotide
agagaauacauggguuucc

SEQ ID NO: 3222882 - RNA, 19 nt, Artificial Sequence
  Description of Artificial Sequence: Synthetic oligonucleotide
ugucuguaucaauauacac

SEQ ID NO: 3222883 - RNA, 19 nt, Artificial Sequence
  Description of Artificial Sequence: Synthetic oligonucleotide
uugucuaaauauacauaca

SEQ ID NO: 3222884 - RNA, 19 nt, Artificial Sequence
  Description of Artificial Sequence: Synthetic oligonucleotide
ugagcaugccagcaggagc

SEQ ID NO: 3222885 - RNA, 19 nt, Artificial Sequence
  Description of Artificial Sequence: Synthetic oligonucleotide
uguaccagguuccccaugu

SEQ ID NO: 3222886 - RNA, 19 nt, Artificial Sequence
  Description of Artificial Sequence: Synthetic oligonucleotide
cuugcugaguaguuauggg

SEQ ID NO: 3222887 - RNA, 19 nt, Artificial Sequence
  Description of Artificial Sequence: Synthetic oligonucleotide
ucuaugucuguaucaauau

SEQ ID NO: 3222888 - RNA, 19 nt, Artificial Sequence
  Description of Artificial Sequence: Synthetic oligonucleotide
uccauagauuucuaguagu

SEQ ID NO: 3222889 - RNA, 19 nt, Artificial Sequence
  Description of Artificial Sequence: Synthetic oligonucleotide
cauaggcuggacucaaagg

SEQ ID NO: 3222890 - RNA, 19 nt, Artificial Sequence
  Description of Artificial Sequence: Synthetic oligonucleotide
acauaggcuggacucaaag

SEQ ID NO: 3222891 - RNA, 19 nt, Artificial Sequence
  Description of Artificial Sequence: Synthetic oligonucleotide
ucaagaaaguucaugaugg

SEQ ID NO: 3222892 - RNA, 19 nt, Artificial Sequence
  Description of Artificial Sequence: Synthetic oligonucleotide
aaauugucugcuuaggagg

SEQ ID NO: 3222893 - RNA, 19 nt, Artificial Sequence
  Description of Artificial Sequence: Synthetic oligonucleotide
aaaauugucugcuuaggag

SEQ ID NO: 3222894 - RNA, 19 nt, Artificial Sequence
  Description of Artificial Sequence: Synthetic oligonucleotide
aaguucaugauggaaauuc

SEQ ID NO: 3222895 - RNA, 19 nt, Artificial Sequence
  Description of Artificial Sequence: Synthetic oligonucleotide
aaacuaagcaaguggcccc

SEQ ID NO: 3222896 - RNA, 19 nt, Artificial Sequence
  Description of Artificial Sequence: Synthetic oligonucleotide
acauuuaaguagcagguac

SEQ ID NO: 3222897 - RNA, 19 nt, Artificial Sequence
  Description of Artificial Sequence: Synthetic oligonucleotide
aauguuuuccagaaaauug

SEQ ID NO: 3222898 - RNA, 19 nt, Artificial Sequence
  Description of Artificial Sequence: Synthetic oligonucleotide
uuuuccagaaaauugucug

SEQ ID NO: 3222899 - RNA, 19 nt, Artificial Sequence
  Description of Artificial Sequence: Synthetic oligonucleotide
uuuuccuuuucccaggcag

SEQ ID NO: 3222900 - RNA, 19 nt, Artificial Sequence
  Description of Artificial Sequence: Synthetic oligonucleotide
uugagcaccaaacuaagca

SEQ ID NO: 3222901 - RNA, 19 nt, Artificial Sequence
  Description of Artificial Sequence: Synthetic oligonucleotide
uguaccuccagcaugcagc

SEQ ID NO: 3222902 - RNA, 19 nt, Artificial Sequence
  Description of Artificial Sequence: Synthetic oligonucleotide
ucugccuccaaagaggucg

SEQ ID NO: 3222903 - RNA, 19 nt, Artificial Sequence
  Description of Artificial Sequence: Synthetic oligonucleotide
aaaauaauuaggccccaca

SEQ ID NO: 3222904 - RNA, 19 nt, Artificial Sequence
  Description of Artificial Sequence: Synthetic oligonucleotide
caugauggaaauucggagg

SEQ ID NO: 3222905 - RNA, 19 nt, Artificial Sequence
  Description of Artificial Sequence: Synthetic oligonucleotide
aaauaauuaggccccacau

SEQ ID NO: 3222906 - RNA, 19 nt, Artificial Sequence
  Description of Artificial Sequence: Synthetic oligonucleotide
uaugguguucaccacuagg

SEQ ID NO: 3222907 - RNA, 19 nt, Artificial Sequence
  Description of Artificial Sequence: Synthetic oligonucleotide
uucuucagcaacauuugag

SEQ ID NO: 3222908 - RNA, 19 nt, Artificial Sequence
  Description of Artificial Sequence: Synthetic oligonucleotide
ucaugauggaaauucggag

SEQ ID NO: 3222909 - RNA, 19 nt, Artificial Sequence
  Description of Artificial Sequence: Synthetic oligonucleotide
ucuguuuuccuuuucccag

SEQ ID NO: 3222910 - RNA, 19 nt, Artificial Sequence
  Description of Artificial Sequence: Synthetic oligonucleotide
uguaagggcaaaucuauga

SEQ ID NO: 3222911 - RNA, 19 nt, Artificial Sequence
  Description of Artificial Sequence: Synthetic oligonucleotide
aacauuugagcaccaaacu

SEQ ID NO: 3222912 - RNA, 19 nt, Artificial Sequence
  Description of Artificial Sequence: Synthetic oligonucleotide
gauuucugccuccaaagag

SEQ ID NO: 3222913 - RNA, 19 nt, Artificial Sequence
  Description of Artificial Sequence: Synthetic oligonucleotide
uggucaagaaaguucauga

SEQ ID NO: 3222914 - RNA, 19 nt, Artificial Sequence
  Description of Artificial Sequence: Synthetic oligonucleotide
auaauuaggccccacauuu

SEQ ID NO: 3222915 - RNA, 19 nt, Artificial Sequence
  Description of Artificial Sequence: Synthetic oligonucleotide
uucaugauggaaauucgga

SEQ ID NO: 3222916 - RNA, 19 nt, Artificial Sequence
  Description of Artificial Sequence: Synthetic oligonucleotide
uuuucuucagcaacauuug

SEQ ID NO: 3222917 - RNA, 19 nt, Artificial Sequence
  Description of Artificial Sequence: Synthetic oligonucleotide
agcuuuauuuucuucagca

SEQ ID NO: 3222918 - RNA, 19 nt, Artificial Sequence
  Description of Artificial Sequence: Synthetic oligonucleotide
accaaacuaagcaaguggc

SEQ ID NO: 3222919 - RNA, 19 nt, Artificial Sequence
  Description of Artificial Sequence: Synthetic oligonucleotide
ucuucugagauccagugua

SEQ ID NO: 3222920 - RNA, 19 nt, Artificial Sequence
  Description of Artificial Sequence: Synthetic oligonucleotide
agucuguuuuccuuuuccc

SEQ ID NO: 3222921 - RNA, 19 nt, Artificial Sequence
  Description of Artificial Sequence: Synthetic oligonucleotide
acuuuaaggucuuucccuc

SEQ ID NO: 3222922 - RNA, 19 nt, Artificial Sequence
  Description of Artificial Sequence: Synthetic oligonucleotide
caacauuugagcaccaaac

SEQ ID NO: 3222923 - RNA, 19 nt, Artificial Sequence
  Description of Artificial Sequence: Synthetic oligonucleotide
gucaagaaaguucaugaug

SEQ ID NO: 3222924 - RNA, 19 nt, Artificial Sequence
  Description of Artificial Sequence: Synthetic oligonucleotide
aagaggucgggaaaggcac

SEQ ID NO: 3222925 - RNA, 19 nt, Artificial Sequence
  Description of Artificial Sequence: Synthetic oligonucleotide
ugacuuuaaggucuuuccc

SEQ ID NO: 3222926 - RNA, 19 nt, Artificial Sequence
  Description of Artificial Sequence: Synthetic oligonucleotide
aauugucugcuuaggaggg

SEQ ID NO: 3222927 - RNA, 19 nt, Artificial Sequence
  Description of Artificial Sequence: Synthetic oligonucleotide
aauaauuaggccccacauu

SEQ ID NO: 3222928 - RNA, 19 nt, Artificial Sequence
  Description of Artificial Sequence: Synthetic oligonucleotide
ugccugaggaccaagucag

SEQ ID NO: 3222929 - RNA, 19 nt, Artificial Sequence
  Description of Artificial Sequence: Synthetic oligonucleotide
uuuccuuuucccaggcagg

SEQ ID NO: 3222930 - RNA, 19 nt, Artificial Sequence
  Description of Artificial Sequence: Synthetic oligonucleotide
ucgggaaaggcacuguaag

SEQ ID NO: 3222931 - RNA, 19 nt, Artificial Sequence
  Description of Artificial Sequence: Synthetic oligonucleotide
gauggaaauucggaggagg

SEQ ID NO: 3222932 - RNA, 19 nt, Artificial Sequence
  Description of Artificial Sequence: Synthetic oligonucleotide
uauuucuggaauguuuucc

SEQ ID NO: 3222933 - RNA, 19 nt, Artificial Sequence
  Description of Artificial Sequence: Synthetic oligonucleotide
uuaaguagcagguacuauu

SEQ ID NO: 3222934 - RNA, 19 nt, Artificial Sequence
  Description of Artificial Sequence: Synthetic oligonucleotide
accuccagcaugcagccgc

SEQ ID NO: 3222935 - RNA, 19 nt, Artificial Sequence
  Description of Artificial Sequence: Synthetic oligonucleotide
cugacuuuaaggucuuucc

SEQ ID NO: 3222936 - RNA, 19 nt, Artificial Sequence
  Description of Artificial Sequence: Synthetic oligonucleotide
uucccaggcaggcuuaacg

SEQ ID NO: 3222937 - RNA, 19 nt, Artificial Sequence
  Description of Artificial Sequence: Synthetic oligonucleotide
uuuccagaaaauugucugc

SEQ ID NO: 3222938 - RNA, 19 nt, Artificial Sequence
  Description of Artificial Sequence: Synthetic oligonucleotide
uaaggucuuucccuccucg

SEQ ID NO: 3222939 - RNA, 19 nt, Artificial Sequence
  Description of Artificial Sequence: Synthetic oligonucleotide
auuuucuucagcaacauuu

SEQ ID NO: 3222940 - RNA, 19 nt, Artificial Sequence
  Description of Artificial Sequence: Synthetic oligonucleotide
ucagcaacauuugagcacc

SEQ ID NO: 3222941 - RNA, 19 nt, Artificial Sequence
  Description of Artificial Sequence: Synthetic oligonucleotide
ucuggaauguuuuccagaa

SEQ ID NO: 3222942 - RNA, 19 nt, Artificial Sequence
  Description of Artificial Sequence: Synthetic oligonucleotide
caaacuaagcaaguggccc

SEQ ID NO: 3222943 - RNA, 19 nt, Artificial Sequence
  Description of Artificial Sequence: Synthetic oligonucleotide
uaagggcaaaucuaugaug

SEQ ID NO: 3222944 - RNA, 19 nt, Artificial Sequence
  Description of Artificial Sequence: Synthetic oligonucleotide
aguagcagguacuauuucu

SEQ ID NO: 3222945 - RNA, 19 nt, Artificial Sequence
  Description of Artificial Sequence: Synthetic oligonucleotide
aaggaucugagucuguuuu

SEQ ID NO: 3222946 - RNA, 19 nt, Artificial Sequence
  Description of Artificial Sequence: Synthetic oligonucleotide
aauuaggccccacauuuaa

SEQ ID NO: 3222947 - RNA, 19 nt, Artificial Sequence
  Description of Artificial Sequence: Synthetic oligonucleotide
caccaaacuaagcaagugg

SEQ ID NO: 3222948 - RNA, 19 nt, Artificial Sequence
  Description of Artificial Sequence: Synthetic oligonucleotide
auuucugccuccaaagagg

SEQ ID NO: 3222949 - RNA, 19 nt, Artificial Sequence
  Description of Artificial Sequence: Synthetic oligonucleotide
auuucuggaauguuuucca

SEQ ID NO: 3222950 - RNA, 19 nt, Artificial Sequence
  Description of Artificial Sequence: Synthetic oligonucleotide
augauggaaauucggagga

SEQ ID NO: 3222951 - RNA, 19 nt, Artificial Sequence
  Description of Artificial Sequence: Synthetic oligonucleotide
gagcuagggacccacaggc

SEQ ID NO: 3222952 - RNA, 19 nt, Artificial Sequence
  Description of Artificial Sequence: Synthetic oligonucleotide
gaaaauugucugcuuagga

SEQ ID NO: 3222953 - RNA, 19 nt, Artificial Sequence
  Description of Artificial Sequence: Synthetic oligonucleotide
uuaggccccacauuuaagu

SEQ ID NO: 3222954 - RNA, 19 nt, Artificial Sequence
  Description of Artificial Sequence: Synthetic oligonucleotide
ugaggaccaagucaggcac

SEQ ID NO: 3222955 - RNA, 19 nt, Artificial Sequence
  Description of Artificial Sequence: Synthetic oligonucleotide
acagcuuuauuuucuucag

SEQ ID NO: 3222956 - RNA, 19 nt, Artificial Sequence
  Description of Artificial Sequence: Synthetic oligonucleotide
cagaaaauugucugcuuag

SEQ ID NO: 3222957 - RNA, 19 nt, Artificial Sequence
  Description of Artificial Sequence: Synthetic oligonucleotide
aaguagcagguacuauuuc

SEQ ID NO: 3222958 - RNA, 19 nt, Artificial Sequence
  Description of Artificial Sequence: Synthetic oligonucleotide
uucagcaacauuugagcac

SEQ ID NO: 3222959 - RNA, 19 nt, Artificial Sequence
  Description of Artificial Sequence: Synthetic oligonucleotide
augguguucaccacuaggg

SEQ ID NO: 3222960 - RNA, 19 nt, Artificial Sequence
  Description of Artificial Sequence: Synthetic oligonucleotide
agaaaauugucugcuuagg

SEQ ID NO: 3222961 - RNA, 19 nt, Artificial Sequence
  Description of Artificial Sequence: Synthetic oligonucleotide
ugagauccaguguaccucc

SEQ ID NO: 3222962 - RNA, 19 nt, Artificial Sequence
  Description of Artificial Sequence: Synthetic oligonucleotide
aagcaaguggccccuaagu

SEQ ID NO: 3222963 - RNA, 19 nt, Artificial Sequence
  Description of Artificial Sequence: Synthetic oligonucleotide
uuuaaggucuuucccuccu

SEQ ID NO: 3222964 - RNA, 19 nt, Artificial Sequence
  Description of Artificial Sequence: Synthetic oligonucleotide
caaguggccccuaagugcc

SEQ ID NO: 3222965 - RNA, 19 nt, Artificial Sequence
  Description of Artificial Sequence: Synthetic oligonucleotide
uuuaugguguucaccacua

SEQ ID NO: 3222966 - RNA, 19 nt, Artificial Sequence
  Description of Artificial Sequence: Synthetic oligonucleotide
agauuagaagcacagcuuu

SEQ ID NO: 3222967 - RNA, 19 nt, Artificial Sequence
  Description of Artificial Sequence: Synthetic oligonucleotide
aaggucuuucccuccucgg

SEQ ID NO: 3222968 - RNA, 19 nt, Artificial Sequence
  Description of Artificial Sequence: Synthetic oligonucleotide
uagcagguacuauuucugg

SEQ ID NO: 3222969 - RNA, 19 nt, Artificial Sequence
  Description of Artificial Sequence: Synthetic oligonucleotide
uaaguagcagguacuauuu

SEQ ID NO: 3222970 - RNA, 19 nt, Artificial Sequence
  Description of Artificial Sequence: Synthetic oligonucleotide
gagucuguuuuccuuuucc

SEQ ID NO: 3222971 - RNA, 19 nt, Artificial Sequence
  Description of Artificial Sequence: Synthetic oligonucleotide
agaagcacagcuuuauuuu

SEQ ID NO: 3222972 - RNA, 19 nt, Artificial Sequence
  Description of Artificial Sequence: Synthetic oligonucleotide
uacuauuucuggaauguuu

SEQ ID NO: 3222973 - RNA, 19 nt, Artificial Sequence
  Description of Artificial Sequence: Synthetic oligonucleotide
uguuuuccagaaaauuguc

SEQ ID NO: 3222974 - RNA, 19 nt, Artificial Sequence
  Description of Artificial Sequence: Synthetic oligonucleotide
agucuucugagauccagug

SEQ ID NO: 3222975 - RNA, 19 nt, Artificial Sequence
  Description of Artificial Sequence: Synthetic oligonucleotide
aauucggaggaggcgagag

SEQ ID NO: 3222976 - RNA, 19 nt, Artificial Sequence
  Description of Artificial Sequence: Synthetic oligonucleotide
uucggcaucaggagcuagg

SEQ ID NO: 3222977 - RNA, 19 nt, Artificial Sequence
  Description of Artificial Sequence: Synthetic oligonucleotide
agaaaguucaugauggaaa

SEQ ID NO: 3222978 - RNA, 19 nt, Artificial Sequence
  Description of Artificial Sequence: Synthetic oligonucleotide
uuucuggaauguuuuccag

SEQ ID NO: 3222979 - RNA, 19 nt, Artificial Sequence
  Description of Artificial Sequence: Synthetic oligonucleotide
ucugagauccaguguaccu

SEQ ID NO: 3222980 - RNA, 19 nt, Artificial Sequence
  Description of Artificial Sequence: Synthetic oligonucleotide
auggaaauucggaggaggc

SEQ ID NO: 3222981 - RNA, 19 nt, Artificial Sequence
  Description of Artificial Sequence: Synthetic oligonucleotide
uagaagcacagcuuuauuu

SEQ ID NO: 3222982 - RNA, 19 nt, Artificial Sequence
  Description of Artificial Sequence: Synthetic oligonucleotide
aaagaggucgggaaaggca

SEQ ID NO: 3222983 - RNA, 19 nt, Artificial Sequence
  Description of Artificial Sequence: Synthetic oligonucleotide
uuugagcaccaaacuaagc

SEQ ID NO: 3222984 - RNA, 19 nt, Artificial Sequence
  Description of Artificial Sequence: Synthetic oligonucleotide
ucugcuuaggagggaaccg

SEQ ID NO: 3222985 - RNA, 19 nt, Artificial Sequence
  Description of Artificial Sequence: Synthetic oligonucleotide
gguguucaccacuagggcg

SEQ ID NO: 3222986 - RNA, 19 nt, Artificial Sequence
  Description of Artificial Sequence: Synthetic oligonucleotide
uccaaagaggucgggaaag

SEQ ID NO: 3222987 - RNA, 19 nt, Artificial Sequence
  Description of Artificial Sequence: Synthetic oligonucleotide
uaagcaaguggccccuaag

SEQ ID NO: 3222988 - RNA, 19 nt, Artificial Sequence
  Description of Artificial Sequence: Synthetic oligonucleotide
ggagggaaccgacauaagg

SEQ ID NO: 3222989 - RNA, 19 nt, Artificial Sequence
  Description of Artificial Sequence: Synthetic oligonucleotide
cccacauuuaaguagcagg

SEQ ID NO: 3222990 - RNA, 19 nt, Artificial Sequence
  Description of Artificial Sequence: Synthetic oligonucleotide
uucuggaauguuuuccaga

SEQ ID NO: 3222991 - RNA, 19 nt, Artificial Sequence
  Description of Artificial Sequence: Synthetic oligonucleotide
aauaaaauuagcugaaagg

SEQ ID NO: 3222992 - RNA, 19 nt, Artificial Sequence
  Description of Artificial Sequence: Synthetic oligonucleotide
uuagcaacgaaucugaugc

SEQ ID NO: 3222993 - RNA, 19 nt, Artificial Sequence
  Description of Artificial Sequence: Synthetic oligonucleotide
uuuauaaacgaaaauguag

SEQ ID NO: 3222994 - RNA, 19 nt, Artificial Sequence
  Description of Artificial Sequence: Synthetic oligonucleotide
aaauuguucaaaccuaugg

SEQ ID NO: 3222995 - RNA, 19 nt, Artificial Sequence
  Description of Artificial Sequence: Synthetic oligonucleotide
ugugaauuaagucauacug

SEQ ID NO: 3222996 - RNA, 19 nt, Artificial Sequence
  Description of Artificial Sequence: Synthetic oligonucleotide
guuaaugccauuuacaaag

SEQ ID NO: 3222997 - RNA, 19 nt, Artificial Sequence
  Description of Artificial Sequence: Synthetic oligonucleotide
auacaaaacuuucaaaacc

SEQ ID NO: 3222998 - RNA, 19 nt, Artificial Sequence
  Description of Artificial Sequence: Synthetic oligonucleotide
auuuacaucacacaaagcu

SEQ ID NO: 3222999 - RNA, 19 nt, Artificial Sequence
  Description of Artificial Sequence: Synthetic oligonucleotide
uauuuauaaacgaaaaugu

SEQ ID NO: 3223000 - RNA, 19 nt, Artificial Sequence
  Description of Artificial Sequence: Synthetic oligonucleotide
aaaauuagcugaaagguuc

SEQ ID NO: 3223001 - RNA, 19 nt, Artificial Sequence
  Description of Artificial Sequence: Synthetic oligonucleotide
uuaaacguaacucucaaaa

SEQ ID NO: 3223002 - RNA, 19 nt, Artificial Sequence
  Description of Artificial Sequence: Synthetic oligonucleotide
aacucugacaaucuaaaug

SEQ ID NO: 3223003 - RNA, 19 nt, Artificial Sequence
  Description of Artificial Sequence: Synthetic oligonucleotide
caaguaacaauguuaaugc

SEQ ID NO: 3223004 - RNA, 19 nt, Artificial Sequence
  Description of Artificial Sequence: Synthetic oligonucleotide
agcuagacuaucuacagac

SEQ ID NO: 3223005 - RNA, 19 nt, Artificial Sequence
  Description of Artificial Sequence: Synthetic oligonucleotide
ucuucaacgauacugcaag

SEQ ID NO: 3223006 - RNA, 19 nt, Artificial Sequence
  Description of Artificial Sequence: Synthetic oligonucleotide
ucuuaaauacucaacagaa

SEQ ID NO: 3223007 - RNA, 19 nt, Artificial Sequence
  Description of Artificial Sequence: Synthetic oligonucleotide
aacagaugugaauuaaguc

SEQ ID NO: 3223008 - RNA, 19 nt, Artificial Sequence
  Description of Artificial Sequence: Synthetic oligonucleotide
aagguucauaaacacaagg

SEQ ID NO: 3223009 - RNA, 19 nt, Artificial Sequence
  Description of Artificial Sequence: Synthetic oligonucleotide
uaauguacaacuauguuau

SEQ ID NO: 3223010 - RNA, 19 nt, Artificial Sequence
  Description of Artificial Sequence: Synthetic oligonucleotide
acagaugugaauuaaguca

SEQ ID NO: 3223011 - RNA, 19 nt, Artificial Sequence
  Description of Artificial Sequence: Synthetic oligonucleotide
aucuuauuuuccuuaagac

SEQ ID NO: 3223012 - RNA, 19 nt, Artificial Sequence
  Description of Artificial Sequence: Synthetic oligonucleotide
agcugaaagguucauaaac

SEQ ID NO: 3223013 - RNA, 19 nt, Artificial Sequence
  Description of Artificial Sequence: Synthetic oligonucleotide
uaggaaauuguucaaaccu

SEQ ID NO: 3223014 - RNA, 19 nt, Artificial Sequence
  Description of Artificial Sequence: Synthetic oligonucleotide
aaauucaaguccucaggac

SEQ ID NO: 3223015 - RNA, 19 nt, Artificial Sequence
  Description of Artificial Sequence: Synthetic oligonucleotide
aaguuuuauaacuacaauu

SEQ ID NO: 3223016 - RNA, 19 nt, Artificial Sequence
  Description of Artificial Sequence: Synthetic oligonucleotide
uguacagccucuuaaauac

SEQ ID NO: 3223017 - RNA, 19 nt, Artificial Sequence
  Description of Artificial Sequence: Synthetic oligonucleotide
aaagauaauguacaacuau

SEQ ID NO: 3223018 - RNA, 19 nt, Artificial Sequence
  Description of Artificial Sequence: Synthetic oligonucleotide
uuaugcauagcacauugcc

SEQ ID NO: 3223019 - RNA, 19 nt, Artificial Sequence
  Description of Artificial Sequence: Synthetic oligonucleotide
aaguaacaauguuaaugcc

SEQ ID NO: 3223020 - RNA, 19 nt, Artificial Sequence
  Description of Artificial Sequence: Synthetic oligonucleotide
uuaacgaagguuaacucug

SEQ ID NO: 3223021 - RNA, 19 nt, Artificial Sequence
  Description of Artificial Sequence: Synthetic oligonucleotide
uuauuaagugcuccgauga

SEQ ID NO: 3223022 - RNA, 19 nt, Artificial Sequence
  Description of Artificial Sequence: Synthetic oligonucleotide
uacaaaacuuucaaaaccu

SEQ ID NO: 3223023 - RNA, 19 nt, Artificial Sequence
  Description of Artificial Sequence: Synthetic oligonucleotide
auaaaauuagcugaaaggu

SEQ ID NO: 3223024 - RNA, 19 nt, Artificial Sequence
  Description of Artificial Sequence: Synthetic oligonucleotide
aaggauaugagaaagugcu

SEQ ID NO: 3223025 - RNA, 19 nt, Artificial Sequence
  Description of Artificial Sequence: Synthetic oligonucleotide
gaaagaagcguguagcugc

SEQ ID NO: 3223026 - RNA, 19 nt, Artificial Sequence
  Description of Artificial Sequence: Synthetic oligonucleotide
acaacuauguuaugcauag

SEQ ID NO: 3223027 - RNA, 19 nt, Artificial Sequence
  Description of Artificial Sequence: Synthetic oligonucleotide
ucuuauuuuccuuaagaca

SEQ ID NO: 3223028 - RNA, 19 nt, Artificial Sequence
  Description of Artificial Sequence: Synthetic oligonucleotide
uguaaagugaagcacaauu

SEQ ID NO: 3223029 - RNA, 19 nt, Artificial Sequence
  Description of Artificial Sequence: Synthetic oligonucleotide
aagcacaaagaauccaaac

SEQ ID NO: 3223030 - RNA, 19 nt, Artificial Sequence
  Description of Artificial Sequence: Synthetic oligonucleotide
ucuaaggggaagcauauga

SEQ ID NO: 3223031 - RNA, 19 nt, Artificial Sequence
  Description of Artificial Sequence: Synthetic oligonucleotide
uaaacgaaaauguagcauc

SEQ ID NO: 3223032 - RNA, 19 nt, Artificial Sequence
  Description of Artificial Sequence: Synthetic oligonucleotide
ucuaaaugcaccuaaggau

SEQ ID NO: 3223033 - RNA, 19 nt, Artificial Sequence
  Description of Artificial Sequence: Synthetic oligonucleotide
acgaaaauguagcaucacc

SEQ ID NO: 3223034 - RNA, 19 nt, Artificial Sequence
  Description of Artificial Sequence: Synthetic oligonucleotide
uacuguacuauacugaaaa

SEQ ID NO: 3223035 - RNA, 19 nt, Artificial Sequence
  Description of Artificial Sequence: Synthetic oligonucleotide
uguuaugcauagcacauug

SEQ ID NO: 3223036 - RNA, 19 nt, Artificial Sequence
  Description of Artificial Sequence: Synthetic oligonucleotide
acuaucuacagacagauua

SEQ ID NO: 3223037 - RNA, 19 nt, Artificial Sequence
  Description of Artificial Sequence: Synthetic oligonucleotide
uuuaacgaagguuaacucu

SEQ ID NO: 3223038 - RNA, 19 nt, Artificial Sequence
  Description of Artificial Sequence: Synthetic oligonucleotide
aaauaaauaccagccuuac

SEQ ID NO: 3223039 - RNA, 19 nt, Artificial Sequence
  Description of Artificial Sequence: Synthetic oligonucleotide
uuuguuuauugauguaccg

SEQ ID NO: 3223040 - RNA, 19 nt, Artificial Sequence
  Description of Artificial Sequence: Synthetic oligonucleotide
gacaaaacaauucuucaac

SEQ ID NO: 3223041 - RNA, 19 nt, Artificial Sequence
  Description of Artificial Sequence: Synthetic oligonucleotide
uuuagcacgcgccucacag

SEQ ID NO: 3223042 - RNA, 19 nt, Artificial Sequence
  Description of Artificial Sequence: Synthetic oligonucleotide
aagaccucaaguaacaaug

SEQ ID NO: 3223043 - RNA, 19 nt, Artificial Sequence
  Description of Artificial Sequence: Synthetic oligonucleotide
auaauguacaacuauguua

SEQ ID NO: 3223044 - RNA, 19 nt, Artificial Sequence
  Description of Artificial Sequence: Synthetic oligonucleotide
ucacacaaagcucaggugu

SEQ ID NO: 3223045 - RNA, 19 nt, Artificial Sequence
  Description of Artificial Sequence: Synthetic oligonucleotide
uuagcugaaagguucauaa

SEQ ID NO: 3223046 - RNA, 19 nt, Artificial Sequence
  Description of Artificial Sequence: Synthetic oligonucleotide
ugaagcuagacuaucuaca

SEQ ID NO: 3223047 - RNA, 19 nt, Artificial Sequence
  Description of Artificial Sequence: Synthetic oligonucleotide
agucauacuguacaacuuc

SEQ ID NO: 3223048 - RNA, 19 nt, Artificial Sequence
  Description of Artificial Sequence: Synthetic oligonucleotide
uauacaguaugaaaauagu

SEQ ID NO: 3223049 - RNA, 19 nt, Artificial Sequence
  Description of Artificial Sequence: Synthetic oligonucleotide
uuuauuaagugcuccgaug

SEQ ID NO: 3223050 - RNA, 19 nt, Artificial Sequence
  Description of Artificial Sequence: Synthetic oligonucleotide
cagguguuagccuuaaacg

SEQ ID NO: 3223051 - RNA, 19 nt, Artificial Sequence
  Description of Artificial Sequence: Synthetic oligonucleotide
uaaggauaugagaaagugc

SEQ ID NO: 3223052 - RNA, 19 nt, Artificial Sequence
  Description of Artificial Sequence: Synthetic oligonucleotide
uuugcuacaguaguacagg

SEQ ID NO: 3223053 - RNA, 19 nt, Artificial Sequence
  Description of Artificial Sequence: Synthetic oligonucleotide
uuuacaucacacaaagcuc

SEQ ID NO: 3223054 - RNA, 19 nt, Artificial Sequence
  Description of Artificial Sequence: Synthetic oligonucleotide
cauuuuauuaagugcuccg

SEQ ID NO: 3223055 - RNA, 19 nt, Artificial Sequence
  Description of Artificial Sequence: Synthetic oligonucleotide
gaauaaaacucaaagcaac

SEQ ID NO: 3223056 - RNA, 19 nt, Artificial Sequence
  Description of Artificial Sequence: Synthetic oligonucleotide
uguuuauugauguaccgaa

SEQ ID NO: 3223057 - RNA, 19 nt, Artificial Sequence
  Description of Artificial Sequence: Synthetic oligonucleotide
auaugagaaagugcuaagc

SEQ ID NO: 3223058 - RNA, 19 nt, Artificial Sequence
  Description of Artificial Sequence: Synthetic oligonucleotide
aagauaauguacaacuaug

SEQ ID NO: 3223059 - RNA, 19 nt, Artificial Sequence
  Description of Artificial Sequence: Synthetic oligonucleotide
uuaccuacaaacauauuua

SEQ ID NO: 3223060 - RNA, 19 nt, Artificial Sequence
  Description of Artificial Sequence: Synthetic oligonucleotide
gaagcuagacuaucuacag

SEQ ID NO: 3223061 - RNA, 19 nt, Artificial Sequence
  Description of Artificial Sequence: Synthetic oligonucleotide
ugagaaagugcuaagccaa

SEQ ID NO: 3223062 - RNA, 19 nt, Artificial Sequence
  Description of Artificial Sequence: Synthetic oligonucleotide
agaauccaaacacaaaaga

SEQ ID NO: 3223063 - RNA, 19 nt, Artificial Sequence
  Description of Artificial Sequence: Synthetic oligonucleotide
ugaauuaagucauacugua

SEQ ID NO: 3223064 - RNA, 19 nt, Artificial Sequence
  Description of Artificial Sequence: Synthetic oligonucleotide
aacauauuuauaaacgaaa

SEQ ID NO: 3223065 - RNA, 19 nt, Artificial Sequence
  Description of Artificial Sequence: Synthetic oligonucleotide
ugcaaguacaucacuaaac

SEQ ID NO: 3223066 - RNA, 19 nt, Artificial Sequence
  Description of Artificial Sequence: Synthetic oligonucleotide
ucaacgauacugcaaguac

SEQ ID NO: 3223067 - RNA, 19 nt, Artificial Sequence
  Description of Artificial Sequence: Synthetic oligonucleotide
ugcugcaguacaaaucagg

SEQ ID NO: 3223068 - RNA, 19 nt, Artificial Sequence
  Description of Artificial Sequence: Synthetic oligonucleotide
acauuuuauuaagugcucc

SEQ ID NO: 3223069 - RNA, 19 nt, Artificial Sequence
  Description of Artificial Sequence: Synthetic oligonucleotide
ucuacagacagauuagcaa

SEQ ID NO: 3223070 - RNA, 19 nt, Artificial Sequence
  Description of Artificial Sequence: Synthetic oligonucleotide
cuagacuaucuacagacag

SEQ ID NO: 3223071 - RNA, 19 nt, Artificial Sequence
  Description of Artificial Sequence: Synthetic oligonucleotide
uauguuaugcauagcacau

SEQ ID NO: 3223072 - RNA, 19 nt, Artificial Sequence
  Description of Artificial Sequence: Synthetic oligonucleotide
gaaagugcuaagccaauug

SEQ ID NO: 3223073 - RNA, 19 nt, Artificial Sequence
  Description of Artificial Sequence: Synthetic oligonucleotide
uaagcaagaccucaaguaa

SEQ ID NO: 3223074 - RNA, 19 nt, Artificial Sequence
  Description of Artificial Sequence: Synthetic oligonucleotide
accauaaacagcugaagcu

SEQ ID NO: 3223075 - RNA, 19 nt, Artificial Sequence
  Description of Artificial Sequence: Synthetic oligonucleotide
ucaucaaugccuugguuug

SEQ ID NO: 3223076 - RNA, 19 nt, Artificial Sequence
  Description of Artificial Sequence: Synthetic oligonucleotide
agaaaacauguacagccuc

SEQ ID NO: 3223077 - RNA, 19 nt, Artificial Sequence
  Description of Artificial Sequence: Synthetic oligonucleotide
aacaucacuugauauguaa

SEQ ID NO: 3223078 - RNA, 19 nt, Artificial Sequence
  Description of Artificial Sequence: Synthetic oligonucleotide
cugaagagcauugaguggg

SEQ ID NO: 3223079 - RNA, 19 nt, Artificial Sequence
  Description of Artificial Sequence: Synthetic oligonucleotide
augcauagcacauugccug

SEQ ID NO: 3223080 - RNA, 19 nt, Artificial Sequence
  Description of Artificial Sequence: Synthetic oligonucleotide
gauaugagaaagugcuaag

SEQ ID NO: 3223081 - RNA, 19 nt, Artificial Sequence
  Description of Artificial Sequence: Synthetic oligonucleotide
aaaacugauacaaaacuuu

SEQ ID NO: 3223082 - RNA, 19 nt, Artificial Sequence
  Description of Artificial Sequence: Synthetic oligonucleotide
ucugaugcacuguaaauuc

SEQ ID NO: 3223083 - RNA, 19 nt, Artificial Sequence
  Description of Artificial Sequence: Synthetic oligonucleotide
aauaaaacucaaagcaacu

SEQ ID NO: 3223084 - RNA, 19 nt, Artificial Sequence
  Description of Artificial Sequence: Synthetic oligonucleotide
aguuuuauaacuacaauuu

SEQ ID NO: 3223085 - RNA, 19 nt, Artificial Sequence
  Description of Artificial Sequence: Synthetic oligonucleotide
aaauaccagccuuacauuu

SEQ ID NO: 3223086 - RNA, 19 nt, Artificial Sequence
  Description of Artificial Sequence: Synthetic oligonucleotide
uacuguacaacuucaaaua

SEQ ID NO: 3223087 - RNA, 19 nt, Artificial Sequence
  Description of Artificial Sequence: Synthetic oligonucleotide
aauaaauaccagccuuaca

SEQ ID NO: 3223088 - RNA, 19 nt, Artificial Sequence
  Description of Artificial Sequence: Synthetic oligonucleotide
aaacacaaggucuuauuua

SEQ ID NO: 3223089 - RNA, 19 nt, Artificial Sequence
  Description of Artificial Sequence: Synthetic oligonucleotide
auuagcaacgaaucugaug

SEQ ID NO: 3223090 - RNA, 19 nt, Artificial Sequence
  Description of Artificial Sequence: Synthetic oligonucleotide
ucugacaaucuaaaugcac

SEQ ID NO: 3223091 - RNA, 19 nt, Artificial Sequence
  Description of Artificial Sequence: Synthetic oligonucleotide
aaaucuggagauuuggucc

SEQ ID NO: 3223092 - RNA, 19 nt, Artificial Sequence
  Description of Artificial Sequence: Synthetic oligonucleotide
aaucauagaugcgaaaggc

SEQ ID NO: 3223093 - RNA, 19 nt, Artificial Sequence
  Description of Artificial Sequence: Synthetic oligonucleotide
aauucaugaaaucuggaga

SEQ ID NO: 3223094 - RNA, 19 nt, Artificial Sequence
  Description of Artificial Sequence: Synthetic oligonucleotide
aaaaucauagaugcgaaag

SEQ ID NO: 3223095 - RNA, 19 nt, Artificial Sequence
  Description of Artificial Sequence: Synthetic oligonucleotide
ucguuaaaaucauagaugc

SEQ ID NO: 3223096 - RNA, 19 nt, Artificial Sequence
  Description of Artificial Sequence: Synthetic oligonucleotide
aaaucauagaugcgaaagg

SEQ ID NO: 3223097 - RNA, 19 nt, Artificial Sequence
  Description of Artificial Sequence: Synthetic oligonucleotide
ucaaucuucagacuggggc

SEQ ID NO: 3223098 - RNA, 19 nt, Artificial Sequence
  Description of Artificial Sequence: Synthetic oligonucleotide
aaggagaacacauuguugu

SEQ ID NO: 3223099 - RNA, 19 nt, Artificial Sequence
  Description of Artificial Sequence: Synthetic oligonucleotide
gauucgaucucugaaaggg

SEQ ID NO: 3223100 - RNA, 19 nt, Artificial Sequence
  Description of Artificial Sequence: Synthetic oligonucleotide
aaaugaauucaugaaaucu

SEQ ID NO: 3223101 - RNA, 19 nt, Artificial Sequence
  Description of Artificial Sequence: Synthetic oligonucleotide
gaauucaugaaaucuggag

SEQ ID NO: 3223102 - RNA, 19 nt, Artificial Sequence
  Description of Artificial Sequence: Synthetic oligonucleotide
uguucgaacucagagaagg

SEQ ID NO: 3223103 - RNA, 19 nt, Artificial Sequence
  Description of Artificial Sequence: Synthetic oligonucleotide
aaugaauucaugaaaucug

SEQ ID NO: 3223104 - RNA, 19 nt, Artificial Sequence
  Description of Artificial Sequence: Synthetic oligonucleotide
auauucaaucuucagacug

SEQ ID NO: 3223105 - RNA, 19 nt, Artificial Sequence
  Description of Artificial Sequence: Synthetic oligonucleotide
uauucaaucuucagacugg

SEQ ID NO: 3223106 - RNA, 19 nt, Artificial Sequence
  Description of Artificial Sequence: Synthetic oligonucleotide
ugcauguucgaacucagag

SEQ ID NO: 3223107 - RNA, 19 nt, Artificial Sequence
  Description of Artificial Sequence: Synthetic oligonucleotide
ucucguuaaaaucauagau

SEQ ID NO: 3223108 - RNA, 19 nt, Artificial Sequence
  Description of Artificial Sequence: Synthetic oligonucleotide
aaugaagccauucucguua

SEQ ID NO: 3223109 - RNA, 19 nt, Artificial Sequence
  Description of Artificial Sequence: Synthetic oligonucleotide
uguuaagcagucuuaacac

SEQ ID NO: 3223110 - RNA, 19 nt, Artificial Sequence
  Description of Artificial Sequence: Synthetic oligonucleotide
aaaggcauauucaaucuuc

SEQ ID NO: 3223111 - RNA, 19 nt, Artificial Sequence
  Description of Artificial Sequence: Synthetic oligonucleotide
uuaagcagucuuaacacga

SEQ ID NO: 3223112 - RNA, 19 nt, Artificial Sequence
  Description of Artificial Sequence: Synthetic oligonucleotide
ucuuaacacgauuuucugg

SEQ ID NO: 3223113 - RNA, 19 nt, Artificial Sequence
  Description of Artificial Sequence: Synthetic oligonucleotide
ucgucuucaucaaugaagc

SEQ ID NO: 3223114 - RNA, 19 nt, Artificial Sequence
  Description of Artificial Sequence: Synthetic oligonucleotide
agaugcgaaaggcauauuc

SEQ ID NO: 3223115 - RNA, 19 nt, Artificial Sequence
  Description of Artificial Sequence: Synthetic oligonucleotide
cacaucaucacuguuaagc

SEQ ID NO: 3223116 - RNA, 19 nt, Artificial Sequence
  Description of Artificial Sequence: Synthetic oligonucleotide
aacacgauuuucuggaggu

SEQ ID NO: 3223117 - RNA, 19 nt, Artificial Sequence
  Description of Artificial Sequence: Synthetic oligonucleotide
cucguuaaaaucauagaug

SEQ ID NO: 3223118 - RNA, 19 nt, Artificial Sequence
  Description of Artificial Sequence: Synthetic oligonucleotide
guuaaaaucauagaugcga

SEQ ID NO: 3223119 - RNA, 19 nt, Artificial Sequence
  Description of Artificial Sequence: Synthetic oligonucleotide
gagaacacauuguuguggg

SEQ ID NO: 3223120 - RNA, 19 nt, Artificial Sequence
  Description of Artificial Sequence: Synthetic oligonucleotide
auuguugugggagaacacc

SEQ ID NO: 3223121 - RNA, 19 nt, Artificial Sequence
  Description of Artificial Sequence: Synthetic oligonucleotide
aaugaauccgaaaugaauu

SEQ ID NO: 3223122 - RNA, 19 nt, Artificial Sequence
  Description of Artificial Sequence: Synthetic oligonucleotide
augaauccgaaaugaauuc

SEQ ID NO: 3223123 - RNA, 19 nt, Artificial Sequence
  Description of Artificial Sequence: Synthetic oligonucleotide
uuaaaaucauagaugcgaa

SEQ ID NO: 3223124 - RNA, 19 nt, Artificial Sequence
  Description of Artificial Sequence: Synthetic oligonucleotide
uaacacgauuuucuggagg

SEQ ID NO: 3223125 - RNA, 19 nt, Artificial Sequence
  Description of Artificial Sequence: Synthetic oligonucleotide
ucuucaucaaugaagccau

SEQ ID NO: 3223126 - RNA, 19 nt, Artificial Sequence
  Description of Artificial Sequence: Synthetic oligonucleotide
aaggacagcauguugucgu

SEQ ID NO: 3223127 - RNA, 19 nt, Artificial Sequence
  Description of Artificial Sequence: Synthetic oligonucleotide
cuuaacacgauuuucugga

SEQ ID NO: 3223128 - RNA, 19 nt, Artificial Sequence
  Description of Artificial Sequence: Synthetic oligonucleotide
auucaugaaaucuggagau

SEQ ID NO: 3223129 - RNA, 19 nt, Artificial Sequence
  Description of Artificial Sequence: Synthetic oligonucleotide
agaaaugaauccgaaauga

SEQ ID NO: 3223130 - RNA, 19 nt, Artificial Sequence
  Description of Artificial Sequence: Synthetic oligonucleotide
ucaucaaugaagccauucu

SEQ ID NO: 3223131 - RNA, 19 nt, Artificial Sequence
  Description of Artificial Sequence: Synthetic oligonucleotide
ucauagaugcgaaaggcau

SEQ ID NO: 3223132 - RNA, 19 nt, Artificial Sequence
  Description of Artificial Sequence: Synthetic oligonucleotide
gagaacauccucaaaggag

SEQ ID NO: 3223133 - RNA, 19 nt, Artificial Sequence
  Description of Artificial Sequence: Synthetic oligonucleotide
ucaacauccccagaaauga

SEQ ID NO: 3223134 - RNA, 19 nt, Artificial Sequence
  Description of Artificial Sequence: Synthetic oligonucleotide
ugggagaacacccugcaga

SEQ ID NO: 3223135 - RNA, 19 nt, Artificial Sequence
  Description of Artificial Sequence: Synthetic oligonucleotide
cucaaaggagaacacauug

SEQ ID NO: 3223136 - RNA, 19 nt, Artificial Sequence
  Description of Artificial Sequence: Synthetic oligonucleotide
gaaaucuggagauuugguc

SEQ ID NO: 3223137 - RNA, 19 nt, Artificial Sequence
  Description of Artificial Sequence: Synthetic oligonucleotide
aucaaugaagccauucucg

SEQ ID NO: 3223138 - RNA, 19 nt, Artificial Sequence
  Description of Artificial Sequence: Synthetic oligonucleotide
guuaagcagucuuaacacg

SEQ ID NO: 3223139 - RNA, 19 nt, Artificial Sequence
  Description of Artificial Sequence: Synthetic oligonucleotide
auucucguuaaaaucauag

SEQ ID NO: 3223140 - RNA, 19 nt, Artificial Sequence
  Description of Artificial Sequence: Synthetic oligonucleotide
ucgaacucagagaaggaca

SEQ ID NO: 3223141 - RNA, 19 nt, Artificial Sequence
  Description of Artificial Sequence: Synthetic oligonucleotide
ugccaugccgagaacaucc

SEQ ID NO: 3223142 - RNA, 19 nt, Artificial Sequence
  Description of Artificial Sequence: Synthetic oligonucleotide
ucagagaaggacagcaugu

SEQ ID NO: 3223143 - RNA, 19 nt, Artificial Sequence
  Description of Artificial Sequence: Synthetic oligonucleotide
gagaacacccugcagauuc

SEQ ID NO: 3223144 - RNA, 19 nt, Artificial Sequence
  Description of Artificial Sequence: Synthetic oligonucleotide
agccauucucguuaaaauc

SEQ ID NO: 3223145 - RNA, 19 nt, Artificial Sequence
  Description of Artificial Sequence: Synthetic oligonucleotide
gcauauucaaucuucagac

SEQ ID NO: 3223146 - RNA, 19 nt, Artificial Sequence
  Description of Artificial Sequence: Synthetic oligonucleotide
ggugacauccaucagcagg

SEQ ID NO: 3223147 - RNA, 19 nt, Artificial Sequence
  Description of Artificial Sequence: Synthetic oligonucleotide
gacauggugggugacaucc

SEQ ID NO: 3223148 - RNA, 19 nt, Artificial Sequence
  Description of Artificial Sequence: Synthetic oligonucleotide
uccauaucaacauccccag

SEQ ID NO: 3223149 - RNA, 19 nt, Artificial Sequence
  Description of Artificial Sequence: Synthetic oligonucleotide
gaacacauuguugugggag

SEQ ID NO: 3223150 - RNA, 19 nt, Artificial Sequence
  Description of Artificial Sequence: Synthetic oligonucleotide
aaucuggagauuuggucca

SEQ ID NO: 3223151 - RNA, 19 nt, Artificial Sequence
  Description of Artificial Sequence: Synthetic oligonucleotide
ucaaaggagaacacauugu

SEQ ID NO: 3223152 - RNA, 19 nt, Artificial Sequence
  Description of Artificial Sequence: Synthetic oligonucleotide
uuguugugggagaacaccc

SEQ ID NO: 3223153 - RNA, 19 nt, Artificial Sequence
  Description of Artificial Sequence: Synthetic oligonucleotide
augaauucaugaaaucugg

SEQ ID NO: 3223154 - RNA, 19 nt, Artificial Sequence
  Description of Artificial Sequence: Synthetic oligonucleotide
aacucagagaaggacagca

SEQ ID NO: 3223155 - RNA, 19 nt, Artificial Sequence
  Description of Artificial Sequence: Synthetic oligonucleotide
ucagcagguccucagacac

SEQ ID NO: 3223156 - RNA, 19 nt, Artificial Sequence
  Description of Artificial Sequence: Synthetic oligonucleotide
gaaaugaauucaugaaauc

SEQ ID NO: 3223157 - RNA, 19 nt, Artificial Sequence
  Description of Artificial Sequence: Synthetic oligonucleotide
uccgaaaugaauucaugaa

SEQ ID NO: 3223158 - RNA, 19 nt, Artificial Sequence
  Description of Artificial Sequence: Synthetic oligonucleotide
aaaugaauccgaaaugaau

SEQ ID NO: 3223159 - RNA, 19 nt, Artificial Sequence
  Description of Artificial Sequence: Synthetic oligonucleotide
ugggugacauccaucagca

SEQ ID NO: 3223160 - RNA, 19 nt, Artificial Sequence
  Description of Artificial Sequence: Synthetic oligonucleotide
aacacauuguugugggaga

SEQ ID NO: 3223161 - RNA, 19 nt, Artificial Sequence
  Description of Artificial Sequence: Synthetic oligonucleotide
auccgaaaugaauucauga

SEQ ID NO: 3223162 - RNA, 19 nt, Artificial Sequence
  Description of Artificial Sequence: Synthetic oligonucleotide
uccucaaaggagaacacau

SEQ ID NO: 3223163 - RNA, 19 nt, Artificial Sequence
  Description of Artificial Sequence: Synthetic oligonucleotide
acuguuaagcagucuuaac

SEQ ID NO: 3223164 - RNA, 19 nt, Artificial Sequence
  Description of Artificial Sequence: Synthetic oligonucleotide
uccauugcauguucgaacu

SEQ ID NO: 3223165 - RNA, 19 nt, Artificial Sequence
  Description of Artificial Sequence: Synthetic oligonucleotide
gaacacugaugccaugccg

SEQ ID NO: 3223166 - RNA, 19 nt, Artificial Sequence
  Description of Artificial Sequence: Synthetic oligonucleotide
ucaaugaagccauucucgu

SEQ ID NO: 3223167 - RNA, 19 nt, Artificial Sequence
  Description of Artificial Sequence: Synthetic oligonucleotide
ugaaaucuggagauuuggu

SEQ ID NO: 3223168 - RNA, 19 nt, Artificial Sequence
  Description of Artificial Sequence: Synthetic oligonucleotide
ucacugaacacugaugcca

SEQ ID NO: 3223169 - RNA, 19 nt, Artificial Sequence
  Description of Artificial Sequence: Synthetic oligonucleotide
augaaaucuggagauuugg

SEQ ID NO: 3223170 - RNA, 19 nt, Artificial Sequence
  Description of Artificial Sequence: Synthetic oligonucleotide
gucgucuucaucaaugaag

SEQ ID NO: 3223171 - RNA, 19 nt, Artificial Sequence
  Description of Artificial Sequence: Synthetic oligonucleotide
aucucugaaaggguugacc

SEQ ID NO: 3223172 - RNA, 19 nt, Artificial Sequence
  Description of Artificial Sequence: Synthetic oligonucleotide
ugaauucaugaaaucugga

SEQ ID NO: 3223173 - RNA, 19 nt, Artificial Sequence
  Description of Artificial Sequence: Synthetic oligonucleotide
aagccauucucguuaaaau

SEQ ID NO: 3223174 - RNA, 19 nt, Artificial Sequence
  Description of Artificial Sequence: Synthetic oligonucleotide
cucagacacaucaucacug

SEQ ID NO: 3223175 - RNA, 19 nt, Artificial Sequence
  Description of Artificial Sequence: Synthetic oligonucleotide
agaaggacagcauguuguc

SEQ ID NO: 3223176 - RNA, 19 nt, Artificial Sequence
  Description of Artificial Sequence: Synthetic oligonucleotide
acaucaucacuguuaagca

SEQ ID NO: 3223177 - RNA, 19 nt, Artificial Sequence
  Description of Artificial Sequence: Synthetic oligonucleotide
aaaggagaacacauuguug

SEQ ID NO: 3223178 - RNA, 19 nt, Artificial Sequence
  Description of Artificial Sequence: Synthetic oligonucleotide
ugcagauucgaucucugaa

SEQ ID NO: 3223179 - RNA, 19 nt, Artificial Sequence
  Description of Artificial Sequence: Synthetic oligonucleotide
uucucguuaaaaucauaga

SEQ ID NO: 3223180 - RNA, 19 nt, Artificial Sequence
  Description of Artificial Sequence: Synthetic oligonucleotide
acauccucaaaggagaaca

SEQ ID NO: 3223181 - RNA, 19 nt, Artificial Sequence
  Description of Artificial Sequence: Synthetic oligonucleotide
cuguuaagcagucuuaaca

SEQ ID NO: 3223182 - RNA, 19 nt, Artificial Sequence
  Description of Artificial Sequence: Synthetic oligonucleotide
uggugggugacauccauca

SEQ ID NO: 3223183 - RNA, 19 nt, Artificial Sequence
  Description of Artificial Sequence: Synthetic oligonucleotide
cucgcucaggacauggugg

SEQ ID NO: 3223184 - RNA, 19 nt, Artificial Sequence
  Description of Artificial Sequence: Synthetic oligonucleotide
uaucaacauccccagaaau

SEQ ID NO: 3223185 - RNA, 19 nt, Artificial Sequence
  Description of Artificial Sequence: Synthetic oligonucleotide
cagaaaugaauccgaaaug

SEQ ID NO: 3223186 - RNA, 19 nt, Artificial Sequence
  Description of Artificial Sequence: Synthetic oligonucleotide
agauucgaucucugaaagg

SEQ ID NO: 3223187 - RNA, 19 nt, Artificial Sequence
  Description of Artificial Sequence: Synthetic oligonucleotide
agaacauccucaaaggaga

SEQ ID NO: 3223188 - RNA, 19 nt, Artificial Sequence
  Description of Artificial Sequence: Synthetic oligonucleotide
acugaugccaugccgagaa

SEQ ID NO: 3223189 - RNA, 19 nt, Artificial Sequence
  Description of Artificial Sequence: Synthetic oligonucleotide
ugaacacugaugccaugcc

SEQ ID NO: 3223190 - RNA, 19 nt, Artificial Sequence
  Description of Artificial Sequence: Synthetic oligonucleotide
aucacuguuaagcagucuu

SEQ ID NO: 3223191 - RNA, 19 nt, Artificial Sequence
  Description of Artificial Sequence: Synthetic oligonucleotide
auucauacaacauuaaacc

SEQ ID NO: 3223192 - RNA, 19 nt, Artificial Sequence
  Description of Artificial Sequence: Synthetic oligonucleotide
aaugaauauggcuagugcc

SEQ ID NO: 3223193 - RNA, 19 nt, Artificial Sequence
  Description of Artificial Sequence: Synthetic oligonucleotide
aauauguuugaccaaaggg

SEQ ID NO: 3223194 - RNA, 19 nt, Artificial Sequence
  Description of Artificial Sequence: Synthetic oligonucleotide
auuauaaucaaucaacuuc

SEQ ID NO: 3223195 - RNA, 19 nt, Artificial Sequence
  Description of Artificial Sequence: Synthetic oligonucleotide
aaauuuccaaacuagaaug

SEQ ID NO: 3223196 - RNA, 19 nt, Artificial Sequence
  Description of Artificial Sequence: Synthetic oligonucleotide
aauaacaaauuccaaaaug

SEQ ID NO: 3223197 - RNA, 19 nt, Artificial Sequence
  Description of Artificial Sequence: Synthetic oligonucleotide
acuaucaucccuuuuaggc

SEQ ID NO: 3223198 - RNA, 19 nt, Artificial Sequence
  Description of Artificial Sequence: Synthetic oligonucleotide
uuaucguucaacaaggaag

SEQ ID NO: 3223199 - RNA, 19 nt, Artificial Sequence
  Description of Artificial Sequence: Synthetic oligonucleotide
agaacuaaaagucuauuac

SEQ ID NO: 3223200 - RNA, 19 nt, Artificial Sequence
  Description of Artificial Sequence: Synthetic oligonucleotide
aaaugaauauggcuagugc

SEQ ID NO: 3223201 - RNA, 19 nt, Artificial Sequence
  Description of Artificial Sequence: Synthetic oligonucleotide
uuagugucaggaaauaugg

SEQ ID NO: 3223202 - RNA, 19 nt, Artificial Sequence
  Description of Artificial Sequence: Synthetic oligonucleotide
auaacaaauuccaaaaugc

SEQ ID NO: 3223203 - RNA, 19 nt, Artificial Sequence
  Description of Artificial Sequence: Synthetic oligonucleotide
uuuauuaguagaaaccggc

SEQ ID NO: 3223204 - RNA, 19 nt, Artificial Sequence
  Description of Artificial Sequence: Synthetic oligonucleotide
caugagaagaaacaaaucc

SEQ ID NO: 3223205 - RNA, 19 nt, Artificial Sequence
  Description of Artificial Sequence: Synthetic oligonucleotide
aaggauuuagaacuuagga

SEQ ID NO: 3223206 - RNA, 19 nt, Artificial Sequence
  Description of Artificial Sequence: Synthetic oligonucleotide
agaaucacaugaucaaugc

SEQ ID NO: 3223207 - RNA, 19 nt, Artificial Sequence
  Description of Artificial Sequence: Synthetic oligonucleotide
ugcaauguaaaucccacag

SEQ ID NO: 3223208 - RNA, 19 nt, Artificial Sequence
  Description of Artificial Sequence: Synthetic oligonucleotide
uuuagugucaggaaauaug

SEQ ID NO: 3223209 - RNA, 19 nt, Artificial Sequence
  Description of Artificial Sequence: Synthetic oligonucleotide
ucaggcauuugccacaucg

SEQ ID NO: 3223210 - RNA, 19 nt, Artificial Sequence
  Description of Artificial Sequence: Synthetic oligonucleotide
uuuacauacguuaucuuga

SEQ ID NO: 3223211 - RNA, 19 nt, Artificial Sequence
  Description of Artificial Sequence: Synthetic oligonucleotide
aguaccaguguucuugucc

SEQ ID NO: 3223212 - RNA, 19 nt, Artificial Sequence
  Description of Artificial Sequence: Synthetic oligonucleotide
cauucauacaacauuaaac

SEQ ID NO: 3223213 - RNA, 19 nt, Artificial Sequence
  Description of Artificial Sequence: Synthetic oligonucleotide
uuucuuuugugcaagguga

SEQ ID NO: 3223214 - RNA, 19 nt, Artificial Sequence
  Description of Artificial Sequence: Synthetic oligonucleotide
ugugauacaacacugggua

SEQ ID NO: 3223215 - RNA, 19 nt, Artificial Sequence
  Description of Artificial Sequence: Synthetic oligonucleotide
uuuacauuguuuauuguaa

SEQ ID NO: 3223216 - RNA, 19 nt, Artificial Sequence
  Description of Artificial Sequence: Synthetic oligonucleotide
cacuggguaaaauagaacc

SEQ ID NO: 3223217 - RNA, 19 nt, Artificial Sequence
  Description of Artificial Sequence: Synthetic oligonucleotide
aaaggucugacauacggcu

SEQ ID NO: 3223218 - RNA, 19 nt, Artificial Sequence
  Description of Artificial Sequence: Synthetic oligonucleotide
aucugaaucaaauccaaag

SEQ ID NO: 3223219 - RNA, 19 nt, Artificial Sequence
  Description of Artificial Sequence: Synthetic oligonucleotide
uccuucuucaauaaggcca

SEQ ID NO: 3223220 - RNA, 19 nt, Artificial Sequence
  Description of Artificial Sequence: Synthetic oligonucleotide
ucugaaucaaauccaaaga

SEQ ID NO: 3223221 - RNA, 19 nt, Artificial Sequence
  Description of Artificial Sequence: Synthetic oligonucleotide
aggauuuagaacuuaggag

SEQ ID NO: 3223222 - RNA, 19 nt, Artificial Sequence
  Description of Artificial Sequence: Synthetic oligonucleotide
gacaguaccaaauaaauua

SEQ ID NO: 3223223 - RNA, 19 nt, Artificial Sequence
  Description of Artificial Sequence: Synthetic oligonucleotide
ucuguuaucugcaauguaa

SEQ ID NO: 3223224 - RNA, 19 nt, Artificial Sequence
  Description of Artificial Sequence: Synthetic oligonucleotide
aguauguucacuuguaaga

SEQ ID NO: 3223225 - RNA, 19 nt, Artificial Sequence
  Description of Artificial Sequence: Synthetic oligonucleotide
uaaaggauuuagaacuuag

SEQ ID NO: 3223226 - RNA, 19 nt, Artificial Sequence
  Description of Artificial Sequence: Synthetic oligonucleotide
uugacuaagucacugguac

SEQ ID NO: 3223227 - RNA, 19 nt, Artificial Sequence
  Description of Artificial Sequence: Synthetic oligonucleotide
ugauuugaaaagaaucaca

SEQ ID NO: 3223228 - RNA, 19 nt, Artificial Sequence
  Description of Artificial Sequence: Synthetic oligonucleotide
cuuacaaaggagcucgugg

SEQ ID NO: 3223229 - RNA, 19 nt, Artificial Sequence
  Description of Artificial Sequence: Synthetic oligonucleotide
ucuaaaauuaaggccauca

SEQ ID NO: 3223230 - RNA, 19 nt, Artificial Sequence
  Description of Artificial Sequence: Synthetic oligonucleotide
uuuuggaguccuuagccgg

SEQ ID NO: 3223231 - RNA, 19 nt, Artificial Sequence
  Description of Artificial Sequence: Synthetic oligonucleotide
aauggauuucacagaaagc

SEQ ID NO: 3223232 - RNA, 19 nt, Artificial Sequence
  Description of Artificial Sequence: Synthetic oligonucleotide
gaagaucuuacaaaggagc

SEQ ID NO: 3223233 - RNA, 19 nt, Artificial Sequence
  Description of Artificial Sequence: Synthetic oligonucleotide
uauuaguagaaaccggcug

SEQ ID NO: 3223234 - RNA, 19 nt, Artificial Sequence
  Description of Artificial Sequence: Synthetic oligonucleotide
ucaccacugacacacagag

SEQ ID NO: 3223235 - RNA, 19 nt, Artificial Sequence
  Description of Artificial Sequence: Synthetic oligonucleotide
auguucauauaacagagga

SEQ ID NO: 3223236 - RNA, 19 nt, Artificial Sequence
  Description of Artificial Sequence: Synthetic oligonucleotide
gacauuaucaggcacuuuc

SEQ ID NO: 3223237 - RNA, 19 nt, Artificial Sequence
  Description of Artificial Sequence: Synthetic oligonucleotide
uuugacaguaccaaauaaa

SEQ ID NO: 3223238 - RNA, 19 nt, Artificial Sequence
  Description of Artificial Sequence: Synthetic oligonucleotide
auaaugaauaugcaugaga

SEQ ID NO: 3223239 - RNA, 19 nt, Artificial Sequence
  Description of Artificial Sequence: Synthetic oligonucleotide
ugcguuuuggcauacuaag

SEQ ID NO: 3223240 - RNA, 19 nt, Artificial Sequence
  Description of Artificial Sequence: Synthetic oligonucleotide
caugcugcuauuaaucacc

SEQ ID NO: 3223241 - RNA, 19 nt, Artificial Sequence
  Description of Artificial Sequence: Synthetic oligonucleotide
auuaaugaccaucauugca

SEQ ID NO: 3223242 - RNA, 19 nt, Artificial Sequence
  Description of Artificial Sequence: Synthetic oligonucleotide
aacacuaucaucccuuuua

SEQ ID NO: 3223243 - RNA, 19 nt, Artificial Sequence
  Description of Artificial Sequence: Synthetic oligonucleotide
aagaaguauguucacuugu

SEQ ID NO: 3223244 - RNA, 19 nt, Artificial Sequence
  Description of Artificial Sequence: Synthetic oligonucleotide
aguaucaucagaauguuca

SEQ ID NO: 3223245 - RNA, 19 nt, Artificial Sequence
  Description of Artificial Sequence: Synthetic oligonucleotide
uaggcuaccuaacaaaacu

SEQ ID NO: 3223246 - RNA, 19 nt, Artificial Sequence
  Description of Artificial Sequence: Synthetic oligonucleotide
ggauuaaugaccaucauug

SEQ ID NO: 3223247 - RNA, 19 nt, Artificial Sequence
  Description of Artificial Sequence: Synthetic oligonucleotide
uaccuaacaaaacuaaauc

SEQ ID NO: 3223248 - RNA, 19 nt, Artificial Sequence
  Description of Artificial Sequence: Synthetic oligonucleotide
ucugaaaagguguuugaca

SEQ ID NO: 3223249 - RNA, 19 nt, Artificial Sequence
  Description of Artificial Sequence: Synthetic oligonucleotide
uuccugaugauuaggaacu

SEQ ID NO: 3223250 - RNA, 19 nt, Artificial Sequence
  Description of Artificial Sequence: Synthetic oligonucleotide
ugacauacggcuuuguuaa

SEQ ID NO: 3223251 - RNA, 19 nt, Artificial Sequence
  Description of Artificial Sequence: Synthetic oligonucleotide
aaaaugaauauggcuagug

SEQ ID NO: 3223252 - RNA, 19 nt, Artificial Sequence
  Description of Artificial Sequence: Synthetic oligonucleotide
accuaacaaaacuaaauca

SEQ ID NO: 3223253 - RNA, 19 nt, Artificial Sequence
  Description of Artificial Sequence: Synthetic oligonucleotide
ucuugugucuagcagcaag

SEQ ID NO: 3223254 - RNA, 19 nt, Artificial Sequence
  Description of Artificial Sequence: Synthetic oligonucleotide
auuugguuuggauggugcc

SEQ ID NO: 3223255 - RNA, 19 nt, Artificial Sequence
  Description of Artificial Sequence: Synthetic oligonucleotide
uugacaguaccaaauaaau

SEQ ID NO: 3223256 - RNA, 19 nt, Artificial Sequence
  Description of Artificial Sequence: Synthetic oligonucleotide
acuaagguaucguucauca

SEQ ID NO: 3223257 - RNA, 19 nt, Artificial Sequence
  Description of Artificial Sequence: Synthetic oligonucleotide
ugcaaggugagccucaagu

SEQ ID NO: 3223258 - RNA, 19 nt, Artificial Sequence
  Description of Artificial Sequence: Synthetic oligonucleotide
cuauuuucagaguaggauc

SEQ ID NO: 3223259 - RNA, 19 nt, Artificial Sequence
  Description of Artificial Sequence: Synthetic oligonucleotide
gaacuaaaagucuauuaca

SEQ ID NO: 3223260 - RNA, 19 nt, Artificial Sequence
  Description of Artificial Sequence: Synthetic oligonucleotide
aaaggauuuagaacuuagg

SEQ ID NO: 3223261 - RNA, 19 nt, Artificial Sequence
  Description of Artificial Sequence: Synthetic oligonucleotide
ugacauuuucuuuugugca

SEQ ID NO: 3223262 - RNA, 19 nt, Artificial Sequence
  Description of Artificial Sequence: Synthetic oligonucleotide
cagucagaaauuuucugcg

SEQ ID NO: 3223263 - RNA, 19 nt, Artificial Sequence
  Description of Artificial Sequence: Synthetic oligonucleotide
ucaaugcuauaaauuaugu

SEQ ID NO: 3223264 - RNA, 19 nt, Artificial Sequence
  Description of Artificial Sequence: Synthetic oligonucleotide
uccgagaccacucuaaaau

SEQ ID NO: 3223265 - RNA, 19 nt, Artificial Sequence
  Description of Artificial Sequence: Synthetic oligonucleotide
aucaccauaaacuuuuaaa

SEQ ID NO: 3223266 - RNA, 19 nt, Artificial Sequence
  Description of Artificial Sequence: Synthetic oligonucleotide
ugagacauuaucaggcacu

SEQ ID NO: 3223267 - RNA, 19 nt, Artificial Sequence
  Description of Artificial Sequence: Synthetic oligonucleotide
ugagauacagacagggcac

SEQ ID NO: 3223268 - RNA, 19 nt, Artificial Sequence
  Description of Artificial Sequence: Synthetic oligonucleotide
uucaaguaugcacuuugcc

SEQ ID NO: 3223269 - RNA, 19 nt, Artificial Sequence
  Description of Artificial Sequence: Synthetic oligonucleotide
uucugcauuacaguaagug

SEQ ID NO: 3223270 - RNA, 19 nt, Artificial Sequence
  Description of Artificial Sequence: Synthetic oligonucleotide
uuugcucuauuucacugug

SEQ ID NO: 3223271 - RNA, 19 nt, Artificial Sequence
  Description of Artificial Sequence: Synthetic oligonucleotide
uuuuccauagugucuauau

SEQ ID NO: 3223272 - RNA, 19 nt, Artificial Sequence
  Description of Artificial Sequence: Synthetic oligonucleotide
aagaaucacaugaucaaug

SEQ ID NO: 3223273 - RNA, 19 nt, Artificial Sequence
  Description of Artificial Sequence: Synthetic oligonucleotide
aguagaaaccggcugauaa

SEQ ID NO: 3223274 - RNA, 19 nt, Artificial Sequence
  Description of Artificial Sequence: Synthetic oligonucleotide
uuaucuugaucagaacagg

SEQ ID NO: 3223275 - RNA, 19 nt, Artificial Sequence
  Description of Artificial Sequence: Synthetic oligonucleotide
uuauuaguagaaaccggcu

SEQ ID NO: 3223276 - RNA, 19 nt, Artificial Sequence
  Description of Artificial Sequence: Synthetic oligonucleotide
gaccacucuaaaauuaagg

SEQ ID NO: 3223277 - RNA, 19 nt, Artificial Sequence
  Description of Artificial Sequence: Synthetic oligonucleotide
acaggcaucuacucgauca

SEQ ID NO: 3223278 - RNA, 19 nt, Artificial Sequence
  Description of Artificial Sequence: Synthetic oligonucleotide
aggaguuguacuuaucugu

SEQ ID NO: 3223279 - RNA, 19 nt, Artificial Sequence
  Description of Artificial Sequence: Synthetic oligonucleotide
uaauguaggcuaccuaaca

SEQ ID NO: 3223280 - RNA, 19 nt, Artificial Sequence
  Description of Artificial Sequence: Synthetic oligonucleotide
uaauaacaaauuccaaaau

SEQ ID NO: 3223281 - RNA, 19 nt, Artificial Sequence
  Description of Artificial Sequence: Synthetic oligonucleotide
aaacaaagauuugaaauuu

SEQ ID NO: 3223282 - RNA, 19 nt, Artificial Sequence
  Description of Artificial Sequence: Synthetic oligonucleotide
acaaauuucccuucuugcu

SEQ ID NO: 3223283 - RNA, 19 nt, Artificial Sequence
  Description of Artificial Sequence: Synthetic oligonucleotide
uugacuaguuacccaaaug

SEQ ID NO: 3223284 - RNA, 19 nt, Artificial Sequence
  Description of Artificial Sequence: Synthetic oligonucleotide
auuuauuaguagaaaccgg

SEQ ID NO: 3223285 - RNA, 19 nt, Artificial Sequence
  Description of Artificial Sequence: Synthetic oligonucleotide
ucaaucaacuucuuccuuc

SEQ ID NO: 3223286 - RNA, 19 nt, Artificial Sequence
  Description of Artificial Sequence: Synthetic oligonucleotide
gauuaaugaccaucauugc

SEQ ID NO: 3223287 - RNA, 19 nt, Artificial Sequence
  Description of Artificial Sequence: Synthetic oligonucleotide
aguguucuuguccauggag

SEQ ID NO: 3223288 - RNA, 19 nt, Artificial Sequence
  Description of Artificial Sequence: Synthetic oligonucleotide
cauacuaagguaucguuca

SEQ ID NO: 3223289 - RNA, 19 nt, Artificial Sequence
  Description of Artificial Sequence: Synthetic oligonucleotide
aacuaacaguguuugcucu

SEQ ID NO: 3223290 - RNA, 19 nt, Artificial Sequence
  Description of Artificial Sequence: Synthetic oligonucleotide
uccaaagagugucugacau

SEQ ID NO: 3223291 - RNA, 19 nt, Artificial Sequence
  Description of Artificial Sequence: Synthetic oligonucleotide
uuauauuaaauuauaagca

SEQ ID NO: 3223292 - RNA, 19 nt, Artificial Sequence
  Description of Artificial Sequence: Synthetic oligonucleotide
aauaaauuuaauuccggug

SEQ ID NO: 3223293 - RNA, 19 nt, Artificial Sequence
  Description of Artificial Sequence: Synthetic oligonucleotide
ugaaauauuaguuugguau

SEQ ID NO: 3223294 - RNA, 19 nt, Artificial Sequence
  Description of Artificial Sequence: Synthetic oligonucleotide
aguaaugccgaucugaguc

SEQ ID NO: 3223295 - RNA, 19 nt, Artificial Sequence
  Description of Artificial Sequence: Synthetic oligonucleotide
gacaaaacaauucaauucc

SEQ ID NO: 3223296 - RNA, 19 nt, Artificial Sequence
  Description of Artificial Sequence: Synthetic oligonucleotide
aucaauauguccuuuacag

SEQ ID NO: 3223297 - RNA, 19 nt, Artificial Sequence
  Description of Artificial Sequence: Synthetic oligonucleotide
cauauuaacauuucaaaac

SEQ ID NO: 3223298 - RNA, 19 nt, Artificial Sequence
  Description of Artificial Sequence: Synthetic oligonucleotide
aaaggauccaguuauaaaa

SEQ ID NO: 3223299 - RNA, 19 nt, Artificial Sequence
  Description of Artificial Sequence: Synthetic oligonucleotide
uuauaaaagcaguaguggg

SEQ ID NO: 3223300 - RNA, 19 nt, Artificial Sequence
  Description of Artificial Sequence: Synthetic oligonucleotide
uguuaugccuucaugaaag

SEQ ID NO: 3223301 - RNA, 19 nt, Artificial Sequence
  Description of Artificial Sequence: Synthetic oligonucleotide
aaagagcuaaaguacaaug

SEQ ID NO: 3223302 - RNA, 19 nt, Artificial Sequence
  Description of Artificial Sequence: Synthetic oligonucleotide
uguuacaucuaaaacaaac

SEQ ID NO: 3223303 - RNA, 19 nt, Artificial Sequence
  Description of Artificial Sequence: Synthetic oligonucleotide
auaagcagaaccucagacc

SEQ ID NO: 3223304 - RNA, 19 nt, Artificial Sequence
  Description of Artificial Sequence: Synthetic oligonucleotide
gaaucucugaauuauuucc

SEQ ID NO: 3223305 - RNA, 19 nt, Artificial Sequence
  Description of Artificial Sequence: Synthetic oligonucleotide
gucaauauccguuaggacc

SEQ ID NO: 3223306 - RNA, 19 nt, Artificial Sequence
  Description of Artificial Sequence: Synthetic oligonucleotide
uauaaaagcaguagugggc

SEQ ID NO: 3223307 - RNA, 19 nt, Artificial Sequence
  Description of Artificial Sequence: Synthetic oligonucleotide
uauauuaaauuauaagcaa

SEQ ID NO: 3223308 - RNA, 19 nt, Artificial Sequence
  Description of Artificial Sequence: Synthetic oligonucleotide
augaaaguuaaaaggaucc

SEQ ID NO: 3223309 - RNA, 19 nt, Artificial Sequence
  Description of Artificial Sequence: Synthetic oligonucleotide
agagcuaaaguacaauggg

SEQ ID NO: 3223310 - RNA, 19 nt, Artificial Sequence
  Description of Artificial Sequence: Synthetic oligonucleotide
uuugguauuuaacauauua

SEQ ID NO: 3223311 - RNA, 19 nt, Artificial Sequence
  Description of Artificial Sequence: Synthetic oligonucleotide
uuugguucaauuuaugcuc

SEQ ID NO: 3223312 - RNA, 19 nt, Artificial Sequence
  Description of Artificial Sequence: Synthetic oligonucleotide
ugguauuuaacauauuaac

SEQ ID NO: 3223313 - RNA, 19 nt, Artificial Sequence
  Description of Artificial Sequence: Synthetic oligonucleotide
aaucucugaauuauuuccc

SEQ ID NO: 3223314 - RNA, 19 nt, Artificial Sequence
  Description of Artificial Sequence: Synthetic oligonucleotide
guuauaaaagcaguagugg

SEQ ID NO: 3223315 - RNA, 19 nt, Artificial Sequence
  Description of Artificial Sequence: Synthetic oligonucleotide
uuuauaaaaugaaugugau

SEQ ID NO: 3223316 - RNA, 19 nt, Artificial Sequence
  Description of Artificial Sequence: Synthetic oligonucleotide
ugacaaaacaauucaauuc

SEQ ID NO: 3223317 - RNA, 19 nt, Artificial Sequence
  Description of Artificial Sequence: Synthetic oligonucleotide
uguguugauaauuuuaaau

SEQ ID NO: 3223318 - RNA, 19 nt, Artificial Sequence
  Description of Artificial Sequence: Synthetic oligonucleotide
uggcaaauuuauaaaauga

SEQ ID NO: 3223319 - RNA, 19 nt, Artificial Sequence
  Description of Artificial Sequence: Synthetic oligonucleotide
ucucaaagagcuaaaguac

SEQ ID NO: 3223320 - RNA, 19 nt, Artificial Sequence
  Description of Artificial Sequence: Synthetic oligonucleotide
uauuucauauacaaagaaa

SEQ ID NO: 3223321 - RNA, 19 nt, Artificial Sequence
  Description of Artificial Sequence: Synthetic oligonucleotide
uuauuucauauacaaagaa

SEQ ID NO: 3223322 - RNA, 19 nt, Artificial Sequence
  Description of Artificial Sequence: Synthetic oligonucleotide
aagagcuaaaguacaaugg

SEQ ID NO: 3223323 - RNA, 19 nt, Artificial Sequence
  Description of Artificial Sequence: Synthetic oligonucleotide
cuaaaguacaaugggaucc

SEQ ID NO: 3223324 - RNA, 19 nt, Artificial Sequence
  Description of Artificial Sequence: Synthetic oligonucleotide
uugaaaaucugauuuauuu

SEQ ID NO: 3223325 - RNA, 19 nt, Artificial Sequence
  Description of Artificial Sequence: Synthetic oligonucleotide
aaucauaguaucgaagcug

SEQ ID NO: 3223326 - RNA, 19 nt, Artificial Sequence
  Description of Artificial Sequence: Synthetic oligonucleotide
ugagcaguaaugccgaucu

SEQ ID NO: 3223327 - RNA, 19 nt, Artificial Sequence
  Description of Artificial Sequence: Synthetic oligonucleotide
uggucaucagacaucagag

SEQ ID NO: 3223328 - RNA, 19 nt, Artificial Sequence
  Description of Artificial Sequence: Synthetic oligonucleotide
uauuuugaaauauuaguuu

SEQ ID NO: 3223329 - RNA, 19 nt, Artificial Sequence
  Description of Artificial Sequence: Synthetic oligonucleotide
ugugugacaaggcaacugc

SEQ ID NO: 3223330 - RNA, 19 nt, Artificial Sequence
  Description of Artificial Sequence: Synthetic oligonucleotide
uacauauuuugaaauauua

SEQ ID NO: 3223331 - RNA, 19 nt, Artificial Sequence
  Description of Artificial Sequence: Synthetic oligonucleotide
cuuaaauccuguuggaaug

SEQ ID NO: 3223332 - RNA, 19 nt, Artificial Sequence
  Description of Artificial Sequence: Synthetic oligonucleotide
gauaagcagaaccucagac

SEQ ID NO: 3223333 - RNA, 19 nt, Artificial Sequence
  Description of Artificial Sequence: Synthetic oligonucleotide
aucucugaauuauuucccc

SEQ ID NO: 3223334 - RNA, 19 nt, Artificial Sequence
  Description of Artificial Sequence: Synthetic oligonucleotide
ugaagauugaucucugccu

SEQ ID NO: 3223335 - RNA, 19 nt, Artificial Sequence
  Description of Artificial Sequence: Synthetic oligonucleotide
gaaaguuaaaaggauccag

SEQ ID NO: 3223336 - RNA, 19 nt, Artificial Sequence
  Description of Artificial Sequence: Synthetic oligonucleotide
uauuaguuugguauuuaac

SEQ ID NO: 3223337 - RNA, 19 nt, Artificial Sequence
  Description of Artificial Sequence: Synthetic oligonucleotide
aagggaacaaucuuuuaau

SEQ ID NO: 3223338 - RNA, 19 nt, Artificial Sequence
  Description of Artificial Sequence: Synthetic oligonucleotide
aggauccaguuauaaaagc

SEQ ID NO: 3223339 - RNA, 19 nt, Artificial Sequence
  Description of Artificial Sequence: Synthetic oligonucleotide
uugguauuuaacauauuaa

SEQ ID NO: 3223340 - RNA, 19 nt, Artificial Sequence
  Description of Artificial Sequence: Synthetic oligonucleotide
uacaccauuggauggggcg

SEQ ID NO: 3223341 - RNA, 19 nt, Artificial Sequence
  Description of Artificial Sequence: Synthetic oligonucleotide
ugagucaauauccguuagg

SEQ ID NO: 3223342 - RNA, 19 nt, Artificial Sequence
  Description of Artificial Sequence: Synthetic oligonucleotide
aaaguuaaaaggauccagu

SEQ ID NO: 3223343 - RNA, 19 nt, Artificial Sequence
  Description of Artificial Sequence: Synthetic oligonucleotide
ugucgucauagcauggccg

SEQ ID NO: 3223344 - RNA, 19 nt, Artificial Sequence
  Description of Artificial Sequence: Synthetic oligonucleotide
ucaauuuaugcuccaauuu

SEQ ID NO: 3223345 - RNA, 19 nt, Artificial Sequence
  Description of Artificial Sequence: Synthetic oligonucleotide
uggcucauccuucaggucc

SEQ ID NO: 3223346 - RNA, 19 nt, Artificial Sequence
  Description of Artificial Sequence: Synthetic oligonucleotide
guuuuguuacaucuaaaac

SEQ ID NO: 3223347 - RNA, 19 nt, Artificial Sequence
  Description of Artificial Sequence: Synthetic oligonucleotide
aaggcuuuguuaugccuuc

SEQ ID NO: 3223348 - RNA, 19 nt, Artificial Sequence
  Description of Artificial Sequence: Synthetic oligonucleotide
gaauuauuuccccagaccu

SEQ ID NO: 3223349 - RNA, 19 nt, Artificial Sequence
  Description of Artificial Sequence: Synthetic oligonucleotide
auacaaauaaugugcaaaa

SEQ ID NO: 3223350 - RNA, 19 nt, Artificial Sequence
  Description of Artificial Sequence: Synthetic oligonucleotide
uuuuguacagcguuccuuc

SEQ ID NO: 3223351 - RNA, 19 nt, Artificial Sequence
  Description of Artificial Sequence: Synthetic oligonucleotide
acagguggcaaauuuauaa

SEQ ID NO: 3223352 - RNA, 19 nt, Artificial Sequence
  Description of Artificial Sequence: Synthetic oligonucleotide
auuuaauuccggugguuag

SEQ ID NO: 3223353 - RNA, 19 nt, Artificial Sequence
  Description of Artificial Sequence: Synthetic oligonucleotide
ucauagaagguuaggcaug

SEQ ID NO: 3223354 - RNA, 19 nt, Artificial Sequence
  Description of Artificial Sequence: Synthetic oligonucleotide
uacaaaguaguuuucuuua

SEQ ID NO: 3223355 - RNA, 19 nt, Artificial Sequence
  Description of Artificial Sequence: Synthetic oligonucleotide
acuuaaauccuguuggaau

SEQ ID NO: 3223356 - RNA, 19 nt, Artificial Sequence
  Description of Artificial Sequence: Synthetic oligonucleotide
agcaguagugggcacaguc

SEQ ID NO: 3223357 - RNA, 19 nt, Artificial Sequence
  Description of Artificial Sequence: Synthetic oligonucleotide
ugauaggaaggcacauugg

SEQ ID NO: 3223358 - RNA, 19 nt, Artificial Sequence
  Description of Artificial Sequence: Synthetic oligonucleotide
aaugggauccauaguuuac

SEQ ID NO: 3223359 - RNA, 19 nt, Artificial Sequence
  Description of Artificial Sequence: Synthetic oligonucleotide
cugaagauugaucucugcc

SEQ ID NO: 3223360 - RNA, 19 nt, Artificial Sequence
  Description of Artificial Sequence: Synthetic oligonucleotide
ugauaauuuuaaauuugaa

SEQ ID NO: 3223361 - RNA, 19 nt, Artificial Sequence
  Description of Artificial Sequence: Synthetic oligonucleotide
uuugauguguacuggcugu

SEQ ID NO: 3223362 - RNA, 19 nt, Artificial Sequence
  Description of Artificial Sequence: Synthetic oligonucleotide
uacagcguuccuucaaagg

SEQ ID NO: 3223363 - RNA, 19 nt, Artificial Sequence
  Description of Artificial Sequence: Synthetic oligonucleotide
cauugguggacacaagacc

SEQ ID NO: 3223364 - RNA, 19 nt, Artificial Sequence
  Description of Artificial Sequence: Synthetic oligonucleotide
guuaaaaggauccaguuau

SEQ ID NO: 3223365 - RNA, 19 nt, Artificial Sequence
  Description of Artificial Sequence: Synthetic oligonucleotide
uugguucaauuuaugcucc

SEQ ID NO: 3223366 - RNA, 19 nt, Artificial Sequence
  Description of Artificial Sequence: Synthetic oligonucleotide
acagcguuccuucaaagga

SEQ ID NO: 3223367 - RNA, 19 nt, Artificial Sequence
  Description of Artificial Sequence: Synthetic oligonucleotide
aaauacaaauaaugugcaa

SEQ ID NO: 3223368 - RNA, 19 nt, Artificial Sequence
  Description of Artificial Sequence: Synthetic oligonucleotide
auggucaucagacaucaga

SEQ ID NO: 3223369 - RNA, 19 nt, Artificial Sequence
  Description of Artificial Sequence: Synthetic oligonucleotide
ugguuaguggacucaaggc

SEQ ID NO: 3223370 - RNA, 19 nt, Artificial Sequence
  Description of Artificial Sequence: Synthetic oligonucleotide
aaucauauauacauauuuu

SEQ ID NO: 3223371 - RNA, 19 nt, Artificial Sequence
  Description of Artificial Sequence: Synthetic oligonucleotide
gaagguuaggcaugagcag

SEQ ID NO: 3223372 - RNA, 19 nt, Artificial Sequence
  Description of Artificial Sequence: Synthetic oligonucleotide
augucgucauagcauggcc

SEQ ID NO: 3223373 - RNA, 19 nt, Artificial Sequence
  Description of Artificial Sequence: Synthetic oligonucleotide
uccguuaggaccaccacaa

SEQ ID NO: 3223374 - RNA, 19 nt, Artificial Sequence
  Description of Artificial Sequence: Synthetic oligonucleotide
aauuuaauuccggugguua

SEQ ID NO: 3223375 - RNA, 19 nt, Artificial Sequence
  Description of Artificial Sequence: Synthetic oligonucleotide
ugucaucguucuuugaugu

SEQ ID NO: 3223376 - RNA, 19 nt, Artificial Sequence
  Description of Artificial Sequence: Synthetic oligonucleotide
gaaaaggugugucauccca

SEQ ID NO: 3223377 - RNA, 19 nt, Artificial Sequence
  Description of Artificial Sequence: Synthetic oligonucleotide
aaaggugugucaucccagu

SEQ ID NO: 3223378 - RNA, 19 nt, Artificial Sequence
  Description of Artificial Sequence: Synthetic oligonucleotide
ucaaagagcuaaaguacaa

SEQ ID NO: 3223379 - RNA, 19 nt, Artificial Sequence
  Description of Artificial Sequence: Synthetic oligonucleotide
agucucaaagagcuaaagu

SEQ ID NO: 3223380 - RNA, 19 nt, Artificial Sequence
  Description of Artificial Sequence: Synthetic oligonucleotide
acaauucaauucccugugg

SEQ ID NO: 3223381 - RNA, 19 nt, Artificial Sequence
  Description of Artificial Sequence: Synthetic oligonucleotide
uuauaaaaugaaugugaua

SEQ ID NO: 3223382 - RNA, 19 nt, Artificial Sequence
  Description of Artificial Sequence: Synthetic oligonucleotide
uguccuuuacagcuugugu

SEQ ID NO: 3223383 - RNA, 19 nt, Artificial Sequence
  Description of Artificial Sequence: Synthetic oligonucleotide
uguuuacgcucucuggaca

SEQ ID NO: 3223384 - RNA, 19 nt, Artificial Sequence
  Description of Artificial Sequence: Synthetic oligonucleotide
uccaguuauaaaagcagua

SEQ ID NO: 3223385 - RNA, 19 nt, Artificial Sequence
  Description of Artificial Sequence: Synthetic oligonucleotide
ugugcucuacaccauugga

SEQ ID NO: 3223386 - RNA, 19 nt, Artificial Sequence
  Description of Artificial Sequence: Synthetic oligonucleotide
uuaauuccggugguuagug

SEQ ID NO: 3223387 - RNA, 19 nt, Artificial Sequence
  Description of Artificial Sequence: Synthetic oligonucleotide
uguaaagcguggcugcccu

SEQ ID NO: 3223388 - RNA, 19 nt, Artificial Sequence
  Description of Artificial Sequence: Synthetic oligonucleotide
aaggugugucaucccaguc

SEQ ID NO: 3223389 - RNA, 19 nt, Artificial Sequence
  Description of Artificial Sequence: Synthetic oligonucleotide
aaaaggugugucaucccag

SEQ ID NO: 3223390 - RNA, 19 nt, Artificial Sequence
  Description of Artificial Sequence: Synthetic oligonucleotide
aggcugacaaaacaauuca

SEQ ID NO: 3223391 - RNA, 19 nt, Artificial Sequence
  Description of Artificial Sequence: Synthetic oligonucleotide
aaacuuaccaaaguaaagc

SEQ ID NO: 3223392 - RNA, 19 nt, Artificial Sequence
  Description of Artificial Sequence: Synthetic oligonucleotide
aaauuaaugguucagaauu

SEQ ID NO: 3223393 - RNA, 19 nt, Artificial Sequence
  Description of Artificial Sequence: Synthetic oligonucleotide
cauugugugacauagacag

SEQ ID NO: 3223394 - RNA, 19 nt, Artificial Sequence
  Description of Artificial Sequence: Synthetic oligonucleotide
aguagagaaacuuguagcc

SEQ ID NO: 3223395 - RNA, 19 nt, Artificial Sequence
  Description of Artificial Sequence: Synthetic oligonucleotide
ucuaucaacuuaaagaaca

SEQ ID NO: 3223396 - RNA, 19 nt, Artificial Sequence
  Description of Artificial Sequence: Synthetic oligonucleotide
aaauaauuuaacuucugga

SEQ ID NO: 3223397 - RNA, 19 nt, Artificial Sequence
  Description of Artificial Sequence: Synthetic oligonucleotide
aauaaaacuuaccaaagua

SEQ ID NO: 3223398 - RNA, 19 nt, Artificial Sequence
  Description of Artificial Sequence: Synthetic oligonucleotide
uaaagcaaaauacuuuacc

SEQ ID NO: 3223399 - RNA, 19 nt, Artificial Sequence
  Description of Artificial Sequence: Synthetic oligonucleotide
aacaacuaccucuaucaac

SEQ ID NO: 3223400 - RNA, 19 nt, Artificial Sequence
  Description of Artificial Sequence: Synthetic oligonucleotide
ucaacaacuaccucuauca

SEQ ID NO: 3223401 - RNA, 19 nt, Artificial Sequence
  Description of Artificial Sequence: Synthetic oligonucleotide
agcuaaggaaaauuaaugg

SEQ ID NO: 3223402 - RNA, 19 nt, Artificial Sequence
  Description of Artificial Sequence: Synthetic oligonucleotide
uauaggaauacacaucagc

SEQ ID NO: 3223403 - RNA, 19 nt, Artificial Sequence
  Description of Artificial Sequence: Synthetic oligonucleotide
ucugcaaagaaaauaauuu

SEQ ID NO: 3223404 - RNA, 19 nt, Artificial Sequence
  Description of Artificial Sequence: Synthetic oligonucleotide
accucuaucaacuuaaaga

SEQ ID NO: 3223405 - RNA, 19 nt, Artificial Sequence
  Description of Artificial Sequence: Synthetic oligonucleotide
aacagcugcaauccuaagg

SEQ ID NO: 3223406 - RNA, 19 nt, Artificial Sequence
  Description of Artificial Sequence: Synthetic oligonucleotide
aggaauacacaucagcagg

SEQ ID NO: 3223407 - RNA, 19 nt, Artificial Sequence
  Description of Artificial Sequence: Synthetic oligonucleotide
aauaaggcucuuuggauug

SEQ ID NO: 3223408 - RNA, 19 nt, Artificial Sequence
  Description of Artificial Sequence: Synthetic oligonucleotide
uugucuagcacacuuaacu

SEQ ID NO: 3223409 - RNA, 19 nt, Artificial Sequence
  Description of Artificial Sequence: Synthetic oligonucleotide
aauacacaucagcaggacg

SEQ ID NO: 3223410 - RNA, 19 nt, Artificial Sequence
  Description of Artificial Sequence: Synthetic oligonucleotide
aauacuuuaccuaaauacu

SEQ ID NO: 3223411 - RNA, 19 nt, Artificial Sequence
  Description of Artificial Sequence: Synthetic oligonucleotide
aaagguugaaguuacugaa

SEQ ID NO: 3223412 - RNA, 19 nt, Artificial Sequence
  Description of Artificial Sequence: Synthetic oligonucleotide
aaaauuaaugguucagaau

SEQ ID NO: 3223413 - RNA, 19 nt, Artificial Sequence
  Description of Artificial Sequence: Synthetic oligonucleotide
uuugcaaugcccugguggg

SEQ ID NO: 3223414 - RNA, 19 nt, Artificial Sequence
  Description of Artificial Sequence: Synthetic oligonucleotide
auaggacacagcuuguuac

SEQ ID NO: 3223415 - RNA, 19 nt, Artificial Sequence
  Description of Artificial Sequence: Synthetic oligonucleotide
cuugcuuauaggaauacac

SEQ ID NO: 3223416 - RNA, 19 nt, Artificial Sequence
  Description of Artificial Sequence: Synthetic oligonucleotide
aacuuaccaaaguaaagca

SEQ ID NO: 3223417 - RNA, 19 nt, Artificial Sequence
  Description of Artificial Sequence: Synthetic oligonucleotide
agaucaaaguaauaaauaa

SEQ ID NO: 3223418 - RNA, 19 nt, Artificial Sequence
  Description of Artificial Sequence: Synthetic oligonucleotide
uacugaaagugucugaaca

SEQ ID NO: 3223419 - RNA, 19 nt, Artificial Sequence
  Description of Artificial Sequence: Synthetic oligonucleotide
aaugguucagaauuccaga

SEQ ID NO: 3223420 - RNA, 19 nt, Artificial Sequence
  Description of Artificial Sequence: Synthetic oligonucleotide
ugagaucaaaguaauaaau

SEQ ID NO: 3223421 - RNA, 19 nt, Artificial Sequence
  Description of Artificial Sequence: Synthetic oligonucleotide
acagcuuguuaccaaaacg

SEQ ID NO: 3223422 - RNA, 19 nt, Artificial Sequence
  Description of Artificial Sequence: Synthetic oligonucleotide
uaaggaaaauuaaugguuc

SEQ ID NO: 3223423 - RNA, 19 nt, Artificial Sequence
  Description of Artificial Sequence: Synthetic oligonucleotide
ucaaaguaauaaauaauau

SEQ ID NO: 3223424 - RNA, 19 nt, Artificial Sequence
  Description of Artificial Sequence: Synthetic oligonucleotide
auaucugucaaacacugga

SEQ ID NO: 3223425 - RNA, 19 nt, Artificial Sequence
  Description of Artificial Sequence: Synthetic oligonucleotide
agaacauugugugacauag

SEQ ID NO: 3223426 - RNA, 19 nt, Artificial Sequence
  Description of Artificial Sequence: Synthetic oligonucleotide
auuaaugguucagaauucc

SEQ ID NO: 3223427 - RNA, 19 nt, Artificial Sequence
  Description of Artificial Sequence: Synthetic oligonucleotide
cuuauaggaauacacauca

SEQ ID NO: 3223428 - RNA, 19 nt, Artificial Sequence
  Description of Artificial Sequence: Synthetic oligonucleotide
uaauaaaacuuaccaaagu

SEQ ID NO: 3223429 - RNA, 19 nt, Artificial Sequence
  Description of Artificial Sequence: Synthetic oligonucleotide
gacauagacagaauaaggc

SEQ ID NO: 3223430 - RNA, 19 nt, Artificial Sequence
  Description of Artificial Sequence: Synthetic oligonucleotide
acaguagagaaacuuguag

SEQ ID NO: 3223431 - RNA, 19 nt, Artificial Sequence
  Description of Artificial Sequence: Synthetic oligonucleotide
aaacuuguagccguucugg

SEQ ID NO: 3223432 - RNA, 19 nt, Artificial Sequence
  Description of Artificial Sequence: Synthetic oligonucleotide
agaacaucacucaaauucc

SEQ ID NO: 3223433 - RNA, 19 nt, Artificial Sequence
  Description of Artificial Sequence: Synthetic oligonucleotide
ugugacauagacagaauaa

SEQ ID NO: 3223434 - RNA, 19 nt, Artificial Sequence
  Description of Artificial Sequence: Synthetic oligonucleotide
aaucacuucucugugcagg

SEQ ID NO: 3223435 - RNA, 19 nt, Artificial Sequence
  Description of Artificial Sequence: Synthetic oligonucleotide
cuuugcaaugcccuggugg

SEQ ID NO: 3223436 - RNA, 19 nt, Artificial Sequence
  Description of Artificial Sequence: Synthetic oligonucleotide
aacuuguagccguucuggc

SEQ ID NO: 3223437 - RNA, 19 nt, Artificial Sequence
  Description of Artificial Sequence: Synthetic oligonucleotide
uacuuuaugguacagcuuu

SEQ ID NO: 3223438 - RNA, 19 nt, Artificial Sequence
  Description of Artificial Sequence: Synthetic oligonucleotide
aauuaaugguucagaauuc

SEQ ID NO: 3223439 - RNA, 19 nt, Artificial Sequence
  Description of Artificial Sequence: Synthetic oligonucleotide
aucaacuuaaagaacauca

SEQ ID NO: 3223440 - RNA, 19 nt, Artificial Sequence
  Description of Artificial Sequence: Synthetic oligonucleotide
ucugagacaguucaacaac

SEQ ID NO: 3223441 - RNA, 19 nt, Artificial Sequence
  Description of Artificial Sequence: Synthetic oligonucleotide
uuuaccuaaauacuucuuu

SEQ ID NO: 3223442 - RNA, 19 nt, Artificial Sequence
  Description of Artificial Sequence: Synthetic oligonucleotide
auacacaucagcaggacgg

SEQ ID NO: 3223443 - RNA, 19 nt, Artificial Sequence
  Description of Artificial Sequence: Synthetic oligonucleotide
ucaacuuaaagaacaucac

SEQ ID NO: 3223444 - RNA, 19 nt, Artificial Sequence
  Description of Artificial Sequence: Synthetic oligonucleotide
caguagagaaacuuguagc

SEQ ID NO: 3223445 - RNA, 19 nt, Artificial Sequence
  Description of Artificial Sequence: Synthetic oligonucleotide
aagcuaaggaaaauuaaug

SEQ ID NO: 3223446 - RNA, 19 nt, Artificial Sequence
  Description of Artificial Sequence: Synthetic oligonucleotide
acagcugcaauccuaagga

SEQ ID NO: 3223447 - RNA, 19 nt, Artificial Sequence
  Description of Artificial Sequence: Synthetic oligonucleotide
uaggaauacacaucagcag

SEQ ID NO: 3223448 - RNA, 19 nt, Artificial Sequence
  Description of Artificial Sequence: Synthetic oligonucleotide
uguucagugacacucccac

SEQ ID NO: 3223449 - RNA, 19 nt, Artificial Sequence
  Description of Artificial Sequence: Synthetic oligonucleotide
cuuguuaccaaaacgcauc

SEQ ID NO: 3223450 - RNA, 19 nt, Artificial Sequence
  Description of Artificial Sequence: Synthetic oligonucleotide
cauagacagaauaaggcuc

SEQ ID NO: 3223451 - RNA, 19 nt, Artificial Sequence
  Description of Artificial Sequence: Synthetic oligonucleotide
ucucccuugggguugacag

SEQ ID NO: 3223452 - RNA, 19 nt, Artificial Sequence
  Description of Artificial Sequence: Synthetic oligonucleotide
uaccaaaacgcaucuuugg

SEQ ID NO: 3223453 - RNA, 19 nt, Artificial Sequence
  Description of Artificial Sequence: Synthetic oligonucleotide
uaacuuuuaauguacucau

SEQ ID NO: 3223454 - RNA, 19 nt, Artificial Sequence
  Description of Artificial Sequence: Synthetic oligonucleotide
uuuggauugucuagcacac

SEQ ID NO: 3223455 - RNA, 19 nt, Artificial Sequence
  Description of Artificial Sequence: Synthetic oligonucleotide
uuaccaaaacgcaucuuug

SEQ ID NO: 3223456 - RNA, 19 nt, Artificial Sequence
  Description of Artificial Sequence: Synthetic oligonucleotide
uaccuaaauacuucuuucc

SEQ ID NO: 3223457 - RNA, 19 nt, Artificial Sequence
  Description of Artificial Sequence: Synthetic oligonucleotide
acugaaagugucugaacag

SEQ ID NO: 3223458 - RNA, 19 nt, Artificial Sequence
  Description of Artificial Sequence: Synthetic oligonucleotide
uugcuuauaggaauacaca

SEQ ID NO: 3223459 - RNA, 19 nt, Artificial Sequence
  Description of Artificial Sequence: Synthetic oligonucleotide
gauggucccaucgucagcg

SEQ ID NO: 3223460 - RNA, 19 nt, Artificial Sequence
  Description of Artificial Sequence: Synthetic oligonucleotide
ucucgugauggucccaucg

SEQ ID NO: 3223461 - RNA, 19 nt, Artificial Sequence
  Description of Artificial Sequence: Synthetic oligonucleotide
accaaaguaaagcaaaaua

SEQ ID NO: 3223462 - RNA, 19 nt, Artificial Sequence
  Description of Artificial Sequence: Synthetic oligonucleotide
uucagcaaugggaagacau

SEQ ID NO: 3223463 - RNA, 19 nt, Artificial Sequence
  Description of Artificial Sequence: Synthetic oligonucleotide
uuucaaucacuucucugug

SEQ ID NO: 3223464 - RNA, 19 nt, Artificial Sequence
  Description of Artificial Sequence: Synthetic oligonucleotide
acaacuaccucuaucaacu

SEQ ID NO: 3223465 - RNA, 19 nt, Artificial Sequence
  Description of Artificial Sequence: Synthetic oligonucleotide
uuaccuaaauacuucuuuc

SEQ ID NO: 3223466 - RNA, 19 nt, Artificial Sequence
  Description of Artificial Sequence: Synthetic oligonucleotide
aucaaaguaauaaauaaua

SEQ ID NO: 3223467 - RNA, 19 nt, Artificial Sequence
  Description of Artificial Sequence: Synthetic oligonucleotide
uacuuuaccuaaauacuuc

SEQ ID NO: 3223468 - RNA, 19 nt, Artificial Sequence
  Description of Artificial Sequence: Synthetic oligonucleotide
auaggaauacacaucagca

SEQ ID NO: 3223469 - RNA, 19 nt, Artificial Sequence
  Description of Artificial Sequence: Synthetic oligonucleotide
cuuuaaaauaauaaaacuu

SEQ ID NO: 3223470 - RNA, 19 nt, Artificial Sequence
  Description of Artificial Sequence: Synthetic oligonucleotide
gcacacuuaacuuuuaaug

SEQ ID NO: 3223471 - RNA, 19 nt, Artificial Sequence
  Description of Artificial Sequence: Synthetic oligonucleotide
cuuuggauugucuagcaca

SEQ ID NO: 3223472 - RNA, 19 nt, Artificial Sequence
  Description of Artificial Sequence: Synthetic oligonucleotide
uccgaucucgugauggucc

SEQ ID NO: 3223473 - RNA, 19 nt, Artificial Sequence
  Description of Artificial Sequence: Synthetic oligonucleotide
ugucaugucugccauccca

SEQ ID NO: 3223474 - RNA, 19 nt, Artificial Sequence
  Description of Artificial Sequence: Synthetic oligonucleotide
ggcaaaauaugaccaaggg

SEQ ID NO: 3223475 - RNA, 19 nt, Artificial Sequence
  Description of Artificial Sequence: Synthetic oligonucleotide
uuaacuucuggagacuaca

SEQ ID NO: 3223476 - RNA, 19 nt, Artificial Sequence
  Description of Artificial Sequence: Synthetic oligonucleotide
gaaagugucugaacagggg

SEQ ID NO: 3223477 - RNA, 19 nt, Artificial Sequence
  Description of Artificial Sequence: Synthetic oligonucleotide
auuccagaagaacauugug

SEQ ID NO: 3223478 - RNA, 19 nt, Artificial Sequence
  Description of Artificial Sequence: Synthetic oligonucleotide
uuauaggaauacacaucag

SEQ ID NO: 3223479 - RNA, 19 nt, Artificial Sequence
  Description of Artificial Sequence: Synthetic oligonucleotide
auaaaacuuaccaaaguaa

SEQ ID NO: 3223480 - RNA, 19 nt, Artificial Sequence
  Description of Artificial Sequence: Synthetic oligonucleotide
cuugucaugucugccaucc

SEQ ID NO: 3223481 - RNA, 19 nt, Artificial Sequence
  Description of Artificial Sequence: Synthetic oligonucleotide
agaauaaggcucuuuggau

SEQ ID NO: 3223482 - RNA, 19 nt, Artificial Sequence
  Description of Artificial Sequence: Synthetic oligonucleotide
uucaacaacuaccucuauc

SEQ ID NO: 3223483 - RNA, 19 nt, Artificial Sequence
  Description of Artificial Sequence: Synthetic oligonucleotide
cuugcccuuagacugaaug

SEQ ID NO: 3223484 - RNA, 19 nt, Artificial Sequence
  Description of Artificial Sequence: Synthetic oligonucleotide
ucagcaaugggaagacaug

SEQ ID NO: 3223485 - RNA, 19 nt, Artificial Sequence
  Description of Artificial Sequence: Synthetic oligonucleotide
aaggguauccgaucucgug

SEQ ID NO: 3223486 - RNA, 19 nt, Artificial Sequence
  Description of Artificial Sequence: Synthetic oligonucleotide
uaucugucaaacacuggac

SEQ ID NO: 3223487 - RNA, 19 nt, Artificial Sequence
  Description of Artificial Sequence: Synthetic oligonucleotide
gugacauagacagaauaag

SEQ ID NO: 3223488 - RNA, 19 nt, Artificial Sequence
  Description of Artificial Sequence: Synthetic oligonucleotide
cagaagaacauugugugac

SEQ ID NO: 3223489 - RNA, 19 nt, Artificial Sequence
  Description of Artificial Sequence: Synthetic oligonucleotide
aaguuacugaaagugucug

SEQ ID NO: 3223490 - RNA, 19 nt, Artificial Sequence
  Description of Artificial Sequence: Synthetic oligonucleotide
guagagaaacuuguagccg

SEQ ID NO: 3223491 - RNA, 19 nt, Artificial Sequence
  Description of Artificial Sequence: Synthetic oligonucleotide
acgaagauaaaucccaucc

SEQ ID NO: 3223492 - RNA, 19 nt, Artificial Sequence
  Description of Artificial Sequence: Synthetic oligonucleotide
uaaacuuggauuaugguga

SEQ ID NO: 3223493 - RNA, 19 nt, Artificial Sequence
  Description of Artificial Sequence: Synthetic oligonucleotide
uggauuauggugaagacca

SEQ ID NO: 3223494 - RNA, 19 nt, Artificial Sequence
  Description of Artificial Sequence: Synthetic oligonucleotide
aacuccuuaggauuuggcc

SEQ ID NO: 3223495 - RNA, 19 nt, Artificial Sequence
  Description of Artificial Sequence: Synthetic oligonucleotide
auucauagcaaacuguuuc

SEQ ID NO: 3223496 - RNA, 19 nt, Artificial Sequence
  Description of Artificial Sequence: Synthetic oligonucleotide
aguacugggacccuggugg

SEQ ID NO: 3223497 - RNA, 19 nt, Artificial Sequence
  Description of Artificial Sequence: Synthetic oligonucleotide
auaaacuuggauuauggug

SEQ ID NO: 3223498 - RNA, 19 nt, Artificial Sequence
  Description of Artificial Sequence: Synthetic oligonucleotide
gauaccuuuagguaaggag

SEQ ID NO: 3223499 - RNA, 19 nt, Artificial Sequence
  Description of Artificial Sequence: Synthetic oligonucleotide
aucuagaugggucaaacuc

SEQ ID NO: 3223500 - RNA, 19 nt, Artificial Sequence
  Description of Artificial Sequence: Synthetic oligonucleotide
auaaaucccauccuuggac

SEQ ID NO: 3223501 - RNA, 19 nt, Artificial Sequence
  Description of Artificial Sequence: Synthetic oligonucleotide
aacugugauaccuuuaggu

SEQ ID NO: 3223502 - RNA, 19 nt, Artificial Sequence
  Description of Artificial Sequence: Synthetic oligonucleotide
uggacuucaaaacaguucu

SEQ ID NO: 3223503 - RNA, 19 nt, Artificial Sequence
  Description of Artificial Sequence: Synthetic oligonucleotide
auaccuuuagguaaggagc

SEQ ID NO: 3223504 - RNA, 19 nt, Artificial Sequence
  Description of Artificial Sequence: Synthetic oligonucleotide
uggugaagaccauaaaugg

SEQ ID NO: 3223505 - RNA, 19 nt, Artificial Sequence
  Description of Artificial Sequence: Synthetic oligonucleotide
uaggauuuggccauaaacu

SEQ ID NO: 3223506 - RNA, 19 nt, Artificial Sequence
  Description of Artificial Sequence: Synthetic oligonucleotide
uuaggauuuggccauaaac

SEQ ID NO: 3223507 - RNA, 19 nt, Artificial Sequence
  Description of Artificial Sequence: Synthetic oligonucleotide
aagaaucuggugcaaaucu

SEQ ID NO: 3223508 - RNA, 19 nt, Artificial Sequence
  Description of Artificial Sequence: Synthetic oligonucleotide
aaaacaguucuuuguauga

SEQ ID NO: 3223509 - RNA, 19 nt, Artificial Sequence
  Description of Artificial Sequence: Synthetic oligonucleotide
ucuagaugggucaaacucc

SEQ ID NO: 3223510 - RNA, 19 nt, Artificial Sequence
  Description of Artificial Sequence: Synthetic oligonucleotide
cauaaauggagauugcaac

SEQ ID NO: 3223511 - RNA, 19 nt, Artificial Sequence
  Description of Artificial Sequence: Synthetic oligonucleotide
aaaucuagaugggucaaac

SEQ ID NO: 3223512 - RNA, 19 nt, Artificial Sequence
  Description of Artificial Sequence: Synthetic oligonucleotide
cuggugcaaaucuagaugg

SEQ ID NO: 3223513 - RNA, 19 nt, Artificial Sequence
  Description of Artificial Sequence: Synthetic oligonucleotide
agauaaaucccauccuugg

SEQ ID NO: 3223514 - RNA, 19 nt, Artificial Sequence
  Description of Artificial Sequence: Synthetic oligonucleotide
gagauugcaacugugauac

SEQ ID NO: 3223515 - RNA, 19 nt, Artificial Sequence
  Description of Artificial Sequence: Synthetic oligonucleotide
ugugccgagaagaaucugg

SEQ ID NO: 3223516 - RNA, 19 nt, Artificial Sequence
  Description of Artificial Sequence: Synthetic oligonucleotide
uugagacgaagauaaaucc

SEQ ID NO: 3223517 - RNA, 19 nt, Artificial Sequence
  Description of Artificial Sequence: Synthetic oligonucleotide
gauuuggccauaaacuugg

SEQ ID NO: 3223518 - RNA, 19 nt, Artificial Sequence
  Description of Artificial Sequence: Synthetic oligonucleotide
caggcaacagcucaaagcg

SEQ ID NO: 3223519 - RNA, 19 nt, Artificial Sequence
  Description of Artificial Sequence: Synthetic oligonucleotide
uaccuuuagguaaggagcg

SEQ ID NO: 3223520 - RNA, 19 nt, Artificial Sequence
  Description of Artificial Sequence: Synthetic oligonucleotide
uuuguaugaguacugggac

SEQ ID NO: 3223521 - RNA, 19 nt, Artificial Sequence
  Description of Artificial Sequence: Synthetic oligonucleotide
ucuggugcaaaucuagaug

SEQ ID NO: 3223522 - RNA, 19 nt, Artificial Sequence
  Description of Artificial Sequence: Synthetic oligonucleotide
ugugauaccuuuagguaag

SEQ ID NO: 3223523 - RNA, 19 nt, Artificial Sequence
  Description of Artificial Sequence: Synthetic oligonucleotide
uauggugaagaccauaaau

SEQ ID NO: 3223524 - RNA, 19 nt, Artificial Sequence
  Description of Artificial Sequence: Synthetic oligonucleotide
cuugagacgaagauaaauc

SEQ ID NO: 3223525 - RNA, 19 nt, Artificial Sequence
  Description of Artificial Sequence: Synthetic oligonucleotide
ugagacgaagauaaauccc

SEQ ID NO: 3223526 - RNA, 19 nt, Artificial Sequence
  Description of Artificial Sequence: Synthetic oligonucleotide
ucaggcaacagcucaaagc

SEQ ID NO: 3223527 - RNA, 19 nt, Artificial Sequence
  Description of Artificial Sequence: Synthetic oligonucleotide
ucuuuguaugaguacuggg

SEQ ID NO: 3223528 - RNA, 19 nt, Artificial Sequence
  Description of Artificial Sequence: Synthetic oligonucleotide
auaaauggagauugcaacu

SEQ ID NO: 3223529 - RNA, 19 nt, Artificial Sequence
  Description of Artificial Sequence: Synthetic oligonucleotide
guaaggagcguccaucugg

SEQ ID NO: 3223530 - RNA, 19 nt, Artificial Sequence
  Description of Artificial Sequence: Synthetic oligonucleotide
uguaugaguacugggaccc

SEQ ID NO: 3223531 - RNA, 19 nt, Artificial Sequence
  Description of Artificial Sequence: Synthetic oligonucleotide
uucauagcaaacuguuucc

SEQ ID NO: 3223532 - RNA, 19 nt, Artificial Sequence
  Description of Artificial Sequence: Synthetic oligonucleotide
aggaaagcauagcugugcc

SEQ ID NO: 3223533 - RNA, 19 nt, Artificial Sequence
  Description of Artificial Sequence: Synthetic oligonucleotide
aauuccuugcuccuccuga

SEQ ID NO: 3223534 - RNA, 19 nt, Artificial Sequence
  Description of Artificial Sequence: Synthetic oligonucleotide
aaugcaauuccuugcuccu

SEQ ID NO: 3223535 - RNA, 19 nt, Artificial Sequence
  Description of Artificial Sequence: Synthetic oligonucleotide
gugaagaccauaaauggag

SEQ ID NO: 3223536 - RNA, 19 nt, Artificial Sequence
  Description of Artificial Sequence: Synthetic oligonucleotide
aacagcucaaagcggagca

SEQ ID NO: 3223537 - RNA, 19 nt, Artificial Sequence
  Description of Artificial Sequence: Synthetic oligonucleotide
uucaaaacaguucuuugua

SEQ ID NO: 3223538 - RNA, 19 nt, Artificial Sequence
  Description of Artificial Sequence: Synthetic oligonucleotide
uccuuggacuucaaaacag

SEQ ID NO: 3223539 - RNA, 19 nt, Artificial Sequence
  Description of Artificial Sequence: Synthetic oligonucleotide
agugauagguguguugagc

SEQ ID NO: 3223540 - RNA, 19 nt, Artificial Sequence
  Description of Artificial Sequence: Synthetic oligonucleotide
agaccauaaauggagauug

SEQ ID NO: 3223541 - RNA, 19 nt, Artificial Sequence
  Description of Artificial Sequence: Synthetic oligonucleotide
ucugggaagugauaggugu

SEQ ID NO: 3223542 - RNA, 19 nt, Artificial Sequence
  Description of Artificial Sequence: Synthetic oligonucleotide
caaugcaauuccuugcucc

SEQ ID NO: 3223543 - RNA, 19 nt, Artificial Sequence
  Description of Artificial Sequence: Synthetic oligonucleotide
ugcaaaucuagauggguca

SEQ ID NO: 3223544 - RNA, 19 nt, Artificial Sequence
  Description of Artificial Sequence: Synthetic oligonucleotide
uuggccauaaacuuggauu

SEQ ID NO: 3223545 - RNA, 19 nt, Artificial Sequence
  Description of Artificial Sequence: Synthetic oligonucleotide
aacaguucuuuguaugagu

SEQ ID NO: 3223546 - RNA, 19 nt, Artificial Sequence
  Description of Artificial Sequence: Synthetic oligonucleotide
uaaggagcguccaucuggg

SEQ ID NO: 3223547 - RNA, 19 nt, Artificial Sequence
  Description of Artificial Sequence: Synthetic oligonucleotide
caaaacaguucuuuguaug

SEQ ID NO: 3223548 - RNA, 19 nt, Artificial Sequence
  Description of Artificial Sequence: Synthetic oligonucleotide
gaugggucaaacuccuuag

SEQ ID NO: 3223549 - RNA, 19 nt, Artificial Sequence
  Description of Artificial Sequence: Synthetic oligonucleotide
cuucuugagacgaagauaa

SEQ ID NO: 3223550 - RNA, 19 nt, Artificial Sequence
  Description of Artificial Sequence: Synthetic oligonucleotide
ucauucauagcaaacuguu

SEQ ID NO: 3223551 - RNA, 19 nt, Artificial Sequence
  Description of Artificial Sequence: Synthetic oligonucleotide
accuucagcucauucauag

SEQ ID NO: 3223552 - RNA, 19 nt, Artificial Sequence
  Description of Artificial Sequence: Synthetic oligonucleotide
acuccuuaggauuuggcca

SEQ ID NO: 3223553 - RNA, 19 nt, Artificial Sequence
  Description of Artificial Sequence: Synthetic oligonucleotide
uaaauggagauugcaacug

SEQ ID NO: 3223554 - RNA, 19 nt, Artificial Sequence
  Description of Artificial Sequence: Synthetic oligonucleotide
uccaucugggaagugauag

SEQ ID NO: 3223555 - RNA, 19 nt, Artificial Sequence
  Description of Artificial Sequence: Synthetic oligonucleotide
cauccuuggacuucaaaac

SEQ ID NO: 3223556 - RNA, 19 nt, Artificial Sequence
  Description of Artificial Sequence: Synthetic oligonucleotide
aaauggagauugcaacugu

SEQ ID NO: 3223557 - RNA, 19 nt, Artificial Sequence
  Description of Artificial Sequence: Synthetic oligonucleotide
uguuucccaaugcaauucc

SEQ ID NO: 3223558 - RNA, 19 nt, Artificial Sequence
  Description of Artificial Sequence: Synthetic oligonucleotide
acuucaaaacaguucuuug

SEQ ID NO: 3223559 - RNA, 19 nt, Artificial Sequence
  Description of Artificial Sequence: Synthetic oligonucleotide
aagauaaaucccauccuug

SEQ ID NO: 3223560 - RNA, 19 nt, Artificial Sequence
  Description of Artificial Sequence: Synthetic oligonucleotide
cuuuguaugaguacuggga

SEQ ID NO: 3223561 - RNA, 19 nt, Artificial Sequence
  Description of Artificial Sequence: Synthetic oligonucleotide
ugcaauuccuugcuccucc

SEQ ID NO: 3223562 - RNA, 19 nt, Artificial Sequence
  Description of Artificial Sequence: Synthetic oligonucleotide
aaacaguucuuuguaugag

SEQ ID NO: 3223563 - RNA, 19 nt, Artificial Sequence
  Description of Artificial Sequence: Synthetic oligonucleotide
auggugaagaccauaaaug

SEQ ID NO: 3223564 - RNA, 19 nt, Artificial Sequence
  Description of Artificial Sequence: Synthetic oligonucleotide
gaaucuggugcaaaucuag

SEQ ID NO: 3223565 - RNA, 19 nt, Artificial Sequence
  Description of Artificial Sequence: Synthetic oligonucleotide
uuggacuucaaaacaguuc

SEQ ID NO: 3223566 - RNA, 19 nt, Artificial Sequence
  Description of Artificial Sequence: Synthetic oligonucleotide
aaucuagaugggucaaacu

SEQ ID NO: 3223567 - RNA, 19 nt, Artificial Sequence
  Description of Artificial Sequence: Synthetic oligonucleotide
ugggucaaacuccuuagga

SEQ ID NO: 3223568 - RNA, 19 nt, Artificial Sequence
  Description of Artificial Sequence: Synthetic oligonucleotide
uucuuuguaugaguacugg

SEQ ID NO: 3223569 - RNA, 19 nt, Artificial Sequence
  Description of Artificial Sequence: Synthetic oligonucleotide
cuuuagguaaggagcgucc

SEQ ID NO: 3223570 - RNA, 19 nt, Artificial Sequence
  Description of Artificial Sequence: Synthetic oligonucleotide
aguucuuuguaugaguacu

SEQ ID NO: 3223571 - RNA, 19 nt, Artificial Sequence
  Description of Artificial Sequence: Synthetic oligonucleotide
aagcggagcagagucaggg

SEQ ID NO: 3223572 - RNA, 19 nt, Artificial Sequence
  Description of Artificial Sequence: Synthetic oligonucleotide
ugaagaccauaaauggaga

SEQ ID NO: 3223573 - RNA, 19 nt, Artificial Sequence
  Description of Artificial Sequence: Synthetic oligonucleotide
uuggauuauggugaagacc

SEQ ID NO: 3223574 - RNA, 19 nt, Artificial Sequence
  Description of Artificial Sequence: Synthetic oligonucleotide
cucaaagcggagcagaguc

SEQ ID NO: 3223575 - RNA, 19 nt, Artificial Sequence
  Description of Artificial Sequence: Synthetic oligonucleotide
uucccaaugcaauuccuug

SEQ ID NO: 3223576 - RNA, 19 nt, Artificial Sequence
  Description of Artificial Sequence: Synthetic oligonucleotide
acuuggauuauggugaaga

SEQ ID NO: 3223577 - RNA, 19 nt, Artificial Sequence
  Description of Artificial Sequence: Synthetic oligonucleotide
uaaaucccauccuuggacu

SEQ ID NO: 3223578 - RNA, 19 nt, Artificial Sequence
  Description of Artificial Sequence: Synthetic oligonucleotide
gaagugauagguguguuga

SEQ ID NO: 3223579 - RNA, 19 nt, Artificial Sequence
  Description of Artificial Sequence: Synthetic oligonucleotide
gaaagcauagcugugccga

SEQ ID NO: 3223580 - RNA, 19 nt, Artificial Sequence
  Description of Artificial Sequence: Synthetic oligonucleotide
uuguaugaguacugggacc

SEQ ID NO: 3223581 - RNA, 19 nt, Artificial Sequence
  Description of Artificial Sequence: Synthetic oligonucleotide
aaacuccuuaggauuuggc

SEQ ID NO: 3223582 - RNA, 19 nt, Artificial Sequence
  Description of Artificial Sequence: Synthetic oligonucleotide
aaagcauagcugugccgag

SEQ ID NO: 3223583 - RNA, 19 nt, Artificial Sequence
  Description of Artificial Sequence: Synthetic oligonucleotide
uggccauaaacuuggauua

SEQ ID NO: 3223584 - RNA, 19 nt, Artificial Sequence
  Description of Artificial Sequence: Synthetic oligonucleotide
aagggcaggaaagcauagc

SEQ ID NO: 3223585 - RNA, 19 nt, Artificial Sequence
  Description of Artificial Sequence: Synthetic oligonucleotide
gagacgaagauaaauccca

SEQ ID NO: 3223586 - RNA, 19 nt, Artificial Sequence
  Description of Artificial Sequence: Synthetic oligonucleotide
auagcaaacuguuucccaa

SEQ ID NO: 3223587 - RNA, 19 nt, Artificial Sequence
  Description of Artificial Sequence: Synthetic oligonucleotide
cuugcuccuccugagaagg

SEQ ID NO: 3223588 - RNA, 19 nt, Artificial Sequence
  Description of Artificial Sequence: Synthetic oligonucleotide
ucaaaacaguucuuuguau

SEQ ID NO: 3223589 - RNA, 19 nt, Artificial Sequence
  Description of Artificial Sequence: Synthetic oligonucleotide
acugugauaccuuuaggua

SEQ ID NO: 3223590 - RNA, 19 nt, Artificial Sequence
  Description of Artificial Sequence: Synthetic oligonucleotide
aagugauagguguguugag

SEQ ID NO: 3223591 - RNA, 19 nt, Artificial Sequence
  Description of Artificial Sequence: Synthetic oligonucleotide
ucucgaaggaucaaguacg

SEQ ID NO: 3223592 - RNA, 19 nt, Artificial Sequence
  Description of Artificial Sequence: Synthetic oligonucleotide
uguguacuggguaagaggc

SEQ ID NO: 3223593 - RNA, 19 nt, Artificial Sequence
  Description of Artificial Sequence: Synthetic oligonucleotide
aagccauucgcacaucagg

SEQ ID NO: 3223594 - RNA, 19 nt, Artificial Sequence
  Description of Artificial Sequence: Synthetic oligonucleotide
aguacugcaggucaacagg

SEQ ID NO: 3223595 - RNA, 19 nt, Artificial Sequence
  Description of Artificial Sequence: Synthetic oligonucleotide
uucaaugagcaucuuucgg

SEQ ID NO: 3223596 - RNA, 19 nt, Artificial Sequence
  Description of Artificial Sequence: Synthetic oligonucleotide
aauagugcaagcaccgaac

SEQ ID NO: 3223597 - RNA, 19 nt, Artificial Sequence
  Description of Artificial Sequence: Synthetic oligonucleotide
auaaguuucucacaagcca

SEQ ID NO: 3223598 - RNA, 19 nt, Artificial Sequence
  Description of Artificial Sequence: Synthetic oligonucleotide
ucaaugagcaucuuucgga

SEQ ID NO: 3223599 - RNA, 19 nt, Artificial Sequence
  Description of Artificial Sequence: Synthetic oligonucleotide
aaggaucaaguacgcaccc

SEQ ID NO: 3223600 - RNA, 19 nt, Artificial Sequence
  Description of Artificial Sequence: Synthetic oligonucleotide
uggcucaucaccaaugagc

SEQ ID NO: 3223601 - RNA, 19 nt, Artificial Sequence
  Description of Artificial Sequence: Synthetic oligonucleotide
cugaaaacuccucaggacc

SEQ ID NO: 3223602 - RNA, 19 nt, Artificial Sequence
  Description of Artificial Sequence: Synthetic oligonucleotide
agcuucucaacauuuacug

SEQ ID NO: 3223603 - RNA, 19 nt, Artificial Sequence
  Description of Artificial Sequence: Synthetic oligonucleotide
uacccuagagcccuguagg

SEQ ID NO: 3223604 - RNA, 19 nt, Artificial Sequence
  Description of Artificial Sequence: Synthetic oligonucleotide
guuacaagcaggcacagga

SEQ ID NO: 3223605 - RNA, 19 nt, Artificial Sequence
  Description of Artificial Sequence: Synthetic oligonucleotide
cucaauagugcaagcaccg

SEQ ID NO: 3223606 - RNA, 19 nt, Artificial Sequence
  Description of Artificial Sequence: Synthetic oligonucleotide
acaggaccuagccagcucc

SEQ ID NO: 3223607 - RNA, 19 nt, Artificial Sequence
  Description of Artificial Sequence: Synthetic oligonucleotide
agugcaagcaccgaacaac

SEQ ID NO: 3223608 - RNA, 19 nt, Artificial Sequence
  Description of Artificial Sequence: Synthetic oligonucleotide
ucggaugucagcaucuggc

SEQ ID NO: 3223609 - RNA, 19 nt, Artificial Sequence
  Description of Artificial Sequence: Synthetic oligonucleotide
auuguacagcucucgaagg

SEQ ID NO: 3223610 - RNA, 19 nt, Artificial Sequence
  Description of Artificial Sequence: Synthetic oligonucleotide
aaguacgcacccugguccc

SEQ ID NO: 3223611 - RNA, 19 nt, Artificial Sequence
  Description of Artificial Sequence: Synthetic oligonucleotide
ugaaaacuccucaggacca

SEQ ID NO: 3223612 - RNA, 19 nt, Artificial Sequence
  Description of Artificial Sequence: Synthetic oligonucleotide
uuuugcugguuacaagcag

SEQ ID NO: 3223613 - RNA, 19 nt, Artificial Sequence
  Description of Artificial Sequence: Synthetic oligonucleotide
aagcucuagcuguucuugc

SEQ ID NO: 3223614 - RNA, 19 nt, Artificial Sequence
  Description of Artificial Sequence: Synthetic oligonucleotide
caugauggcuucaaugagc

SEQ ID NO: 3223615 - RNA, 19 nt, Artificial Sequence
  Description of Artificial Sequence: Synthetic oligonucleotide
uggcacaggaccuagccag

SEQ ID NO: 3223616 - RNA, 19 nt, Artificial Sequence
  Description of Artificial Sequence: Synthetic oligonucleotide
cuuguggugucgaugcucg

SEQ ID NO: 3223617 - RNA, 19 nt, Artificial Sequence
  Description of Artificial Sequence: Synthetic oligonucleotide
ucucaacauuuacugggcg

SEQ ID NO: 3223618 - RNA, 19 nt, Artificial Sequence
  Description of Artificial Sequence: Synthetic oligonucleotide
uaaguuucucacaagccau

SEQ ID NO: 3223619 - RNA, 19 nt, Artificial Sequence
  Description of Artificial Sequence: Synthetic oligonucleotide
ucugaaaacuccucaggac

SEQ ID NO: 3223620 - RNA, 19 nt, Artificial Sequence
  Description of Artificial Sequence: Synthetic oligonucleotide
cucaggaccagccaagggc

SEQ ID NO: 3223621 - RNA, 19 nt, Artificial Sequence
  Description of Artificial Sequence: Synthetic oligonucleotide
aaaguagaucuggagccgg

SEQ ID NO: 3223622 - RNA, 19 nt, Artificial Sequence
  Description of Artificial Sequence: Synthetic oligonucleotide
uuacccuagagcccuguag

SEQ ID NO: 3223623 - RNA, 19 nt, Artificial Sequence
  Description of Artificial Sequence: Synthetic oligonucleotide
cauauguaggcagcuaugg

SEQ ID NO: 3223624 - RNA, 19 nt, Artificial Sequence
  Description of Artificial Sequence: Synthetic oligonucleotide
caagcaccgaacaacuugc

SEQ ID NO: 3223625 - RNA, 19 nt, Artificial Sequence
  Description of Artificial Sequence: Synthetic oligonucleotide
ugggcguuuacccuagagc

SEQ ID NO: 3223626 - RNA, 19 nt, Artificial Sequence
  Description of Artificial Sequence: Synthetic oligonucleotide
gauggcuucaaugagcauc

SEQ ID NO: 3223627 - RNA, 19 nt, Artificial Sequence
  Description of Artificial Sequence: Synthetic oligonucleotide
cuggguaagaggcagcagc

SEQ ID NO: 3223628 - RNA, 19 nt, Artificial Sequence
  Description of Artificial Sequence: Synthetic oligonucleotide
cuguguacuggguaagagg

SEQ ID NO: 3223629 - RNA, 19 nt, Artificial Sequence
  Description of Artificial Sequence: Synthetic oligonucleotide
uuuuccaugccaaccucug

SEQ ID NO: 3223630 - RNA, 19 nt, Artificial Sequence
  Description of Artificial Sequence: Synthetic oligonucleotide
gaaggaucaaguacgcacc

SEQ ID NO: 3223631 - RNA, 19 nt, Artificial Sequence
  Description of Artificial Sequence: Synthetic oligonucleotide
ucuucaggcaccugcaccu

SEQ ID NO: 3223632 - RNA, 19 nt, Artificial Sequence
  Description of Artificial Sequence: Synthetic oligonucleotide
aggaucuucaggucugcgg

SEQ ID NO: 3223633 - RNA, 19 nt, Artificial Sequence
  Description of Artificial Sequence: Synthetic oligonucleotide
ucaggaccagccaagggca

SEQ ID NO: 3223634 - RNA, 19 nt, Artificial Sequence
  Description of Artificial Sequence: Synthetic oligonucleotide
agcaucuggcucucguugc

SEQ ID NO: 3223635 - RNA, 19 nt, Artificial Sequence
  Description of Artificial Sequence: Synthetic oligonucleotide
aaguguucccaccacuccu

SEQ ID NO: 3223636 - RNA, 19 nt, Artificial Sequence
  Description of Artificial Sequence: Synthetic oligonucleotide
ucuggcgacaaguacugca

SEQ ID NO: 3223637 - RNA, 19 nt, Artificial Sequence
  Description of Artificial Sequence: Synthetic oligonucleotide
ggaucuucaggucugcggg

SEQ ID NO: 3223638 - RNA, 19 nt, Artificial Sequence
  Description of Artificial Sequence: Synthetic oligonucleotide
uggucuauguguugcagcu

SEQ ID NO: 3223639 - RNA, 19 nt, Artificial Sequence
  Description of Artificial Sequence: Synthetic oligonucleotide
ucgacuuggggcccgagca

SEQ ID NO: 3223640 - RNA, 19 nt, Artificial Sequence
  Description of Artificial Sequence: Synthetic oligonucleotide
aggccaaaggaucuucagg

SEQ ID NO: 3223641 - RNA, 19 nt, Artificial Sequence
  Description of Artificial Sequence: Synthetic oligonucleotide
ugcaguggcugucagcagc

SEQ ID NO: 3223642 - RNA, 19 nt, Artificial Sequence
  Description of Artificial Sequence: Synthetic oligonucleotide
uggguaagaggcagcagcc

SEQ ID NO: 3223643 - RNA, 19 nt, Artificial Sequence
  Description of Artificial Sequence: Synthetic oligonucleotide
ugcucgaaacagcaauucc

SEQ ID NO: 3223644 - RNA, 19 nt, Artificial Sequence
  Description of Artificial Sequence: Synthetic oligonucleotide
acauuuacugggcguuuac

SEQ ID NO: 3223645 - RNA, 19 nt, Artificial Sequence
  Description of Artificial Sequence: Synthetic oligonucleotide
ugucuggcgacaaguacug

SEQ ID NO: 3223646 - RNA, 19 nt, Artificial Sequence
  Description of Artificial Sequence: Synthetic oligonucleotide
agaagggaagaaugucgac

SEQ ID NO: 3223647 - RNA, 19 nt, Artificial Sequence
  Description of Artificial Sequence: Synthetic oligonucleotide
aacagcaauuccgaagugu

SEQ ID NO: 3223648 - RNA, 19 nt, Artificial Sequence
  Description of Artificial Sequence: Synthetic oligonucleotide
uuuccaugccaaccucugg

SEQ ID NO: 3223649 - RNA, 19 nt, Artificial Sequence
  Description of Artificial Sequence: Synthetic oligonucleotide
agccauucgcacaucaggc

SEQ ID NO: 3223650 - RNA, 19 nt, Artificial Sequence
  Description of Artificial Sequence: Synthetic oligonucleotide
aagaagggaagaaugucga

SEQ ID NO: 3223651 - RNA, 19 nt, Artificial Sequence
  Description of Artificial Sequence: Synthetic oligonucleotide
aggaucacaggcaaaguag

SEQ ID NO: 3223652 - RNA, 19 nt, Artificial Sequence
  Description of Artificial Sequence: Synthetic oligonucleotide
ucuggcucccaauuguaca

SEQ ID NO: 3223653 - RNA, 19 nt, Artificial Sequence
  Description of Artificial Sequence: Synthetic oligonucleotide
uucggaugucagcaucugg

SEQ ID NO: 3223654 - RNA, 19 nt, Artificial Sequence
  Description of Artificial Sequence: Synthetic oligonucleotide
gaaguguucccaccacucc

SEQ ID NO: 3223655 - RNA, 19 nt, Artificial Sequence
  Description of Artificial Sequence: Synthetic oligonucleotide
gggcguuuacccuagagcc

SEQ ID NO: 3223656 - RNA, 19 nt, Artificial Sequence
  Description of Artificial Sequence: Synthetic oligonucleotide
ucgcacaucaggcucuggc

SEQ ID NO: 3223657 - RNA, 19 nt, Artificial Sequence
  Description of Artificial Sequence: Synthetic oligonucleotide
guaucugcugccgaccugg

SEQ ID NO: 3223658 - RNA, 19 nt, Artificial Sequence
  Description of Artificial Sequence: Synthetic oligonucleotide
uacagcucucgaaggauca

SEQ ID NO: 3223659 - RNA, 19 nt, Artificial Sequence
  Description of Artificial Sequence: Synthetic oligonucleotide
agguuuuccaugccaaccu

SEQ ID NO: 3223660 - RNA, 19 nt, Artificial Sequence
  Description of Artificial Sequence: Synthetic oligonucleotide
ucaaguacgcacccugguc

SEQ ID NO: 3223661 - RNA, 19 nt, Artificial Sequence
  Description of Artificial Sequence: Synthetic oligonucleotide
agcuccagcucaauagugc

SEQ ID NO: 3223662 - RNA, 19 nt, Artificial Sequence
  Description of Artificial Sequence: Synthetic oligonucleotide
ucuuucggaugucagcauc

SEQ ID NO: 3223663 - RNA, 19 nt, Artificial Sequence
  Description of Artificial Sequence: Synthetic oligonucleotide
uucucacaagccauucgca

SEQ ID NO: 3223664 - RNA, 19 nt, Artificial Sequence
  Description of Artificial Sequence: Synthetic oligonucleotide
aaguagaucuggagccggc

SEQ ID NO: 3223665 - RNA, 19 nt, Artificial Sequence
  Description of Artificial Sequence: Synthetic oligonucleotide
gugucgaugcucgaaacag

SEQ ID NO: 3223666 - RNA, 19 nt, Artificial Sequence
  Description of Artificial Sequence: Synthetic oligonucleotide
cuauguguugcagcugucg

SEQ ID NO: 3223667 - RNA, 19 nt, Artificial Sequence
  Description of Artificial Sequence: Synthetic oligonucleotide
ugucgaugcucgaaacagc

SEQ ID NO: 3223668 - RNA, 19 nt, Artificial Sequence
  Description of Artificial Sequence: Synthetic oligonucleotide
auagugcaagcaccgaaca

SEQ ID NO: 3223669 - RNA, 19 nt, Artificial Sequence
  Description of Artificial Sequence: Synthetic oligonucleotide
aaacagcaauuccgaagug

SEQ ID NO: 3223670 - RNA, 19 nt, Artificial Sequence
  Description of Artificial Sequence: Synthetic oligonucleotide
caaccucuggcucaucacc

SEQ ID NO: 3223671 - RNA, 19 nt, Artificial Sequence
  Description of Artificial Sequence: Synthetic oligonucleotide
uaggccaaaggaucuucag

SEQ ID NO: 3223672 - RNA, 19 nt, Artificial Sequence
  Description of Artificial Sequence: Synthetic oligonucleotide
cagccuguccauuucuucc

SEQ ID NO: 3223673 - RNA, 19 nt, Artificial Sequence
  Description of Artificial Sequence: Synthetic oligonucleotide
cuggcgacaaguacugcag

SEQ ID NO: 3223674 - RNA, 19 nt, Artificial Sequence
  Description of Artificial Sequence: Synthetic oligonucleotide
uagcuguucuugcuggucu

SEQ ID NO: 3223675 - RNA, 19 nt, Artificial Sequence
  Description of Artificial Sequence: Synthetic oligonucleotide
cuggcucccaauuguacag

SEQ ID NO: 3223676 - RNA, 19 nt, Artificial Sequence
  Description of Artificial Sequence: Synthetic oligonucleotide
gaugucagcaucuggcucu

SEQ ID NO: 3223677 - RNA, 19 nt, Artificial Sequence
  Description of Artificial Sequence: Synthetic oligonucleotide
gcucgaaacagcaauuccg

SEQ ID NO: 3223678 - RNA, 19 nt, Artificial Sequence
  Description of Artificial Sequence: Synthetic oligonucleotide
uuccgaaguguucccacca

SEQ ID NO: 3223679 - RNA, 19 nt, Artificial Sequence
  Description of Artificial Sequence: Synthetic oligonucleotide
uccggguccaggagaaaag

SEQ ID NO: 3223680 - RNA, 19 nt, Artificial Sequence
  Description of Artificial Sequence: Synthetic oligonucleotide
caggucaacaggcagccug

SEQ ID NO: 3223681 - RNA, 19 nt, Artificial Sequence
  Description of Artificial Sequence: Synthetic oligonucleotide
ucucguugcuugucuggcg

SEQ ID NO: 3223682 - RNA, 19 nt, Artificial Sequence
  Description of Artificial Sequence: Synthetic oligonucleotide
gcugguuacaagcaggcac

SEQ ID NO: 3223683 - RNA, 19 nt, Artificial Sequence
  Description of Artificial Sequence: Synthetic oligonucleotide
uagaucuggagccggcacu

SEQ ID NO: 3223684 - RNA, 19 nt, Artificial Sequence
  Description of Artificial Sequence: Synthetic oligonucleotide
aucuucaggucugcggggc

SEQ ID NO: 3223685 - RNA, 19 nt, Artificial Sequence
  Description of Artificial Sequence: Synthetic oligonucleotide
cucgaaacagcaauuccga

SEQ ID NO: 3223686 - RNA, 19 nt, Artificial Sequence
  Description of Artificial Sequence: Synthetic oligonucleotide
cuggauaaguuucucacaa

SEQ ID NO: 3223687 - RNA, 19 nt, Artificial Sequence
  Description of Artificial Sequence: Synthetic oligonucleotide
uggcgacaaguacugcagg

SEQ ID NO: 3223688 - RNA, 19 nt, Artificial Sequence
  Description of Artificial Sequence: Synthetic oligonucleotide
cucgaaggaucaaguacgc

SEQ ID NO: 3223689 - RNA, 19 nt, Artificial Sequence
  Description of Artificial Sequence: Synthetic oligonucleotide
cacaucaggcucuggcucc

SEQ ID NO: 3223690 - RNA, 19 nt, Artificial Sequence
  Description of Artificial Sequence: Synthetic oligonucleotide
aacuccucaggaccagcca

SEQ ID NO: 3223691 - RNA, 19 nt, Artificial Sequence
  Description of Artificial Sequence: Synthetic oligonucleotide
aagaaaaucuaucagcacc

SEQ ID NO: 3223692 - RNA, 19 nt, Artificial Sequence
  Description of Artificial Sequence: Synthetic oligonucleotide
aauauuaccauauagaauu

SEQ ID NO: 3223693 - RNA, 19 nt, Artificial Sequence
  Description of Artificial Sequence: Synthetic oligonucleotide
aaugcuaccacggugauuc

SEQ ID NO: 3223694 - RNA, 19 nt, Artificial Sequence
  Description of Artificial Sequence: Synthetic oligonucleotide
aaaauauuaccauauagaa

SEQ ID NO: 3223695 - RNA, 19 nt, Artificial Sequence
  Description of Artificial Sequence: Synthetic oligonucleotide
uauagaauuaucauaacaa

SEQ ID NO: 3223696 - RNA, 19 nt, Artificial Sequence
  Description of Artificial Sequence: Synthetic oligonucleotide
uagaauuaucauaacaagg

SEQ ID NO: 3223697 - RNA, 19 nt, Artificial Sequence
  Description of Artificial Sequence: Synthetic oligonucleotide
uauaaagaaggaaagaaaa

SEQ ID NO: 3223698 - RNA, 19 nt, Artificial Sequence
  Description of Artificial Sequence: Synthetic oligonucleotide
uuugcuaccaauauuuucu

SEQ ID NO: 3223699 - RNA, 19 nt, Artificial Sequence
  Description of Artificial Sequence: Synthetic oligonucleotide
agaauuaucauaacaaggg

SEQ ID NO: 3223700 - RNA, 19 nt, Artificial Sequence
  Description of Artificial Sequence: Synthetic oligonucleotide
ucuaucagcacccaguucu

SEQ ID NO: 3223701 - RNA, 19 nt, Artificial Sequence
  Description of Artificial Sequence: Synthetic oligonucleotide
aaggaaagaaaaucuauca

SEQ ID NO: 3223702 - RNA, 19 nt, Artificial Sequence
  Description of Artificial Sequence: Synthetic oligonucleotide
aauucucugaggaugauuc

SEQ ID NO: 3223703 - RNA, 19 nt, Artificial Sequence
  Description of Artificial Sequence: Synthetic oligonucleotide
auucacaacuaccugacac

SEQ ID NO: 3223704 - RNA, 19 nt, Artificial Sequence
  Description of Artificial Sequence: Synthetic oligonucleotide
aaagaaaaucuaucagcac

SEQ ID NO: 3223705 - RNA, 19 nt, Artificial Sequence
  Description of Artificial Sequence: Synthetic oligonucleotide
uuaccauauagaauuauca

SEQ ID NO: 3223706 - RNA, 19 nt, Artificial Sequence
  Description of Artificial Sequence: Synthetic oligonucleotide
auagaauuaucauaacaag

SEQ ID NO: 3223707 - RNA, 19 nt, Artificial Sequence
  Description of Artificial Sequence: Synthetic oligonucleotide
uugguauaaagaaggaaag

SEQ ID NO: 3223708 - RNA, 19 nt, Artificial Sequence
  Description of Artificial Sequence: Synthetic oligonucleotide
uguuuugcuaccaauauuu

SEQ ID NO: 3223709 - RNA, 19 nt, Artificial Sequence
  Description of Artificial Sequence: Synthetic oligonucleotide
gaugauucuguuuugcuac

SEQ ID NO: 3223710 - RNA, 19 nt, Artificial Sequence
  Description of Artificial Sequence: Synthetic oligonucleotide
aaagaaggaaagaaaaucu

SEQ ID NO: 3223711 - RNA, 19 nt, Artificial Sequence
  Description of Artificial Sequence: Synthetic oligonucleotide
auauagaauuaucauaaca

SEQ ID NO: 3223712 - RNA, 19 nt, Artificial Sequence
  Description of Artificial Sequence: Synthetic oligonucleotide
agaaaaucuaucagcaccc

SEQ ID NO: 3223713 - RNA, 19 nt, Artificial Sequence
  Description of Artificial Sequence: Synthetic oligonucleotide
uaaagaaggaaagaaaauc

SEQ ID NO: 3223714 - RNA, 19 nt, Artificial Sequence
  Description of Artificial Sequence: Synthetic oligonucleotide
ggaaagaaaaucuaucagc

SEQ ID NO: 3223715 - RNA, 19 nt, Artificial Sequence
  Description of Artificial Sequence: Synthetic oligonucleotide
uucugauucacaacuaccu

SEQ ID NO: 3223716 - RNA, 19 nt, Artificial Sequence
  Description of Artificial Sequence: Synthetic oligonucleotide
auuaucauaacaaggguug

SEQ ID NO: 3223717 - RNA, 19 nt, Artificial Sequence
  Description of Artificial Sequence: Synthetic oligonucleotide
gaaagaaaaucuaucagca

SEQ ID NO: 3223718 - RNA, 19 nt, Artificial Sequence
  Description of Artificial Sequence: Synthetic oligonucleotide
aguucugauucacaacuac

SEQ ID NO: 3223719 - RNA, 19 nt, Artificial Sequence
  Description of Artificial Sequence: Synthetic oligonucleotide
aggaaagaaaaucuaucag

SEQ ID NO: 3223720 - RNA, 19 nt, Artificial Sequence
  Description of Artificial Sequence: Synthetic oligonucleotide
aacaaggguugguauaaag

SEQ ID NO: 3223721 - RNA, 19 nt, Artificial Sequence
  Description of Artificial Sequence: Synthetic oligonucleotide
aaaaucuaucagcacccag

SEQ ID NO: 3223722 - RNA, 19 nt, Artificial Sequence
  Description of Artificial Sequence: Synthetic oligonucleotide
uguaauucucugaggauga

SEQ ID NO: 3223723 - RNA, 19 nt, Artificial Sequence
  Description of Artificial Sequence: Synthetic oligonucleotide
acaacuaccugacacccuc

SEQ ID NO: 3223724 - RNA, 19 nt, Artificial Sequence
  Description of Artificial Sequence: Synthetic oligonucleotide
gucuuuguaauucucugag

SEQ ID NO: 3223725 - RNA, 19 nt, Artificial Sequence
  Description of Artificial Sequence: Synthetic oligonucleotide
uuuucucucucucuuugcc

SEQ ID NO: 3223726 - RNA, 19 nt, Artificial Sequence
  Description of Artificial Sequence: Synthetic oligonucleotide
uuguaauucucugaggaug

SEQ ID NO: 3223727 - RNA, 19 nt, Artificial Sequence
  Description of Artificial Sequence: Synthetic oligonucleotide
aggguugguauaaagaagg

SEQ ID NO: 3223728 - RNA, 19 nt, Artificial Sequence
  Description of Artificial Sequence: Synthetic oligonucleotide
aaaucuaucagcacccagu

SEQ ID NO: 3223729 - RNA, 19 nt, Artificial Sequence
  Description of Artificial Sequence: Synthetic oligonucleotide
uucacaacuaccugacacc

SEQ ID NO: 3223730 - RNA, 19 nt, Artificial Sequence
  Description of Artificial Sequence: Synthetic oligonucleotide
ugauucacaacuaccugac

SEQ ID NO: 3223731 - RNA, 19 nt, Artificial Sequence
  Description of Artificial Sequence: Synthetic oligonucleotide
accacggugauucccaggg

SEQ ID NO: 3223732 - RNA, 19 nt, Artificial Sequence
  Description of Artificial Sequence: Synthetic oligonucleotide
ucuuuguaauucucugagg

SEQ ID NO: 3223733 - RNA, 19 nt, Artificial Sequence
  Description of Artificial Sequence: Synthetic oligonucleotide
cuuuguaauucucugagga

SEQ ID NO: 3223734 - RNA, 19 nt, Artificial Sequence
  Description of Artificial Sequence: Synthetic oligonucleotide
auuaccauauagaauuauc

SEQ ID NO: 3223735 - RNA, 19 nt, Artificial Sequence
  Description of Artificial Sequence: Synthetic oligonucleotide
ucugauucacaacuaccug

SEQ ID NO: 3223736 - RNA, 19 nt, Artificial Sequence
  Description of Artificial Sequence: Synthetic oligonucleotide
aauuaucauaacaaggguu

SEQ ID NO: 3223737 - RNA, 19 nt, Artificial Sequence
  Description of Artificial Sequence: Synthetic oligonucleotide
uugccuagcuaccagaaaa

SEQ ID NO: 3223738 - RNA, 19 nt, Artificial Sequence
  Description of Artificial Sequence: Synthetic oligonucleotide
ucuguuuugcuaccaauau

SEQ ID NO: 3223739 - RNA, 19 nt, Artificial Sequence
  Description of Artificial Sequence: Synthetic oligonucleotide
aaauauuaccauauagaau

SEQ ID NO: 3223740 - RNA, 19 nt, Artificial Sequence
  Description of Artificial Sequence: Synthetic oligonucleotide
guugguauaaagaaggaaa

SEQ ID NO: 3223741 - RNA, 19 nt, Artificial Sequence
  Description of Artificial Sequence: Synthetic oligonucleotide
auucccaggguuuuggcug

SEQ ID NO: 3223742 - RNA, 19 nt, Artificial Sequence
  Description of Artificial Sequence: Synthetic oligonucleotide
accauauagaauuaucaua

SEQ ID NO: 3223743 - RNA, 19 nt, Artificial Sequence
  Description of Artificial Sequence: Synthetic oligonucleotide
accaauauuuucuaucuuu

SEQ ID NO: 3223744 - RNA, 19 nt, Artificial Sequence
  Description of Artificial Sequence: Synthetic oligonucleotide
gaaggaaagaaaaucuauc

SEQ ID NO: 3223745 - RNA, 19 nt, Artificial Sequence
  Description of Artificial Sequence: Synthetic oligonucleotide
uuuugcuaccaauauuuuc

SEQ ID NO: 3223746 - RNA, 19 nt, Artificial Sequence
  Description of Artificial Sequence: Synthetic oligonucleotide
uaccauauagaauuaucau

SEQ ID NO: 3223747 - RNA, 19 nt, Artificial Sequence
  Description of Artificial Sequence: Synthetic oligonucleotide
augauucuguuuugcuacc

SEQ ID NO: 3223748 - RNA, 19 nt, Artificial Sequence
  Description of Artificial Sequence: Synthetic oligonucleotide
uuaucauaacaaggguugg

SEQ ID NO: 3223749 - RNA, 19 nt, Artificial Sequence
  Description of Artificial Sequence: Synthetic oligonucleotide
aaucuaucagcacccaguu

SEQ ID NO: 3223750 - RNA, 19 nt, Artificial Sequence
  Description of Artificial Sequence: Synthetic oligonucleotide
uagccuguugccuagcuac

SEQ ID NO: 3223751 - RNA, 19 nt, Artificial Sequence
  Description of Artificial Sequence: Synthetic oligonucleotide
aucaugaaugcuaccacgg

SEQ ID NO: 3223752 - RNA, 19 nt, Artificial Sequence
  Description of Artificial Sequence: Synthetic oligonucleotide
ugucuuuguaauucucuga

SEQ ID NO: 3223753 - RNA, 19 nt, Artificial Sequence
  Description of Artificial Sequence: Synthetic oligonucleotide
aaggguugguauaaagaag

SEQ ID NO: 3223754 - RNA, 19 nt, Artificial Sequence
  Description of Artificial Sequence: Synthetic oligonucleotide
uucuguuuugcuaccaaua

SEQ ID NO: 3223755 - RNA, 19 nt, Artificial Sequence
  Description of Artificial Sequence: Synthetic oligonucleotide
ucucugaggaugauucugu

SEQ ID NO: 3223756 - RNA, 19 nt, Artificial Sequence
  Description of Artificial Sequence: Synthetic oligonucleotide
uuuguaauucucugaggau

SEQ ID NO: 3223757 - RNA, 19 nt, Artificial Sequence
  Description of Artificial Sequence: Synthetic oligonucleotide
caugaaugcuaccacggug

SEQ ID NO: 3223758 - RNA, 19 nt, Artificial Sequence
  Description of Artificial Sequence: Synthetic oligonucleotide
cuaccugacacccuccuac

SEQ ID NO: 3223759 - RNA, 19 nt, Artificial Sequence
  Description of Artificial Sequence: Synthetic oligonucleotide
cauauagaauuaucauaac

SEQ ID NO: 3223760 - RNA, 19 nt, Artificial Sequence
  Description of Artificial Sequence: Synthetic oligonucleotide
uucucucucucuuugccac

SEQ ID NO: 3223761 - RNA, 19 nt, Artificial Sequence
  Description of Artificial Sequence: Synthetic oligonucleotide
caaggguugguauaaagaa

SEQ ID NO: 3223762 - RNA, 19 nt, Artificial Sequence
  Description of Artificial Sequence: Synthetic oligonucleotide
ucacaacuaccugacaccc

SEQ ID NO: 3223763 - RNA, 19 nt, Artificial Sequence
  Description of Artificial Sequence: Synthetic oligonucleotide
cugucuuuguaauucucug

SEQ ID NO: 3223764 - RNA, 19 nt, Artificial Sequence
  Description of Artificial Sequence: Synthetic oligonucleotide
ugguauaaagaaggaaaga

SEQ ID NO: 3223765 - RNA, 19 nt, Artificial Sequence
  Description of Artificial Sequence: Synthetic oligonucleotide
cugauucacaacuaccuga

SEQ ID NO: 3223766 - RNA, 19 nt, Artificial Sequence
  Description of Artificial Sequence: Synthetic oligonucleotide
ucauaacaaggguugguau

SEQ ID NO: 3223767 - RNA, 19 nt, Artificial Sequence
  Description of Artificial Sequence: Synthetic oligonucleotide
ccauauagaauuaucauaa

SEQ ID NO: 3223768 - RNA, 19 nt, Artificial Sequence
  Description of Artificial Sequence: Synthetic oligonucleotide
uucucugaggaugauucug

SEQ ID NO: 3223769 - RNA, 19 nt, Artificial Sequence
  Description of Artificial Sequence: Synthetic oligonucleotide
uuucucucucucuuugcca

SEQ ID NO: 3223770 - RNA, 19 nt, Artificial Sequence
  Description of Artificial Sequence: Synthetic oligonucleotide
gguauaaagaaggaaagaa

SEQ ID NO: 3223771 - RNA, 19 nt, Artificial Sequence
  Description of Artificial Sequence: Synthetic oligonucleotide
gaauuaucauaacaagggu

SEQ ID NO: 3223772 - RNA, 19 nt, Artificial Sequence
  Description of Artificial Sequence: Synthetic oligonucleotide
ucaugaaugcuaccacggu

SEQ ID NO: 3223773 - RNA, 19 nt, Artificial Sequence
  Description of Artificial Sequence: Synthetic oligonucleotide
aagaaggaaagaaaaucua

SEQ ID NO: 3223774 - RNA, 19 nt, Artificial Sequence
  Description of Artificial Sequence: Synthetic oligonucleotide
auaaagaaggaaagaaaau

SEQ ID NO: 3223775 - RNA, 19 nt, Artificial Sequence
  Description of Artificial Sequence: Synthetic oligonucleotide
guauaaagaaggaaagaaa

SEQ ID NO: 3223776 - RNA, 19 nt, Artificial Sequence
  Description of Artificial Sequence: Synthetic oligonucleotide
auaacaaggguugguauaa

SEQ ID NO: 3223777 - RNA, 19 nt, Artificial Sequence
  Description of Artificial Sequence: Synthetic oligonucleotide
agaaggaaagaaaaucuau

SEQ ID NO: 3223778 - RNA, 19 nt, Artificial Sequence
  Description of Artificial Sequence: Synthetic oligonucleotide
augaaugcuaccacgguga

SEQ ID NO: 3223779 - RNA, 19 nt, Artificial Sequence
  Description of Artificial Sequence: Synthetic oligonucleotide
cuuuucucucucucuuugc

SEQ ID NO: 3223780 - RNA, 19 nt, Artificial Sequence
  Description of Artificial Sequence: Synthetic oligonucleotide
guucugauucacaacuacc

SEQ ID NO: 3223781 - RNA, 19 nt, Artificial Sequence
  Description of Artificial Sequence: Synthetic oligonucleotide
aacuaccugacacccuccu

SEQ ID NO: 3223782 - RNA, 19 nt, Artificial Sequence
  Description of Artificial Sequence: Synthetic oligonucleotide
uguugccuagcuaccagaa

SEQ ID NO: 3223783 - RNA, 19 nt, Artificial Sequence
  Description of Artificial Sequence: Synthetic oligonucleotide
gcuaccaauauuuucuauc

SEQ ID NO: 3223784 - RNA, 19 nt, Artificial Sequence
  Description of Artificial Sequence: Synthetic oligonucleotide
acaaggguugguauaaaga

SEQ ID NO: 3223785 - RNA, 19 nt, Artificial Sequence
  Description of Artificial Sequence: Synthetic oligonucleotide
aggaugauucuguuuugcu

SEQ ID NO: 3223786 - RNA, 19 nt, Artificial Sequence
  Description of Artificial Sequence: Synthetic oligonucleotide
uuuagccuguugccuagcu

SEQ ID NO: 3223787 - RNA, 19 nt, Artificial Sequence
  Description of Artificial Sequence: Synthetic oligonucleotide
uaucauaacaaggguuggu

SEQ ID NO: 3223788 - RNA, 19 nt, Artificial Sequence
  Description of Artificial Sequence: Synthetic oligonucleotide
ugaggaugauucuguuuug

SEQ ID NO: 3223789 - RNA, 19 nt, Artificial Sequence
  Description of Artificial Sequence: Synthetic oligonucleotide
gaggaugauucuguuuugc

SEQ ID NO: 3223790 - RNA, 19 nt, Artificial Sequence
  Description of Artificial Sequence: Synthetic oligonucleotide
cuaccaauauuuucuaucu

SEQ ID NO: 3223791 - RNA, 19 nt, Artificial Sequence
  Description of Artificial Sequence: Synthetic oligonucleotide
aaaauuauuaaacagcccc

SEQ ID NO: 3223792 - RNA, 19 nt, Artificial Sequence
  Description of Artificial Sequence: Synthetic oligonucleotide
aaaucucaaaaucucaaac

SEQ ID NO: 3223793 - RNA, 19 nt, Artificial Sequence
  Description of Artificial Sequence: Synthetic oligonucleotide
aaugcaacacacuauauug

SEQ ID NO: 3223794 - RNA, 19 nt, Artificial Sequence
  Description of Artificial Sequence: Synthetic oligonucleotide
aacuggaagaaucaacagc

SEQ ID NO: 3223795 - RNA, 19 nt, Artificial Sequence
  Description of Artificial Sequence: Synthetic oligonucleotide
uuaucauccauuaaguuca

SEQ ID NO: 3223796 - RNA, 19 nt, Artificial Sequence
  Description of Artificial Sequence: Synthetic oligonucleotide
uaacuuaucauccauuaag

SEQ ID NO: 3223797 - RNA, 19 nt, Artificial Sequence
  Description of Artificial Sequence: Synthetic oligonucleotide
uuuguuuuguuuuaaaugu

SEQ ID NO: 3223798 - RNA, 19 nt, Artificial Sequence
  Description of Artificial Sequence: Synthetic oligonucleotide
uuauuaaacagccccaucc

SEQ ID NO: 3223799 - RNA, 19 nt, Artificial Sequence
  Description of Artificial Sequence: Synthetic oligonucleotide
uccaaaauuauuaaacagc

SEQ ID NO: 3223800 - RNA, 19 nt, Artificial Sequence
  Description of Artificial Sequence: Synthetic oligonucleotide
aaaaucucaaacuaucaga

SEQ ID NO: 3223801 - RNA, 19 nt, Artificial Sequence
  Description of Artificial Sequence: Synthetic oligonucleotide
uuuuguuuuguuuuaaaug

SEQ ID NO: 3223802 - RNA, 19 nt, Artificial Sequence
  Description of Artificial Sequence: Synthetic oligonucleotide
aaacuaucagaucacuaac

SEQ ID NO: 3223803 - RNA, 19 nt, Artificial Sequence
  Description of Artificial Sequence: Synthetic oligonucleotide
uaugggacaaccaagacaa

SEQ ID NO: 3223804 - RNA, 19 nt, Artificial Sequence
  Description of Artificial Sequence: Synthetic oligonucleotide
uuaacuggaagaaucaaca

SEQ ID NO: 3223805 - RNA, 19 nt, Artificial Sequence
  Description of Artificial Sequence: Synthetic oligonucleotide
uuuguuuuaaaugugcacc

SEQ ID NO: 3223806 - RNA, 19 nt, Artificial Sequence
  Description of Artificial Sequence: Synthetic oligonucleotide
acuggaagaaucaacagcc

SEQ ID NO: 3223807 - RNA, 19 nt, Artificial Sequence
  Description of Artificial Sequence: Synthetic oligonucleotide
uauauugccacucuagaac

SEQ ID NO: 3223808 - RNA, 19 nt, Artificial Sequence
  Description of Artificial Sequence: Synthetic oligonucleotide
aaucucaaaaucucaaacu

SEQ ID NO: 3223809 - RNA, 19 nt, Artificial Sequence
  Description of Artificial Sequence: Synthetic oligonucleotide
uccauuaaguucaaugucc

SEQ ID NO: 3223810 - RNA, 19 nt, Artificial Sequence
  Description of Artificial Sequence: Synthetic oligonucleotide
aaaugugcacccuuaauca

SEQ ID NO: 3223811 - RNA, 19 nt, Artificial Sequence
  Description of Artificial Sequence: Synthetic oligonucleotide
ucuacuguuaacuggaaga

SEQ ID NO: 3223812 - RNA, 19 nt, Artificial Sequence
  Description of Artificial Sequence: Synthetic oligonucleotide
aucucaaacuaucagauca

SEQ ID NO: 3223813 - RNA, 19 nt, Artificial Sequence
  Description of Artificial Sequence: Synthetic oligonucleotide
ucauccauuaaguucaaug

SEQ ID NO: 3223814 - RNA, 19 nt, Artificial Sequence
  Description of Artificial Sequence: Synthetic oligonucleotide
uuugaaaugcaacacacua

SEQ ID NO: 3223815 - RNA, 19 nt, Artificial Sequence
  Description of Artificial Sequence: Synthetic oligonucleotide
uguuuuguuuuaaaugugc

SEQ ID NO: 3223816 - RNA, 19 nt, Artificial Sequence
  Description of Artificial Sequence: Synthetic oligonucleotide
uaaucaguaagccaucucu

SEQ ID NO: 3223817 - RNA, 19 nt, Artificial Sequence
  Description of Artificial Sequence: Synthetic oligonucleotide
uaucagaucacuaacuuau

SEQ ID NO: 3223818 - RNA, 19 nt, Artificial Sequence
  Description of Artificial Sequence: Synthetic oligonucleotide
ucaauguccaaaauuauua

SEQ ID NO: 3223819 - RNA, 19 nt, Artificial Sequence
  Description of Artificial Sequence: Synthetic oligonucleotide
uaaaugugcacccuuaauc

SEQ ID NO: 3223820 - RNA, 19 nt, Artificial Sequence
  Description of Artificial Sequence: Synthetic oligonucleotide
  modified_base (5)..(5): a, c, u, g, unknown or other
uuuunuuuuguuuuguuuu

SEQ ID NO: 3223821 - RNA, 19 nt, Artificial Sequence
  Description of Artificial Sequence: Synthetic oligonucleotide
cuuaucauccauuaaguuc

SEQ ID NO: 3223822 - RNA, 19 nt, Artificial Sequence
  Description of Artificial Sequence: Synthetic oligonucleotide
uagaacaaccuccugagca

SEQ ID NO: 3223823 - RNA, 19 nt, Artificial Sequence
  Description of Artificial Sequence: Synthetic oligonucleotide
ucuagaacaaccuccugag

SEQ ID NO: 3223824 - RNA, 19 nt, Artificial Sequence
  Description of Artificial Sequence: Synthetic oligonucleotide
agaucacuaacuuaucauc

SEQ ID NO: 3223825 - RNA, 19 nt, Artificial Sequence
  Description of Artificial Sequence: Synthetic oligonucleotide
  modified_base (4)..(4): a, c, u, g, unknown or other
uuunuuuuguuuuguuuug

SEQ ID NO: 3223826 - RNA, 19 nt, Artificial Sequence
  Description of Artificial Sequence: Synthetic oligonucleotide
auguccaaaauuauuaaac

SEQ ID NO: 3223827 - RNA, 19 nt, Artificial Sequence
  Description of Artificial Sequence: Synthetic oligonucleotide
agaaucaacagccgcacuc

SEQ ID NO: 3223828 - RNA, 19 nt, Artificial Sequence
  Description of Artificial Sequence: Synthetic oligonucleotide
ucaacagccgcacuccugg

SEQ ID NO: 3223829 - RNA, 19 nt, Artificial Sequence
  Description of Artificial Sequence: Synthetic oligonucleotide
uguccaaaauuauuaaaca

SEQ ID NO: 3223830 - RNA, 19 nt, Artificial Sequence
  Description of Artificial Sequence: Synthetic oligonucleotide
aucaguaagccaucucucc

SEQ ID NO: 3223831 - RNA, 19 nt, Artificial Sequence
  Description of Artificial Sequence: Synthetic oligonucleotide
uguccaaaaucucaaaauc

SEQ ID NO: 3223832 - RNA, 19 nt, Artificial Sequence
  Description of Artificial Sequence: Synthetic oligonucleotide
uuaugggacaaccaagaca

SEQ ID NO: 3223833 - RNA, 19 nt, Artificial Sequence
  Description of Artificial Sequence: Synthetic oligonucleotide
ugaaaugcaacacacuaua

SEQ ID NO: 3223834 - RNA, 19 nt, Artificial Sequence
  Description of Artificial Sequence: Synthetic oligonucleotide
ucaaaaucucaaacuauca

SEQ ID NO: 3223835 - RNA, 19 nt, Artificial Sequence
  Description of Artificial Sequence: Synthetic oligonucleotide
aaguuacuguggcaaaggg

SEQ ID NO: 3223836 - RNA, 19 nt, Artificial Sequence
  Description of Artificial Sequence: Synthetic oligonucleotide
accaagacaaguuacugug

SEQ ID NO: 3223837 - RNA, 19 nt, Artificial Sequence
  Description of Artificial Sequence: Synthetic oligonucleotide
uuaaguucaauguccaaaa

SEQ ID NO: 3223838 - RNA, 19 nt, Artificial Sequence
  Description of Artificial Sequence: Synthetic oligonucleotide
acuguuaacuggaagaauc

SEQ ID NO: 3223839 - RNA, 19 nt, Artificial Sequence
  Description of Artificial Sequence: Synthetic oligonucleotide
uuuuguuuuguuuuguuuu

SEQ ID NO: 3223840 - RNA, 19 nt, Artificial Sequence
  Description of Artificial Sequence: Synthetic oligonucleotide
aaucucaaacuaucagauc

SEQ ID NO: 3223841 - RNA, 19 nt, Artificial Sequence
  Description of Artificial Sequence: Synthetic oligonucleotide
uccaaaaucucaaaaucuc

SEQ ID NO: 3223842 - RNA, 19 nt, Artificial Sequence
  Description of Artificial Sequence: Synthetic oligonucleotide
aaaaucucaaaaucucaaa

SEQ ID NO: 3223843 - RNA, 19 nt, Artificial Sequence
  Description of Artificial Sequence: Synthetic oligonucleotide
ccaaaauuauuaaacagcc

SEQ ID NO: 3223844 - RNA, 19 nt, Artificial Sequence
  Description of Artificial Sequence: Synthetic oligonucleotide
uuguuuuaaaugugcaccc

SEQ ID NO: 3223845 - RNA, 19 nt, Artificial Sequence
  Description of Artificial Sequence: Synthetic oligonucleotide
aauguccaaaauuauuaaa

SEQ ID NO: 3223846 - RNA, 19 nt, Artificial Sequence
  Description of Artificial Sequence: Synthetic oligonucleotide
guccaaaauuauuaaacag

SEQ ID NO: 3223847 - RNA, 19 nt, Artificial Sequence
  Description of Artificial Sequence: Synthetic oligonucleotide
uuuuguuuuaaaugugcac

SEQ ID NO: 3223848 - RNA, 19 nt, Artificial Sequence
  Description of Artificial Sequence: Synthetic oligonucleotide
aacagccccauccuucuac

SEQ ID NO: 3223849 - RNA, 19 nt, Artificial Sequence
  Description of Artificial Sequence: Synthetic oligonucleotide
aaaugcaacacacuauauu

SEQ ID NO: 3223850 - RNA, 19 nt, Artificial Sequence
  Description of Artificial Sequence: Synthetic oligonucleotide
caaaaucucaaacuaucag

SEQ ID NO: 3223851 - RNA, 19 nt, Artificial Sequence
  Description of Artificial Sequence: Synthetic oligonucleotide
auccauuaaguucaauguc

SEQ ID NO: 3223852 - RNA, 19 nt, Artificial Sequence
  Description of Artificial Sequence: Synthetic oligonucleotide
ugcacccuuaaucaguaag

SEQ ID NO: 3223853 - RNA, 19 nt, Artificial Sequence
  Description of Artificial Sequence: Synthetic oligonucleotide
ucagaucacuaacuuauca

SEQ ID NO: 3223854 - RNA, 19 nt, Artificial Sequence
  Description of Artificial Sequence: Synthetic oligonucleotide
cucaaaaucucaaacuauc

SEQ ID NO: 3223855 - RNA, 19 nt, Artificial Sequence
  Description of Artificial Sequence: Synthetic oligonucleotide
aaugugcacccuuaaucag

SEQ ID NO: 3223856 - RNA, 19 nt, Artificial Sequence
  Description of Artificial Sequence: Synthetic oligonucleotide
ugcaacacacuauauugcc

SEQ ID NO: 3223857 - RNA, 19 nt, Artificial Sequence
  Description of Artificial Sequence: Synthetic oligonucleotide
aaguucaauguccaaaauu

SEQ ID NO: 3223858 - RNA, 19 nt, Artificial Sequence
  Description of Artificial Sequence: Synthetic oligonucleotide
aaaucucaaacuaucagau

SEQ ID NO: 3223859 - RNA, 19 nt, Artificial Sequence
  Description of Artificial Sequence: Synthetic oligonucleotide
uccuucuacuguuaacugg

SEQ ID NO: 3223860 - RNA, 19 nt, Artificial Sequence
  Description of Artificial Sequence: Synthetic oligonucleotide
uauuaaacagccccauccu

SEQ ID NO: 3223861 - RNA, 19 nt, Artificial Sequence
  Description of Artificial Sequence: Synthetic oligonucleotide
gaucacuaacuuaucaucc

SEQ ID NO: 3223862 - RNA, 19 nt, Artificial Sequence
  Description of Artificial Sequence: Synthetic oligonucleotide
agcagauuaugggacaacc

SEQ ID NO: 3223863 - RNA, 19 nt, Artificial Sequence
  Description of Artificial Sequence: Synthetic oligonucleotide
auuaugggacaaccaagac

SEQ ID NO: 3223864 - RNA, 19 nt, Artificial Sequence
  Description of Artificial Sequence: Synthetic oligonucleotide
auuauuaaacagccccauc

SEQ ID NO: 3223865 - RNA, 19 nt, Artificial Sequence
  Description of Artificial Sequence: Synthetic oligonucleotide
caaaauuauuaaacagccc

SEQ ID NO: 3223866 - RNA, 19 nt, Artificial Sequence
  Description of Artificial Sequence: Synthetic oligonucleotide
uggaagaaucaacagccgc

SEQ ID NO: 3223867 - RNA, 19 nt, Artificial Sequence
  Description of Artificial Sequence: Synthetic oligonucleotide
aaccaagacaaguuacugu

SEQ ID NO: 3223868 - RNA, 19 nt, Artificial Sequence
  Description of Artificial Sequence: Synthetic oligonucleotide
uuaaacagccccauccuuc

SEQ ID NO: 3223869 - RNA, 19 nt, Artificial Sequence
  Description of Artificial Sequence: Synthetic oligonucleotide
aaauuauuaaacagcccca

SEQ ID NO: 3223870 - RNA, 19 nt, Artificial Sequence
  Description of Artificial Sequence: Synthetic oligonucleotide
uguggcaaagggaauggug

SEQ ID NO: 3223871 - RNA, 19 nt, Artificial Sequence
  Description of Artificial Sequence: Synthetic oligonucleotide
aaugguguccaaaaucuca

SEQ ID NO: 3223872 - RNA, 19 nt, Artificial Sequence
  Description of Artificial Sequence: Synthetic oligonucleotide
aaucaguaagccaucucuc

SEQ ID NO: 3223873 - RNA, 19 nt, Artificial Sequence
  Description of Artificial Sequence: Synthetic oligonucleotide
uaagccaucucuccagccc

SEQ ID NO: 3223874 - RNA, 19 nt, Artificial Sequence
  Description of Artificial Sequence: Synthetic oligonucleotide
uuguuuuguuuuaaaugug

SEQ ID NO: 3223875 - RNA, 19 nt, Artificial Sequence
  Description of Artificial Sequence: Synthetic oligonucleotide
aguaagccaucucuccagc

SEQ ID NO: 3223876 - RNA, 19 nt, Artificial Sequence
  Description of Artificial Sequence: Synthetic oligonucleotide
aacuuaucauccauuaagu

SEQ ID NO: 3223877 - RNA, 19 nt, Artificial Sequence
  Description of Artificial Sequence: Synthetic oligonucleotide
uuuugaaaugcaacacacu

SEQ ID NO: 3223878 - RNA, 19 nt, Artificial Sequence
  Description of Artificial Sequence: Synthetic oligonucleotide
caacacacuauauugccac

SEQ ID NO: 3223879 - RNA, 19 nt, Artificial Sequence
  Description of Artificial Sequence: Synthetic oligonucleotide
auauugccacucuagaaca

SEQ ID NO: 3223880 - RNA, 19 nt, Artificial Sequence
  Description of Artificial Sequence: Synthetic oligonucleotide
agaacaaccuccugagcag

SEQ ID NO: 3223881 - RNA, 19 nt, Artificial Sequence
  Description of Artificial Sequence: Synthetic oligonucleotide
caagacaaguuacuguggc

SEQ ID NO: 3223882 - RNA, 19 nt, Artificial Sequence
  Description of Artificial Sequence: Synthetic oligonucleotide
aucucaaaaucucaaacua

SEQ ID NO: 3223883 - RNA, 19 nt, Artificial Sequence
  Description of Artificial Sequence: Synthetic oligonucleotide
acuauauugccacucuaga

SEQ ID NO: 3223884 - RNA, 19 nt, Artificial Sequence
  Description of Artificial Sequence: Synthetic oligonucleotide
uucuacuguuaacuggaag

SEQ ID NO: 3223885 - RNA, 19 nt, Artificial Sequence
  Description of Artificial Sequence: Synthetic oligonucleotide
uaacuggaagaaucaacag

SEQ ID NO: 3223886 - RNA, 19 nt, Artificial Sequence
  Description of Artificial Sequence: Synthetic oligonucleotide
uuuuaaaugugcacccuua

SEQ ID NO: 3223887 - RNA, 19 nt, Artificial Sequence
  Description of Artificial Sequence: Synthetic oligonucleotide
cacuauauugccacucuag

SEQ ID NO: 3223888 - RNA, 19 nt, Artificial Sequence
  Description of Artificial Sequence: Synthetic oligonucleotide
uucaauguccaaaauuauu

SEQ ID NO: 3223889 - RNA, 19 nt, Artificial Sequence
  Description of Artificial Sequence: Synthetic oligonucleotide
aguucaauguccaaaauua

SEQ ID NO: 3223890 - RNA, 19 nt, Artificial Sequence
  Description of Artificial Sequence: Synthetic oligonucleotide
aagggaaugguguccaaaa

SEQ ID NO: 3223891 - RNA, 19 nt, Artificial Sequence
  Description of Artificial Sequence: Synthetic oligonucleotide
aauagaacaaaugauuuuc

SEQ ID NO: 3223892 - RNA, 19 nt, Artificial Sequence
  Description of Artificial Sequence: Synthetic oligonucleotide
ucuggaauagaacaaauga

SEQ ID NO: 3223893 - RNA, 19 nt, Artificial Sequence
  Description of Artificial Sequence: Synthetic oligonucleotide
cauuuauugagaaaguuug

SEQ ID NO: 3223894 - RNA, 19 nt, Artificial Sequence
  Description of Artificial Sequence: Synthetic oligonucleotide
aaaggaaugguagaguauc

SEQ ID NO: 3223895 - RNA, 19 nt, Artificial Sequence
  Description of Artificial Sequence: Synthetic oligonucleotide
acuucauuuauugagaaag

SEQ ID NO: 3223896 - RNA, 19 nt, Artificial Sequence
  Description of Artificial Sequence: Synthetic oligonucleotide
aaguuuguagaauuucauc

SEQ ID NO: 3223897 - RNA, 19 nt, Artificial Sequence
  Description of Artificial Sequence: Synthetic oligonucleotide
agacccgccauccagagcc

SEQ ID NO: 3223898 - RNA, 19 nt, Artificial Sequence
  Description of Artificial Sequence: Synthetic oligonucleotide
uguuugaggguuuuaaaag

SEQ ID NO: 3223899 - RNA, 19 nt, Artificial Sequence
  Description of Artificial Sequence: Synthetic oligonucleotide
auccauaagaaacucuccc

SEQ ID NO: 3223900 - RNA, 19 nt, Artificial Sequence
  Description of Artificial Sequence: Synthetic oligonucleotide
uuuaaaaggaaugguagag

SEQ ID NO: 3223901 - RNA, 19 nt, Artificial Sequence
  Description of Artificial Sequence: Synthetic oligonucleotide
uuauugagaaaguuuguag

SEQ ID NO: 3223902 - RNA, 19 nt, Artificial Sequence
  Description of Artificial Sequence: Synthetic oligonucleotide
ucucguauucggaagauag

SEQ ID NO: 3223903 - RNA, 19 nt, Artificial Sequence
  Description of Artificial Sequence: Synthetic oligonucleotide
uuucucaaaauccaauccc

SEQ ID NO: 3223904 - RNA, 19 nt, Artificial Sequence
  Description of Artificial Sequence: Synthetic oligonucleotide
uaaaaguucuuguuugagg

SEQ ID NO: 3223905 - RNA, 19 nt, Artificial Sequence
  Description of Artificial Sequence: Synthetic oligonucleotide
uuuucucaaaauccaaucc

SEQ ID NO: 3223906 - RNA, 19 nt, Artificial Sequence
  Description of Artificial Sequence: Synthetic oligonucleotide
auaugcucagcucuggggc

SEQ ID NO: 3223907 - RNA, 19 nt, Artificial Sequence
  Description of Artificial Sequence: Synthetic oligonucleotide
uguucacaaacucaggggc

SEQ ID NO: 3223908 - RNA, 19 nt, Artificial Sequence
  Description of Artificial Sequence: Synthetic oligonucleotide
uuuucagucguauuucucc

SEQ ID NO: 3223909 - RNA, 19 nt, Artificial Sequence
  Description of Artificial Sequence: Synthetic oligonucleotide
aaugauuuucccguuauca

SEQ ID NO: 3223910 - RNA, 19 nt, Artificial Sequence
  Description of Artificial Sequence: Synthetic oligonucleotide
ugaagauaugcucagcucu

SEQ ID NO: 3223911 - RNA, 19 nt, Artificial Sequence
  Description of Artificial Sequence: Synthetic oligonucleotide
uauugagaaaguuuguaga

SEQ ID NO: 3223912 - RNA, 19 nt, Artificial Sequence
  Description of Artificial Sequence: Synthetic oligonucleotide
ucgauuuucacaugguaag

SEQ ID NO: 3223913 - RNA, 19 nt, Artificial Sequence
  Description of Artificial Sequence: Synthetic oligonucleotide
guuugaggguuuuaaaagg

SEQ ID NO: 3223914 - RNA, 19 nt, Artificial Sequence
  Description of Artificial Sequence: Synthetic oligonucleotide
guuuuaaaaggaaugguag

SEQ ID NO: 3223915 - RNA, 19 nt, Artificial Sequence
  Description of Artificial Sequence: Synthetic oligonucleotide
uuuuaaaaggaaugguaga

SEQ ID NO: 3223916 - RNA, 19 nt, Artificial Sequence
  Description of Artificial Sequence: Synthetic oligonucleotide
uuuguagaauuucaucuga

SEQ ID NO: 3223917 - RNA, 19 nt, Artificial Sequence
  Description of Artificial Sequence: Synthetic oligonucleotide
uagaguaucuggaauagaa

SEQ ID NO: 3223918 - RNA, 19 nt, Artificial Sequence
  Description of Artificial Sequence: Synthetic oligonucleotide
uccaacaccucuaucacca

SEQ ID NO: 3223919 - RNA, 19 nt, Artificial Sequence
  Description of Artificial Sequence: Synthetic oligonucleotide
augauuuucccguuaucac

SEQ ID NO: 3223920 - RNA, 19 nt, Artificial Sequence
  Description of Artificial Sequence: Synthetic oligonucleotide
aauccauaagaaacucucc

SEQ ID NO: 3223921 - RNA, 19 nt, Artificial Sequence
  Description of Artificial Sequence: Synthetic oligonucleotide
cuuggaacaauccauaaga

SEQ ID NO: 3223922 - RNA, 19 nt, Artificial Sequence
  Description of Artificial Sequence: Synthetic oligonucleotide
gaguaucuggaauagaaca

SEQ ID NO: 3223923 - RNA, 19 nt, Artificial Sequence
  Description of Artificial Sequence: Synthetic oligonucleotide
ugauuuucccguuaucacc

SEQ ID NO: 3223924 - RNA, 19 nt, Artificial Sequence
  Description of Artificial Sequence: Synthetic oligonucleotide
ggugacuucauuuauugag

SEQ ID NO: 3223925 - RNA, 19 nt, Artificial Sequence
  Description of Artificial Sequence: Synthetic oligonucleotide
uuugaggguuuuaaaagga

SEQ ID NO: 3223926 - RNA, 19 nt, Artificial Sequence
  Description of Artificial Sequence: Synthetic oligonucleotide
gauaugcucagcucugggg

SEQ ID NO: 3223927 - RNA, 19 nt, Artificial Sequence
  Description of Artificial Sequence: Synthetic oligonucleotide
aacaauccauaagaaacuc

SEQ ID NO: 3223928 - RNA, 19 nt, Artificial Sequence
  Description of Artificial Sequence: Synthetic oligonucleotide
ucauuuauugagaaaguuu

SEQ ID NO: 3223929 - RNA, 19 nt, Artificial Sequence
  Description of Artificial Sequence: Synthetic oligonucleotide
uaagaaacucucccgaagu

SEQ ID NO: 3223930 - RNA, 19 nt, Artificial Sequence
  Description of Artificial Sequence: Synthetic oligonucleotide
uuuucacaugguaagauuu

SEQ ID NO: 3223931 - RNA, 19 nt, Artificial Sequence
  Description of Artificial Sequence: Synthetic oligonucleotide
uauucggaagauagcaacc

SEQ ID NO: 3223932 - RNA, 19 nt, Artificial Sequence
  Description of Artificial Sequence: Synthetic oligonucleotide
ucuaucucguauucggaag

SEQ ID NO: 3223933 - RNA, 19 nt, Artificial Sequence
  Description of Artificial Sequence: Synthetic oligonucleotide
auaagaaacucucccgaag

SEQ ID NO: 3223934 - RNA, 19 nt, Artificial Sequence
  Description of Artificial Sequence: Synthetic oligonucleotide
ggaacaauccauaagaaac

SEQ ID NO: 3223935 - RNA, 19 nt, Artificial Sequence
  Description of Artificial Sequence: Synthetic oligonucleotide
uaaaaggaaugguagagua

SEQ ID NO: 3223936 - RNA, 19 nt, Artificial Sequence
  Description of Artificial Sequence: Synthetic oligonucleotide
agugaagauaugcucagcu

SEQ ID NO: 3223937 - RNA, 19 nt, Artificial Sequence
  Description of Artificial Sequence: Synthetic oligonucleotide
uucucaaaauccaaucccu

SEQ ID NO: 3223938 - RNA, 19 nt, Artificial Sequence
  Description of Artificial Sequence: Synthetic oligonucleotide
uagaacaaaugauuuuccc

SEQ ID NO: 3223939 - RNA, 19 nt, Artificial Sequence
  Description of Artificial Sequence: Synthetic oligonucleotide
auagaacaaaugauuuucc

SEQ ID NO: 3223940 - RNA, 19 nt, Artificial Sequence
  Description of Artificial Sequence: Synthetic oligonucleotide
guugccagcaucugcaucc

SEQ ID NO: 3223941 - RNA, 19 nt, Artificial Sequence
  Description of Artificial Sequence: Synthetic oligonucleotide
agaaaguuuguagaauuuc

SEQ ID NO: 3223942 - RNA, 19 nt, Artificial Sequence
  Description of Artificial Sequence: Synthetic oligonucleotide
guguaaaaguucuuguuug

SEQ ID NO: 3223943 - RNA, 19 nt, Artificial Sequence
  Description of Artificial Sequence: Synthetic oligonucleotide
uugucauugauguccagga

SEQ ID NO: 3223944 - RNA, 19 nt, Artificial Sequence
  Description of Artificial Sequence: Synthetic oligonucleotide
uuguuugaggguuuuaaaa

SEQ ID NO: 3223945 - RNA, 19 nt, Artificial Sequence
  Description of Artificial Sequence: Synthetic oligonucleotide
ucguucacauccaacaccu

SEQ ID NO: 3223946 - RNA, 19 nt, Artificial Sequence
  Description of Artificial Sequence: Synthetic oligonucleotide
acaugguaagauuugauuu

SEQ ID NO: 3223947 - RNA, 19 nt, Artificial Sequence
  Description of Artificial Sequence: Synthetic oligonucleotide
uuucacaugguaagauuug

SEQ ID NO: 3223948 - RNA, 19 nt, Artificial Sequence
  Description of Artificial Sequence: Synthetic oligonucleotide
uuguagaauuucaucugag

SEQ ID NO: 3223949 - RNA, 19 nt, Artificial Sequence
  Description of Artificial Sequence: Synthetic oligonucleotide
ugagaaaguuuguagaauu

SEQ ID NO: 3223950 - RNA, 19 nt, Artificial Sequence
  Description of Artificial Sequence: Synthetic oligonucleotide
ucagugaagauaugcucag

SEQ ID NO: 3223951 - RNA, 19 nt, Artificial Sequence
  Description of Artificial Sequence: Synthetic oligonucleotide
gguguucacaaacucaggg

SEQ ID NO: 3223952 - RNA, 19 nt, Artificial Sequence
  Description of Artificial Sequence: Synthetic oligonucleotide
auugucauugauguccagg

SEQ ID NO: 3223953 - RNA, 19 nt, Artificial Sequence
  Description of Artificial Sequence: Synthetic oligonucleotide
uguaaaaguucuuguuuga

SEQ ID NO: 3223954 - RNA, 19 nt, Artificial Sequence
  Description of Artificial Sequence: Synthetic oligonucleotide
ucaaaauccaaucccuuuu

SEQ ID NO: 3223955 - RNA, 19 nt, Artificial Sequence
  Description of Artificial Sequence: Synthetic oligonucleotide
guguucacaaacucagggg

SEQ ID NO: 3223956 - RNA, 19 nt, Artificial Sequence
  Description of Artificial Sequence: Synthetic oligonucleotide
gaacaaaugauuuucccgu

SEQ ID NO: 3223957 - RNA, 19 nt, Artificial Sequence
  Description of Artificial Sequence: Synthetic oligonucleotide
uuggcuaggacagucagga

SEQ ID NO: 3223958 - RNA, 19 nt, Artificial Sequence
  Description of Artificial Sequence: Synthetic oligonucleotide
aacaccucuaucaccacag

SEQ ID NO: 3223959 - RNA, 19 nt, Artificial Sequence
  Description of Artificial Sequence: Synthetic oligonucleotide
ggaaugguagaguaucugg

SEQ ID NO: 3223960 - RNA, 19 nt, Artificial Sequence
  Description of Artificial Sequence: Synthetic oligonucleotide
gaggguuuuaaaaggaaug

SEQ ID NO: 3223961 - RNA, 19 nt, Artificial Sequence
  Description of Artificial Sequence: Synthetic oligonucleotide
ucguauucggaagauagca

SEQ ID NO: 3223962 - RNA, 19 nt, Artificial Sequence
  Description of Artificial Sequence: Synthetic oligonucleotide
ucugggacugaguugguca

SEQ ID NO: 3223963 - RNA, 19 nt, Artificial Sequence
  Description of Artificial Sequence: Synthetic oligonucleotide
guauucggaagauagcaac

SEQ ID NO: 3223964 - RNA, 19 nt, Artificial Sequence
  Description of Artificial Sequence: Synthetic oligonucleotide
uuuauugagaaaguuugua

SEQ ID NO: 3223965 - RNA, 19 nt, Artificial Sequence
  Description of Artificial Sequence: Synthetic oligonucleotide
gaaacucucccgaaguugc

SEQ ID NO: 3223966 - RNA, 19 nt, Artificial Sequence
  Description of Artificial Sequence: Synthetic oligonucleotide
aaaguucuuguuugagggu

SEQ ID NO: 3223967 - RNA, 19 nt, Artificial Sequence
  Description of Artificial Sequence: Synthetic oligonucleotide
uuggucagugaagauaugc

SEQ ID NO: 3223968 - RNA, 19 nt, Artificial Sequence
  Description of Artificial Sequence: Synthetic oligonucleotide
uuaaaaggaaugguagagu

SEQ ID NO: 3223969 - RNA, 19 nt, Artificial Sequence
  Description of Artificial Sequence: Synthetic oligonucleotide
ugaggguuuuaaaaggaau

SEQ ID NO: 3223970 - RNA, 19 nt, Artificial Sequence
  Description of Artificial Sequence: Synthetic oligonucleotide
ucaggauucgaaccauggc

SEQ ID NO: 3223971 - RNA, 19 nt, Artificial Sequence
  Description of Artificial Sequence: Synthetic oligonucleotide
uuucccguuaucaccagaa

SEQ ID NO: 3223972 - RNA, 19 nt, Artificial Sequence
  Description of Artificial Sequence: Synthetic oligonucleotide
agaaaggccuccuccaucu

SEQ ID NO: 3223973 - RNA, 19 nt, Artificial Sequence
  Description of Artificial Sequence: Synthetic oligonucleotide
auccaacaccucuaucacc

SEQ ID NO: 3223974 - RNA, 19 nt, Artificial Sequence
  Description of Artificial Sequence: Synthetic oligonucleotide
uggaacaauccauaagaaa

SEQ ID NO: 3223975 - RNA, 19 nt, Artificial Sequence
  Description of Artificial Sequence: Synthetic oligonucleotide
uauuucuccggugacuuca

SEQ ID NO: 3223976 - RNA, 19 nt, Artificial Sequence
  Description of Artificial Sequence: Synthetic oligonucleotide
ucucuggagcguuuucugg

SEQ ID NO: 3223977 - RNA, 19 nt, Artificial Sequence
  Description of Artificial Sequence: Synthetic oligonucleotide
aacucaggggcauugucau

SEQ ID NO: 3223978 - RNA, 19 nt, Artificial Sequence
  Description of Artificial Sequence: Synthetic oligonucleotide
ucaccaagguguaaaaguu

SEQ ID NO: 3223979 - RNA, 19 nt, Artificial Sequence
  Description of Artificial Sequence: Synthetic oligonucleotide
auguccaggaucaggauuc

SEQ ID NO: 3223980 - RNA, 19 nt, Artificial Sequence
  Description of Artificial Sequence: Synthetic oligonucleotide
agaguaucuggaauagaac

SEQ ID NO: 3223981 - RNA, 19 nt, Artificial Sequence
  Description of Artificial Sequence: Synthetic oligonucleotide
agauagcaaccacagucuc

SEQ ID NO: 3223982 - RNA, 19 nt, Artificial Sequence
  Description of Artificial Sequence: Synthetic oligonucleotide
uccaggaucaggauucgaa

SEQ ID NO: 3223983 - RNA, 19 nt, Artificial Sequence
  Description of Artificial Sequence: Synthetic oligonucleotide
aaaguuuguagaauuucau

SEQ ID NO: 3223984 - RNA, 19 nt, Artificial Sequence
  Description of Artificial Sequence: Synthetic oligonucleotide
caccagaaucucuaucucg

SEQ ID NO: 3223985 - RNA, 19 nt, Artificial Sequence
  Description of Artificial Sequence: Synthetic oligonucleotide
aggaccugcaccucauagg

SEQ ID NO: 3223986 - RNA, 19 nt, Artificial Sequence
  Description of Artificial Sequence: Synthetic oligonucleotide
aagauuugauuuucucaaa

SEQ ID NO: 3223987 - RNA, 19 nt, Artificial Sequence
  Description of Artificial Sequence: Synthetic oligonucleotide
agucguauuucuccgguga

SEQ ID NO: 3223988 - RNA, 19 nt, Artificial Sequence
  Description of Artificial Sequence: Synthetic oligonucleotide
cucuggagcguuuucuggg

SEQ ID NO: 3223989 - RNA, 19 nt, Artificial Sequence
  Description of Artificial Sequence: Synthetic oligonucleotide
augguaagauuugauuuuc

SEQ ID NO: 3223990 - RNA, 19 nt, Artificial Sequence
  Description of Artificial Sequence: Synthetic oligonucleotide
uuggaacaauccauaagaa

SEQ ID NO: 3223991 - RNA, 19 nt, Artificial Sequence
  Description of Artificial Sequence: Synthetic oligonucleotide
uaucaaacuguuuugaagg

SEQ ID NO: 3223992 - RNA, 19 nt, Artificial Sequence
  Description of Artificial Sequence: Synthetic oligonucleotide
aggucuuuuagacauaagc

SEQ ID NO: 3223993 - RNA, 19 nt, Artificial Sequence
  Description of Artificial Sequence: Synthetic oligonucleotide
gaagacaugacagaugugg

SEQ ID NO: 3223994 - RNA, 19 nt, Artificial Sequence
  Description of Artificial Sequence: Synthetic oligonucleotide
uuuaaaaucuccuucucca

SEQ ID NO: 3223995 - RNA, 19 nt, Artificial Sequence
  Description of Artificial Sequence: Synthetic oligonucleotide
uuaucaaacuguuuugaag

SEQ ID NO: 3223996 - RNA, 19 nt, Artificial Sequence
  Description of Artificial Sequence: Synthetic oligonucleotide
uuuuaaaaucuccuucucc

SEQ ID NO: 3223997 - RNA, 19 nt, Artificial Sequence
  Description of Artificial Sequence: Synthetic oligonucleotide
uaagcguuuuaucaaacug

SEQ ID NO: 3223998 - RNA, 19 nt, Artificial Sequence
  Description of Artificial Sequence: Synthetic oligonucleotide
uguuuugaagggcuugugg

SEQ ID NO: 3223999 - RNA, 19 nt, Artificial Sequence
  Description of Artificial Sequence: Synthetic oligonucleotide
uccuucuccaccuugauac

SEQ ID NO: 3224000 - RNA, 19 nt, Artificial Sequence
  Description of Artificial Sequence: Synthetic oligonucleotide
agacauaagcguuuuauca

SEQ ID NO: 3224001 - RNA, 19 nt, Artificial Sequence
  Description of Artificial Sequence: Synthetic oligonucleotide
ugugguuuuaaaaucuccu

SEQ ID NO: 3224002 - RNA, 19 nt, Artificial Sequence
  Description of Artificial Sequence: Synthetic oligonucleotide
aaaaucuccuucuccaccu

SEQ ID NO: 3224003 - RNA, 19 nt, Artificial Sequence
  Description of Artificial Sequence: Synthetic oligonucleotide
uaaaaucuccuucuccacc

SEQ ID NO: 3224004 - RNA, 19 nt, Artificial Sequence
  Description of Artificial Sequence: Synthetic oligonucleotide
aaacucaagauguggcuug

SEQ ID NO: 3224005 - RNA, 19 nt, Artificial Sequence
  Description of Artificial Sequence: Synthetic oligonucleotide
ugguuuuaaaaucuccuuc

SEQ ID NO: 3224006 - RNA, 19 nt, Artificial Sequence
  Description of Artificial Sequence: Synthetic oligonucleotide
ucaagauguggcuugccag

SEQ ID NO: 3224007 - RNA, 19 nt, Artificial Sequence
  Description of Artificial Sequence: Synthetic oligonucleotide
ucuuuuagacauaagcguu

SEQ ID NO: 3224008 - RNA, 19 nt, Artificial Sequence
  Description of Artificial Sequence: Synthetic oligonucleotide
gauacuugguccgagaaga

SEQ ID NO: 3224009 - RNA, 19 nt, Artificial Sequence
  Description of Artificial Sequence: Synthetic oligonucleotide
aucaaacuguuuugaaggg

SEQ ID NO: 3224010 - RNA, 19 nt, Artificial Sequence
  Description of Artificial Sequence: Synthetic oligonucleotide
uuuuaucaaacuguuuuga

SEQ ID NO: 3224011 - RNA, 19 nt, Artificial Sequence
  Description of Artificial Sequence: Synthetic oligonucleotide
guuuuaucaaacuguuuug

SEQ ID NO: 3224012 - RNA, 19 nt, Artificial Sequence
  Description of Artificial Sequence: Synthetic oligonucleotide
ggucuuuuagacauaagcg

SEQ ID NO: 3224013 - RNA, 19 nt, Artificial Sequence
  Description of Artificial Sequence: Synthetic oligonucleotide
gauguggcuugccaggagg

SEQ ID NO: 3224014 - RNA, 19 nt, Artificial Sequence
  Description of Artificial Sequence: Synthetic oligonucleotide
acaugacagaugugggucc

SEQ ID NO: 3224015 - RNA, 19 nt, Artificial Sequence
  Description of Artificial Sequence: Synthetic oligonucleotide
uuagacauaagcguuuuau

SEQ ID NO: 3224016 - RNA, 19 nt, Artificial Sequence
  Description of Artificial Sequence: Synthetic oligonucleotide
uauguguagccccauucug

SEQ ID NO: 3224017 - RNA, 19 nt, Artificial Sequence
  Description of Artificial Sequence: Synthetic oligonucleotide
uugugguuuuaaaaucucc

SEQ ID NO: 3224018 - RNA, 19 nt, Artificial Sequence
  Description of Artificial Sequence: Synthetic oligonucleotide
ugauacuugguccgagaag

SEQ ID NO: 3224019 - RNA, 19 nt, Artificial Sequence
  Description of Artificial Sequence: Synthetic oligonucleotide
uuuaucaaacuguuuugaa

SEQ ID NO: 3224020 - RNA, 19 nt, Artificial Sequence
  Description of Artificial Sequence: Synthetic oligonucleotide
uguauguguagccccauuc

SEQ ID NO: 3224021 - RNA, 19 nt, Artificial Sequence
  Description of Artificial Sequence: Synthetic oligonucleotide
uccaccuugauacuugguc

SEQ ID NO: 3224022 - RNA, 19 nt, Artificial Sequence
  Description of Artificial Sequence: Synthetic oligonucleotide
caagauguggcuugccagg

SEQ ID NO: 3224023 - RNA, 19 nt, Artificial Sequence
  Description of Artificial Sequence: Synthetic oligonucleotide
aagacaugacagauguggg

SEQ ID NO: 3224024 - RNA, 19 nt, Artificial Sequence
  Description of Artificial Sequence: Synthetic oligonucleotide
gagaagacaugacagaugu

SEQ ID NO: 3224025 - RNA, 19 nt, Artificial Sequence
  Description of Artificial Sequence: Synthetic oligonucleotide
aagcguuuuaucaaacugu

SEQ ID NO: 3224026 - RNA, 19 nt, Artificial Sequence
  Description of Artificial Sequence: Synthetic oligonucleotide
uuaaaaucuccuucuccac

SEQ ID NO: 3224027 - RNA, 19 nt, Artificial Sequence
  Description of Artificial Sequence: Synthetic oligonucleotide
auaagcguuuuaucaaacu

SEQ ID NO: 3224028 - RNA, 19 nt, Artificial Sequence
  Description of Artificial Sequence: Synthetic oligonucleotide
gacauaagcguuuuaucaa

SEQ ID NO: 3224029 - RNA, 19 nt, Artificial Sequence
  Description of Artificial Sequence: Synthetic oligonucleotide
aacucaagauguggcuugc

SEQ ID NO: 3224030 - RNA, 19 nt, Artificial Sequence
  Description of Artificial Sequence: Synthetic oligonucleotide
acagauguggguccguugu

SEQ ID NO: 3224031 - RNA, 19 nt, Artificial Sequence
  Description of Artificial Sequence: Synthetic oligonucleotide
ucaaacuguuuugaagggc

SEQ ID NO: 3224032 - RNA, 19 nt, Artificial Sequence
  Description of Artificial Sequence: Synthetic oligonucleotide
uugauacuugguccgagaa

SEQ ID NO: 3224033 - RNA, 19 nt, Artificial Sequence
  Description of Artificial Sequence: Synthetic oligonucleotide
uagacauaagcguuuuauc

SEQ ID NO: 3224034 - RNA, 19 nt, Artificial Sequence
  Description of Artificial Sequence: Synthetic oligonucleotide
uucuccaccuugauacuug

SEQ ID NO: 3224035 - RNA, 19 nt, Artificial Sequence
  Description of Artificial Sequence: Synthetic oligonucleotide
aaucuccuucuccaccuug

SEQ ID NO: 3224036 - RNA, 19 nt, Artificial Sequence
  Description of Artificial Sequence: Synthetic oligonucleotide
caccuugauacuugguccg

SEQ ID NO: 3224037 - RNA, 19 nt, Artificial Sequence
  Description of Artificial Sequence: Synthetic oligonucleotide
acauaagcguuuuaucaaa

SEQ ID NO: 3224038 - RNA, 19 nt, Artificial Sequence
  Description of Artificial Sequence: Synthetic oligonucleotide
gacaugacagauguggguc

SEQ ID NO: 3224039 - RNA, 19 nt, Artificial Sequence
  Description of Artificial Sequence: Synthetic oligonucleotide
cauaagcguuuuaucaaac

SEQ ID NO: 3224040 - RNA, 19 nt, Artificial Sequence
  Description of Artificial Sequence: Synthetic oligonucleotide
gucuuuuagacauaagcgu

SEQ ID NO: 3224041 - RNA, 19 nt, Artificial Sequence
  Description of Artificial Sequence: Synthetic oligonucleotide
uugccaggaggucuuuuag

SEQ ID NO: 3224042 - RNA, 19 nt, Artificial Sequence
  Description of Artificial Sequence: Synthetic oligonucleotide
aacuguuuugaagggcuug

SEQ ID NO: 3224043 - RNA, 19 nt, Artificial Sequence
  Description of Artificial Sequence: Synthetic oligonucleotide
ucuccaccuugauacuugg

SEQ ID NO: 3224044 - RNA, 19 nt, Artificial Sequence
  Description of Artificial Sequence: Synthetic oligonucleotide
uccgagaagacaugacaga

SEQ ID NO: 3224045 - RNA, 19 nt, Artificial Sequence
  Description of Artificial Sequence: Synthetic oligonucleotide
cuugugguuuuaaaaucuc

SEQ ID NO: 3224046 - RNA, 19 nt, Artificial Sequence
  Description of Artificial Sequence: Synthetic oligonucleotide
agacaugacagaugugggu

SEQ ID NO: 3224047 - RNA, 19 nt, Artificial Sequence
  Description of Artificial Sequence: Synthetic oligonucleotide
guuuuaaaaucuccuucuc

SEQ ID NO: 3224048 - RNA, 19 nt, Artificial Sequence
  Description of Artificial Sequence: Synthetic oligonucleotide
uuuugaagggcuugugguu

SEQ ID NO: 3224049 - RNA, 19 nt, Artificial Sequence
  Description of Artificial Sequence: Synthetic oligonucleotide
guccgagaagacaugacag

SEQ ID NO: 3224050 - RNA, 19 nt, Artificial Sequence
  Description of Artificial Sequence: Synthetic oligonucleotide
agggcuugugguuuuaaaa

SEQ ID NO: 3224051 - RNA, 19 nt, Artificial Sequence
  Description of Artificial Sequence: Synthetic oligonucleotide
uccguuguauguguagccc

SEQ ID NO: 3224052 - RNA, 19 nt, Artificial Sequence
  Description of Artificial Sequence: Synthetic oligonucleotide
guuuugaagggcuuguggu

SEQ ID NO: 3224053 - RNA, 19 nt, Artificial Sequence
  Description of Artificial Sequence: Synthetic oligonucleotide
gauguggguccguuguaug

SEQ ID NO: 3224054 - RNA, 19 nt, Artificial Sequence
  Description of Artificial Sequence: Synthetic oligonucleotide
uuugaagggcuugugguuu

SEQ ID NO: 3224055 - RNA, 19 nt, Artificial Sequence
  Description of Artificial Sequence: Synthetic oligonucleotide
uguggguccguuguaugug

SEQ ID NO: 3224056 - RNA, 19 nt, Artificial Sequence
  Description of Artificial Sequence: Synthetic oligonucleotide
gguuuuaaaaucuccuucu

SEQ ID NO: 3224057 - RNA, 19 nt, Artificial Sequence
  Description of Artificial Sequence: Synthetic oligonucleotide
caaacuguuuugaagggcu

SEQ ID NO: 3224058 - RNA, 19 nt, Artificial Sequence
  Description of Artificial Sequence: Synthetic oligonucleotide
aagggcuugugguuuuaaa

SEQ ID NO: 3224059 - RNA, 19 nt, Artificial Sequence
  Description of Artificial Sequence: Synthetic oligonucleotide
acuugguccgagaagacau

SEQ ID NO: 3224060 - RNA, 19 nt, Artificial Sequence
  Description of Artificial Sequence: Synthetic oligonucleotide
uuuuagacauaagcguuuu

SEQ ID NO: 3224061 - RNA, 19 nt, Artificial Sequence
  Description of Artificial Sequence: Synthetic oligonucleotide
gacagauguggguccguug

SEQ ID NO: 3224062 - RNA, 19 nt, Artificial Sequence
  Description of Artificial Sequence: Synthetic oligonucleotide
ccaccuugauacuuggucc

SEQ ID NO: 3224063 - RNA, 19 nt, Artificial Sequence
  Description of Artificial Sequence: Synthetic oligonucleotide
uuuagacauaagcguuuua

SEQ ID NO: 3224064 - RNA, 19 nt, Artificial Sequence
  Description of Artificial Sequence: Synthetic oligonucleotide
guccguuguauguguagcc

SEQ ID NO: 3224065 - RNA, 19 nt, Artificial Sequence
  Description of Artificial Sequence: Synthetic oligonucleotide
auguggguccguuguaugu

SEQ ID NO: 3224066 - RNA, 19 nt, Artificial Sequence
  Description of Artificial Sequence: Synthetic oligonucleotide
ugccaggaggucuuuuaga

SEQ ID NO: 3224067 - RNA, 19 nt, Artificial Sequence
  Description of Artificial Sequence: Synthetic oligonucleotide
aagauguggcuugccagga

SEQ ID NO: 3224068 - RNA, 19 nt, Artificial Sequence
  Description of Artificial Sequence: Synthetic oligonucleotide
acuguuuugaagggcuugu

SEQ ID NO: 3224069 - RNA, 19 nt, Artificial Sequence
  Description of Artificial Sequence: Synthetic oligonucleotide
uacuugguccgagaagaca

SEQ ID NO: 3224070 - RNA, 19 nt, Artificial Sequence
  Description of Artificial Sequence: Synthetic oligonucleotide
caugacagauguggguccg

SEQ ID NO: 3224071 - RNA, 19 nt, Artificial Sequence
  Description of Artificial Sequence: Synthetic oligonucleotide
uugguccgagaagacauga

SEQ ID NO: 3224072 - RNA, 19 nt, Artificial Sequence
  Description of Artificial Sequence: Synthetic oligonucleotide
cucaagauguggcuugcca

SEQ ID NO: 3224073 - RNA, 19 nt, Artificial Sequence
  Description of Artificial Sequence: Synthetic oligonucleotide
acucaagauguggcuugcc

SEQ ID NO: 3224074 - RNA, 19 nt, Artificial Sequence
  Description of Artificial Sequence: Synthetic oligonucleotide
cuugauacuugguccgaga

SEQ ID NO: 3224075 - RNA, 19 nt, Artificial Sequence
  Description of Artificial Sequence: Synthetic oligonucleotide
ggcuugugguuuuaaaauc

SEQ ID NO: 3224076 - RNA, 19 nt, Artificial Sequence
  Description of Artificial Sequence: Synthetic oligonucleotide
agauguggcuugccaggag

SEQ ID NO: 3224077 - RNA, 19 nt, Artificial Sequence
  Description of Artificial Sequence: Synthetic oligonucleotide
gguccgagaagacaugaca

SEQ ID NO: 3224078 - RNA, 19 nt, Artificial Sequence
  Description of Artificial Sequence: Synthetic oligonucleotide
gccaggaggucuuuuagac

SEQ ID NO: 3224079 - RNA, 19 nt, Artificial Sequence
  Description of Artificial Sequence: Synthetic oligonucleotide
cuugguccgagaagacaug

SEQ ID NO: 3224080 - RNA, 19 nt, Artificial Sequence
  Description of Artificial Sequence: Synthetic oligonucleotide
ugguccgagaagacaugac

SEQ ID NO: 3224081 - RNA, 19 nt, Artificial Sequence
  Description of Artificial Sequence: Synthetic oligonucleotide
caggaggucuuuuagacau

SEQ ID NO: 3224082 - RNA, 19 nt, Artificial Sequence
  Description of Artificial Sequence: Synthetic oligonucleotide
auacuugguccgagaagac

SEQ ID NO: 3224083 - RNA, 19 nt, Artificial Sequence
  Description of Artificial Sequence: Synthetic oligonucleotide
agcguuuuaucaaacuguu

SEQ ID NO: 3224084 - RNA, 19 nt, Artificial Sequence
  Description of Artificial Sequence: Synthetic oligonucleotide
aaaucuccuucuccaccuu

SEQ ID NO: 3224085 - RNA, 19 nt, Artificial Sequence
  Description of Artificial Sequence: Synthetic oligonucleotide
guauguguagccccauucu

SEQ ID NO: 3224086 - RNA, 19 nt, Artificial Sequence
  Description of Artificial Sequence: Synthetic oligonucleotide
ucuccuucuccaccuugau

SEQ ID NO: 3224087 - RNA, 19 nt, Artificial Sequence
  Description of Artificial Sequence: Synthetic oligonucleotide
uuguauguguagccccauu

SEQ ID NO: 3224088 - RNA, 19 nt, Artificial Sequence
  Description of Artificial Sequence: Synthetic oligonucleotide
gaggucuuuuagacauaag

SEQ ID NO: 3224089 - RNA, 19 nt, Artificial Sequence
  Description of Artificial Sequence: Synthetic oligonucleotide
agauguggguccguuguau

SEQ ID NO: 3224090 - RNA, 19 nt, Artificial Sequence
  Description of Artificial Sequence: Synthetic oligonucleotide
gguccguuguauguguagc

SEQ ID NO: 3224091 - RNA, 19 nt, Artificial Sequence
  Description of Artificial Sequence: Synthetic oligonucleotide
uguuuuaucauucuuuacg

SEQ ID NO: 3224092 - RNA, 19 nt, Artificial Sequence
  Description of Artificial Sequence: Synthetic oligonucleotide
aaagauguccuucucauuc

SEQ ID NO: 3224093 - RNA, 19 nt, Artificial Sequence
  Description of Artificial Sequence: Synthetic oligonucleotide
uauaguacuguaaagcagg

SEQ ID NO: 3224094 - RNA, 19 nt, Artificial Sequence
  Description of Artificial Sequence: Synthetic oligonucleotide
auugucagaauucugauca

SEQ ID NO: 3224095 - RNA, 19 nt, Artificial Sequence
  Description of Artificial Sequence: Synthetic oligonucleotide
uguaaagcaggacugaagc

SEQ ID NO: 3224096 - RNA, 19 nt, Artificial Sequence
  Description of Artificial Sequence: Synthetic oligonucleotide
agcaguaagaaucccaggc

SEQ ID NO: 3224097 - RNA, 19 nt, Artificial Sequence
  Description of Artificial Sequence: Synthetic oligonucleotide
aacaucguaaugcaagauc

SEQ ID NO: 3224098 - RNA, 19 nt, Artificial Sequence
  Description of Artificial Sequence: Synthetic oligonucleotide
uuuuccauuaaugaguugc

SEQ ID NO: 3224099 - RNA, 19 nt, Artificial Sequence
  Description of Artificial Sequence: Synthetic oligonucleotide
uggucaaucagcaauuugc

SEQ ID NO: 3224100 - RNA, 19 nt, Artificial Sequence
  Description of Artificial Sequence: Synthetic oligonucleotide
aauuugaagucuuucacau

SEQ ID NO: 3224101 - RNA, 19 nt, Artificial Sequence
  Description of Artificial Sequence: Synthetic oligonucleotide
uuucacaugaugcuugucc

SEQ ID NO: 3224102 - RNA, 19 nt, Artificial Sequence
  Description of Artificial Sequence: Synthetic oligonucleotide
ucuguuguaaauacuggag

SEQ ID NO: 3224103 - RNA, 19 nt, Artificial Sequence
  Description of Artificial Sequence: Synthetic oligonucleotide
aauaguagaauuccuuccu

SEQ ID NO: 3224104 - RNA, 19 nt, Artificial Sequence
  Description of Artificial Sequence: Synthetic oligonucleotide
aguacuguaaagcaggacu

SEQ ID NO: 3224105 - RNA, 19 nt, Artificial Sequence
  Description of Artificial Sequence: Synthetic oligonucleotide
uguauaguacuguaaagca

SEQ ID NO: 3224106 - RNA, 19 nt, Artificial Sequence
  Description of Artificial Sequence: Synthetic oligonucleotide
auagguuucaaccaaacau

SEQ ID NO: 3224107 - RNA, 19 nt, Artificial Sequence
  Description of Artificial Sequence: Synthetic oligonucleotide
uuucuuuuccauuaaugag

SEQ ID NO: 3224108 - RNA, 19 nt, Artificial Sequence
  Description of Artificial Sequence: Synthetic oligonucleotide
uucuuuuccauuaaugagu

SEQ ID NO: 3224109 - RNA, 19 nt, Artificial Sequence
  Description of Artificial Sequence: Synthetic oligonucleotide
uuguaguaauaucugaggc

SEQ ID NO: 3224110 - RNA, 19 nt, Artificial Sequence
  Description of Artificial Sequence: Synthetic oligonucleotide
uuuaucauucuuuacgcgu

SEQ ID NO: 3224111 - RNA, 19 nt, Artificial Sequence
  Description of Artificial Sequence: Synthetic oligonucleotide
uguucaaacacaaguguug

SEQ ID NO: 3224112 - RNA, 19 nt, Artificial Sequence
  Description of Artificial Sequence: Synthetic oligonucleotide
acaggaauccuguucaaac

SEQ ID NO: 3224113 - RNA, 19 nt, Artificial Sequence
  Description of Artificial Sequence: Synthetic oligonucleotide
aagauguccuucucauucc

SEQ ID NO: 3224114 - RNA, 19 nt, Artificial Sequence
  Description of Artificial Sequence: Synthetic oligonucleotide
uucaaaacuggcagcauag

SEQ ID NO: 3224115 - RNA, 19 nt, Artificial Sequence
  Description of Artificial Sequence: Synthetic oligonucleotide
ugaauaucaauuugaaguc

SEQ ID NO: 3224116 - RNA, 19 nt, Artificial Sequence
  Description of Artificial Sequence: Synthetic oligonucleotide
ucaaucagcaauuugcaaa

SEQ ID NO: 3224117 - RNA, 19 nt, Artificial Sequence
  Description of Artificial Sequence: Synthetic oligonucleotide
uuuuguuugcagaagguaa

SEQ ID NO: 3224118 - RNA, 19 nt, Artificial Sequence
  Description of Artificial Sequence: Synthetic oligonucleotide
aguaacacguuuuccagag

SEQ ID NO: 3224119 - RNA, 19 nt, Artificial Sequence
  Description of Artificial Sequence: Synthetic oligonucleotide
uuuuaucauucuuuacgcg

SEQ ID NO: 3224120 - RNA, 19 nt, Artificial Sequence
  Description of Artificial Sequence: Synthetic oligonucleotide
ucagcaauuugcaaagaug

SEQ ID NO: 3224121 - RNA, 19 nt, Artificial Sequence
  Description of Artificial Sequence: Synthetic oligonucleotide
gaaauaguagaauuccuuc

SEQ ID NO: 3224122 - RNA, 19 nt, Artificial Sequence
  Description of Artificial Sequence: Synthetic oligonucleotide
uuaguaacacguuuuccag

SEQ ID NO: 3224123 - RNA, 19 nt, Artificial Sequence
  Description of Artificial Sequence: Synthetic oligonucleotide
auaucugaggcuuccaaag

SEQ ID NO: 3224124 - RNA, 19 nt, Artificial Sequence
  Description of Artificial Sequence: Synthetic oligonucleotide
uaaugcaagaucugucgcg

SEQ ID NO: 3224125 - RNA, 19 nt, Artificial Sequence
  Description of Artificial Sequence: Synthetic oligonucleotide
cuccccaucaucaugcucg

SEQ ID NO: 3224126 - RNA, 19 nt, Artificial Sequence
  Description of Artificial Sequence: Synthetic oligonucleotide
gaagucuuucacaugaugc

SEQ ID NO: 3224127 - RNA, 19 nt, Artificial Sequence
  Description of Artificial Sequence: Synthetic oligonucleotide
aagaaucccaggcacacca

SEQ ID NO: 3224128 - RNA, 19 nt, Artificial Sequence
  Description of Artificial Sequence: Synthetic oligonucleotide
ugcagaagguaacugaugu

SEQ ID NO: 3224129 - RNA, 19 nt, Artificial Sequence
  Description of Artificial Sequence: Synthetic oligonucleotide
aggaauccuguucaaacac

SEQ ID NO: 3224130 - RNA, 19 nt, Artificial Sequence
  Description of Artificial Sequence: Synthetic oligonucleotide
ucuggaaauaguagaauuc

SEQ ID NO: 3224131 - RNA, 19 nt, Artificial Sequence
  Description of Artificial Sequence: Synthetic oligonucleotide
aguaauaucugaggcuucc

SEQ ID NO: 3224132 - RNA, 19 nt, Artificial Sequence
  Description of Artificial Sequence: Synthetic oligonucleotide
aacacaaguguugaauauc

SEQ ID NO: 3224133 - RNA, 19 nt, Artificial Sequence
  Description of Artificial Sequence: Synthetic oligonucleotide
aaagauguccuauauucuu

SEQ ID NO: 3224134 - RNA, 19 nt, Artificial Sequence
  Description of Artificial Sequence: Synthetic oligonucleotide
ucuucagcaguaagaaucc

SEQ ID NO: 3224135 - RNA, 19 nt, Artificial Sequence
  Description of Artificial Sequence: Synthetic oligonucleotide
ucuguauaguacuguaaag

SEQ ID NO: 3224136 - RNA, 19 nt, Artificial Sequence
  Description of Artificial Sequence: Synthetic oligonucleotide
uaaugaguugcuuccugcg

SEQ ID NO: 3224137 - RNA, 19 nt, Artificial Sequence
  Description of Artificial Sequence: Synthetic oligonucleotide
ugguacagcaguuaguaac

SEQ ID NO: 3224138 - RNA, 19 nt, Artificial Sequence
  Description of Artificial Sequence: Synthetic oligonucleotide
acguuuuccagagauaccg

SEQ ID NO: 3224139 - RNA, 19 nt, Artificial Sequence
  Description of Artificial Sequence: Synthetic oligonucleotide
uguugaauaucaauuugaa

SEQ ID NO: 3224140 - RNA, 19 nt, Artificial Sequence
  Description of Artificial Sequence: Synthetic oligonucleotide
acacguuuuccagagauac

SEQ ID NO: 3224141 - RNA, 19 nt, Artificial Sequence
  Description of Artificial Sequence: Synthetic oligonucleotide
caaucagcaauuugcaaag

SEQ ID NO: 3224142 - RNA, 19 nt, Artificial Sequence
  Description of Artificial Sequence: Synthetic oligonucleotide
ucaaccaaacaucguaaug

SEQ ID NO: 3224143 - RNA, 19 nt, Artificial Sequence
  Description of Artificial Sequence: Synthetic oligonucleotide
uuuguuugcagaagguaac

SEQ ID NO: 3224144 - RNA, 19 nt, Artificial Sequence
  Description of Artificial Sequence: Synthetic oligonucleotide
ucuuguagcacaggaaucc

SEQ ID NO: 3224145 - RNA, 19 nt, Artificial Sequence
  Description of Artificial Sequence: Synthetic oligonucleotide
guugaauaucaauuugaag

SEQ ID NO: 3224146 - RNA, 19 nt, Artificial Sequence
  Description of Artificial Sequence: Synthetic oligonucleotide
auucucuggaaauaguaga

SEQ ID NO: 3224147 - RNA, 19 nt, Artificial Sequence
  Description of Artificial Sequence: Synthetic oligonucleotide
uuuggcuaaagguucuuca

SEQ ID NO: 3224148 - RNA, 19 nt, Artificial Sequence
  Description of Artificial Sequence: Synthetic oligonucleotide
guaacugauguucaguuuc

SEQ ID NO: 3224149 - RNA, 19 nt, Artificial Sequence
  Description of Artificial Sequence: Synthetic oligonucleotide
uuuucucuucagcaguaag

SEQ ID NO: 3224150 - RNA, 19 nt, Artificial Sequence
  Description of Artificial Sequence: Synthetic oligonucleotide
ucuuuguaguaauaucuga

SEQ ID NO: 3224151 - RNA, 19 nt, Artificial Sequence
  Description of Artificial Sequence: Synthetic oligonucleotide
aaacuggcagcauagguuu

SEQ ID NO: 3224152 - RNA, 19 nt, Artificial Sequence
  Description of Artificial Sequence: Synthetic oligonucleotide
uucuguuguaaauacugga

SEQ ID NO: 3224153 - RNA, 19 nt, Artificial Sequence
  Description of Artificial Sequence: Synthetic oligonucleotide
uaaagcaggacugaagccu

SEQ ID NO: 3224154 - RNA, 19 nt, Artificial Sequence
  Description of Artificial Sequence: Synthetic oligonucleotide
ucuuccuucuuguagcaca

SEQ ID NO: 3224155 - RNA, 19 nt, Artificial Sequence
  Description of Artificial Sequence: Synthetic oligonucleotide
aaacacaaguguugaauau

SEQ ID NO: 3224156 - RNA, 19 nt, Artificial Sequence
  Description of Artificial Sequence: Synthetic oligonucleotide
uccauuaaugaguugcuuc

SEQ ID NO: 3224157 - RNA, 19 nt, Artificial Sequence
  Description of Artificial Sequence: Synthetic oligonucleotide
cuggaaauaguagaauucc

SEQ ID NO: 3224158 - RNA, 19 nt, Artificial Sequence
  Description of Artificial Sequence: Synthetic oligonucleotide
ucucauuccacauguugcc

SEQ ID NO: 3224159 - RNA, 19 nt, Artificial Sequence
  Description of Artificial Sequence: Synthetic oligonucleotide
uaacacguuuuccagagau

SEQ ID NO: 3224160 - RNA, 19 nt, Artificial Sequence
  Description of Artificial Sequence: Synthetic oligonucleotide
gaggcuuccaaagaugucc

SEQ ID NO: 3224161 - RNA, 19 nt, Artificial Sequence
  Description of Artificial Sequence: Synthetic oligonucleotide
gcaaagauguccuauauuc

SEQ ID NO: 3224162 - RNA, 19 nt, Artificial Sequence
  Description of Artificial Sequence: Synthetic oligonucleotide
uuugcagaagguaacugau

SEQ ID NO: 3224163 - RNA, 19 nt, Artificial Sequence
  Description of Artificial Sequence: Synthetic oligonucleotide
uacgcguuuggcuaaaggu

SEQ ID NO: 3224164 - RNA, 19 nt, Artificial Sequence
  Description of Artificial Sequence: Synthetic oligonucleotide
uucccaauuccuaccacag

SEQ ID NO: 3224165 - RNA, 19 nt, Artificial Sequence
  Description of Artificial Sequence: Synthetic oligonucleotide
gaugcuucccaauuccuac

SEQ ID NO: 3224166 - RNA, 19 nt, Artificial Sequence
  Description of Artificial Sequence: Synthetic oligonucleotide
uuucaaccaaacaucguaa

SEQ ID NO: 3224167 - RNA, 19 nt, Artificial Sequence
  Description of Artificial Sequence: Synthetic oligonucleotide
ugacagaugagcugguaca

SEQ ID NO: 3224168 - RNA, 19 nt, Artificial Sequence
  Description of Artificial Sequence: Synthetic oligonucleotide
aaugaguugcuuccugcga

SEQ ID NO: 3224169 - RNA, 19 nt, Artificial Sequence
  Description of Artificial Sequence: Synthetic oligonucleotide
uucagcaguaagaauccca

SEQ ID NO: 3224170 - RNA, 19 nt, Artificial Sequence
  Description of Artificial Sequence: Synthetic oligonucleotide
agcacaggaauccuguuca

SEQ ID NO: 3224171 - RNA, 19 nt, Artificial Sequence
  Description of Artificial Sequence: Synthetic oligonucleotide
auucuuuacgcguuuggcu

SEQ ID NO: 3224172 - RNA, 19 nt, Artificial Sequence
  Description of Artificial Sequence: Synthetic oligonucleotide
uucacaugaugcuugucca

SEQ ID NO: 3224173 - RNA, 19 nt, Artificial Sequence
  Description of Artificial Sequence: Synthetic oligonucleotide
auuaaugaguugcuuccug

SEQ ID NO: 3224174 - RNA, 19 nt, Artificial Sequence
  Description of Artificial Sequence: Synthetic oligonucleotide
auuccuaccacaggcaguc

SEQ ID NO: 3224175 - RNA, 19 nt, Artificial Sequence
  Description of Artificial Sequence: Synthetic oligonucleotide
aguagaauuccuuccuuga

SEQ ID NO: 3224176 - RNA, 19 nt, Artificial Sequence
  Description of Artificial Sequence: Synthetic oligonucleotide
ucaugcucgucauugucag

SEQ ID NO: 3224177 - RNA, 19 nt, Artificial Sequence
  Description of Artificial Sequence: Synthetic oligonucleotide
ucaaacacaaguguugaau

SEQ ID NO: 3224178 - RNA, 19 nt, Artificial Sequence
  Description of Artificial Sequence: Synthetic oligonucleotide
uuacgcguuuggcuaaagg

SEQ ID NO: 3224179 - RNA, 19 nt, Artificial Sequence
  Description of Artificial Sequence: Synthetic oligonucleotide
ggcagcauagguuucaacc

SEQ ID NO: 3224180 - RNA, 19 nt, Artificial Sequence
  Description of Artificial Sequence: Synthetic oligonucleotide
ucugaggcuuccaaagaug

SEQ ID NO: 3224181 - RNA, 19 nt, Artificial Sequence
  Description of Artificial Sequence: Synthetic oligonucleotide
acaaguguugaauaucaau

SEQ ID NO: 3224182 - RNA, 19 nt, Artificial Sequence
  Description of Artificial Sequence: Synthetic oligonucleotide
uaguagaauuccuuccuug

SEQ ID NO: 3224183 - RNA, 19 nt, Artificial Sequence
  Description of Artificial Sequence: Synthetic oligonucleotide
caucugugagucuaucucc

SEQ ID NO: 3224184 - RNA, 19 nt, Artificial Sequence
  Description of Artificial Sequence: Synthetic oligonucleotide
acagcaguuaguaacacgu

SEQ ID NO: 3224185 - RNA, 19 nt, Artificial Sequence
  Description of Artificial Sequence: Synthetic oligonucleotide
aaagguucuucauuccuuu

SEQ ID NO: 3224186 - RNA, 19 nt, Artificial Sequence
  Description of Artificial Sequence: Synthetic oligonucleotide
uuuccauuaaugaguugcu

SEQ ID NO: 3224187 - RNA, 19 nt, Artificial Sequence
  Description of Artificial Sequence: Synthetic oligonucleotide
aaugcaagaucugucgcga

SEQ ID NO: 3224188 - RNA, 19 nt, Artificial Sequence
  Description of Artificial Sequence: Synthetic oligonucleotide
uggaaauaguagaauuccu

SEQ ID NO: 3224189 - RNA, 19 nt, Artificial Sequence
  Description of Artificial Sequence: Synthetic oligonucleotide
uucugaucaucuuuucucu

SEQ ID NO: 3224190 - RNA, 19 nt, Artificial Sequence
  Description of Artificial Sequence: Synthetic oligonucleotide
ucuuuuccauuaaugaguu

SEQ ID NO: 3224191 - RNA, 19 nt, Artificial Sequence
  Description of Artificial Sequence: Synthetic oligonucleotide
aaauaaagauuucaauucc

SEQ ID NO: 3224192 - RNA, 19 nt, Artificial Sequence
  Description of Artificial Sequence: Synthetic oligonucleotide
agaaagauuacacaguagc

SEQ ID NO: 3224193 - RNA, 19 nt, Artificial Sequence
  Description of Artificial Sequence: Synthetic oligonucleotide
auucuagaaaucuauaacc

SEQ ID NO: 3224194 - RNA, 19 nt, Artificial Sequence
  Description of Artificial Sequence: Synthetic oligonucleotide
uaauuguucauucagagcu

SEQ ID NO: 3224195 - RNA, 19 nt, Artificial Sequence
  Description of Artificial Sequence: Synthetic oligonucleotide
ucuauaaccuucuuaaggg

SEQ ID NO: 3224196 - RNA, 19 nt, Artificial Sequence
  Description of Artificial Sequence: Synthetic oligonucleotide
aaaaggaccaucugcaggg

SEQ ID NO: 3224197 - RNA, 19 nt, Artificial Sequence
  Description of Artificial Sequence: Synthetic oligonucleotide
aaaucuauaaccuucuuaa

SEQ ID NO: 3224198 - RNA, 19 nt, Artificial Sequence
  Description of Artificial Sequence: Synthetic oligonucleotide
aaagauuucaauuccauau

SEQ ID NO: 3224199 - RNA, 19 nt, Artificial Sequence
  Description of Artificial Sequence: Synthetic oligonucleotide
  modified_base (3)..(3): a, c, u, g, unknown or other
agnuaaaaggaccaucugc

SEQ ID NO: 3224200 - RNA, 19 nt, Artificial Sequence
  Description of Artificial Sequence: Synthetic oligonucleotide
uguauugaaauaaagauuu

SEQ ID NO: 3224201 - RNA, 19 nt, Artificial Sequence
  Description of Artificial Sequence: Synthetic oligonucleotide
uuuguauugaaauaaagau

SEQ ID NO: 3224202 - RNA, 19 nt, Artificial Sequence
  Description of Artificial Sequence: Synthetic oligonucleotide
aagaaaccaagacauuugc

SEQ ID NO: 3224203 - RNA, 19 nt, Artificial Sequence
  Description of Artificial Sequence: Synthetic oligonucleotide
gaaauaaagauuucaauuc

SEQ ID NO: 3224204 - RNA, 19 nt, Artificial Sequence
  Description of Artificial Sequence: Synthetic oligonucleotide
uaauuuaucuaauuguuca

SEQ ID NO: 3224205 - RNA, 19 nt, Artificial Sequence
  Description of Artificial Sequence: Synthetic oligonucleotide
guugagaaagauuacacag

SEQ ID NO: 3224206 - RNA, 19 nt, Artificial Sequence
  Description of Artificial Sequence: Synthetic oligonucleotide
uuucaauuccauaucacag

SEQ ID NO: 3224207 - RNA, 19 nt, Artificial Sequence
  Description of Artificial Sequence: Synthetic oligonucleotide
aucuauaaccuucuuaagg

SEQ ID NO: 3224208 - RNA, 19 nt, Artificial Sequence
  Description of Artificial Sequence: Synthetic oligonucleotide
aaaauuuguauugaaauaa

SEQ ID NO: 3224209 - RNA, 19 nt, Artificial Sequence
  Description of Artificial Sequence: Synthetic oligonucleotide
ucuaauuguucauucagag

SEQ ID NO: 3224210 - RNA, 19 nt, Artificial Sequence
  Description of Artificial Sequence: Synthetic oligonucleotide
ugaaauaaagauuucaauu

SEQ ID NO: 3224211 - RNA, 19 nt, Artificial Sequence
  Description of Artificial Sequence: Synthetic oligonucleotide
aagauuucaauuccauauc

SEQ ID NO: 3224212 - RNA, 19 nt, Artificial Sequence
  Description of Artificial Sequence: Synthetic oligonucleotide
uaucuaauuguucauucag

SEQ ID NO: 3224213 - RNA, 19 nt, Artificial Sequence
  Description of Artificial Sequence: Synthetic oligonucleotide
uuuaauuuaucuaauuguu

SEQ ID NO: 3224214 - RNA, 19 nt, Artificial Sequence
  Description of Artificial Sequence: Synthetic oligonucleotide
aaugaagggaaugugaaga

SEQ ID NO: 3224215 - RNA, 19 nt, Artificial Sequence
  Description of Artificial Sequence: Synthetic oligonucleotide
caagacauuugcaagauug

SEQ ID NO: 3224216 - RNA, 19 nt, Artificial Sequence
  Description of Artificial Sequence: Synthetic oligonucleotide
uaaaaggaccaucugcagg

SEQ ID NO: 3224217 - RNA, 19 nt, Artificial Sequence
  Description of Artificial Sequence: Synthetic oligonucleotide
aaaccaagacauuugcaag

SEQ ID NO: 3224218 - RNA, 19 nt, Artificial Sequence
  Description of Artificial Sequence: Synthetic oligonucleotide
uuaacugaccccauucuag

SEQ ID NO: 3224219 - RNA, 19 nt, Artificial Sequence
  Description of Artificial Sequence: Synthetic oligonucleotide
cauaucacagccaaugaag

SEQ ID NO: 3224220 - RNA, 19 nt, Artificial Sequence
  Description of Artificial Sequence: Synthetic oligonucleotide
ucaauuccauaucacagcc

SEQ ID NO: 3224221 - RNA, 19 nt, Artificial Sequence
  Description of Artificial Sequence: Synthetic oligonucleotide
aauuccauaucacagccaa

SEQ ID NO: 3224222 - RNA, 19 nt, Artificial Sequence
  Description of Artificial Sequence: Synthetic oligonucleotide
  modified_base (12)..(12): a, c, u, g, unknown or other
ggagauggcagnuaaaagg

SEQ ID NO: 3224223 - RNA, 19 nt, Artificial Sequence
  Description of Artificial Sequence: Synthetic oligonucleotide
aaggccauuuuccauacug

SEQ ID NO: 3224224 - RNA, 19 nt, Artificial Sequence
  Description of Artificial Sequence: Synthetic oligonucleotide
gaaagccaugcacugaugg

SEQ ID NO: 3224225 - RNA, 19 nt, Artificial Sequence
  Description of Artificial Sequence: Synthetic oligonucleotide
uucuagaaaucuauaaccu

SEQ ID NO: 3224226 - RNA, 19 nt, Artificial Sequence
  Description of Artificial Sequence: Synthetic oligonucleotide
aaggagguuaacugacccc

SEQ ID NO: 3224227 - RNA, 19 nt, Artificial Sequence
  Description of Artificial Sequence: Synthetic oligonucleotide
cuagaaaucuauaaccuuc

SEQ ID NO: 3224228 - RNA, 19 nt, Artificial Sequence
  Description of Artificial Sequence: Synthetic oligonucleotide
aauuuguauugaaauaaag

SEQ ID NO: 3224229 - RNA, 19 nt, Artificial Sequence
  Description of Artificial Sequence: Synthetic oligonucleotide
uauugaaauaaagauuuca

SEQ ID NO: 3224230 - RNA, 19 nt, Artificial Sequence
  Description of Artificial Sequence: Synthetic oligonucleotide
uuaauuuaucuaauuguuc

SEQ ID NO: 3224231 - RNA, 19 nt, Artificial Sequence
  Description of Artificial Sequence: Synthetic oligonucleotide
uuuaucuaauuguucauuc

SEQ ID NO: 3224232 - RNA, 19 nt, Artificial Sequence
  Description of Artificial Sequence: Synthetic oligonucleotide
uucaauuccauaucacagc

SEQ ID NO: 3224233 - RNA, 19 nt, Artificial Sequence
  Description of Artificial Sequence: Synthetic oligonucleotide
auuucaauuccauaucaca

SEQ ID NO: 3224234 - RNA, 19 nt, Artificial Sequence
  Description of Artificial Sequence: Synthetic oligonucleotide
  modified_base (2)..(2): a, c, u, g, unknown or other
gnuaaaaggaccaucugca

SEQ ID NO: 3224235 - RNA, 19 nt, Artificial Sequence
  Description of Artificial Sequence: Synthetic oligonucleotide
aagauuggccuccuaugac

SEQ ID NO: 3224236 - RNA, 19 nt, Artificial Sequence
  Description of Artificial Sequence: Synthetic oligonucleotide
augacaaggagguuaacug

SEQ ID NO: 3224237 - RNA, 19 nt, Artificial Sequence
  Description of Artificial Sequence: Synthetic oligonucleotide
guagcuuuaauuuaucuaa

SEQ ID NO: 3224238 - RNA, 19 nt, Artificial Sequence
  Description of Artificial Sequence: Synthetic oligonucleotide
acauuugcaagauuggccu

SEQ ID NO: 3224239 - RNA, 19 nt, Artificial Sequence
  Description of Artificial Sequence: Synthetic oligonucleotide
aagauuacacaguagcuuu

SEQ ID NO: 3224240 - RNA, 19 nt, Artificial Sequence
  Description of Artificial Sequence: Synthetic oligonucleotide
uacacaguagcuuuaauuu

SEQ ID NO: 3224241 - RNA, 19 nt, Artificial Sequence
  Description of Artificial Sequence: Synthetic oligonucleotide
uauaaccuucuuaagggga

SEQ ID NO: 3224242 - RNA, 19 nt, Artificial Sequence
  Description of Artificial Sequence: Synthetic oligonucleotide
aaucuauaaccuucuuaag

SEQ ID NO: 3224243 - RNA, 19 nt, Artificial Sequence
  Description of Artificial Sequence: Synthetic oligonucleotide
uggaagaagaaaccaagac

SEQ ID NO: 3224244 - RNA, 19 nt, Artificial Sequence
  Description of Artificial Sequence: Synthetic oligonucleotide
gaaaccaagacauuugcaa

SEQ ID NO: 3224245 - RNA, 19 nt, Artificial Sequence
  Description of Artificial Sequence: Synthetic oligonucleotide
cauucuagaaaucuauaac

SEQ ID NO: 3224246 - RNA, 19 nt, Artificial Sequence
  Description of Artificial Sequence: Synthetic oligonucleotide
gauggaagaagaaaccaag

SEQ ID NO: 3224247 - RNA, 19 nt, Artificial Sequence
  Description of Artificial Sequence: Synthetic oligonucleotide
uuguugagaaagauuacac

SEQ ID NO: 3224248 - RNA, 19 nt, Artificial Sequence
  Description of Artificial Sequence: Synthetic oligonucleotide
ugagaaagauuacacagua

SEQ ID NO: 3224249 - RNA, 19 nt, Artificial Sequence
  Description of Artificial Sequence: Synthetic oligonucleotide
uuguauugaaauaaagauu

SEQ ID NO: 3224250 - RNA, 19 nt, Artificial Sequence
  Description of Artificial Sequence: Synthetic oligonucleotide
uuuguugagaaagauuaca

SEQ ID NO: 3224251 - RNA, 19 nt, Artificial Sequence
  Description of Artificial Sequence: Synthetic oligonucleotide
auuuguauugaaauaaaga

SEQ ID NO: 3224252 - RNA, 19 nt, Artificial Sequence
  Description of Artificial Sequence: Synthetic oligonucleotide
aaccaagacauuugcaaga

SEQ ID NO: 3224253 - RNA, 19 nt, Artificial Sequence
  Description of Artificial Sequence: Synthetic oligonucleotide
uuuuccauacugugguagg

SEQ ID NO: 3224254 - RNA, 19 nt, Artificial Sequence
  Description of Artificial Sequence: Synthetic oligonucleotide
aauuuaucuaauuguucau

SEQ ID NO: 3224255 - RNA, 19 nt, Artificial Sequence
  Description of Artificial Sequence: Synthetic oligonucleotide
uguugagaaagauuacaca

SEQ ID NO: 3224256 - RNA, 19 nt, Artificial Sequence
  Description of Artificial Sequence: Synthetic oligonucleotide
uugaaauaaagauuucaau

SEQ ID NO: 3224257 - RNA, 19 nt, Artificial Sequence
  Description of Artificial Sequence: Synthetic oligonucleotide
acgaggaaaauuuguauug

SEQ ID NO: 3224258 - RNA, 19 nt, Artificial Sequence
  Description of Artificial Sequence: Synthetic oligonucleotide
gaagggaaugugaagaggc

SEQ ID NO: 3224259 - RNA, 19 nt, Artificial Sequence
  Description of Artificial Sequence: Synthetic oligonucleotide
aauaaagauuucaauucca

SEQ ID NO: 3224260 - RNA, 19 nt, Artificial Sequence
  Description of Artificial Sequence: Synthetic oligonucleotide
acugauggaagaagaaacc

SEQ ID NO: 3224261 - RNA, 19 nt, Artificial Sequence
  Description of Artificial Sequence: Synthetic oligonucleotide
uguucauucagagcugggg

SEQ ID NO: 3224262 - RNA, 19 nt, Artificial Sequence
  Description of Artificial Sequence: Synthetic oligonucleotide
cacugauggaagaagaaac

SEQ ID NO: 3224263 - RNA, 19 nt, Artificial Sequence
  Description of Artificial Sequence: Synthetic oligonucleotide
  modified_base (14)..(14): a, c, u, g, unknown or other
aaggagauggcagnuaaaa

SEQ ID NO: 3224264 - RNA, 19 nt, Artificial Sequence
  Description of Artificial Sequence: Synthetic oligonucleotide
uugagaaagauuacacagu

SEQ ID NO: 3224265 - RNA, 19 nt, Artificial Sequence
  Description of Artificial Sequence: Synthetic oligonucleotide
ugugguagggagaaagcca

SEQ ID NO: 3224266 - RNA, 19 nt, Artificial Sequence
  Description of Artificial Sequence: Synthetic oligonucleotide
agauuucaauuccauauca

SEQ ID NO: 3224267 - RNA, 19 nt, Artificial Sequence
  Description of Artificial Sequence: Synthetic oligonucleotide
gaaaauuuguauugaaaua

SEQ ID NO: 3224268 - RNA, 19 nt, Artificial Sequence
  Description of Artificial Sequence: Synthetic oligonucleotide
aaagauuacacaguagcuu

SEQ ID NO: 3224269 - RNA, 19 nt, Artificial Sequence
  Description of Artificial Sequence: Synthetic oligonucleotide
uaucacagccaaugaaggg

SEQ ID NO: 3224270 - RNA, 19 nt, Artificial Sequence
  Description of Artificial Sequence: Synthetic oligonucleotide
cuaauuguucauucagagc

SEQ ID NO: 3224271 - RNA, 19 nt, Artificial Sequence
  Description of Artificial Sequence: Synthetic oligonucleotide
uuaucuaauuguucauuca

SEQ ID NO: 3224272 - RNA, 19 nt, Artificial Sequence
  Description of Artificial Sequence: Synthetic oligonucleotide
uuccauaucacagccaaug

SEQ ID NO: 3224273 - RNA, 19 nt, Artificial Sequence
  Description of Artificial Sequence: Synthetic oligonucleotide
  modified_base (9)..(9): a, c, u, g, unknown or other
gauggcagnuaaaaggacc

SEQ ID NO: 3224274 - RNA, 19 nt, Artificial Sequence
  Description of Artificial Sequence: Synthetic oligonucleotide
aaugugaagaggccugaga

SEQ ID NO: 3224275 - RNA, 19 nt, Artificial Sequence
  Description of Artificial Sequence: Synthetic oligonucleotide
agacauuugcaagauuggc

SEQ ID NO: 3224276 - RNA, 19 nt, Artificial Sequence
  Description of Artificial Sequence: Synthetic oligonucleotide
cuauaaccuucuuaagggg

SEQ ID NO: 3224277 - RNA, 19 nt, Artificial Sequence
  Description of Artificial Sequence: Synthetic oligonucleotide
auuugcaagauuggccucc

SEQ ID NO: 3224278 - RNA, 19 nt, Artificial Sequence
  Description of Artificial Sequence: Synthetic oligonucleotide
uagaaaucuauaaccuucu

SEQ ID NO: 3224279 - RNA, 19 nt, Artificial Sequence
  Description of Artificial Sequence: Synthetic oligonucleotide
gugaagaggccugagaagg

SEQ ID NO: 3224280 - RNA, 19 nt, Artificial Sequence
  Description of Artificial Sequence: Synthetic oligonucleotide
gacauuugcaagauuggcc

SEQ ID NO: 3224281 - RNA, 19 nt, Artificial Sequence
  Description of Artificial Sequence: Synthetic oligonucleotide
aagacauuugcaagauugg

SEQ ID NO: 3224282 - RNA, 19 nt, Artificial Sequence
  Description of Artificial Sequence: Synthetic oligonucleotide
agguuaacugaccccauuc

SEQ ID NO: 3224283 - RNA, 19 nt, Artificial Sequence
  Description of Artificial Sequence: Synthetic oligonucleotide
gcuuuaauuuaucuaauug

SEQ ID NO: 3224284 - RNA, 19 nt, Artificial Sequence
  Description of Artificial Sequence: Synthetic oligonucleotide
aucuccaaggccauuuucc

SEQ ID NO: 3224285 - RNA, 19 nt, Artificial Sequence
  Description of Artificial Sequence: Synthetic oligonucleotide
cuuuaauuuaucuaauugu

SEQ ID NO: 3224286 - RNA, 19 nt, Artificial Sequence
  Description of Artificial Sequence: Synthetic oligonucleotide
gaagaagaaaccaagacau

SEQ ID NO: 3224287 - RNA, 19 nt, Artificial Sequence
  Description of Artificial Sequence: Synthetic oligonucleotide
ugauggaagaagaaaccaa

SEQ ID NO: 3224288 - RNA, 19 nt, Artificial Sequence
  Description of Artificial Sequence: Synthetic oligonucleotide
uuacacaguagcuuuaauu

SEQ ID NO: 3224289 - RNA, 19 nt, Artificial Sequence
  Description of Artificial Sequence: Synthetic oligonucleotide
uaugacaaggagguuaacu

SEQ ID NO: 3224290 - RNA, 19 nt, Artificial Sequence
  Description of Artificial Sequence: Synthetic oligonucleotide
  modified_base (16)..(16): a, c, u, g, unknown or other
agaaggagauggcagnuaa

SEQ ID NO: 3224291 - RNA, 19 nt, Artificial Sequence
  Description of Artificial Sequence: Synthetic oligonucleotide
aacagauuaacauccaucc

SEQ ID NO: 3224292 - RNA, 19 nt, Artificial Sequence
  Description of Artificial Sequence: Synthetic oligonucleotide
aaguucuucaaacucuucc

SEQ ID NO: 3224293 - RNA, 19 nt, Artificial Sequence
  Description of Artificial Sequence: Synthetic oligonucleotide
aaagaaacugaugaaaccg

SEQ ID NO: 3224294 - RNA, 19 nt, Artificial Sequence
  Description of Artificial Sequence: Synthetic oligonucleotide
uccaacgugaaagagaugg

SEQ ID NO: 3224295 - RNA, 19 nt, Artificial Sequence
  Description of Artificial Sequence: Synthetic oligonucleotide
aguaacuucacuguagacc

SEQ ID NO: 3224296 - RNA, 19 nt, Artificial Sequence
  Description of Artificial Sequence: Synthetic oligonucleotide
aauaacuccagucuagccu

SEQ ID NO: 3224297 - RNA, 19 nt, Artificial Sequence
  Description of Artificial Sequence: Synthetic oligonucleotide
uuaacauccauccacugug

SEQ ID NO: 3224298 - RNA, 19 nt, Artificial Sequence
  Description of Artificial Sequence: Synthetic oligonucleotide
ucuucaaacucuuccaacg

SEQ ID NO: 3224299 - RNA, 19 nt, Artificial Sequence
  Description of Artificial Sequence: Synthetic oligonucleotide
aaacccauagccuuuggag

SEQ ID NO: 3224300 - RNA, 19 nt, Artificial Sequence
  Description of Artificial Sequence: Synthetic oligonucleotide
aacucuuccaacgugaaag

SEQ ID NO: 3224301 - RNA, 19 nt, Artificial Sequence
  Description of Artificial Sequence: Synthetic oligonucleotide
ugguaaugcacacagagca

SEQ ID NO: 3224302 - RNA, 19 nt, Artificial Sequence
  Description of Artificial Sequence: Synthetic oligonucleotide
acuauuaacucucugccuc

SEQ ID NO: 3224303 - RNA, 19 nt, Artificial Sequence
  Description of Artificial Sequence: Synthetic oligonucleotide
acuccacaaacccauagcc

SEQ ID NO: 3224304 - RNA, 19 nt, Artificial Sequence
  Description of Artificial Sequence: Synthetic oligonucleotide
aagccaacagauuaacauc

SEQ ID NO: 3224305 - RNA, 19 nt, Artificial Sequence
  Description of Artificial Sequence: Synthetic oligonucleotide
guugguaaugcacacagag

SEQ ID NO: 3224306 - RNA, 19 nt, Artificial Sequence
  Description of Artificial Sequence: Synthetic oligonucleotide
ucauguacuccacaaaccc

SEQ ID NO: 3224307 - RNA, 19 nt, Artificial Sequence
  Description of Artificial Sequence: Synthetic oligonucleotide
uuucauguacuccacaaac

SEQ ID NO: 3224308 - RNA, 19 nt, Artificial Sequence
  Description of Artificial Sequence: Synthetic oligonucleotide
ugaugaaaccgcugaaucg

SEQ ID NO: 3224309 - RNA, 19 nt, Artificial Sequence
  Description of Artificial Sequence: Synthetic oligonucleotide
gaaagaaacugaugaaacc

SEQ ID NO: 3224310 - RNA, 19 nt, Artificial Sequence
  Description of Artificial Sequence: Synthetic oligonucleotide
aagaaacugaugaaaccgc

SEQ ID NO: 3224311 - RNA, 19 nt, Artificial Sequence
  Description of Artificial Sequence: Synthetic oligonucleotide
aaacugaugaaaccgcuga

SEQ ID NO: 3224312 - RNA, 19 nt, Artificial Sequence
  Description of Artificial Sequence: Synthetic oligonucleotide
ugcacuauuaacucucugc

SEQ ID NO: 3224313 - RNA, 19 nt, Artificial Sequence
  Description of Artificial Sequence: Synthetic oligonucleotide
aaagagaugggcagguugg

SEQ ID NO: 3224314 - RNA, 19 nt, Artificial Sequence
  Description of Artificial Sequence: Synthetic oligonucleotide
ugcagcugcacuauuaacu

SEQ ID NO: 3224315 - RNA, 19 nt, Artificial Sequence
  Description of Artificial Sequence: Synthetic oligonucleotide
ucaaacucuuccaacguga

SEQ ID NO: 3224316 - RNA, 19 nt, Artificial Sequence
  Description of Artificial Sequence: Synthetic oligonucleotide
cagauuaacauccauccac

SEQ ID NO: 3224317 - RNA, 19 nt, Artificial Sequence
  Description of Artificial Sequence: Synthetic oligonucleotide
guaacuucacuguagacca

SEQ ID NO: 3224318 - RNA, 19 nt, Artificial Sequence
  Description of Artificial Sequence: Synthetic oligonucleotide
gaugaaaccgcugaaucgc

SEQ ID NO: 3224319 - RNA, 19 nt, Artificial Sequence
  Description of Artificial Sequence: Synthetic oligonucleotide
uucauguacuccacaaacc

SEQ ID NO: 3224320 - RNA, 19 nt, Artificial Sequence
  Description of Artificial Sequence: Synthetic oligonucleotide
gaaagagaugggcagguug

SEQ ID NO: 3224321 - RNA, 19 nt, Artificial Sequence
  Description of Artificial Sequence: Synthetic oligonucleotide
ucuuccaacgugaaagaga

SEQ ID NO: 3224322 - RNA, 19 nt, Artificial Sequence
  Description of Artificial Sequence: Synthetic oligonucleotide
agccaacagauuaacaucc

SEQ ID NO: 3224323 - RNA, 19 nt, Artificial Sequence
  Description of Artificial Sequence: Synthetic oligonucleotide
ugugcuugcucccauucag

SEQ ID NO: 3224324 - RNA, 19 nt, Artificial Sequence
  Description of Artificial Sequence: Synthetic oligonucleotide
ucucgauguucccauaugc

SEQ ID NO: 3224325 - RNA, 19 nt, Artificial Sequence
  Description of Artificial Sequence: Synthetic oligonucleotide
agguugguaaugcacacag

SEQ ID NO: 3224326 - RNA, 19 nt, Artificial Sequence
  Description of Artificial Sequence: Synthetic oligonucleotide
ugugcaaagagugccgacg

SEQ ID NO: 3224327 - RNA, 19 nt, Artificial Sequence
  Description of Artificial Sequence: Synthetic oligonucleotide
uuuggaguggccaguaacu

SEQ ID NO: 3224328 - RNA, 19 nt, Artificial Sequence
  Description of Artificial Sequence: Synthetic oligonucleotide
acacagagcaucugugggc

SEQ ID NO: 3224329 - RNA, 19 nt, Artificial Sequence
  Description of Artificial Sequence: Synthetic oligonucleotide
cucggaaagaaacugauga

SEQ ID NO: 3224330 - RNA, 19 nt, Artificial Sequence
  Description of Artificial Sequence: Synthetic oligonucleotide
uccagucuagccuuggcag

SEQ ID NO: 3224331 - RNA, 19 nt, Artificial Sequence
  Description of Artificial Sequence: Synthetic oligonucleotide
aacucucugccucggaaag

SEQ ID NO: 3224332 - RNA, 19 nt, Artificial Sequence
  Description of Artificial Sequence: Synthetic oligonucleotide
auuaacauccauccacugu

SEQ ID NO: 3224333 - RNA, 19 nt, Artificial Sequence
  Description of Artificial Sequence: Synthetic oligonucleotide
aacccauagccuuuggagu

SEQ ID NO: 3224334 - RNA, 19 nt, Artificial Sequence
  Description of Artificial Sequence: Synthetic oligonucleotide
aguucuucaaacucuucca

SEQ ID NO: 3224335 - RNA, 19 nt, Artificial Sequence
  Description of Artificial Sequence: Synthetic oligonucleotide
ugcccaauaacuccagucu

SEQ ID NO: 3224336 - RNA, 19 nt, Artificial Sequence
  Description of Artificial Sequence: Synthetic oligonucleotide
uucaaacucuuccaacgug

SEQ ID NO: 3224337 - RNA, 19 nt, Artificial Sequence
  Description of Artificial Sequence: Synthetic oligonucleotide
aaacaccucucgauguucc

SEQ ID NO: 3224338 - RNA, 19 nt, Artificial Sequence
  Description of Artificial Sequence: Synthetic oligonucleotide
cuugcucccauucaguaac

SEQ ID NO: 3224339 - RNA, 19 nt, Artificial Sequence
  Description of Artificial Sequence: Synthetic oligonucleotide
aacaccucucgauguuccc

SEQ ID NO: 3224340 - RNA, 19 nt, Artificial Sequence
  Description of Artificial Sequence: Synthetic oligonucleotide
uugguaaugcacacagagc

SEQ ID NO: 3224341 - RNA, 19 nt, Artificial Sequence
  Description of Artificial Sequence: Synthetic oligonucleotide
aaagagugccgacgcuccc

SEQ ID NO: 3224342 - RNA, 19 nt, Artificial Sequence
  Description of Artificial Sequence: Synthetic oligonucleotide
gauguucccauaugcucgg

SEQ ID NO: 3224343 - RNA, 19 nt, Artificial Sequence
  Description of Artificial Sequence: Synthetic oligonucleotide
aaaacaccucucgauguuc

SEQ ID NO: 3224344 - RNA, 19 nt, Artificial Sequence
  Description of Artificial Sequence: Synthetic oligonucleotide
ucggacaaguucuucaaac

SEQ ID NO: 3224345 - RNA, 19 nt, Artificial Sequence
  Description of Artificial Sequence: Synthetic oligonucleotide
cuauuaacucucugccucg

SEQ ID NO: 3224346 - RNA, 19 nt, Artificial Sequence
  Description of Artificial Sequence: Synthetic oligonucleotide
caacagauuaacauccauc

SEQ ID NO: 3224347 - RNA, 19 nt, Artificial Sequence
  Description of Artificial Sequence: Synthetic oligonucleotide
uacuccacaaacccauagc

SEQ ID NO: 3224348 - RNA, 19 nt, Artificial Sequence
  Description of Artificial Sequence: Synthetic oligonucleotide
aucugugggcugcagcugc

SEQ ID NO: 3224349 - RNA, 19 nt, Artificial Sequence
  Description of Artificial Sequence: Synthetic oligonucleotide
gaagccaacagauuaacau

SEQ ID NO: 3224350 - RNA, 19 nt, Artificial Sequence
  Description of Artificial Sequence: Synthetic oligonucleotide
acgugaaagagaugggcag

SEQ ID NO: 3224351 - RNA, 19 nt, Artificial Sequence
  Description of Artificial Sequence: Synthetic oligonucleotide
guggccaguaacuucacug

SEQ ID NO: 3224352 - RNA, 19 nt, Artificial Sequence
  Description of Artificial Sequence: Synthetic oligonucleotide
uuuucauguacuccacaaa

SEQ ID NO: 3224353 - RNA, 19 nt, Artificial Sequence
  Description of Artificial Sequence: Synthetic oligonucleotide
uuaacucucugccucggaa

SEQ ID NO: 3224354 - RNA, 19 nt, Artificial Sequence
  Description of Artificial Sequence: Synthetic oligonucleotide
cacacagagcaucuguggg

SEQ ID NO: 3224355 - RNA, 19 nt, Artificial Sequence
  Description of Artificial Sequence: Synthetic oligonucleotide
aacgugaaagagaugggca

SEQ ID NO: 3224356 - RNA, 19 nt, Artificial Sequence
  Description of Artificial Sequence: Synthetic oligonucleotide
uccacaaacccauagccuu

SEQ ID NO: 3224357 - RNA, 19 nt, Artificial Sequence
  Description of Artificial Sequence: Synthetic oligonucleotide
aaaccgcugaaucgcgcuc

SEQ ID NO: 3224358 - RNA, 19 nt, Artificial Sequence
  Description of Artificial Sequence: Synthetic oligonucleotide
uucuucaaacucuuccaac

SEQ ID NO: 3224359 - RNA, 19 nt, Artificial Sequence
  Description of Artificial Sequence: Synthetic oligonucleotide
ugcacacagagcaucugug

SEQ ID NO: 3224360 - RNA, 19 nt, Artificial Sequence
  Description of Artificial Sequence: Synthetic oligonucleotide
cugaugaaaccgcugaauc

SEQ ID NO: 3224361 - RNA, 19 nt, Artificial Sequence
  Description of Artificial Sequence: Synthetic oligonucleotide
ucgauguucccauaugcuc

SEQ ID NO: 3224362 - RNA, 19 nt, Artificial Sequence
  Description of Artificial Sequence: Synthetic oligonucleotide
agcaucugugggcugcagc

SEQ ID NO: 3224363 - RNA, 19 nt, Artificial Sequence
  Description of Artificial Sequence: Synthetic oligonucleotide
gauuaacauccauccacug

SEQ ID NO: 3224364 - RNA, 19 nt, Artificial Sequence
  Description of Artificial Sequence: Synthetic oligonucleotide
ucugccucggaaagaaacu

SEQ ID NO: 3224365 - RNA, 19 nt, Artificial Sequence
  Description of Artificial Sequence: Synthetic oligonucleotide
auaacuccagucuagccuu

SEQ ID NO: 3224366 - RNA, 19 nt, Artificial Sequence
  Description of Artificial Sequence: Synthetic oligonucleotide
uccacugugcaaagagugc

SEQ ID NO: 3224367 - RNA, 19 nt, Artificial Sequence
  Description of Artificial Sequence: Synthetic oligonucleotide
uaaugcacacagagcaucu

SEQ ID NO: 3224368 - RNA, 19 nt, Artificial Sequence
  Description of Artificial Sequence: Synthetic oligonucleotide
caauaacuccagucuagcc

SEQ ID NO: 3224369 - RNA, 19 nt, Artificial Sequence
  Description of Artificial Sequence: Synthetic oligonucleotide
ucugccugcccaauaacuc

SEQ ID NO: 3224370 - RNA, 19 nt, Artificial Sequence
  Description of Artificial Sequence: Synthetic oligonucleotide
caaagagugccgacgcucc

SEQ ID NO: 3224371 - RNA, 19 nt, Artificial Sequence
  Description of Artificial Sequence: Synthetic oligonucleotide
cauucaguaacguaacaaa

SEQ ID NO: 3224372 - RNA, 19 nt, Artificial Sequence
  Description of Artificial Sequence: Synthetic oligonucleotide
cuuuggaguggccaguaac

SEQ ID NO: 3224373 - RNA, 19 nt, Artificial Sequence
  Description of Artificial Sequence: Synthetic oligonucleotide
cucugccucggaaagaaac

SEQ ID NO: 3224374 - RNA, 19 nt, Artificial Sequence
  Description of Artificial Sequence: Synthetic oligonucleotide
gcacuauuaacucucugcc

SEQ ID NO: 3224375 - RNA, 19 nt, Artificial Sequence
  Description of Artificial Sequence: Synthetic oligonucleotide
auaugcucggacaaguucu

SEQ ID NO: 3224376 - RNA, 19 nt, Artificial Sequence
  Description of Artificial Sequence: Synthetic oligonucleotide
acccauagccuuuggagug

SEQ ID NO: 3224377 - RNA, 19 nt, Artificial Sequence
  Description of Artificial Sequence: Synthetic oligonucleotide
ugcucggacaaguucuuca

SEQ ID NO: 3224378 - RNA, 19 nt, Artificial Sequence
  Description of Artificial Sequence: Synthetic oligonucleotide
agugccgacgcucccaucu

SEQ ID NO: 3224379 - RNA, 19 nt, Artificial Sequence
  Description of Artificial Sequence: Synthetic oligonucleotide
gaaacugaugaaaccgcug

SEQ ID NO: 3224380 - RNA, 19 nt, Artificial Sequence
  Description of Artificial Sequence: Synthetic oligonucleotide
cauaugcucggacaaguuc

SEQ ID NO: 3224381 - RNA, 19 nt, Artificial Sequence
  Description of Artificial Sequence: Synthetic oligonucleotide
caacgugaaagagaugggc

SEQ ID NO: 3224382 - RNA, 19 nt, Artificial Sequence
  Description of Artificial Sequence: Synthetic oligonucleotide
uaacauccauccacugugc

SEQ ID NO: 3224383 - RNA, 19 nt, Artificial Sequence
  Description of Artificial Sequence: Synthetic oligonucleotide
agcugcacuauuaacucuc

SEQ ID NO: 3224384 - RNA, 19 nt, Artificial Sequence
  Description of Artificial Sequence: Synthetic oligonucleotide
ggaaagaaacugaugaaac

SEQ ID NO: 3224385 - RNA, 19 nt, Artificial Sequence
  Description of Artificial Sequence: Synthetic oligonucleotide
aacauccauccacugugca

SEQ ID NO: 3224386 - RNA, 19 nt, Artificial Sequence
  Description of Artificial Sequence: Synthetic oligonucleotide
uauuaacucucugccucgg

SEQ ID NO: 3224387 - RNA, 19 nt, Artificial Sequence
  Description of Artificial Sequence: Synthetic oligonucleotide
aaucgcgcucugugcuugc

SEQ ID NO: 3224388 - RNA, 19 nt, Artificial Sequence
  Description of Artificial Sequence: Synthetic oligonucleotide
augggcagguugguaaugc

SEQ ID NO: 3224389 - RNA, 19 nt, Artificial Sequence
  Description of Artificial Sequence: Synthetic oligonucleotide
cucccauucaguaacguaa

SEQ ID NO: 3224390 - RNA, 19 nt, Artificial Sequence
  Description of Artificial Sequence: Synthetic oligonucleotide
uucccauaugcucggacaa

SEQ ID NO: 3224391 - RNA, 19 nt, Artificial Sequence
  Description of Artificial Sequence: Synthetic oligonucleotide
aacaaauccuaucuggucc

SEQ ID NO: 3224392 - RNA, 19 nt, Artificial Sequence
  Description of Artificial Sequence: Synthetic oligonucleotide
uugagguuuaaacagaggc

SEQ ID NO: 3224393 - RNA, 19 nt, Artificial Sequence
  Description of Artificial Sequence: Synthetic oligonucleotide
uacaucuguacucaaauug

SEQ ID NO: 3224394 - RNA, 19 nt, Artificial Sequence
  Description of Artificial Sequence: Synthetic oligonucleotide
guaaauaggacuccaacag

SEQ ID NO: 3224395 - RNA, 19 nt, Artificial Sequence
  Description of Artificial Sequence: Synthetic oligonucleotide
gaggaaaucagccagggug

SEQ ID NO: 3224396 - RNA, 19 nt, Artificial Sequence
  Description of Artificial Sequence: Synthetic oligonucleotide
aacacaccaagaugaaagc

SEQ ID NO: 3224397 - RNA, 19 nt, Artificial Sequence
  Description of Artificial Sequence: Synthetic oligonucleotide
ugucuugagguuuaaacag

SEQ ID NO: 3224398 - RNA, 19 nt, Artificial Sequence
  Description of Artificial Sequence: Synthetic oligonucleotide
gaaaggaagggguugaagc

SEQ ID NO: 3224399 - RNA, 19 nt, Artificial Sequence
  Description of Artificial Sequence: Synthetic oligonucleotide
aaagacuccauugccaaac

SEQ ID NO: 3224400 - RNA, 19 nt, Artificial Sequence
  Description of Artificial Sequence: Synthetic oligonucleotide
aaucaggugggccagggag

SEQ ID NO: 3224401 - RNA, 19 nt, Artificial Sequence
  Description of Artificial Sequence: Synthetic oligonucleotide
uugaauuugugucagcaga

SEQ ID NO: 3224402 - RNA, 19 nt, Artificial Sequence
  Description of Artificial Sequence: Synthetic oligonucleotide
gaugucuugagguuuaaac

SEQ ID NO: 3224403 - RNA, 19 nt, Artificial Sequence
  Description of Artificial Sequence: Synthetic oligonucleotide
uaaauaggacuccaacagg

SEQ ID NO: 3224404 - RNA, 19 nt, Artificial Sequence
  Description of Artificial Sequence: Synthetic oligonucleotide
aaccaaacuguguucacag

SEQ ID NO: 3224405 - RNA, 19 nt, Artificial Sequence
  Description of Artificial Sequence: Synthetic oligonucleotide
aaaccaaacacaccaagau

SEQ ID NO: 3224406 - RNA, 19 nt, Artificial Sequence
  Description of Artificial Sequence: Synthetic oligonucleotide
uuuaaacagaggcaggggu

SEQ ID NO: 3224407 - RNA, 19 nt, Artificial Sequence
  Description of Artificial Sequence: Synthetic oligonucleotide
ucaucuuuaggccagccac

SEQ ID NO: 3224408 - RNA, 19 nt, Artificial Sequence
  Description of Artificial Sequence: Synthetic oligonucleotide
gagauggagaaccaaacug

SEQ ID NO: 3224409 - RNA, 19 nt, Artificial Sequence
  Description of Artificial Sequence: Synthetic oligonucleotide
ucaccaacaaauccuaucu

SEQ ID NO: 3224410 - RNA, 19 nt, Artificial Sequence
  Description of Artificial Sequence: Synthetic oligonucleotide
aguaaauaggacuccaaca

SEQ ID NO: 3224411 - RNA, 19 nt, Artificial Sequence
  Description of Artificial Sequence: Synthetic oligonucleotide
caacaggagaaucaggugg

SEQ ID NO: 3224412 - RNA, 19 nt, Artificial Sequence
  Description of Artificial Sequence: Synthetic oligonucleotide
uuggcagauagcuaaagca

SEQ ID NO: 3224413 - RNA, 19 nt, Artificial Sequence
  Description of Artificial Sequence: Synthetic oligonucleotide
aaacuguguucacaguccg

SEQ ID NO: 3224414 - RNA, 19 nt, Artificial Sequence
  Description of Artificial Sequence: Synthetic oligonucleotide
uccaacaggagaaucaggu

SEQ ID NO: 3224415 - RNA, 19 nt, Artificial Sequence
  Description of Artificial Sequence: Synthetic oligonucleotide
aaucaguaaauaggacucc

SEQ ID NO: 3224416 - RNA, 19 nt, Artificial Sequence
  Description of Artificial Sequence: Synthetic oligonucleotide
auugccaaaccaaacacac

SEQ ID NO: 3224417 - RNA, 19 nt, Artificial Sequence
  Description of Artificial Sequence: Synthetic oligonucleotide
gagguuuaaacagaggcag

SEQ ID NO: 3224418 - RNA, 19 nt, Artificial Sequence
  Description of Artificial Sequence: Synthetic oligonucleotide
aagcaauggacacguaauc

SEQ ID NO: 3224419 - RNA, 19 nt, Artificial Sequence
  Description of Artificial Sequence: Synthetic oligonucleotide
agaaggaucauggagagga

SEQ ID NO: 3224420 - RNA, 19 nt, Artificial Sequence
  Description of Artificial Sequence: Synthetic oligonucleotide
ucuugagguuuaaacagag

SEQ ID NO: 3224421 - RNA, 19 nt, Artificial Sequence
  Description of Artificial Sequence: Synthetic oligonucleotide
caaucaguaaauaggacuc

SEQ ID NO: 3224422 - RNA, 19 nt, Artificial Sequence
  Description of Artificial Sequence: Synthetic oligonucleotide
ugagguuuaaacagaggca

SEQ ID NO: 3224423 - RNA, 19 nt, Artificial Sequence
  Description of Artificial Sequence: Synthetic oligonucleotide
aaccaaacacaccaagaug

SEQ ID NO: 3224424 - RNA, 19 nt, Artificial Sequence
  Description of Artificial Sequence: Synthetic oligonucleotide
cuuccuaaagucuuucccc

SEQ ID NO: 3224425 - RNA, 19 nt, Artificial Sequence
  Description of Artificial Sequence: Synthetic oligonucleotide
uucacaguccgcuucaucu

SEQ ID NO: 3224426 - RNA, 19 nt, Artificial Sequence
  Description of Artificial Sequence: Synthetic oligonucleotide
uccauugccaaaccaaaca

SEQ ID NO: 3224427 - RNA, 19 nt, Artificial Sequence
  Description of Artificial Sequence: Synthetic oligonucleotide
uuguccuggguacagcugg

SEQ ID NO: 3224428 - RNA, 19 nt, Artificial Sequence
  Description of Artificial Sequence: Synthetic oligonucleotide
gauagcuaaagcaauggac

SEQ ID NO: 3224429 - RNA, 19 nt, Artificial Sequence
  Description of Artificial Sequence: Synthetic oligonucleotide
caauagacaagugaggcag

SEQ ID NO: 3224430 - RNA, 19 nt, Artificial Sequence
  Description of Artificial Sequence: Synthetic oligonucleotide
aagacuccauugccaaacc

SEQ ID NO: 3224431 - RNA, 19 nt, Artificial Sequence
  Description of Artificial Sequence: Synthetic oligonucleotide
aagucuuuccccaaaagga

SEQ ID NO: 3224432 - RNA, 19 nt, Artificial Sequence
  Description of Artificial Sequence: Synthetic oligonucleotide
uaaagcaauggacacguaa

SEQ ID NO: 3224433 - RNA, 19 nt, Artificial Sequence
  Description of Artificial Sequence: Synthetic oligonucleotide
uuugaggaggcuuuguccu

SEQ ID NO: 3224434 - RNA, 19 nt, Artificial Sequence
  Description of Artificial Sequence: Synthetic oligonucleotide
agcaauggacacguaaucc

SEQ ID NO: 3224435 - RNA, 19 nt, Artificial Sequence
  Description of Artificial Sequence: Synthetic oligonucleotide
ucuucauacaucuguacuc

SEQ ID NO: 3224436 - RNA, 19 nt, Artificial Sequence
  Description of Artificial Sequence: Synthetic oligonucleotide
ucuuuccccaaaaggaaag

SEQ ID NO: 3224437 - RNA, 19 nt, Artificial Sequence
  Description of Artificial Sequence: Synthetic oligonucleotide
aaauaggacuccaacagga

SEQ ID NO: 3224438 - RNA, 19 nt, Artificial Sequence
  Description of Artificial Sequence: Synthetic oligonucleotide
agaaugcccuuuuauggac

SEQ ID NO: 3224439 - RNA, 19 nt, Artificial Sequence
  Description of Artificial Sequence: Synthetic oligonucleotide
ugugucagcagagaaagac

SEQ ID NO: 3224440 - RNA, 19 nt, Artificial Sequence
  Description of Artificial Sequence: Synthetic oligonucleotide
augucuugagguuuaaaca

SEQ ID NO: 3224441 - RNA, 19 nt, Artificial Sequence
  Description of Artificial Sequence: Synthetic oligonucleotide
uccagaaugcccuuuuaug

SEQ ID NO: 3224442 - RNA, 19 nt, Artificial Sequence
  Description of Artificial Sequence: Synthetic oligonucleotide
aagggguugaagcaacugu

SEQ ID NO: 3224443 - RNA, 19 nt, Artificial Sequence
  Description of Artificial Sequence: Synthetic oligonucleotide
gaaggcugccuccagaaug

SEQ ID NO: 3224444 - RNA, 19 nt, Artificial Sequence
  Description of Artificial Sequence: Synthetic oligonucleotide
aaaggcagcagaggaaauc

SEQ ID NO: 3224445 - RNA, 19 nt, Artificial Sequence
  Description of Artificial Sequence: Synthetic oligonucleotide
aagcagagggcuccaguac

SEQ ID NO: 3224446 - RNA, 19 nt, Artificial Sequence
  Description of Artificial Sequence: Synthetic oligonucleotide
ucccaauagacaagugagg

SEQ ID NO: 3224447 - RNA, 19 nt, Artificial Sequence
  Description of Artificial Sequence: Synthetic oligonucleotide
cuuuuauggacugucuugc

SEQ ID NO: 3224448 - RNA, 19 nt, Artificial Sequence
  Description of Artificial Sequence: Synthetic oligonucleotide
uaaucccaggauaacgcag

SEQ ID NO: 3224449 - RNA, 19 nt, Artificial Sequence
  Description of Artificial Sequence: Synthetic oligonucleotide
ugucagcagagaaagacuc

SEQ ID NO: 3224450 - RNA, 19 nt, Artificial Sequence
  Description of Artificial Sequence: Synthetic oligonucleotide
accaaacacaccaagauga

SEQ ID NO: 3224451 - RNA, 19 nt, Artificial Sequence
  Description of Artificial Sequence: Synthetic oligonucleotide
aaaggaaaggaagggguug

SEQ ID NO: 3224452 - RNA, 19 nt, Artificial Sequence
  Description of Artificial Sequence: Synthetic oligonucleotide
ccaagaugaaagcagaggg

SEQ ID NO: 3224453 - RNA, 19 nt, Artificial Sequence
  Description of Artificial Sequence: Synthetic oligonucleotide
aguacugaucugcagguca

SEQ ID NO: 3224454 - RNA, 19 nt, Artificial Sequence
  Description of Artificial Sequence: Synthetic oligonucleotide
caagaugaaagcagagggc

SEQ ID NO: 3224455 - RNA, 19 nt, Artificial Sequence
  Description of Artificial Sequence: Synthetic oligonucleotide
guccgcuucaucuuuaggc

SEQ ID NO: 3224456 - RNA, 19 nt, Artificial Sequence
  Description of Artificial Sequence: Synthetic oligonucleotide
uggagaaccaaacuguguu

SEQ ID NO: 3224457 - RNA, 19 nt, Artificial Sequence
  Description of Artificial Sequence: Synthetic oligonucleotide
aucuucauacaucuguacu

SEQ ID NO: 3224458 - RNA, 19 nt, Artificial Sequence
  Description of Artificial Sequence: Synthetic oligonucleotide
uccgcuucaucuuuaggcc

SEQ ID NO: 3224459 - RNA, 19 nt, Artificial Sequence
  Description of Artificial Sequence: Synthetic oligonucleotide
agucccaauagacaaguga

SEQ ID NO: 3224460 - RNA, 19 nt, Artificial Sequence
  Description of Artificial Sequence: Synthetic oligonucleotide
gaugaaagcagagggcucc

SEQ ID NO: 3224461 - RNA, 19 nt, Artificial Sequence
  Description of Artificial Sequence: Synthetic oligonucleotide
ucaguugaauuugugucag

SEQ ID NO: 3224462 - RNA, 19 nt, Artificial Sequence
  Description of Artificial Sequence: Synthetic oligonucleotide
aaagcaauggacacguaau

SEQ ID NO: 3224463 - RNA, 19 nt, Artificial Sequence
  Description of Artificial Sequence: Synthetic oligonucleotide
gucccaauagacaagugag

SEQ ID NO: 3224464 - RNA, 19 nt, Artificial Sequence
  Description of Artificial Sequence: Synthetic oligonucleotide
accaagaugaaagcagagg

SEQ ID NO: 3224465 - RNA, 19 nt, Artificial Sequence
  Description of Artificial Sequence: Synthetic oligonucleotide
guugaauuugugucagcag

SEQ ID NO: 3224466 - RNA, 19 nt, Artificial Sequence
  Description of Artificial Sequence: Synthetic oligonucleotide
aaagcagagggcuccagua

SEQ ID NO: 3224467 - RNA, 19 nt, Artificial Sequence
  Description of Artificial Sequence: Synthetic oligonucleotide
gacugucuugcuuucuucc

SEQ ID NO: 3224468 - RNA, 19 nt, Artificial Sequence
  Description of Artificial Sequence: Synthetic oligonucleotide
uuccuaaagucuuucccca

SEQ ID NO: 3224469 - RNA, 19 nt, Artificial Sequence
  Description of Artificial Sequence: Synthetic oligonucleotide
aguugaauuugugucagca

SEQ ID NO: 3224470 - RNA, 19 nt, Artificial Sequence
  Description of Artificial Sequence: Synthetic oligonucleotide
ccagaaugcccuuuuaugg

SEQ ID NO: 3224471 - RNA, 19 nt, Artificial Sequence
  Description of Artificial Sequence: Synthetic oligonucleotide
aaggcagcagaggaaauca

SEQ ID NO: 3224472 - RNA, 19 nt, Artificial Sequence
  Description of Artificial Sequence: Synthetic oligonucleotide
gauaacgcagcuucccuca

SEQ ID NO: 3224473 - RNA, 19 nt, Artificial Sequence
  Description of Artificial Sequence: Synthetic oligonucleotide
cagagaaggaucauggaga

SEQ ID NO: 3224474 - RNA, 19 nt, Artificial Sequence
  Description of Artificial Sequence: Synthetic oligonucleotide
aggagaaucaggugggcca

SEQ ID NO: 3224475 - RNA, 19 nt, Artificial Sequence
  Description of Artificial Sequence: Synthetic oligonucleotide
aucagccagggugagaugg

SEQ ID NO: 3224476 - RNA, 19 nt, Artificial Sequence
  Description of Artificial Sequence: Synthetic oligonucleotide
ugcuuucuuccuaaagucu

SEQ ID NO: 3224477 - RNA, 19 nt, Artificial Sequence
  Description of Artificial Sequence: Synthetic oligonucleotide
cuugagguuuaaacagagg

SEQ ID NO: 3224478 - RNA, 19 nt, Artificial Sequence
  Description of Artificial Sequence: Synthetic oligonucleotide
uuaaacagaggcagggguu

SEQ ID NO: 3224479 - RNA, 19 nt, Artificial Sequence
  Description of Artificial Sequence: Synthetic oligonucleotide
agaaccaaacuguguucac

SEQ ID NO: 3224480 - RNA, 19 nt, Artificial Sequence
  Description of Artificial Sequence: Synthetic oligonucleotide
cacagcaccaacccguugc

SEQ ID NO: 3224481 - RNA, 19 nt, Artificial Sequence
  Description of Artificial Sequence: Synthetic oligonucleotide
aauaggacuccaacaggag

SEQ ID NO: 3224482 - RNA, 19 nt, Artificial Sequence
  Description of Artificial Sequence: Synthetic oligonucleotide
cagauagcuaaagcaaugg

SEQ ID NO: 3224483 - RNA, 19 nt, Artificial Sequence
  Description of Artificial Sequence: Synthetic oligonucleotide
caguaaauaggacuccaac

SEQ ID NO: 3224484 - RNA, 19 nt, Artificial Sequence
  Description of Artificial Sequence: Synthetic oligonucleotide
gguuuaaacagaggcaggg

SEQ ID NO: 3224485 - RNA, 19 nt, Artificial Sequence
  Description of Artificial Sequence: Synthetic oligonucleotide
uaaacagaggcagggguug

SEQ ID NO: 3224486 - RNA, 19 nt, Artificial Sequence
  Description of Artificial Sequence: Synthetic oligonucleotide
uucaucuuuaggccagcca

SEQ ID NO: 3224487 - RNA, 19 nt, Artificial Sequence
  Description of Artificial Sequence: Synthetic oligonucleotide
ugaagcaacuguuggcaga

SEQ ID NO: 3224488 - RNA, 19 nt, Artificial Sequence
  Description of Artificial Sequence: Synthetic oligonucleotide
gaggcuuuguccuggguac

SEQ ID NO: 3224489 - RNA, 19 nt, Artificial Sequence
  Description of Artificial Sequence: Synthetic oligonucleotide
acagcaccaacccguugcc

SEQ ID NO: 3224490 - RNA, 19 nt, Artificial Sequence
  Description of Artificial Sequence: Synthetic oligonucleotide
uccugggucagcaaucagu

SEQ ID NO: 3224491 - RNA, 19 nt, Artificial Sequence
  Description of Artificial Sequence: Synthetic oligonucleotide
aauagauguaaauuaacac

SEQ ID NO: 3224492 - RNA, 19 nt, Artificial Sequence
  Description of Artificial Sequence: Synthetic oligonucleotide
auagauguaaauuaacacc

SEQ ID NO: 3224493 - RNA, 19 nt, Artificial Sequence
  Description of Artificial Sequence: Synthetic oligonucleotide
ugucuuguaagcaagagag

SEQ ID NO: 3224494 - RNA, 19 nt, Artificial Sequence
  Description of Artificial Sequence: Synthetic oligonucleotide
aaauguaggaauucuuagg

SEQ ID NO: 3224495 - RNA, 19 nt, Artificial Sequence
  Description of Artificial Sequence: Synthetic oligonucleotide
uagaucuucaauuuagggg

SEQ ID NO: 3224496 - RNA, 19 nt, Artificial Sequence
  Description of Artificial Sequence: Synthetic oligonucleotide
uguuccauauucuacagag

SEQ ID NO: 3224497 - RNA, 19 nt, Artificial Sequence
  Description of Artificial Sequence: Synthetic oligonucleotide
uagauguaaauuaacaccu

SEQ ID NO: 3224498 - RNA, 19 nt, Artificial Sequence
  Description of Artificial Sequence: Synthetic oligonucleotide
aaaauccuagguaaaagac

SEQ ID NO: 3224499 - RNA, 19 nt, Artificial Sequence
  Description of Artificial Sequence: Synthetic oligonucleotide
uguuagaucauccacacua

SEQ ID NO: 3224500 - RNA, 19 nt, Artificial Sequence
  Description of Artificial Sequence: Synthetic oligonucleotide
aaaccgaguaaucuguuuc

SEQ ID NO: 3224501 - RNA, 19 nt, Artificial Sequence
  Description of Artificial Sequence: Synthetic oligonucleotide
uucuaguauauucacugcg

SEQ ID NO: 3224502 - RNA, 19 nt, Artificial Sequence
  Description of Artificial Sequence: Synthetic oligonucleotide
agagucauagaauaccuuc

SEQ ID NO: 3224503 - RNA, 19 nt, Artificial Sequence
  Description of Artificial Sequence: Synthetic oligonucleotide
auuuugugggaaucgaucg

SEQ ID NO: 3224504 - RNA, 19 nt, Artificial Sequence
  Description of Artificial Sequence: Synthetic oligonucleotide
aaauuaacaccugugaacu

SEQ ID NO: 3224505 - RNA, 19 nt, Artificial Sequence
  Description of Artificial Sequence: Synthetic oligonucleotide
uaaaagacuacucucucga

SEQ ID NO: 3224506 - RNA, 19 nt, Artificial Sequence
  Description of Artificial Sequence: Synthetic oligonucleotide
aguauauucacugcgaucu

SEQ ID NO: 3224507 - RNA, 19 nt, Artificial Sequence
  Description of Artificial Sequence: Synthetic oligonucleotide
aauuugucucuuccuauuc

SEQ ID NO: 3224508 - RNA, 19 nt, Artificial Sequence
  Description of Artificial Sequence: Synthetic oligonucleotide
acuuuuaugccauaugcca

SEQ ID NO: 3224509 - RNA, 19 nt, Artificial Sequence
  Description of Artificial Sequence: Synthetic oligonucleotide
uuuccggccagaauaagag

SEQ ID NO: 3224510 - RNA, 19 nt, Artificial Sequence
  Description of Artificial Sequence: Synthetic oligonucleotide
ugcgaucugacacuuaccc

SEQ ID NO: 3224511 - RNA, 19 nt, Artificial Sequence
  Description of Artificial Sequence: Synthetic oligonucleotide
aauaauagauguaaauuaa

SEQ ID NO: 3224512 - RNA, 19 nt, Artificial Sequence
  Description of Artificial Sequence: Synthetic oligonucleotide
auaauguuggccaaaauga

SEQ ID NO: 3224513 - RNA, 19 nt, Artificial Sequence
  Description of Artificial Sequence: Synthetic oligonucleotide
aagacuacucucucgauau

SEQ ID NO: 3224514 - RNA, 19 nt, Artificial Sequence
  Description of Artificial Sequence: Synthetic oligonucleotide
aaccgaguaaucuguuucg

SEQ ID NO: 3224515 - RNA, 19 nt, Artificial Sequence
  Description of Artificial Sequence: Synthetic oligonucleotide
caaacugugauuacaguug

SEQ ID NO: 3224516 - RNA, 19 nt, Artificial Sequence
  Description of Artificial Sequence: Synthetic oligonucleotide
gauuagcuugccuucagcc

SEQ ID NO: 3224517 - RNA, 19 nt, Artificial Sequence
  Description of Artificial Sequence: Synthetic oligonucleotide
aagcaagagaguuugcaca

SEQ ID NO: 3224518 - RNA, 19 nt, Artificial Sequence
  Description of Artificial Sequence: Synthetic oligonucleotide
gaaaauccuagguaaaaga

SEQ ID NO: 3224519 - RNA, 19 nt, Artificial Sequence
  Description of Artificial Sequence: Synthetic oligonucleotide
aacuucacugacauagcgc

SEQ ID NO: 3224520 - RNA, 19 nt, Artificial Sequence
  Description of Artificial Sequence: Synthetic oligonucleotide
uacuuuuaugccauaugcc

SEQ ID NO: 3224521 - RNA, 19 nt, Artificial Sequence
  Description of Artificial Sequence: Synthetic oligonucleotide
uuuuccauguugucaaccc

SEQ ID NO: 3224522 - RNA, 19 nt, Artificial Sequence
  Description of Artificial Sequence: Synthetic oligonucleotide
uuacccauuccauagcuca

SEQ ID NO: 3224523 - RNA, 19 nt, Artificial Sequence
  Description of Artificial Sequence: Synthetic oligonucleotide
ugcugagaaucuuugaaug

SEQ ID NO: 3224524 - RNA, 19 nt, Artificial Sequence
  Description of Artificial Sequence: Synthetic oligonucleotide
auaauagauguaaauuaac

SEQ ID NO: 3224525 - RNA, 19 nt, Artificial Sequence
  Description of Artificial Sequence: Synthetic oligonucleotide
guaaaagacuacucucucg

SEQ ID NO: 3224526 - RNA, 19 nt, Artificial Sequence
  Description of Artificial Sequence: Synthetic oligonucleotide
uauagaaaugucucgcuaa

SEQ ID NO: 3224527 - RNA, 19 nt, Artificial Sequence
  Description of Artificial Sequence: Synthetic oligonucleotide
uuuguaaacuugaccaagu

SEQ ID NO: 3224528 - RNA, 19 nt, Artificial Sequence
  Description of Artificial Sequence: Synthetic oligonucleotide
auuacuuuuaugccauaug

SEQ ID NO: 3224529 - RNA, 19 nt, Artificial Sequence
  Description of Artificial Sequence: Synthetic oligonucleotide
aaugugccuucuuagauua

SEQ ID NO: 3224530 - RNA, 19 nt, Artificial Sequence
  Description of Artificial Sequence: Synthetic oligonucleotide
ugucauaccuucuuuggga

SEQ ID NO: 3224531 - RNA, 19 nt, Artificial Sequence
  Description of Artificial Sequence: Synthetic oligonucleotide
ucuccaauaauagauguaa

SEQ ID NO: 3224532 - RNA, 19 nt, Artificial Sequence
  Description of Artificial Sequence: Synthetic oligonucleotide
uccaauaauagauguaaau

SEQ ID NO: 3224533 - RNA, 19 nt, Artificial Sequence
  Description of Artificial Sequence: Synthetic oligonucleotide
uccggccagaauaagaggc

SEQ ID NO: 3224534 - RNA, 19 nt, Artificial Sequence
  Description of Artificial Sequence: Synthetic oligonucleotide
cuuuuaugccauaugccag

SEQ ID NO: 3224535 - RNA, 19 nt, Artificial Sequence
  Description of Artificial Sequence: Synthetic oligonucleotide
gacagaugaaugcauuuug

SEQ ID NO: 3224536 - RNA, 19 nt, Artificial Sequence
  Description of Artificial Sequence: Synthetic oligonucleotide
caauaauagauguaaauua

SEQ ID NO: 3224537 - RNA, 19 nt, Artificial Sequence
  Description of Artificial Sequence: Synthetic oligonucleotide
acuccacucugccagaagg

SEQ ID NO: 3224538 - RNA, 19 nt, Artificial Sequence
  Description of Artificial Sequence: Synthetic oligonucleotide
cugagaauaauguuggcca

SEQ ID NO: 3224539 - RNA, 19 nt, Artificial Sequence
  Description of Artificial Sequence: Synthetic oligonucleotide
uguguuagaucauccacac

SEQ ID NO: 3224540 - RNA, 19 nt, Artificial Sequence
  Description of Artificial Sequence: Synthetic oligonucleotide
aaugucucgcuaaagcuug

SEQ ID NO: 3224541 - RNA, 19 nt, Artificial Sequence
  Description of Artificial Sequence: Synthetic oligonucleotide
ugugcuguaacaggaaggc

SEQ ID NO: 3224542 - RNA, 19 nt, Artificial Sequence
  Description of Artificial Sequence: Synthetic oligonucleotide
caagaaauagggaucagga

SEQ ID NO: 3224543 - RNA, 19 nt, Artificial Sequence
  Description of Artificial Sequence: Synthetic oligonucleotide
auagaauaccuucucuucu

SEQ ID NO: 3224544 - RNA, 19 nt, Artificial Sequence
  Description of Artificial Sequence: Synthetic oligonucleotide
cugaccauccaguaggcgc

SEQ ID NO: 3224545 - RNA, 19 nt, Artificial Sequence
  Description of Artificial Sequence: Synthetic oligonucleotide
ucagggacgagacauacuu

SEQ ID NO: 3224546 - RNA, 19 nt, Artificial Sequence
  Description of Artificial Sequence: Synthetic oligonucleotide
aaacuugaccaaguguauc

SEQ ID NO: 3224547 - RNA, 19 nt, Artificial Sequence
  Description of Artificial Sequence: Synthetic oligonucleotide
ugaucuagcucuuuguuuu

SEQ ID NO: 3224548 - RNA, 19 nt, Artificial Sequence
  Description of Artificial Sequence: Synthetic oligonucleotide
ucaguguguuaaauggcag

SEQ ID NO: 3224549 - RNA, 19 nt, Artificial Sequence
  Description of Artificial Sequence: Synthetic oligonucleotide
ucgauuucggccuugugaa

SEQ ID NO: 3224550 - RNA, 19 nt, Artificial Sequence
  Description of Artificial Sequence: Synthetic oligonucleotide
aagaaauagggaucaggau

SEQ ID NO: 3224551 - RNA, 19 nt, Artificial Sequence
  Description of Artificial Sequence: Synthetic oligonucleotide
ucuagcucuuuguuuuccg

SEQ ID NO: 3224552 - RNA, 19 nt, Artificial Sequence
  Description of Artificial Sequence: Synthetic oligonucleotide
auacuuuucuaugagugug

SEQ ID NO: 3224553 - RNA, 19 nt, Artificial Sequence
  Description of Artificial Sequence: Synthetic oligonucleotide
auagucuuucacuauacuu

SEQ ID NO: 3224554 - RNA, 19 nt, Artificial Sequence
  Description of Artificial Sequence: Synthetic oligonucleotide
cauuuugugggaaucgauc

SEQ ID NO: 3224555 - RNA, 19 nt, Artificial Sequence
  Description of Artificial Sequence: Synthetic oligonucleotide
ugaacaagucugugaagcc

SEQ ID NO: 3224556 - RNA, 19 nt, Artificial Sequence
  Description of Artificial Sequence: Synthetic oligonucleotide
uuuucuuggccagauuugc

SEQ ID NO: 3224557 - RNA, 19 nt, Artificial Sequence
  Description of Artificial Sequence: Synthetic oligonucleotide
ucacuauacuuuuccaugu

SEQ ID NO: 3224558 - RNA, 19 nt, Artificial Sequence
  Description of Artificial Sequence: Synthetic oligonucleotide
uuggaacugggcuuuagac

SEQ ID NO: 3224559 - RNA, 19 nt, Artificial Sequence
  Description of Artificial Sequence: Synthetic oligonucleotide
agaguuugcacaucaugcu

SEQ ID NO: 3224560 - RNA, 19 nt, Artificial Sequence
  Description of Artificial Sequence: Synthetic oligonucleotide
acuaaugugccuucuuaga

SEQ ID NO: 3224561 - RNA, 19 nt, Artificial Sequence
  Description of Artificial Sequence: Synthetic oligonucleotide
agaacagugugcucggcug

SEQ ID NO: 3224562 - RNA, 19 nt, Artificial Sequence
  Description of Artificial Sequence: Synthetic oligonucleotide
gaaucgaucgcuuccugca

SEQ ID NO: 3224563 - RNA, 19 nt, Artificial Sequence
  Description of Artificial Sequence: Synthetic oligonucleotide
ugcacaugugcuuguacug

SEQ ID NO: 3224564 - RNA, 19 nt, Artificial Sequence
  Description of Artificial Sequence: Synthetic oligonucleotide
aucgauucagggacgagac

SEQ ID NO: 3224565 - RNA, 19 nt, Artificial Sequence
  Description of Artificial Sequence: Synthetic oligonucleotide
gacggaaggagacuuucug

SEQ ID NO: 3224566 - RNA, 19 nt, Artificial Sequence
  Description of Artificial Sequence: Synthetic oligonucleotide
cagaugaaugcauuuugug

SEQ ID NO: 3224567 - RNA, 19 nt, Artificial Sequence
  Description of Artificial Sequence: Synthetic oligonucleotide
gaucgcuuccugcagucag

SEQ ID NO: 3224568 - RNA, 19 nt, Artificial Sequence
  Description of Artificial Sequence: Synthetic oligonucleotide
gugucauaccuucuuuggg

SEQ ID NO: 3224569 - RNA, 19 nt, Artificial Sequence
  Description of Artificial Sequence: Synthetic oligonucleotide
cuagcucuuuguuuuccgg

SEQ ID NO: 3224570 - RNA, 19 nt, Artificial Sequence
  Description of Artificial Sequence: Synthetic oligonucleotide
uugaccaaguguaucugaa

SEQ ID NO: 3224571 - RNA, 19 nt, Artificial Sequence
  Description of Artificial Sequence: Synthetic oligonucleotide
aggccucuguuucauaguc

SEQ ID NO: 3224572 - RNA, 19 nt, Artificial Sequence
  Description of Artificial Sequence: Synthetic oligonucleotide
auucagggacgagacauac

SEQ ID NO: 3224573 - RNA, 19 nt, Artificial Sequence
  Description of Artificial Sequence: Synthetic oligonucleotide
gacuagaaagagugucucc

SEQ ID NO: 3224574 - RNA, 19 nt, Artificial Sequence
  Description of Artificial Sequence: Synthetic oligonucleotide
acuuacccauuccauagcu

SEQ ID NO: 3224575 - RNA, 19 nt, Artificial Sequence
  Description of Artificial Sequence: Synthetic oligonucleotide
cuucuuugggacuuccgug

SEQ ID NO: 3224576 - RNA, 19 nt, Artificial Sequence
  Description of Artificial Sequence: Synthetic oligonucleotide
auauagaaaugucucgcua

SEQ ID NO: 3224577 - RNA, 19 nt, Artificial Sequence
  Description of Artificial Sequence: Synthetic oligonucleotide
auuaacaccugugaacuaa

SEQ ID NO: 3224578 - RNA, 19 nt, Artificial Sequence
  Description of Artificial Sequence: Synthetic oligonucleotide
uuucccacacuacuccacu

SEQ ID NO: 3224579 - RNA, 19 nt, Artificial Sequence
  Description of Artificial Sequence: Synthetic oligonucleotide
agcagugcuaaaguucuuc

SEQ ID NO: 3224580 - RNA, 19 nt, Artificial Sequence
  Description of Artificial Sequence: Synthetic oligonucleotide
aaaugucucgcuaaagcuu

SEQ ID NO: 3224581 - RNA, 19 nt, Artificial Sequence
  Description of Artificial Sequence: Synthetic oligonucleotide
uccuagguaaaagacuacu

SEQ ID NO: 3224582 - RNA, 19 nt, Artificial Sequence
  Description of Artificial Sequence: Synthetic oligonucleotide
ugagaauaauguuggccaa

SEQ ID NO: 3224583 - RNA, 19 nt, Artificial Sequence
  Description of Artificial Sequence: Synthetic oligonucleotide
uccacacuaauaagucuac

SEQ ID NO: 3224584 - RNA, 19 nt, Artificial Sequence
  Description of Artificial Sequence: Synthetic oligonucleotide
aaaagacuacucucucgau

SEQ ID NO: 3224585 - RNA, 19 nt, Artificial Sequence
  Description of Artificial Sequence: Synthetic oligonucleotide
guuuggaugugucauaccu

SEQ ID NO: 3224586 - RNA, 19 nt, Artificial Sequence
  Description of Artificial Sequence: Synthetic oligonucleotide
ucuuccuauuccagaguca

SEQ ID NO: 3224587 - RNA, 19 nt, Artificial Sequence
  Description of Artificial Sequence: Synthetic oligonucleotide
agagcagugcuaaaguucu

SEQ ID NO: 3224588 - RNA, 19 nt, Artificial Sequence
  Description of Artificial Sequence: Synthetic oligonucleotide
aucuagcucuuuguuuucc

SEQ ID NO: 3224589 - RNA, 19 nt, Artificial Sequence
  Description of Artificial Sequence: Synthetic oligonucleotide
caugcaaaugcuauggacu

SEQ ID NO: 3224590 - RNA, 19 nt, Artificial Sequence
  Description of Artificial Sequence: Synthetic oligonucleotide
uaaugugccuucuuagauu

SEQ ID NO: 3224591 - RNA, 19 nt, Artificial Sequence
  Description of Artificial Sequence: Synthetic oligonucleotide
aauuuuaaggucuaauacg

SEQ ID NO: 3224592 - RNA, 19 nt, Artificial Sequence
  Description of Artificial Sequence: Synthetic oligonucleotide
aguuuuaaccuucagaagc

SEQ ID NO: 3224593 - RNA, 19 nt, Artificial Sequence
  Description of Artificial Sequence: Synthetic oligonucleotide
aauauauauauauauauau

SEQ ID NO: 3224594 - RNA, 19 nt, Artificial Sequence
  Description of Artificial Sequence: Synthetic oligonucleotide
uauauauauauauauauga

SEQ ID NO: 3224595 - RNA, 19 nt, Artificial Sequence
  Description of Artificial Sequence: Synthetic oligonucleotide
aauauauugaucugaagug

SEQ ID NO: 3224596 - RNA, 19 nt, Artificial Sequence
  Description of Artificial Sequence: Synthetic oligonucleotide
auauauauauauaugaugg

SEQ ID NO: 3224597 - RNA, 19 nt, Artificial Sequence
  Description of Artificial Sequence: Synthetic oligonucleotide
uauauauauauauauauau

SEQ ID NO: 3224598 - RNA, 19 nt, Artificial Sequence
  Description of Artificial Sequence: Synthetic oligonucleotide
uauauauauauauaugaug

SEQ ID NO: 3224599 - RNA, 19 nt, Artificial Sequence
  Description of Artificial Sequence: Synthetic oligonucleotide
acuucaguuauucacacac

SEQ ID NO: 3224600 - RNA, 19 nt, Artificial Sequence
  Description of Artificial Sequence: Synthetic oligonucleotide
acauguuacagguaaaugg

SEQ ID NO: 3224601 - RNA, 19 nt, Artificial Sequence
  Description of Artificial Sequence: Synthetic oligonucleotide
auauauaugauggaugggc

SEQ ID NO: 3224602 - RNA, 19 nt, Artificial Sequence
  Description of Artificial Sequence: Synthetic oligonucleotide
aaugaagcauucugggugc

SEQ ID NO: 3224603 - RNA, 19 nt, Artificial Sequence
  Description of Artificial Sequence: Synthetic oligonucleotide
agaauuuagugauaauggc

SEQ ID NO: 3224604 - RNA, 19 nt, Artificial Sequence
  Description of Artificial Sequence: Synthetic oligonucleotide
caugaauccauuuaguggc

SEQ ID NO: 3224605 - RNA, 19 nt, Artificial Sequence
  Description of Artificial Sequence: Synthetic oligonucleotide
aaggaauauauauauauau

SEQ ID NO: 3224606 - RNA, 19 nt, Artificial Sequence
  Description of Artificial Sequence: Synthetic oligonucleotide
uuaaggaauauauauauau

SEQ ID NO: 3224607 - RNA, 19 nt, Artificial Sequence
  Description of Artificial Sequence: Synthetic oligonucleotide
ucaugaauccauuuagugg

SEQ ID NO: 3224608 - RNA, 19 nt, Artificial Sequence
  Description of Artificial Sequence: Synthetic oligonucleotide
ucauauuucgggcuggacg

SEQ ID NO: 3224609 - RNA, 19 nt, Artificial Sequence
  Description of Artificial Sequence: Synthetic oligonucleotide
aaagucugcaaacacaccu

SEQ ID NO: 3224610 - RNA, 19 nt, Artificial Sequence
  Description of Artificial Sequence: Synthetic oligonucleotide
aaagccucagauuuugauc

SEQ ID NO: 3224611 - RNA, 19 nt, Artificial Sequence
  Description of Artificial Sequence: Synthetic oligonucleotide
uaaaugacaguaaaguaac

SEQ ID NO: 3224612 - RNA, 19 nt, Artificial Sequence
  Description of Artificial Sequence: Synthetic oligonucleotide
uaagaaugcugguauaccg

SEQ ID NO: 3224613 - RNA, 19 nt, Artificial Sequence
  Description of Artificial Sequence: Synthetic oligonucleotide
acuacugucccacaauggc

SEQ ID NO: 3224614 - RNA, 19 nt, Artificial Sequence
  Description of Artificial Sequence: Synthetic oligonucleotide
cauguuacagguaaauggg

SEQ ID NO: 3224615 - RNA, 19 nt, Artificial Sequence
  Description of Artificial Sequence: Synthetic oligonucleotide
uauugaucugaagugaugg

SEQ ID NO: 3224616 - RNA, 19 nt, Artificial Sequence
  Description of Artificial Sequence: Synthetic oligonucleotide
gaaugaagcauucugggug

SEQ ID NO: 3224617 - RNA, 19 nt, Artificial Sequence
  Description of Artificial Sequence: Synthetic oligonucleotide
uaacuaugggccaacaugc

SEQ ID NO: 3224618 - RNA, 19 nt, Artificial Sequence
  Description of Artificial Sequence: Synthetic oligonucleotide
uauaccgaagccauccugg

SEQ ID NO: 3224619 - RNA, 19 nt, Artificial Sequence
  Description of Artificial Sequence: Synthetic oligonucleotide
agaaugaacaaucaacugu

SEQ ID NO: 3224620 - RNA, 19 nt, Artificial Sequence
  Description of Artificial Sequence: Synthetic oligonucleotide
uuaauagaccaucacagaa

SEQ ID NO: 3224621 - RNA, 19 nt, Artificial Sequence
  Description of Artificial Sequence: Synthetic oligonucleotide
uauacaagacuacaaauua

SEQ ID NO: 3224622 - RNA, 19 nt, Artificial Sequence
  Description of Artificial Sequence: Synthetic oligonucleotide
uuuauaggcacagacaugu

SEQ ID NO: 3224623 - RNA, 19 nt, Artificial Sequence
  Description of Artificial Sequence: Synthetic oligonucleotide
uugugaauggcuuugacaa

SEQ ID NO: 3224624 - RNA, 19 nt, Artificial Sequence
  Description of Artificial Sequence: Synthetic oligonucleotide
uguacugcauauuugaaaa

SEQ ID NO: 3224625 - RNA, 19 nt, Artificial Sequence
  Description of Artificial Sequence: Synthetic oligonucleotide
aaagaguccaguuuucagu

SEQ ID NO: 3224626 - RNA, 19 nt, Artificial Sequence
  Description of Artificial Sequence: Synthetic oligonucleotide
aaugacaguaaaguaacug

SEQ ID NO: 3224627 - RNA, 19 nt, Artificial Sequence
  Description of Artificial Sequence: Synthetic oligonucleotide
uuuaacauccucccuccgg

SEQ ID NO: 3224628 - RNA, 19 nt, Artificial Sequence
  Description of Artificial Sequence: Synthetic oligonucleotide
uauuuuagccagacaauag

SEQ ID NO: 3224629 - RNA, 19 nt, Artificial Sequence
  Description of Artificial Sequence: Synthetic oligonucleotide
aagguaaggacaucaccgg

SEQ ID NO: 3224630 - RNA, 19 nt, Artificial Sequence
  Description of Artificial Sequence: Synthetic oligonucleotide
uugauugugacucuucuuc

SEQ ID NO: 3224631 - RNA, 19 nt, Artificial Sequence
  Description of Artificial Sequence: Synthetic oligonucleotide
aacaaucaacuguaggcag

SEQ ID NO: 3224632 - RNA, 19 nt, Artificial Sequence
  Description of Artificial Sequence: Synthetic oligonucleotide
aggaguucauccuuuauag

SEQ ID NO: 3224633 - RNA, 19 nt, Artificial Sequence
  Description of Artificial Sequence: Synthetic oligonucleotide
auccuuuauaggcacagac

SEQ ID NO: 3224634 - RNA, 19 nt, Artificial Sequence
  Description of Artificial Sequence: Synthetic oligonucleotide
cauaagauuuacauuguac

SEQ ID NO: 3224635 - RNA, 19 nt, Artificial Sequence
  Description of Artificial Sequence: Synthetic oligonucleotide
ugaaaggugaaauauuuua

SEQ ID NO: 3224636 - RNA, 19 nt, Artificial Sequence
  Description of Artificial Sequence: Synthetic oligonucleotide
uuuuggccaaucuucagag

SEQ ID NO: 3224637 - RNA, 19 nt, Artificial Sequence
  Description of Artificial Sequence: Synthetic oligonucleotide
acuauaaucuccccaaacu

SEQ ID NO: 3224638 - RNA, 19 nt, Artificial Sequence
  Description of Artificial Sequence: Synthetic oligonucleotide
cuaacuaugggccaacaug

SEQ ID NO: 3224639 - RNA, 19 nt, Artificial Sequence
  Description of Artificial Sequence: Synthetic oligonucleotide
uauauaugauggaugggca

SEQ ID NO: 3224640 - RNA, 19 nt, Artificial Sequence
  Description of Artificial Sequence: Synthetic oligonucleotide
uguaacguguuugugaaug

SEQ ID NO: 3224641 - RNA, 19 nt, Artificial Sequence
  Description of Artificial Sequence: Synthetic oligonucleotide
aauugaggcagccuacucu

SEQ ID NO: 3224642 - RNA, 19 nt, Artificial Sequence
  Description of Artificial Sequence: Synthetic oligonucleotide
uauauauauauaugaugga

SEQ ID NO: 3224643 - RNA, 19 nt, Artificial Sequence
  Description of Artificial Sequence: Synthetic oligonucleotide
uaauacguaauuuggacua

SEQ ID NO: 3224644 - RNA, 19 nt, Artificial Sequence
  Description of Artificial Sequence: Synthetic oligonucleotide
aaacacaccuugcagguga

SEQ ID NO: 3224645 - RNA, 19 nt, Artificial Sequence
  Description of Artificial Sequence: Synthetic oligonucleotide
uuaacauccucccuccggc

SEQ ID NO: 3224646 - RNA, 19 nt, Artificial Sequence
  Description of Artificial Sequence: Synthetic oligonucleotide
cacucuucgcauuuaaagg

SEQ ID NO: 3224647 - RNA, 19 nt, Artificial Sequence
  Description of Artificial Sequence: Synthetic oligonucleotide
aggucuaauacguaauuug

SEQ ID NO: 3224648 - RNA, 19 nt, Artificial Sequence
  Description of Artificial Sequence: Synthetic oligonucleotide
aaguucugagguuuggcug

SEQ ID NO: 3224649 - RNA, 19 nt, Artificial Sequence
  Description of Artificial Sequence: Synthetic oligonucleotide
ucugcaaacacaccuugca

SEQ ID NO: 3224650 - RNA, 19 nt, Artificial Sequence
  Description of Artificial Sequence: Synthetic oligonucleotide
gaaaccacuauaaucuccc

SEQ ID NO: 3224651 - RNA, 19 nt, Artificial Sequence
  Description of Artificial Sequence: Synthetic oligonucleotide
auauauauauauauauaug

SEQ ID NO: 3224652 - RNA, 19 nt, Artificial Sequence
  Description of Artificial Sequence: Synthetic oligonucleotide
aacauccucccuccggccc

SEQ ID NO: 3224653 - RNA, 19 nt, Artificial Sequence
  Description of Artificial Sequence: Synthetic oligonucleotide
aauuguuuccuuacgccuc

SEQ ID NO: 3224654 - RNA, 19 nt, Artificial Sequence
  Description of Artificial Sequence: Synthetic oligonucleotide
agagguuuaacuguaacgu

SEQ ID NO: 3224655 - RNA, 19 nt, Artificial Sequence
  Description of Artificial Sequence: Synthetic oligonucleotide
uggcgcuccuauaugaugg

SEQ ID NO: 3224656 - RNA, 19 nt, Artificial Sequence
  Description of Artificial Sequence: Synthetic oligonucleotide
aaaccacuauaaucucccc

SEQ ID NO: 3224657 - RNA, 19 nt, Artificial Sequence
  Description of Artificial Sequence: Synthetic oligonucleotide
guuauucacacacauguca

SEQ ID NO: 3224658 - RNA, 19 nt, Artificial Sequence
  Description of Artificial Sequence: Synthetic oligonucleotide
gaagugaugguauauuuaa

SEQ ID NO: 3224659 - RNA, 19 nt, Artificial Sequence
  Description of Artificial Sequence: Synthetic oligonucleotide
guuacagguaaaugggucc

SEQ ID NO: 3224660 - RNA, 19 nt, Artificial Sequence
  Description of Artificial Sequence: Synthetic oligonucleotide
auaggcacagacauguuac

SEQ ID NO: 3224661 - RNA, 19 nt, Artificial Sequence
  Description of Artificial Sequence: Synthetic oligonucleotide
cuauaaucuccccaaacug

SEQ ID NO: 3224662 - RNA, 19 nt, Artificial Sequence
  Description of Artificial Sequence: Synthetic oligonucleotide
aauggcuuugacaagaguu

SEQ ID NO: 3224663 - RNA, 19 nt, Artificial Sequence
  Description of Artificial Sequence: Synthetic oligonucleotide
cucuggacuaacuaugggc

SEQ ID NO: 3224664 - RNA, 19 nt, Artificial Sequence
  Description of Artificial Sequence: Synthetic oligonucleotide
aagacucuggacuaacuau

SEQ ID NO: 3224665 - RNA, 19 nt, Artificial Sequence
  Description of Artificial Sequence: Synthetic oligonucleotide
cuuauuaauagaccaucac

SEQ ID NO: 3224666 - RNA, 19 nt, Artificial Sequence
  Description of Artificial Sequence: Synthetic oligonucleotide
uaugauggaguguuguaga

SEQ ID NO: 3224667 - RNA, 19 nt, Artificial Sequence
  Description of Artificial Sequence: Synthetic oligonucleotide
uaaggaauauauauauaua

SEQ ID NO: 3224668 - RNA, 19 nt, Artificial Sequence
  Description of Artificial Sequence: Synthetic oligonucleotide
aaaagccucagauuuugau

SEQ ID NO: 3224669 - RNA, 19 nt, Artificial Sequence
  Description of Artificial Sequence: Synthetic oligonucleotide
uguugaggagucuaucacc

SEQ ID NO: 3224670 - RNA, 19 nt, Artificial Sequence
  Description of Artificial Sequence: Synthetic oligonucleotide
aauacguaauuuggacuac

SEQ ID NO: 3224671 - RNA, 19 nt, Artificial Sequence
  Description of Artificial Sequence: Synthetic oligonucleotide
uuggccaaucuucagagaa

SEQ ID NO: 3224672 - RNA, 19 nt, Artificial Sequence
  Description of Artificial Sequence: Synthetic oligonucleotide
uaauagaccaucacagaau

SEQ ID NO: 3224673 - RNA, 19 nt, Artificial Sequence
  Description of Artificial Sequence: Synthetic oligonucleotide
agauuuacauuguacugca

SEQ ID NO: 3224674 - RNA, 19 nt, Artificial Sequence
  Description of Artificial Sequence: Synthetic oligonucleotide
agagaaugaacaaucaacu

SEQ ID NO: 3224675 - RNA, 19 nt, Artificial Sequence
  Description of Artificial Sequence: Synthetic oligonucleotide
auauauauauaugauggau

SEQ ID NO: 3224676 - RNA, 19 nt, Artificial Sequence
  Description of Artificial Sequence: Synthetic oligonucleotide
uguuacagguaaauggguc

SEQ ID NO: 3224677 - RNA, 19 nt, Artificial Sequence
  Description of Artificial Sequence: Synthetic oligonucleotide
uuucucauauuucgggcug

SEQ ID NO: 3224678 - RNA, 19 nt, Artificial Sequence
  Description of Artificial Sequence: Synthetic oligonucleotide
auuaauagaccaucacaga

SEQ ID NO: 3224679 - RNA, 19 nt, Artificial Sequence
  Description of Artificial Sequence: Synthetic oligonucleotide
uacuacugucccacaaugg

SEQ ID NO: 3224680 - RNA, 19 nt, Artificial Sequence
  Description of Artificial Sequence: Synthetic oligonucleotide
cacagaaugaagcauucug

SEQ ID NO: 3224681 - RNA, 19 nt, Artificial Sequence
  Description of Artificial Sequence: Synthetic oligonucleotide
uucagagaaugaacaauca

SEQ ID NO: 3224682 - RNA, 19 nt, Artificial Sequence
  Description of Artificial Sequence: Synthetic oligonucleotide
guggaaauucucuagacaa

SEQ ID NO: 3224683 - RNA, 19 nt, Artificial Sequence
  Description of Artificial Sequence: Synthetic oligonucleotide
auuuacauuguacugcaua

SEQ ID NO: 3224684 - RNA, 19 nt, Artificial Sequence
  Description of Artificial Sequence: Synthetic oligonucleotide
uuggacuacaggaacuugu

SEQ ID NO: 3224685 - RNA, 19 nt, Artificial Sequence
  Description of Artificial Sequence: Synthetic oligonucleotide
aaccacuauaaucucccca

SEQ ID NO: 3224686 - RNA, 19 nt, Artificial Sequence
  Description of Artificial Sequence: Synthetic oligonucleotide
aagaguccaguuuucaguu

SEQ ID NO: 3224687 - RNA, 19 nt, Artificial Sequence
  Description of Artificial Sequence: Synthetic oligonucleotide
ugagauuucaggugcucca

SEQ ID NO: 3224688 - RNA, 19 nt, Artificial Sequence
  Description of Artificial Sequence: Synthetic oligonucleotide
aaggacaucaccggcagga

SEQ ID NO: 3224689 - RNA, 19 nt, Artificial Sequence
  Description of Artificial Sequence: Synthetic oligonucleotide
auuaacucuucguggaaga

SEQ ID NO: 3224690 - RNA, 19 nt, Artificial Sequence
  Description of Artificial Sequence: Synthetic oligonucleotide
ugguauaccgaagccaucc

SEQ ID NO: 3224691 - RNA, 19 nt, Artificial Sequence
  Description of Artificial Sequence: Synthetic oligonucleotide
uagaaaauaaaauaaauaa

SEQ ID NO: 3224692 - RNA, 19 nt, Artificial Sequence
  Description of Artificial Sequence: Synthetic oligonucleotide
gaaaauaaaauaaauaaaa

SEQ ID NO: 3224693 - RNA, 19 nt, Artificial Sequence
  Description of Artificial Sequence: Synthetic oligonucleotide
aucucugugaguucgagac

SEQ ID NO: 3224694 - RNA, 19 nt, Artificial Sequence
  Description of Artificial Sequence: Synthetic oligonucleotide
ugucuagaaaauaaaauaa

SEQ ID NO: 3224695 - RNA, 19 nt, Artificial Sequence
  Description of Artificial Sequence: Synthetic oligonucleotide
ucuagaaaauaaaauaaau

SEQ ID NO: 3224696 - RNA, 19 nt, Artificial Sequence
  Description of Artificial Sequence: Synthetic oligonucleotide
aaucccagcacaugggagg

SEQ ID NO: 3224697 - RNA, 19 nt, Artificial Sequence
  Description of Artificial Sequence: Synthetic oligonucleotide
uuuuaugagggucacggug

SEQ ID NO: 3224698 - RNA, 19 nt, Artificial Sequence
  Description of Artificial Sequence: Synthetic oligonucleotide
cuuuaaucccagcacaugg

SEQ ID NO: 3224699 - RNA, 19 nt, Artificial Sequence
  Description of Artificial Sequence: Synthetic oligonucleotide
uuuaaucccagcacauggg

SEQ ID NO: 3224700 - RNA, 19 nt, Artificial Sequence
  Description of Artificial Sequence: Synthetic oligonucleotide
agaaacucugucuagaaaa

SEQ ID NO: 3224701 - RNA, 19 nt, Artificial Sequence
  Description of Artificial Sequence: Synthetic oligonucleotide
ucugucuagaaaauaaaau

SEQ ID NO: 3224702 - RNA, 19 nt, Artificial Sequence
  Description of Artificial Sequence: Synthetic oligonucleotide
acuuguaacuccugggugg

SEQ ID NO: 3224703 - RNA, 19 nt, Artificial Sequence
  Description of Artificial Sequence: Synthetic oligonucleotide
uccagagcuacacagagaa

SEQ ID NO: 3224704 - RNA, 19 nt, Artificial Sequence
  Description of Artificial Sequence: Synthetic oligonucleotide
uuuaugagggucacggugu

SEQ ID NO: 3224705 - RNA, 19 nt, Artificial Sequence
  Description of Artificial Sequence: Synthetic oligonucleotide
acucacaagcacuuguaac

SEQ ID NO: 3224706 - RNA, 19 nt, Artificial Sequence
  Description of Artificial Sequence: Synthetic oligonucleotide
acaccuuuaaucccagcac

SEQ ID NO: 3224707 - RNA, 19 nt, Artificial Sequence
  Description of Artificial Sequence: Synthetic oligonucleotide
aagcacuuguaacuccugg

SEQ ID NO: 3224708 - RNA, 19 nt, Artificial Sequence
  Description of Artificial Sequence: Synthetic oligonucleotide
cuagaaaauaaaauaaaua

SEQ ID NO: 3224709 - RNA, 19 nt, Artificial Sequence
  Description of Artificial Sequence: Synthetic oligonucleotide
uucgagaccagugagugcc

SEQ ID NO: 3224710 - RNA, 19 nt, Artificial Sequence
  Description of Artificial Sequence: Synthetic oligonucleotide
uggcacacaccuuuaaucc

SEQ ID NO: 3224711 - RNA, 19 nt, Artificial Sequence
  Description of Artificial Sequence: Synthetic oligonucleotide
agaaaauaaaauaaauaaa

SEQ ID NO: 3224712 - RNA, 19 nt, Artificial Sequence
  Description of Artificial Sequence: Synthetic oligonucleotide
ugugaguucgagaccagug

SEQ ID NO: 3224713 - RNA, 19 nt, Artificial Sequence
  Description of Artificial Sequence: Synthetic oligonucleotide
ugaguucgagaccagugag

SEQ ID NO: 3224714 - RNA, 19 nt, Artificial Sequence
  Description of Artificial Sequence: Synthetic oligonucleotide
cagcaagcaacucacaagc

SEQ ID NO: 3224715 - RNA, 19 nt, Artificial Sequence
  Description of Artificial Sequence: Synthetic oligonucleotide
augagggucacgguguucc

SEQ ID NO: 3224716 - RNA, 19 nt, Artificial Sequence
  Description of Artificial Sequence: Synthetic oligonucleotide
acagcaagcaacucacaag

SEQ ID NO: 3224717 - RNA, 19 nt, Artificial Sequence
  Description of Artificial Sequence: Synthetic oligonucleotide
uguaacuccuggguggugg

SEQ ID NO: 3224718 - RNA, 19 nt, Artificial Sequence
  Description of Artificial Sequence: Synthetic oligonucleotide
uuaaucccagcacauggga

SEQ ID NO: 3224719 - RNA, 19 nt, Artificial Sequence
  Description of Artificial Sequence: Synthetic oligonucleotide
ugggaggucagagucaggg

SEQ ID NO: 3224720 - RNA, 19 nt, Artificial Sequence
  Description of Artificial Sequence: Synthetic oligonucleotide
agcacuuguaacuccuggg

SEQ ID NO: 3224721 - RNA, 19 nt, Artificial Sequence
  Description of Artificial Sequence: Synthetic oligonucleotide
uacacagagaaacucuguc

SEQ ID NO: 3224722 - RNA, 19 nt, Artificial Sequence
  Description of Artificial Sequence: Synthetic oligonucleotide
cagagcuacacagagaaac

SEQ ID NO: 3224723 - RNA, 19 nt, Artificial Sequence
  Description of Artificial Sequence: Synthetic oligonucleotide
cugucuagaaaauaaaaua

SEQ ID NO: 3224724 - RNA, 19 nt, Artificial Sequence
  Description of Artificial Sequence: Synthetic oligonucleotide
agugagugccaggauaggc

SEQ ID NO: 3224725 - RNA, 19 nt, Artificial Sequence
  Description of Artificial Sequence: Synthetic oligonucleotide
aacucugucuagaaaauaa

SEQ ID NO: 3224726 - RNA, 19 nt, Artificial Sequence
  Description of Artificial Sequence: Synthetic oligonucleotide
uaaucccagcacaugggag

SEQ ID NO: 3224727 - RNA, 19 nt, Artificial Sequence
  Description of Artificial Sequence: Synthetic oligonucleotide
acacagagaaacucugucu

SEQ ID NO: 3224728 - RNA, 19 nt, Artificial Sequence
  Description of Artificial Sequence: Synthetic oligonucleotide
auaggcuccagagcuacac

SEQ ID NO: 3224729 - RNA, 19 nt, Artificial Sequence
  Description of Artificial Sequence: Synthetic oligonucleotide
aacuccugggugguggugg

SEQ ID NO: 3224730 - RNA, 19 nt, Artificial Sequence
  Description of Artificial Sequence: Synthetic oligonucleotide
acagagaaacucugucuag

SEQ ID NO: 3224731 - RNA, 19 nt, Artificial Sequence
  Description of Artificial Sequence: Synthetic oligonucleotide
uguuccgagggccaaccca

SEQ ID NO: 3224732 - RNA, 19 nt, Artificial Sequence
  Description of Artificial Sequence: Synthetic oligonucleotide
aguucgagaccagugagug

SEQ ID NO: 3224733 - RNA, 19 nt, Artificial Sequence
  Description of Artificial Sequence: Synthetic oligonucleotide
aacucacaagcacuuguaa

SEQ ID NO: 3224734 - RNA, 19 nt, Artificial Sequence
  Description of Artificial Sequence: Synthetic oligonucleotide
cacaugggaggucagaguc

SEQ ID NO: 3224735 - RNA, 19 nt, Artificial Sequence
  Description of Artificial Sequence: Synthetic oligonucleotide
caacccagcacccacagca

SEQ ID NO: 3224736 - RNA, 19 nt, Artificial Sequence
  Description of Artificial Sequence: Synthetic oligonucleotide
aggcuccagagcuacacag

SEQ ID NO: 3224737 - RNA, 19 nt, Artificial Sequence
  Description of Artificial Sequence: Synthetic oligonucleotide
guggcacacaccuuuaauc

SEQ ID NO: 3224738 - RNA, 19 nt, Artificial Sequence
  Description of Artificial Sequence: Synthetic oligonucleotide
agcacccacagcaagcaac

SEQ ID NO: 3224739 - RNA, 19 nt, Artificial Sequence
  Description of Artificial Sequence: Synthetic oligonucleotide
agagaaacucugucuagaa

SEQ ID NO: 3224740 - RNA, 19 nt, Artificial Sequence
  Description of Artificial Sequence: Synthetic oligonucleotide
cacaccuuuaaucccagca

SEQ ID NO: 3224741 - RNA, 19 nt, Artificial Sequence
  Description of Artificial Sequence: Synthetic oligonucleotide
ucucugugaguucgagacc

SEQ ID NO: 3224742 - RNA, 19 nt, Artificial Sequence
  Description of Artificial Sequence: Synthetic oligonucleotide
cucacaagcacuuguaacu

SEQ ID NO: 3224743 - RNA, 19 nt, Artificial Sequence
  Description of Artificial Sequence: Synthetic oligonucleotide
ugagugccaggauaggcuc

SEQ ID NO: 3224744 - RNA, 19 nt, Artificial Sequence
  Description of Artificial Sequence: Synthetic oligonucleotide
gucuagaaaauaaaauaaa

SEQ ID NO: 3224745 - RNA, 19 nt, Artificial Sequence
  Description of Artificial Sequence: Synthetic oligonucleotide
agcacaugggaggucagag

SEQ ID NO: 3224746 - RNA, 19 nt, Artificial Sequence
  Description of Artificial Sequence: Synthetic oligonucleotide
cacaagcacuuguaacucc

SEQ ID NO: 3224747 - RNA, 19 nt, Artificial Sequence
  Description of Artificial Sequence: Synthetic oligonucleotide
agggucacgguguuccgag

SEQ ID NO: 3224748 - RNA, 19 nt, Artificial Sequence
  Description of Artificial Sequence: Synthetic oligonucleotide
cucugucuagaaaauaaaa

SEQ ID NO: 3224749 - RNA, 19 nt, Artificial Sequence
  Description of Artificial Sequence: Synthetic oligonucleotide
acccacagcaagcaacuca

SEQ ID NO: 3224750 - RNA, 19 nt, Artificial Sequence
  Description of Artificial Sequence: Synthetic oligonucleotide
cacuuguaacuccugggug

SEQ ID NO: 3224751 - RNA, 19 nt, Artificial Sequence
  Description of Artificial Sequence: Synthetic oligonucleotide
gagaccagugagugccagg

SEQ ID NO: 3224752 - RNA, 19 nt, Artificial Sequence
  Description of Artificial Sequence: Synthetic oligonucleotide
ucacaagcacuuguaacuc

SEQ ID NO: 3224753 - RNA, 19 nt, Artificial Sequence
  Description of Artificial Sequence: Synthetic oligonucleotide
caugggaggucagagucag

SEQ ID NO: 3224754 - RNA, 19 nt, Artificial Sequence
  Description of Artificial Sequence: Synthetic oligonucleotide
gugaguucgagaccaguga

SEQ ID NO: 3224755 - RNA, 19 nt, Artificial Sequence
  Description of Artificial Sequence: Synthetic oligonucleotide
gccaggauaggcuccagag

SEQ ID NO: 3224756 - RNA, 19 nt, Artificial Sequence
  Description of Artificial Sequence: Synthetic oligonucleotide
acacaccuuuaaucccagc

SEQ ID NO: 3224757 - RNA, 19 nt, Artificial Sequence
  Description of Artificial Sequence: Synthetic oligonucleotide
acuccuggguggugguggc

SEQ ID NO: 3224758 - RNA, 19 nt, Artificial Sequence
  Description of Artificial Sequence: Synthetic oligonucleotide
gagaaacucugucuagaaa

SEQ ID NO: 3224759 - RNA, 19 nt, Artificial Sequence
  Description of Artificial Sequence: Synthetic oligonucleotide
ucugugaguucgagaccag

SEQ ID NO: 3224760 - RNA, 19 nt, Artificial Sequence
  Description of Artificial Sequence: Synthetic oligonucleotide
accagugagugccaggaua

SEQ ID NO: 3224761 - RNA, 19 nt, Artificial Sequence
  Description of Artificial Sequence: Synthetic oligonucleotide
guuccgagggccaacccag

SEQ ID NO: 3224762 - RNA, 19 nt, Artificial Sequence
  Description of Artificial Sequence: Synthetic oligonucleotide
agaccagugagugccagga

SEQ ID NO: 3224763 - RNA, 19 nt, Artificial Sequence
  Description of Artificial Sequence: Synthetic oligonucleotide
aaacucugucuagaaaaua

SEQ ID NO: 3224764 - RNA, 19 nt, Artificial Sequence
  Description of Artificial Sequence: Synthetic oligonucleotide
agcuacacagagaaacucu

SEQ ID NO: 3224765 - RNA, 19 nt, Artificial Sequence
  Description of Artificial Sequence: Synthetic oligonucleotide
gcaagcaacucacaagcac

SEQ ID NO: 3224766 - RNA, 19 nt, Artificial Sequence
  Description of Artificial Sequence: Synthetic oligonucleotide
cacagagaaacucugucua

SEQ ID NO: 3224767 - RNA, 19 nt, Artificial Sequence
  Description of Artificial Sequence: Synthetic oligonucleotide
gcuccagagcuacacagag

SEQ ID NO: 3224768 - RNA, 19 nt, Artificial Sequence
  Description of Artificial Sequence: Synthetic oligonucleotide
gaucucugugaguucgaga

SEQ ID NO: 3224769 - RNA, 19 nt, Artificial Sequence
  Description of Artificial Sequence: Synthetic oligonucleotide
acaagcacuuguaacuccu

SEQ ID NO: 3224770 - RNA, 19 nt, Artificial Sequence
  Description of Artificial Sequence: Synthetic oligonucleotide
ggucacgguguuccgaggg

SEQ ID NO: 3224771 - RNA, 19 nt, Artificial Sequence
  Description of Artificial Sequence: Synthetic oligonucleotide
caggauaggcuccagagcu

SEQ ID NO: 3224772 - RNA, 19 nt, Artificial Sequence
  Description of Artificial Sequence: Synthetic oligonucleotide
caccuuuaaucccagcaca

SEQ ID NO: 3224773 - RNA, 19 nt, Artificial Sequence
  Description of Artificial Sequence: Synthetic oligonucleotide
caagcaacucacaagcacu

SEQ ID NO: 3224774 - RNA, 19 nt, Artificial Sequence
  Description of Artificial Sequence: Synthetic oligonucleotide
ccagugagugccaggauag

SEQ ID NO: 3224775 - RNA, 19 nt, Artificial Sequence
  Description of Artificial Sequence: Synthetic oligonucleotide
cucugugaguucgagacca

SEQ ID NO: 3224776 - RNA, 19 nt, Artificial Sequence
  Description of Artificial Sequence: Synthetic oligonucleotide
agagcuacacagagaaacu

SEQ ID NO: 3224777 - RNA, 19 nt, Artificial Sequence
  Description of Artificial Sequence: Synthetic oligonucleotide
ugagggucacgguguuccg

SEQ ID NO: 3224778 - RNA, 19 nt, Artificial Sequence
  Description of Artificial Sequence: Synthetic oligonucleotide
gagcuacacagagaaacuc

SEQ ID NO: 3224779 - RNA, 19 nt, Artificial Sequence
  Description of Artificial Sequence: Synthetic oligonucleotide
uaggcuccagagcuacaca

SEQ ID NO: 3224780 - RNA, 19 nt, Artificial Sequence
  Description of Artificial Sequence: Synthetic oligonucleotide
ucacgguguuccgagggcc

SEQ ID NO: 3224781 - RNA, 19 nt, Artificial Sequence
  Description of Artificial Sequence: Synthetic oligonucleotide
ggggaucucugugaguucg

SEQ ID NO: 3224782 - RNA, 19 nt, Artificial Sequence
  Description of Artificial Sequence: Synthetic oligonucleotide
uccgagggccaacccagca

SEQ ID NO: 3224783 - RNA, 19 nt, Artificial Sequence
  Description of Artificial Sequence: Synthetic oligonucleotide
ggcacacaccuuuaauccc

SEQ ID NO: 3224784 - RNA, 19 nt, Artificial Sequence
  Description of Artificial Sequence: Synthetic oligonucleotide
cacacaccuuuaaucccag

SEQ ID NO: 3224785 - RNA, 19 nt, Artificial Sequence
  Description of Artificial Sequence: Synthetic oligonucleotide
ugccaggauaggcuccaga

SEQ ID NO: 3224786 - RNA, 19 nt, Artificial Sequence
  Description of Artificial Sequence: Synthetic oligonucleotide
cacagcaagcaacucacaa

SEQ ID NO: 3224787 - RNA, 19 nt, Artificial Sequence
  Description of Artificial Sequence: Synthetic oligonucleotide
caagcacuuguaacuccug

SEQ ID NO: 3224788 - RNA, 19 nt, Artificial Sequence
  Description of Artificial Sequence: Synthetic oligonucleotide
cccacagcaagcaacucac

SEQ ID NO: 3224789 - RNA, 19 nt, Artificial Sequence
  Description of Artificial Sequence: Synthetic oligonucleotide
guggugguggcacacaccu

SEQ ID NO: 3224790 - RNA, 19 nt, Artificial Sequence
  Description of Artificial Sequence: Synthetic oligonucleotide
uuaugagggucacgguguu

SEQ ID NO: 3224791 - RNA, 19 nt, Artificial Sequence
  Description of Artificial Sequence: Synthetic oligonucleotide
gaguauuucaacuuugucg

SEQ ID NO: 3224792 - RNA, 19 nt, Artificial Sequence
  Description of Artificial Sequence: Synthetic oligonucleotide
uuuagugucccauaccacg

SEQ ID NO: 3224793 - RNA, 19 nt, Artificial Sequence
  Description of Artificial Sequence: Synthetic oligonucleotide
aguauuucaacuuugucgu

SEQ ID NO: 3224794 - RNA, 19 nt, Artificial Sequence
  Description of Artificial Sequence: Synthetic oligonucleotide
uucuuucugagauagacgc

SEQ ID NO: 3224795 - RNA, 19 nt, Artificial Sequence
  Description of Artificial Sequence: Synthetic oligonucleotide
aacuuugucguuaaccagc

SEQ ID NO: 3224796 - RNA, 19 nt, Artificial Sequence
  Description of Artificial Sequence: Synthetic oligonucleotide
ucccauaccacguagacgc

SEQ ID NO: 3224797 - RNA, 19 nt, Artificial Sequence
  Description of Artificial Sequence: Synthetic oligonucleotide
uguguugaagcucaaggag

SEQ ID NO: 3224798 - RNA, 19 nt, Artificial Sequence
  Description of Artificial Sequence: Synthetic oligonucleotide
acuguguugaagcucaagg

SEQ ID NO: 3224799 - RNA, 19 nt, Artificial Sequence
  Description of Artificial Sequence: Synthetic oligonucleotide
uguuuagugucccauacca

SEQ ID NO: 3224800 - RNA, 19 nt, Artificial Sequence
  Description of Artificial Sequence: Synthetic oligonucleotide
aacacuuccacacucuugu

SEQ ID NO: 3224801 - RNA, 19 nt, Artificial Sequence
  Description of Artificial Sequence: Synthetic oligonucleotide
aacccgcugacauagcccc

SEQ ID NO: 3224802 - RNA, 19 nt, Artificial Sequence
  Description of Artificial Sequence: Synthetic oligonucleotide
uuugucguuaaccagccca

SEQ ID NO: 3224803 - RNA, 19 nt, Artificial Sequence
  Description of Artificial Sequence: Synthetic oligonucleotide
ucaacuuugucguuaacca

SEQ ID NO: 3224804 - RNA, 19 nt, Artificial Sequence
  Description of Artificial Sequence: Synthetic oligonucleotide
gaaauugugggacucgugc

SEQ ID NO: 3224805 - RNA, 19 nt, Artificial Sequence
  Description of Artificial Sequence: Synthetic oligonucleotide
agggacacuguguugaagc

SEQ ID NO: 3224806 - RNA, 19 nt, Artificial Sequence
  Description of Artificial Sequence: Synthetic oligonucleotide
uagagugucucauugucgg

SEQ ID NO: 3224807 - RNA, 19 nt, Artificial Sequence
  Description of Artificial Sequence: Synthetic oligonucleotide
ugaaccacgacccugcgga

SEQ ID NO: 3224808 - RNA, 19 nt, Artificial Sequence
  Description of Artificial Sequence: Synthetic oligonucleotide
gagguuggggcccagaggg

SEQ ID NO: 3224809 - RNA, 19 nt, Artificial Sequence
  Description of Artificial Sequence: Synthetic oligonucleotide
aaacaccucaguccucugc

SEQ ID NO: 3224810 - RNA, 19 nt, Artificial Sequence
  Description of Artificial Sequence: Synthetic oligonucleotide
gacauagccccacaggccg

SEQ ID NO: 3224811 - RNA, 19 nt, Artificial Sequence
  Description of Artificial Sequence: Synthetic oligonucleotide
ucugggugaaccacgaccc

SEQ ID NO: 3224812 - RNA, 19 nt, Artificial Sequence
  Description of Artificial Sequence: Synthetic oligonucleotide
gacgcuauucaccugauuc

SEQ ID NO: 3224813 - RNA, 19 nt, Artificial Sequence
  Description of Artificial Sequence: Synthetic oligonucleotide
uccccguugaaauuguggg

SEQ ID NO: 3224814 - RNA, 19 nt, Artificial Sequence
  Description of Artificial Sequence: Synthetic oligonucleotide
aacauguugucagaaaaca

SEQ ID NO: 3224815 - RNA, 19 nt, Artificial Sequence
  Description of Artificial Sequence: Synthetic oligonucleotide
uucaacuuugucguuaacc

SEQ ID NO: 3224816 - RNA, 19 nt, Artificial Sequence
  Description of Artificial Sequence: Synthetic oligonucleotide
ugugaguauuucaacuuug

SEQ ID NO: 3224817 - RNA, 19 nt, Artificial Sequence
  Description of Artificial Sequence: Synthetic oligonucleotide
aauugugggacucgugcug

SEQ ID NO: 3224818 - RNA, 19 nt, Artificial Sequence
  Description of Artificial Sequence: Synthetic oligonucleotide
cuuguucuuucugagauag

SEQ ID NO: 3224819 - RNA, 19 nt, Artificial Sequence
  Description of Artificial Sequence: Synthetic oligonucleotide
agaacauguugucagaaaa

SEQ ID NO: 3224820 - RNA, 19 nt, Artificial Sequence
  Description of Artificial Sequence: Synthetic oligonucleotide
uugaagcucaaggagggcg

SEQ ID NO: 3224821 - RNA, 19 nt, Artificial Sequence
  Description of Artificial Sequence: Synthetic oligonucleotide
cugacauagccccacaggc

SEQ ID NO: 3224822 - RNA, 19 nt, Artificial Sequence
  Description of Artificial Sequence: Synthetic oligonucleotide
aaauugugggacucgugcu

SEQ ID NO: 3224823 - RNA, 19 nt, Artificial Sequence
  Description of Artificial Sequence: Synthetic oligonucleotide
ucaaggagggcgauguccc

SEQ ID NO: 3224824 - RNA, 19 nt, Artificial Sequence
  Description of Artificial Sequence: Synthetic oligonucleotide
aaccagcccaucuccacac

SEQ ID NO: 3224825 - RNA, 19 nt, Artificial Sequence
  Description of Artificial Sequence: Synthetic oligonucleotide
accacguagacgcugccac

SEQ ID NO: 3224826 - RNA, 19 nt, Artificial Sequence
  Description of Artificial Sequence: Synthetic oligonucleotide
uugucgggcaggcagacug

SEQ ID NO: 3224827 - RNA, 19 nt, Artificial Sequence
  Description of Artificial Sequence: Synthetic oligonucleotide
aacaccucaguccucugcu

SEQ ID NO: 3224828 - RNA, 19 nt, Artificial Sequence
  Description of Artificial Sequence: Synthetic oligonucleotide
uugucagaaaacaccucag

SEQ ID NO: 3224829 - RNA, 19 nt, Artificial Sequence
  Description of Artificial Sequence: Synthetic oligonucleotide
ugugugaccgagaaacacu

SEQ ID NO: 3224830 - RNA, 19 nt, Artificial Sequence
  Description of Artificial Sequence: Synthetic oligonucleotide
gucugugugaccgagaaac

SEQ ID NO: 3224831 - RNA, 19 nt, Artificial Sequence
  Description of Artificial Sequence: Synthetic oligonucleotide
guugucagaaaacaccuca

SEQ ID NO: 3224832 - RNA, 19 nt, Artificial Sequence
  Description of Artificial Sequence: Synthetic oligonucleotide
cucauugucgggcaggcag

SEQ ID NO: 3224833 - RNA, 19 nt, Artificial Sequence
  Description of Artificial Sequence: Synthetic oligonucleotide
aguccucugcuucuggugg

SEQ ID NO: 3224834 - RNA, 19 nt, Artificial Sequence
  Description of Artificial Sequence: Synthetic oligonucleotide
aaacccgcugacauagccc

SEQ ID NO: 3224835 - RNA, 19 nt, Artificial Sequence
  Description of Artificial Sequence: Synthetic oligonucleotide
acuguccccuggcagacgc

SEQ ID NO: 3224836 - RNA, 19 nt, Artificial Sequence
  Description of Artificial Sequence: Synthetic oligonucleotide
gugaccgagaaacacuucc

SEQ ID NO: 3224837 - RNA, 19 nt, Artificial Sequence
  Description of Artificial Sequence: Synthetic oligonucleotide
uucugguggagccaggccu

SEQ ID NO: 3224838 - RNA, 19 nt, Artificial Sequence
  Description of Artificial Sequence: Synthetic oligonucleotide
ugucagaaaacaccucagu

SEQ ID NO: 3224839 - RNA, 19 nt, Artificial Sequence
  Description of Artificial Sequence: Synthetic oligonucleotide
agcugugaguauuucaacu

SEQ ID NO: 3224840 - RNA, 19 nt, Artificial Sequence
  Description of Artificial Sequence: Synthetic oligonucleotide
uuagugucccauaccacgu

SEQ ID NO: 3224841 - RNA, 19 nt, Artificial Sequence
  Description of Artificial Sequence: Synthetic oligonucleotide
guguugaagcucaaggagg

SEQ ID NO: 3224842 - RNA, 19 nt, Artificial Sequence
  Description of Artificial Sequence: Synthetic oligonucleotide
caucuccacaccaaacccg

SEQ ID NO: 3224843 - RNA, 19 nt, Artificial Sequence
  Description of Artificial Sequence: Synthetic oligonucleotide
ugaguauuucaacuuuguc

SEQ ID NO: 3224844 - RNA, 19 nt, Artificial Sequence
  Description of Artificial Sequence: Synthetic oligonucleotide
uuguuuagugucccauacc

SEQ ID NO: 3224845 - RNA, 19 nt, Artificial Sequence
  Description of Artificial Sequence: Synthetic oligonucleotide
gucuacgucugugugaccg

SEQ ID NO: 3224846 - RNA, 19 nt, Artificial Sequence
  Description of Artificial Sequence: Synthetic oligonucleotide
acuuugucguuaaccagcc

SEQ ID NO: 3224847 - RNA, 19 nt, Artificial Sequence
  Description of Artificial Sequence: Synthetic oligonucleotide
ugacauagccccacaggcc

SEQ ID NO: 3224848 - RNA, 19 nt, Artificial Sequence
  Description of Artificial Sequence: Synthetic oligonucleotide
gucagaaaacaccucaguc

SEQ ID NO: 3224849 - RNA, 19 nt, Artificial Sequence
  Description of Artificial Sequence: Synthetic oligonucleotide
gauguccccguugaaauug

SEQ ID NO: 3224850 - RNA, 19 nt, Artificial Sequence
  Description of Artificial Sequence: Synthetic oligonucleotide
cauaccacguagacgcugc

SEQ ID NO: 3224851 - RNA, 19 nt, Artificial Sequence
  Description of Artificial Sequence: Synthetic oligonucleotide
accaaacccgcugacauag

SEQ ID NO: 3224852 - RNA, 19 nt, Artificial Sequence
  Description of Artificial Sequence: Synthetic oligonucleotide
acauguugucagaaaacac

SEQ ID NO: 3224853 - RNA, 19 nt, Artificial Sequence
  Description of Artificial Sequence: Synthetic oligonucleotide
gagaaacacuuccacacuc

SEQ ID NO: 3224854 - RNA, 19 nt, Artificial Sequence
  Description of Artificial Sequence: Synthetic oligonucleotide
ucguccccagcacagaaca

SEQ ID NO: 3224855 - RNA, 19 nt, Artificial Sequence
  Description of Artificial Sequence: Synthetic oligonucleotide
agggugguuccccaguuuc

SEQ ID NO: 3224856 - RNA, 19 nt, Artificial Sequence
  Description of Artificial Sequence: Synthetic oligonucleotide
ugaaauugugggacucgug

SEQ ID NO: 3224857 - RNA, 19 nt, Artificial Sequence
  Description of Artificial Sequence: Synthetic oligonucleotide
cuggcagacgcuauucacc

SEQ ID NO: 3224858 - RNA, 19 nt, Artificial Sequence
  Description of Artificial Sequence: Synthetic oligonucleotide
ugucccauaccacguagac

SEQ ID NO: 3224859 - RNA, 19 nt, Artificial Sequence
  Description of Artificial Sequence: Synthetic oligonucleotide
guucuuucugagauagacg

SEQ ID NO: 3224860 - RNA, 19 nt, Artificial Sequence
  Description of Artificial Sequence: Synthetic oligonucleotide
aucuccacaccaaacccgc

SEQ ID NO: 3224861 - RNA, 19 nt, Artificial Sequence
  Description of Artificial Sequence: Synthetic oligonucleotide
gugguagagugucucauug

SEQ ID NO: 3224862 - RNA, 19 nt, Artificial Sequence
  Description of Artificial Sequence: Synthetic oligonucleotide
ugaccgagaaacacuucca

SEQ ID NO: 3224863 - RNA, 19 nt, Artificial Sequence
  Description of Artificial Sequence: Synthetic oligonucleotide
guugaaauugugggacucg

SEQ ID NO: 3224864 - RNA, 19 nt, Artificial Sequence
  Description of Artificial Sequence: Synthetic oligonucleotide
gaacauguugucagaaaac

SEQ ID NO: 3224865 - RNA, 19 nt, Artificial Sequence
  Description of Artificial Sequence: Synthetic oligonucleotide
gacacuguguugaagcuca

SEQ ID NO: 3224866 - RNA, 19 nt, Artificial Sequence
  Description of Artificial Sequence: Synthetic oligonucleotide
guagagugucucauugucg

SEQ ID NO: 3224867 - RNA, 19 nt, Artificial Sequence
  Description of Artificial Sequence: Synthetic oligonucleotide
uucaccugauucucguccc

SEQ ID NO: 3224868 - RNA, 19 nt, Artificial Sequence
  Description of Artificial Sequence: Synthetic oligonucleotide
uauuucaacuuugucguua

SEQ ID NO: 3224869 - RNA, 19 nt, Artificial Sequence
  Description of Artificial Sequence: Synthetic oligonucleotide
agugucccauaccacguag

SEQ ID NO: 3224870 - RNA, 19 nt, Artificial Sequence
  Description of Artificial Sequence: Synthetic oligonucleotide
cucccggggagcuacaggc

SEQ ID NO: 3224871 - RNA, 19 nt, Artificial Sequence
  Description of Artificial Sequence: Synthetic oligonucleotide
caacuuugucguuaaccag

SEQ ID NO: 3224872 - RNA, 19 nt, Artificial Sequence
  Description of Artificial Sequence: Synthetic oligonucleotide
acaccaaacccgcugacau

SEQ ID NO: 3224873 - RNA, 19 nt, Artificial Sequence
  Description of Artificial Sequence: Synthetic oligonucleotide
uccacaccaaacccgcuga

SEQ ID NO: 3224874 - RNA, 19 nt, Artificial Sequence
  Description of Artificial Sequence: Synthetic oligonucleotide
uuaaccagcccaucuccac

SEQ ID NO: 3224875 - RNA, 19 nt, Artificial Sequence
  Description of Artificial Sequence: Synthetic oligonucleotide
caaacccgcugacauagcc

SEQ ID NO: 3224876 - RNA, 19 nt, Artificial Sequence
  Description of Artificial Sequence: Synthetic oligonucleotide
auuucaacuuugucguuaa

SEQ ID NO: 3224877 - RNA, 19 nt, Artificial Sequence
  Description of Artificial Sequence: Synthetic oligonucleotide
acacucuuguucuuucuga

SEQ ID NO: 3224878 - RNA, 19 nt, Artificial Sequence
  Description of Artificial Sequence: Synthetic oligonucleotide
cagacugggaggagguugg

SEQ ID NO: 3224879 - RNA, 19 nt, Artificial Sequence
  Description of Artificial Sequence: Synthetic oligonucleotide
gcacagaacauguugucag

SEQ ID NO: 3224880 - RNA, 19 nt, Artificial Sequence
  Description of Artificial Sequence: Synthetic oligonucleotide
ugucucauugucgggcagg

SEQ ID NO: 3224881 - RNA, 19 nt, Artificial Sequence
  Description of Artificial Sequence: Synthetic oligonucleotide
uaaccagcccaucuccaca

SEQ ID NO: 3224882 - RNA, 19 nt, Artificial Sequence
  Description of Artificial Sequence: Synthetic oligonucleotide
uggcagacgcuauucaccu

SEQ ID NO: 3224883 - RNA, 19 nt, Artificial Sequence
  Description of Artificial Sequence: Synthetic oligonucleotide
cacucuuguucuuucugag

SEQ ID NO: 3224884 - RNA, 19 nt, Artificial Sequence
  Description of Artificial Sequence: Synthetic oligonucleotide
uagacgcugccacuguccc

SEQ ID NO: 3224885 - RNA, 19 nt, Artificial Sequence
  Description of Artificial Sequence: Synthetic oligonucleotide
ucuuucugagauagacgcu

SEQ ID NO: 3224886 - RNA, 19 nt, Artificial Sequence
  Description of Artificial Sequence: Synthetic oligonucleotide
cucaaggagggcgaugucc

SEQ ID NO: 3224887 - RNA, 19 nt, Artificial Sequence
  Description of Artificial Sequence: Synthetic oligonucleotide
acgcuauucaccugauucu

SEQ ID NO: 3224888 - RNA, 19 nt, Artificial Sequence
  Description of Artificial Sequence: Synthetic oligonucleotide
aaggagggcgauguccccg

SEQ ID NO: 3224889 - RNA, 19 nt, Artificial Sequence
  Description of Artificial Sequence: Synthetic oligonucleotide
aguuucagcagcucgucua

SEQ ID NO: 3224890 - RNA, 19 nt, Artificial Sequence
  Description of Artificial Sequence: Synthetic oligonucleotide
ucguuaaccagcccaucuc

SEQ ID NO: 3224891 - RNA, 19 nt, Artificial Sequence
  Description of Artificial Sequence: Synthetic oligonucleotide
uuuuccauugcauauuccu

SEQ ID NO: 3224892 - RNA, 19 nt, Artificial Sequence
  Description of Artificial Sequence: Synthetic oligonucleotide
uuaagggcauuuuccauug

SEQ ID NO: 3224893 - RNA, 19 nt, Artificial Sequence
  Description of Artificial Sequence: Synthetic oligonucleotide
cuuaacucgucccuuuucc

SEQ ID NO: 3224894 - RNA, 19 nt, Artificial Sequence
  Description of Artificial Sequence: Synthetic oligonucleotide
uuuaagggcauuuuccauu

SEQ ID NO: 3224895 - RNA, 19 nt, Artificial Sequence
  Description of Artificial Sequence: Synthetic oligonucleotide
aagggcauuuuccauugca

SEQ ID NO: 3224896 - RNA, 19 nt, Artificial Sequence
  Description of Artificial Sequence: Synthetic oligonucleotide
uuccauugcauauuccuuc

SEQ ID NO: 3224897 - RNA, 19 nt, Artificial Sequence
  Description of Artificial Sequence: Synthetic oligonucleotide
uuaacucgucccuuuuccc

SEQ ID NO: 3224898 - RNA, 19 nt, Artificial Sequence
  Description of Artificial Sequence: Synthetic oligonucleotide
uuuuaagggcauuuuccau

SEQ ID NO: 3224899 - RNA, 19 nt, Artificial Sequence
  Description of Artificial Sequence: Synthetic oligonucleotide
uaacucgucccuuuuccca

SEQ ID NO: 3224900 - RNA, 19 nt, Artificial Sequence
  Description of Artificial Sequence: Synthetic oligonucleotide
uuuccauugcauauuccuu

SEQ ID NO: 3224901 - RNA, 19 nt, Artificial Sequence
  Description of Artificial Sequence: Synthetic oligonucleotide
cauuuuccauugcauauuc

SEQ ID NO: 3224902 - RNA, 19 nt, Artificial Sequence
  Description of Artificial Sequence: Synthetic oligonucleotide
auuuuccauugcauauucc

SEQ ID NO: 3224903 - RNA, 19 nt, Artificial Sequence
  Description of Artificial Sequence: Synthetic oligonucleotide
ucccuuuucccaaagcauu

SEQ ID NO: 3224904 - RNA, 19 nt, Artificial Sequence
  Description of Artificial Sequence: Synthetic oligonucleotide
ucuuaacucgucccuuuuc

SEQ ID NO: 3224905 - RNA, 19 nt, Artificial Sequence
  Description of Artificial Sequence: Synthetic oligonucleotide
aacucgucccuuuucccaa

SEQ ID NO: 3224906 - RNA, 19 nt, Artificial Sequence
  Description of Artificial Sequence: Synthetic oligonucleotide
uaagggcauuuuccauugc

SEQ ID NO: 3224907 - RNA, 19 nt, Artificial Sequence
  Description of Artificial Sequence: Synthetic oligonucleotide
ucgucccuuuucccaaagc

SEQ ID NO: 3224908 - RNA, 19 nt, Artificial Sequence
  Description of Artificial Sequence: Synthetic oligonucleotide
agggcauuuuccauugcau

SEQ ID NO: 3224909 - RNA, 19 nt, Artificial Sequence
  Description of Artificial Sequence: Synthetic oligonucleotide
ggcauuuuccauugcauau

SEQ ID NO: 3224910 - RNA, 19 nt, Artificial Sequence
  Description of Artificial Sequence: Synthetic oligonucleotide
cucgucccuuuucccaaag

SEQ ID NO: 3224911 - RNA, 19 nt, Artificial Sequence
  Description of Artificial Sequence: Synthetic oligonucleotide
gggcauuuuccauugcaua

SEQ ID NO: 3224912 - RNA, 19 nt, Artificial Sequence
  Description of Artificial Sequence: Synthetic oligonucleotide
acucgucccuuuucccaaa

SEQ ID NO: 3224913 - RNA, 19 nt, Artificial Sequence
  Description of Artificial Sequence: Synthetic oligonucleotide
cgucccuuuucccaaagca

SEQ ID NO: 3224914 - RNA, 19 nt, Artificial Sequence
  Description of Artificial Sequence: Synthetic oligonucleotide
gucccuuuucccaaagcau

SEQ ID NO: 3224915 - RNA, 19 nt, Artificial Sequence
  Description of Artificial Sequence: Synthetic oligonucleotide
ccuuuucccaaagcauuuc

SEQ ID NO: 3224916 - RNA, 19 nt, Artificial Sequence
  Description of Artificial Sequence: Synthetic oligonucleotide
gcauuuuccauugcauauu

SEQ ID NO: 3224917 - RNA, 19 nt, Artificial Sequence
  Description of Artificial Sequence: Synthetic oligonucleotide
aaagauucucuucacuucc

SEQ ID NO: 3224918 - RNA, 19 nt, Artificial Sequence
  Description of Artificial Sequence: Synthetic oligonucleotide
uuucauauuaacaacacaa

SEQ ID NO: 3224919 - RNA, 19 nt, Artificial Sequence
  Description of Artificial Sequence: Synthetic oligonucleotide
agugaauaugaacaggacc

SEQ ID NO: 3224920 - RNA, 19 nt, Artificial Sequence
  Description of Artificial Sequence: Synthetic oligonucleotide
uguacauacacaauguagc

SEQ ID NO: 3224921 - RNA, 19 nt, Artificial Sequence
  Description of Artificial Sequence: Synthetic oligonucleotide
aacaugacucgauacaaac

SEQ ID NO: 3224922 - RNA, 19 nt, Artificial Sequence
  Description of Artificial Sequence: Synthetic oligonucleotide
acaaucuaagacuaguuac

SEQ ID NO: 3224923 - RNA, 19 nt, Artificial Sequence
  Description of Artificial Sequence: Synthetic oligonucleotide
gacaaauagagauucacag

SEQ ID NO: 3224924 - RNA, 19 nt, Artificial Sequence
  Description of Artificial Sequence: Synthetic oligonucleotide
aagacauugacucacuucu

SEQ ID NO: 3224925 - RNA, 19 nt, Artificial Sequence
  Description of Artificial Sequence: Synthetic oligonucleotide
ucuaagacuaguuacaagu

SEQ ID NO: 3224926 - RNA, 19 nt, Artificial Sequence
  Description of Artificial Sequence: Synthetic oligonucleotide
ugaagaagcgauuuguggg

SEQ ID NO: 3224927 - RNA, 19 nt, Artificial Sequence
  Description of Artificial Sequence: Synthetic oligonucleotide
uauaaaauugccuggggcc

SEQ ID NO: 3224928 - RNA, 19 nt, Artificial Sequence
  Description of Artificial Sequence: Synthetic oligonucleotide
aguaagauucaucugggac

SEQ ID NO: 3224929 - RNA, 19 nt, Artificial Sequence
  Description of Artificial Sequence: Synthetic oligonucleotide
ucaaguugaauccucagug

SEQ ID NO: 3224930 - RNA, 19 nt, Artificial Sequence
  Description of Artificial Sequence: Synthetic oligonucleotide
cauauuaacaacacaacug

SEQ ID NO: 3224931 - RNA, 19 nt, Artificial Sequence
  Description of Artificial Sequence: Synthetic oligonucleotide
uccucagugaauaugaaca

SEQ ID NO: 3224932 - RNA, 19 nt, Artificial Sequence
  Description of Artificial Sequence: Synthetic oligonucleotide
aauacccagguacagaucu

SEQ ID NO: 3224933 - RNA, 19 nt, Artificial Sequence
  Description of Artificial Sequence: Synthetic oligonucleotide
cuaguuacaaguuucuacc

SEQ ID NO: 3224934 - RNA, 19 nt, Artificial Sequence
  Description of Artificial Sequence: Synthetic oligonucleotide
aaagacauugacucacuuc

SEQ ID NO: 3224935 - RNA, 19 nt, Artificial Sequence
  Description of Artificial Sequence: Synthetic oligonucleotide
agauucacagcauuuuacc

SEQ ID NO: 3224936 - RNA, 19 nt, Artificial Sequence
  Description of Artificial Sequence: Synthetic oligonucleotide
auauuaacaacacaacugu

SEQ ID NO: 3224937 - RNA, 19 nt, Artificial Sequence
  Description of Artificial Sequence: Synthetic oligonucleotide
ucaaacacuucucacacug

SEQ ID NO: 3224938 - RNA, 19 nt, Artificial Sequence
  Description of Artificial Sequence: Synthetic oligonucleotide
uuaacaacacaacuguuga

SEQ ID NO: 3224939 - RNA, 19 nt, Artificial Sequence
  Description of Artificial Sequence: Synthetic oligonucleotide
ugcuuaaagacauugacuc

SEQ ID NO: 3224940 - RNA, 19 nt, Artificial Sequence
  Description of Artificial Sequence: Synthetic oligonucleotide
aaugaggaagccaugcccc

SEQ ID NO: 3224941 - RNA, 19 nt, Artificial Sequence
  Description of Artificial Sequence: Synthetic oligonucleotide
aaugucaaaagcuauuaua

SEQ ID NO: 3224942 - RNA, 19 nt, Artificial Sequence
  Description of Artificial Sequence: Synthetic oligonucleotide
ucagugaauaugaacagga

SEQ ID NO: 3224943 - RNA, 19 nt, Artificial Sequence
  Description of Artificial Sequence: Synthetic oligonucleotide
uuuacaaugucaaaagcua

SEQ ID NO: 3224944 - RNA, 19 nt, Artificial Sequence
  Description of Artificial Sequence: Synthetic oligonucleotide
uacacaauguagcagaaaa

SEQ ID NO: 3224945 - RNA, 19 nt, Artificial Sequence
  Description of Artificial Sequence: Synthetic oligonucleotide
ugcagugagacucaaguug

SEQ ID NO: 3224946 - RNA, 19 nt, Artificial Sequence
  Description of Artificial Sequence: Synthetic oligonucleotide
guuucuaccuauuuugucc

SEQ ID NO: 3224947 - RNA, 19 nt, Artificial Sequence
  Description of Artificial Sequence: Synthetic oligonucleotide
aacacaacuguugaaacug

SEQ ID NO: 3224948 - RNA, 19 nt, Artificial Sequence
  Description of Artificial Sequence: Synthetic oligonucleotide
accuauuuuguccuaaguc

SEQ ID NO: 3224949 - RNA, 19 nt, Artificial Sequence
  Description of Artificial Sequence: Synthetic oligonucleotide
ugagacucaaguugaaucc

SEQ ID NO: 3224950 - RNA, 19 nt, Artificial Sequence
  Description of Artificial Sequence: Synthetic oligonucleotide
augaauucugcagugagac

SEQ ID NO: 3224951 - RNA, 19 nt, Artificial Sequence
  Description of Artificial Sequence: Synthetic oligonucleotide
aagacuaguuacaaguuuc

SEQ ID NO: 3224952 - RNA, 19 nt, Artificial Sequence
  Description of Artificial Sequence: Synthetic oligonucleotide
cugagaaauacccagguac

SEQ ID NO: 3224953 - RNA, 19 nt, Artificial Sequence
  Description of Artificial Sequence: Synthetic oligonucleotide
uguaacagcaaaugaauuc

SEQ ID NO: 3224954 - RNA, 19 nt, Artificial Sequence
  Description of Artificial Sequence: Synthetic oligonucleotide
aaacacaucuugauguucg

SEQ ID NO: 3224955 - RNA, 19 nt, Artificial Sequence
  Description of Artificial Sequence: Synthetic oligonucleotide
cacuguauaaaauugccug

SEQ ID NO: 3224956 - RNA, 19 nt, Artificial Sequence
  Description of Artificial Sequence: Synthetic oligonucleotide
auuaggacuggucccaaac

SEQ ID NO: 3224957 - RNA, 19 nt, Artificial Sequence
  Description of Artificial Sequence: Synthetic oligonucleotide
aucacuggcacuuacaaaa

SEQ ID NO: 3224958 - RNA, 19 nt, Artificial Sequence
  Description of Artificial Sequence: Synthetic oligonucleotide
cuaucugugaugaagccac

SEQ ID NO: 3224959 - RNA, 19 nt, Artificial Sequence
  Description of Artificial Sequence: Synthetic oligonucleotide
ugaucaaacacuucucaca

SEQ ID NO: 3224960 - RNA, 19 nt, Artificial Sequence
  Description of Artificial Sequence: Synthetic oligonucleotide
caugacucgauacaaacac

SEQ ID NO: 3224961 - RNA, 19 nt, Artificial Sequence
  Description of Artificial Sequence: Synthetic oligonucleotide
aacagcaaaugaauucugc

SEQ ID NO: 3224962 - RNA, 19 nt, Artificial Sequence
  Description of Artificial Sequence: Synthetic oligonucleotide
acaacacaacuguugaaac

SEQ ID NO: 3224963 - RNA, 19 nt, Artificial Sequence
  Description of Artificial Sequence: Synthetic oligonucleotide
cuuugagcugcuuaaagac

SEQ ID NO: 3224964 - RNA, 19 nt, Artificial Sequence
  Description of Artificial Sequence: Synthetic oligonucleotide
uuaguuguaacagcaaaug

SEQ ID NO: 3224965 - RNA, 19 nt, Artificial Sequence
  Description of Artificial Sequence: Synthetic oligonucleotide
uguccugagaaauacccag

SEQ ID NO: 3224966 - RNA, 19 nt, Artificial Sequence
  Description of Artificial Sequence: Synthetic oligonucleotide
caauguagcagaaaagcac

SEQ ID NO: 3224967 - RNA, 19 nt, Artificial Sequence
  Description of Artificial Sequence: Synthetic oligonucleotide
augucaaaagcuauuauag

SEQ ID NO: 3224968 - RNA, 19 nt, Artificial Sequence
  Description of Artificial Sequence: Synthetic oligonucleotide
cacacuaaguaucauuucc

SEQ ID NO: 3224969 - RNA, 19 nt, Artificial Sequence
  Description of Artificial Sequence: Synthetic oligonucleotide
gaaaucccaaguaagauuc

SEQ ID NO: 3224970 - RNA, 19 nt, Artificial Sequence
  Description of Artificial Sequence: Synthetic oligonucleotide
gaucaaacacuucucacac

SEQ ID NO: 3224971 - RNA, 19 nt, Artificial Sequence
  Description of Artificial Sequence: Synthetic oligonucleotide
cacaauguagcagaaaagc

SEQ ID NO: 3224972 - RNA, 19 nt, Artificial Sequence
  Description of Artificial Sequence: Synthetic oligonucleotide
ugggacagacauuugauca

SEQ ID NO: 3224973 - RNA, 19 nt, Artificial Sequence
  Description of Artificial Sequence: Synthetic oligonucleotide
cuguacauacacaauguag

SEQ ID NO: 3224974 - RNA, 19 nt, Artificial Sequence
  Description of Artificial Sequence: Synthetic oligonucleotide
aaacaggacugaccugucc

SEQ ID NO: 3224975 - RNA, 19 nt, Artificial Sequence
  Description of Artificial Sequence: Synthetic oligonucleotide
uuaauguauuacuucuuca

SEQ ID NO: 3224976 - RNA, 19 nt, Artificial Sequence
  Description of Artificial Sequence: Synthetic oligonucleotide
agcagaaaagcacacuaag

SEQ ID NO: 3224977 - RNA, 19 nt, Artificial Sequence
  Description of Artificial Sequence: Synthetic oligonucleotide
aacaaucuaagacuaguua

SEQ ID NO: 3224978 - RNA, 19 nt, Artificial Sequence
  Description of Artificial Sequence: Synthetic oligonucleotide
ugacaaauagagauucaca

SEQ ID NO: 3224979 - RNA, 19 nt, Artificial Sequence
  Description of Artificial Sequence: Synthetic oligonucleotide
aauguagcagaaaagcaca

SEQ ID NO: 3224980 - RNA, 19 nt, Artificial Sequence
  Description of Artificial Sequence: Synthetic oligonucleotide
cuuggcacuggccugaggg

SEQ ID NO: 3224981 - RNA, 19 nt, Artificial Sequence
  Description of Artificial Sequence: Synthetic oligonucleotide
ugagaaauacccagguaca

SEQ ID NO: 3224982 - RNA, 19 nt, Artificial Sequence
  Description of Artificial Sequence: Synthetic oligonucleotide
augacaaauagagauucac

SEQ ID NO: 3224983 - RNA, 19 nt, Artificial Sequence
  Description of Artificial Sequence: Synthetic oligonucleotide
uucacagcauuuuaccaag

SEQ ID NO: 3224984 - RNA, 19 nt, Artificial Sequence
  Description of Artificial Sequence: Synthetic oligonucleotide
uauuacuucuucacuguca

SEQ ID NO: 3224985 - RNA, 19 nt, Artificial Sequence
  Description of Artificial Sequence: Synthetic oligonucleotide
agcaaaugaauucugcagu

SEQ ID NO: 3224986 - RNA, 19 nt, Artificial Sequence
  Description of Artificial Sequence: Synthetic oligonucleotide
ucgauacaaacacaucuug

SEQ ID NO: 3224987 - RNA, 19 nt, Artificial Sequence
  Description of Artificial Sequence: Synthetic oligonucleotide
ugucaaaagcuauuauagc

SEQ ID NO: 3224988 - RNA, 19 nt, Artificial Sequence
  Description of Artificial Sequence: Synthetic oligonucleotide
uaagauucaucugggacag

SEQ ID NO: 3224989 - RNA, 19 nt, Artificial Sequence
  Description of Artificial Sequence: Synthetic oligonucleotide
uggcacuuacaaaauuugg

SEQ ID NO: 3224990 - RNA, 19 nt, Artificial Sequence
  Description of Artificial Sequence: Synthetic oligonucleotide
ucaaaagcuauuauagcuu

SEQ ID NO: 3224991 - RNA, 19 nt, Artificial Sequence
  Description of Artificial Sequence: Synthetic oligonucleotide
uucgugauuguuaggaagu

SEQ ID NO: 3224992 - RNA, 19 nt, Artificial Sequence
  Description of Artificial Sequence: Synthetic oligonucleotide
guaagauucaucugggaca

SEQ ID NO: 3224993 - RNA, 19 nt, Artificial Sequence
  Description of Artificial Sequence: Synthetic oligonucleotide
caaacucccauuuccgugg

SEQ ID NO: 3224994 - RNA, 19 nt, Artificial Sequence
  Description of Artificial Sequence: Synthetic oligonucleotide
gcuauuauagcuuuuaaaa

SEQ ID NO: 3224995 - RNA, 19 nt, Artificial Sequence
  Description of Artificial Sequence: Synthetic oligonucleotide
aacaacacaacuguugaaa

SEQ ID NO: 3224996 - RNA, 19 nt, Artificial Sequence
  Description of Artificial Sequence: Synthetic oligonucleotide
aacaggacugaccuguccu

SEQ ID NO: 3224997 - RNA, 19 nt, Artificial Sequence
  Description of Artificial Sequence: Synthetic oligonucleotide
uguauuacuucuucacugu

SEQ ID NO: 3224998 - RNA, 19 nt, Artificial Sequence
  Description of Artificial Sequence: Synthetic oligonucleotide
uuguuaggaagucugugga

SEQ ID NO: 3224999 - RNA, 19 nt, Artificial Sequence
  Description of Artificial Sequence: Synthetic oligonucleotide
agauucaucugggacagac

SEQ ID NO: 3225000 - RNA, 19 nt, Artificial Sequence
  Description of Artificial Sequence: Synthetic oligonucleotide
agaaaagcacacuaaguau

SEQ ID NO: 3225001 - RNA, 19 nt, Artificial Sequence
  Description of Artificial Sequence: Synthetic oligonucleotide
aguuucuaccuauuuuguc

SEQ ID NO: 3225002 - RNA, 19 nt, Artificial Sequence
  Description of Artificial Sequence: Synthetic oligonucleotide
guuaggaagucuguggagg

SEQ ID NO: 3225003 - RNA, 19 nt, Artificial Sequence
  Description of Artificial Sequence: Synthetic oligonucleotide
aagaaaucaaauaacuauu

SEQ ID NO: 3225004 - RNA, 19 nt, Artificial Sequence
  Description of Artificial Sequence: Synthetic oligonucleotide
uugaaacugcuguacauac

SEQ ID NO: 3225005 - RNA, 19 nt, Artificial Sequence
  Description of Artificial Sequence: Synthetic oligonucleotide
acuguugaaacugcuguac

SEQ ID NO: 3225006 - RNA, 19 nt, Artificial Sequence
  Description of Artificial Sequence: Synthetic oligonucleotide
uaguuguaacagcaaauga

SEQ ID NO: 3225007 - RNA, 19 nt, Artificial Sequence
  Description of Artificial Sequence: Synthetic oligonucleotide
ugucauuaguuguaacagc

SEQ ID NO: 3225008 - RNA, 19 nt, Artificial Sequence
  Description of Artificial Sequence: Synthetic oligonucleotide
acuggucccaaacuuaaug

SEQ ID NO: 3225009 - RNA, 19 nt, Artificial Sequence
  Description of Artificial Sequence: Synthetic oligonucleotide
gaaaagcacacuaaguauc

SEQ ID NO: 3225010 - RNA, 19 nt, Artificial Sequence
  Description of Artificial Sequence: Synthetic oligonucleotide
acuuacaaaauuugguaau

SEQ ID NO: 3225011 - RNA, 19 nt, Artificial Sequence
  Description of Artificial Sequence: Synthetic oligonucleotide
gaaagauucucuucacuuc

SEQ ID NO: 3225012 - RNA, 19 nt, Artificial Sequence
  Description of Artificial Sequence: Synthetic oligonucleotide
cagcaaaugaauucugcag

SEQ ID NO: 3225013 - RNA, 19 nt, Artificial Sequence
  Description of Artificial Sequence: Synthetic oligonucleotide
auucaucugggacagacau

SEQ ID NO: 3225014 - RNA, 19 nt, Artificial Sequence
  Description of Artificial Sequence: Synthetic oligonucleotide
augcacacgaugcuggauc

SEQ ID NO: 3225015 - RNA, 19 nt, Artificial Sequence
  Description of Artificial Sequence: Synthetic oligonucleotide
ucuucacugucauuaguug

SEQ ID NO: 3225016 - RNA, 19 nt, Artificial Sequence
  Description of Artificial Sequence: Synthetic oligonucleotide
caaugaggaagccaugccc

SEQ ID NO: 3225017 - RNA, 19 nt, Artificial Sequence
  Description of Artificial Sequence: Synthetic oligonucleotide
aauaaaauaacagaaggca

SEQ ID NO: 3225018 - RNA, 19 nt, Artificial Sequence
  Description of Artificial Sequence: Synthetic oligonucleotide
ugaaaauuaaacuaguuuc

SEQ ID NO: 3225019 - RNA, 19 nt, Artificial Sequence
  Description of Artificial Sequence: Synthetic oligonucleotide
aauaaacaaacaucuguac

SEQ ID NO: 3225020 - RNA, 19 nt, Artificial Sequence
  Description of Artificial Sequence: Synthetic oligonucleotide
aaauauacaaauaaaauaa

SEQ ID NO: 3225021 - RNA, 19 nt, Artificial Sequence
  Description of Artificial Sequence: Synthetic oligonucleotide
aauaaagacaauaagagaa

SEQ ID NO: 3225022 - RNA, 19 nt, Artificial Sequence
  Description of Artificial Sequence: Synthetic oligonucleotide
agucaagacagguugaugc

SEQ ID NO: 3225023 - RNA, 19 nt, Artificial Sequence
  Description of Artificial Sequence: Synthetic oligonucleotide
agugcagaaacacaguccc

SEQ ID NO: 3225024 - RNA, 19 nt, Artificial Sequence
  Description of Artificial Sequence: Synthetic oligonucleotide
aaugcuaucaacucaggcu

SEQ ID NO: 3225025 - RNA, 19 nt, Artificial Sequence
  Description of Artificial Sequence: Synthetic oligonucleotide
aaagucaggcaacaugacc

SEQ ID NO: 3225026 - RNA, 19 nt, Artificial Sequence
  Description of Artificial Sequence: Synthetic oligonucleotide
aauuccaauggccuuagag

SEQ ID NO: 3225027 - RNA, 19 nt, Artificial Sequence
  Description of Artificial Sequence: Synthetic oligonucleotide
aaaugcuaucaacucaggc

SEQ ID NO: 3225028 - RNA, 19 nt, Artificial Sequence
  Description of Artificial Sequence: Synthetic oligonucleotide
aguacugugaaaauuaaac

SEQ ID NO: 3225029 - RNA, 19 nt, Artificial Sequence
  Description of Artificial Sequence: Synthetic oligonucleotide
uuuccaagcaacaagacaa

SEQ ID NO: 3225030 - RNA, 19 nt, Artificial Sequence
  Description of Artificial Sequence: Synthetic oligonucleotide
uguuauuugguucaauggc

SEQ ID NO: 3225031 - RNA, 19 nt, Artificial Sequence
  Description of Artificial Sequence: Synthetic oligonucleotide
aagucaggcaacaugaccc

SEQ ID NO: 3225032 - RNA, 19 nt, Artificial Sequence
  Description of Artificial Sequence: Synthetic oligonucleotide
aaaacuuuguaguacugug

SEQ ID NO: 3225033 - RNA, 19 nt, Artificial Sequence
  Description of Artificial Sequence: Synthetic oligonucleotide
aaggcauuaacuguucugc

SEQ ID NO: 3225034 - RNA, 19 nt, Artificial Sequence
  Description of Artificial Sequence: Synthetic oligonucleotide
auuugaauuccacacgcgc

SEQ ID NO: 3225035 - RNA, 19 nt, Artificial Sequence
  Description of Artificial Sequence: Synthetic oligonucleotide
ucuuacuacacucuaauuc

SEQ ID NO: 3225036 - RNA, 19 nt, Artificial Sequence
  Description of Artificial Sequence: Synthetic oligonucleotide
aacaagacaaggcuguaag

SEQ ID NO: 3225037 - RNA, 19 nt, Artificial Sequence
  Description of Artificial Sequence: Synthetic oligonucleotide
uuugaaauuccaauggccu

SEQ ID NO: 3225038 - RNA, 19 nt, Artificial Sequence
  Description of Artificial Sequence: Synthetic oligonucleotide
uaagaaaacaugauacaug

SEQ ID NO: 3225039 - RNA, 19 nt, Artificial Sequence
  Description of Artificial Sequence: Synthetic oligonucleotide
aguuugaaauuccaauggc

SEQ ID NO: 3225040 - RNA, 19 nt, Artificial Sequence
  Description of Artificial Sequence: Synthetic oligonucleotide
auuauggcaaaacagcuug

SEQ ID NO: 3225041 - RNA, 19 nt, Artificial Sequence
  Description of Artificial Sequence: Synthetic oligonucleotide
aagauuaguggcuaaacau

SEQ ID NO: 3225042 - RNA, 19 nt, Artificial Sequence
  Description of Artificial Sequence: Synthetic oligonucleotide
ugacuauccaaaaucugcg

SEQ ID NO: 3225043 - RNA, 19 nt, Artificial Sequence
  Description of Artificial Sequence: Synthetic oligonucleotide
auaaauccugcucagauga

SEQ ID NO: 3225044 - RNA, 19 nt, Artificial Sequence
  Description of Artificial Sequence: Synthetic oligonucleotide
aagaaauagguacaauugu

SEQ ID NO: 3225045 - RNA, 19 nt, Artificial Sequence
  Description of Artificial Sequence: Synthetic oligonucleotide
uaagggacuauccagauua

SEQ ID NO: 3225046 - RNA, 19 nt, Artificial Sequence
  Description of Artificial Sequence: Synthetic oligonucleotide
cauuagaguuucuagaaag

SEQ ID NO: 3225047 - RNA, 19 nt, Artificial Sequence
  Description of Artificial Sequence: Synthetic oligonucleotide
ucugcgagcagauagcaag

SEQ ID NO: 3225048 - RNA, 19 nt, Artificial Sequence
  Description of Artificial Sequence: Synthetic oligonucleotide
gaagacuuggaucugcgag

SEQ ID NO: 3225049 - RNA, 19 nt, Artificial Sequence
  Description of Artificial Sequence: Synthetic oligonucleotide
uucuuuuccaagcaacaag

SEQ ID NO: 3225050 - RNA, 19 nt, Artificial Sequence
  Description of Artificial Sequence: Synthetic oligonucleotide
cugacuauccaaaaucugc

SEQ ID NO: 3225051 - RNA, 19 nt, Artificial Sequence
  Description of Artificial Sequence: Synthetic oligonucleotide
auuuucuacaguuauucca

SEQ ID NO: 3225052 - RNA, 19 nt, Artificial Sequence
  Description of Artificial Sequence: Synthetic oligonucleotide
aauucagugagguuccccu

SEQ ID NO: 3225053 - RNA, 19 nt, Artificial Sequence
  Description of Artificial Sequence: Synthetic oligonucleotide
uauaaauucugcuucuuaa

SEQ ID NO: 3225054 - RNA, 19 nt, Artificial Sequence
  Description of Artificial Sequence: Synthetic oligonucleotide
agugacacaccucaugcac

SEQ ID NO: 3225055 - RNA, 19 nt, Artificial Sequence
  Description of Artificial Sequence: Synthetic oligonucleotide
uucuaagacuguuucagag

SEQ ID NO: 3225056 - RNA, 19 nt, Artificial Sequence
  Description of Artificial Sequence: Synthetic oligonucleotide
aaggcagugacacaccuca

SEQ ID NO: 3225057 - RNA, 19 nt, Artificial Sequence
  Description of Artificial Sequence: Synthetic oligonucleotide
auaaacaaacaucuguaca

SEQ ID NO: 3225058 - RNA, 19 nt, Artificial Sequence
  Description of Artificial Sequence: Synthetic oligonucleotide
uuauuugguucaauggcag

SEQ ID NO: 3225059 - RNA, 19 nt, Artificial Sequence
  Description of Artificial Sequence: Synthetic oligonucleotide
auauccaaggagucaagac

SEQ ID NO: 3225060 - RNA, 19 nt, Artificial Sequence
  Description of Artificial Sequence: Synthetic oligonucleotide
aaaggcauuaacuguucug

SEQ ID NO: 3225061 - RNA, 19 nt, Artificial Sequence
  Description of Artificial Sequence: Synthetic oligonucleotide
uuuuaaccaauggugagag

SEQ ID NO: 3225062 - RNA, 19 nt, Artificial Sequence
  Description of Artificial Sequence: Synthetic oligonucleotide
aaucccagccacucugacc

SEQ ID NO: 3225063 - RNA, 19 nt, Artificial Sequence
  Description of Artificial Sequence: Synthetic oligonucleotide
uuuuccaagcaacaagaca

SEQ ID NO: 3225064 - RNA, 19 nt, Artificial Sequence
  Description of Artificial Sequence: Synthetic oligonucleotide
aucaaggcagagcagagag

SEQ ID NO: 3225065 - RNA, 19 nt, Artificial Sequence
  Description of Artificial Sequence: Synthetic oligonucleotide
guuagcuugguaucaaugc

SEQ ID NO: 3225066 - RNA, 19 nt, Artificial Sequence
  Description of Artificial Sequence: Synthetic oligonucleotide
cuguuauuugguucaaugg

SEQ ID NO: 3225067 - RNA, 19 nt, Artificial Sequence
  Description of Artificial Sequence: Synthetic oligonucleotide
cuugggaagccacaaaggg

SEQ ID NO: 3225068 - RNA, 19 nt, Artificial Sequence
  Description of Artificial Sequence: Synthetic oligonucleotide
auuccuacugcauucaaga

SEQ ID NO: 3225069 - RNA, 19 nt, Artificial Sequence
  Description of Artificial Sequence: Synthetic oligonucleotide
auuccauuuuaaccaaugg

SEQ ID NO: 3225070 - RNA, 19 nt, Artificial Sequence
  Description of Artificial Sequence: Synthetic oligonucleotide
acugugaaaauuaaacuag

SEQ ID NO: 3225071 - RNA, 19 nt, Artificial Sequence
  Description of Artificial Sequence: Synthetic oligonucleotide
agcuuaauuggucacaggu

SEQ ID NO: 3225072 - RNA, 19 nt, Artificial Sequence
  Description of Artificial Sequence: Synthetic oligonucleotide
cuggaauaguaaaauauac

SEQ ID NO: 3225073 - RNA, 19 nt, Artificial Sequence
  Description of Artificial Sequence: Synthetic oligonucleotide
auuccaauggccuuagaga

SEQ ID NO: 3225074 - RNA, 19 nt, Artificial Sequence
  Description of Artificial Sequence: Synthetic oligonucleotide
ugccauucaaacaaucuac

SEQ ID NO: 3225075 - RNA, 19 nt, Artificial Sequence
  Description of Artificial Sequence: Synthetic oligonucleotide
aagggcugaaaaucccagc

SEQ ID NO: 3225076 - RNA, 19 nt, Artificial Sequence
  Description of Artificial Sequence: Synthetic oligonucleotide
ugcuugggaagccacaaag

SEQ ID NO: 3225077 - RNA, 19 nt, Artificial Sequence
  Description of Artificial Sequence: Synthetic oligonucleotide
cacauuagcagcaaaauaa

SEQ ID NO: 3225078 - RNA, 19 nt, Artificial Sequence
  Description of Artificial Sequence: Synthetic oligonucleotide
aaaacacccggauugcaga

SEQ ID NO: 3225079 - RNA, 19 nt, Artificial Sequence
  Description of Artificial Sequence: Synthetic oligonucleotide
cuaauucuaagacuguuuc

SEQ ID NO: 3225080 - RNA, 19 nt, Artificial Sequence
  Description of Artificial Sequence: Synthetic oligonucleotide
acaugauacaugugggagg

SEQ ID NO: 3225081 - RNA, 19 nt, Artificial Sequence
  Description of Artificial Sequence: Synthetic oligonucleotide
aauggcagaauaaggcgac

SEQ ID NO: 3225082 - RNA, 19 nt, Artificial Sequence
  Description of Artificial Sequence: Synthetic oligonucleotide
aauauaugccagacucugc

SEQ ID NO: 3225083 - RNA, 19 nt, Artificial Sequence
  Description of Artificial Sequence: Synthetic oligonucleotide
agucaaacaguucaucugu

SEQ ID NO: 3225084 - RNA, 19 nt, Artificial Sequence
  Description of Artificial Sequence: Synthetic oligonucleotide
auauacaaauaaaauaaca

SEQ ID NO: 3225085 - RNA, 19 nt, Artificial Sequence
  Description of Artificial Sequence: Synthetic oligonucleotide
cuaggucugagauaaacuc

SEQ ID NO: 3225086 - RNA, 19 nt, Artificial Sequence
  Description of Artificial Sequence: Synthetic oligonucleotide
auaagauuaguggcuaaac

SEQ ID NO: 3225087 - RNA, 19 nt, Artificial Sequence
  Description of Artificial Sequence: Synthetic oligonucleotide
auauaugccagacucugcu

SEQ ID NO: 3225088 - RNA, 19 nt, Artificial Sequence
  Description of Artificial Sequence: Synthetic oligonucleotide
agagaccaaauuuagaauu

SEQ ID NO: 3225089 - RNA, 19 nt, Artificial Sequence
  Description of Artificial Sequence: Synthetic oligonucleotide
acaaucuacaugaagauaa

SEQ ID NO: 3225090 - RNA, 19 nt, Artificial Sequence
  Description of Artificial Sequence: Synthetic oligonucleotide
gauuaguggcuaaacauug

SEQ ID NO: 3225091 - RNA, 19 nt, Artificial Sequence
  Description of Artificial Sequence: Synthetic oligonucleotide
ugaccuacacagaacauaa

SEQ ID NO: 3225092 - RNA, 19 nt, Artificial Sequence
  Description of Artificial Sequence: Synthetic oligonucleotide
ucucaugucaugucaacac

SEQ ID NO: 3225093 - RNA, 19 nt, Artificial Sequence
  Description of Artificial Sequence: Synthetic oligonucleotide
aucuuaauuauggcaaaac

SEQ ID NO: 3225094 - RNA, 19 nt, Artificial Sequence
  Description of Artificial Sequence: Synthetic oligonucleotide
aagcuaccagauaaugucc

SEQ ID NO: 3225095 - RNA, 19 nt, Artificial Sequence
  Description of Artificial Sequence: Synthetic oligonucleotide
uuugcaacuacaagccaga

SEQ ID NO: 3225096 - RNA, 19 nt, Artificial Sequence
  Description of Artificial Sequence: Synthetic oligonucleotide
accacaagggcugaaaauc

SEQ ID NO: 3225097 - RNA, 19 nt, Artificial Sequence
  Description of Artificial Sequence: Synthetic oligonucleotide
aaaggcagcugucaccuca

SEQ ID NO: 3225098 - RNA, 19 nt, Artificial Sequence
  Description of Artificial Sequence: Synthetic oligonucleotide
agaguuucuagaaagaaau

SEQ ID NO: 3225099 - RNA, 19 nt, Artificial Sequence
  Description of Artificial Sequence: Synthetic oligonucleotide
ugagcugaccuacacagaa

SEQ ID NO: 3225100 - RNA, 19 nt, Artificial Sequence
  Description of Artificial Sequence: Synthetic oligonucleotide
cucauacucucucacaaag

SEQ ID NO: 3225101 - RNA, 19 nt, Artificial Sequence
  Description of Artificial Sequence: Synthetic oligonucleotide
caugauacaugugggaggg

SEQ ID NO: 3225102 - RNA, 19 nt, Artificial Sequence
  Description of Artificial Sequence: Synthetic oligonucleotide
gacgacacgacacagaagu

SEQ ID NO: 3225103 - RNA, 19 nt, Artificial Sequence
  Description of Artificial Sequence: Synthetic oligonucleotide
uugaauuccacacgcgcac

SEQ ID NO: 3225104 - RNA, 19 nt, Artificial Sequence
  Description of Artificial Sequence: Synthetic oligonucleotide
ugucuaacaaaagucauua

SEQ ID NO: 3225105 - RNA, 19 nt, Artificial Sequence
  Description of Artificial Sequence: Synthetic oligonucleotide
uaacagaaggcagugacac

SEQ ID NO: 3225106 - RNA, 19 nt, Artificial Sequence
  Description of Artificial Sequence: Synthetic oligonucleotide
uggcuaaacauuguuuggg

SEQ ID NO: 3225107 - RNA, 19 nt, Artificial Sequence
  Description of Artificial Sequence: Synthetic oligonucleotide
aucuuucaaaggcauuaac

SEQ ID NO: 3225108 - RNA, 19 nt, Artificial Sequence
  Description of Artificial Sequence: Synthetic oligonucleotide
uacagauaaaacacccgga

SEQ ID NO: 3225109 - RNA, 19 nt, Artificial Sequence
  Description of Artificial Sequence: Synthetic oligonucleotide
ugucuuacuacacucuaau

SEQ ID NO: 3225110 - RNA, 19 nt, Artificial Sequence
  Description of Artificial Sequence: Synthetic oligonucleotide
gggaauauaugccagacuc

SEQ ID NO: 3225111 - RNA, 19 nt, Artificial Sequence
  Description of Artificial Sequence: Synthetic oligonucleotide
uagaguuucuagaaagaaa

SEQ ID NO: 3225112 - RNA, 19 nt, Artificial Sequence
  Description of Artificial Sequence: Synthetic oligonucleotide
agaguucuaggucugagau

SEQ ID NO: 3225113 - RNA, 19 nt, Artificial Sequence
  Description of Artificial Sequence: Synthetic oligonucleotide
acuauccaaaaucugcgca

SEQ ID NO: 3225114 - RNA, 19 nt, Artificial Sequence
  Description of Artificial Sequence: Synthetic oligonucleotide
auauauaauaaugcaauuu

SEQ ID NO: 3225115 - RNA, 19 nt, Artificial Sequence
  Description of Artificial Sequence: Synthetic oligonucleotide
ucaaaccaccacaagggcu

SEQ ID NO: 3225116 - RNA, 19 nt, Artificial Sequence
  Description of Artificial Sequence: Synthetic oligonucleotide
ucuaauucuaagacuguuu

SEQ ID NO: 3225117 - RNA, 19 nt, Artificial Sequence
  Description of Artificial Sequence: Synthetic oligonucleotide
aaaugcauaggucugcagc

SEQ ID NO: 3225118 - RNA, 19 nt, Artificial Sequence
  Description of Artificial Sequence: Synthetic oligonucleotide
aacuaagagauucagcaac

SEQ ID NO: 3225119 - RNA, 19 nt, Artificial Sequence
  Description of Artificial Sequence: Synthetic oligonucleotide
aauuucaggagucacaucu

SEQ ID NO: 3225120 - RNA, 19 nt, Artificial Sequence
  Description of Artificial Sequence: Synthetic oligonucleotide
aaucuaaagaacuaagaga

SEQ ID NO: 3225121 - RNA, 19 nt, Artificial Sequence
  Description of Artificial Sequence: Synthetic oligonucleotide
guaaucauaauucugauca

SEQ ID NO: 3225122 - RNA, 19 nt, Artificial Sequence
  Description of Artificial Sequence: Synthetic oligonucleotide
aagaacuagaauuucagga

SEQ ID NO: 3225123 - RNA, 19 nt, Artificial Sequence
  Description of Artificial Sequence: Synthetic oligonucleotide
gaaucuaaagaacuaagag

SEQ ID NO: 3225124 - RNA, 19 nt, Artificial Sequence
  Description of Artificial Sequence: Synthetic oligonucleotide
agaacuaagagauucagca

SEQ ID NO: 3225125 - RNA, 19 nt, Artificial Sequence
  Description of Artificial Sequence: Synthetic oligonucleotide
ucugcagcgagucauacgg

SEQ ID NO: 3225126 - RNA, 19 nt, Artificial Sequence
  Description of Artificial Sequence: Synthetic oligonucleotide
aaugcauaggucugcagcg

SEQ ID NO: 3225127 - RNA, 19 nt, Artificial Sequence
  Description of Artificial Sequence: Synthetic oligonucleotide
aaugacauuaucugggaug

SEQ ID NO: 3225128 - RNA, 19 nt, Artificial Sequence
  Description of Artificial Sequence: Synthetic oligonucleotide
ucagaguuugagcugaugg

SEQ ID NO: 3225129 - RNA, 19 nt, Artificial Sequence
  Description of Artificial Sequence: Synthetic oligonucleotide
agccauuuccuucaaaugc

SEQ ID NO: 3225130 - RNA, 19 nt, Artificial Sequence
  Description of Artificial Sequence: Synthetic oligonucleotide
uuuuauucaguacauuuca

SEQ ID NO: 3225131 - RNA, 19 nt, Artificial Sequence
  Description of Artificial Sequence: Synthetic oligonucleotide
guacauuucaaauuaacug

SEQ ID NO: 3225132 - RNA, 19 nt, Artificial Sequence
  Description of Artificial Sequence: Synthetic oligonucleotide
aaauuaacuguccaaggcu

SEQ ID NO: 3225133 - RNA, 19 nt, Artificial Sequence
  Description of Artificial Sequence: Synthetic oligonucleotide
uacauuucaaauuaacugu

SEQ ID NO: 3225134 - RNA, 19 nt, Artificial Sequence
  Description of Artificial Sequence: Synthetic oligonucleotide
auuuccuucaaaugcauag

SEQ ID NO: 3225135 - RNA, 19 nt, Artificial Sequence
  Description of Artificial Sequence: Synthetic oligonucleotide
auuuccauacaugucagcc

SEQ ID NO: 3225136 - RNA, 19 nt, Artificial Sequence
  Description of Artificial Sequence: Synthetic oligonucleotide
ucaagaacuagaauuucag

SEQ ID NO: 3225137 - RNA, 19 nt, Artificial Sequence
  Description of Artificial Sequence: Synthetic oligonucleotide
agaacuagaauuucaggag

SEQ ID NO: 3225138 - RNA, 19 nt, Artificial Sequence
  Description of Artificial Sequence: Synthetic oligonucleotide
uagguaaucauaauucuga

SEQ ID NO: 3225139 - RNA, 19 nt, Artificial Sequence
  Description of Artificial Sequence: Synthetic oligonucleotide
ucugaucagaguuugagcu

SEQ ID NO: 3225140 - RNA, 19 nt, Artificial Sequence
  Description of Artificial Sequence: Synthetic oligonucleotide
ucaaauuaacuguccaagg

SEQ ID NO: 3225141 - RNA, 19 nt, Artificial Sequence
  Description of Artificial Sequence: Synthetic oligonucleotide
ugcuuuuaaaagucggucg

SEQ ID NO: 3225142 - RNA, 19 nt, Artificial Sequence
  Description of Artificial Sequence: Synthetic oligonucleotide
ucugggaugcuuuuaaaag

SEQ ID NO: 3225143 - RNA, 19 nt, Artificial Sequence
  Description of Artificial Sequence: Synthetic oligonucleotide
uucaaauuaacuguccaag

SEQ ID NO: 3225144 - RNA, 19 nt, Artificial Sequence
  Description of Artificial Sequence: Synthetic oligonucleotide
acuuagguaaucauaauuc

SEQ ID NO: 3225145 - RNA, 19 nt, Artificial Sequence
  Description of Artificial Sequence: Synthetic oligonucleotide
uucaguacauuucaaauua

SEQ ID NO: 3225146 - RNA, 19 nt, Artificial Sequence
  Description of Artificial Sequence: Synthetic oligonucleotide
aagagauucagcaacugag

SEQ ID NO: 3225147 - RNA, 19 nt, Artificial Sequence
  Description of Artificial Sequence: Synthetic oligonucleotide
ugauggaaucuaaagaacu

SEQ ID NO: 3225148 - RNA, 19 nt, Artificial Sequence
  Description of Artificial Sequence: Synthetic oligonucleotide
uuagguaaucauaauucug

SEQ ID NO: 3225149 - RNA, 19 nt, Artificial Sequence
  Description of Artificial Sequence: Synthetic oligonucleotide
aguacaaggucuccuggcc

SEQ ID NO: 3225150 - RNA, 19 nt, Artificial Sequence
  Description of Artificial Sequence: Synthetic oligonucleotide
augacauuaucugggaugc

SEQ ID NO: 3225151 - RNA, 19 nt, Artificial Sequence
  Description of Artificial Sequence: Synthetic oligonucleotide
ucuuucccaaauaaauucc

SEQ ID NO: 3225152 - RNA, 19 nt, Artificial Sequence
  Description of Artificial Sequence: Synthetic oligonucleotide
caaauuaacuguccaaggc

SEQ ID NO: 3225153 - RNA, 19 nt, Artificial Sequence
  Description of Artificial Sequence: Synthetic oligonucleotide
auccacaucagcuucuuuc

SEQ ID NO: 3225154 - RNA, 19 nt, Artificial Sequence
  Description of Artificial Sequence: Synthetic oligonucleotide
uggaaucuaaagaacuaag

SEQ ID NO: 3225155 - RNA, 19 nt, Artificial Sequence
  Description of Artificial Sequence: Synthetic oligonucleotide
cuaaagaacuaagagauuc

SEQ ID NO: 3225156 - RNA, 19 nt, Artificial Sequence
  Description of Artificial Sequence: Synthetic oligonucleotide
agucuuuuaaagcggggac

SEQ ID NO: 3225157 - RNA, 19 nt, Artificial Sequence
  Description of Artificial Sequence: Synthetic oligonucleotide
aaaaugacauuaucuggga

SEQ ID NO: 3225158 - RNA, 19 nt, Artificial Sequence
  Description of Artificial Sequence: Synthetic oligonucleotide
uuccauacaugucagccag

SEQ ID NO: 3225159 - RNA, 19 nt, Artificial Sequence
  Description of Artificial Sequence: Synthetic oligonucleotide
aaagaacuaagagauucag

SEQ ID NO: 3225160 - RNA, 19 nt, Artificial Sequence
  Description of Artificial Sequence: Synthetic oligonucleotide
aucuaaagaacuaagagau

SEQ ID NO: 3225161 - RNA, 19 nt, Artificial Sequence
  Description of Artificial Sequence: Synthetic oligonucleotide
uauucaguacauuucaaau

SEQ ID NO: 3225162 - RNA, 19 nt, Artificial Sequence
  Description of Artificial Sequence: Synthetic oligonucleotide
aagaacuaagagauucagc

SEQ ID NO: 3225163 - RNA, 19 nt, Artificial Sequence
  Description of Artificial Sequence: Synthetic oligonucleotide
agucggucgacucaagaac

SEQ ID NO: 3225164 - RNA, 19 nt, Artificial Sequence
  Description of Artificial Sequence: Synthetic oligonucleotide
acaucagcuucuuucaguc

SEQ ID NO: 3225165 - RNA, 19 nt, Artificial Sequence
  Description of Artificial Sequence: Synthetic oligonucleotide
uuaaaagucggucgacuca

SEQ ID NO: 3225166 - RNA, 19 nt, Artificial Sequence
  Description of Artificial Sequence: Synthetic oligonucleotide
aaggcuaugaguacaaggu

SEQ ID NO: 3225167 - RNA, 19 nt, Artificial Sequence
  Description of Artificial Sequence: Synthetic oligonucleotide
uaaagaacuaagagauuca

SEQ ID NO: 3225168 - RNA, 19 nt, Artificial Sequence
  Description of Artificial Sequence: Synthetic oligonucleotide
cagccagucuuuuaaagcg

SEQ ID NO: 3225169 - RNA, 19 nt, Artificial Sequence
  Description of Artificial Sequence: Synthetic oligonucleotide
auuucaaauuaacugucca

SEQ ID NO: 3225170 - RNA, 19 nt, Artificial Sequence
  Description of Artificial Sequence: Synthetic oligonucleotide
caaggcuaugaguacaagg

SEQ ID NO: 3225171 - RNA, 19 nt, Artificial Sequence
  Description of Artificial Sequence: Synthetic oligonucleotide
aguuugagcugauggaauc

SEQ ID NO: 3225172 - RNA, 19 nt, Artificial Sequence
  Description of Artificial Sequence: Synthetic oligonucleotide
uaagagauucagcaacuga

SEQ ID NO: 3225173 - RNA, 19 nt, Artificial Sequence
  Description of Artificial Sequence: Synthetic oligonucleotide
agucauacgguggagcccc

SEQ ID NO: 3225174 - RNA, 19 nt, Artificial Sequence
  Description of Artificial Sequence: Synthetic oligonucleotide
uuauucaguacauuucaaa

SEQ ID NO: 3225175 - RNA, 19 nt, Artificial Sequence
  Description of Artificial Sequence: Synthetic oligonucleotide
ucagccagucuuuuaaagc

SEQ ID NO: 3225176 - RNA, 19 nt, Artificial Sequence
  Description of Artificial Sequence: Synthetic oligonucleotide
gagauucagcaacugagcc

SEQ ID NO: 3225177 - RNA, 19 nt, Artificial Sequence
  Description of Artificial Sequence: Synthetic oligonucleotide
ugaguacaaggucuccugg

SEQ ID NO: 3225178 - RNA, 19 nt, Artificial Sequence
  Description of Artificial Sequence: Synthetic oligonucleotide
caagaacuagaauuucagg

SEQ ID NO: 3225179 - RNA, 19 nt, Artificial Sequence
  Description of Artificial Sequence: Synthetic oligonucleotide
ucuuuuaaagcggggaccc

SEQ ID NO: 3225180 - RNA, 19 nt, Artificial Sequence
  Description of Artificial Sequence: Synthetic oligonucleotide
aaucauaauucugaucaga

SEQ ID NO: 3225181 - RNA, 19 nt, Artificial Sequence
  Description of Artificial Sequence: Synthetic oligonucleotide
aacuagaauuucaggaguc

SEQ ID NO: 3225182 - RNA, 19 nt, Artificial Sequence
  Description of Artificial Sequence: Synthetic oligonucleotide
cuuucccaaauaaauuccc

SEQ ID NO: 3225183 - RNA, 19 nt, Artificial Sequence
  Description of Artificial Sequence: Synthetic oligonucleotide
uuuaaaagucggucgacuc

SEQ ID NO: 3225184 - RNA, 19 nt, Artificial Sequence
  Description of Artificial Sequence: Synthetic oligonucleotide
uagaauuucaggagucaca

SEQ ID NO: 3225185 - RNA, 19 nt, Artificial Sequence
  Description of Artificial Sequence: Synthetic oligonucleotide
cauuucaaauuaacugucc

SEQ ID NO: 3225186 - RNA, 19 nt, Artificial Sequence
  Description of Artificial Sequence: Synthetic oligonucleotide
aacugagccauuuccuuca

SEQ ID NO: 3225187 - RNA, 19 nt, Artificial Sequence
  Description of Artificial Sequence: Synthetic oligonucleotide
uuuccuucaaaugcauagg

SEQ ID NO: 3225188 - RNA, 19 nt, Artificial Sequence
  Description of Artificial Sequence: Synthetic oligonucleotide
uucagucuuucccaaauaa

SEQ ID NO: 3225189 - RNA, 19 nt, Artificial Sequence
  Description of Artificial Sequence: Synthetic oligonucleotide
ugagccauuuccuucaaau

SEQ ID NO: 3225190 - RNA, 19 nt, Artificial Sequence
  Description of Artificial Sequence: Synthetic oligonucleotide
uuucaaauuaacuguccaa

SEQ ID NO: 3225191 - RNA, 19 nt, Artificial Sequence
  Description of Artificial Sequence: Synthetic oligonucleotide
gagcugauggaaucuaaag

SEQ ID NO: 3225192 - RNA, 19 nt, Artificial Sequence
  Description of Artificial Sequence: Synthetic oligonucleotide
auacaugucagccagucuu

SEQ ID NO: 3225193 - RNA, 19 nt, Artificial Sequence
  Description of Artificial Sequence: Synthetic oligonucleotide
agagauucagcaacugagc

SEQ ID NO: 3225194 - RNA, 19 nt, Artificial Sequence
  Description of Artificial Sequence: Synthetic oligonucleotide
gucuuucccaaauaaauuc

SEQ ID NO: 3225195 - RNA, 19 nt, Artificial Sequence
  Description of Artificial Sequence: Synthetic oligonucleotide
agcugauggaaucuaaaga

SEQ ID NO: 3225196 - RNA, 19 nt, Artificial Sequence
  Description of Artificial Sequence: Synthetic oligonucleotide
aucauaauucugaucagag

SEQ ID NO: 3225197 - RNA, 19 nt, Artificial Sequence
  Description of Artificial Sequence: Synthetic oligonucleotide
aguacauuucaaauuaacu

SEQ ID NO: 3225198 - RNA, 19 nt, Artificial Sequence
  Description of Artificial Sequence: Synthetic oligonucleotide
accccagucacuuagguaa

SEQ ID NO: 3225199 - RNA, 19 nt, Artificial Sequence
  Description of Artificial Sequence: Synthetic oligonucleotide
uuaucugggaugcuuuuaa

SEQ ID NO: 3225200 - RNA, 19 nt, Artificial Sequence
  Description of Artificial Sequence: Synthetic oligonucleotide
uaaucauaauucugaucag

SEQ ID NO: 3225201 - RNA, 19 nt, Artificial Sequence
  Description of Artificial Sequence: Synthetic oligonucleotide
ugggaugcuuuuaaaaguc

SEQ ID NO: 3225202 - RNA, 19 nt, Artificial Sequence
  Description of Artificial Sequence: Synthetic oligonucleotide
acauuucaaauuaacuguc

SEQ ID NO: 3225203 - RNA, 19 nt, Artificial Sequence
  Description of Artificial Sequence: Synthetic oligonucleotide
auucugaucagaguuugag

SEQ ID NO: 3225204 - RNA, 19 nt, Artificial Sequence
  Description of Artificial Sequence: Synthetic oligonucleotide
uuccuucaaaugcauaggu

SEQ ID NO: 3225205 - RNA, 19 nt, Artificial Sequence
  Description of Artificial Sequence: Synthetic oligonucleotide
uucugaucagaguuugagc

SEQ ID NO: 3225206 - RNA, 19 nt, Artificial Sequence
  Description of Artificial Sequence: Synthetic oligonucleotide
augcuuuuaaaagucgguc

SEQ ID NO: 3225207 - RNA, 19 nt, Artificial Sequence
  Description of Artificial Sequence: Synthetic oligonucleotide
uuuaaagcggggaccccag

SEQ ID NO: 3225208 - RNA, 19 nt, Artificial Sequence
  Description of Artificial Sequence: Synthetic oligonucleotide
uuuauucaguacauuucaa

SEQ ID NO: 3225209 - RNA, 19 nt, Artificial Sequence
  Description of Artificial Sequence: Synthetic oligonucleotide
ucccaaauaaauucccuaa

SEQ ID NO: 3225210 - RNA, 19 nt, Artificial Sequence
  Description of Artificial Sequence: Synthetic oligonucleotide
uuucccaaauaaauucccu

SEQ ID NO: 3225211 - RNA, 19 nt, Artificial Sequence
  Description of Artificial Sequence: Synthetic oligonucleotide
uuuccauacaugucagcca

SEQ ID NO: 3225212 - RNA, 19 nt, Artificial Sequence
  Description of Artificial Sequence: Synthetic oligonucleotide
uaauucugaucagaguuug

SEQ ID NO: 3225213 - RNA, 19 nt, Artificial Sequence
  Description of Artificial Sequence: Synthetic oligonucleotide
uggccauuuccauacaugu

SEQ ID NO: 3225214 - RNA, 19 nt, Artificial Sequence
  Description of Artificial Sequence: Synthetic oligonucleotide
auucaguacauuucaaauu

SEQ ID NO: 3225215 - RNA, 19 nt, Artificial Sequence
  Description of Artificial Sequence: Synthetic oligonucleotide
ucauaauucugaucagagu

SEQ ID NO: 3225216 - RNA, 19 nt, Artificial Sequence
  Description of Artificial Sequence: Synthetic oligonucleotide
aaagcggggaccccaguca

SEQ ID NO: 3225217 - RNA, 19 nt, Artificial Sequence
  Description of Artificial Sequence: Synthetic oligonucleotide
caaagaaaagaacagaggg

SEQ ID NO: 3225218 - RNA, 19 nt, Artificial Sequence
  Description of Artificial Sequence: Synthetic oligonucleotide
uuuguuuucauacaaagau

SEQ ID NO: 3225219 - RNA, 19 nt, Artificial Sequence
  Description of Artificial Sequence: Synthetic oligonucleotide
uaaacuugcauaauaaaca

SEQ ID NO: 3225220 - RNA, 19 nt, Artificial Sequence
  Description of Artificial Sequence: Synthetic oligonucleotide
acuugcauaauaaacaugc

SEQ ID NO: 3225221 - RNA, 19 nt, Artificial Sequence
  Description of Artificial Sequence: Synthetic oligonucleotide
gaauuauuucuuuugaaag

SEQ ID NO: 3225222 - RNA, 19 nt, Artificial Sequence
  Description of Artificial Sequence: Synthetic oligonucleotide
aauaaaaguaguuugucau

SEQ ID NO: 3225223 - RNA, 19 nt, Artificial Sequence
  Description of Artificial Sequence: Synthetic oligonucleotide
agaaaauaaaaguaguuug

SEQ ID NO: 3225224 - RNA, 19 nt, Artificial Sequence
  Description of Artificial Sequence: Synthetic oligonucleotide
uuaaacuugcauaauaaac

SEQ ID NO: 3225225 - RNA, 19 nt, Artificial Sequence
  Description of Artificial Sequence: Synthetic oligonucleotide
aaaauaaaauuuaaaacca

SEQ ID NO: 3225226 - RNA, 19 nt, Artificial Sequence
  Description of Artificial Sequence: Synthetic oligonucleotide
aagacagcuuuucuuaccc

SEQ ID NO: 3225227 - RNA, 19 nt, Artificial Sequence
  Description of Artificial Sequence: Synthetic oligonucleotide
aaagauuucauaaguugcc

SEQ ID NO: 3225228 - RNA, 19 nt, Artificial Sequence
  Description of Artificial Sequence: Synthetic oligonucleotide
acauaaagaaaauaaaagu

SEQ ID NO: 3225229 - RNA, 19 nt, Artificial Sequence
  Description of Artificial Sequence: Synthetic oligonucleotide
auaguaaggcacuauuucc

SEQ ID NO: 3225230 - RNA, 19 nt, Artificial Sequence
  Description of Artificial Sequence: Synthetic oligonucleotide
aaaguaguuugucaugcac

SEQ ID NO: 3225231 - RNA, 19 nt, Artificial Sequence
  Description of Artificial Sequence: Synthetic oligonucleotide
gacauaaagaaaauaaaag

SEQ ID NO: 3225232 - RNA, 19 nt, Artificial Sequence
  Description of Artificial Sequence: Synthetic oligonucleotide
aaaauacacaaaaccaacc

SEQ ID NO: 3225233 - RNA, 19 nt, Artificial Sequence
  Description of Artificial Sequence: Synthetic oligonucleotide
aauuauuucuuuugaaagu

SEQ ID NO: 3225234 - RNA, 19 nt, Artificial Sequence
  Description of Artificial Sequence: Synthetic oligonucleotide
aaauacacaaaaccaaccu

SEQ ID NO: 3225235 - RNA, 19 nt, Artificial Sequence
  Description of Artificial Sequence: Synthetic oligonucleotide
aaugugacggagcugaaug

SEQ ID NO: 3225236 - RNA, 19 nt, Artificial Sequence
  Description of Artificial Sequence: Synthetic oligonucleotide
aaaauaaaaguaguuuguc

SEQ ID NO: 3225237 - RNA, 19 nt, Artificial Sequence
  Description of Artificial Sequence: Synthetic oligonucleotide
uccaccaaagaaaagaaca

SEQ ID NO: 3225238 - RNA, 19 nt, Artificial Sequence
  Description of Artificial Sequence: Synthetic oligonucleotide
auaaagaaaauaaaaguag

SEQ ID NO: 3225239 - RNA, 19 nt, Artificial Sequence
  Description of Artificial Sequence: Synthetic oligonucleotide
aaugaauuauuucuuuuga

SEQ ID NO: 3225240 - RNA, 19 nt, Artificial Sequence
  Description of Artificial Sequence: Synthetic oligonucleotide
aaauaaaaguaguuuguca

SEQ ID NO: 3225241 - RNA, 19 nt, Artificial Sequence
  Description of Artificial Sequence: Synthetic oligonucleotide
uuugucaugcacauuaucu

SEQ ID NO: 3225242 - RNA, 19 nt, Artificial Sequence
  Description of Artificial Sequence: Synthetic oligonucleotide
uaaagaaaauaaaaguagu

SEQ ID NO: 3225243 - RNA, 19 nt, Artificial Sequence
  Description of Artificial Sequence: Synthetic oligonucleotide
ugacauaaagaaaauaaaa

SEQ ID NO: 3225244 - RNA, 19 nt, Artificial Sequence
  Description of Artificial Sequence: Synthetic oligonucleotide
aaaggacugacauaaagaa

SEQ ID NO: 3225245 - RNA, 19 nt, Artificial Sequence
  Description of Artificial Sequence: Synthetic oligonucleotide
uuaucuucugcauagcuca

SEQ ID NO: 3225246 - RNA, 19 nt, Artificial Sequence
  Description of Artificial Sequence: Synthetic oligonucleotide
ugcauaauaaacaugcaau

SEQ ID NO: 3225247 - RNA, 19 nt, Artificial Sequence
  Description of Artificial Sequence: Synthetic oligonucleotide
ucauacaaagauuucauaa

SEQ ID NO: 3225248 - RNA, 19 nt, Artificial Sequence
  Description of Artificial Sequence: Synthetic oligonucleotide
caaagauuucauaaguugc

SEQ ID NO: 3225249 - RNA, 19 nt, Artificial Sequence
  Description of Artificial Sequence: Synthetic oligonucleotide
aaugaacagagccuccuuc

SEQ ID NO: 3225250 - RNA, 19 nt, Artificial Sequence
  Description of Artificial Sequence: Synthetic oligonucleotide
ucuuuguucauuuaaacuu

SEQ ID NO: 3225251 - RNA, 19 nt, Artificial Sequence
  Description of Artificial Sequence: Synthetic oligonucleotide
acaaagauuucauaaguug

SEQ ID NO: 3225252 - RNA, 19 nt, Artificial Sequence
  Description of Artificial Sequence: Synthetic oligonucleotide
uuugcagagagagaggagg

SEQ ID NO: 3225253 - RNA, 19 nt, Artificial Sequence
  Description of Artificial Sequence: Synthetic oligonucleotide
uucauaaguugccacauug

SEQ ID NO: 3225254 - RNA, 19 nt, Artificial Sequence
  Description of Artificial Sequence: Synthetic oligonucleotide
uucauuuaaacuugcauaa

SEQ ID NO: 3225255 - RNA, 19 nt, Artificial Sequence
  Description of Artificial Sequence: Synthetic oligonucleotide
uuuaccaaaguagggaggg

SEQ ID NO: 3225256 - RNA, 19 nt, Artificial Sequence
  Description of Artificial Sequence: Synthetic oligonucleotide
uauaguaaggcacuauuuc

SEQ ID NO: 3225257 - RNA, 19 nt, Artificial Sequence
  Description of Artificial Sequence: Synthetic oligonucleotide
ugaauuauuucuuuugaaa

SEQ ID NO: 3225258 - RNA, 19 nt, Artificial Sequence
  Description of Artificial Sequence: Synthetic oligonucleotide
cauacaaagauuucauaag

SEQ ID NO: 3225259 - RNA, 19 nt, Artificial Sequence
  Description of Artificial Sequence: Synthetic oligonucleotide
uguuuucauacaaagauuu

SEQ ID NO: 3225260 - RNA, 19 nt, Artificial Sequence
  Description of Artificial Sequence: Synthetic oligonucleotide
uguuuaccaaaguagggag

SEQ ID NO: 3225261 - RNA, 19 nt, Artificial Sequence
  Description of Artificial Sequence: Synthetic oligonucleotide
uuuucauacaaagauuuca

SEQ ID NO: 3225262 - RNA, 19 nt, Artificial Sequence
  Description of Artificial Sequence: Synthetic oligonucleotide
aagaaaagaacagagggaa

SEQ ID NO: 3225263 - RNA, 19 nt, Artificial Sequence
  Description of Artificial Sequence: Synthetic oligonucleotide
uguccuuagacacaccacc

SEQ ID NO: 3225264 - RNA, 19 nt, Artificial Sequence
  Description of Artificial Sequence: Synthetic oligonucleotide
auaauaaacaugcaaugaa

SEQ ID NO: 3225265 - RNA, 19 nt, Artificial Sequence
  Description of Artificial Sequence: Synthetic oligonucleotide
aaacuugcauaauaaacau

SEQ ID NO: 3225266 - RNA, 19 nt, Artificial Sequence
  Description of Artificial Sequence: Synthetic oligonucleotide
cauaaagaaaauaaaagua

SEQ ID NO: 3225267 - RNA, 19 nt, Artificial Sequence
  Description of Artificial Sequence: Synthetic oligonucleotide
aagaaaauaaaaguaguuu

SEQ ID NO: 3225268 - RNA, 19 nt, Artificial Sequence
  Description of Artificial Sequence: Synthetic oligonucleotide
uaaaaguaguuugucaugc

SEQ ID NO: 3225269 - RNA, 19 nt, Artificial Sequence
  Description of Artificial Sequence: Synthetic oligonucleotide
uauuucuuuugaaaguugu

SEQ ID NO: 3225270 - RNA, 19 nt, Artificial Sequence
  Description of Artificial Sequence: Synthetic oligonucleotide
aaaaggugaagacagcuuu

SEQ ID NO: 3225271 - RNA, 19 nt, Artificial Sequence
  Description of Artificial Sequence: Synthetic oligonucleotide
uuuuguuuucauacaaaga

SEQ ID NO: 3225272 - RNA, 19 nt, Artificial Sequence
  Description of Artificial Sequence: Synthetic oligonucleotide
acaaaaccaaccuagacua

SEQ ID NO: 3225273 - RNA, 19 nt, Artificial Sequence
  Description of Artificial Sequence: Synthetic oligonucleotide
aauaaaauuuaaaaccaaa

SEQ ID NO: 3225274 - RNA, 19 nt, Artificial Sequence
  Description of Artificial Sequence: Synthetic oligonucleotide
cacauuaucuucugcauag

SEQ ID NO: 3225275 - RNA, 19 nt, Artificial Sequence
  Description of Artificial Sequence: Synthetic oligonucleotide
gagagagagagagagagag

SEQ ID NO: 3225276 - RNA, 19 nt, Artificial Sequence
  Description of Artificial Sequence: Synthetic oligonucleotide
uaguuugucaugcacauua

SEQ ID NO: 3225277 - RNA, 19 nt, Artificial Sequence
  Description of Artificial Sequence: Synthetic oligonucleotide
uaauaaacaugcaaugaau

SEQ ID NO: 3225278 - RNA, 19 nt, Artificial Sequence
  Description of Artificial Sequence: Synthetic oligonucleotide
auacaaagauuucauaagu

SEQ ID NO: 3225279 - RNA, 19 nt, Artificial Sequence
  Description of Artificial Sequence: Synthetic oligonucleotide
uuucccuuugcagagagag

SEQ ID NO: 3225280 - RNA, 19 nt, Artificial Sequence
  Description of Artificial Sequence: Synthetic oligonucleotide
acuauuucccuuugcagag

SEQ ID NO: 3225281 - RNA, 19 nt, Artificial Sequence
  Description of Artificial Sequence: Synthetic oligonucleotide
aaaaggacugacauaaaga

SEQ ID NO: 3225282 - RNA, 19 nt, Artificial Sequence
  Description of Artificial Sequence: Synthetic oligonucleotide
aacagagccuccuucuguc

SEQ ID NO: 3225283 - RNA, 19 nt, Artificial Sequence
  Description of Artificial Sequence: Synthetic oligonucleotide
uguucauuuaaacuugcau

SEQ ID NO: 3225284 - RNA, 19 nt, Artificial Sequence
  Description of Artificial Sequence: Synthetic oligonucleotide
uaguaaggcacuauuuccc

SEQ ID NO: 3225285 - RNA, 19 nt, Artificial Sequence
  Description of Artificial Sequence: Synthetic oligonucleotide
aaaaccaaccuagacuaag

SEQ ID NO: 3225286 - RNA, 19 nt, Artificial Sequence
  Description of Artificial Sequence: Synthetic oligonucleotide
uucuuuguucauuuaaacu

SEQ ID NO: 3225287 - RNA, 19 nt, Artificial Sequence
  Description of Artificial Sequence: Synthetic oligonucleotide
aacccacuuauaguaaggc

SEQ ID NO: 3225288 - RNA, 19 nt, Artificial Sequence
  Description of Artificial Sequence: Synthetic oligonucleotide
agauuucauaaguugccac

SEQ ID NO: 3225289 - RNA, 19 nt, Artificial Sequence
  Description of Artificial Sequence: Synthetic oligonucleotide
gagcugaaugaacagagcc

SEQ ID NO: 3225290 - RNA, 19 nt, Artificial Sequence
  Description of Artificial Sequence: Synthetic oligonucleotide
caaugaauuauuucuuuug

SEQ ID NO: 3225291 - RNA, 19 nt, Artificial Sequence
  Description of Artificial Sequence: Synthetic oligonucleotide
uuucauacaaagauuucau

SEQ ID NO: 3225292 - RNA, 19 nt, Artificial Sequence
  Description of Artificial Sequence: Synthetic oligonucleotide
gaguguuuaccaaaguagg

SEQ ID NO: 3225293 - RNA, 19 nt, Artificial Sequence
  Description of Artificial Sequence: Synthetic oligonucleotide
aauacacaaaaccaaccua

SEQ ID NO: 3225294 - RNA, 19 nt, Artificial Sequence
  Description of Artificial Sequence: Synthetic oligonucleotide
uugcauaauaaacaugcaa

SEQ ID NO: 3225295 - RNA, 19 nt, Artificial Sequence
  Description of Artificial Sequence: Synthetic oligonucleotide
auaaaaguaguuugucaug

SEQ ID NO: 3225296 - RNA, 19 nt, Artificial Sequence
  Description of Artificial Sequence: Synthetic oligonucleotide
uuuaaacuugcauaauaaa

SEQ ID NO: 3225297 - RNA, 19 nt, Artificial Sequence
  Description of Artificial Sequence: Synthetic oligonucleotide
ucuucugcauagcucaacc

SEQ ID NO: 3225298 - RNA, 19 nt, Artificial Sequence
  Description of Artificial Sequence: Synthetic oligonucleotide
cuuuguucauuuaaacuug

SEQ ID NO: 3225299 - RNA, 19 nt, Artificial Sequence
  Description of Artificial Sequence: Synthetic oligonucleotide
auugcauuggaguguuuac

SEQ ID NO: 3225300 - RNA, 19 nt, Artificial Sequence
  Description of Artificial Sequence: Synthetic oligonucleotide
acacaaaaccaaccuagac

SEQ ID NO: 3225301 - RNA, 19 nt, Artificial Sequence
  Description of Artificial Sequence: Synthetic oligonucleotide
acaugcaaugaauuauuuc

SEQ ID NO: 3225302 - RNA, 19 nt, Artificial Sequence
  Description of Artificial Sequence: Synthetic oligonucleotide
uucugcauagcucaaccca

SEQ ID NO: 3225303 - RNA, 19 nt, Artificial Sequence
  Description of Artificial Sequence: Synthetic oligonucleotide
auacacaaaaccaaccuag

SEQ ID NO: 3225304 - RNA, 19 nt, Artificial Sequence
  Description of Artificial Sequence: Synthetic oligonucleotide
aaagaaaagaacagaggga

SEQ ID NO: 3225305 - RNA, 19 nt, Artificial Sequence
  Description of Artificial Sequence: Synthetic oligonucleotide
uuucuuuguucauuuaaac

SEQ ID NO: 3225306 - RNA, 19 nt, Artificial Sequence
  Description of Artificial Sequence: Synthetic oligonucleotide
ucuguccuuagacacacca

SEQ ID NO: 3225307 - RNA, 19 nt, Artificial Sequence
  Description of Artificial Sequence: Synthetic oligonucleotide
acugacauaaagaaaauaa

SEQ ID NO: 3225308 - RNA, 19 nt, Artificial Sequence
  Description of Artificial Sequence: Synthetic oligonucleotide
uagcucaacccacuuauag

SEQ ID NO: 3225309 - RNA, 19 nt, Artificial Sequence
  Description of Artificial Sequence: Synthetic oligonucleotide
uuucuuacccuccuccacc

SEQ ID NO: 3225310 - RNA, 19 nt, Artificial Sequence
  Description of Artificial Sequence: Synthetic oligonucleotide
aaguagggaggguaaaugu

SEQ ID NO: 3225311 - RNA, 19 nt, Artificial Sequence
  Description of Artificial Sequence: Synthetic oligonucleotide
uuauuucuuuugaaaguug

SEQ ID NO: 3225312 - RNA, 19 nt, Artificial Sequence
  Description of Artificial Sequence: Synthetic oligonucleotide
accaaagaaaagaacagag

SEQ ID NO: 3225313 - RNA, 19 nt, Artificial Sequence
  Description of Artificial Sequence: Synthetic oligonucleotide
uuuguucauuuaaacuugc

SEQ ID NO: 3225314 - RNA, 19 nt, Artificial Sequence
  Description of Artificial Sequence: Synthetic oligonucleotide
ucauaaguugccacauugc

SEQ ID NO: 3225315 - RNA, 19 nt, Artificial Sequence
  Description of Artificial Sequence: Synthetic oligonucleotide
uaaguugccacauugcauu

SEQ ID NO: 3225316 - RNA, 19 nt, Artificial Sequence
  Description of Artificial Sequence: Synthetic oligonucleotide
ucuuuugaaaguuguauuu

SEQ ID NO: 3225317 - RNA, 19 nt, Artificial Sequence
  Description of Artificial Sequence: Synthetic oligonucleotide
aucauagugauucuguugg

SEQ ID NO: 3225318 - RNA, 19 nt, Artificial Sequence
  Description of Artificial Sequence: Synthetic oligonucleotide
aacaucuccugucucaccc

SEQ ID NO: 3225319 - RNA, 19 nt, Artificial Sequence
  Description of Artificial Sequence: Synthetic oligonucleotide
agaagaucuuaguaaagcg

SEQ ID NO: 3225320 - RNA, 19 nt, Artificial Sequence
  Description of Artificial Sequence: Synthetic oligonucleotide
auaagcaccuucuccaggc

SEQ ID NO: 3225321 - RNA, 19 nt, Artificial Sequence
  Description of Artificial Sequence: Synthetic oligonucleotide
aucuuaguaaagcggaugg

SEQ ID NO: 3225322 - RNA, 19 nt, Artificial Sequence
  Description of Artificial Sequence: Synthetic oligonucleotide
aaucauagugauucuguug

SEQ ID NO: 3225323 - RNA, 19 nt, Artificial Sequence
  Description of Artificial Sequence: Synthetic oligonucleotide
uguugguuguagaagaucu

SEQ ID NO: 3225324 - RNA, 19 nt, Artificial Sequence
  Description of Artificial Sequence: Synthetic oligonucleotide
ugagcgauacacauaagca

SEQ ID NO: 3225325 - RNA, 19 nt, Artificial Sequence
  Description of Artificial Sequence: Synthetic oligonucleotide
acacauaagcaccuucucc

SEQ ID NO: 3225326 - RNA, 19 nt, Artificial Sequence
  Description of Artificial Sequence: Synthetic oligonucleotide
gaagaucuuaguaaagcgg

SEQ ID NO: 3225327 - RNA, 19 nt, Artificial Sequence
  Description of Artificial Sequence: Synthetic oligonucleotide
aguagaauuuuccagugcu

SEQ ID NO: 3225328 - RNA, 19 nt, Artificial Sequence
  Description of Artificial Sequence: Synthetic oligonucleotide
uaggagaaguaguagaccc

SEQ ID NO: 3225329 - RNA, 19 nt, Artificial Sequence
  Description of Artificial Sequence: Synthetic oligonucleotide
uguagaagaucuuaguaaa

SEQ ID NO: 3225330 - RNA, 19 nt, Artificial Sequence
  Description of Artificial Sequence: Synthetic oligonucleotide
aaugcugagcgauacacau

SEQ ID NO: 3225331 - RNA, 19 nt, Artificial Sequence
  Description of Artificial Sequence: Synthetic oligonucleotide
uccuuucucacccuucucg

SEQ ID NO: 3225332 - RNA, 19 nt, Artificial Sequence
  Description of Artificial Sequence: Synthetic oligonucleotide
uagaauuuuccagugcugg

SEQ ID NO: 3225333 - RNA, 19 nt, Artificial Sequence
  Description of Artificial Sequence: Synthetic oligonucleotide
aagaccugcaucuccuuuc

SEQ ID NO: 3225334 - RNA, 19 nt, Artificial Sequence
  Description of Artificial Sequence: Synthetic oligonucleotide
uguugcaguagaauuuucc

SEQ ID NO: 3225335 - RNA, 19 nt, Artificial Sequence
  Description of Artificial Sequence: Synthetic oligonucleotide
agcgauacacauaagcacc

SEQ ID NO: 3225336 - RNA, 19 nt, Artificial Sequence
  Description of Artificial Sequence: Synthetic oligonucleotide
uuguagaagaucuuaguaa

SEQ ID NO: 3225337 - RNA, 19 nt, Artificial Sequence
  Description of Artificial Sequence: Synthetic oligonucleotide
uccagugcuggaaucauag

SEQ ID NO: 3225338 - RNA, 19 nt, Artificial Sequence
  Description of Artificial Sequence: Synthetic oligonucleotide
gauaugguaggagaaguag

SEQ ID NO: 3225339 - RNA, 19 nt, Artificial Sequence
  Description of Artificial Sequence: Synthetic oligonucleotide
uagaagaucuuaguaaagc

SEQ ID NO: 3225340 - RNA, 19 nt, Artificial Sequence
  Description of Artificial Sequence: Synthetic oligonucleotide
agaaguaguagaccccugg

SEQ ID NO: 3225341 - RNA, 19 nt, Artificial Sequence
  Description of Artificial Sequence: Synthetic oligonucleotide
ugcaguagaauuuuccagu

SEQ ID NO: 3225342 - RNA, 19 nt, Artificial Sequence
  Description of Artificial Sequence: Synthetic oligonucleotide
auagugauucuguugguug

SEQ ID NO: 3225343 - RNA, 19 nt, Artificial Sequence
  Description of Artificial Sequence: Synthetic oligonucleotide
accaagaagaccugcaucu

SEQ ID NO: 3225344 - RNA, 19 nt, Artificial Sequence
  Description of Artificial Sequence: Synthetic oligonucleotide
ugcaucuccuuucucaccc

SEQ ID NO: 3225345 - RNA, 19 nt, Artificial Sequence
  Description of Artificial Sequence: Synthetic oligonucleotide
aagaucuuaguaaagcgga

SEQ ID NO: 3225346 - RNA, 19 nt, Artificial Sequence
  Description of Artificial Sequence: Synthetic oligonucleotide
agugacucuggucuccagc

SEQ ID NO: 3225347 - RNA, 19 nt, Artificial Sequence
  Description of Artificial Sequence: Synthetic oligonucleotide
ugcugagcgauacacauaa

SEQ ID NO: 3225348 - RNA, 19 nt, Artificial Sequence
  Description of Artificial Sequence: Synthetic oligonucleotide
uucuguugguuguagaaga

SEQ ID NO: 3225349 - RNA, 19 nt, Artificial Sequence
  Description of Artificial Sequence: Synthetic oligonucleotide
cugagcgauacacauaagc

SEQ ID NO: 3225350 - RNA, 19 nt, Artificial Sequence
  Description of Artificial Sequence: Synthetic oligonucleotide
gaaguaguagaccccuggg

SEQ ID NO: 3225351 - RNA, 19 nt, Artificial Sequence
  Description of Artificial Sequence: Synthetic oligonucleotide
uucagcuccagucacucca

SEQ ID NO: 3225352 - RNA, 19 nt, Artificial Sequence
  Description of Artificial Sequence: Synthetic oligonucleotide
uugcaguagaauuuuccag

SEQ ID NO: 3225353 - RNA, 19 nt, Artificial Sequence
  Description of Artificial Sequence: Synthetic oligonucleotide
uuaguaaagcggaugggaa

SEQ ID NO: 3225354 - RNA, 19 nt, Artificial Sequence
  Description of Artificial Sequence: Synthetic oligonucleotide
ugguuguagaagaucuuag

SEQ ID NO: 3225355 - RNA, 19 nt, Artificial Sequence
  Description of Artificial Sequence: Synthetic oligonucleotide
uaugguaggagaaguagua

SEQ ID NO: 3225356 - RNA, 19 nt, Artificial Sequence
  Description of Artificial Sequence: Synthetic oligonucleotide
cacaagucuccuuggaugg

SEQ ID NO: 3225357 - RNA, 19 nt, Artificial Sequence
  Description of Artificial Sequence: Synthetic oligonucleotide
uccagucacuccaacaucu

SEQ ID NO: 3225358 - RNA, 19 nt, Artificial Sequence
  Description of Artificial Sequence: Synthetic oligonucleotide
uccagccccacacugaaug

SEQ ID NO: 3225359 - RNA, 19 nt, Artificial Sequence
  Description of Artificial Sequence: Synthetic oligonucleotide
gagcgauacacauaagcac

SEQ ID NO: 3225360 - RNA, 19 nt, Artificial Sequence
  Description of Artificial Sequence: Synthetic oligonucleotide
aaguaguagaccccuggga

SEQ ID NO: 3225361 - RNA, 19 nt, Artificial Sequence
  Description of Artificial Sequence: Synthetic oligonucleotide
aauuuuccagugcuggaau

SEQ ID NO: 3225362 - RNA, 19 nt, Artificial Sequence
  Description of Artificial Sequence: Synthetic oligonucleotide
aguaguagaccccugggau

SEQ ID NO: 3225363 - RNA, 19 nt, Artificial Sequence
  Description of Artificial Sequence: Synthetic oligonucleotide
ugaaugcugagcgauacac

SEQ ID NO: 3225364 - RNA, 19 nt, Artificial Sequence
  Description of Artificial Sequence: Synthetic oligonucleotide
ugguaggagaaguaguaga

SEQ ID NO: 3225365 - RNA, 19 nt, Artificial Sequence
  Description of Artificial Sequence: Synthetic oligonucleotide
uuuucugccggggauuccg

SEQ ID NO: 3225366 - RNA, 19 nt, Artificial Sequence
  Description of Artificial Sequence: Synthetic oligonucleotide
ucuccugucucacccuugg

SEQ ID NO: 3225367 - RNA, 19 nt, Artificial Sequence
  Description of Artificial Sequence: Synthetic oligonucleotide
uuucucacccuucucgcca

SEQ ID NO: 3225368 - RNA, 19 nt, Artificial Sequence
  Description of Artificial Sequence: Synthetic oligonucleotide
acugaaugcugagcgauac

SEQ ID NO: 3225369 - RNA, 19 nt, Artificial Sequence
  Description of Artificial Sequence: Synthetic oligonucleotide
gauacacauaagcaccuuc

SEQ ID NO: 3225370 - RNA, 19 nt, Artificial Sequence
  Description of Artificial Sequence: Synthetic oligonucleotide
ucugccaucacgaccuggu

SEQ ID NO: 3225371 - RNA, 19 nt, Artificial Sequence
  Description of Artificial Sequence: Synthetic oligonucleotide
ucuuaguaaagcggauggg

SEQ ID NO: 3225372 - RNA, 19 nt, Artificial Sequence
  Description of Artificial Sequence: Synthetic oligonucleotide
uuccgggaaagccucgggg

SEQ ID NO: 3225373 - RNA, 19 nt, Artificial Sequence
  Description of Artificial Sequence: Synthetic oligonucleotide
gauucuguugguuguagaa

SEQ ID NO: 3225374 - RNA, 19 nt, Artificial Sequence
  Description of Artificial Sequence: Synthetic oligonucleotide
auuuuccagugcuggaauc

SEQ ID NO: 3225375 - RNA, 19 nt, Artificial Sequence
  Description of Artificial Sequence: Synthetic oligonucleotide
cacauaagcaccuucucca

SEQ ID NO: 3225376 - RNA, 19 nt, Artificial Sequence
  Description of Artificial Sequence: Synthetic oligonucleotide
guugcaguagaauuuucca

SEQ ID NO: 3225377 - RNA, 19 nt, Artificial Sequence
  Description of Artificial Sequence: Synthetic oligonucleotide
cagugcuggaaucauagug

SEQ ID NO: 3225378 - RNA, 19 nt, Artificial Sequence
  Description of Artificial Sequence: Synthetic oligonucleotide
uccaacaucuccugucuca

SEQ ID NO: 3225379 - RNA, 19 nt, Artificial Sequence
  Description of Artificial Sequence: Synthetic oligonucleotide
ucccauuguggccaggaug

SEQ ID NO: 3225380 - RNA, 19 nt, Artificial Sequence
  Description of Artificial Sequence: Synthetic oligonucleotide
uccugucucacccuuggga

SEQ ID NO: 3225381 - RNA, 19 nt, Artificial Sequence
  Description of Artificial Sequence: Synthetic oligonucleotide
gaucuuaguaaagcggaug

SEQ ID NO: 3225382 - RNA, 19 nt, Artificial Sequence
  Description of Artificial Sequence: Synthetic oligonucleotide
aagcaccuucuccaggcuc

SEQ ID NO: 3225383 - RNA, 19 nt, Artificial Sequence
  Description of Artificial Sequence: Synthetic oligonucleotide
gcuggaaucauagugauuc

SEQ ID NO: 3225384 - RNA, 19 nt, Artificial Sequence
  Description of Artificial Sequence: Synthetic oligonucleotide
cuugggaccaagaagaccu

SEQ ID NO: 3225385 - RNA, 19 nt, Artificial Sequence
  Description of Artificial Sequence: Synthetic oligonucleotide
aaagcggaugggaacacug

SEQ ID NO: 3225386 - RNA, 19 nt, Artificial Sequence
  Description of Artificial Sequence: Synthetic oligonucleotide
caagaagaccugcaucucc

SEQ ID NO: 3225387 - RNA, 19 nt, Artificial Sequence
  Description of Artificial Sequence: Synthetic oligonucleotide
aguaaagcggaugggaaca

SEQ ID NO: 3225388 - RNA, 19 nt, Artificial Sequence
  Description of Artificial Sequence: Synthetic oligonucleotide
uaguaaagcggaugggaac

SEQ ID NO: 3225389 - RNA, 19 nt, Artificial Sequence
  Description of Artificial Sequence: Synthetic oligonucleotide
guuguagaagaucuuagua

SEQ ID NO: 3225390 - RNA, 19 nt, Artificial Sequence
  Description of Artificial Sequence: Synthetic oligonucleotide
uuuuccagugcuggaauca

SEQ ID NO: 3225391 - RNA, 19 nt, Artificial Sequence
  Description of Artificial Sequence: Synthetic oligonucleotide
accugcacaagucuccuug

SEQ ID NO: 3225392 - RNA, 19 nt, Artificial Sequence
  Description of Artificial Sequence: Synthetic oligonucleotide
agcggaugggaacacuggg

SEQ ID NO: 3225393 - RNA, 19 nt, Artificial Sequence
  Description of Artificial Sequence: Synthetic oligonucleotide
auucuguugguuguagaag

SEQ ID NO: 3225394 - RNA, 19 nt, Artificial Sequence
  Description of Artificial Sequence: Synthetic oligonucleotide
gaacacuggggacagugac

SEQ ID NO: 3225395 - RNA, 19 nt, Artificial Sequence
  Description of Artificial Sequence: Synthetic oligonucleotide
agugcuggaaucauaguga

SEQ ID NO: 3225396 - RNA, 19 nt, Artificial Sequence
  Description of Artificial Sequence: Synthetic oligonucleotide
acacuggggacagugacuc

SEQ ID NO: 3225397 - RNA, 19 nt, Artificial Sequence
  Description of Artificial Sequence: Synthetic oligonucleotide
acauaagcaccuucuccag

SEQ ID NO: 3225398 - RNA, 19 nt, Artificial Sequence
  Description of Artificial Sequence: Synthetic oligonucleotide
agucuccuuggauggaggg

SEQ ID NO: 3225399 - RNA, 19 nt, Artificial Sequence
  Description of Artificial Sequence: Synthetic oligonucleotide
ucuccuuucucacccuucu

SEQ ID NO: 3225400 - RNA, 19 nt, Artificial Sequence
  Description of Artificial Sequence: Synthetic oligonucleotide
gugacucuggucuccagcc

SEQ ID NO: 3225401 - RNA, 19 nt, Artificial Sequence
  Description of Artificial Sequence: Synthetic oligonucleotide
accugcaucuccuuucuca

SEQ ID NO: 3225402 - RNA, 19 nt, Artificial Sequence
  Description of Artificial Sequence: Synthetic oligonucleotide
augccugccauccaaccug

SEQ ID NO: 3225403 - RNA, 19 nt, Artificial Sequence
  Description of Artificial Sequence: Synthetic oligonucleotide
uccgggaaagccucggggc

SEQ ID NO: 3225404 - RNA, 19 nt, Artificial Sequence
  Description of Artificial Sequence: Synthetic oligonucleotide
uagugauucuguugguugu

SEQ ID NO: 3225405 - RNA, 19 nt, Artificial Sequence
  Description of Artificial Sequence: Synthetic oligonucleotide
agcaccuucuccaggcucc

SEQ ID NO: 3225406 - RNA, 19 nt, Artificial Sequence
  Description of Artificial Sequence: Synthetic oligonucleotide
agaauuuuccagugcugga

SEQ ID NO: 3225407 - RNA, 19 nt, Artificial Sequence
  Description of Artificial Sequence: Synthetic oligonucleotide
aagaagaccugcaucuccu

SEQ ID NO: 3225408 - RNA, 19 nt, Artificial Sequence
  Description of Artificial Sequence: Synthetic oligonucleotide
uacacauaagcaccuucuc

SEQ ID NO: 3225409 - RNA, 19 nt, Artificial Sequence
  Description of Artificial Sequence: Synthetic oligonucleotide
cuuaguaaagcggauggga

SEQ ID NO: 3225410 - RNA, 19 nt, Artificial Sequence
  Description of Artificial Sequence: Synthetic oligonucleotide
ugauaugguaggagaagua

SEQ ID NO: 3225411 - RNA, 19 nt, Artificial Sequence
  Description of Artificial Sequence: Synthetic oligonucleotide
uggaaucauagugauucug

SEQ ID NO: 3225412 - RNA, 19 nt, Artificial Sequence
  Description of Artificial Sequence: Synthetic oligonucleotide
cauaagcaccuucuccagg

SEQ ID NO: 3225413 - RNA, 19 nt, Artificial Sequence
  Description of Artificial Sequence: Synthetic oligonucleotide
aucucugccaucacgaccu

SEQ ID NO: 3225414 - RNA, 19 nt, Artificial Sequence
  Description of Artificial Sequence: Synthetic oligonucleotide
aggagaaguaguagacccc

SEQ ID NO: 3225415 - RNA, 19 nt, Artificial Sequence
  Description of Artificial Sequence: Synthetic oligonucleotide
gacucuggucuccagcccc

SEQ ID NO: 3225416 - RNA, 19 nt, Artificial Sequence
  Description of Artificial Sequence: Synthetic oligonucleotide
auacacauaagcaccuucu

SEQ ID NO: 3225417 - RNA, 19 nt, Artificial Sequence
  Description of Artificial Sequence: Synthetic oligonucleotide
uuaguuuaaacucaccacu

SEQ ID NO: 3225418 - RNA, 19 nt, Artificial Sequence
  Description of Artificial Sequence: Synthetic oligonucleotide
uugaggaacaccaugccag

SEQ ID NO: 3225419 - RNA, 19 nt, Artificial Sequence
  Description of Artificial Sequence: Synthetic oligonucleotide
cauugaaacacguagccag

SEQ ID NO: 3225420 - RNA, 19 nt, Artificial Sequence
  Description of Artificial Sequence: Synthetic oligonucleotide
uuuaaacucaccacuugag

SEQ ID NO: 3225421 - RNA, 19 nt, Artificial Sequence
  Description of Artificial Sequence: Synthetic oligonucleotide
aggaacagcaccuugagca

SEQ ID NO: 3225422 - RNA, 19 nt, Artificial Sequence
  Description of Artificial Sequence: Synthetic oligonucleotide
uuuaguuuaaacucaccac

SEQ ID NO: 3225423 - RNA, 19 nt, Artificial Sequence
  Description of Artificial Sequence: Synthetic oligonucleotide
gaaggugacgaacaggaag

SEQ ID NO: 3225424 - RNA, 19 nt, Artificial Sequence
  Description of Artificial Sequence: Synthetic oligonucleotide
ugugccuucucgaaguccg

SEQ ID NO: 3225425 - RNA, 19 nt, Artificial Sequence
  Description of Artificial Sequence: Synthetic oligonucleotide
agcgcauugaaacacguag

SEQ ID NO: 3225426 - RNA, 19 nt, Artificial Sequence
  Description of Artificial Sequence: Synthetic oligonucleotide
aagaagaacacgcccacca

SEQ ID NO: 3225427 - RNA, 19 nt, Artificial Sequence
  Description of Artificial Sequence: Synthetic oligonucleotide
gaaaguguuacagagggac

SEQ ID NO: 3225428 - RNA, 19 nt, Artificial Sequence
  Description of Artificial Sequence: Synthetic oligonucleotide
aaggugacgaacaggaagg

SEQ ID NO: 3225429 - RNA, 19 nt, Artificial Sequence
  Description of Artificial Sequence: Synthetic oligonucleotide
guuacagagggacaggacc

SEQ ID NO: 3225430 - RNA, 19 nt, Artificial Sequence
  Description of Artificial Sequence: Synthetic oligonucleotide
aaacaggcugagcacgcgc

SEQ ID NO: 3225431 - RNA, 19 nt, Artificial Sequence
  Description of Artificial Sequence: Synthetic oligonucleotide
caugaagaagaacacgccc

SEQ ID NO: 3225432 - RNA, 19 nt, Artificial Sequence
  Description of Artificial Sequence: Synthetic oligonucleotide
uugaccgcgucccucaggg

SEQ ID NO: 3225433 - RNA, 19 nt, Artificial Sequence
  Description of Artificial Sequence: Synthetic oligonucleotide
ugcagcuugucucucacug

SEQ ID NO: 3225434 - RNA, 19 nt, Artificial Sequence
  Description of Artificial Sequence: Synthetic oligonucleotide
ucgaaguccgccucgauga

SEQ ID NO: 3225435 - RNA, 19 nt, Artificial Sequence
  Description of Artificial Sequence: Synthetic oligonucleotide
cucgaugaccuucacaggc

SEQ ID NO: 3225436 - RNA, 19 nt, Artificial Sequence
  Description of Artificial Sequence: Synthetic oligonucleotide
cacguagccaggaagacac

SEQ ID NO: 3225437 - RNA, 19 nt, Artificial Sequence
  Description of Artificial Sequence: Synthetic oligonucleotide
caccaugccagccaggacg

SEQ ID NO: 3225438 - RNA, 19 nt, Artificial Sequence
  Description of Artificial Sequence: Synthetic oligonucleotide
gaugcccaggcccaggccg

SEQ ID NO: 3225439 - RNA, 19 nt, Artificial Sequence
  Description of Artificial Sequence: Synthetic oligonucleotide
acaggaaggugccacccgc

SEQ ID NO: 3225440 - RNA, 19 nt, Artificial Sequence
  Description of Artificial Sequence: Synthetic oligonucleotide
uuacagagggacaggaccu

SEQ ID NO: 3225441 - RNA, 19 nt, Artificial Sequence
  Description of Artificial Sequence: Synthetic oligonucleotide
aacaggaaggugccacccg

SEQ ID NO: 3225442 - RNA, 19 nt, Artificial Sequence
  Description of Artificial Sequence: Synthetic oligonucleotide
ugaagaagaacacgcccac

SEQ ID NO: 3225443 - RNA, 19 nt, Artificial Sequence
  Description of Artificial Sequence: Synthetic oligonucleotide
aggagcuucgucauggugg

SEQ ID NO: 3225444 - RNA, 19 nt, Artificial Sequence
  Description of Artificial Sequence: Synthetic oligonucleotide
auagcccagcaccaggaac

SEQ ID NO: 3225445 - RNA, 19 nt, Artificial Sequence
  Description of Artificial Sequence: Synthetic oligonucleotide
augcagaggaccuuggcca

SEQ ID NO: 3225446 - RNA, 19 nt, Artificial Sequence
  Description of Artificial Sequence: Synthetic oligonucleotide
caugcagaggaccuuggcc

SEQ ID NO: 3225447 - RNA, 19 nt, Artificial Sequence
  Description of Artificial Sequence: Synthetic oligonucleotide
acaccgagugcgcagacag

SEQ ID NO: 3225448 - RNA, 19 nt, Artificial Sequence
  Description of Artificial Sequence: Synthetic oligonucleotide
gaagaacacgcccaccaug

SEQ ID NO: 3225449 - RNA, 19 nt, Artificial Sequence
  Description of Artificial Sequence: Synthetic oligonucleotide
aacacguagccaggaagac

SEQ ID NO: 3225450 - RNA, 19 nt, Artificial Sequence
  Description of Artificial Sequence: Synthetic oligonucleotide
ccgaaaguguuacagaggg

SEQ ID NO: 3225451 - RNA, 19 nt, Artificial Sequence
  Description of Artificial Sequence: Synthetic oligonucleotide
accugcugcagcuugucuc

SEQ ID NO: 3225452 - RNA, 19 nt, Artificial Sequence
  Description of Artificial Sequence: Synthetic oligonucleotide
gaucauggcgcucacgguc

SEQ ID NO: 3225453 - RNA, 19 nt, Artificial Sequence
  Description of Artificial Sequence: Synthetic oligonucleotide
ugacgaacaggaaggugcc

SEQ ID NO: 3225454 - RNA, 19 nt, Artificial Sequence
  Description of Artificial Sequence: Synthetic oligonucleotide
gggaucauggcgcucacgg

SEQ ID NO: 3225455 - RNA, 19 nt, Artificial Sequence
  Description of Artificial Sequence: Synthetic oligonucleotide
gauggccacgcccacaaac

SEQ ID NO: 3225456 - RNA, 19 nt, Artificial Sequence
  Description of Artificial Sequence: Synthetic oligonucleotide
ugucucucacugcuggcag

SEQ ID NO: 3225457 - RNA, 19 nt, Artificial Sequence
  Description of Artificial Sequence: Synthetic oligonucleotide
acgcccaccaugcagagga

SEQ ID NO: 3225458 - RNA, 19 nt, Artificial Sequence
  Description of Artificial Sequence: Synthetic oligonucleotide
uaguuuaaacucaccacuu

SEQ ID NO: 3225459 - RNA, 19 nt, Artificial Sequence
  Description of Artificial Sequence: Synthetic oligonucleotide
acgaacaggaaggugccac

SEQ ID NO: 3225460 - RNA, 19 nt, Artificial Sequence
  Description of Artificial Sequence: Synthetic oligonucleotide
gaacacgcccaccaugcag

SEQ ID NO: 3225461 - RNA, 19 nt, Artificial Sequence
  Description of Artificial Sequence: Synthetic oligonucleotide
cacaaacaggcugagcacg

SEQ ID NO: 3225462 - RNA, 19 nt, Artificial Sequence
  Description of Artificial Sequence: Synthetic oligonucleotide
aacaccaugccagccagga

SEQ ID NO: 3225463 - RNA, 19 nt, Artificial Sequence
  Description of Artificial Sequence: Synthetic oligonucleotide
cucuccuccagcuccuugg

SEQ ID NO: 3225464 - RNA, 19 nt, Artificial Sequence
  Description of Artificial Sequence: Synthetic oligonucleotide
uugagcagcugcucgcucc

SEQ ID NO: 3225465 - RNA, 19 nt, Artificial Sequence
  Description of Artificial Sequence: Synthetic oligonucleotide
accgagugcgcagacagcg

SEQ ID NO: 3225466 - RNA, 19 nt, Artificial Sequence
  Description of Artificial Sequence: Synthetic oligonucleotide
accaggagcuucgucaugg

SEQ ID NO: 3225467 - RNA, 19 nt, Artificial Sequence
  Description of Artificial Sequence: Synthetic oligonucleotide
auugaaacacguagccagg

SEQ ID NO: 3225468 - RNA, 19 nt, Artificial Sequence
  Description of Artificial Sequence: Synthetic oligonucleotide
uguuacagagggacaggac

SEQ ID NO: 3225469 - RNA, 19 nt, Artificial Sequence
  Description of Artificial Sequence: Synthetic oligonucleotide
acaaacaggcugagcacgc

SEQ ID NO: 3225470 - RNA, 19 nt, Artificial Sequence
  Description of Artificial Sequence: Synthetic oligonucleotide
ggcagcagcgcauugaaac

SEQ ID NO: 3225471 - RNA, 19 nt, Artificial Sequence
  Description of Artificial Sequence: Synthetic oligonucleotide
agcagugccgacgccacgc

SEQ ID NO: 3225472 - RNA, 19 nt, Artificial Sequence
  Description of Artificial Sequence: Synthetic oligonucleotide
augaagaagaacacgccca

SEQ ID NO: 3225473 - RNA, 19 nt, Artificial Sequence
  Description of Artificial Sequence: Synthetic oligonucleotide
ugaggaacaccaugccagc

SEQ ID NO: 3225474 - RNA, 19 nt, Artificial Sequence
  Description of Artificial Sequence: Synthetic oligonucleotide
agugccgacgccacgcugc

SEQ ID NO: 3225475 - RNA, 19 nt, Artificial Sequence
  Description of Artificial Sequence: Synthetic oligonucleotide
ucucacugcuggcagcagc

SEQ ID NO: 3225476 - RNA, 19 nt, Artificial Sequence
  Description of Artificial Sequence: Synthetic oligonucleotide
aggcugagcagccgcagcg

SEQ ID NO: 3225477 - RNA, 19 nt, Artificial Sequence
  Description of Artificial Sequence: Synthetic oligonucleotide
ucguggauggccacgccca

SEQ ID NO: 3225478 - RNA, 19 nt, Artificial Sequence
  Description of Artificial Sequence: Synthetic oligonucleotide
ucgaacaccgagugcgcag

SEQ ID NO: 3225479 - RNA, 19 nt, Artificial Sequence
  Description of Artificial Sequence: Synthetic oligonucleotide
ugaaacacguagccaggaa

SEQ ID NO: 3225480 - RNA, 19 nt, Artificial Sequence
  Description of Artificial Sequence: Synthetic oligonucleotide
cugcgggccaugcugaugc

SEQ ID NO: 3225481 - RNA, 19 nt, Artificial Sequence
  Description of Artificial Sequence: Synthetic oligonucleotide
aucuccaggaaggugacga

SEQ ID NO: 3225482 - RNA, 19 nt, Artificial Sequence
  Description of Artificial Sequence: Synthetic oligonucleotide
caccacuugaggaacacca

SEQ ID NO: 3225483 - RNA, 19 nt, Artificial Sequence
  Description of Artificial Sequence: Synthetic oligonucleotide
aacacgcccaccaugcaga

SEQ ID NO: 3225484 - RNA, 19 nt, Artificial Sequence
  Description of Artificial Sequence: Synthetic oligonucleotide
cuucacaggcagcagcgag

SEQ ID NO: 3225485 - RNA, 19 nt, Artificial Sequence
  Description of Artificial Sequence: Synthetic oligonucleotide
gaggaccuuggccaccagg

SEQ ID NO: 3225486 - RNA, 19 nt, Artificial Sequence
  Description of Artificial Sequence: Synthetic oligonucleotide
gaccgcgucccucaggggc

SEQ ID NO: 3225487 - RNA, 19 nt, Artificial Sequence
  Description of Artificial Sequence: Synthetic oligonucleotide
ugcgcagacagcgcgaaga

SEQ ID NO: 3225488 - RNA, 19 nt, Artificial Sequence
  Description of Artificial Sequence: Synthetic oligonucleotide
aguguuacagagggacagg

SEQ ID NO: 3225489 - RNA, 19 nt, Artificial Sequence
  Description of Artificial Sequence: Synthetic oligonucleotide
aggggcaccgcgcugcggg

SEQ ID NO: 3225490 - RNA, 19 nt, Artificial Sequence
  Description of Artificial Sequence: Synthetic oligonucleotide
aaguccgccucgaugaccu

SEQ ID NO: 3225491 - RNA, 19 nt, Artificial Sequence
  Description of Artificial Sequence: Synthetic oligonucleotide
uggauggccacgcccacaa

SEQ ID NO: 3225492 - RNA, 19 nt, Artificial Sequence
  Description of Artificial Sequence: Synthetic oligonucleotide
agggccacagccaccagcg

SEQ ID NO: 3225493 - RNA, 19 nt, Artificial Sequence
  Description of Artificial Sequence: Synthetic oligonucleotide
cugauguggcccaagcuca

SEQ ID NO: 3225494 - RNA, 19 nt, Artificial Sequence
  Description of Artificial Sequence: Synthetic oligonucleotide
ucaugguggccaccuaggu

SEQ ID NO: 3225495 - RNA, 19 nt, Artificial Sequence
  Description of Artificial Sequence: Synthetic oligonucleotide
augcccacggggaucaugg

SEQ ID NO: 3225496 - RNA, 19 nt, Artificial Sequence
  Description of Artificial Sequence: Synthetic oligonucleotide
ugcugauguggcccaagcu

SEQ ID NO: 3225497 - RNA, 19 nt, Artificial Sequence
  Description of Artificial Sequence: Synthetic oligonucleotide
gacagcgcgaagaccaggc

SEQ ID NO: 3225498 - RNA, 19 nt, Artificial Sequence
  Description of Artificial Sequence: Synthetic oligonucleotide
agccaggaagacaccaccc

SEQ ID NO: 3225499 - RNA, 19 nt, Artificial Sequence
  Description of Artificial Sequence: Synthetic oligonucleotide
acaggcagcagcgagccca

SEQ ID NO: 3225500 - RNA, 19 nt, Artificial Sequence
  Description of Artificial Sequence: Synthetic oligonucleotide
uugaaacacguagccagga

SEQ ID NO: 3225501 - RNA, 19 nt, Artificial Sequence
  Description of Artificial Sequence: Synthetic oligonucleotide
uugucucucacugcuggca

SEQ ID NO: 3225502 - RNA, 19 nt, Artificial Sequence
  Description of Artificial Sequence: Synthetic oligonucleotide
gcgaagaccaggcugagca

SEQ ID NO: 3225503 - RNA, 19 nt, Artificial Sequence
  Description of Artificial Sequence: Synthetic oligonucleotide
ugggcucgugcugaugugg

SEQ ID NO: 3225504 - RNA, 19 nt, Artificial Sequence
  Description of Artificial Sequence: Synthetic oligonucleotide
cuugaggaacaccaugcca

SEQ ID NO: 3225505 - RNA, 19 nt, Artificial Sequence
  Description of Artificial Sequence: Synthetic oligonucleotide
uggccacgcccacaaacag

SEQ ID NO: 3225506 - RNA, 19 nt, Artificial Sequence
  Description of Artificial Sequence: Synthetic oligonucleotide
gcugauguggcccaagcuc

SEQ ID NO: 3225507 - RNA, 19 nt, Artificial Sequence
  Description of Artificial Sequence: Synthetic oligonucleotide
agggccaggcccucgaaca

SEQ ID NO: 3225508 - RNA, 19 nt, Artificial Sequence
  Description of Artificial Sequence: Synthetic oligonucleotide
agcuccuuggccaggaucu

SEQ ID NO: 3225509 - RNA, 19 nt, Artificial Sequence
  Description of Artificial Sequence: Synthetic oligonucleotide
uccgccucgaugaccuuca

SEQ ID NO: 3225510 - RNA, 19 nt, Artificial Sequence
  Description of Artificial Sequence: Synthetic oligonucleotide
ucucucacugcuggcagca

SEQ ID NO: 3225511 - RNA, 19 nt, Artificial Sequence
  Description of Artificial Sequence: Synthetic oligonucleotide
uucgucaugguggccaccu

SEQ ID NO: 3225512 - RNA, 19 nt, Artificial Sequence
  Description of Artificial Sequence: Synthetic oligonucleotide
gaagaagaacacgcccacc

SEQ ID NO: 3225513 - RNA, 19 nt, Artificial Sequence
  Description of Artificial Sequence: Synthetic oligonucleotide
ggagcggugugccuucucg

SEQ ID NO: 3225514 - RNA, 19 nt, Artificial Sequence
  Description of Artificial Sequence: Synthetic oligonucleotide
agccaggacggcauagccc

SEQ ID NO: 3225515 - RNA, 19 nt, Artificial Sequence
  Description of Artificial Sequence: Synthetic oligonucleotide
aacaggcugagcacgcgcu

SEQ ID NO: 3225516 - RNA, 19 nt, Artificial Sequence
  Description of Artificial Sequence: Synthetic oligonucleotide
cacgcugcuggcuacgcuc

SEQ ID NO: 3225517 - RNA, 19 nt, Artificial Sequence
  Description of Artificial Sequence: Synthetic oligonucleotide
aacaacagaaguuucaagc

SEQ ID NO: 3225518 - RNA, 19 nt, Artificial Sequence
  Description of Artificial Sequence: Synthetic oligonucleotide
uuauuaauggcacaugccg

SEQ ID NO: 3225519 - RNA, 19 nt, Artificial Sequence
  Description of Artificial Sequence: Synthetic oligonucleotide
aaauccacuuaucucaagc

SEQ ID NO: 3225520 - RNA, 19 nt, Artificial Sequence
  Description of Artificial Sequence: Synthetic oligonucleotide
aaagcuugaaguucuguac

SEQ ID NO: 3225521 - RNA, 19 nt, Artificial Sequence
  Description of Artificial Sequence: Synthetic oligonucleotide
uuauuugagagccuaaacc

SEQ ID NO: 3225522 - RNA, 19 nt, Artificial Sequence
  Description of Artificial Sequence: Synthetic oligonucleotide
aaguguuugacuuggggac

SEQ ID NO: 3225523 - RNA, 19 nt, Artificial Sequence
  Description of Artificial Sequence: Synthetic oligonucleotide
uuuaauaucuccugauacg

SEQ ID NO: 3225524 - RNA, 19 nt, Artificial Sequence
  Description of Artificial Sequence: Synthetic oligonucleotide
aaaccaaacgcagagcucc

SEQ ID NO: 3225525 - RNA, 19 nt, Artificial Sequence
  Description of Artificial Sequence: Synthetic oligonucleotide
aagggcaucacacacagcu

SEQ ID NO: 3225526 - RNA, 19 nt, Artificial Sequence
  Description of Artificial Sequence: Synthetic oligonucleotide
uauuugagagccuaaacca

SEQ ID NO: 3225527 - RNA, 19 nt, Artificial Sequence
  Description of Artificial Sequence: Synthetic oligonucleotide
ucuuccaaguugcauaagg

SEQ ID NO: 3225528 - RNA, 19 nt, Artificial Sequence
  Description of Artificial Sequence: Synthetic oligonucleotide
uccugauaaucuuagacag

SEQ ID NO: 3225529 - RNA, 19 nt, Artificial Sequence
  Description of Artificial Sequence: Synthetic oligonucleotide
cuuaucucaagcuggaagc

SEQ ID NO: 3225530 - RNA, 19 nt, Artificial Sequence
  Description of Artificial Sequence: Synthetic oligonucleotide
uccacuuaucucaagcugg

SEQ ID NO: 3225531 - RNA, 19 nt, Artificial Sequence
  Description of Artificial Sequence: Synthetic oligonucleotide
guuucauuaacauccgccg

SEQ ID NO: 3225532 - RNA, 19 nt, Artificial Sequence
  Description of Artificial Sequence: Synthetic oligonucleotide
uuugccuuagcucuaucag

SEQ ID NO: 3225533 - RNA, 19 nt, Artificial Sequence
  Description of Artificial Sequence: Synthetic oligonucleotide
auuaacauccgccggcggc

SEQ ID NO: 3225534 - RNA, 19 nt, Artificial Sequence
  Description of Artificial Sequence: Synthetic oligonucleotide
cuuuaauaucuccugauac

SEQ ID NO: 3225535 - RNA, 19 nt, Artificial Sequence
  Description of Artificial Sequence: Synthetic oligonucleotide
ucugcaauauuuguaaagc

SEQ ID NO: 3225536 - RNA, 19 nt, Artificial Sequence
  Description of Artificial Sequence: Synthetic oligonucleotide
uuuuaucuaacugagaauu

SEQ ID NO: 3225537 - RNA, 19 nt, Artificial Sequence
  Description of Artificial Sequence: Synthetic oligonucleotide
aagacaguccacccucugc

SEQ ID NO: 3225538 - RNA, 19 nt, Artificial Sequence
  Description of Artificial Sequence: Synthetic oligonucleotide
uguccugauaaucuuagac

SEQ ID NO: 3225539 - RNA, 19 nt, Artificial Sequence
  Description of Artificial Sequence: Synthetic oligonucleotide
cuuagacagauccucacgg

SEQ ID NO: 3225540 - RNA, 19 nt, Artificial Sequence
  Description of Artificial Sequence: Synthetic oligonucleotide
aaugugacuguugucuugg

SEQ ID NO: 3225541 - RNA, 19 nt, Artificial Sequence
  Description of Artificial Sequence: Synthetic oligonucleotide
uuucauuaacauccgccgg

SEQ ID NO: 3225542 - RNA, 19 nt, Artificial Sequence
  Description of Artificial Sequence: Synthetic oligonucleotide
auuaauggcacaugccguc

SEQ ID NO: 3225543 - RNA, 19 nt, Artificial Sequence
  Description of Artificial Sequence: Synthetic oligonucleotide
acgaguaccgaguauggac

SEQ ID NO: 3225544 - RNA, 19 nt, Artificial Sequence
  Description of Artificial Sequence: Synthetic oligonucleotide
acuuaucucaagcuggaag

SEQ ID NO: 3225545 - RNA, 19 nt, Artificial Sequence
  Description of Artificial Sequence: Synthetic oligonucleotide
uuauguuucuucuucugca

SEQ ID NO: 3225546 - RNA, 19 nt, Artificial Sequence
  Description of Artificial Sequence: Synthetic oligonucleotide
uuuauuugagagccuaaac

SEQ ID NO: 3225547 - RNA, 19 nt, Artificial Sequence
  Description of Artificial Sequence: Synthetic oligonucleotide
  modified_base (10)..(10): a, c, u, g, unknown or other
ucuggcccunucauggucg

SEQ ID NO: 3225548 - RNA, 19 nt, Artificial Sequence
  Description of Artificial Sequence: Synthetic oligonucleotide
uccaaguugcauaaggacu

SEQ ID NO: 3225549 - RNA, 19 nt, Artificial Sequence
  Description of Artificial Sequence: Synthetic oligonucleotide
uuaauaucuccugauacga

SEQ ID NO: 3225550 - RNA, 19 nt, Artificial Sequence
  Description of Artificial Sequence: Synthetic oligonucleotide
cauauucacaggaaagagc

SEQ ID NO: 3225551 - RNA, 19 nt, Artificial Sequence
  Description of Artificial Sequence: Synthetic oligonucleotide
aauccacuuaucucaagcu

SEQ ID NO: 3225552 - RNA, 19 nt, Artificial Sequence
  Description of Artificial Sequence: Synthetic oligonucleotide
gauacgaguaccgaguaug

SEQ ID NO: 3225553 - RNA, 19 nt, Artificial Sequence
  Description of Artificial Sequence: Synthetic oligonucleotide
ugacugcacagucacaucc

SEQ ID NO: 3225554 - RNA, 19 nt, Artificial Sequence
  Description of Artificial Sequence: Synthetic oligonucleotide
guugucuugggugacaagg

SEQ ID NO: 3225555 - RNA, 19 nt, Artificial Sequence
  Description of Artificial Sequence: Synthetic oligonucleotide
auauucacaggaaagagca

SEQ ID NO: 3225556 - RNA, 19 nt, Artificial Sequence
  Description of Artificial Sequence: Synthetic oligonucleotide
ucuaggucaucucucccgg

SEQ ID NO: 3225557 - RNA, 19 nt, Artificial Sequence
  Description of Artificial Sequence: Synthetic oligonucleotide
ucauauucacaggaaagag

SEQ ID NO: 3225558 - RNA, 19 nt, Artificial Sequence
  Description of Artificial Sequence: Synthetic oligonucleotide
ucuccugauacgaguaccg

SEQ ID NO: 3225559 - RNA, 19 nt, Artificial Sequence
  Description of Artificial Sequence: Synthetic oligonucleotide
aagcagucguccuucuucg

SEQ ID NO: 3225560 - RNA, 19 nt, Artificial Sequence
  Description of Artificial Sequence: Synthetic oligonucleotide
uucauauucacaggaaaga

SEQ ID NO: 3225561 - RNA, 19 nt, Artificial Sequence
  Description of Artificial Sequence: Synthetic oligonucleotide
uauuaauggcacaugccgu

SEQ ID NO: 3225562 - RNA, 19 nt, Artificial Sequence
  Description of Artificial Sequence: Synthetic oligonucleotide
aacucaggcgaagacaguc

SEQ ID NO: 3225563 - RNA, 19 nt, Artificial Sequence
  Description of Artificial Sequence: Synthetic oligonucleotide
gaaguguuugacuugggga

SEQ ID NO: 3225564 - RNA, 19 nt, Artificial Sequence
  Description of Artificial Sequence: Synthetic oligonucleotide
uugcauaaggacuuuauuu

SEQ ID NO: 3225565 - RNA, 19 nt, Artificial Sequence
  Description of Artificial Sequence: Synthetic oligonucleotide
cuccaugcuacuuuggggc

SEQ ID NO: 3225566 - RNA, 19 nt, Artificial Sequence
  Description of Artificial Sequence: Synthetic oligonucleotide
ugcaauauuuguaaagcuu

SEQ ID NO: 3225567 - RNA, 19 nt, Artificial Sequence
  Description of Artificial Sequence: Synthetic oligonucleotide
ugagagccuaaaccaaacg

SEQ ID NO: 3225568 - RNA, 19 nt, Artificial Sequence
  Description of Artificial Sequence: Synthetic oligonucleotide
acccuuauacccgagggcc

SEQ ID NO: 3225569 - RNA, 19 nt, Artificial Sequence
  Description of Artificial Sequence: Synthetic oligonucleotide
uuccacuuggcucaguaga

SEQ ID NO: 3225570 - RNA, 19 nt, Artificial Sequence
  Description of Artificial Sequence: Synthetic oligonucleotide
aaugacugcacagucacau

SEQ ID NO: 3225571 - RNA, 19 nt, Artificial Sequence
  Description of Artificial Sequence: Synthetic oligonucleotide
uuagacagauccucacggg

SEQ ID NO: 3225572 - RNA, 19 nt, Artificial Sequence
  Description of Artificial Sequence: Synthetic oligonucleotide
aacgcagagcuccgaaaac

SEQ ID NO: 3225573 - RNA, 19 nt, Artificial Sequence
  Description of Artificial Sequence: Synthetic oligonucleotide
auucacaggaaagagcauc

SEQ ID NO: 3225574 - RNA, 19 nt, Artificial Sequence
  Description of Artificial Sequence: Synthetic oligonucleotide
auucuugcuauauuaucug

SEQ ID NO: 3225575 - RNA, 19 nt, Artificial Sequence
  Description of Artificial Sequence: Synthetic oligonucleotide
ugcacagucacauccaauc

SEQ ID NO: 3225576 - RNA, 19 nt, Artificial Sequence
  Description of Artificial Sequence: Synthetic oligonucleotide
gugacuguugucuugggug

SEQ ID NO: 3225577 - RNA, 19 nt, Artificial Sequence
  Description of Artificial Sequence: Synthetic oligonucleotide
uuuugccuuagcucuauca

SEQ ID NO: 3225578 - RNA, 19 nt, Artificial Sequence
  Description of Artificial Sequence: Synthetic oligonucleotide
auucauauucacaggaaag

SEQ ID NO: 3225579 - RNA, 19 nt, Artificial Sequence
  Description of Artificial Sequence: Synthetic oligonucleotide
cuuguccugauaaucuuag

SEQ ID NO: 3225580 - RNA, 19 nt, Artificial Sequence
  Description of Artificial Sequence: Synthetic oligonucleotide
aauggcacaugccgucuuc

SEQ ID NO: 3225581 - RNA, 19 nt, Artificial Sequence
  Description of Artificial Sequence: Synthetic oligonucleotide
ugccuuagcucuaucagac

SEQ ID NO: 3225582 - RNA, 19 nt, Artificial Sequence
  Description of Artificial Sequence: Synthetic oligonucleotide
uagacagauccucacgggc

SEQ ID NO: 3225583 - RNA, 19 nt, Artificial Sequence
  Description of Artificial Sequence: Synthetic oligonucleotide
ugacuuggggaccccaagg

SEQ ID NO: 3225584 - RNA, 19 nt, Artificial Sequence
  Description of Artificial Sequence: Synthetic oligonucleotide
uaaagcuugaaguucugua

SEQ ID NO: 3225585 - RNA, 19 nt, Artificial Sequence
  Description of Artificial Sequence: Synthetic oligonucleotide
aaacgcagagcuccgaaaa

SEQ ID NO: 3225586 - RNA, 19 nt, Artificial Sequence
  Description of Artificial Sequence: Synthetic oligonucleotide
agaaguggaaugucagaag

SEQ ID NO: 3225587 - RNA, 19 nt, Artificial Sequence
  Description of Artificial Sequence: Synthetic oligonucleotide
uuccaaguugcauaaggac

SEQ ID NO: 3225588 - RNA, 19 nt, Artificial Sequence
  Description of Artificial Sequence: Synthetic oligonucleotide
uuugagagccuaaaccaaa

SEQ ID NO: 3225589 - RNA, 19 nt, Artificial Sequence
  Description of Artificial Sequence: Synthetic oligonucleotide
aaaauccacuuaucucaag

SEQ ID NO: 3225590 - RNA, 19 nt, Artificial Sequence
  Description of Artificial Sequence: Synthetic oligonucleotide
augcuuucuuccaaguugc

SEQ ID NO: 3225591 - RNA, 19 nt, Artificial Sequence
  Description of Artificial Sequence: Synthetic oligonucleotide
caauggacccuuauacccg

SEQ ID NO: 3225592 - RNA, 19 nt, Artificial Sequence
  Description of Artificial Sequence: Synthetic oligonucleotide
acuuggggaccccaagggc

SEQ ID NO: 3225593 - RNA, 19 nt, Artificial Sequence
  Description of Artificial Sequence: Synthetic oligonucleotide
cucuaggucaucucucccg

SEQ ID NO: 3225594 - RNA, 19 nt, Artificial Sequence
  Description of Artificial Sequence: Synthetic oligonucleotide
ucauuaacauccgccggcg

SEQ ID NO: 3225595 - RNA, 19 nt, Artificial Sequence
  Description of Artificial Sequence: Synthetic oligonucleotide
gcggcauucauauucacag

SEQ ID NO: 3225596 - RNA, 19 nt, Artificial Sequence
  Description of Artificial Sequence: Synthetic oligonucleotide
agcuccgaaaacucaggcg

SEQ ID NO: 3225597 - RNA, 19 nt, Artificial Sequence
  Description of Artificial Sequence: Synthetic oligonucleotide
uccugauacgaguaccgag

SEQ ID NO: 3225598 - RNA, 19 nt, Artificial Sequence
  Description of Artificial Sequence: Synthetic oligonucleotide
ugggcugguaaauucuugc

SEQ ID NO: 3225599 - RNA, 19 nt, Artificial Sequence
  Description of Artificial Sequence: Synthetic oligonucleotide
uagaaguggaaugucagaa

SEQ ID NO: 3225600 - RNA, 19 nt, Artificial Sequence
  Description of Artificial Sequence: Synthetic oligonucleotide
aauggacccuuauacccga

SEQ ID NO: 3225601 - RNA, 19 nt, Artificial Sequence
  Description of Artificial Sequence: Synthetic oligonucleotide
cuuggcucaguagaagugg

SEQ ID NO: 3225602 - RNA, 19 nt, Artificial Sequence
  Description of Artificial Sequence: Synthetic oligonucleotide
aguguuugacuuggggacc

SEQ ID NO: 3225603 - RNA, 19 nt, Artificial Sequence
  Description of Artificial Sequence: Synthetic oligonucleotide
guccugauaaucuuagaca

SEQ ID NO: 3225604 - RNA, 19 nt, Artificial Sequence
  Description of Artificial Sequence: Synthetic oligonucleotide
auccacuuaucucaagcug

SEQ ID NO: 3225605 - RNA, 19 nt, Artificial Sequence
  Description of Artificial Sequence: Synthetic oligonucleotide
aucuccugauacgaguacc

SEQ ID NO: 3225606 - RNA, 19 nt, Artificial Sequence
  Description of Artificial Sequence: Synthetic oligonucleotide
uucuucugcaauauuugua

SEQ ID NO: 3225607 - RNA, 19 nt, Artificial Sequence
  Description of Artificial Sequence: Synthetic oligonucleotide
acagcuugaacuuccugga

SEQ ID NO: 3225608 - RNA, 19 nt, Artificial Sequence
  Description of Artificial Sequence: Synthetic oligonucleotide
uggaaugucagaaguguuu

SEQ ID NO: 3225609 - RNA, 19 nt, Artificial Sequence
  Description of Artificial Sequence: Synthetic oligonucleotide
ucuugcuauauuaucuguu

SEQ ID NO: 3225610 - RNA, 19 nt, Artificial Sequence
  Description of Artificial Sequence: Synthetic oligonucleotide
ugugccaaugugacuguug

SEQ ID NO: 3225611 - RNA, 19 nt, Artificial Sequence
  Description of Artificial Sequence: Synthetic oligonucleotide
gaaaacucaggcgaagaca

SEQ ID NO: 3225612 - RNA, 19 nt, Artificial Sequence
  Description of Artificial Sequence: Synthetic oligonucleotide
caagcuggaagcucucuag

SEQ ID NO: 3225613 - RNA, 19 nt, Artificial Sequence
  Description of Artificial Sequence: Synthetic oligonucleotide
uuuaucuaacugagaauuu

SEQ ID NO: 3225614 - RNA, 19 nt, Artificial Sequence
  Description of Artificial Sequence: Synthetic oligonucleotide
uugagagccuaaaccaaac

SEQ ID NO: 3225615 - RNA, 19 nt, Artificial Sequence
  Description of Artificial Sequence: Synthetic oligonucleotide
ucuaacaauggacccuuau

SEQ ID NO: 3225616 - RNA, 19 nt, Artificial Sequence
  Description of Artificial Sequence: Synthetic oligonucleotide
uacccgagggccuccaggg

SEQ ID NO: 3225617 - RNA, 19 nt, Artificial Sequence
  Description of Artificial Sequence: Synthetic oligonucleotide
uauauuuguauuuugaagg

SEQ ID NO: 3225618 - RNA, 19 nt, Artificial Sequence
  Description of Artificial Sequence: Synthetic oligonucleotide
aaucaaaggaucuaggcag

SEQ ID NO: 3225619 - RNA, 19 nt, Artificial Sequence
  Description of Artificial Sequence: Synthetic oligonucleotide
aauauaaugugacagaaau

SEQ ID NO: 3225620 - RNA, 19 nt, Artificial Sequence
  Description of Artificial Sequence: Synthetic oligonucleotide
aauuguguuuaacugauuc

SEQ ID NO: 3225621 - RNA, 19 nt, Artificial Sequence
  Description of Artificial Sequence: Synthetic oligonucleotide
uugaauaaauguuucaacg

SEQ ID NO: 3225622 - RNA, 19 nt, Artificial Sequence
  Description of Artificial Sequence: Synthetic oligonucleotide
ugucuugucauuuugauug

SEQ ID NO: 3225623 - RNA, 19 nt, Artificial Sequence
  Description of Artificial Sequence: Synthetic oligonucleotide
ucuagaucaggcaagagag

SEQ ID NO: 3225624 - RNA, 19 nt, Artificial Sequence
  Description of Artificial Sequence: Synthetic oligonucleotide
uuguacaugguucugauag

SEQ ID NO: 3225625 - RNA, 19 nt, Artificial Sequence
  Description of Artificial Sequence: Synthetic oligonucleotide
gauugauggauuuuagugg

SEQ ID NO: 3225626 - RNA, 19 nt, Artificial Sequence
  Description of Artificial Sequence: Synthetic oligonucleotide
uucaauugucuuuaaaagg

SEQ ID NO: 3225627 - RNA, 19 nt, Artificial Sequence
  Description of Artificial Sequence: Synthetic oligonucleotide
uuuagugguagauagaaac

SEQ ID NO: 3225628 - RNA, 19 nt, Artificial Sequence
  Description of Artificial Sequence: Synthetic oligonucleotide
ucaauugucuuuaaaaggu

SEQ ID NO: 3225629 - RNA, 19 nt, Artificial Sequence
  Description of Artificial Sequence: Synthetic oligonucleotide
uccauaacaaaacacauaa

SEQ ID NO: 3225630 - RNA, 19 nt, Artificial Sequence
  Description of Artificial Sequence: Synthetic oligonucleotide
auaagauccacacuaaaug

SEQ ID NO: 3225631 - RNA, 19 nt, Artificial Sequence
  Description of Artificial Sequence: Synthetic oligonucleotide
ugcaggauuaucaauacca

SEQ ID NO: 3225632 - RNA, 19 nt, Artificial Sequence
  Description of Artificial Sequence: Synthetic oligonucleotide
agauugauggauuuuagug

SEQ ID NO: 3225633 - RNA, 19 nt, Artificial Sequence
  Description of Artificial Sequence: Synthetic oligonucleotide
ucgaauuuuaauaauucga

SEQ ID NO: 3225634 - RNA, 19 nt, Artificial Sequence
  Description of Artificial Sequence: Synthetic oligonucleotide
auuguguuuaacugauucc

SEQ ID NO: 3225635 - RNA, 19 nt, Artificial Sequence
  Description of Artificial Sequence: Synthetic oligonucleotide
uacuacuaaacccugaaac

SEQ ID NO: 3225636 - RNA, 19 nt, Artificial Sequence
  Description of Artificial Sequence: Synthetic oligonucleotide
aaauguuucaacgacagau

SEQ ID NO: 3225637 - RNA, 19 nt, Artificial Sequence
  Description of Artificial Sequence: Synthetic oligonucleotide
agcauuuacugucacuucc

SEQ ID NO: 3225638 - RNA, 19 nt, Artificial Sequence
  Description of Artificial Sequence: Synthetic oligonucleotide
augauauugagauaaagaa

SEQ ID NO: 3225639 - RNA, 19 nt, Artificial Sequence
  Description of Artificial Sequence: Synthetic oligonucleotide
aguagugaaagccucauca

SEQ ID NO: 3225640 - RNA, 19 nt, Artificial Sequence
  Description of Artificial Sequence: Synthetic oligonucleotide
aauugugucaagggguucc

SEQ ID NO: 3225641 - RNA, 19 nt, Artificial Sequence
  Description of Artificial Sequence: Synthetic oligonucleotide
uauuaaaagcccuugguaa

SEQ ID NO: 3225642 - RNA, 19 nt, Artificial Sequence
  Description of Artificial Sequence: Synthetic oligonucleotide
gagaaaucuguuuucuugg

SEQ ID NO: 3225643 - RNA, 19 nt, Artificial Sequence
  Description of Artificial Sequence: Synthetic oligonucleotide
aauguaagugaacagggaa

SEQ ID NO: 3225644 - RNA, 19 nt, Artificial Sequence
  Description of Artificial Sequence: Synthetic oligonucleotide
uuucuuacuccaauugagg

SEQ ID NO: 3225645 - RNA, 19 nt, Artificial Sequence
  Description of Artificial Sequence: Synthetic oligonucleotide
uuaucagacaaauaggaau

SEQ ID NO: 3225646 - RNA, 19 nt, Artificial Sequence
  Description of Artificial Sequence: Synthetic oligonucleotide
ucgauucugacuaucaucu

SEQ ID NO: 3225647 - RNA, 19 nt, Artificial Sequence
  Description of Artificial Sequence: Synthetic oligonucleotide
uucuguuugaaaauugugu

SEQ ID NO: 3225648 - RNA, 19 nt, Artificial Sequence
  Description of Artificial Sequence: Synthetic oligonucleotide
aaggcguucuauuuuaucu

SEQ ID NO: 3225649 - RNA, 19 nt, Artificial Sequence
  Description of Artificial Sequence: Synthetic oligonucleotide
aauuaaaccuuuccaguca

SEQ ID NO: 3225650 - RNA, 19 nt, Artificial Sequence
  Description of Artificial Sequence: Synthetic oligonucleotide
aaaaugucuugucauuuug

SEQ ID NO: 3225651 - RNA, 19 nt, Artificial Sequence
  Description of Artificial Sequence: Synthetic oligonucleotide
uuacaaaugaguuucgaau

SEQ ID NO: 3225652 - RNA, 19 nt, Artificial Sequence
  Description of Artificial Sequence: Synthetic oligonucleotide
uuauauauucuucucuccu

SEQ ID NO: 3225653 - RNA, 19 nt, Artificial Sequence
  Description of Artificial Sequence: Synthetic oligonucleotide
agaaugagaaucaaggaag

SEQ ID NO: 3225654 - RNA, 19 nt, Artificial Sequence
  Description of Artificial Sequence: Synthetic oligonucleotide
uugucaagcauuaaggaau

SEQ ID NO: 3225655 - RNA, 19 nt, Artificial Sequence
  Description of Artificial Sequence: Synthetic oligonucleotide
uuugcaaucacauucuguu

SEQ ID NO: 3225656 - RNA, 19 nt, Artificial Sequence
  Description of Artificial Sequence: Synthetic oligonucleotide
uacaauuucuccauuguaa

SEQ ID NO: 3225657 - RNA, 19 nt, Artificial Sequence
  Description of Artificial Sequence: Synthetic oligonucleotide
ucugcugucauuagguuga

SEQ ID NO: 3225658 - RNA, 19 nt, Artificial Sequence
  Description of Artificial Sequence: Synthetic oligonucleotide
uugauuguggacuaucugu

SEQ ID NO: 3225659 - RNA, 19 nt, Artificial Sequence
  Description of Artificial Sequence: Synthetic oligonucleotide
auugcaggauuaucaauac

SEQ ID NO: 3225660 - RNA, 19 nt, Artificial Sequence
  Description of Artificial Sequence: Synthetic oligonucleotide
cugguuuagguuuaauagg

SEQ ID NO: 3225661 - RNA, 19 nt, Artificial Sequence
  Description of Artificial Sequence: Synthetic oligonucleotide
auuucuauucuucuuuucu

SEQ ID NO: 3225662 - RNA, 19 nt, Artificial Sequence
  Description of Artificial Sequence: Synthetic oligonucleotide
ucuauaugcuuugaaaaug

SEQ ID NO: 3225663 - RNA, 19 nt, Artificial Sequence
  Description of Artificial Sequence: Synthetic oligonucleotide
acuaacacgguauaauccu

SEQ ID NO: 3225664 - RNA, 19 nt, Artificial Sequence
  Description of Artificial Sequence: Synthetic oligonucleotide
gaguaaagaccucaguuug

SEQ ID NO: 3225665 - RNA, 19 nt, Artificial Sequence
  Description of Artificial Sequence: Synthetic oligonucleotide
uucugacacauccuuauug

SEQ ID NO: 3225666 - RNA, 19 nt, Artificial Sequence
  Description of Artificial Sequence: Synthetic oligonucleotide
auugauggauuuuaguggu

SEQ ID NO: 3225667 - RNA, 19 nt, Artificial Sequence
  Description of Artificial Sequence: Synthetic oligonucleotide
uaugacuuggcuuuacuaa

SEQ ID NO: 3225668 - RNA, 19 nt, Artificial Sequence
  Description of Artificial Sequence: Synthetic oligonucleotide
aggauccacaucuucaggg

SEQ ID NO: 3225669 - RNA, 19 nt, Artificial Sequence
  Description of Artificial Sequence: Synthetic oligonucleotide
cuuccauagauaacuaaag

SEQ ID NO: 3225670 - RNA, 19 nt, Artificial Sequence
  Description of Artificial Sequence: Synthetic oligonucleotide
uauacuacuaaacccugaa

SEQ ID NO: 3225671 - RNA, 19 nt, Artificial Sequence
  Description of Artificial Sequence: Synthetic oligonucleotide
gggugaaagaauaagaucc

SEQ ID NO: 3225672 - RNA, 19 nt, Artificial Sequence
  Description of Artificial Sequence: Synthetic oligonucleotide
cuuauauauucuucucucc

SEQ ID NO: 3225673 - RNA, 19 nt, Artificial Sequence
  Description of Artificial Sequence: Synthetic oligonucleotide
cauaaagcaggcugaaagc

SEQ ID NO: 3225674 - RNA, 19 nt, Artificial Sequence
  Description of Artificial Sequence: Synthetic oligonucleotide
uagcaguuaucucaguugc

SEQ ID NO: 3225675 - RNA, 19 nt, Artificial Sequence
  Description of Artificial Sequence: Synthetic oligonucleotide
aguaacugccacuaguugu

SEQ ID NO: 3225676 - RNA, 19 nt, Artificial Sequence
  Description of Artificial Sequence: Synthetic oligonucleotide
gggaauaccauauaguuca

SEQ ID NO: 3225677 - RNA, 19 nt, Artificial Sequence
  Description of Artificial Sequence: Synthetic oligonucleotide
aaugagaaucaaggaaggg

SEQ ID NO: 3225678 - RNA, 19 nt, Artificial Sequence
  Description of Artificial Sequence: Synthetic oligonucleotide
gaaggauccacaucuucag

SEQ ID NO: 3225679 - RNA, 19 nt, Artificial Sequence
  Description of Artificial Sequence: Synthetic oligonucleotide
agcaaagaaagcuuugaga

SEQ ID NO: 3225680 - RNA, 19 nt, Artificial Sequence
  Description of Artificial Sequence: Synthetic oligonucleotide
gauagccucauuuucaaaa

SEQ ID NO: 3225681 - RNA, 19 nt, Artificial Sequence
  Description of Artificial Sequence: Synthetic oligonucleotide
aauugauauuaugaucuug

SEQ ID NO: 3225682 - RNA, 19 nt, Artificial Sequence
  Description of Artificial Sequence: Synthetic oligonucleotide
cuuaccacgguuuuagauc

SEQ ID NO: 3225683 - RNA, 19 nt, Artificial Sequence
  Description of Artificial Sequence: Synthetic oligonucleotide
auguaaauuaaauucccaa

SEQ ID NO: 3225684 - RNA, 19 nt, Artificial Sequence
  Description of Artificial Sequence: Synthetic oligonucleotide
uucuuacuccaauugagga

SEQ ID NO: 3225685 - RNA, 19 nt, Artificial Sequence
  Description of Artificial Sequence: Synthetic oligonucleotide
gaaugagaaucaaggaagg

SEQ ID NO: 3225686 - RNA, 19 nt, Artificial Sequence
  Description of Artificial Sequence: Synthetic oligonucleotide
uagccugaaauuauaaaau

SEQ ID NO: 3225687 - RNA, 19 nt, Artificial Sequence
  Description of Artificial Sequence: Synthetic oligonucleotide
gcuuuaguuaucuacagac

SEQ ID NO: 3225688 - RNA, 19 nt, Artificial Sequence
  Description of Artificial Sequence: Synthetic oligonucleotide
acuaguuguacaggaaugg

SEQ ID NO: 3225689 - RNA, 19 nt, Artificial Sequence
  Description of Artificial Sequence: Synthetic oligonucleotide
gaauacaucauaguuuaca

SEQ ID NO: 3225690 - RNA, 19 nt, Artificial Sequence
  Description of Artificial Sequence: Synthetic oligonucleotide
uucuauaugcuuugaaaau

SEQ ID NO: 3225691 - RNA, 19 nt, Artificial Sequence
  Description of Artificial Sequence: Synthetic oligonucleotide
cacuaacacgguauaaucc

SEQ ID NO: 3225692 - RNA, 19 nt, Artificial Sequence
  Description of Artificial Sequence: Synthetic oligonucleotide
uaccauauacuucuuugcu

SEQ ID NO: 3225693 - RNA, 19 nt, Artificial Sequence
  Description of Artificial Sequence: Synthetic oligonucleotide
uuaccacgguuuuagaucu

SEQ ID NO: 3225694 - RNA, 19 nt, Artificial Sequence
  Description of Artificial Sequence: Synthetic oligonucleotide
auugugguugaauuagcug

SEQ ID NO: 3225695 - RNA, 19 nt, Artificial Sequence
  Description of Artificial Sequence: Synthetic oligonucleotide
uucuauucuucuuuucucu

SEQ ID NO: 3225696 - RNA, 19 nt, Artificial Sequence
  Description of Artificial Sequence: Synthetic oligonucleotide
gacuauaaggagguggugc

SEQ ID NO: 3225697 - RNA, 19 nt, Artificial Sequence
  Description of Artificial Sequence: Synthetic oligonucleotide
uucacauuuguuuuaggua

SEQ ID NO: 3225698 - RNA, 19 nt, Artificial Sequence
  Description of Artificial Sequence: Synthetic oligonucleotide
uacuaaacccugaaacaug

SEQ ID NO: 3225699 - RNA, 19 nt, Artificial Sequence
  Description of Artificial Sequence: Synthetic oligonucleotide
cuaccauauacuucuuugc

SEQ ID NO: 3225700 - RNA, 19 nt, Artificial Sequence
  Description of Artificial Sequence: Synthetic oligonucleotide
aauguaaauuaaauuccca

SEQ ID NO: 3225701 - RNA, 19 nt, Artificial Sequence
  Description of Artificial Sequence: Synthetic oligonucleotide
aaggauccacaucuucagg

SEQ ID NO: 3225702 - RNA, 19 nt, Artificial Sequence
  Description of Artificial Sequence: Synthetic oligonucleotide
aagcaguggaucuucuuca

SEQ ID NO: 3225703 - RNA, 19 nt, Artificial Sequence
  Description of Artificial Sequence: Synthetic oligonucleotide
ucugacuaucaucugggac

SEQ ID NO: 3225704 - RNA, 19 nt, Artificial Sequence
  Description of Artificial Sequence: Synthetic oligonucleotide
cugacuaucaucugggaca

SEQ ID NO: 3225705 - RNA, 19 nt, Artificial Sequence
  Description of Artificial Sequence: Synthetic oligonucleotide
augcuguaaauuuagcagu

SEQ ID NO: 3225706 - RNA, 19 nt, Artificial Sequence
  Description of Artificial Sequence: Synthetic oligonucleotide
gguauaauccuucaguaca

SEQ ID NO: 3225707 - RNA, 19 nt, Artificial Sequence
  Description of Artificial Sequence: Synthetic oligonucleotide
auguuucaacgacagauug

SEQ ID NO: 3225708 - RNA, 19 nt, Artificial Sequence
  Description of Artificial Sequence: Synthetic oligonucleotide
uuuaauagguggaggcacu

SEQ ID NO: 3225709 - RNA, 19 nt, Artificial Sequence
  Description of Artificial Sequence: Synthetic oligonucleotide
uuguggacuaucuguauga

SEQ ID NO: 3225710 - RNA, 19 nt, Artificial Sequence
  Description of Artificial Sequence: Synthetic oligonucleotide
uguuucaacgacagauuga

SEQ ID NO: 3225711 - RNA, 19 nt, Artificial Sequence
  Description of Artificial Sequence: Synthetic oligonucleotide
ucuccuucagucauuaauu

SEQ ID NO: 3225712 - RNA, 19 nt, Artificial Sequence
  Description of Artificial Sequence: Synthetic oligonucleotide
uuucuauucuucuuuucuc

SEQ ID NO: 3225713 - RNA, 19 nt, Artificial Sequence
  Description of Artificial Sequence: Synthetic oligonucleotide
auuguggacuaucuguaug

SEQ ID NO: 3225714 - RNA, 19 nt, Artificial Sequence
  Description of Artificial Sequence: Synthetic oligonucleotide
cauccuuauugauaggaac

SEQ ID NO: 3225715 - RNA, 19 nt, Artificial Sequence
  Description of Artificial Sequence: Synthetic oligonucleotide
aaguagugaaagccucauc

SEQ ID NO: 3225716 - RNA, 19 nt, Artificial Sequence
  Description of Artificial Sequence: Synthetic oligonucleotide
aguuguuauagggaaaaca

SEQ ID NO: 3225717 - RNA, 19 nt, Artificial Sequence
  Description of Artificial Sequence: Synthetic oligonucleotide
aacuaaauaacauaaaugc

SEQ ID NO: 3225718 - RNA, 19 nt, Artificial Sequence
  Description of Artificial Sequence: Synthetic oligonucleotide
aagaaggucaagcucaucc

SEQ ID NO: 3225719 - RNA, 19 nt, Artificial Sequence
  Description of Artificial Sequence: Synthetic oligonucleotide
aaugccaaaaucuacaaca

SEQ ID NO: 3225720 - RNA, 19 nt, Artificial Sequence
  Description of Artificial Sequence: Synthetic oligonucleotide
aucuacaacaaucauuucc

SEQ ID NO: 3225721 - RNA, 19 nt, Artificial Sequence
  Description of Artificial Sequence: Synthetic oligonucleotide
uacauuaccacaaauuucu

SEQ ID NO: 3225722 - RNA, 19 nt, Artificial Sequence
  Description of Artificial Sequence: Synthetic oligonucleotide
uauacauaguacauuacca

SEQ ID NO: 3225723 - RNA, 19 nt, Artificial Sequence
  Description of Artificial Sequence: Synthetic oligonucleotide
uauauuuugcuauuauuca

SEQ ID NO: 3225724 - RNA, 19 nt, Artificial Sequence
  Description of Artificial Sequence: Synthetic oligonucleotide
cuggcuaccauuuggaugg

SEQ ID NO: 3225725 - RNA, 19 nt, Artificial Sequence
  Description of Artificial Sequence: Synthetic oligonucleotide
aauguugcuuccucuaguc

SEQ ID NO: 3225726 - RNA, 19 nt, Artificial Sequence
  Description of Artificial Sequence: Synthetic oligonucleotide
aaaucuacaacaaucauuu

SEQ ID NO: 3225727 - RNA, 19 nt, Artificial Sequence
  Description of Artificial Sequence: Synthetic oligonucleotide
acacgguucaucaugaucc

SEQ ID NO: 3225728 - RNA, 19 nt, Artificial Sequence
  Description of Artificial Sequence: Synthetic oligonucleotide
uuaagugggacacagucac

SEQ ID NO: 3225729 - RNA, 19 nt, Artificial Sequence
  Description of Artificial Sequence: Synthetic oligonucleotide
uucucaaacacucuggaaa

SEQ ID NO: 3225730 - RNA, 19 nt, Artificial Sequence
  Description of Artificial Sequence: Synthetic oligonucleotide
aaaugccaaaaucuacaac

SEQ ID NO: 3225731 - RNA, 19 nt, Artificial Sequence
  Description of Artificial Sequence: Synthetic oligonucleotide
aauggccaggacuaucagc

SEQ ID NO: 3225732 - RNA, 19 nt, Artificial Sequence
  Description of Artificial Sequence: Synthetic oligonucleotide
cuuccucuaguccagaucg

SEQ ID NO: 3225733 - RNA, 19 nt, Artificial Sequence
  Description of Artificial Sequence: Synthetic oligonucleotide
auaucuguugaaauguugc

SEQ ID NO: 3225734 - RNA, 19 nt, Artificial Sequence
  Description of Artificial Sequence: Synthetic oligonucleotide
gaguaggccaaucaaagag

SEQ ID NO: 3225735 - RNA, 19 nt, Artificial Sequence
  Description of Artificial Sequence: Synthetic oligonucleotide
ucacucuucuuucagagca

SEQ ID NO: 3225736 - RNA, 19 nt, Artificial Sequence
  Description of Artificial Sequence: Synthetic oligonucleotide
uaaauaacauaaaugccaa

SEQ ID NO: 3225737 - RNA, 19 nt, Artificial Sequence
  Description of Artificial Sequence: Synthetic oligonucleotide
uauagccuccauuaagugg

SEQ ID NO: 3225738 - RNA, 19 nt, Artificial Sequence
  Description of Artificial Sequence: Synthetic oligonucleotide
cuuuaaaugcuugagucgg

SEQ ID NO: 3225739 - RNA, 19 nt, Artificial Sequence
  Description of Artificial Sequence: Synthetic oligonucleotide
ucaaagagguuguacauga

SEQ ID NO: 3225740 - RNA, 19 nt, Artificial Sequence
  Description of Artificial Sequence: Synthetic oligonucleotide
auuauucauguucugaaga

SEQ ID NO: 3225741 - RNA, 19 nt, Artificial Sequence
  Description of Artificial Sequence: Synthetic oligonucleotide
uccacaagcagcacagugg

SEQ ID NO: 3225742 - RNA, 19 nt, Artificial Sequence
  Description of Artificial Sequence: Synthetic oligonucleotide
ugagccuuacucuaaguag

SEQ ID NO: 3225743 - RNA, 19 nt, Artificial Sequence
  Description of Artificial Sequence: Synthetic oligonucleotide
uacucuaaguaguagguca

SEQ ID NO: 3225744 - RNA, 19 nt, Artificial Sequence
  Description of Artificial Sequence: Synthetic oligonucleotide
gguaauucugcaauaaugg

SEQ ID NO: 3225745 - RNA, 19 nt, Artificial Sequence
  Description of Artificial Sequence: Synthetic oligonucleotide
ucaucuauagccuccauua

SEQ ID NO: 3225746 - RNA, 19 nt, Artificial Sequence
  Description of Artificial Sequence: Synthetic oligonucleotide
uaaguaguaggucauuccu

SEQ ID NO: 3225747 - RNA, 19 nt, Artificial Sequence
  Description of Artificial Sequence: Synthetic oligonucleotide
uauaucuguugaaauguug

SEQ ID NO: 3225748 - RNA, 19 nt, Artificial Sequence
  Description of Artificial Sequence: Synthetic oligonucleotide
aagcucauccacaagcagc

SEQ ID NO: 3225749 - RNA, 19 nt, Artificial Sequence
  Description of Artificial Sequence: Synthetic oligonucleotide
aauaggcugagaaacagca

SEQ ID NO: 3225750 - RNA, 19 nt, Artificial Sequence
  Description of Artificial Sequence: Synthetic oligonucleotide
aggacuaucagccgggcuc

SEQ ID NO: 3225751 - RNA, 19 nt, Artificial Sequence
  Description of Artificial Sequence: Synthetic oligonucleotide
guauauuuugcuauuauuc

SEQ ID NO: 3225752 - RNA, 19 nt, Artificial Sequence
  Description of Artificial Sequence: Synthetic oligonucleotide
uguuuggaaguccaaagaa

SEQ ID NO: 3225753 - RNA, 19 nt, Artificial Sequence
  Description of Artificial Sequence: Synthetic oligonucleotide
cucuaguccagaucgacgg

SEQ ID NO: 3225754 - RNA, 19 nt, Artificial Sequence
  Description of Artificial Sequence: Synthetic oligonucleotide
aaucauuuccauucuguau

SEQ ID NO: 3225755 - RNA, 19 nt, Artificial Sequence
  Description of Artificial Sequence: Synthetic oligonucleotide
aaauaggcugagaaacagc

SEQ ID NO: 3225756 - RNA, 19 nt, Artificial Sequence
  Description of Artificial Sequence: Synthetic oligonucleotide
cucacauugagccuuacuc

SEQ ID NO: 3225757 - RNA, 19 nt, Artificial Sequence
  Description of Artificial Sequence: Synthetic oligonucleotide
ugagaaacagcagaagucu

SEQ ID NO: 3225758 - RNA, 19 nt, Artificial Sequence
  Description of Artificial Sequence: Synthetic oligonucleotide
uuuaaaugcuugagucggg

SEQ ID NO: 3225759 - RNA, 19 nt, Artificial Sequence
  Description of Artificial Sequence: Synthetic oligonucleotide
augacaucuuguuuggaag

SEQ ID NO: 3225760 - RNA, 19 nt, Artificial Sequence
  Description of Artificial Sequence: Synthetic oligonucleotide
uacaugacaucuuguuugg

SEQ ID NO: 3225761 - RNA, 19 nt, Artificial Sequence
  Description of Artificial Sequence: Synthetic oligonucleotide
agauacacgguucaucaug

SEQ ID NO: 3225762 - RNA, 19 nt, Artificial Sequence
  Description of Artificial Sequence: Synthetic oligonucleotide
gacccagccgacuagauac

SEQ ID NO: 3225763 - RNA, 19 nt, Artificial Sequence
  Description of Artificial Sequence: Synthetic oligonucleotide
aaaaucuacaacaaucauu

SEQ ID NO: 3225764 - RNA, 19 nt, Artificial Sequence
  Description of Artificial Sequence: Synthetic oligonucleotide
aucauuuccauucuguaua

SEQ ID NO: 3225765 - RNA, 19 nt, Artificial Sequence
  Description of Artificial Sequence: Synthetic oligonucleotide
uuccauucuguauauuuug

SEQ ID NO: 3225766 - RNA, 19 nt, Artificial Sequence
  Description of Artificial Sequence: Synthetic oligonucleotide
aaauguugcuuccucuagu

SEQ ID NO: 3225767 - RNA, 19 nt, Artificial Sequence
  Description of Artificial Sequence: Synthetic oligonucleotide
cuguauaucuguugaaaug

SEQ ID NO: 3225768 - RNA, 19 nt, Artificial Sequence
  Description of Artificial Sequence: Synthetic oligonucleotide
cuucacucuucuuucagag

SEQ ID NO: 3225769 - RNA, 19 nt, Artificial Sequence
  Description of Artificial Sequence: Synthetic oligonucleotide
agugauguaggaugaggag

SEQ ID NO: 3225770 - RNA, 19 nt, Artificial Sequence
  Description of Artificial Sequence: Synthetic oligonucleotide
uuugagcacacagccaugg

SEQ ID NO: 3225771 - RNA, 19 nt, Artificial Sequence
  Description of Artificial Sequence: Synthetic oligonucleotide
cagccgacuagauacacgg

SEQ ID NO: 3225772 - RNA, 19 nt, Artificial Sequence
  Description of Artificial Sequence: Synthetic oligonucleotide
uccauucuguauauuuugc

SEQ ID NO: 3225773 - RNA, 19 nt, Artificial Sequence
  Description of Artificial Sequence: Synthetic oligonucleotide
uguaggaugaggagaacau

SEQ ID NO: 3225774 - RNA, 19 nt, Artificial Sequence
  Description of Artificial Sequence: Synthetic oligonucleotide
ucaucaugauccucucugg

SEQ ID NO: 3225775 - RNA, 19 nt, Artificial Sequence
  Description of Artificial Sequence: Synthetic oligonucleotide
auccugguuagacccagcc

SEQ ID NO: 3225776 - RNA, 19 nt, Artificial Sequence
  Description of Artificial Sequence: Synthetic oligonucleotide
ugcacagagccacauguug

SEQ ID NO: 3225777 - RNA, 19 nt, Artificial Sequence
  Description of Artificial Sequence: Synthetic oligonucleotide
caagaacccagauuugagc

SEQ ID NO: 3225778 - RNA, 19 nt, Artificial Sequence
  Description of Artificial Sequence: Synthetic oligonucleotide
ucacauugagccuuacucu

SEQ ID NO: 3225779 - RNA, 19 nt, Artificial Sequence
  Description of Artificial Sequence: Synthetic oligonucleotide
uccaaagaaggucaagcuc

SEQ ID NO: 3225780 - RNA, 19 nt, Artificial Sequence
  Description of Artificial Sequence: Synthetic oligonucleotide
caaucaaagagguuguaca

SEQ ID NO: 3225781 - RNA, 19 nt, Artificial Sequence
  Description of Artificial Sequence: Synthetic oligonucleotide
auauuuugcuauuauucau

SEQ ID NO: 3225782 - RNA, 19 nt, Artificial Sequence
  Description of Artificial Sequence: Synthetic oligonucleotide
aauggcucucaggaagccc

SEQ ID NO: 3225783 - RNA, 19 nt, Artificial Sequence
  Description of Artificial Sequence: Synthetic oligonucleotide
aggccaaucaaagagguug

SEQ ID NO: 3225784 - RNA, 19 nt, Artificial Sequence
  Description of Artificial Sequence: Synthetic oligonucleotide
aagcucgcaaaucucggug

SEQ ID NO: 3225785 - RNA, 19 nt, Artificial Sequence
  Description of Artificial Sequence: Synthetic oligonucleotide
gagcacaucauccuggcuc

SEQ ID NO: 3225786 - RNA, 19 nt, Artificial Sequence
  Description of Artificial Sequence: Synthetic oligonucleotide
aguggucuccuguugggac

SEQ ID NO: 3225787 - RNA, 19 nt, Artificial Sequence
  Description of Artificial Sequence: Synthetic oligonucleotide
uugugcugcaugauuagcu

SEQ ID NO: 3225788 - RNA, 19 nt, Artificial Sequence
  Description of Artificial Sequence: Synthetic oligonucleotide
aaucuacaacaaucauuuc

SEQ ID NO: 3225789 - RNA, 19 nt, Artificial Sequence
  Description of Artificial Sequence: Synthetic oligonucleotide
uuucuggcuaccauuugga

SEQ ID NO: 3225790 - RNA, 19 nt, Artificial Sequence
  Description of Artificial Sequence: Synthetic oligonucleotide
ucgacgguaauucugcaau

SEQ ID NO: 3225791 - RNA, 19 nt, Artificial Sequence
  Description of Artificial Sequence: Synthetic oligonucleotide
auuucucaaacacucugga

SEQ ID NO: 3225792 - RNA, 19 nt, Artificial Sequence
  Description of Artificial Sequence: Synthetic oligonucleotide
ucucaaacacucuggaaaa

SEQ ID NO: 3225793 - RNA, 19 nt, Artificial Sequence
  Description of Artificial Sequence: Synthetic oligonucleotide
uaaaugccaaaaucuacaa

SEQ ID NO: 3225794 - RNA, 19 nt, Artificial Sequence
  Description of Artificial Sequence: Synthetic oligonucleotide
agaacccagauuugagcac

SEQ ID NO: 3225795 - RNA, 19 nt, Artificial Sequence
  Description of Artificial Sequence: Synthetic oligonucleotide
acuagauacacgguucauc

SEQ ID NO: 3225796 - RNA, 19 nt, Artificial Sequence
  Description of Artificial Sequence: Synthetic oligonucleotide
ugugcugcaugauuagcug

SEQ ID NO: 3225797 - RNA, 19 nt, Artificial Sequence
  Description of Artificial Sequence: Synthetic oligonucleotide
acuguauaucuguugaaau

SEQ ID NO: 3225798 - RNA, 19 nt, Artificial Sequence
  Description of Artificial Sequence: Synthetic oligonucleotide
uguacaugacaucuuguuu

SEQ ID NO: 3225799 - RNA, 19 nt, Artificial Sequence
  Description of Artificial Sequence: Synthetic oligonucleotide
uaaggcagucccuccaucc

SEQ ID NO: 3225800 - RNA, 19 nt, Artificial Sequence
  Description of Artificial Sequence: Synthetic oligonucleotide
aagugggacacagucacug

SEQ ID NO: 3225801 - RNA, 19 nt, Artificial Sequence
  Description of Artificial Sequence: Synthetic oligonucleotide
cucucuggcagguccaugg

SEQ ID NO: 3225802 - RNA, 19 nt, Artificial Sequence
  Description of Artificial Sequence: Synthetic oligonucleotide
agagguuguacaugacauc

SEQ ID NO: 3225803 - RNA, 19 nt, Artificial Sequence
  Description of Artificial Sequence: Synthetic oligonucleotide
aguaggccaaucaaagagg

SEQ ID NO: 3225804 - RNA, 19 nt, Artificial Sequence
  Description of Artificial Sequence: Synthetic oligonucleotide
agucacugggcccagagau

SEQ ID NO: 3225805 - RNA, 19 nt, Artificial Sequence
  Description of Artificial Sequence: Synthetic oligonucleotide
aaagcucgcaaaucucggu

SEQ ID NO: 3225806 - RNA, 19 nt, Artificial Sequence
  Description of Artificial Sequence: Synthetic oligonucleotide
uugagccuuacucuaagua

SEQ ID NO: 3225807 - RNA, 19 nt, Artificial Sequence
  Description of Artificial Sequence: Synthetic oligonucleotide
uugaaauguugcuuccucu

SEQ ID NO: 3225808 - RNA, 19 nt, Artificial Sequence
  Description of Artificial Sequence: Synthetic oligonucleotide
uccugguuagacccagccg

SEQ ID NO: 3225809 - RNA, 19 nt, Artificial Sequence
  Description of Artificial Sequence: Synthetic oligonucleotide
cuauuauucauguucugaa

SEQ ID NO: 3225810 - RNA, 19 nt, Artificial Sequence
  Description of Artificial Sequence: Synthetic oligonucleotide
agucugugaagcucuucac

SEQ ID NO: 3225811 - RNA, 19 nt, Artificial Sequence
  Description of Artificial Sequence: Synthetic oligonucleotide
ugaaauguugcuuccucua

SEQ ID NO: 3225812 - RNA, 19 nt, Artificial Sequence
  Description of Artificial Sequence: Synthetic oligonucleotide
uuggaaguccaaagaaggu

SEQ ID NO: 3225813 - RNA, 19 nt, Artificial Sequence
  Description of Artificial Sequence: Synthetic oligonucleotide
aaauaacauaaaugccaaa

SEQ ID NO: 3225814 - RNA, 19 nt, Artificial Sequence
  Description of Artificial Sequence: Synthetic oligonucleotide
guugugagaauagggcugg

SEQ ID NO: 3225815 - RNA, 19 nt, Artificial Sequence
  Description of Artificial Sequence: Synthetic oligonucleotide
ugaagcucuucacucuucu

SEQ ID NO: 3225816 - RNA, 19 nt, Artificial Sequence
  Description of Artificial Sequence: Synthetic oligonucleotide
agcucgcaaaucucggugg

SEQ ID NO: 3225817 - RNA, 19 nt, Artificial Sequence
  Description of Artificial Sequence: Synthetic oligonucleotide
aacaagaucaguuacaggc

SEQ ID NO: 3225818 - RNA, 19 nt, Artificial Sequence
  Description of Artificial Sequence: Synthetic oligonucleotide
aaagaaaacauuuuauugc

SEQ ID NO: 3225819 - RNA, 19 nt, Artificial Sequence
  Description of Artificial Sequence: Synthetic oligonucleotide
uuuaaaauaggauugagga

SEQ ID NO: 3225820 - RNA, 19 nt, Artificial Sequence
  Description of Artificial Sequence: Synthetic oligonucleotide
aauguuuuaauucaagucu

SEQ ID NO: 3225821 - RNA, 19 nt, Artificial Sequence
  Description of Artificial Sequence: Synthetic oligonucleotide
uguguuagaaaauauacag

SEQ ID NO: 3225822 - RNA, 19 nt, Artificial Sequence
  Description of Artificial Sequence: Synthetic oligonucleotide
aaaagaacauacuaaagcu

SEQ ID NO: 3225823 - RNA, 19 nt, Artificial Sequence
  Description of Artificial Sequence: Synthetic oligonucleotide
aauuggauuauuuaagaug

SEQ ID NO: 3225824 - RNA, 19 nt, Artificial Sequence
  Description of Artificial Sequence: Synthetic oligonucleotide
aauguguuagaaaauauac

SEQ ID NO: 3225825 - RNA, 19 nt, Artificial Sequence
  Description of Artificial Sequence: Synthetic oligonucleotide
aauaaacucauacauuaag

SEQ ID NO: 3225826 - RNA, 19 nt, Artificial Sequence
  Description of Artificial Sequence: Synthetic oligonucleotide
uuaaauacucauuuaauug

SEQ ID NO: 3225827 - RNA, 19 nt, Artificial Sequence
  Description of Artificial Sequence: Synthetic oligonucleotide
aaauauacaguagucacac

SEQ ID NO: 3225828 - RNA, 19 nt, Artificial Sequence
  Description of Artificial Sequence: Synthetic oligonucleotide
uuuuaaaauaggauugagg

SEQ ID NO: 3225829 - RNA, 19 nt, Artificial Sequence
  Description of Artificial Sequence: Synthetic oligonucleotide
uuuaauucaagucuucuca

SEQ ID NO: 3225830 - RNA, 19 nt, Artificial Sequence
  Description of Artificial Sequence: Synthetic oligonucleotide
uuauuuaagaugcuuguag

SEQ ID NO: 3225831 - RNA, 19 nt, Artificial Sequence
  Description of Artificial Sequence: Synthetic oligonucleotide
gaaagaaaacauuuuauug

SEQ ID NO: 3225832 - RNA, 19 nt, Artificial Sequence
  Description of Artificial Sequence: Synthetic oligonucleotide
uguuaagccaucuuaaugc

SEQ ID NO: 3225833 - RNA, 19 nt, Artificial Sequence
  Description of Artificial Sequence: Synthetic oligonucleotide
uuuauugcuacaaagguaa

SEQ ID NO: 3225834 - RNA, 19 nt, Artificial Sequence
  Description of Artificial Sequence: Synthetic oligonucleotide
auuacuugcaaucaaagga

SEQ ID NO: 3225835 - RNA, 19 nt, Artificial Sequence
  Description of Artificial Sequence: Synthetic oligonucleotide
cauacauuaaggcagauac

SEQ ID NO: 3225836 - RNA, 19 nt, Artificial Sequence
  Description of Artificial Sequence: Synthetic oligonucleotide
uuagaaaauauacaguagu

SEQ ID NO: 3225837 - RNA, 19 nt, Artificial Sequence
  Description of Artificial Sequence: Synthetic oligonucleotide
aauucaagucuucucaauc

SEQ ID NO: 3225838 - RNA, 19 nt, Artificial Sequence
  Description of Artificial Sequence: Synthetic oligonucleotide
aaucacuugaaauacuugu

SEQ ID NO: 3225839 - RNA, 19 nt, Artificial Sequence
  Description of Artificial Sequence: Synthetic oligonucleotide
gaaaauauacaguagucac

SEQ ID NO: 3225840 - RNA, 19 nt, Artificial Sequence
  Description of Artificial Sequence: Synthetic oligonucleotide
uuaucuguuccuuauaagc

SEQ ID NO: 3225841 - RNA, 19 nt, Artificial Sequence
  Description of Artificial Sequence: Synthetic oligonucleotide
uguauuauuacuugcaauc

SEQ ID NO: 3225842 - RNA, 19 nt, Artificial Sequence
  Description of Artificial Sequence: Synthetic oligonucleotide
aagaaaacauuuuauugcu

SEQ ID NO: 3225843 - RNA, 19 nt, Artificial Sequence
  Description of Artificial Sequence: Synthetic oligonucleotide
gaucuugaauuucaaaagg

SEQ ID NO: 3225844 - RNA, 19 nt, Artificial Sequence
  Description of Artificial Sequence: Synthetic oligonucleotide
uaaauacucauuuaauuga

SEQ ID NO: 3225845 - RNA, 19 nt, Artificial Sequence
  Description of Artificial Sequence: Synthetic oligonucleotide
uaaacucauacauuaaggc

SEQ ID NO: 3225846 - RNA, 19 nt, Artificial Sequence
  Description of Artificial Sequence: Synthetic oligonucleotide
uguuagaaaauauacagua

SEQ ID NO: 3225847 - RNA, 19 nt, Artificial Sequence
  Description of Artificial Sequence: Synthetic oligonucleotide
aucaggagacuuuaggugc

SEQ ID NO: 3225848 - RNA, 19 nt, Artificial Sequence
  Description of Artificial Sequence: Synthetic oligonucleotide
aacucauacauuaaggcag

SEQ ID NO: 3225849 - RNA, 19 nt, Artificial Sequence
  Description of Artificial Sequence: Synthetic oligonucleotide
ugaucuugaauuucaaaag

SEQ ID NO: 3225850 - RNA, 19 nt, Artificial Sequence
  Description of Artificial Sequence: Synthetic oligonucleotide
acuugaaauacuugugagc

SEQ ID NO: 3225851 - RNA, 19 nt, Artificial Sequence
  Description of Artificial Sequence: Synthetic oligonucleotide
caagguuugacauaggcac

SEQ ID NO: 3225852 - RNA, 19 nt, Artificial Sequence
  Description of Artificial Sequence: Synthetic oligonucleotide
aaagcuaguauaaacaaga

SEQ ID NO: 3225853 - RNA, 19 nt, Artificial Sequence
  Description of Artificial Sequence: Synthetic oligonucleotide
aggauucucacccuuaacg

SEQ ID NO: 3225854 - RNA, 19 nt, Artificial Sequence
  Description of Artificial Sequence: Synthetic oligonucleotide
uauaaacaagaucaguuac

SEQ ID NO: 3225855 - RNA, 19 nt, Artificial Sequence
  Description of Artificial Sequence: Synthetic oligonucleotide
aaacucauacauuaaggca

SEQ ID NO: 3225856 - RNA, 19 nt, Artificial Sequence
  Description of Artificial Sequence: Synthetic oligonucleotide
uugacauaggcacagagaa

SEQ ID NO: 3225857 - RNA, 19 nt, Artificial Sequence
  Description of Artificial Sequence: Synthetic oligonucleotide
aagaacauacuaaagcuag

SEQ ID NO: 3225858 - RNA, 19 nt, Artificial Sequence
  Description of Artificial Sequence: Synthetic oligonucleotide
ugaaauguauuauuacuug

SEQ ID NO: 3225859 - RNA, 19 nt, Artificial Sequence
  Description of Artificial Sequence: Synthetic oligonucleotide
uuuguuauuuaaauuguaa

SEQ ID NO: 3225860 - RNA, 19 nt, Artificial Sequence
  Description of Artificial Sequence: Synthetic oligonucleotide
auuuuauugcuacaaaggu

SEQ ID NO: 3225861 - RNA, 19 nt, Artificial Sequence
  Description of Artificial Sequence: Synthetic oligonucleotide
acauuuuauugcuacaaag

SEQ ID NO: 3225862 - RNA, 19 nt, Artificial Sequence
  Description of Artificial Sequence: Synthetic oligonucleotide
aauacuugugagcuaauaa

SEQ ID NO: 3225863 - RNA, 19 nt, Artificial Sequence
  Description of Artificial Sequence: Synthetic oligonucleotide
uucuucaacagguucauug

SEQ ID NO: 3225864 - RNA, 19 nt, Artificial Sequence
  Description of Artificial Sequence: Synthetic oligonucleotide
gaaauguauuauuacuugc

SEQ ID NO: 3225865 - RNA, 19 nt, Artificial Sequence
  Description of Artificial Sequence: Synthetic oligonucleotide
uauuuaagaugcuuguagc

SEQ ID NO: 3225866 - RNA, 19 nt, Artificial Sequence
  Description of Artificial Sequence: Synthetic oligonucleotide
uacauuaaggcagauacug

SEQ ID NO: 3225867 - RNA, 19 nt, Artificial Sequence
  Description of Artificial Sequence: Synthetic oligonucleotide
auauacaguagucacacgu

SEQ ID NO: 3225868 - RNA, 19 nt, Artificial Sequence
  Description of Artificial Sequence: Synthetic oligonucleotide
uuuaauugaugaaauguau

SEQ ID NO: 3225869 - RNA, 19 nt, Artificial Sequence
  Description of Artificial Sequence: Synthetic oligonucleotide
aaugcuaacugcuauucaa

SEQ ID NO: 3225870 - RNA, 19 nt, Artificial Sequence
  Description of Artificial Sequence: Synthetic oligonucleotide
ugcuauucaauccuccucc

SEQ ID NO: 3225871 - RNA, 19 nt, Artificial Sequence
  Description of Artificial Sequence: Synthetic oligonucleotide
gcuaguauaaacaagauca

SEQ ID NO: 3225872 - RNA, 19 nt, Artificial Sequence
  Description of Artificial Sequence: Synthetic oligonucleotide
uacacaaaagcuguuaagc

SEQ ID NO: 3225873 - RNA, 19 nt, Artificial Sequence
  Description of Artificial Sequence: Synthetic oligonucleotide
auacucauuuaauugauga

SEQ ID NO: 3225874 - RNA, 19 nt, Artificial Sequence
  Description of Artificial Sequence: Synthetic oligonucleotide
uaauugaugaaauguauua

SEQ ID NO: 3225875 - RNA, 19 nt, Artificial Sequence
  Description of Artificial Sequence: Synthetic oligonucleotide
uuccuuauaagccugcuuc

SEQ ID NO: 3225876 - RNA, 19 nt, Artificial Sequence
  Description of Artificial Sequence: Synthetic oligonucleotide
agcuaauaaacucauacau

SEQ ID NO: 3225877 - RNA, 19 nt, Artificial Sequence
  Description of Artificial Sequence: Synthetic oligonucleotide
uuuucaggaagauuccaag

SEQ ID NO: 3225878 - RNA, 19 nt, Artificial Sequence
  Description of Artificial Sequence: Synthetic oligonucleotide
uuuaagaugcuuguagcag

SEQ ID NO: 3225879 - RNA, 19 nt, Artificial Sequence
  Description of Artificial Sequence: Synthetic oligonucleotide
ucaacagguucauugaucu

SEQ ID NO: 3225880 - RNA, 19 nt, Artificial Sequence
  Description of Artificial Sequence: Synthetic oligonucleotide
aagguaacuguacacaaaa

SEQ ID NO: 3225881 - RNA, 19 nt, Artificial Sequence
  Description of Artificial Sequence: Synthetic oligonucleotide
uuuuaucuguuccuuauaa

SEQ ID NO: 3225882 - RNA, 19 nt, Artificial Sequence
  Description of Artificial Sequence: Synthetic oligonucleotide
cacaauuggauuauuuaag

SEQ ID NO: 3225883 - RNA, 19 nt, Artificial Sequence
  Description of Artificial Sequence: Synthetic oligonucleotide
cacagagaaaagaacauac

SEQ ID NO: 3225884 - RNA, 19 nt, Artificial Sequence
  Description of Artificial Sequence: Synthetic oligonucleotide
ucacuugaaauacuuguga

SEQ ID NO: 3225885 - RNA, 19 nt, Artificial Sequence
  Description of Artificial Sequence: Synthetic oligonucleotide
uauucaauccuccucccca

SEQ ID NO: 3225886 - RNA, 19 nt, Artificial Sequence
  Description of Artificial Sequence: Synthetic oligonucleotide
aaucugcugauccugagaa

SEQ ID NO: 3225887 - RNA, 19 nt, Artificial Sequence
  Description of Artificial Sequence: Synthetic oligonucleotide
uucaggaagauuccaaggu

SEQ ID NO: 3225888 - RNA, 19 nt, Artificial Sequence
  Description of Artificial Sequence: Synthetic oligonucleotide
uagaaaauauacaguaguc

SEQ ID NO: 3225889 - RNA, 19 nt, Artificial Sequence
  Description of Artificial Sequence: Synthetic oligonucleotide
cuaauaaacucauacauua

SEQ ID NO: 3225890 - RNA, 19 nt, Artificial Sequence
  Description of Artificial Sequence: Synthetic oligonucleotide
uucucaaucacuugaaaua

SEQ ID NO: 3225891 - RNA, 19 nt, Artificial Sequence
  Description of Artificial Sequence: Synthetic oligonucleotide
aaauguauuauuacuugca

SEQ ID NO: 3225892 - RNA, 19 nt, Artificial Sequence
  Description of Artificial Sequence: Synthetic oligonucleotide
gaucaggagacuuuaggug

SEQ ID NO: 3225893 - RNA, 19 nt, Artificial Sequence
  Description of Artificial Sequence: Synthetic oligonucleotide
augaucaggagacuuuagg

SEQ ID NO: 3225894 - RNA, 19 nt, Artificial Sequence
  Description of Artificial Sequence: Synthetic oligonucleotide
ucacaauuggauuauuuaa

SEQ ID NO: 3225895 - RNA, 19 nt, Artificial Sequence
  Description of Artificial Sequence: Synthetic oligonucleotide
uaagccaucuuaaugcuaa

SEQ ID NO: 3225896 - RNA, 19 nt, Artificial Sequence
  Description of Artificial Sequence: Synthetic oligonucleotide
uacuaaagcuaguauaaac

SEQ ID NO: 3225897 - RNA, 19 nt, Artificial Sequence
  Description of Artificial Sequence: Synthetic oligonucleotide
agcuaguauaaacaagauc

SEQ ID NO: 3225898 - RNA, 19 nt, Artificial Sequence
  Description of Artificial Sequence: Synthetic oligonucleotide
uugaugaaauguauuauua

SEQ ID NO: 3225899 - RNA, 19 nt, Artificial Sequence
  Description of Artificial Sequence: Synthetic oligonucleotide
aauuucaaaaggauucuca

SEQ ID NO: 3225900 - RNA, 19 nt, Artificial Sequence
  Description of Artificial Sequence: Synthetic oligonucleotide
uuuaucuguuccuuauaag

SEQ ID NO: 3225901 - RNA, 19 nt, Artificial Sequence
  Description of Artificial Sequence: Synthetic oligonucleotide
uuuuauugcuacaaaggua

SEQ ID NO: 3225902 - RNA, 19 nt, Artificial Sequence
  Description of Artificial Sequence: Synthetic oligonucleotide
uugugagcuaauaaacuca

SEQ ID NO: 3225903 - RNA, 19 nt, Artificial Sequence
  Description of Artificial Sequence: Synthetic oligonucleotide
ugaugaaauguauuauuac

SEQ ID NO: 3225904 - RNA, 19 nt, Artificial Sequence
  Description of Artificial Sequence: Synthetic oligonucleotide
gguaacuguacacaaaagc

SEQ ID NO: 3225905 - RNA, 19 nt, Artificial Sequence
  Description of Artificial Sequence: Synthetic oligonucleotide
uccaagguuugacauaggc

SEQ ID NO: 3225906 - RNA, 19 nt, Artificial Sequence
  Description of Artificial Sequence: Synthetic oligonucleotide
acaauuggauuauuuaaga

SEQ ID NO: 3225907 - RNA, 19 nt, Artificial Sequence
  Description of Artificial Sequence: Synthetic oligonucleotide
uuaauugaugaaauguauu

SEQ ID NO: 3225908 - RNA, 19 nt, Artificial Sequence
  Description of Artificial Sequence: Synthetic oligonucleotide
gaugaaauguauuauuacu

SEQ ID NO: 3225909 - RNA, 19 nt, Artificial Sequence
  Description of Artificial Sequence: Synthetic oligonucleotide
aauauacaguagucacacg

SEQ ID NO: 3225910 - RNA, 19 nt, Artificial Sequence
  Description of Artificial Sequence: Synthetic oligonucleotide
uuaaggcagauacugauuu

SEQ ID NO: 3225911 - RNA, 19 nt, Artificial Sequence
  Description of Artificial Sequence: Synthetic oligonucleotide
ucauuuaauugaugaaaug

SEQ ID NO: 3225912 - RNA, 19 nt, Artificial Sequence
  Description of Artificial Sequence: Synthetic oligonucleotide
uuaaaauaggauugaggaa

SEQ ID NO: 3225913 - RNA, 19 nt, Artificial Sequence
  Description of Artificial Sequence: Synthetic oligonucleotide
auuuaagaugcuuguagca

SEQ ID NO: 3225914 - RNA, 19 nt, Artificial Sequence
  Description of Artificial Sequence: Synthetic oligonucleotide
uuuuaauucaagucuucuc

SEQ ID NO: 3225915 - RNA, 19 nt, Artificial Sequence
  Description of Artificial Sequence: Synthetic oligonucleotide
ugaucaggagacuuuaggu

SEQ ID NO: 3225916 - RNA, 19 nt, Artificial Sequence
  Description of Artificial Sequence: Synthetic oligonucleotide
agaaaauauacaguaguca

SEQ ID NO: 3225917 - RNA, 19 nt, Artificial Sequence
  Description of Artificial Sequence: Synthetic oligonucleotide
aaaaguuuuccucagaagg

SEQ ID NO: 3225918 - RNA, 19 nt, Artificial Sequence
  Description of Artificial Sequence: Synthetic oligonucleotide
aauguaacaaguuauuuuc

SEQ ID NO: 3225919 - RNA, 19 nt, Artificial Sequence
  Description of Artificial Sequence: Synthetic oligonucleotide
uuuuguguuaauaacgugu

SEQ ID NO: 3225920 - RNA, 19 nt, Artificial Sequence
  Description of Artificial Sequence: Synthetic oligonucleotide
uaggaagaaggguagaucg

SEQ ID NO: 3225921 - RNA, 19 nt, Artificial Sequence
  Description of Artificial Sequence: Synthetic oligonucleotide
uucuccugaaucuagauca

SEQ ID NO: 3225922 - RNA, 19 nt, Artificial Sequence
  Description of Artificial Sequence: Synthetic oligonucleotide
uguaacaaguuauuuuccg

SEQ ID NO: 3225923 - RNA, 19 nt, Artificial Sequence
  Description of Artificial Sequence: Synthetic oligonucleotide
guuaaaugcagacagaaca

SEQ ID NO: 3225924 - RNA, 19 nt, Artificial Sequence
  Description of Artificial Sequence: Synthetic oligonucleotide
uuaacuuguguucucagca

SEQ ID NO: 3225925 - RNA, 19 nt, Artificial Sequence
  Description of Artificial Sequence: Synthetic oligonucleotide
aaaguuuuccucagaaggc

SEQ ID NO: 3225926 - RNA, 19 nt, Artificial Sequence
  Description of Artificial Sequence: Synthetic oligonucleotide
ugcguggucauucacaucc

SEQ ID NO: 3225927 - RNA, 19 nt, Artificial Sequence
  Description of Artificial Sequence: Synthetic oligonucleotide
uuaauaacguguaaaaguu

SEQ ID NO: 3225928 - RNA, 19 nt, Artificial Sequence
  Description of Artificial Sequence: Synthetic oligonucleotide
gguaaauucuccgagaugg

SEQ ID NO: 3225929 - RNA, 19 nt, Artificial Sequence
  Description of Artificial Sequence: Synthetic oligonucleotide
guugacaucagacaccucc

SEQ ID NO: 3225930 - RNA, 19 nt, Artificial Sequence
  Description of Artificial Sequence: Synthetic oligonucleotide
guuauuuuccguuuucucc

SEQ ID NO: 3225931 - RNA, 19 nt, Artificial Sequence
  Description of Artificial Sequence: Synthetic oligonucleotide
aaguuuuccucagaaggcc

SEQ ID NO: 3225932 - RNA, 19 nt, Artificial Sequence
  Description of Artificial Sequence: Synthetic oligonucleotide
cugaaucuagaucagauac

SEQ ID NO: 3225933 - RNA, 19 nt, Artificial Sequence
  Description of Artificial Sequence: Synthetic oligonucleotide
aucagaaucgugcauuuuc

SEQ ID NO: 3225934 - RNA, 19 nt, Artificial Sequence
  Description of Artificial Sequence: Synthetic oligonucleotide
acuuggaucagaaucgugc

SEQ ID NO: 3225935 - RNA, 19 nt, Artificial Sequence
  Description of Artificial Sequence: Synthetic oligonucleotide
acagaacaaucucuggugc

SEQ ID NO: 3225936 - RNA, 19 nt, Artificial Sequence
  Description of Artificial Sequence: Synthetic oligonucleotide
cauaguuucugguaaauuc

SEQ ID NO: 3225937 - RNA, 19 nt, Artificial Sequence
  Description of Artificial Sequence: Synthetic oligonucleotide
ucuacaacggugauaguga

SEQ ID NO: 3225938 - RNA, 19 nt, Artificial Sequence
  Description of Artificial Sequence: Synthetic oligonucleotide
agaugggguuguuaaaugc

SEQ ID NO: 3225939 - RNA, 19 nt, Artificial Sequence
  Description of Artificial Sequence: Synthetic oligonucleotide
ugcauuuuccagaaaaggu

SEQ ID NO: 3225940 - RNA, 19 nt, Artificial Sequence
  Description of Artificial Sequence: Synthetic oligonucleotide
gguuguuaaaugcagacag

SEQ ID NO: 3225941 - RNA, 19 nt, Artificial Sequence
  Description of Artificial Sequence: Synthetic oligonucleotide
acauccacgacuuggauca

SEQ ID NO: 3225942 - RNA, 19 nt, Artificial Sequence
  Description of Artificial Sequence: Synthetic oligonucleotide
augucuacaacggugauag

SEQ ID NO: 3225943 - RNA, 19 nt, Artificial Sequence
  Description of Artificial Sequence: Synthetic oligonucleotide
uguguucucagcaugggac

SEQ ID NO: 3225944 - RNA, 19 nt, Artificial Sequence
  Description of Artificial Sequence: Synthetic oligonucleotide
uuauuuuccguuuucuccu

SEQ ID NO: 3225945 - RNA, 19 nt, Artificial Sequence
  Description of Artificial Sequence: Synthetic oligonucleotide
ugauguuguacucugcugu

SEQ ID NO: 3225946 - RNA, 19 nt, Artificial Sequence
  Description of Artificial Sequence: Synthetic oligonucleotide
aucuagaucagauacacua

SEQ ID NO: 3225947 - RNA, 19 nt, Artificial Sequence
  Description of Artificial Sequence: Synthetic oligonucleotide
acguguaaaaguuuuccuc

SEQ ID NO: 3225948 - RNA, 19 nt, Artificial Sequence
  Description of Artificial Sequence: Synthetic oligonucleotide
guuucugguaaauucuccg

SEQ ID NO: 3225949 - RNA, 19 nt, Artificial Sequence
  Description of Artificial Sequence: Synthetic oligonucleotide
uguuaauaacguguaaaag

SEQ ID NO: 3225950 - RNA, 19 nt, Artificial Sequence
  Description of Artificial Sequence: Synthetic oligonucleotide
uuaaaugcagacagaacaa

SEQ ID NO: 3225951 - RNA, 19 nt, Artificial Sequence
  Description of Artificial Sequence: Synthetic oligonucleotide
guuaauaacguguaaaagu

SEQ ID NO: 3225952 - RNA, 19 nt, Artificial Sequence
  Description of Artificial Sequence: Synthetic oligonucleotide
uaaaaguuuuccucagaag

SEQ ID NO: 3225953 - RNA, 19 nt, Artificial Sequence
  Description of Artificial Sequence: Synthetic oligonucleotide
aguuauuuuccguuuucuc

SEQ ID NO: 3225954 - RNA, 19 nt, Artificial Sequence
  Description of Artificial Sequence: Synthetic oligonucleotide
gacagaacaaucucuggug

SEQ ID NO: 3225955 - RNA, 19 nt, Artificial Sequence
  Description of Artificial Sequence: Synthetic oligonucleotide
ucagaaucgugcauuuucc

SEQ ID NO: 3225956 - RNA, 19 nt, Artificial Sequence
  Description of Artificial Sequence: Synthetic oligonucleotide
aaugcagacagaacaaucu

SEQ ID NO: 3225957 - RNA, 19 nt, Artificial Sequence
  Description of Artificial Sequence: Synthetic oligonucleotide
ugucguugacaucagacac

SEQ ID NO: 3225958 - RNA, 19 nt, Artificial Sequence
  Description of Artificial Sequence: Synthetic oligonucleotide
uucugguaaauucuccgag

SEQ ID NO: 3225959 - RNA, 19 nt, Artificial Sequence
  Description of Artificial Sequence: Synthetic oligonucleotide
cucagaaggccuuaggaag

SEQ ID NO: 3225960 - RNA, 19 nt, Artificial Sequence
  Description of Artificial Sequence: Synthetic oligonucleotide
aaacugccaccauaguuuc

SEQ ID NO: 3225961 - RNA, 19 nt, Artificial Sequence
  Description of Artificial Sequence: Synthetic oligonucleotide
aaaugcagacagaacaauc

SEQ ID NO: 3225962 - RNA, 19 nt, Artificial Sequence
  Description of Artificial Sequence: Synthetic oligonucleotide
uggucauucacauccacga

SEQ ID NO: 3225963 - RNA, 19 nt, Artificial Sequence
  Description of Artificial Sequence: Synthetic oligonucleotide
aaaacugccaccauaguuu

SEQ ID NO: 3225964 - RNA, 19 nt, Artificial Sequence
  Description of Artificial Sequence: Synthetic oligonucleotide
aacguguaaaaguuuuccu

SEQ ID NO: 3225965 - RNA, 19 nt, Artificial Sequence
  Description of Artificial Sequence: Synthetic oligonucleotide
acaacggugauagugaugu

SEQ ID NO: 3225966 - RNA, 19 nt, Artificial Sequence
  Description of Artificial Sequence: Synthetic oligonucleotide
uuuguguuaauaacgugua

SEQ ID NO: 3225967 - RNA, 19 nt, Artificial Sequence
  Description of Artificial Sequence: Synthetic oligonucleotide
acaucagacaccuccacug

SEQ ID NO: 3225968 - RNA, 19 nt, Artificial Sequence
  Description of Artificial Sequence: Synthetic oligonucleotide
gaaggccuuaggaagaagg

SEQ ID NO: 3225969 - RNA, 19 nt, Artificial Sequence
  Description of Artificial Sequence: Synthetic oligonucleotide
gaaucuagaucagauacac

SEQ ID NO: 3225970 - RNA, 19 nt, Artificial Sequence
  Description of Artificial Sequence: Synthetic oligonucleotide
uguguuaauaacguguaaa

SEQ ID NO: 3225971 - RNA, 19 nt, Artificial Sequence
  Description of Artificial Sequence: Synthetic oligonucleotide
uaaauucuccgagaugggg

SEQ ID NO: 3225972 - RNA, 19 nt, Artificial Sequence
  Description of Artificial Sequence: Synthetic oligonucleotide
ugaaucuagaucagauaca

SEQ ID NO: 3225973 - RNA, 19 nt, Artificial Sequence
  Description of Artificial Sequence: Synthetic oligonucleotide
aauaacguguaaaaguuuu

SEQ ID NO: 3225974 - RNA, 19 nt, Artificial Sequence
  Description of Artificial Sequence: Synthetic oligonucleotide
guuacguuaacuuguguuc

SEQ ID NO: 3225975 - RNA, 19 nt, Artificial Sequence
  Description of Artificial Sequence: Synthetic oligonucleotide
uaacguguaaaaguuuucc

SEQ ID NO: 3225976 - RNA, 19 nt, Artificial Sequence
  Description of Artificial Sequence: Synthetic oligonucleotide
agaaucgugcauuuuccag

SEQ ID NO: 3225977 - RNA, 19 nt, Artificial Sequence
  Description of Artificial Sequence: Synthetic oligonucleotide
cacgacuuggaucagaauc

SEQ ID NO: 3225978 - RNA, 19 nt, Artificial Sequence
  Description of Artificial Sequence: Synthetic oligonucleotide
uguuacguuaacuuguguu

SEQ ID NO: 3225979 - RNA, 19 nt, Artificial Sequence
  Description of Artificial Sequence: Synthetic oligonucleotide
auagugauguuguacucug

SEQ ID NO: 3225980 - RNA, 19 nt, Artificial Sequence
  Description of Artificial Sequence: Synthetic oligonucleotide
aacuuguguucucagcaug

SEQ ID NO: 3225981 - RNA, 19 nt, Artificial Sequence
  Description of Artificial Sequence: Synthetic oligonucleotide
ucgugcauuuuccagaaaa

SEQ ID NO: 3225982 - RNA, 19 nt, Artificial Sequence
  Description of Artificial Sequence: Synthetic oligonucleotide
aacggugauagugauguug

SEQ ID NO: 3225983 - RNA, 19 nt, Artificial Sequence
  Description of Artificial Sequence: Synthetic oligonucleotide
aacaaucucuggugcgugg

SEQ ID NO: 3225984 - RNA, 19 nt, Artificial Sequence
  Description of Artificial Sequence: Synthetic oligonucleotide
cauuuuccagaaaagguuc

SEQ ID NO: 3225985 - RNA, 19 nt, Artificial Sequence
  Description of Artificial Sequence: Synthetic oligonucleotide
auucacauccacgacuugg

SEQ ID NO: 3225986 - RNA, 19 nt, Artificial Sequence
  Description of Artificial Sequence: Synthetic oligonucleotide
uguuaaaugcagacagaac

SEQ ID NO: 3225987 - RNA, 19 nt, Artificial Sequence
  Description of Artificial Sequence: Synthetic oligonucleotide
agacagaacaaucucuggu

SEQ ID NO: 3225988 - RNA, 19 nt, Artificial Sequence
  Description of Artificial Sequence: Synthetic oligonucleotide
uccacuguuacguuaacuu

SEQ ID NO: 3225989 - RNA, 19 nt, Artificial Sequence
  Description of Artificial Sequence: Synthetic oligonucleotide
ugcagacagaacaaucucu

SEQ ID NO: 3225990 - RNA, 19 nt, Artificial Sequence
  Description of Artificial Sequence: Synthetic oligonucleotide
uguaaaaguuuuccucaga

SEQ ID NO: 3225991 - RNA, 19 nt, Artificial Sequence
  Description of Artificial Sequence: Synthetic oligonucleotide
uccguuuucuccugaaucu

SEQ ID NO: 3225992 - RNA, 19 nt, Artificial Sequence
  Description of Artificial Sequence: Synthetic oligonucleotide
aacaaguuauuuuccguuu

SEQ ID NO: 3225993 - RNA, 19 nt, Artificial Sequence
  Description of Artificial Sequence: Synthetic oligonucleotide
uuguuaaaugcagacagaa

SEQ ID NO: 3225994 - RNA, 19 nt, Artificial Sequence
  Description of Artificial Sequence: Synthetic oligonucleotide
uccucagaaggccuuagga

SEQ ID NO: 3225995 - RNA, 19 nt, Artificial Sequence
  Description of Artificial Sequence: Synthetic oligonucleotide
agugauguuguacucugcu

SEQ ID NO: 3225996 - RNA, 19 nt, Artificial Sequence
  Description of Artificial Sequence: Synthetic oligonucleotide
uguuguacucugcuguugu

SEQ ID NO: 3225997 - RNA, 19 nt, Artificial Sequence
  Description of Artificial Sequence: Synthetic oligonucleotide
ucuagaucagauacacuaa

SEQ ID NO: 3225998 - RNA, 19 nt, Artificial Sequence
  Description of Artificial Sequence: Synthetic oligonucleotide
uugucguugacaucagaca

SEQ ID NO: 3225999 - RNA, 19 nt, Artificial Sequence
  Description of Artificial Sequence: Synthetic oligonucleotide
gaaucgugcauuuuccaga

SEQ ID NO: 3226000 - RNA, 19 nt, Artificial Sequence
  Description of Artificial Sequence: Synthetic oligonucleotide
ucagaaggccuuaggaaga

SEQ ID NO: 3226001 - RNA, 19 nt, Artificial Sequence
  Description of Artificial Sequence: Synthetic oligonucleotide
acgacuuggaucagaaucg

SEQ ID NO: 3226002 - RNA, 19 nt, Artificial Sequence
  Description of Artificial Sequence: Synthetic oligonucleotide
uuucugguaaauucuccga

SEQ ID NO: 3226003 - RNA, 19 nt, Artificial Sequence
  Description of Artificial Sequence: Synthetic oligonucleotide
aaucgugcauuuuccagaa

SEQ ID NO: 3226004 - RNA, 19 nt, Artificial Sequence
  Description of Artificial Sequence: Synthetic oligonucleotide
ucugguaaauucuccgaga

SEQ ID NO: 3226005 - RNA, 19 nt, Artificial Sequence
  Description of Artificial Sequence: Synthetic oligonucleotide
uaacaaguuauuuuccguu

SEQ ID NO: 3226006 - RNA, 19 nt, Artificial Sequence
  Description of Artificial Sequence: Synthetic oligonucleotide
uuccguuuucuccugaauc

SEQ ID NO: 3226007 - RNA, 19 nt, Artificial Sequence
  Description of Artificial Sequence: Synthetic oligonucleotide
acuccccaugucuacaacg

SEQ ID NO: 3226008 - RNA, 19 nt, Artificial Sequence
  Description of Artificial Sequence: Synthetic oligonucleotide
auguaacaaguuauuuucc

SEQ ID NO: 3226009 - RNA, 19 nt, Artificial Sequence
  Description of Artificial Sequence: Synthetic oligonucleotide
auuuuccagaaaagguucc

SEQ ID NO: 3226010 - RNA, 19 nt, Artificial Sequence
  Description of Artificial Sequence: Synthetic oligonucleotide
guuaacuuguguucucagc

SEQ ID NO: 3226011 - RNA, 19 nt, Artificial Sequence
  Description of Artificial Sequence: Synthetic oligonucleotide
uccugaauguaacaaguua

SEQ ID NO: 3226012 - RNA, 19 nt, Artificial Sequence
  Description of Artificial Sequence: Synthetic oligonucleotide
aagaaggguagaucguccu

SEQ ID NO: 3226013 - RNA, 19 nt, Artificial Sequence
  Description of Artificial Sequence: Synthetic oligonucleotide
augcagacagaacaaucuc

SEQ ID NO: 3226014 - RNA, 19 nt, Artificial Sequence
  Description of Artificial Sequence: Synthetic oligonucleotide
guaaaaguuuuccucagaa

SEQ ID NO: 3226015 - RNA, 19 nt, Artificial Sequence
  Description of Artificial Sequence: Synthetic oligonucleotide
uucacauccacgacuugga

SEQ ID NO: 3226016 - RNA, 19 nt, Artificial Sequence
  Description of Artificial Sequence: Synthetic oligonucleotide
aaggccuuaggaagaaggg

SEQ ID NO: 3226017 - RNA, 19 nt, Artificial Sequence
  Description of Artificial Sequence: Synthetic oligonucleotide
aaauauguaucuuucggcc

SEQ ID NO: 3226018 - RNA, 19 nt, Artificial Sequence
  Description of Artificial Sequence: Synthetic oligonucleotide
aauauugugauaaucuucc

SEQ ID NO: 3226019 - RNA, 19 nt, Artificial Sequence
  Description of Artificial Sequence: Synthetic oligonucleotide
aaugaguuaauuuaggaca

SEQ ID NO: 3226020 - RNA, 19 nt, Artificial Sequence
  Description of Artificial Sequence: Synthetic oligonucleotide
aauugaaucuguuucuuac

SEQ ID NO: 3226021 - RNA, 19 nt, Artificial Sequence
  Description of Artificial Sequence: Synthetic oligonucleotide
uuuaauaaccaauugaauc

SEQ ID NO: 3226022 - RNA, 19 nt, Artificial Sequence
  Description of Artificial Sequence: Synthetic oligonucleotide
acauaaacuacacaguuuc

SEQ ID NO: 3226023 - RNA, 19 nt, Artificial Sequence
  Description of Artificial Sequence: Synthetic oligonucleotide
uauuccaacaccuaauucc

SEQ ID NO: 3226024 - RNA, 19 nt, Artificial Sequence
  Description of Artificial Sequence: Synthetic oligonucleotide
agcaucaucaucuuuuccc

SEQ ID NO: 3226025 - RNA, 19 nt, Artificial Sequence
  Description of Artificial Sequence: Synthetic oligonucleotide
aauguuuccaucccgaggu

SEQ ID NO: 3226026 - RNA, 19 nt, Artificial Sequence
  Description of Artificial Sequence: Synthetic oligonucleotide
uuaauuuaggacaaucuga

SEQ ID NO: 3226027 - RNA, 19 nt, Artificial Sequence
  Description of Artificial Sequence: Synthetic oligonucleotide
agaauuaaacuucuugcac

SEQ ID NO: 3226028 - RNA, 19 nt, Artificial Sequence
  Description of Artificial Sequence: Synthetic oligonucleotide
agagguaagcuccacaucg

SEQ ID NO: 3226029 - RNA, 19 nt, Artificial Sequence
  Description of Artificial Sequence: Synthetic oligonucleotide
agaacuagcagcuucaacu

SEQ ID NO: 3226030 - RNA, 19 nt, Artificial Sequence
  Description of Artificial Sequence: Synthetic oligonucleotide
aauuccuucauuaucuuuc

SEQ ID NO: 3226031 - RNA, 19 nt, Artificial Sequence
  Description of Artificial Sequence: Synthetic oligonucleotide
uuuaggacaaucugaauac

SEQ ID NO: 3226032 - RNA, 19 nt, Artificial Sequence
  Description of Artificial Sequence: Synthetic oligonucleotide
aaucgggaacaucaauucc

SEQ ID NO: 3226033 - RNA, 19 nt, Artificial Sequence
  Description of Artificial Sequence: Synthetic oligonucleotide
uaaauauguaucuuucggc

SEQ ID NO: 3226034 - RNA, 19 nt, Artificial Sequence
  Description of Artificial Sequence: Synthetic oligonucleotide
aaauauugugauaaucuuc

SEQ ID NO: 3226035 - RNA, 19 nt, Artificial Sequence
  Description of Artificial Sequence: Synthetic oligonucleotide
acaacuggagcugagaugg

SEQ ID NO: 3226036 - RNA, 19 nt, Artificial Sequence
  Description of Artificial Sequence: Synthetic oligonucleotide
uuaaucuucuggcacacug

SEQ ID NO: 3226037 - RNA, 19 nt, Artificial Sequence
  Description of Artificial Sequence: Synthetic oligonucleotide
aacaguaccucuugcuugg

SEQ ID NO: 3226038 - RNA, 19 nt, Artificial Sequence
  Description of Artificial Sequence: Synthetic oligonucleotide
guuaauuuaggacaaucug

SEQ ID NO: 3226039 - RNA, 19 nt, Artificial Sequence
  Description of Artificial Sequence: Synthetic oligonucleotide
agugauauuagauguggag

SEQ ID NO: 3226040 - RNA, 19 nt, Artificial Sequence
  Description of Artificial Sequence: Synthetic oligonucleotide
aaucuguugaagccauuac

SEQ ID NO: 3226041 - RNA, 19 nt, Artificial Sequence
  Description of Artificial Sequence: Synthetic oligonucleotide
uaauuuaggacaaucugaa

SEQ ID NO: 3226042 - RNA, 19 nt, Artificial Sequence
  Description of Artificial Sequence: Synthetic oligonucleotide
gaaugaguuaauuuaggac

SEQ ID NO: 3226043 - RNA, 19 nt, Artificial Sequence
  Description of Artificial Sequence: Synthetic oligonucleotide
cuugcuuggagaauuaaac

SEQ ID NO: 3226044 - RNA, 19 nt, Artificial Sequence
  Description of Artificial Sequence: Synthetic oligonucleotide
ucuuucuuuucauguaugg

SEQ ID NO: 3226045 - RNA, 19 nt, Artificial Sequence
  Description of Artificial Sequence: Synthetic oligonucleotide
aacaccuaauuccucugac

SEQ ID NO: 3226046 - RNA, 19 nt, Artificial Sequence
  Description of Artificial Sequence: Synthetic oligonucleotide
uguacacugccacucaucc

SEQ ID NO: 3226047 - RNA, 19 nt, Artificial Sequence
  Description of Artificial Sequence: Synthetic oligonucleotide
ucgguaucaucacucaacg

SEQ ID NO: 3226048 - RNA, 19 nt, Artificial Sequence
  Description of Artificial Sequence: Synthetic oligonucleotide
ugaauaauguuuccauccc

SEQ ID NO: 3226049 - RNA, 19 nt, Artificial Sequence
  Description of Artificial Sequence: Synthetic oligonucleotide
aacuucuugcacucuguac

SEQ ID NO: 3226050 - RNA, 19 nt, Artificial Sequence
  Description of Artificial Sequence: Synthetic oligonucleotide
aaacaguaccucuugcuug

SEQ ID NO: 3226051 - RNA, 19 nt, Artificial Sequence
  Description of Artificial Sequence: Synthetic oligonucleotide
aagagggacaugaagcccc

SEQ ID NO: 3226052 - RNA, 19 nt, Artificial Sequence
  Description of Artificial Sequence: Synthetic oligonucleotide
uaauguuuccaucccgagg

SEQ ID NO: 3226053 - RNA, 19 nt, Artificial Sequence
  Description of Artificial Sequence: Synthetic oligonucleotide
cuuuaaauauguaucuuuc

SEQ ID NO: 3226054 - RNA, 19 nt, Artificial Sequence
  Description of Artificial Sequence: Synthetic oligonucleotide
aacaucaauuccuucauua

SEQ ID NO: 3226055 - RNA, 19 nt, Artificial Sequence
  Description of Artificial Sequence: Synthetic oligonucleotide
aguaccuauauccugauuu

SEQ ID NO: 3226056 - RNA, 19 nt, Artificial Sequence
  Description of Artificial Sequence: Synthetic oligonucleotide
gaauaauguuuccaucccg

SEQ ID NO: 3226057 - RNA, 19 nt, Artificial Sequence
  Description of Artificial Sequence: Synthetic oligonucleotide
cuugcucagaacuagcagc

SEQ ID NO: 3226058 - RNA, 19 nt, Artificial Sequence
  Description of Artificial Sequence: Synthetic oligonucleotide
aauauguaucuuucggccu

SEQ ID NO: 3226059 - RNA, 19 nt, Artificial Sequence
  Description of Artificial Sequence: Synthetic oligonucleotide
aaaggauaucugcuuguuc

SEQ ID NO: 3226060 - RNA, 19 nt, Artificial Sequence
  Description of Artificial Sequence: Synthetic oligonucleotide
caauccuuccuuaaggccc

SEQ ID NO: 3226061 - RNA, 19 nt, Artificial Sequence
  Description of Artificial Sequence: Synthetic oligonucleotide
ucuuacaagagggacauga

SEQ ID NO: 3226062 - RNA, 19 nt, Artificial Sequence
  Description of Artificial Sequence: Synthetic oligonucleotide
accaauccuuccuuaaggc

SEQ ID NO: 3226063 - RNA, 19 nt, Artificial Sequence
  Description of Artificial Sequence: Synthetic oligonucleotide
acuucuugcacucuguaca

SEQ ID NO: 3226064 - RNA, 19 nt, Artificial Sequence
  Description of Artificial Sequence: Synthetic oligonucleotide
uaaucuucuggcacacugg

SEQ ID NO: 3226065 - RNA, 19 nt, Artificial Sequence
  Description of Artificial Sequence: Synthetic oligonucleotide
gagagaaugaguuaauuua

SEQ ID NO: 3226066 - RNA, 19 nt, Artificial Sequence
  Description of Artificial Sequence: Synthetic oligonucleotide
cuguaaaucuguugaagcc

SEQ ID NO: 3226067 - RNA, 19 nt, Artificial Sequence
  Description of Artificial Sequence: Synthetic oligonucleotide
ucuucuggcacacuggaaa

SEQ ID NO: 3226068 - RNA, 19 nt, Artificial Sequence
  Description of Artificial Sequence: Synthetic oligonucleotide
aaaacaguaccucuugcuu

SEQ ID NO: 3226069 - RNA, 19 nt, Artificial Sequence
  Description of Artificial Sequence: Synthetic oligonucleotide
gagaauuaaacuucuugca

SEQ ID NO: 3226070 - RNA, 19 nt, Artificial Sequence
  Description of Artificial Sequence: Synthetic oligonucleotide
uuuuauuccaacaccuaau

SEQ ID NO: 3226071 - RNA, 19 nt, Artificial Sequence
  Description of Artificial Sequence: Synthetic oligonucleotide
ucacucaacgacuuaaggu

SEQ ID NO: 3226072 - RNA, 19 nt, Artificial Sequence
  Description of Artificial Sequence: Synthetic oligonucleotide
uagauguggagagagaaug

SEQ ID NO: 3226073 - RNA, 19 nt, Artificial Sequence
  Description of Artificial Sequence: Synthetic oligonucleotide
gguaucaucacucaacgac

SEQ ID NO: 3226074 - RNA, 19 nt, Artificial Sequence
  Description of Artificial Sequence: Synthetic oligonucleotide
ucaaacuugauauuuucuu

SEQ ID NO: 3226075 - RNA, 19 nt, Artificial Sequence
  Description of Artificial Sequence: Synthetic oligonucleotide
cacucaacgacuuaagguc

SEQ ID NO: 3226076 - RNA, 19 nt, Artificial Sequence
  Description of Artificial Sequence: Synthetic oligonucleotide
ugaaacaauggcaguaccu

SEQ ID NO: 3226077 - RNA, 19 nt, Artificial Sequence
  Description of Artificial Sequence: Synthetic oligonucleotide
uguaaaucuguugaagcca

SEQ ID NO: 3226078 - RNA, 19 nt, Artificial Sequence
  Description of Artificial Sequence: Synthetic oligonucleotide
uucaacuuuuauuccaaca

SEQ ID NO: 3226079 - RNA, 19 nt, Artificial Sequence
  Description of Artificial Sequence: Synthetic oligonucleotide
aacuuuuauuccaacaccu

SEQ ID NO: 3226080 - RNA, 19 nt, Artificial Sequence
  Description of Artificial Sequence: Synthetic oligonucleotide
caagucguaagauggcucg

SEQ ID NO: 3226081 - RNA, 19 nt, Artificial Sequence
  Description of Artificial Sequence: Synthetic oligonucleotide
uaucuuucggccuaacaac

SEQ ID NO: 3226082 - RNA, 19 nt, Artificial Sequence
  Description of Artificial Sequence: Synthetic oligonucleotide
uguucagaaaggauaucug

SEQ ID NO: 3226083 - RNA, 19 nt, Artificial Sequence
  Description of Artificial Sequence: Synthetic oligonucleotide
guucagaaaggauaucugc

SEQ ID NO: 3226084 - RNA, 19 nt, Artificial Sequence
  Description of Artificial Sequence: Synthetic oligonucleotide
uacacugccacucauccuc

SEQ ID NO: 3226085 - RNA, 19 nt, Artificial Sequence
  Description of Artificial Sequence: Synthetic oligonucleotide
ugaguuacaagggucaaac

SEQ ID NO: 3226086 - RNA, 19 nt, Artificial Sequence
  Description of Artificial Sequence: Synthetic oligonucleotide
auauuagauguggagagag

SEQ ID NO: 3226087 - RNA, 19 nt, Artificial Sequence
  Description of Artificial Sequence: Synthetic oligonucleotide
aauaauguuuccaucccga

SEQ ID NO: 3226088 - RNA, 19 nt, Artificial Sequence
  Description of Artificial Sequence: Synthetic oligonucleotide
ugguucuccgacaaucggg

SEQ ID NO: 3226089 - RNA, 19 nt, Artificial Sequence
  Description of Artificial Sequence: Synthetic oligonucleotide
aacgacuuaagguccucag

SEQ ID NO: 3226090 - RNA, 19 nt, Artificial Sequence
  Description of Artificial Sequence: Synthetic oligonucleotide
acuuuaauaaccaauugaa

SEQ ID NO: 3226091 - RNA, 19 nt, Artificial Sequence
  Description of Artificial Sequence: Synthetic oligonucleotide
gauauuuucuuccuuuaaa

SEQ ID NO: 3226092 - RNA, 19 nt, Artificial Sequence
  Description of Artificial Sequence: Synthetic oligonucleotide
cuugagauggucucuuggc

SEQ ID NO: 3226093 - RNA, 19 nt, Artificial Sequence
  Description of Artificial Sequence: Synthetic oligonucleotide
uagugucugaaacaauggc

SEQ ID NO: 3226094 - RNA, 19 nt, Artificial Sequence
  Description of Artificial Sequence: Synthetic oligonucleotide
aauaccaauccuuccuuaa

SEQ ID NO: 3226095 - RNA, 19 nt, Artificial Sequence
  Description of Artificial Sequence: Synthetic oligonucleotide
aaucuucuggcacacugga

SEQ ID NO: 3226096 - RNA, 19 nt, Artificial Sequence
  Description of Artificial Sequence: Synthetic oligonucleotide
uuuauuccaacaccuaauu

SEQ ID NO: 3226097 - RNA, 19 nt, Artificial Sequence
  Description of Artificial Sequence: Synthetic oligonucleotide
uauugugauaaucuuccau

SEQ ID NO: 3226098 - RNA, 19 nt, Artificial Sequence
  Description of Artificial Sequence: Synthetic oligonucleotide
caacuuuuauuccaacacc

SEQ ID NO: 3226099 - RNA, 19 nt, Artificial Sequence
  Description of Artificial Sequence: Synthetic oligonucleotide
uccuuaaggcccagcaacg

SEQ ID NO: 3226100 - RNA, 19 nt, Artificial Sequence
  Description of Artificial Sequence: Synthetic oligonucleotide
uguucucucaugcuugaga

SEQ ID NO: 3226101 - RNA, 19 nt, Artificial Sequence
  Description of Artificial Sequence: Synthetic oligonucleotide
uuccauacuuucuguaucc

SEQ ID NO: 3226102 - RNA, 19 nt, Artificial Sequence
  Description of Artificial Sequence: Synthetic oligonucleotide
uaaacuacacaguuucaaa

SEQ ID NO: 3226103 - RNA, 19 nt, Artificial Sequence
  Description of Artificial Sequence: Synthetic oligonucleotide
gagaaugaguuaauuuagg

SEQ ID NO: 3226104 - RNA, 19 nt, Artificial Sequence
  Description of Artificial Sequence: Synthetic oligonucleotide
acgacuuaagguccucagc

SEQ ID NO: 3226105 - RNA, 19 nt, Artificial Sequence
  Description of Artificial Sequence: Synthetic oligonucleotide
uggcagugauauuagaugu

SEQ ID NO: 3226106 - RNA, 19 nt, Artificial Sequence
  Description of Artificial Sequence: Synthetic oligonucleotide
uugugauaaucuuccauac

SEQ ID NO: 3226107 - RNA, 19 nt, Artificial Sequence
  Description of Artificial Sequence: Synthetic oligonucleotide
cauuuucuguucagaaagg

SEQ ID NO: 3226108 - RNA, 19 nt, Artificial Sequence
  Description of Artificial Sequence: Synthetic oligonucleotide
agaugguucuccgacaauc

SEQ ID NO: 3226109 - RNA, 19 nt, Artificial Sequence
  Description of Artificial Sequence: Synthetic oligonucleotide
gaauuaaacuucuugcacu

SEQ ID NO: 3226110 - RNA, 19 nt, Artificial Sequence
  Description of Artificial Sequence: Synthetic oligonucleotide
uaauaaccaauugaaucug

SEQ ID NO: 3226111 - RNA, 19 nt, Artificial Sequence
  Description of Artificial Sequence: Synthetic oligonucleotide
auccucagagguaagcucc

SEQ ID NO: 3226112 - RNA, 19 nt, Artificial Sequence
  Description of Artificial Sequence: Synthetic oligonucleotide
uuuucuguucagaaaggau

SEQ ID NO: 3226113 - RNA, 19 nt, Artificial Sequence
  Description of Artificial Sequence: Synthetic oligonucleotide
gacacugacucauuuaaaa

SEQ ID NO: 3226114 - RNA, 19 nt, Artificial Sequence
  Description of Artificial Sequence: Synthetic oligonucleotide
uguuucuuacaagagggac

SEQ ID NO: 3226115 - RNA, 19 nt, Artificial Sequence
  Description of Artificial Sequence: Synthetic oligonucleotide
aucgguaucaucacucaac

SEQ ID NO: 3226116 - RNA, 19 nt, Artificial Sequence
  Description of Artificial Sequence: Synthetic oligonucleotide
aaaucguccguagugucug

SEQ ID NO: 3226117 - RNA, 19 nt, Artificial Sequence
  Description of Artificial Sequence: Synthetic oligonucleotide
aaaacuuuagucucugugc

SEQ ID NO: 3226118 - RNA, 19 nt, Artificial Sequence
  Description of Artificial Sequence: Synthetic oligonucleotide
aauaaaagccuuuugaagu

SEQ ID NO: 3226119 - RNA, 19 nt, Artificial Sequence
  Description of Artificial Sequence: Synthetic oligonucleotide
gaugcauccagcuugagag

SEQ ID NO: 3226120 - RNA, 19 nt, Artificial Sequence
  Description of Artificial Sequence: Synthetic oligonucleotide
cuuucuuuagcauugauac

SEQ ID NO: 3226121 - RNA, 19 nt, Artificial Sequence
  Description of Artificial Sequence: Synthetic oligonucleotide
aaugacaaagcaguguagc

SEQ ID NO: 3226122 - RNA, 19 nt, Artificial Sequence
  Description of Artificial Sequence: Synthetic oligonucleotide
cuugucacaauacugaugc

SEQ ID NO: 3226123 - RNA, 19 nt, Artificial Sequence
  Description of Artificial Sequence: Synthetic oligonucleotide
agccauaacagucaguagc

SEQ ID NO: 3226124 - RNA, 19 nt, Artificial Sequence
  Description of Artificial Sequence: Synthetic oligonucleotide
aguagcauuaaccucgacg

SEQ ID NO: 3226125 - RNA, 19 nt, Artificial Sequence
  Description of Artificial Sequence: Synthetic oligonucleotide
uuagcauugauacaaucug

SEQ ID NO: 3226126 - RNA, 19 nt, Artificial Sequence
  Description of Artificial Sequence: Synthetic oligonucleotide
auagcaaucacccaagaca

SEQ ID NO: 3226127 - RNA, 19 nt, Artificial Sequence
  Description of Artificial Sequence: Synthetic oligonucleotide
gaauaaaagccuuuugaag

SEQ ID NO: 3226128 - RNA, 19 nt, Artificial Sequence
  Description of Artificial Sequence: Synthetic oligonucleotide
ugaacucucaccaugcuug

SEQ ID NO: 3226129 - RNA, 19 nt, Artificial Sequence
  Description of Artificial Sequence: Synthetic oligonucleotide
uuuagcauugauacaaucu

SEQ ID NO: 3226130 - RNA, 19 nt, Artificial Sequence
  Description of Artificial Sequence: Synthetic oligonucleotide
guagcauuaaccucgacgc

SEQ ID NO: 3226131 - RNA, 19 nt, Artificial Sequence
  Description of Artificial Sequence: Synthetic oligonucleotide
aauacugaugcauccagcu

SEQ ID NO: 3226132 - RNA, 19 nt, Artificial Sequence
  Description of Artificial Sequence: Synthetic oligonucleotide
aaucacccaagacagggac

SEQ ID NO: 3226133 - RNA, 19 nt, Artificial Sequence
  Description of Artificial Sequence: Synthetic oligonucleotide
ucauuuggcacgcauaaug

SEQ ID NO: 3226134 - RNA, 19 nt, Artificial Sequence
  Description of Artificial Sequence: Synthetic oligonucleotide
agucccagaacuaugaggc

SEQ ID NO: 3226135 - RNA, 19 nt, Artificial Sequence
  Description of Artificial Sequence: Synthetic oligonucleotide
gaaaacuuuagucucugug

SEQ ID NO: 3226136 - RNA, 19 nt, Artificial Sequence
  Description of Artificial Sequence: Synthetic oligonucleotide
ucugggaaaacuuuagucu

SEQ ID NO: 3226137 - RNA, 19 nt, Artificial Sequence
  Description of Artificial Sequence: Synthetic oligonucleotide
aacaucuaguucuucagcu

SEQ ID NO: 3226138 - RNA, 19 nt, Artificial Sequence
  Description of Artificial Sequence: Synthetic oligonucleotide
uagcaaucacccaagacag

SEQ ID NO: 3226139 - RNA, 19 nt, Artificial Sequence
  Description of Artificial Sequence: Synthetic oligonucleotide
auaaaagccuuuugaaguc

SEQ ID NO: 3226140 - RNA, 19 nt, Artificial Sequence
  Description of Artificial Sequence: Synthetic oligonucleotide
ugaauaaaagccuuuugaa

SEQ ID NO: 3226141 - RNA, 19 nt, Artificial Sequence
  Description of Artificial Sequence: Synthetic oligonucleotide
aagucccagaacuaugagg

SEQ ID NO: 3226142 - RNA, 19 nt, Artificial Sequence
  Description of Artificial Sequence: Synthetic oligonucleotide
aaacuuuagucucugugca

SEQ ID NO: 3226143 - RNA, 19 nt, Artificial Sequence
  Description of Artificial Sequence: Synthetic oligonucleotide
ugaucauggggucugcacg

SEQ ID NO: 3226144 - RNA, 19 nt, Artificial Sequence
  Description of Artificial Sequence: Synthetic oligonucleotide
aucugggaaaacuuuaguc

SEQ ID NO: 3226145 - RNA, 19 nt, Artificial Sequence
  Description of Artificial Sequence: Synthetic oligonucleotide
gucaguagcauuaaccucg

SEQ ID NO: 3226146 - RNA, 19 nt, Artificial Sequence
  Description of Artificial Sequence: Synthetic oligonucleotide
agggacaacaucuaguucu

SEQ ID NO: 3226147 - RNA, 19 nt, Artificial Sequence
  Description of Artificial Sequence: Synthetic oligonucleotide
ucagcugugucucuguugc

SEQ ID NO: 3226148 - RNA, 19 nt, Artificial Sequence
  Description of Artificial Sequence: Synthetic oligonucleotide
uacugaugcauccagcuug

SEQ ID NO: 3226149 - RNA, 19 nt, Artificial Sequence
  Description of Artificial Sequence: Synthetic oligonucleotide
acagucaguagcauuaacc

SEQ ID NO: 3226150 - RNA, 19 nt, Artificial Sequence
  Description of Artificial Sequence: Synthetic oligonucleotide
augacaaagcaguguagcc

SEQ ID NO: 3226151 - RNA, 19 nt, Artificial Sequence
  Description of Artificial Sequence: Synthetic oligonucleotide
agcuugagagcucacauag

SEQ ID NO: 3226152 - RNA, 19 nt, Artificial Sequence
  Description of Artificial Sequence: Synthetic oligonucleotide
auugauacaaucugggaaa

SEQ ID NO: 3226153 - RNA, 19 nt, Artificial Sequence
  Description of Artificial Sequence: Synthetic oligonucleotide
agcaucaaggagcaugcgc

SEQ ID NO: 3226154 - RNA, 19 nt, Artificial Sequence
  Description of Artificial Sequence: Synthetic oligonucleotide
acuuccccugaauaaaagc

SEQ ID NO: 3226155 - RNA, 19 nt, Artificial Sequence
  Description of Artificial Sequence: Synthetic oligonucleotide
cuuccccugaauaaaagcc

SEQ ID NO: 3226156 - RNA, 19 nt, Artificial Sequence
  Description of Artificial Sequence: Synthetic oligonucleotide
ugcuuguuccugaucaugg

SEQ ID NO: 3226157 - RNA, 19 nt, Artificial Sequence
  Description of Artificial Sequence: Synthetic oligonucleotide
uucuuuagcauugauacaa

SEQ ID NO: 3226158 - RNA, 19 nt, Artificial Sequence
  Description of Artificial Sequence: Synthetic oligonucleotide
uagcauugauacaaucugg

SEQ ID NO: 3226159 - RNA, 19 nt, Artificial Sequence
  Description of Artificial Sequence: Synthetic oligonucleotide
uagucucugugcaauaucc

SEQ ID NO: 3226160 - RNA, 19 nt, Artificial Sequence
  Description of Artificial Sequence: Synthetic oligonucleotide
uuuggcacgcauaaugaca

SEQ ID NO: 3226161 - RNA, 19 nt, Artificial Sequence
  Description of Artificial Sequence: Synthetic oligonucleotide
ucuguugcaacaugagaag

SEQ ID NO: 3226162 - RNA, 19 nt, Artificial Sequence
  Description of Artificial Sequence: Synthetic oligonucleotide
uuucauuuggcacgcauaa

SEQ ID NO: 3226163 - RNA, 19 nt, Artificial Sequence
  Description of Artificial Sequence: Synthetic oligonucleotide
aacaugagaagucccagaa

SEQ ID NO: 3226164 - RNA, 19 nt, Artificial Sequence
  Description of Artificial Sequence: Synthetic oligonucleotide
ucacauagcaaucacccaa

SEQ ID NO: 3226165 - RNA, 19 nt, Artificial Sequence
  Description of Artificial Sequence: Synthetic oligonucleotide
auaaugacaaagcagugua

SEQ ID NO: 3226166 - RNA, 19 nt, Artificial Sequence
  Description of Artificial Sequence: Synthetic oligonucleotide
agccuuuugaaguccaggg

SEQ ID NO: 3226167 - RNA, 19 nt, Artificial Sequence
  Description of Artificial Sequence: Synthetic oligonucleotide
aagcaguguagccauaaca

SEQ ID NO: 3226168 - RNA, 19 nt, Artificial Sequence
  Description of Artificial Sequence: Synthetic oligonucleotide
uaugaggcuuucuuuagca

SEQ ID NO: 3226169 - RNA, 19 nt, Artificial Sequence
  Description of Artificial Sequence: Synthetic oligonucleotide
cucgacgccagcaucaagg

SEQ ID NO: 3226170 - RNA, 19 nt, Artificial Sequence
  Description of Artificial Sequence: Synthetic oligonucleotide
aaagcaguguagccauaac

SEQ ID NO: 3226171 - RNA, 19 nt, Artificial Sequence
  Description of Artificial Sequence: Synthetic oligonucleotide
ugcacgggcuuucagaagc

SEQ ID NO: 3226172 - RNA, 19 nt, Artificial Sequence
  Description of Artificial Sequence: Synthetic oligonucleotide
aacuaugaggcuuucuuua

SEQ ID NO: 3226173 - RNA, 19 nt, Artificial Sequence
  Description of Artificial Sequence: Synthetic oligonucleotide
aacagucaguagcauuaac

SEQ ID NO: 3226174 - RNA, 19 nt, Artificial Sequence
  Description of Artificial Sequence: Synthetic oligonucleotide
acucucaccaugcuuguuc

SEQ ID NO: 3226175 - RNA, 19 nt, Artificial Sequence
  Description of Artificial Sequence: Synthetic oligonucleotide
acaauacugaugcauccag

SEQ ID NO: 3226176 - RNA, 19 nt, Artificial Sequence
  Description of Artificial Sequence: Synthetic oligonucleotide
acaacaucuaguucuucag

SEQ ID NO: 3226177 - RNA, 19 nt, Artificial Sequence
  Description of Artificial Sequence: Synthetic oligonucleotide
auauccagugaacucucac

SEQ ID NO: 3226178 - RNA, 19 nt, Artificial Sequence
  Description of Artificial Sequence: Synthetic oligonucleotide
gaucauggggucugcacgg

SEQ ID NO: 3226179 - RNA, 19 nt, Artificial Sequence
  Description of Artificial Sequence: Synthetic oligonucleotide
auuuggcacgcauaaugac

SEQ ID NO: 3226180 - RNA, 19 nt, Artificial Sequence
  Description of Artificial Sequence: Synthetic oligonucleotide
uauccagugaacucucacc

SEQ ID NO: 3226181 - RNA, 19 nt, Artificial Sequence
  Description of Artificial Sequence: Synthetic oligonucleotide
aguucuucagcugugucuc

SEQ ID NO: 3226182 - RNA, 19 nt, Artificial Sequence
  Description of Artificial Sequence: Synthetic oligonucleotide
cugaauaaaagccuuuuga

SEQ ID NO: 3226183 - RNA, 19 nt, Artificial Sequence
  Description of Artificial Sequence: Synthetic oligonucleotide
aaucugggaaaacuuuagu

SEQ ID NO: 3226184 - RNA, 19 nt, Artificial Sequence
  Description of Artificial Sequence: Synthetic oligonucleotide
ugugcaauauccagugaac

SEQ ID NO: 3226185 - RNA, 19 nt, Artificial Sequence
  Description of Artificial Sequence: Synthetic oligonucleotide
gacgccagcaucaaggagc

SEQ ID NO: 3226186 - RNA, 19 nt, Artificial Sequence
  Description of Artificial Sequence: Synthetic oligonucleotide
uucggagggauucuggcca

SEQ ID NO: 3226187 - RNA, 19 nt, Artificial Sequence
  Description of Artificial Sequence: Synthetic oligonucleotide
ucacaauacugaugcaucc

SEQ ID NO: 3226188 - RNA, 19 nt, Artificial Sequence
  Description of Artificial Sequence: Synthetic oligonucleotide
uaaugacaaagcaguguag

SEQ ID NO: 3226189 - RNA, 19 nt, Artificial Sequence
  Description of Artificial Sequence: Synthetic oligonucleotide
agucaguagcauuaaccuc

SEQ ID NO: 3226190 - RNA, 19 nt, Artificial Sequence
  Description of Artificial Sequence: Synthetic oligonucleotide
ugcaacaugagaaguccca

SEQ ID NO: 3226191 - RNA, 19 nt, Artificial Sequence
  Description of Artificial Sequence: Synthetic oligonucleotide
ugagagcucacauagcaau

SEQ ID NO: 3226192 - RNA, 19 nt, Artificial Sequence
  Description of Artificial Sequence: Synthetic oligonucleotide
agaacuaugaggcuuucuu

SEQ ID NO: 3226193 - RNA, 19 nt, Artificial Sequence
  Description of Artificial Sequence: Synthetic oligonucleotide
agcaguguagccauaacag

SEQ ID NO: 3226194 - RNA, 19 nt, Artificial Sequence
  Description of Artificial Sequence: Synthetic oligonucleotide
cuuguuccugaucaugggg

SEQ ID NO: 3226195 - RNA, 19 nt, Artificial Sequence
  Description of Artificial Sequence: Synthetic oligonucleotide
uguugcaacaugagaaguc

SEQ ID NO: 3226196 - RNA, 19 nt, Artificial Sequence
  Description of Artificial Sequence: Synthetic oligonucleotide
agcauugauacaaucuggg

SEQ ID NO: 3226197 - RNA, 19 nt, Artificial Sequence
  Description of Artificial Sequence: Synthetic oligonucleotide
gacaacaucuaguucuuca

SEQ ID NO: 3226198 - RNA, 19 nt, Artificial Sequence
  Description of Artificial Sequence: Synthetic oligonucleotide
uuguuccugaucauggggu

SEQ ID NO: 3226199 - RNA, 19 nt, Artificial Sequence
  Description of Artificial Sequence: Synthetic oligonucleotide
ugucucuguugcaacauga

SEQ ID NO: 3226200 - RNA, 19 nt, Artificial Sequence
  Description of Artificial Sequence: Synthetic oligonucleotide
acuaugaggcuuucuuuag

SEQ ID NO: 3226201 - RNA, 19 nt, Artificial Sequence
  Description of Artificial Sequence: Synthetic oligonucleotide
uuggcacgcauaaugacaa

SEQ ID NO: 3226202 - RNA, 19 nt, Artificial Sequence
  Description of Artificial Sequence: Synthetic oligonucleotide
ucucuguugcaacaugaga

SEQ ID NO: 3226203 - RNA, 19 nt, Artificial Sequence
  Description of Artificial Sequence: Synthetic oligonucleotide
caaucugggaaaacuuuag

SEQ ID NO: 3226204 - RNA, 19 nt, Artificial Sequence
  Description of Artificial Sequence: Synthetic oligonucleotide
auccagugaacucucacca

SEQ ID NO: 3226205 - RNA, 19 nt, Artificial Sequence
  Description of Artificial Sequence: Synthetic oligonucleotide
ugcaauauccagugaacuc

SEQ ID NO: 3226206 - RNA, 19 nt, Artificial Sequence
  Description of Artificial Sequence: Synthetic oligonucleotide
acaugagaagucccagaac

SEQ ID NO: 3226207 - RNA, 19 nt, Artificial Sequence
  Description of Artificial Sequence: Synthetic oligonucleotide
ugacaaagcaguguagcca

SEQ ID NO: 3226208 - RNA, 19 nt, Artificial Sequence
  Description of Artificial Sequence: Synthetic oligonucleotide
guugcaacaugagaagucc

SEQ ID NO: 3226209 - RNA, 19 nt, Artificial Sequence
  Description of Artificial Sequence: Synthetic oligonucleotide
aagccuuuugaaguccagg

SEQ ID NO: 3226210 - RNA, 19 nt, Artificial Sequence
  Description of Artificial Sequence: Synthetic oligonucleotide
cucuguugcaacaugagaa

SEQ ID NO: 3226211 - RNA, 19 nt, Artificial Sequence
  Description of Artificial Sequence: Synthetic oligonucleotide
cauugauacaaucugggaa

SEQ ID NO: 3226212 - RNA, 19 nt, Artificial Sequence
  Description of Artificial Sequence: Synthetic oligonucleotide
uuuucauuuggcacgcaua

SEQ ID NO: 3226213 - RNA, 19 nt, Artificial Sequence
  Description of Artificial Sequence: Synthetic oligonucleotide
ucucugugcaauauccagu

SEQ ID NO: 3226214 - RNA, 19 nt, Artificial Sequence
  Description of Artificial Sequence: Synthetic oligonucleotide
cucugugcaauauccagug

SEQ ID NO: 3226215 - RNA, 19 nt, Artificial Sequence
  Description of Artificial Sequence: Synthetic oligonucleotide
caguguagccauaacaguc

SEQ ID NO: 3226216 - RNA, 19 nt, Artificial Sequence
  Description of Artificial Sequence: Synthetic oligonucleotide
uaguucuucagcugugucu

SEQ ID NO: 3226217 - RNA, 19 nt, Artificial Sequence
  Description of Artificial Sequence: Synthetic oligonucleotide
aacuguauuagccagguac

SEQ ID NO: 3226218 - RNA, 19 nt, Artificial Sequence
  Description of Artificial Sequence: Synthetic oligonucleotide
aauaaagaaauuuauccug

SEQ ID NO: 3226219 - RNA, 19 nt, Artificial Sequence
  Description of Artificial Sequence: Synthetic oligonucleotide
aauaaauuuaaaagaaagc

SEQ ID NO: 3226220 - RNA, 19 nt, Artificial Sequence
  Description of Artificial Sequence: Synthetic oligonucleotide
uugaaauaaacaaagguca

SEQ ID NO: 3226221 - RNA, 19 nt, Artificial Sequence
  Description of Artificial Sequence: Synthetic oligonucleotide
caucaaauaaauuuaaaag

SEQ ID NO: 3226222 - RNA, 19 nt, Artificial Sequence
  Description of Artificial Sequence: Synthetic oligonucleotide
aucaaauaaauuuaaaaga

SEQ ID NO: 3226223 - RNA, 19 nt, Artificial Sequence
  Description of Artificial Sequence: Synthetic oligonucleotide
aaagcagucauuuccugac

SEQ ID NO: 3226224 - RNA, 19 nt, Artificial Sequence
  Description of Artificial Sequence: Synthetic oligonucleotide
auagcuauuagcuugagaa

SEQ ID NO: 3226225 - RNA, 19 nt, Artificial Sequence
  Description of Artificial Sequence: Synthetic oligonucleotide
aagaaauuuauccugguau

SEQ ID NO: 3226226 - RNA, 19 nt, Artificial Sequence
  Description of Artificial Sequence: Synthetic oligonucleotide
aauaaacaaaggucauagc

SEQ ID NO: 3226227 - RNA, 19 nt, Artificial Sequence
  Description of Artificial Sequence: Synthetic oligonucleotide
aauggguuggugcaauggc

SEQ ID NO: 3226228 - RNA, 19 nt, Artificial Sequence
  Description of Artificial Sequence: Synthetic oligonucleotide
uucucuguuugauugaugg

SEQ ID NO: 3226229 - RNA, 19 nt, Artificial Sequence
  Description of Artificial Sequence: Synthetic oligonucleotide
agauguaauggguuggugc

SEQ ID NO: 3226230 - RNA, 19 nt, Artificial Sequence
  Description of Artificial Sequence: Synthetic oligonucleotide
ugaauugugaaauuccuga

SEQ ID NO: 3226231 - RNA, 19 nt, Artificial Sequence
  Description of Artificial Sequence: Synthetic oligonucleotide
aaauuaguuuccuuuucuc

SEQ ID NO: 3226232 - RNA, 19 nt, Artificial Sequence
  Description of Artificial Sequence: Synthetic oligonucleotide
aauuuauccugguaugcuc

SEQ ID NO: 3226233 - RNA, 19 nt, Artificial Sequence
  Description of Artificial Sequence: Synthetic oligonucleotide
uugugaauagcuauuagcu

SEQ ID NO: 3226234 - RNA, 19 nt, Artificial Sequence
  Description of Artificial Sequence: Synthetic oligonucleotide
uguaguuccuaacagcucc

SEQ ID NO: 3226235 - RNA, 19 nt, Artificial Sequence
  Description of Artificial Sequence: Synthetic oligonucleotide
aaauuaggaaacaauuuuc

SEQ ID NO: 3226236 - RNA, 19 nt, Artificial Sequence
  Description of Artificial Sequence: Synthetic oligonucleotide
aauuaaaucgucaucaaau

SEQ ID NO: 3226237 - RNA, 19 nt, Artificial Sequence
  Description of Artificial Sequence: Synthetic oligonucleotide
aaauuucauacuuggcuuc

SEQ ID NO: 3226238 - RNA, 19 nt, Artificial Sequence
  Description of Artificial Sequence: Synthetic oligonucleotide
uaaugaauugugaaauucc

SEQ ID NO: 3226239 - RNA, 19 nt, Artificial Sequence
  Description of Artificial Sequence: Synthetic oligonucleotide
aauuuaaaagaaagcaguc

SEQ ID NO: 3226240 - RNA, 19 nt, Artificial Sequence
  Description of Artificial Sequence: Synthetic oligonucleotide
auaaccucuucacagcacc

SEQ ID NO: 3226241 - RNA, 19 nt, Artificial Sequence
  Description of Artificial Sequence: Synthetic oligonucleotide
aaaauuucauacuuggcuu

SEQ ID NO: 3226242 - RNA, 19 nt, Artificial Sequence
  Description of Artificial Sequence: Synthetic oligonucleotide
cuuuaagaaauuaggaaac

SEQ ID NO: 3226243 - RNA, 19 nt, Artificial Sequence
  Description of Artificial Sequence: Synthetic oligonucleotide
uacagagcaauaaagaaau

SEQ ID NO: 3226244 - RNA, 19 nt, Artificial Sequence
  Description of Artificial Sequence: Synthetic oligonucleotide
aauuaguuuccuuuucucu

SEQ ID NO: 3226245 - RNA, 19 nt, Artificial Sequence
  Description of Artificial Sequence: Synthetic oligonucleotide
ucugcaauuuuacagcagc

SEQ ID NO: 3226246 - RNA, 19 nt, Artificial Sequence
  Description of Artificial Sequence: Synthetic oligonucleotide
uaaaucgucaucaaauaaa

SEQ ID NO: 3226247 - RNA, 19 nt, Artificial Sequence
  Description of Artificial Sequence: Synthetic oligonucleotide
ucuacugugucacuggaug

SEQ ID NO: 3226248 - RNA, 19 nt, Artificial Sequence
  Description of Artificial Sequence: Synthetic oligonucleotide
aaaagaaagcagucauuuc

SEQ ID NO: 3226249 - RNA, 19 nt, Artificial Sequence
  Description of Artificial Sequence: Synthetic oligonucleotide
agaagguucaccuaucaug

SEQ ID NO: 3226250 - RNA, 19 nt, Artificial Sequence
  Description of Artificial Sequence: Synthetic oligonucleotide
aauuuagcucucuugaaau

SEQ ID NO: 3226251 - RNA, 19 nt, Artificial Sequence
  Description of Artificial Sequence: Synthetic oligonucleotide
cuugugaauagcuauuagc

SEQ ID NO: 3226252 - RNA, 19 nt, Artificial Sequence
  Description of Artificial Sequence: Synthetic oligonucleotide
aucgucaucaaauaaauuu

SEQ ID NO: 3226253 - RNA, 19 nt, Artificial Sequence
  Description of Artificial Sequence: Synthetic oligonucleotide
uguccauugauaaugaauu

SEQ ID NO: 3226254 - RNA, 19 nt, Artificial Sequence
  Description of Artificial Sequence: Synthetic oligonucleotide
ucaccuaucauguccauug

SEQ ID NO: 3226255 - RNA, 19 nt, Artificial Sequence
  Description of Artificial Sequence: Synthetic oligonucleotide
aguaaauuuagcucucuug

SEQ ID NO: 3226256 - RNA, 19 nt, Artificial Sequence
  Description of Artificial Sequence: Synthetic oligonucleotide
agguucaccuaucaugucc

SEQ ID NO: 3226257 - RNA, 19 nt, Artificial Sequence
  Description of Artificial Sequence: Synthetic oligonucleotide
uaaacaaucuacuggugug

SEQ ID NO: 3226258 - RNA, 19 nt, Artificial Sequence
  Description of Artificial Sequence: Synthetic oligonucleotide
aauugugaaauuccugaga

SEQ ID NO: 3226259 - RNA, 19 nt, Artificial Sequence
  Description of Artificial Sequence: Synthetic oligonucleotide
uaggaaacaauuuucucca

SEQ ID NO: 3226260 - RNA, 19 nt, Artificial Sequence
  Description of Artificial Sequence: Synthetic oligonucleotide
auagccaaaagauacuugu

SEQ ID NO: 3226261 - RNA, 19 nt, Artificial Sequence
  Description of Artificial Sequence: Synthetic oligonucleotide
gaaaauuucauacuuggcu

SEQ ID NO: 3226262 - RNA, 19 nt, Artificial Sequence
  Description of Artificial Sequence: Synthetic oligonucleotide
auuaguuuccuuuucucug

SEQ ID NO: 3226263 - RNA, 19 nt, Artificial Sequence
  Description of Artificial Sequence: Synthetic oligonucleotide
ucuucuucaacuguauuag

SEQ ID NO: 3226264 - RNA, 19 nt, Artificial Sequence
  Description of Artificial Sequence: Synthetic oligonucleotide
ucuguuguaguuccuaaca

SEQ ID NO: 3226265 - RNA, 19 nt, Artificial Sequence
  Description of Artificial Sequence: Synthetic oligonucleotide
gugaauagcuauuagcuug

SEQ ID NO: 3226266 - RNA, 19 nt, Artificial Sequence
  Description of Artificial Sequence: Synthetic oligonucleotide
aaauuuagcucucuugaaa

SEQ ID NO: 3226267 - RNA, 19 nt, Artificial Sequence
  Description of Artificial Sequence: Synthetic oligonucleotide
auugauaaugaauugugaa

SEQ ID NO: 3226268 - RNA, 19 nt, Artificial Sequence
  Description of Artificial Sequence: Synthetic oligonucleotide
uuuucccuaaagcccaugg

SEQ ID NO: 3226269 - RNA, 19 nt, Artificial Sequence
  Description of Artificial Sequence: Synthetic oligonucleotide
uaaauuaguuuccuuuucu

SEQ ID NO: 3226270 - RNA, 19 nt, Artificial Sequence
  Description of Artificial Sequence: Synthetic oligonucleotide
ugauugauggucauuggcu

SEQ ID NO: 3226271 - RNA, 19 nt, Artificial Sequence
  Description of Artificial Sequence: Synthetic oligonucleotide
ucauaaauuaguuuccuuu

SEQ ID NO: 3226272 - RNA, 19 nt, Artificial Sequence
  Description of Artificial Sequence: Synthetic oligonucleotide
aaagauacuugucugcaau

SEQ ID NO: 3226273 - RNA, 19 nt, Artificial Sequence
  Description of Artificial Sequence: Synthetic oligonucleotide
cacacaguaaacaaucuac

SEQ ID NO: 3226274 - RNA, 19 nt, Artificial Sequence
  Description of Artificial Sequence: Synthetic oligonucleotide
uuuaccacacaguaaacaa

SEQ ID NO: 3226275 - RNA, 19 nt, Artificial Sequence
  Description of Artificial Sequence: Synthetic oligonucleotide
guaaauuuagcucucuuga

SEQ ID NO: 3226276 - RNA, 19 nt, Artificial Sequence
  Description of Artificial Sequence: Synthetic oligonucleotide
agaaauuuauccugguaug

SEQ ID NO: 3226277 - RNA, 19 nt, Artificial Sequence
  Description of Artificial Sequence: Synthetic oligonucleotide
aaacaaaggucauagccaa

SEQ ID NO: 3226278 - RNA, 19 nt, Artificial Sequence
  Description of Artificial Sequence: Synthetic oligonucleotide
agcuauuagcuugagaagg

SEQ ID NO: 3226279 - RNA, 19 nt, Artificial Sequence
  Description of Artificial Sequence: Synthetic oligonucleotide
auagcuuugucuuucuuca

SEQ ID NO: 3226280 - RNA, 19 nt, Artificial Sequence
  Description of Artificial Sequence: Synthetic oligonucleotide
uugauaaugaauugugaaa

SEQ ID NO: 3226281 - RNA, 19 nt, Artificial Sequence
  Description of Artificial Sequence: Synthetic oligonucleotide
uuuaguugagucaugucau

SEQ ID NO: 3226282 - RNA, 19 nt, Artificial Sequence
  Description of Artificial Sequence: Synthetic oligonucleotide
ugauaaugaauugugaaau

SEQ ID NO: 3226283 - RNA, 19 nt, Artificial Sequence
  Description of Artificial Sequence: Synthetic oligonucleotide
uugucugcaauuuuacagc

SEQ ID NO: 3226284 - RNA, 19 nt, Artificial Sequence
  Description of Artificial Sequence: Synthetic oligonucleotide
uguaaaccacuccauagcu

SEQ ID NO: 3226285 - RNA, 19 nt, Artificial Sequence
  Description of Artificial Sequence: Synthetic oligonucleotide
auuagcucuacugugucac

SEQ ID NO: 3226286 - RNA, 19 nt, Artificial Sequence
  Description of Artificial Sequence: Synthetic oligonucleotide
uuaaaucgucaucaaauaa

SEQ ID NO: 3226287 - RNA, 19 nt, Artificial Sequence
  Description of Artificial Sequence: Synthetic oligonucleotide
ucuucaacuguauuagcca

SEQ ID NO: 3226288 - RNA, 19 nt, Artificial Sequence
  Description of Artificial Sequence: Synthetic oligonucleotide
cacugugaugcacagagcg

SEQ ID NO: 3226289 - RNA, 19 nt, Artificial Sequence
  Description of Artificial Sequence: Synthetic oligonucleotide
aaacaaucuacuggugugg

SEQ ID NO: 3226290 - RNA, 19 nt, Artificial Sequence
  Description of Artificial Sequence: Synthetic oligonucleotide
auggccauaaccucuucac

SEQ ID NO: 3226291 - RNA, 19 nt, Artificial Sequence
  Description of Artificial Sequence: Synthetic oligonucleotide
ugagucaugucauucuuca

SEQ ID NO: 3226292 - RNA, 19 nt, Artificial Sequence
  Description of Artificial Sequence: Synthetic oligonucleotide
uguuguaguuccuaacagc

SEQ ID NO: 3226293 - RNA, 19 nt, Artificial Sequence
  Description of Artificial Sequence: Synthetic oligonucleotide
cuuuaguugagucauguca

SEQ ID NO: 3226294 - RNA, 19 nt, Artificial Sequence
  Description of Artificial Sequence: Synthetic oligonucleotide
aaugaauugugaaauuccu

SEQ ID NO: 3226295 - RNA, 19 nt, Artificial Sequence
  Description of Artificial Sequence: Synthetic oligonucleotide
agcagucauuuccugacgc

SEQ ID NO: 3226296 - RNA, 19 nt, Artificial Sequence
  Description of Artificial Sequence: Synthetic oligonucleotide
aacaaucuacugguguggc

SEQ ID NO: 3226297 - RNA, 19 nt, Artificial Sequence
  Description of Artificial Sequence: Synthetic oligonucleotide
guuccuaacagcuccacug

SEQ ID NO: 3226298 - RNA, 19 nt, Artificial Sequence
  Description of Artificial Sequence: Synthetic oligonucleotide
gaauugugaaauuccugag

SEQ ID NO: 3226299 - RNA, 19 nt, Artificial Sequence
  Description of Artificial Sequence: Synthetic oligonucleotide
aaucuugaauuaaaucguc

SEQ ID NO: 3226300 - RNA, 19 nt, Artificial Sequence
  Description of Artificial Sequence: Synthetic oligonucleotide
uucccuaaagcccauggga

SEQ ID NO: 3226301 - RNA, 19 nt, Artificial Sequence
  Description of Artificial Sequence: Synthetic oligonucleotide
uaaaagaaagcagucauuu

SEQ ID NO: 3226302 - RNA, 19 nt, Artificial Sequence
  Description of Artificial Sequence: Synthetic oligonucleotide
uggugcaauggccauaacc

SEQ ID NO: 3226303 - RNA, 19 nt, Artificial Sequence
  Description of Artificial Sequence: Synthetic oligonucleotide
ucacaauagcccuauaguc

SEQ ID NO: 3226304 - RNA, 19 nt, Artificial Sequence
  Description of Artificial Sequence: Synthetic oligonucleotide
gauguaauggguuggugca

SEQ ID NO: 3226305 - RNA, 19 nt, Artificial Sequence
  Description of Artificial Sequence: Synthetic oligonucleotide
ucuugaauuaaaucgucau

SEQ ID NO: 3226306 - RNA, 19 nt, Artificial Sequence
  Description of Artificial Sequence: Synthetic oligonucleotide
gaugaagacagucccaguc

SEQ ID NO: 3226307 - RNA, 19 nt, Artificial Sequence
  Description of Artificial Sequence: Synthetic oligonucleotide
uucaacuguauuagccagg

SEQ ID NO: 3226308 - RNA, 19 nt, Artificial Sequence
  Description of Artificial Sequence: Synthetic oligonucleotide
ugaauagcuauuagcuuga

SEQ ID NO: 3226309 - RNA, 19 nt, Artificial Sequence
  Description of Artificial Sequence: Synthetic oligonucleotide
uuucccuaaagcccauggg

SEQ ID NO: 3226310 - RNA, 19 nt, Artificial Sequence
  Description of Artificial Sequence: Synthetic oligonucleotide
auugauggucauuggcuac

SEQ ID NO: 3226311 - RNA, 19 nt, Artificial Sequence
  Description of Artificial Sequence: Synthetic oligonucleotide
uucacuuccuguaaaccac

SEQ ID NO: 3226312 - RNA, 19 nt, Artificial Sequence
  Description of Artificial Sequence: Synthetic oligonucleotide
cugguaugcucauuuauag

SEQ ID NO: 3226313 - RNA, 19 nt, Artificial Sequence
  Description of Artificial Sequence: Synthetic oligonucleotide
acuuccuguaaaccacucc

SEQ ID NO: 3226314 - RNA, 19 nt, Artificial Sequence
  Description of Artificial Sequence: Synthetic oligonucleotide
aaagaaauuuauccuggua

SEQ ID NO: 3226315 - RNA, 19 nt, Artificial Sequence
  Description of Artificial Sequence: Synthetic oligonucleotide
ugucuuucuucauaaauua

SEQ ID NO: 3226316 - RNA, 19 nt, Artificial Sequence
  Description of Artificial Sequence: Synthetic oligonucleotide
uaccacacaguaaacaauc

SEQ ID NO: 3226317 - RNA, 19 nt, Artificial Sequence
  Description of Artificial Sequence: Synthetic oligonucleotide
aaacauauggaucucauac

SEQ ID NO: 3226318 - RNA, 19 nt, Artificial Sequence
  Description of Artificial Sequence: Synthetic oligonucleotide
uuaaaauaaaccaucaacu

SEQ ID NO: 3226319 - RNA, 19 nt, Artificial Sequence
  Description of Artificial Sequence: Synthetic oligonucleotide
agcacugucaaacauaugg

SEQ ID NO: 3226320 - RNA, 19 nt, Artificial Sequence
  Description of Artificial Sequence: Synthetic oligonucleotide
aaguuagucacuuuaaaga

SEQ ID NO: 3226321 - RNA, 19 nt, Artificial Sequence
  Description of Artificial Sequence: Synthetic oligonucleotide
aaauaaaccaucaacuauc

SEQ ID NO: 3226322 - RNA, 19 nt, Artificial Sequence
  Description of Artificial Sequence: Synthetic oligonucleotide
aacauauggaucucauacc

SEQ ID NO: 3226323 - RNA, 19 nt, Artificial Sequence
  Description of Artificial Sequence: Synthetic oligonucleotide
acuuuaaagaaauugucag

SEQ ID NO: 3226324 - RNA, 19 nt, Artificial Sequence
  Description of Artificial Sequence: Synthetic oligonucleotide
aaagccgacacccaggcuc

SEQ ID NO: 3226325 - RNA, 19 nt, Artificial Sequence
  Description of Artificial Sequence: Synthetic oligonucleotide
acauauggaucucauaccc

SEQ ID NO: 3226326 - RNA, 19 nt, Artificial Sequence
  Description of Artificial Sequence: Synthetic oligonucleotide
gaagguguaauuaugaccc

SEQ ID NO: 3226327 - RNA, 19 nt, Artificial Sequence
  Description of Artificial Sequence: Synthetic oligonucleotide
uuuaaagaaauugucagug

SEQ ID NO: 3226328 - RNA, 19 nt, Artificial Sequence
  Description of Artificial Sequence: Synthetic oligonucleotide
cauauugcaacucaaagug

SEQ ID NO: 3226329 - RNA, 19 nt, Artificial Sequence
  Description of Artificial Sequence: Synthetic oligonucleotide
aauaacauauugcaacuca

SEQ ID NO: 3226330 - RNA, 19 nt, Artificial Sequence
  Description of Artificial Sequence: Synthetic oligonucleotide
uaagcggugagauucauag

SEQ ID NO: 3226331 - RNA, 19 nt, Artificial Sequence
  Description of Artificial Sequence: Synthetic oligonucleotide
aguaaagcugcuuuguagg

SEQ ID NO: 3226332 - RNA, 19 nt, Artificial Sequence
  Description of Artificial Sequence: Synthetic oligonucleotide
ucaacuaucuuuaucaaau

SEQ ID NO: 3226333 - RNA, 19 nt, Artificial Sequence
  Description of Artificial Sequence: Synthetic oligonucleotide
uagaggauggcaaaagccg

SEQ ID NO: 3226334 - RNA, 19 nt, Artificial Sequence
  Description of Artificial Sequence: Synthetic oligonucleotide
guaauuaugacccaucuuc

SEQ ID NO: 3226335 - RNA, 19 nt, Artificial Sequence
  Description of Artificial Sequence: Synthetic oligonucleotide
auuuacaccauuugguuuc

SEQ ID NO: 3226336 - RNA, 19 nt, Artificial Sequence
  Description of Artificial Sequence: Synthetic oligonucleotide
aagguaagcggugagauuc

SEQ ID NO: 3226337 - RNA, 19 nt, Artificial Sequence
  Description of Artificial Sequence: Synthetic oligonucleotide
aaugagaaaagcuccuuca

SEQ ID NO: 3226338 - RNA, 19 nt, Artificial Sequence
  Description of Artificial Sequence: Synthetic oligonucleotide
aacauggucauuuucaguu

SEQ ID NO: 3226339 - RNA, 19 nt, Artificial Sequence
  Description of Artificial Sequence: Synthetic oligonucleotide
uuaaagaaauugucagugg

SEQ ID NO: 3226340 - RNA, 19 nt, Artificial Sequence
  Description of Artificial Sequence: Synthetic oligonucleotide
uaucauaggagcaucuuca

SEQ ID NO: 3226341 - RNA, 19 nt, Artificial Sequence
  Description of Artificial Sequence: Synthetic oligonucleotide
gagaaaagcuccuucacgc

SEQ ID NO: 3226342 - RNA, 19 nt, Artificial Sequence
  Description of Artificial Sequence: Synthetic oligonucleotide
aauugucagugguauuccc

SEQ ID NO: 3226343 - RNA, 19 nt, Artificial Sequence
  Description of Artificial Sequence: Synthetic oligonucleotide
ugaagguguaauuaugacc

SEQ ID NO: 3226344 - RNA, 19 nt, Artificial Sequence
  Description of Artificial Sequence: Synthetic oligonucleotide
uucaucauacagcaacacg

SEQ ID NO: 3226345 - RNA, 19 nt, Artificial Sequence
  Description of Artificial Sequence: Synthetic oligonucleotide
uaaagaaauugucaguggu

SEQ ID NO: 3226346 - RNA, 19 nt, Artificial Sequence
  Description of Artificial Sequence: Synthetic oligonucleotide
uauugcaacucaaagugca

SEQ ID NO: 3226347 - RNA, 19 nt, Artificial Sequence
  Description of Artificial Sequence: Synthetic oligonucleotide
ucauacagcaacacggcag

SEQ ID NO: 3226348 - RNA, 19 nt, Artificial Sequence
  Description of Artificial Sequence: Synthetic oligonucleotide
aggaucaggaacaagauag

SEQ ID NO: 3226349 - RNA, 19 nt, Artificial Sequence
  Description of Artificial Sequence: Synthetic oligonucleotide
aaauugucagugguauucc

SEQ ID NO: 3226350 - RNA, 19 nt, Artificial Sequence
  Description of Artificial Sequence: Synthetic oligonucleotide
ugugaagguguaauuauga

SEQ ID NO: 3226351 - RNA, 19 nt, Artificial Sequence
  Description of Artificial Sequence: Synthetic oligonucleotide
cugcuuuuccuuuaaagcc

SEQ ID NO: 3226352 - RNA, 19 nt, Artificial Sequence
  Description of Artificial Sequence: Synthetic oligonucleotide
aagugcaucuuuuaaaaua

SEQ ID NO: 3226353 - RNA, 19 nt, Artificial Sequence
  Description of Artificial Sequence: Synthetic oligonucleotide
ugcaucuuuuaaaauaaac

SEQ ID NO: 3226354 - RNA, 19 nt, Artificial Sequence
  Description of Artificial Sequence: Synthetic oligonucleotide
caaguuagucacuuuaaag

SEQ ID NO: 3226355 - RNA, 19 nt, Artificial Sequence
  Description of Artificial Sequence: Synthetic oligonucleotide
aagauggccgagcccagcc

SEQ ID NO: 3226356 - RNA, 19 nt, Artificial Sequence
  Description of Artificial Sequence: Synthetic oligonucleotide
aauccaguuaucauaggag

SEQ ID NO: 3226357 - RNA, 19 nt, Artificial Sequence
  Description of Artificial Sequence: Synthetic oligonucleotide
auuaugacccaucuucaag

SEQ ID NO: 3226358 - RNA, 19 nt, Artificial Sequence
  Description of Artificial Sequence: Synthetic oligonucleotide
uuuuaaaauaaaccaucaa

SEQ ID NO: 3226359 - RNA, 19 nt, Artificial Sequence
  Description of Artificial Sequence: Synthetic oligonucleotide
cagcuggacaacaauaugg

SEQ ID NO: 3226360 - RNA, 19 nt, Artificial Sequence
  Description of Artificial Sequence: Synthetic oligonucleotide
aaagcugcuuuguaggcga

SEQ ID NO: 3226361 - RNA, 19 nt, Artificial Sequence
  Description of Artificial Sequence: Synthetic oligonucleotide
aagaacauggucauuuuca

SEQ ID NO: 3226362 - RNA, 19 nt, Artificial Sequence
  Description of Artificial Sequence: Synthetic oligonucleotide
aaugaaacuguggugauuu

SEQ ID NO: 3226363 - RNA, 19 nt, Artificial Sequence
  Description of Artificial Sequence: Synthetic oligonucleotide
uaauuaugacccaucuuca

SEQ ID NO: 3226364 - RNA, 19 nt, Artificial Sequence
  Description of Artificial Sequence: Synthetic oligonucleotide
ugagaauccaguuaucaua

SEQ ID NO: 3226365 - RNA, 19 nt, Artificial Sequence
  Description of Artificial Sequence: Synthetic oligonucleotide
ucuaaugagaaaagcuccu

SEQ ID NO: 3226366 - RNA, 19 nt, Artificial Sequence
  Description of Artificial Sequence: Synthetic oligonucleotide
uguagaggauggcaaaagc

SEQ ID NO: 3226367 - RNA, 19 nt, Artificial Sequence
  Description of Artificial Sequence: Synthetic oligonucleotide
agcggugagauucauagca

SEQ ID NO: 3226368 - RNA, 19 nt, Artificial Sequence
  Description of Artificial Sequence: Synthetic oligonucleotide
uuuguguagaggauggcaa

SEQ ID NO: 3226369 - RNA, 19 nt, Artificial Sequence
  Description of Artificial Sequence: Synthetic oligonucleotide
gagaauccaguuaucauag

SEQ ID NO: 3226370 - RNA, 19 nt, Artificial Sequence
  Description of Artificial Sequence: Synthetic oligonucleotide
aguuagucacuuuaaagaa

SEQ ID NO: 3226371 - RNA, 19 nt, Artificial Sequence
  Description of Artificial Sequence: Synthetic oligonucleotide
caguucaucauacagcaac

SEQ ID NO: 3226372 - RNA, 19 nt, Artificial Sequence
  Description of Artificial Sequence: Synthetic oligonucleotide
cuaucuuuaucaaauaaaa

SEQ ID NO: 3226373 - RNA, 19 nt, Artificial Sequence
  Description of Artificial Sequence: Synthetic oligonucleotide
uuggcaaaagcaguaaagc

SEQ ID NO: 3226374 - RNA, 19 nt, Artificial Sequence
  Description of Artificial Sequence: Synthetic oligonucleotide
ugcuuuuccuuuaaagcca

SEQ ID NO: 3226375 - RNA, 19 nt, Artificial Sequence
  Description of Artificial Sequence: Synthetic oligonucleotide
aagauagggaccacuacag

SEQ ID NO: 3226376 - RNA, 19 nt, Artificial Sequence
  Description of Artificial Sequence: Synthetic oligonucleotide
uccaccugagcucaguuca

SEQ ID NO: 3226377 - RNA, 19 nt, Artificial Sequence
  Description of Artificial Sequence: Synthetic oligonucleotide
ugcaacaucaguagaccug

SEQ ID NO: 3226378 - RNA, 19 nt, Artificial Sequence
  Description of Artificial Sequence: Synthetic oligonucleotide
aagaaauugucagugguau

SEQ ID NO: 3226379 - RNA, 19 nt, Artificial Sequence
  Description of Artificial Sequence: Synthetic oligonucleotide
cuucacgcuaucaccaugg

SEQ ID NO: 3226380 - RNA, 19 nt, Artificial Sequence
  Description of Artificial Sequence: Synthetic oligonucleotide
cacgcuaucaccaugggga

SEQ ID NO: 3226381 - RNA, 19 nt, Artificial Sequence
  Description of Artificial Sequence: Synthetic oligonucleotide
uuuccuuuaaagccaggcu

SEQ ID NO: 3226382 - RNA, 19 nt, Artificial Sequence
  Description of Artificial Sequence: Synthetic oligonucleotide
cuuuuaaaauaaaccauca

SEQ ID NO: 3226383 - RNA, 19 nt, Artificial Sequence
  Description of Artificial Sequence: Synthetic oligonucleotide
gaauccaguuaucauagga

SEQ ID NO: 3226384 - RNA, 19 nt, Artificial Sequence
  Description of Artificial Sequence: Synthetic oligonucleotide
aucaaauaaaauauuuaca

SEQ ID NO: 3226385 - RNA, 19 nt, Artificial Sequence
  Description of Artificial Sequence: Synthetic oligonucleotide
caaagagacaucgagcuug

SEQ ID NO: 3226386 - RNA, 19 nt, Artificial Sequence
  Description of Artificial Sequence: Synthetic oligonucleotide
gaucaggaacaagauaggg

SEQ ID NO: 3226387 - RNA, 19 nt, Artificial Sequence
  Description of Artificial Sequence: Synthetic oligonucleotide
agauucauagcacugucaa

SEQ ID NO: 3226388 - RNA, 19 nt, Artificial Sequence
  Description of Artificial Sequence: Synthetic oligonucleotide
aacacggcaggcuccccgc

SEQ ID NO: 3226389 - RNA, 19 nt, Artificial Sequence
  Description of Artificial Sequence: Synthetic oligonucleotide
acaagauagggaccacuac

SEQ ID NO: 3226390 - RNA, 19 nt, Artificial Sequence
  Description of Artificial Sequence: Synthetic oligonucleotide
accaucaacuaucuuuauc

SEQ ID NO: 3226391 - RNA, 19 nt, Artificial Sequence
  Description of Artificial Sequence: Synthetic oligonucleotide
acagcaacacggcaggcuc

SEQ ID NO: 3226392 - RNA, 19 nt, Artificial Sequence
  Description of Artificial Sequence: Synthetic oligonucleotide
uaaugagaaaagcuccuuc

SEQ ID NO: 3226393 - RNA, 19 nt, Artificial Sequence
  Description of Artificial Sequence: Synthetic oligonucleotide
auauuuacaccauuugguu

SEQ ID NO: 3226394 - RNA, 19 nt, Artificial Sequence
  Description of Artificial Sequence: Synthetic oligonucleotide
aauaaaccaucaacuaucu

SEQ ID NO: 3226395 - RNA, 19 nt, Artificial Sequence
  Description of Artificial Sequence: Synthetic oligonucleotide
gcaucuuuuaaaauaaacc

SEQ ID NO: 3226396 - RNA, 19 nt, Artificial Sequence
  Description of Artificial Sequence: Synthetic oligonucleotide
ugcaacucaaagugcaucu

SEQ ID NO: 3226397 - RNA, 19 nt, Artificial Sequence
  Description of Artificial Sequence: Synthetic oligonucleotide
ucaaguuagucacuuuaaa

SEQ ID NO: 3226398 - RNA, 19 nt, Artificial Sequence
  Description of Artificial Sequence: Synthetic oligonucleotide
uaaagcugcuuuguaggcg

SEQ ID NO: 3226399 - RNA, 19 nt, Artificial Sequence
  Description of Artificial Sequence: Synthetic oligonucleotide
aauuaugacccaucuucaa

SEQ ID NO: 3226400 - RNA, 19 nt, Artificial Sequence
  Description of Artificial Sequence: Synthetic oligonucleotide
cucaguucaucauacagca

SEQ ID NO: 3226401 - RNA, 19 nt, Artificial Sequence
  Description of Artificial Sequence: Synthetic oligonucleotide
agauagggaccacuacagc

SEQ ID NO: 3226402 - RNA, 19 nt, Artificial Sequence
  Description of Artificial Sequence: Synthetic oligonucleotide
uuuuaaggcgucaggugcu

SEQ ID NO: 3226403 - RNA, 19 nt, Artificial Sequence
  Description of Artificial Sequence: Synthetic oligonucleotide
gacacccaggcucagcagg

SEQ ID NO: 3226404 - RNA, 19 nt, Artificial Sequence
  Description of Artificial Sequence: Synthetic oligonucleotide
ucaggugcugauaaugaaa

SEQ ID NO: 3226405 - RNA, 19 nt, Artificial Sequence
  Description of Artificial Sequence: Synthetic oligonucleotide
cacuuuaaagaaauuguca

SEQ ID NO: 3226406 - RNA, 19 nt, Artificial Sequence
  Description of Artificial Sequence: Synthetic oligonucleotide
caguaaagcugcuuuguag

SEQ ID NO: 3226407 - RNA, 19 nt, Artificial Sequence
  Description of Artificial Sequence: Synthetic oligonucleotide
aucaguagaccuggcagcc

SEQ ID NO: 3226408 - RNA, 19 nt, Artificial Sequence
  Description of Artificial Sequence: Synthetic oligonucleotide
uauucccaagguaagcggu

SEQ ID NO: 3226409 - RNA, 19 nt, Artificial Sequence
  Description of Artificial Sequence: Synthetic oligonucleotide
caggugcugauaaugaaac

SEQ ID NO: 3226410 - RNA, 19 nt, Artificial Sequence
  Description of Artificial Sequence: Synthetic oligonucleotide
ucaaacauauggaucucau

SEQ ID NO: 3226411 - RNA, 19 nt, Artificial Sequence
  Description of Artificial Sequence: Synthetic oligonucleotide
guauucccaagguaagcgg

SEQ ID NO: 3226412 - RNA, 19 nt, Artificial Sequence
  Description of Artificial Sequence: Synthetic oligonucleotide
guuggcaaaagcaguaaag

SEQ ID NO: 3226413 - RNA, 19 nt, Artificial Sequence
  Description of Artificial Sequence: Synthetic oligonucleotide
ucacgcuaucaccaugggg

SEQ ID NO: 3226414 - RNA, 19 nt, Artificial Sequence
  Description of Artificial Sequence: Synthetic oligonucleotide
auauugcaacucaaagugc

SEQ ID NO: 3226415 - RNA, 19 nt, Artificial Sequence
  Description of Artificial Sequence: Synthetic oligonucleotide
uguaucuccaccugagcuc

SEQ ID NO: 3226416 - RNA, 19 nt, Artificial Sequence
  Description of Artificial Sequence: Synthetic oligonucleotide
guagaggauggcaaaagcc

SEQ ID NO: 3226417 - RNA, 19 nt, Artificial Sequence
  Description of Artificial Sequence: Synthetic oligonucleotide
aauaugcugaaauucaucc

SEQ ID NO: 3226418 - RNA, 19 nt, Artificial Sequence
  Description of Artificial Sequence: Synthetic oligonucleotide
aaagucaucaccuucuucg

SEQ ID NO: 3226419 - RNA, 19 nt, Artificial Sequence
  Description of Artificial Sequence: Synthetic oligonucleotide
ucuaguuucaauagaaugg

SEQ ID NO: 3226420 - RNA, 19 nt, Artificial Sequence
  Description of Artificial Sequence: Synthetic oligonucleotide
uguauauguaacuauaaag

SEQ ID NO: 3226421 - RNA, 19 nt, Artificial Sequence
  Description of Artificial Sequence: Synthetic oligonucleotide
aaaagucuaauucacuguc

SEQ ID NO: 3226422 - RNA, 19 nt, Artificial Sequence
  Description of Artificial Sequence: Synthetic oligonucleotide
uauguaacuauaaaguuca

SEQ ID NO: 3226423 - RNA, 19 nt, Artificial Sequence
  Description of Artificial Sequence: Synthetic oligonucleotide
auuacauuuaaacagugga

SEQ ID NO: 3226424 - RNA, 19 nt, Artificial Sequence
  Description of Artificial Sequence: Synthetic oligonucleotide
gacauggaaaaucugaaag

SEQ ID NO: 3226425 - RNA, 19 nt, Artificial Sequence
  Description of Artificial Sequence: Synthetic oligonucleotide
ucuugaagaaauaugcuga

SEQ ID NO: 3226426 - RNA, 19 nt, Artificial Sequence
  Description of Artificial Sequence: Synthetic oligonucleotide
aaugcaguggcucagccug

SEQ ID NO: 3226427 - RNA, 19 nt, Artificial Sequence
  Description of Artificial Sequence: Synthetic oligonucleotide
uaaucuuaggacaaagagc

SEQ ID NO: 3226428 - RNA, 19 nt, Artificial Sequence
  Description of Artificial Sequence: Synthetic oligonucleotide
ugaaaagucuaauucacug

SEQ ID NO: 3226429 - RNA, 19 nt, Artificial Sequence
  Description of Artificial Sequence: Synthetic oligonucleotide
aacaguaacaguagguagc

SEQ ID NO: 3226430 - RNA, 19 nt, Artificial Sequence
  Description of Artificial Sequence: Synthetic oligonucleotide
uaaaccaaggcuuaacuca

SEQ ID NO: 3226431 - RNA, 19 nt, Artificial Sequence
  Description of Artificial Sequence: Synthetic oligonucleotide
gauacagauaacucuuugg

SEQ ID NO: 3226432 - RNA, 19 nt, Artificial Sequence
  Description of Artificial Sequence: Synthetic oligonucleotide
cuaaucuuaggacaaagag

SEQ ID NO: 3226433 - RNA, 19 nt, Artificial Sequence
  Description of Artificial Sequence: Synthetic oligonucleotide
ugaagaaauaugcugaaau

SEQ ID NO: 3226434 - RNA, 19 nt, Artificial Sequence
  Description of Artificial Sequence: Synthetic oligonucleotide
aaacaguaacaguagguag

SEQ ID NO: 3226435 - RNA, 19 nt, Artificial Sequence
  Description of Artificial Sequence: Synthetic oligonucleotide
aucugaaagaucucgagag

SEQ ID NO: 3226436 - RNA, 19 nt, Artificial Sequence
  Description of Artificial Sequence: Synthetic oligonucleotide
aaaucugaaagaucucgag

SEQ ID NO: 3226437 - RNA, 19 nt, Artificial Sequence
  Description of Artificial Sequence: Synthetic oligonucleotide
uccaaguagauuugaaagg

SEQ ID NO: 3226438 - RNA, 19 nt, Artificial Sequence
  Description of Artificial Sequence: Synthetic oligonucleotide
ucugaaagguugaaggucc

SEQ ID NO: 3226439 - RNA, 19 nt, Artificial Sequence
  Description of Artificial Sequence: Synthetic oligonucleotide
aaagcaaacaguaacagua

SEQ ID NO: 3226440 - RNA, 19 nt, Artificial Sequence
  Description of Artificial Sequence: Synthetic oligonucleotide
aagaucaucagaugugucu

SEQ ID NO: 3226441 - RNA, 19 nt, Artificial Sequence
  Description of Artificial Sequence: Synthetic oligonucleotide
gauucugcaaugcaguggc

SEQ ID NO: 3226442 - RNA, 19 nt, Artificial Sequence
  Description of Artificial Sequence: Synthetic oligonucleotide
auuaauggccuccaaguag

SEQ ID NO: 3226443 - RNA, 19 nt, Artificial Sequence
  Description of Artificial Sequence: Synthetic oligonucleotide
uuaaacaguggacacaaaa

SEQ ID NO: 3226444 - RNA, 19 nt, Artificial Sequence
  Description of Artificial Sequence: Synthetic oligonucleotide
gaguguacccuucugaaag

SEQ ID NO: 3226445 - RNA, 19 nt, Artificial Sequence
  Description of Artificial Sequence: Synthetic oligonucleotide
cugguuaauauauucuccg

SEQ ID NO: 3226446 - RNA, 19 nt, Artificial Sequence
  Description of Artificial Sequence: Synthetic oligonucleotide
auagcuaucagaaauguca

SEQ ID NO: 3226447 - RNA, 19 nt, Artificial Sequence
  Description of Artificial Sequence: Synthetic oligonucleotide
aguaauuaaagcuuacaau

SEQ ID NO: 3226448 - RNA, 19 nt, Artificial Sequence
  Description of Artificial Sequence: Synthetic oligonucleotide
uuugaucuagcucugccug

SEQ ID NO: 3226449 - RNA, 19 nt, Artificial Sequence
  Description of Artificial Sequence: Synthetic oligonucleotide
cuccaaguagauuugaaag

SEQ ID NO: 3226450 - RNA, 19 nt, Artificial Sequence
  Description of Artificial Sequence: Synthetic oligonucleotide
aacaguagguagcugagga

SEQ ID NO: 3226451 - RNA, 19 nt, Artificial Sequence
  Description of Artificial Sequence: Synthetic oligonucleotide
uucacuuaugacaccacag

SEQ ID NO: 3226452 - RNA, 19 nt, Artificial Sequence
  Description of Artificial Sequence: Synthetic oligonucleotide
auuaucagcugauacauau

SEQ ID NO: 3226453 - RNA, 19 nt, Artificial Sequence
  Description of Artificial Sequence: Synthetic oligonucleotide
aguaacaguagguagcuga

SEQ ID NO: 3226454 - RNA, 19 nt, Artificial Sequence
  Description of Artificial Sequence: Synthetic oligonucleotide
aaucugaaagaucucgaga

SEQ ID NO: 3226455 - RNA, 19 nt, Artificial Sequence
  Description of Artificial Sequence: Synthetic oligonucleotide
uuacauuuaaacaguggac

SEQ ID NO: 3226456 - RNA, 19 nt, Artificial Sequence
  Description of Artificial Sequence: Synthetic oligonucleotide
aauugauaacuucccagcu

SEQ ID NO: 3226457 - RNA, 19 nt, Artificial Sequence
  Description of Artificial Sequence: Synthetic oligonucleotide
aaaagcaaacaguaacagu

SEQ ID NO: 3226458 - RNA, 19 nt, Artificial Sequence
  Description of Artificial Sequence: Synthetic oligonucleotide
agauuaauggccuccaagu

SEQ ID NO: 3226459 - RNA, 19 nt, Artificial Sequence
  Description of Artificial Sequence: Synthetic oligonucleotide
uccaauaucauuacauuua

SEQ ID NO: 3226460 - RNA, 19 nt, Artificial Sequence
  Description of Artificial Sequence: Synthetic oligonucleotide
uaguucaaagucaucaccu

SEQ ID NO: 3226461 - RNA, 19 nt, Artificial Sequence
  Description of Artificial Sequence: Synthetic oligonucleotide
aagcuuacaauucaauuuu

SEQ ID NO: 3226462 - RNA, 19 nt, Artificial Sequence
  Description of Artificial Sequence: Synthetic oligonucleotide
uaauucacugucauccuug

SEQ ID NO: 3226463 - RNA, 19 nt, Artificial Sequence
  Description of Artificial Sequence: Synthetic oligonucleotide
uuggaauugauaacuuccc

SEQ ID NO: 3226464 - RNA, 19 nt, Artificial Sequence
  Description of Artificial Sequence: Synthetic oligonucleotide
aaauaugcugaaauucauc

SEQ ID NO: 3226465 - RNA, 19 nt, Artificial Sequence
  Description of Artificial Sequence: Synthetic oligonucleotide
uuuggcagcaaccgugagg

SEQ ID NO: 3226466 - RNA, 19 nt, Artificial Sequence
  Description of Artificial Sequence: Synthetic oligonucleotide
uuguguuagucccaguuca

SEQ ID NO: 3226467 - RNA, 19 nt, Artificial Sequence
  Description of Artificial Sequence: Synthetic oligonucleotide
aucauuaucagcugauaca

SEQ ID NO: 3226468 - RNA, 19 nt, Artificial Sequence
  Description of Artificial Sequence: Synthetic oligonucleotide
cauuacauuuaaacagugg

SEQ ID NO: 3226469 - RNA, 19 nt, Artificial Sequence
  Description of Artificial Sequence: Synthetic oligonucleotide
aaugugcacacacugcaga

SEQ ID NO: 3226470 - RNA, 19 nt, Artificial Sequence
  Description of Artificial Sequence: Synthetic oligonucleotide
aaaacaaccccuauucacu

SEQ ID NO: 3226471 - RNA, 19 nt, Artificial Sequence
  Description of Artificial Sequence: Synthetic oligonucleotide
uucaauagaauggacuuga

SEQ ID NO: 3226472 - RNA, 19 nt, Artificial Sequence
  Description of Artificial Sequence: Synthetic oligonucleotide
cuuaugacaccacaguaug

SEQ ID NO: 3226473 - RNA, 19 nt, Artificial Sequence
  Description of Artificial Sequence: Synthetic oligonucleotide
aauguaacuccccaagauu

SEQ ID NO: 3226474 - RNA, 19 nt, Artificial Sequence
  Description of Artificial Sequence: Synthetic oligonucleotide
uuggucuuguguuaguccc

SEQ ID NO: 3226475 - RNA, 19 nt, Artificial Sequence
  Description of Artificial Sequence: Synthetic oligonucleotide
ucaucauuuguucccgugc

SEQ ID NO: 3226476 - RNA, 19 nt, Artificial Sequence
  Description of Artificial Sequence: Synthetic oligonucleotide
uuugcuuggucugugacca

SEQ ID NO: 3226477 - RNA, 19 nt, Artificial Sequence
  Description of Artificial Sequence: Synthetic oligonucleotide
uguguccucuccuauaaug

SEQ ID NO: 3226478 - RNA, 19 nt, Artificial Sequence
  Description of Artificial Sequence: Synthetic oligonucleotide
uguguauauguaacuauaa

SEQ ID NO: 3226479 - RNA, 19 nt, Artificial Sequence
  Description of Artificial Sequence: Synthetic oligonucleotide
aagucaucaccuucuucgg

SEQ ID NO: 3226480 - RNA, 19 nt, Artificial Sequence
  Description of Artificial Sequence: Synthetic oligonucleotide
uccgauuccaaaaucuagu

SEQ ID NO: 3226481 - RNA, 19 nt, Artificial Sequence
  Description of Artificial Sequence: Synthetic oligonucleotide
agcugaaaagucuaauuca

SEQ ID NO: 3226482 - RNA, 19 nt, Artificial Sequence
  Description of Artificial Sequence: Synthetic oligonucleotide
uuggcagcaaccgugaggc

SEQ ID NO: 3226483 - RNA, 19 nt, Artificial Sequence
  Description of Artificial Sequence: Synthetic oligonucleotide
uagcuaucagaaaugucag

SEQ ID NO: 3226484 - RNA, 19 nt, Artificial Sequence
  Description of Artificial Sequence: Synthetic oligonucleotide
ucgagagaaaaccuccuca

SEQ ID NO: 3226485 - RNA, 19 nt, Artificial Sequence
  Description of Artificial Sequence: Synthetic oligonucleotide
augucagucuaucauuauc

SEQ ID NO: 3226486 - RNA, 19 nt, Artificial Sequence
  Description of Artificial Sequence: Synthetic oligonucleotide
uucugguuaauauauucuc

SEQ ID NO: 3226487 - RNA, 19 nt, Artificial Sequence
  Description of Artificial Sequence: Synthetic oligonucleotide
uucuccgauuccaaaaucu

SEQ ID NO: 3226488 - RNA, 19 nt, Artificial Sequence
  Description of Artificial Sequence: Synthetic oligonucleotide
aagucuaauucacugucau

SEQ ID NO: 3226489 - RNA, 19 nt, Artificial Sequence
  Description of Artificial Sequence: Synthetic oligonucleotide
uacagauaacucuuuggca

SEQ ID NO: 3226490 - RNA, 19 nt, Artificial Sequence
  Description of Artificial Sequence: Synthetic oligonucleotide
ucuaucauuaucagcugau

SEQ ID NO: 3226491 - RNA, 19 nt, Artificial Sequence
  Description of Artificial Sequence: Synthetic oligonucleotide
uuuccuacugugcugugcu

SEQ ID NO: 3226492 - RNA, 19 nt, Artificial Sequence
  Description of Artificial Sequence: Synthetic oligonucleotide
ggaauugauaacuucccag

SEQ ID NO: 3226493 - RNA, 19 nt, Artificial Sequence
  Description of Artificial Sequence: Synthetic oligonucleotide
ugucagauacagauaacuc

SEQ ID NO: 3226494 - RNA, 19 nt, Artificial Sequence
  Description of Artificial Sequence: Synthetic oligonucleotide
ucauuaucagcugauacau

SEQ ID NO: 3226495 - RNA, 19 nt, Artificial Sequence
  Description of Artificial Sequence: Synthetic oligonucleotide
gagacaaaacuugccaggg

SEQ ID NO: 3226496 - RNA, 19 nt, Artificial Sequence
  Description of Artificial Sequence: Synthetic oligonucleotide
uguccucuccuauaauggg

SEQ ID NO: 3226497 - RNA, 19 nt, Artificial Sequence
  Description of Artificial Sequence: Synthetic oligonucleotide
aauagcuaucagaaauguc

SEQ ID NO: 3226498 - RNA, 19 nt, Artificial Sequence
  Description of Artificial Sequence: Synthetic oligonucleotide
ugaagguuuccuacugugc

SEQ ID NO: 3226499 - RNA, 19 nt, Artificial Sequence
  Description of Artificial Sequence: Synthetic oligonucleotide
guauauguaacuauaaagu

SEQ ID NO: 3226500 - RNA, 19 nt, Artificial Sequence
  Description of Artificial Sequence: Synthetic oligonucleotide
uuccagacauggaaaaucu

SEQ ID NO: 3226501 - RNA, 19 nt, Artificial Sequence
  Description of Artificial Sequence: Synthetic oligonucleotide
aucucgagagaaaaccucc

SEQ ID NO: 3226502 - RNA, 19 nt, Artificial Sequence
  Description of Artificial Sequence: Synthetic oligonucleotide
gauucccagauuaauggcc

SEQ ID NO: 3226503 - RNA, 19 nt, Artificial Sequence
  Description of Artificial Sequence: Synthetic oligonucleotide
accccuauucacuuaugac

SEQ ID NO: 3226504 - RNA, 19 nt, Artificial Sequence
  Description of Artificial Sequence: Synthetic oligonucleotide
aaggucccauuaucagucc

SEQ ID NO: 3226505 - RNA, 19 nt, Artificial Sequence
  Description of Artificial Sequence: Synthetic oligonucleotide
aaaaucugaaagaucucga

SEQ ID NO: 3226506 - RNA, 19 nt, Artificial Sequence
  Description of Artificial Sequence: Synthetic oligonucleotide
aguuucaauagaauggacu

SEQ ID NO: 3226507 - RNA, 19 nt, Artificial Sequence
  Description of Artificial Sequence: Synthetic oligonucleotide
uggucaaguaguucaaagu

SEQ ID NO: 3226508 - RNA, 19 nt, Artificial Sequence
  Description of Artificial Sequence: Synthetic oligonucleotide
ucugacacgucugugucag

SEQ ID NO: 3226509 - RNA, 19 nt, Artificial Sequence
  Description of Artificial Sequence: Synthetic oligonucleotide
aaccccuauucacuuauga

SEQ ID NO: 3226510 - RNA, 19 nt, Artificial Sequence
  Description of Artificial Sequence: Synthetic oligonucleotide
uuucuuuaucuccuucaga

SEQ ID NO: 3226511 - RNA, 19 nt, Artificial Sequence
  Description of Artificial Sequence: Synthetic oligonucleotide
uggaauugauaacuuccca

SEQ ID NO: 3226512 - RNA, 19 nt, Artificial Sequence
  Description of Artificial Sequence: Synthetic oligonucleotide
ucuuguguuagucccaguu

SEQ ID NO: 3226513 - RNA, 19 nt, Artificial Sequence
  Description of Artificial Sequence: Synthetic oligonucleotide
ucacuguucagaggaaggg

SEQ ID NO: 3226514 - RNA, 19 nt, Artificial Sequence
  Description of Artificial Sequence: Synthetic oligonucleotide
gauacuucugacacgucug

SEQ ID NO: 3226515 - RNA, 19 nt, Artificial Sequence
  Description of Artificial Sequence: Synthetic oligonucleotide
ugauucccagauuaauggc

SEQ ID NO: 3226516 - RNA, 19 nt, Artificial Sequence
  Description of Artificial Sequence: Synthetic oligonucleotide
ugaaggucccauuaucagu

SEQ ID NO: 3226517 - RNA, 19 nt, Artificial Sequence
  Description of Artificial Sequence: Synthetic oligonucleotide
aaugucaggauacagguac

SEQ ID NO: 3226518 - RNA, 19 nt, Artificial Sequence
  Description of Artificial Sequence: Synthetic oligonucleotide
aaucuuaacaaaauguccc

SEQ ID NO: 3226519 - RNA, 19 nt, Artificial Sequence
  Description of Artificial Sequence: Synthetic oligonucleotide
aaccuuguagucucgaagg

SEQ ID NO: 3226520 - RNA, 19 nt, Artificial Sequence
  Description of Artificial Sequence: Synthetic oligonucleotide
auaauaaccuuguagucuc

SEQ ID NO: 3226521 - RNA, 19 nt, Artificial Sequence
  Description of Artificial Sequence: Synthetic oligonucleotide
aacaaaaugucccaggcau

SEQ ID NO: 3226522 - RNA, 19 nt, Artificial Sequence
  Description of Artificial Sequence: Synthetic oligonucleotide
aguggaaucucacuucucc

SEQ ID NO: 3226523 - RNA, 19 nt, Artificial Sequence
  Description of Artificial Sequence: Synthetic oligonucleotide
aaggaugucagcgaacggc

SEQ ID NO: 3226524 - RNA, 19 nt, Artificial Sequence
  Description of Artificial Sequence: Synthetic oligonucleotide
auacagguacuucagaggg

SEQ ID NO: 3226525 - RNA, 19 nt, Artificial Sequence
  Description of Artificial Sequence: Synthetic oligonucleotide
aggcauuuuaucuuugagc

SEQ ID NO: 3226526 - RNA, 19 nt, Artificial Sequence
  Description of Artificial Sequence: Synthetic oligonucleotide
uuaacaaaaugucccaggc

SEQ ID NO: 3226527 - RNA, 19 nt, Artificial Sequence
  Description of Artificial Sequence: Synthetic oligonucleotide
ugaaucuuaacaaaauguc

SEQ ID NO: 3226528 - RNA, 19 nt, Artificial Sequence
  Description of Artificial Sequence: Synthetic oligonucleotide
uccaagauggcucucacug

SEQ ID NO: 3226529 - RNA, 19 nt, Artificial Sequence
  Description of Artificial Sequence: Synthetic oligonucleotide
uuuguuguaggguucuacg

SEQ ID NO: 3226530 - RNA, 19 nt, Artificial Sequence
  Description of Artificial Sequence: Synthetic oligonucleotide
gauacagguacuucagagg

SEQ ID NO: 3226531 - RNA, 19 nt, Artificial Sequence
  Description of Artificial Sequence: Synthetic oligonucleotide
ucccauaauaaccuuguag

SEQ ID NO: 3226532 - RNA, 19 nt, Artificial Sequence
  Description of Artificial Sequence: Synthetic oligonucleotide
gguaaugccuccaagaugg

SEQ ID NO: 3226533 - RNA, 19 nt, Artificial Sequence
  Description of Artificial Sequence: Synthetic oligonucleotide
gaauguucccauaauaacc

SEQ ID NO: 3226534 - RNA, 19 nt, Artificial Sequence
  Description of Artificial Sequence: Synthetic oligonucleotide
cuuaacaaaaugucccagg

SEQ ID NO: 3226535 - RNA, 19 nt, Artificial Sequence
  Description of Artificial Sequence: Synthetic oligonucleotide
gaaucuuaacaaaaugucc

SEQ ID NO: 3226536 - RNA, 19 nt, Artificial Sequence
  Description of Artificial Sequence: Synthetic oligonucleotide
aaugccuccaagauggcuc

SEQ ID NO: 3226537 - RNA, 19 nt, Artificial Sequence
  Description of Artificial Sequence: Synthetic oligonucleotide
acugaaucuuaacaaaaug

SEQ ID NO: 3226538 - RNA, 19 nt, Artificial Sequence
  Description of Artificial Sequence: Synthetic oligonucleotide
aauguucccauaauaaccu

SEQ ID NO: 3226539 - RNA, 19 nt, Artificial Sequence
  Description of Artificial Sequence: Synthetic oligonucleotide
uaaccuuguagucucgaag

SEQ ID NO: 3226540 - RNA, 19 nt, Artificial Sequence
  Description of Artificial Sequence: Synthetic oligonucleotide
uccguuuucagaguggucc

SEQ ID NO: 3226541 - RNA, 19 nt, Artificial Sequence
  Description of Artificial Sequence: Synthetic oligonucleotide
uucagagugguccacccag

SEQ ID NO: 3226542 - RNA, 19 nt, Artificial Sequence
  Description of Artificial Sequence: Synthetic oligonucleotide
ucaggauacagguacuuca

SEQ ID NO: 3226543 - RNA, 19 nt, Artificial Sequence
  Description of Artificial Sequence: Synthetic oligonucleotide
acuucagaggguuuucagg

SEQ ID NO: 3226544 - RNA, 19 nt, Artificial Sequence
  Description of Artificial Sequence: Synthetic oligonucleotide
aacggcagagcugacaguc

SEQ ID NO: 3226545 - RNA, 19 nt, Artificial Sequence
  Description of Artificial Sequence: Synthetic oligonucleotide
uuguuguaggguucuacgg

SEQ ID NO: 3226546 - RNA, 19 nt, Artificial Sequence
  Description of Artificial Sequence: Synthetic oligonucleotide
cuugucuugggaaugucag

SEQ ID NO: 3226547 - RNA, 19 nt, Artificial Sequence
  Description of Artificial Sequence: Synthetic oligonucleotide
cuuguagucucgaaggaug

SEQ ID NO: 3226548 - RNA, 19 nt, Artificial Sequence
  Description of Artificial Sequence: Synthetic oligonucleotide
uguuguaggguucuacgga

SEQ ID NO: 3226549 - RNA, 19 nt, Artificial Sequence
  Description of Artificial Sequence: Synthetic oligonucleotide
ucucacugaaucuuaacaa

SEQ ID NO: 3226550 - RNA, 19 nt, Artificial Sequence
  Description of Artificial Sequence: Synthetic oligonucleotide
aagguaaugccuccaagau

SEQ ID NO: 3226551 - RNA, 19 nt, Artificial Sequence
  Description of Artificial Sequence: Synthetic oligonucleotide
uguucccauaauaaccuug

SEQ ID NO: 3226552 - RNA, 19 nt, Artificial Sequence
  Description of Artificial Sequence: Synthetic oligonucleotide
ggcauuuuaucuuugagca

SEQ ID NO: 3226553 - RNA, 19 nt, Artificial Sequence
  Description of Artificial Sequence: Synthetic oligonucleotide
gaagguaaugccuccaaga

SEQ ID NO: 3226554 - RNA, 19 nt, Artificial Sequence
  Description of Artificial Sequence: Synthetic oligonucleotide
cacuucuccguuuucagag

SEQ ID NO: 3226555 - RNA, 19 nt, Artificial Sequence
  Description of Artificial Sequence: Synthetic oligonucleotide
cuugggaaugucaggauac

SEQ ID NO: 3226556 - RNA, 19 nt, Artificial Sequence
  Description of Artificial Sequence: Synthetic oligonucleotide
ucacugaaucuuaacaaaa

SEQ ID NO: 3226557 - RNA, 19 nt, Artificial Sequence
  Description of Artificial Sequence: Synthetic oligonucleotide
agauggcucucacugaauc

SEQ ID NO: 3226558 - RNA, 19 nt, Artificial Sequence
  Description of Artificial Sequence: Synthetic oligonucleotide
aggguuuucaggaauguuc

SEQ ID NO: 3226559 - RNA, 19 nt, Artificial Sequence
  Description of Artificial Sequence: Synthetic oligonucleotide
ugucccaggcauuuuaucu

SEQ ID NO: 3226560 - RNA, 19 nt, Artificial Sequence
  Description of Artificial Sequence: Synthetic oligonucleotide
ugaagguaaugccuccaag

SEQ ID NO: 3226561 - RNA, 19 nt, Artificial Sequence
  Description of Artificial Sequence: Synthetic oligonucleotide
uaacaaaaugucccaggca

SEQ ID NO: 3226562 - RNA, 19 nt, Artificial Sequence
  Description of Artificial Sequence: Synthetic oligonucleotide
guuguaggguucuacggag

SEQ ID NO: 3226563 - RNA, 19 nt, Artificial Sequence
  Description of Artificial Sequence: Synthetic oligonucleotide
uucaggaauguucccauaa

SEQ ID NO: 3226564 - RNA, 19 nt, Artificial Sequence
  Description of Artificial Sequence: Synthetic oligonucleotide
uguaggguucuacggagug

SEQ ID NO: 3226565 - RNA, 19 nt, Artificial Sequence
  Description of Artificial Sequence: Synthetic oligonucleotide
ucuuaacaaaaugucccag

SEQ ID NO: 3226566 - RNA, 19 nt, Artificial Sequence
  Description of Artificial Sequence: Synthetic oligonucleotide
ugucuugggaaugucagga

SEQ ID NO: 3226567 - RNA, 19 nt, Artificial Sequence
  Description of Artificial Sequence: Synthetic oligonucleotide
uuuucagagugguccaccc

SEQ ID NO: 3226568 - RNA, 19 nt, Artificial Sequence
  Description of Artificial Sequence: Synthetic oligonucleotide
gagugguccacccagguga

SEQ ID NO: 3226569 - RNA, 19 nt, Artificial Sequence
  Description of Artificial Sequence: Synthetic oligonucleotide
gucucgaaggaugucagcg

SEQ ID NO: 3226570 - RNA, 19 nt, Artificial Sequence
  Description of Artificial Sequence: Synthetic oligonucleotide
ggauacagguacuucagag

SEQ ID NO: 3226571 - RNA, 19 nt, Artificial Sequence
  Description of Artificial Sequence: Synthetic oligonucleotide
aucuuaacaaaauguccca

SEQ ID NO: 3226572 - RNA, 19 nt, Artificial Sequence
  Description of Artificial Sequence: Synthetic oligonucleotide
acccaggugaagguaaugc

SEQ ID NO: 3226573 - RNA, 19 nt, Artificial Sequence
  Description of Artificial Sequence: Synthetic oligonucleotide
ucuacggaguggaaucuca

SEQ ID NO: 3226574 - RNA, 19 nt, Artificial Sequence
  Description of Artificial Sequence: Synthetic oligonucleotide
cauuuuaucuuugagcaga

SEQ ID NO: 3226575 - RNA, 19 nt, Artificial Sequence
  Description of Artificial Sequence: Synthetic oligonucleotide
uaauaaccuuguagucucg

SEQ ID NO: 3226576 - RNA, 19 nt, Artificial Sequence
  Description of Artificial Sequence: Synthetic oligonucleotide
uugucuugggaaugucagg

SEQ ID NO: 3226577 - RNA, 19 nt, Artificial Sequence
  Description of Artificial Sequence: Synthetic oligonucleotide
cugaaucuuaacaaaaugu

SEQ ID NO: 3226578 - RNA, 19 nt, Artificial Sequence
  Description of Artificial Sequence: Synthetic oligonucleotide
aaaugucccaggcauuuua

SEQ ID NO: 3226579 - RNA, 19 nt, Artificial Sequence
  Description of Artificial Sequence: Synthetic oligonucleotide
ugacagucgcccuuuguug

SEQ ID NO: 3226580 - RNA, 19 nt, Artificial Sequence
  Description of Artificial Sequence: Synthetic oligonucleotide
cuucagaggguuuucagga

SEQ ID NO: 3226581 - RNA, 19 nt, Artificial Sequence
  Description of Artificial Sequence: Synthetic oligonucleotide
uuuucaggaauguucccau

SEQ ID NO: 3226582 - RNA, 19 nt, Artificial Sequence
  Description of Artificial Sequence: Synthetic oligonucleotide
uagucucgaaggaugucag

SEQ ID NO: 3226583 - RNA, 19 nt, Artificial Sequence
  Description of Artificial Sequence: Synthetic oligonucleotide
uucuccguuuucagagugg

SEQ ID NO: 3226584 - RNA, 19 nt, Artificial Sequence
  Description of Artificial Sequence: Synthetic oligonucleotide
uacuucagaggguuuucag

SEQ ID NO: 3226585 - RNA, 19 nt, Artificial Sequence
  Description of Artificial Sequence: Synthetic oligonucleotide
aggugaagguaaugccucc

SEQ ID NO: 3226586 - RNA, 19 nt, Artificial Sequence
  Description of Artificial Sequence: Synthetic oligonucleotide
uggaaucucacuucuccgu

SEQ ID NO: 3226587 - RNA, 19 nt, Artificial Sequence
  Description of Artificial Sequence: Synthetic oligonucleotide
guggaaucucacuucuccg

SEQ ID NO: 3226588 - RNA, 19 nt, Artificial Sequence
  Description of Artificial Sequence: Synthetic oligonucleotide
ugguccacccaggugaagg

SEQ ID NO: 3226589 - RNA, 19 nt, Artificial Sequence
  Description of Artificial Sequence: Synthetic oligonucleotide
ucagagugguccacccagg

SEQ ID NO: 3226590 - RNA, 19 nt, Artificial Sequence
  Description of Artificial Sequence: Synthetic oligonucleotide
ucuugggaaugucaggaua

SEQ ID NO: 3226591 - RNA, 19 nt, Artificial Sequence
  Description of Artificial Sequence: Synthetic oligonucleotide
ggaauguucccauaauaac

SEQ ID NO: 3226592 - RNA, 19 nt, Artificial Sequence
  Description of Artificial Sequence: Synthetic oligonucleotide
caggauacagguacuucag

SEQ ID NO: 3226593 - RNA, 19 nt, Artificial Sequence
  Description of Artificial Sequence: Synthetic oligonucleotide
agguaaugccuccaagaug

SEQ ID NO: 3226594 - RNA, 19 nt, Artificial Sequence
  Description of Artificial Sequence: Synthetic oligonucleotide
uuguagucucgaaggaugu

SEQ ID NO: 3226595 - RNA, 19 nt, Artificial Sequence
  Description of Artificial Sequence: Synthetic oligonucleotide
agucucgaaggaugucagc

SEQ ID NO: 3226596 - RNA, 19 nt, Artificial Sequence
  Description of Artificial Sequence: Synthetic oligonucleotide
aauaaccuuguagucucga

SEQ ID NO: 3226597 - RNA, 19 nt, Artificial Sequence
  Description of Artificial Sequence: Synthetic oligonucleotide
ucagcgaacggcagagcug

SEQ ID NO: 3226598 - RNA, 19 nt, Artificial Sequence
  Description of Artificial Sequence: Synthetic oligonucleotide
cucucacugaaucuuaaca

SEQ ID NO: 3226599 - RNA, 19 nt, Artificial Sequence
  Description of Artificial Sequence: Synthetic oligonucleotide
aaucucacuucuccguuuu

SEQ ID NO: 3226600 - RNA, 19 nt, Artificial Sequence
  Description of Artificial Sequence: Synthetic oligonucleotide
ucagaggguuuucaggaau

SEQ ID NO: 3226601 - RNA, 19 nt, Artificial Sequence
  Description of Artificial Sequence: Synthetic oligonucleotide
gaaggaugucagcgaacgg

SEQ ID NO: 3226602 - RNA, 19 nt, Artificial Sequence
  Description of Artificial Sequence: Synthetic oligonucleotide
cucacuucuccguuuucag

SEQ ID NO: 3226603 - RNA, 19 nt, Artificial Sequence
  Description of Artificial Sequence: Synthetic oligonucleotide
uaggguucuacggagugga

SEQ ID NO: 3226604 - RNA, 19 nt, Artificial Sequence
  Description of Artificial Sequence: Synthetic oligonucleotide
aggaauguucccauaauaa

SEQ ID NO: 3226605 - RNA, 19 nt, Artificial Sequence
  Description of Artificial Sequence: Synthetic oligonucleotide
caggcauuuuaucuuugag

SEQ ID NO: 3226606 - RNA, 19 nt, Artificial Sequence
  Description of Artificial Sequence: Synthetic oligonucleotide
ucucgaaggaugucagcga

SEQ ID NO: 3226607 - RNA, 19 nt, Artificial Sequence
  Description of Artificial Sequence: Synthetic oligonucleotide
ucucacuucuccguuuuca

SEQ ID NO: 3226608 - RNA, 19 nt, Artificial Sequence
  Description of Artificial Sequence: Synthetic oligonucleotide
gggaaugucaggauacagg

SEQ ID NO: 3226609 - RNA, 19 nt, Artificial Sequence
  Description of Artificial Sequence: Synthetic oligonucleotide
ucaggaauguucccauaau

SEQ ID NO: 3226610 - RNA, 19 nt, Artificial Sequence
  Description of Artificial Sequence: Synthetic oligonucleotide
caggugaagguaaugccuc

SEQ ID NO: 3226611 - RNA, 19 nt, Artificial Sequence
  Description of Artificial Sequence: Synthetic oligonucleotide
aaggcuugucuugggaaug

SEQ ID NO: 3226612 - RNA, 19 nt, Artificial Sequence
  Description of Artificial Sequence: Synthetic oligonucleotide
uuucagagugguccaccca

SEQ ID NO: 3226613 - RNA, 19 nt, Artificial Sequence
  Description of Artificial Sequence: Synthetic oligonucleotide
augucccaggcauuuuauc

SEQ ID NO: 3226614 - RNA, 19 nt, Artificial Sequence
  Description of Artificial Sequence: Synthetic oligonucleotide
ugggaaugucaggauacag

SEQ ID NO: 3226615 - RNA, 19 nt, Artificial Sequence
  Description of Artificial Sequence: Synthetic oligonucleotide
gguucuacggaguggaauc

SEQ ID NO: 3226616 - RNA, 19 nt, Artificial Sequence
  Description of Artificial Sequence: Synthetic oligonucleotide
guuuucaggaauguuccca

SEQ ID NO: 3226617 - RNA, 19 nt, Artificial Sequence
  Description of Artificial Sequence: Synthetic oligonucleotide
aauuuauucuacaaaaugc

SEQ ID NO: 3226618 - RNA, 19 nt, Artificial Sequence
  Description of Artificial Sequence: Synthetic oligonucleotide
aaacaaauaaacaaaauag

SEQ ID NO: 3226619 - RNA, 19 nt, Artificial Sequence
  Description of Artificial Sequence: Synthetic oligonucleotide
uuuaaaacuguacaaagag

SEQ ID NO: 3226620 - RNA, 19 nt, Artificial Sequence
  Description of Artificial Sequence: Synthetic oligonucleotide
aaaguugaauauuuuaaac

SEQ ID NO: 3226621 - RNA, 19 nt, Artificial Sequence
  Description of Artificial Sequence: Synthetic oligonucleotide
aauaaguuuuaauauguuc

SEQ ID NO: 3226622 - RNA, 19 nt, Artificial Sequence
  Description of Artificial Sequence: Synthetic oligonucleotide
aaacagaaccuuuuaauac

SEQ ID NO: 3226623 - RNA, 19 nt, Artificial Sequence
  Description of Artificial Sequence: Synthetic oligonucleotide
aaauuuauucuacaaaaug

SEQ ID NO: 3226624 - RNA, 19 nt, Artificial Sequence
  Description of Artificial Sequence: Synthetic oligonucleotide
uuuagaaacaaauaaacaa

SEQ ID NO: 3226625 - RNA, 19 nt, Artificial Sequence
  Description of Artificial Sequence: Synthetic oligonucleotide
uuuaauacaaaguugaaua

SEQ ID NO: 3226626 - RNA, 19 nt, Artificial Sequence
  Description of Artificial Sequence: Synthetic oligonucleotide
aauauuuuaaacucccuca

SEQ ID NO: 3226627 - RNA, 19 nt, Artificial Sequence
  Description of Artificial Sequence: Synthetic oligonucleotide
aguugaauauuuuaaacuc

SEQ ID NO: 3226628 - RNA, 19 nt, Artificial Sequence
  Description of Artificial Sequence: Synthetic oligonucleotide
uuaaauuuauucuacaaaa

SEQ ID NO: 3226629 - RNA, 19 nt, Artificial Sequence
  Description of Artificial Sequence: Synthetic oligonucleotide
aaagcuaacaacaacaaca

SEQ ID NO: 3226630 - RNA, 19 nt, Artificial Sequence
  Description of Artificial Sequence: Synthetic oligonucleotide
caaauaaacaaaauagagc

SEQ ID NO: 3226631 - RNA, 19 nt, Artificial Sequence
  Description of Artificial Sequence: Synthetic oligonucleotide
gaaaauaaguuuuaauaug

SEQ ID NO: 3226632 - RNA, 19 nt, Artificial Sequence
  Description of Artificial Sequence: Synthetic oligonucleotide
ucuuaauuaaauuuauucu

SEQ ID NO: 3226633 - RNA, 19 nt, Artificial Sequence
  Description of Artificial Sequence: Synthetic oligonucleotide
uuuaaucauacagagaaag

SEQ ID NO: 3226634 - RNA, 19 nt, Artificial Sequence
  Description of Artificial Sequence: Synthetic oligonucleotide
aaguugaauauuuuaaacu

SEQ ID NO: 3226635 - RNA, 19 nt, Artificial Sequence
  Description of Artificial Sequence: Synthetic oligonucleotide
uacuuauacacccaaauac

SEQ ID NO: 3226636 - RNA, 19 nt, Artificial Sequence
  Description of Artificial Sequence: Synthetic oligonucleotide
uuaaacucccucaaaauca

SEQ ID NO: 3226637 - RNA, 19 nt, Artificial Sequence
  Description of Artificial Sequence: Synthetic oligonucleotide
uucuuaauuaaauuuauuc

SEQ ID NO: 3226638 - RNA, 19 nt, Artificial Sequence
  Description of Artificial Sequence: Synthetic oligonucleotide
uuaauuaaauuuauucuac

SEQ ID NO: 3226639 - RNA, 19 nt, Artificial Sequence
  Description of Artificial Sequence: Synthetic oligonucleotide
uuagaaacaaauaaacaaa

SEQ ID NO: 3226640 - RNA, 19 nt, Artificial Sequence
  Description of Artificial Sequence: Synthetic oligonucleotide
aaugcuacucaauggaaag

SEQ ID NO: 3226641 - RNA, 19 nt, Artificial Sequence
  Description of Artificial Sequence: Synthetic oligonucleotide
uacaaaaugcuacucaaug

SEQ ID NO: 3226642 - RNA, 19 nt, Artificial Sequence
  Description of Artificial Sequence: Synthetic oligonucleotide
acuuuagaaacaaauaaac

SEQ ID NO: 3226643 - RNA, 19 nt, Artificial Sequence
  Description of Artificial Sequence: Synthetic oligonucleotide
uugaauauuuuaaacuccc

SEQ ID NO: 3226644 - RNA, 19 nt, Artificial Sequence
  Description of Artificial Sequence: Synthetic oligonucleotide
aauuaaauuuauucuacaa

SEQ ID NO: 3226645 - RNA, 19 nt, Artificial Sequence
  Description of Artificial Sequence: Synthetic oligonucleotide
  modified_base (15)..(15): a, c, u, g, unknown or other
uaaaauaaauggaanauuu

SEQ ID NO: 3226646 - RNA, 19 nt, Artificial Sequence
  Description of Artificial Sequence: Synthetic oligonucleotide
uuauucuacaaaaugcuac

SEQ ID NO: 3226647 - RNA, 19 nt, Artificial Sequence
  Description of Artificial Sequence: Synthetic oligonucleotide
uccuaaguuagaaaagggg

SEQ ID NO: 3226648 - RNA, 19 nt, Artificial Sequence
  Description of Artificial Sequence: Synthetic oligonucleotide
aaaauaaguuuuaauaugu

SEQ ID NO: 3226649 - RNA, 19 nt, Artificial Sequence
  Description of Artificial Sequence: Synthetic oligonucleotide
guuuucacuacuuauacac

SEQ ID NO: 3226650 - RNA, 19 nt, Artificial Sequence
  Description of Artificial Sequence: Synthetic oligonucleotide
ucacuuuagaaacaaauaa

SEQ ID NO: 3226651 - RNA, 19 nt, Artificial Sequence
  Description of Artificial Sequence: Synthetic oligonucleotide
  modified_base (18)..(18): a, c, u, g, unknown or other
aaguaaaauaaauggaana

SEQ ID NO: 3226652 - RNA, 19 nt, Artificial Sequence
  Description of Artificial Sequence: Synthetic oligonucleotide
auuauccuaaguuagaaaa

SEQ ID NO: 3226653 - RNA, 19 nt, Artificial Sequence
  Description of Artificial Sequence: Synthetic oligonucleotide
acaaauaaacaaaauagag

SEQ ID NO: 3226654 - RNA, 19 nt, Artificial Sequence
  Description of Artificial Sequence: Synthetic oligonucleotide
uuuuaaaacuguacaaaga

SEQ ID NO: 3226655 - RNA, 19 nt, Artificial Sequence
  Description of Artificial Sequence: Synthetic oligonucleotide
gaaacaaauaaacaaaaua

SEQ ID NO: 3226656 - RNA, 19 nt, Artificial Sequence
  Description of Artificial Sequence: Synthetic oligonucleotide
aagugggaaagcuaacaac

SEQ ID NO: 3226657 - RNA, 19 nt, Artificial Sequence
  Description of Artificial Sequence: Synthetic oligonucleotide
acaaaaugcuacucaaugg

SEQ ID NO: 3226658 - RNA, 19 nt, Artificial Sequence
  Description of Artificial Sequence: Synthetic oligonucleotide
uaaacacgaaguaaaauaa

SEQ ID NO: 3226659 - RNA, 19 nt, Artificial Sequence
  Description of Artificial Sequence: Synthetic oligonucleotide
uuuguucuuaauuaaauuu

SEQ ID NO: 3226660 - RNA, 19 nt, Artificial Sequence
  Description of Artificial Sequence: Synthetic oligonucleotide
aaaacagaaccuuuuaaua

SEQ ID NO: 3226661 - RNA, 19 nt, Artificial Sequence
  Description of Artificial Sequence: Synthetic oligonucleotide
aacagaaccuuuuaauaca

SEQ ID NO: 3226662 - RNA, 19 nt, Artificial Sequence
  Description of Artificial Sequence: Synthetic oligonucleotide
uauccuaaguuagaaaagg

SEQ ID NO: 3226663 - RNA, 19 nt, Artificial Sequence
  Description of Artificial Sequence: Synthetic oligonucleotide
uuuaaacucccucaaaauc

SEQ ID NO: 3226664 - RNA, 19 nt, Artificial Sequence
  Description of Artificial Sequence: Synthetic oligonucleotide
uuucacuacuuauacaccc

SEQ ID NO: 3226665 - RNA, 19 nt, Artificial Sequence
  Description of Artificial Sequence: Synthetic oligonucleotide
guaaccacgaaguaaacac

SEQ ID NO: 3226666 - RNA, 19 nt, Artificial Sequence
  Description of Artificial Sequence: Synthetic oligonucleotide
auuaaauuuauucuacaaa

SEQ ID NO: 3226667 - RNA, 19 nt, Artificial Sequence
  Description of Artificial Sequence: Synthetic oligonucleotide
aacaaauaaacaaaauaga

SEQ ID NO: 3226668 - RNA, 19 nt, Artificial Sequence
  Description of Artificial Sequence: Synthetic oligonucleotide
auaaguuuuaauauguucu

SEQ ID NO: 3226669 - RNA, 19 nt, Artificial Sequence
  Description of Artificial Sequence: Synthetic oligonucleotide
caaaagacacccuuguacc

SEQ ID NO: 3226670 - RNA, 19 nt, Artificial Sequence
  Description of Artificial Sequence: Synthetic oligonucleotide
uuauccuaaguuagaaaag

SEQ ID NO: 3226671 - RNA, 19 nt, Artificial Sequence
  Description of Artificial Sequence: Synthetic oligonucleotide
uagaaacaaauaaacaaaa

SEQ ID NO: 3226672 - RNA, 19 nt, Artificial Sequence
  Description of Artificial Sequence: Synthetic oligonucleotide
ucuuuaauagcagauuuca

SEQ ID NO: 3226673 - RNA, 19 nt, Artificial Sequence
  Description of Artificial Sequence: Synthetic oligonucleotide
gaauauuuuaaacucccuc

SEQ ID NO: 3226674 - RNA, 19 nt, Artificial Sequence
  Description of Artificial Sequence: Synthetic oligonucleotide
uuaaaacuguacaaagagu

SEQ ID NO: 3226675 - RNA, 19 nt, Artificial Sequence
  Description of Artificial Sequence: Synthetic oligonucleotide
auuuuaaacucccucaaaa

SEQ ID NO: 3226676 - RNA, 19 nt, Artificial Sequence
  Description of Artificial Sequence: Synthetic oligonucleotide
uauucuacaaaaugcuacu

SEQ ID NO: 3226677 - RNA, 19 nt, Artificial Sequence
  Description of Artificial Sequence: Synthetic oligonucleotide
cuuaauuaaauuuauucua

SEQ ID NO: 3226678 - RNA, 19 nt, Artificial Sequence
  Description of Artificial Sequence: Synthetic oligonucleotide
uucuacaaaaugcuacuca

SEQ ID NO: 3226679 - RNA, 19 nt, Artificial Sequence
  Description of Artificial Sequence: Synthetic oligonucleotide
cucuuuaauacaaaguuga

SEQ ID NO: 3226680 - RNA, 19 nt, Artificial Sequence
  Description of Artificial Sequence: Synthetic oligonucleotide
uaauuaaauuuauucuaca

SEQ ID NO: 3226681 - RNA, 19 nt, Artificial Sequence
  Description of Artificial Sequence: Synthetic oligonucleotide
uuguucuuaauuaaauuua

SEQ ID NO: 3226682 - RNA, 19 nt, Artificial Sequence
  Description of Artificial Sequence: Synthetic oligonucleotide
uaaauuuauucuacaaaau

SEQ ID NO: 3226683 - RNA, 19 nt, Artificial Sequence
  Description of Artificial Sequence: Synthetic oligonucleotide
acuuauacacccaaauacg

SEQ ID NO: 3226684 - RNA, 19 nt, Artificial Sequence
  Description of Artificial Sequence: Synthetic oligonucleotide
  modified_base (17)..(17): a, c, u, g, unknown or other
aguaaaauaaauggaanau

SEQ ID NO: 3226685 - RNA, 19 nt, Artificial Sequence
  Description of Artificial Sequence: Synthetic oligonucleotide
agcucuuuaauacaaaguu

SEQ ID NO: 3226686 - RNA, 19 nt, Artificial Sequence
  Description of Artificial Sequence: Synthetic oligonucleotide
cuacucaauggaaaguggg

SEQ ID NO: 3226687 - RNA, 19 nt, Artificial Sequence
  Description of Artificial Sequence: Synthetic oligonucleotide
uccagggucuuuaauagca

SEQ ID NO: 3226688 - RNA, 19 nt, Artificial Sequence
  Description of Artificial Sequence: Synthetic oligonucleotide
uaaccacgaaguaaacacg

SEQ ID NO: 3226689 - RNA, 19 nt, Artificial Sequence
  Description of Artificial Sequence: Synthetic oligonucleotide
ucuacaaaaugcuacucaa

SEQ ID NO: 3226690 - RNA, 19 nt, Artificial Sequence
  Description of Artificial Sequence: Synthetic oligonucleotide
uggaaagugggaaagcuaa

SEQ ID NO: 3226691 - RNA, 19 nt, Artificial Sequence
  Description of Artificial Sequence: Synthetic oligonucleotide
uuaaucauacagagaaagu

SEQ ID NO: 3226692 - RNA, 19 nt, Artificial Sequence
  Description of Artificial Sequence: Synthetic oligonucleotide
guaaacacgaaguaaaaua

SEQ ID NO: 3226693 - RNA, 19 nt, Artificial Sequence
  Description of Artificial Sequence: Synthetic oligonucleotide
uguucuuaauuaaauuuau

SEQ ID NO: 3226694 - RNA, 19 nt, Artificial Sequence
  Description of Artificial Sequence: Synthetic oligonucleotide
  modified_base (14)..(14): a, c, u, g, unknown or other
aaaauaaauggaanauuuu

SEQ ID NO: 3226695 - RNA, 19 nt, Artificial Sequence
  Description of Artificial Sequence: Synthetic oligonucleotide
uuaauacaaaguugaauau

SEQ ID NO: 3226696 - RNA, 19 nt, Artificial Sequence
  Description of Artificial Sequence: Synthetic oligonucleotide
cuagcucuuuaauacaaag

SEQ ID NO: 3226697 - RNA, 19 nt, Artificial Sequence
  Description of Artificial Sequence: Synthetic oligonucleotide
guaccuagcucuuuaauac

SEQ ID NO: 3226698 - RNA, 19 nt, Artificial Sequence
  Description of Artificial Sequence: Synthetic oligonucleotide
ucaauggaaagugggaaag

SEQ ID NO: 3226699 - RNA, 19 nt, Artificial Sequence
  Description of Artificial Sequence: Synthetic oligonucleotide
auuuauucuacaaaaugcu

SEQ ID NO: 3226700 - RNA, 19 nt, Artificial Sequence
  Description of Artificial Sequence: Synthetic oligonucleotide
aaagugggaaagcuaacaa

SEQ ID NO: 3226701 - RNA, 19 nt, Artificial Sequence
  Description of Artificial Sequence: Synthetic oligonucleotide
uuuucacuacuuauacacc

SEQ ID NO: 3226702 - RNA, 19 nt, Artificial Sequence
  Description of Artificial Sequence: Synthetic oligonucleotide
aauggaaagugggaaagcu

SEQ ID NO: 3226703 - RNA, 19 nt, Artificial Sequence
  Description of Artificial Sequence: Synthetic oligonucleotide
gaguuuucacuacuuauac

SEQ ID NO: 3226704 - RNA, 19 nt, Artificial Sequence
  Description of Artificial Sequence: Synthetic oligonucleotide
ugaguuuucacuacuuaua

SEQ ID NO: 3226705 - RNA, 19 nt, Artificial Sequence
  Description of Artificial Sequence: Synthetic oligonucleotide
uuuauucuacaaaaugcua

SEQ ID NO: 3226706 - RNA, 19 nt, Artificial Sequence
  Description of Artificial Sequence: Synthetic oligonucleotide
cuuuagaaacaaauaaaca

SEQ ID NO: 3226707 - RNA, 19 nt, Artificial Sequence
  Description of Artificial Sequence: Synthetic oligonucleotide
uuuuaaacucccucaaaau

SEQ ID NO: 3226708 - RNA, 19 nt, Artificial Sequence
  Description of Artificial Sequence: Synthetic oligonucleotide
acuacuuauacacccaaau

SEQ ID NO: 3226709 - RNA, 19 nt, Artificial Sequence
  Description of Artificial Sequence: Synthetic oligonucleotide
uacaaaguugaauauuuua

SEQ ID NO: 3226710 - RNA, 19 nt, Artificial Sequence
  Description of Artificial Sequence: Synthetic oligonucleotide
gaaguaaacacgaaguaaa

SEQ ID NO: 3226711 - RNA, 19 nt, Artificial Sequence
  Description of Artificial Sequence: Synthetic oligonucleotide
aagcuugaguuuucacuac

SEQ ID NO: 3226712 - RNA, 19 nt, Artificial Sequence
  Description of Artificial Sequence: Synthetic oligonucleotide
aguuuuaauauguucuuuu

SEQ ID NO: 3226713 - RNA, 19 nt, Artificial Sequence
  Description of Artificial Sequence: Synthetic oligonucleotide
aaaagacacccuuguaccu

SEQ ID NO: 3226714 - RNA, 19 nt, Artificial Sequence
  Description of Artificial Sequence: Synthetic oligonucleotide
aacacgaaguaaaauaaau

SEQ ID NO: 3226715 - RNA, 19 nt, Artificial Sequence
  Description of Artificial Sequence: Synthetic oligonucleotide
uuuuguucuuaauuaaauu

SEQ ID NO: 3226716 - RNA, 19 nt, Artificial Sequence
  Description of Artificial Sequence: Synthetic oligonucleotide
guugaauauuuuaaacucc

SEQ ID NO: 3226717 - RNA, 19 nt, Artificial Sequence
  Description of Artificial Sequence: Synthetic oligonucleotide
uauacuuuaauuuaggccc

SEQ ID NO: 3226718 - RNA, 19 nt, Artificial Sequence
  Description of Artificial Sequence: Synthetic oligonucleotide
uuauuuuauagucugaccg

SEQ ID NO: 3226719 - RNA, 19 nt, Artificial Sequence
  Description of Artificial Sequence: Synthetic oligonucleotide
acuacuauccccuacaccc

SEQ ID NO: 3226720 - RNA, 19 nt, Artificial Sequence
  Description of Artificial Sequence: Synthetic oligonucleotide
aauaguuguaaucuugggc

SEQ ID NO: 3226721 - RNA, 19 nt, Artificial Sequence
  Description of Artificial Sequence: Synthetic oligonucleotide
auaguuguaaucuugggcc

SEQ ID NO: 3226722 - RNA, 19 nt, Artificial Sequence
  Description of Artificial Sequence: Synthetic oligonucleotide
aauauauacacauaauaca

SEQ ID NO: 3226723 - RNA, 19 nt, Artificial Sequence
  Description of Artificial Sequence: Synthetic oligonucleotide
aauagauauuuauugagag

SEQ ID NO: 3226724 - RNA, 19 nt, Artificial Sequence
  Description of Artificial Sequence: Synthetic oligonucleotide
cucaauauaaacaauaaug

SEQ ID NO: 3226725 - RNA, 19 nt, Artificial Sequence
  Description of Artificial Sequence: Synthetic oligonucleotide
auucauaaaauuaaaauac

SEQ ID NO: 3226726 - RNA, 19 nt, Artificial Sequence
  Description of Artificial Sequence: Synthetic oligonucleotide
aaaauggaaaacuacuauc

SEQ ID NO: 3226727 - RNA, 19 nt, Artificial Sequence
  Description of Artificial Sequence: Synthetic oligonucleotide
aacaagacucaauauaaac

SEQ ID NO: 3226728 - RNA, 19 nt, Artificial Sequence
  Description of Artificial Sequence: Synthetic oligonucleotide
aaauggaaaacuacuaucc

SEQ ID NO: 3226729 - RNA, 19 nt, Artificial Sequence
  Description of Artificial Sequence: Synthetic oligonucleotide
uagauauuuauugagaggg

SEQ ID NO: 3226730 - RNA, 19 nt, Artificial Sequence
  Description of Artificial Sequence: Synthetic oligonucleotide
aauucauaaaauuaaaaua

SEQ ID NO: 3226731 - RNA, 19 nt, Artificial Sequence
  Description of Artificial Sequence: Synthetic oligonucleotide
ugaaauacaauuuuacuac

SEQ ID NO: 3226732 - RNA, 19 nt, Artificial Sequence
  Description of Artificial Sequence: Synthetic oligonucleotide
uaaacaauaaugaacaaua

SEQ ID NO: 3226733 - RNA, 19 nt, Artificial Sequence
  Description of Artificial Sequence: Synthetic oligonucleotide
uaaugaacaauauauacac

SEQ ID NO: 3226734 - RNA, 19 nt, Artificial Sequence
  Description of Artificial Sequence: Synthetic oligonucleotide
auuauacuuuaauuuaggc

SEQ ID NO: 3226735 - RNA, 19 nt, Artificial Sequence
  Description of Artificial Sequence: Synthetic oligonucleotide
accaucacagaguagaagc

SEQ ID NO: 3226736 - RNA, 19 nt, Artificial Sequence
  Description of Artificial Sequence: Synthetic oligonucleotide
uuagacuccgaucaaaugc

SEQ ID NO: 3226737 - RNA, 19 nt, Artificial Sequence
  Description of Artificial Sequence: Synthetic oligonucleotide
uuauacuuuaauuuaggcc

SEQ ID NO: 3226738 - RNA, 19 nt, Artificial Sequence
  Description of Artificial Sequence: Synthetic oligonucleotide
acgauuuuauuccacaugg

SEQ ID NO: 3226739 - RNA, 19 nt, Artificial Sequence
  Description of Artificial Sequence: Synthetic oligonucleotide
uuuacuacacaagugaugc

SEQ ID NO: 3226740 - RNA, 19 nt, Artificial Sequence
  Description of Artificial Sequence: Synthetic oligonucleotide
aucgucacgauuuuauucc

SEQ ID NO: 3226741 - RNA, 19 nt, Artificial Sequence
  Description of Artificial Sequence: Synthetic oligonucleotide
acagaguagaagcaguucc

SEQ ID NO: 3226742 - RNA, 19 nt, Artificial Sequence
  Description of Artificial Sequence: Synthetic oligonucleotide
aaaaccaguccccaucugg

SEQ ID NO: 3226743 - RNA, 19 nt, Artificial Sequence
  Description of Artificial Sequence: Synthetic oligonucleotide
aauacaauuuuacuacaca

SEQ ID NO: 3226744 - RNA, 19 nt, Artificial Sequence
  Description of Artificial Sequence: Synthetic oligonucleotide
auucagugcgauuugauag

SEQ ID NO: 3226745 - RNA, 19 nt, Artificial Sequence
  Description of Artificial Sequence: Synthetic oligonucleotide
uuuaauuuaggcccuggug

SEQ ID NO: 3226746 - RNA, 19 nt, Artificial Sequence
  Description of Artificial Sequence: Synthetic oligonucleotide
accaagauuagggagacgc

SEQ ID NO: 3226747 - RNA, 19 nt, Artificial Sequence
  Description of Artificial Sequence: Synthetic oligonucleotide
aaacuuucauaauugauuu

SEQ ID NO: 3226748 - RNA, 19 nt, Artificial Sequence
  Description of Artificial Sequence: Synthetic oligonucleotide
aaaacuacuauccccuaca

SEQ ID NO: 3226749 - RNA, 19 nt, Artificial Sequence
  Description of Artificial Sequence: Synthetic oligonucleotide
ugucacaaccaucacagag

SEQ ID NO: 3226750 - RNA, 19 nt, Artificial Sequence
  Description of Artificial Sequence: Synthetic oligonucleotide
auacauauuaaaacaagac

SEQ ID NO: 3226751 - RNA, 19 nt, Artificial Sequence
  Description of Artificial Sequence: Synthetic oligonucleotide
uauuucugaggcaaggcag

SEQ ID NO: 3226752 - RNA, 19 nt, Artificial Sequence
  Description of Artificial Sequence: Synthetic oligonucleotide
auagauauuuauugagagg

SEQ ID NO: 3226753 - RNA, 19 nt, Artificial Sequence
  Description of Artificial Sequence: Synthetic oligonucleotide
uauuuauugagagggaaag

SEQ ID NO: 3226754 - RNA, 19 nt, Artificial Sequence
  Description of Artificial Sequence: Synthetic oligonucleotide
cuccaaacaauauauacac

SEQ ID NO: 3226755 - RNA, 19 nt, Artificial Sequence
  Description of Artificial Sequence: Synthetic oligonucleotide
ucuccaaacaauauauaca

SEQ ID NO: 3226756 - RNA, 19 nt, Artificial Sequence
  Description of Artificial Sequence: Synthetic oligonucleotide
aauacauauuaaaacaaga

SEQ ID NO: 3226757 - RNA, 19 nt, Artificial Sequence
  Description of Artificial Sequence: Synthetic oligonucleotide
uuuauugagagggaaagga

SEQ ID NO: 3226758 - RNA, 19 nt, Artificial Sequence
  Description of Artificial Sequence: Synthetic oligonucleotide
uauuuuauagucugaccgc

SEQ ID NO: 3226759 - RNA, 19 nt, Artificial Sequence
  Description of Artificial Sequence: Synthetic oligonucleotide
agaguuuaauugcuauugc

SEQ ID NO: 3226760 - RNA, 19 nt, Artificial Sequence
  Description of Artificial Sequence: Synthetic oligonucleotide
ugguagaggauaauuacug

SEQ ID NO: 3226761 - RNA, 19 nt, Artificial Sequence
  Description of Artificial Sequence: Synthetic oligonucleotide
aauaccuuuagacuccgau

SEQ ID NO: 3226762 - RNA, 19 nt, Artificial Sequence
  Description of Artificial Sequence: Synthetic oligonucleotide
aacaauaaugaacaauaua

SEQ ID NO: 3226763 - RNA, 19 nt, Artificial Sequence
  Description of Artificial Sequence: Synthetic oligonucleotide
uggaaaacuacuauccccu

SEQ ID NO: 3226764 - RNA, 19 nt, Artificial Sequence
  Description of Artificial Sequence: Synthetic oligonucleotide
aaaauacuguguguguagg

SEQ ID NO: 3226765 - RNA, 19 nt, Artificial Sequence
  Description of Artificial Sequence: Synthetic oligonucleotide
cuaauuagaucucuguaac

SEQ ID NO: 3226766 - RNA, 19 nt, Artificial Sequence
  Description of Artificial Sequence: Synthetic oligonucleotide
uuuauagucugaccgcuug

SEQ ID NO: 3226767 - RNA, 19 nt, Artificial Sequence
  Description of Artificial Sequence: Synthetic oligonucleotide
aaauagauauuuauugaga

SEQ ID NO: 3226768 - RNA, 19 nt, Artificial Sequence
  Description of Artificial Sequence: Synthetic oligonucleotide
uuauuucugaggcaaggca

SEQ ID NO: 3226769 - RNA, 19 nt, Artificial Sequence
  Description of Artificial Sequence: Synthetic oligonucleotide
acuaauuagaucucuguaa

SEQ ID NO: 3226770 - RNA, 19 nt, Artificial Sequence
  Description of Artificial Sequence: Synthetic oligonucleotide
aaugucuccaaacaauaua

SEQ ID NO: 3226771 - RNA, 19 nt, Artificial Sequence
  Description of Artificial Sequence: Synthetic oligonucleotide
uggaauaguuguaaucuug

SEQ ID NO: 3226772 - RNA, 19 nt, Artificial Sequence
  Description of Artificial Sequence: Synthetic oligonucleotide
guggcuuaaaauuauauaa

SEQ ID NO: 3226773 - RNA, 19 nt, Artificial Sequence
  Description of Artificial Sequence: Synthetic oligonucleotide
uucuaccuaaguuagcuga

SEQ ID NO: 3226774 - RNA, 19 nt, Artificial Sequence
  Description of Artificial Sequence: Synthetic oligonucleotide
uaggaaaucgucacgauuu

SEQ ID NO: 3226775 - RNA, 19 nt, Artificial Sequence
  Description of Artificial Sequence: Synthetic oligonucleotide
uaaacaauaaugucuccaa

SEQ ID NO: 3226776 - RNA, 19 nt, Artificial Sequence
  Description of Artificial Sequence: Synthetic oligonucleotide
uacacgucaauuuccacug

SEQ ID NO: 3226777 - RNA, 19 nt, Artificial Sequence
  Description of Artificial Sequence: Synthetic oligonucleotide
uguguguaggaaaucguca

SEQ ID NO: 3226778 - RNA, 19 nt, Artificial Sequence
  Description of Artificial Sequence: Synthetic oligonucleotide
uguguaggaaaucgucacg

SEQ ID NO: 3226779 - RNA, 19 nt, Artificial Sequence
  Description of Artificial Sequence: Synthetic oligonucleotide
auuuccacuggcuugaaau

SEQ ID NO: 3226780 - RNA, 19 nt, Artificial Sequence
  Description of Artificial Sequence: Synthetic oligonucleotide
uggauacaaaugauuauac

SEQ ID NO: 3226781 - RNA, 19 nt, Artificial Sequence
  Description of Artificial Sequence: Synthetic oligonucleotide
auaaugaacaauauauaca

SEQ ID NO: 3226782 - RNA, 19 nt, Artificial Sequence
  Description of Artificial Sequence: Synthetic oligonucleotide
auacaauuuuacuacacaa

SEQ ID NO: 3226783 - RNA, 19 nt, Artificial Sequence
  Description of Artificial Sequence: Synthetic oligonucleotide
acuggcuugaaauacaauu

SEQ ID NO: 3226784 - RNA, 19 nt, Artificial Sequence
  Description of Artificial Sequence: Synthetic oligonucleotide
uuagggagacgccacagug

SEQ ID NO: 3226785 - RNA, 19 nt, Artificial Sequence
  Description of Artificial Sequence: Synthetic oligonucleotide
auaccuuuagacuccgauc

SEQ ID NO: 3226786 - RNA, 19 nt, Artificial Sequence
  Description of Artificial Sequence: Synthetic oligonucleotide
cauauuaaaacaagacuca

SEQ ID NO: 3226787 - RNA, 19 nt, Artificial Sequence
  Description of Artificial Sequence: Synthetic oligonucleotide
ugcuauugcacuagaacac

SEQ ID NO: 3226788 - RNA, 19 nt, Artificial Sequence
  Description of Artificial Sequence: Synthetic oligonucleotide
ugagagggaaaggagaacc

SEQ ID NO: 3226789 - RNA, 19 nt, Artificial Sequence
  Description of Artificial Sequence: Synthetic oligonucleotide
uugauagaguuuaauugcu

SEQ ID NO: 3226790 - RNA, 19 nt, Artificial Sequence
  Description of Artificial Sequence: Synthetic oligonucleotide
gcuguaaauaccuuuagac

SEQ ID NO: 3226791 - RNA, 19 nt, Artificial Sequence
  Description of Artificial Sequence: Synthetic oligonucleotide
caguaaacuuucauaauug

SEQ ID NO: 3226792 - RNA, 19 nt, Artificial Sequence
  Description of Artificial Sequence: Synthetic oligonucleotide
uccuucuaaggcauaaaca

SEQ ID NO: 3226793 - RNA, 19 nt, Artificial Sequence
  Description of Artificial Sequence: Synthetic oligonucleotide
uggcaguaaacuuucauaa

SEQ ID NO: 3226794 - RNA, 19 nt, Artificial Sequence
  Description of Artificial Sequence: Synthetic oligonucleotide
aggauaauuacuguacaag

SEQ ID NO: 3226795 - RNA, 19 nt, Artificial Sequence
  Description of Artificial Sequence: Synthetic oligonucleotide
aggcauaaacaauaauguc

SEQ ID NO: 3226796 - RNA, 19 nt, Artificial Sequence
  Description of Artificial Sequence: Synthetic oligonucleotide
ugaacaauauauacacguc

SEQ ID NO: 3226797 - RNA, 19 nt, Artificial Sequence
  Description of Artificial Sequence: Synthetic oligonucleotide
uacacccuguuucaaaggc

SEQ ID NO: 3226798 - RNA, 19 nt, Artificial Sequence
  Description of Artificial Sequence: Synthetic oligonucleotide
ggauaauuacuguacaagc

SEQ ID NO: 3226799 - RNA, 19 nt, Artificial Sequence
  Description of Artificial Sequence: Synthetic oligonucleotide
agugcgauuugauagaguu

SEQ ID NO: 3226800 - RNA, 19 nt, Artificial Sequence
  Description of Artificial Sequence: Synthetic oligonucleotide
gacgccacaguguugguag

SEQ ID NO: 3226801 - RNA, 19 nt, Artificial Sequence
  Description of Artificial Sequence: Synthetic oligonucleotide
auacacgucaauuuccacu

SEQ ID NO: 3226802 - RNA, 19 nt, Artificial Sequence
  Description of Artificial Sequence: Synthetic oligonucleotide
acuagaacacccuuuccug

SEQ ID NO: 3226803 - RNA, 19 nt, Artificial Sequence
  Description of Artificial Sequence: Synthetic oligonucleotide
gucuccaaacaauauauac

SEQ ID NO: 3226804 - RNA, 19 nt, Artificial Sequence
  Description of Artificial Sequence: Synthetic oligonucleotide
aguaaacuuucauaauuga

SEQ ID NO: 3226805 - RNA, 19 nt, Artificial Sequence
  Description of Artificial Sequence: Synthetic oligonucleotide
ucuaccuaaguuagcugag

SEQ ID NO: 3226806 - RNA, 19 nt, Artificial Sequence
  Description of Artificial Sequence: Synthetic oligonucleotide
auguauggcagccuuuguc

SEQ ID NO: 3226807 - RNA, 19 nt, Artificial Sequence
  Description of Artificial Sequence: Synthetic oligonucleotide
caagacucaauauaaacaa

SEQ ID NO: 3226808 - RNA, 19 nt, Artificial Sequence
  Description of Artificial Sequence: Synthetic oligonucleotide
auaaacaauaaugucucca

SEQ ID NO: 3226809 - RNA, 19 nt, Artificial Sequence
  Description of Artificial Sequence: Synthetic oligonucleotide
ggcacuaccaagauuaggg

SEQ ID NO: 3226810 - RNA, 19 nt, Artificial Sequence
  Description of Artificial Sequence: Synthetic oligonucleotide
ucccuuucgacagauuugg

SEQ ID NO: 3226811 - RNA, 19 nt, Artificial Sequence
  Description of Artificial Sequence: Synthetic oligonucleotide
ugugaacauucuuugggug

SEQ ID NO: 3226812 - RNA, 19 nt, Artificial Sequence
  Description of Artificial Sequence: Synthetic oligonucleotide
uaguuguaaucuugggccg

SEQ ID NO: 3226813 - RNA, 19 nt, Artificial Sequence
  Description of Artificial Sequence: Synthetic oligonucleotide
ugacuaauuagaucucugu

SEQ ID NO: 3226814 - RNA, 19 nt, Artificial Sequence
  Description of Artificial Sequence: Synthetic oligonucleotide
ugcuacaguccuucuaagg

SEQ ID NO: 3226815 - RNA, 19 nt, Artificial Sequence
  Description of Artificial Sequence: Synthetic oligonucleotide
agcaguuccucauuaucuc

SEQ ID NO: 3226816 - RNA, 19 nt, Artificial Sequence
  Description of Artificial Sequence: Synthetic oligonucleotide
auaaacaauaaugaacaau

SEQ ID NO: 3226817 - RNA, 19 nt, Artificial Sequence
  Description of Artificial Sequence: Synthetic oligonucleotide
cuugauauagguuuggagg

SEQ ID NO: 3226818 - RNA, 19 nt, Artificial Sequence
  Description of Artificial Sequence: Synthetic oligonucleotide
ucuuuaaagagaucgaugc

SEQ ID NO: 3226819 - RNA, 19 nt, Artificial Sequence
  Description of Artificial Sequence: Synthetic oligonucleotide
cuauguaagucaaagauag

SEQ ID NO: 3226820 - RNA, 19 nt, Artificial Sequence
  Description of Artificial Sequence: Synthetic oligonucleotide
aagagaucgaugcuaaaag

SEQ ID NO: 3226821 - RNA, 19 nt, Artificial Sequence
  Description of Artificial Sequence: Synthetic oligonucleotide
uuccucuuuaaagagaucg

SEQ ID NO: 3226822 - RNA, 19 nt, Artificial Sequence
  Description of Artificial Sequence: Synthetic oligonucleotide
ucaaagauagguccagccg

SEQ ID NO: 3226823 - RNA, 19 nt, Artificial Sequence
  Description of Artificial Sequence: Synthetic oligonucleotide
uagugaaaagcccugcugg

SEQ ID NO: 3226824 - RNA, 19 nt, Artificial Sequence
  Description of Artificial Sequence: Synthetic oligonucleotide
aagggguagcaacacaggc

SEQ ID NO: 3226825 - RNA, 19 nt, Artificial Sequence
  Description of Artificial Sequence: Synthetic oligonucleotide
guaagucaaagauaggucc

SEQ ID NO: 3226826 - RNA, 19 nt, Artificial Sequence
  Description of Artificial Sequence: Synthetic oligonucleotide
ugugaagacguauuuguag

SEQ ID NO: 3226827 - RNA, 19 nt, Artificial Sequence
  Description of Artificial Sequence: Synthetic oligonucleotide
aagagguccaagauaaugg

SEQ ID NO: 3226828 - RNA, 19 nt, Artificial Sequence
  Description of Artificial Sequence: Synthetic oligonucleotide
aagacguauuuguagagcu

SEQ ID NO: 3226829 - RNA, 19 nt, Artificial Sequence
  Description of Artificial Sequence: Synthetic oligonucleotide
ucugcucuagugaaaagcc

SEQ ID NO: 3226830 - RNA, 19 nt, Artificial Sequence
  Description of Artificial Sequence: Synthetic oligonucleotide
guguugaucacauagucug

SEQ ID NO: 3226831 - RNA, 19 nt, Artificial Sequence
  Description of Artificial Sequence: Synthetic oligonucleotide
agagguccaagauaauggc

SEQ ID NO: 3226832 - RNA, 19 nt, Artificial Sequence
  Description of Artificial Sequence: Synthetic oligonucleotide
acagccaaguuccaagagc

SEQ ID NO: 3226833 - RNA, 19 nt, Artificial Sequence
  Description of Artificial Sequence: Synthetic oligonucleotide
aaguuccaagagcucagcc

SEQ ID NO: 3226834 - RNA, 19 nt, Artificial Sequence
  Description of Artificial Sequence: Synthetic oligonucleotide
ugaaaagcccugcuggcgg

SEQ ID NO: 3226835 - RNA, 19 nt, Artificial Sequence
  Description of Artificial Sequence: Synthetic oligonucleotide
guagcauuccuccacauug

SEQ ID NO: 3226836 - RNA, 19 nt, Artificial Sequence
  Description of Artificial Sequence: Synthetic oligonucleotide
agaucuuggagcaaggcac

SEQ ID NO: 3226837 - RNA, 19 nt, Artificial Sequence
  Description of Artificial Sequence: Synthetic oligonucleotide
gagaucgaugcuaaaaggg

SEQ ID NO: 3226838 - RNA, 19 nt, Artificial Sequence
  Description of Artificial Sequence: Synthetic oligonucleotide
uggcaaaagagaacgcugg

SEQ ID NO: 3226839 - RNA, 19 nt, Artificial Sequence
  Description of Artificial Sequence: Synthetic oligonucleotide
auaauggcaucccguaggc

SEQ ID NO: 3226840 - RNA, 19 nt, Artificial Sequence
  Description of Artificial Sequence: Synthetic oligonucleotide
aaagagaacgcugguaaag

SEQ ID NO: 3226841 - RNA, 19 nt, Artificial Sequence
  Description of Artificial Sequence: Synthetic oligonucleotide
uuuguagagcuugaagugg

SEQ ID NO: 3226842 - RNA, 19 nt, Artificial Sequence
  Description of Artificial Sequence: Synthetic oligonucleotide
agagaucgaugcuaaaagg

SEQ ID NO: 3226843 - RNA, 19 nt, Artificial Sequence
  Description of Artificial Sequence: Synthetic oligonucleotide
aaagagguccaagauaaug

SEQ ID NO: 3226844 - RNA, 19 nt, Artificial Sequence
  Description of Artificial Sequence: Synthetic oligonucleotide
uguaagucaaagauagguc

SEQ ID NO: 3226845 - RNA, 19 nt, Artificial Sequence
  Description of Artificial Sequence: Synthetic oligonucleotide
agauagguccagccgaacc

SEQ ID NO: 3226846 - RNA, 19 nt, Artificial Sequence
  Description of Artificial Sequence: Synthetic oligonucleotide
uaaaguagcgguagcauuc

SEQ ID NO: 3226847 - RNA, 19 nt, Artificial Sequence
  Description of Artificial Sequence: Synthetic oligonucleotide
aagaucuuggagcaaggca

SEQ ID NO: 3226848 - RNA, 19 nt, Artificial Sequence
  Description of Artificial Sequence: Synthetic oligonucleotide
agugaaaagcccugcuggc

SEQ ID NO: 3226849 - RNA, 19 nt, Artificial Sequence
  Description of Artificial Sequence: Synthetic oligonucleotide
uuaaagagaucgaugcuaa

SEQ ID NO: 3226850 - RNA, 19 nt, Artificial Sequence
  Description of Artificial Sequence: Synthetic oligonucleotide
cuccacauugcccaaaggg

SEQ ID NO: 3226851 - RNA, 19 nt, Artificial Sequence
  Description of Artificial Sequence: Synthetic oligonucleotide
aaaguagcgguagcauucc

SEQ ID NO: 3226852 - RNA, 19 nt, Artificial Sequence
  Description of Artificial Sequence: Synthetic oligonucleotide
cuuggagcaaggcacaagc

SEQ ID NO: 3226853 - RNA, 19 nt, Artificial Sequence
  Description of Artificial Sequence: Synthetic oligonucleotide
aggccguccaguuugcugc

SEQ ID NO: 3226854 - RNA, 19 nt, Artificial Sequence
  Description of Artificial Sequence: Synthetic oligonucleotide
uaagucaaagauaggucca

SEQ ID NO: 3226855 - RNA, 19 nt, Artificial Sequence
  Description of Artificial Sequence: Synthetic oligonucleotide
uuuaaagagaucgaugcua

SEQ ID NO: 3226856 - RNA, 19 nt, Artificial Sequence
  Description of Artificial Sequence: Synthetic oligonucleotide
auguaagucaaagauaggu

SEQ ID NO: 3226857 - RNA, 19 nt, Artificial Sequence
  Description of Artificial Sequence: Synthetic oligonucleotide
uccaaggccguccaguuug

SEQ ID NO: 3226858 - RNA, 19 nt, Artificial Sequence
  Description of Artificial Sequence: Synthetic oligonucleotide
uucucuucuggccagggcu

SEQ ID NO: 3226859 - RNA, 19 nt, Artificial Sequence
  Description of Artificial Sequence: Synthetic oligonucleotide
aaagagaucgaugcuaaaa

SEQ ID NO: 3226860 - RNA, 19 nt, Artificial Sequence
  Description of Artificial Sequence: Synthetic oligonucleotide
uauguaagucaaagauagg

SEQ ID NO: 3226861 - RNA, 19 nt, Artificial Sequence
  Description of Artificial Sequence: Synthetic oligonucleotide
ugggucuugauauagguuu

SEQ ID NO: 3226862 - RNA, 19 nt, Artificial Sequence
  Description of Artificial Sequence: Synthetic oligonucleotide
auagguuuggaggaugcac

SEQ ID NO: 3226863 - RNA, 19 nt, Artificial Sequence
  Description of Artificial Sequence: Synthetic oligonucleotide
uguucugccaacaccucgc

SEQ ID NO: 3226864 - RNA, 19 nt, Artificial Sequence
  Description of Artificial Sequence: Synthetic oligonucleotide
ugcucuagugaaaagcccu

SEQ ID NO: 3226865 - RNA, 19 nt, Artificial Sequence
  Description of Artificial Sequence: Synthetic oligonucleotide
uuguucugccaacaccucg

SEQ ID NO: 3226866 - RNA, 19 nt, Artificial Sequence
  Description of Artificial Sequence: Synthetic oligonucleotide
ugaagacguauuuguagag

SEQ ID NO: 3226867 - RNA, 19 nt, Artificial Sequence
  Description of Artificial Sequence: Synthetic oligonucleotide
agaacgcugguaaaguagc

SEQ ID NO: 3226868 - RNA, 19 nt, Artificial Sequence
  Description of Artificial Sequence: Synthetic oligonucleotide
gagugcaugggaaaagagg

SEQ ID NO: 3226869 - RNA, 19 nt, Artificial Sequence
  Description of Artificial Sequence: Synthetic oligonucleotide
uggagcaaggcacaagcug

SEQ ID NO: 3226870 - RNA, 19 nt, Artificial Sequence
  Description of Artificial Sequence: Synthetic oligonucleotide
ugaagaucuuggagcaagg

SEQ ID NO: 3226871 - RNA, 19 nt, Artificial Sequence
  Description of Artificial Sequence: Synthetic oligonucleotide
ugcaugggaaaagaggucc

SEQ ID NO: 3226872 - RNA, 19 nt, Artificial Sequence
  Description of Artificial Sequence: Synthetic oligonucleotide
aagauaauggcaucccgua

SEQ ID NO: 3226873 - RNA, 19 nt, Artificial Sequence
  Description of Artificial Sequence: Synthetic oligonucleotide
agaucgaugcuaaaagggg

SEQ ID NO: 3226874 - RNA, 19 nt, Artificial Sequence
  Description of Artificial Sequence: Synthetic oligonucleotide
ugggaaaagagguccaaga

SEQ ID NO: 3226875 - RNA, 19 nt, Artificial Sequence
  Description of Artificial Sequence: Synthetic oligonucleotide
uagguuuggaggaugcaca

SEQ ID NO: 3226876 - RNA, 19 nt, Artificial Sequence
  Description of Artificial Sequence: Synthetic oligonucleotide
aacgcugguaaaguagcgg

SEQ ID NO: 3226877 - RNA, 19 nt, Artificial Sequence
  Description of Artificial Sequence: Synthetic oligonucleotide
gauagggccgcuccaaggc

SEQ ID NO: 3226878 - RNA, 19 nt, Artificial Sequence
  Description of Artificial Sequence: Synthetic oligonucleotide
guagcgguagcauuccucc

SEQ ID NO: 3226879 - RNA, 19 nt, Artificial Sequence
  Description of Artificial Sequence: Synthetic oligonucleotide
gucaaagauagguccagcc

SEQ ID NO: 3226880 - RNA, 19 nt, Artificial Sequence
  Description of Artificial Sequence: Synthetic oligonucleotide
auauagguuuggaggaugc

SEQ ID NO: 3226881 - RNA, 19 nt, Artificial Sequence
  Description of Artificial Sequence: Synthetic oligonucleotide
agcauuccuccacauugcc

SEQ ID NO: 3226882 - RNA, 19 nt, Artificial Sequence
  Description of Artificial Sequence: Synthetic oligonucleotide
cacaguuucugguucuucc

SEQ ID NO: 3226883 - RNA, 19 nt, Artificial Sequence
  Description of Artificial Sequence: Synthetic oligonucleotide
aguuccaagagcucagcca

SEQ ID NO: 3226884 - RNA, 19 nt, Artificial Sequence
  Description of Artificial Sequence: Synthetic oligonucleotide
ucugccaaugccagcagcu

SEQ ID NO: 3226885 - RNA, 19 nt, Artificial Sequence
  Description of Artificial Sequence: Synthetic oligonucleotide
cauagucugccaaugccag

SEQ ID NO: 3226886 - RNA, 19 nt, Artificial Sequence
  Description of Artificial Sequence: Synthetic oligonucleotide
ucuagugaaaagcccugcu

SEQ ID NO: 3226887 - RNA, 19 nt, Artificial Sequence
  Description of Artificial Sequence: Synthetic oligonucleotide
agcgguagcauuccuccac

SEQ ID NO: 3226888 - RNA, 19 nt, Artificial Sequence
  Description of Artificial Sequence: Synthetic oligonucleotide
aggacagccaaguuccaag

SEQ ID NO: 3226889 - RNA, 19 nt, Artificial Sequence
  Description of Artificial Sequence: Synthetic oligonucleotide
agcaacacaggccuuguga

SEQ ID NO: 3226890 - RNA, 19 nt, Artificial Sequence
  Description of Artificial Sequence: Synthetic oligonucleotide
gagaacgcugguaaaguag

SEQ ID NO: 3226891 - RNA, 19 nt, Artificial Sequence
  Description of Artificial Sequence: Synthetic oligonucleotide
agaagaugagugcauggga

SEQ ID NO: 3226892 - RNA, 19 nt, Artificial Sequence
  Description of Artificial Sequence: Synthetic oligonucleotide
uguugaucacauagucugc

SEQ ID NO: 3226893 - RNA, 19 nt, Artificial Sequence
  Description of Artificial Sequence: Synthetic oligonucleotide
ugauagggccgcuccaagg

SEQ ID NO: 3226894 - RNA, 19 nt, Artificial Sequence
  Description of Artificial Sequence: Synthetic oligonucleotide
gacgguggcugauagggcc

SEQ ID NO: 3226895 - RNA, 19 nt, Artificial Sequence
  Description of Artificial Sequence: Synthetic oligonucleotide
aagucaaagauagguccag

SEQ ID NO: 3226896 - RNA, 19 nt, Artificial Sequence
  Description of Artificial Sequence: Synthetic oligonucleotide
uuugcugggacgguggcug

SEQ ID NO: 3226897 - RNA, 19 nt, Artificial Sequence
  Description of Artificial Sequence: Synthetic oligonucleotide
ugaaguggcggaaguaggu

SEQ ID NO: 3226898 - RNA, 19 nt, Artificial Sequence
  Description of Artificial Sequence: Synthetic oligonucleotide
aagaugagugcaugggaaa

SEQ ID NO: 3226899 - RNA, 19 nt, Artificial Sequence
  Description of Artificial Sequence: Synthetic oligonucleotide
aaguggcggaaguaggugu

SEQ ID NO: 3226900 - RNA, 19 nt, Artificial Sequence
  Description of Artificial Sequence: Synthetic oligonucleotide
aaagggguagcaacacagg

SEQ ID NO: 3226901 - RNA, 19 nt, Artificial Sequence
  Description of Artificial Sequence: Synthetic oligonucleotide
gaagacguauuuguagagc

SEQ ID NO: 3226902 - RNA, 19 nt, Artificial Sequence
  Description of Artificial Sequence: Synthetic oligonucleotide
agguuuggaggaugcacac

SEQ ID NO: 3226903 - RNA, 19 nt, Artificial Sequence
  Description of Artificial Sequence: Synthetic oligonucleotide
cuugccuuugcugggacgg

SEQ ID NO: 3226904 - RNA, 19 nt, Artificial Sequence
  Description of Artificial Sequence: Synthetic oligonucleotide
uccucuuuaaagagaucga

SEQ ID NO: 3226905 - RNA, 19 nt, Artificial Sequence
  Description of Artificial Sequence: Synthetic oligonucleotide
auagucugccaaugccagc

SEQ ID NO: 3226906 - RNA, 19 nt, Artificial Sequence
  Description of Artificial Sequence: Synthetic oligonucleotide
ugguucuuccuccugugga

SEQ ID NO: 3226907 - RNA, 19 nt, Artificial Sequence
  Description of Artificial Sequence: Synthetic oligonucleotide
cuagugaaaagcccugcug

SEQ ID NO: 3226908 - RNA, 19 nt, Artificial Sequence
  Description of Artificial Sequence: Synthetic oligonucleotide
agggguagcaacacaggcc

SEQ ID NO: 3226909 - RNA, 19 nt, Artificial Sequence
  Description of Artificial Sequence: Synthetic oligonucleotide
ugaugucugcucuagugaa

SEQ ID NO: 3226910 - RNA, 19 nt, Artificial Sequence
  Description of Artificial Sequence: Synthetic oligonucleotide
auagggccgcuccaaggcc

SEQ ID NO: 3226911 - RNA, 19 nt, Artificial Sequence
  Description of Artificial Sequence: Synthetic oligonucleotide
caaagauagguccagccga

SEQ ID NO: 3226912 - RNA, 19 nt, Artificial Sequence
  Description of Artificial Sequence: Synthetic oligonucleotide
cagcuguuccucuuuaaag

SEQ ID NO: 3226913 - RNA, 19 nt, Artificial Sequence
  Description of Artificial Sequence: Synthetic oligonucleotide
gauauagguuuggaggaug

SEQ ID NO: 3226914 - RNA, 19 nt, Artificial Sequence
  Description of Artificial Sequence: Synthetic oligonucleotide
uaggcucugcucaggacag

SEQ ID NO: 3226915 - RNA, 19 nt, Artificial Sequence
  Description of Artificial Sequence: Synthetic oligonucleotide
gaugagugcaugggaaaag

SEQ ID NO: 3226916 - RNA, 19 nt, Artificial Sequence
  Description of Artificial Sequence: Synthetic oligonucleotide
agcccuauguaagucaaag

SEQ ID NO: 3226917 - RNA, 19 nt, Artificial Sequence
  Description of Artificial Sequence: Synthetic oligonucleotide
ucuaauuuauuuaagaucg

SEQ ID NO: 3226918 - RNA, 19 nt, Artificial Sequence
  Description of Artificial Sequence: Synthetic oligonucleotide
guauuuauauuauaguugg

SEQ ID NO: 3226919 - RNA, 19 nt, Artificial Sequence
  Description of Artificial Sequence: Synthetic oligonucleotide
uguauuuauauuauaguug

SEQ ID NO: 3226920 - RNA, 19 nt, Artificial Sequence
  Description of Artificial Sequence: Synthetic oligonucleotide
aaagccaguagcuagcuuc

SEQ ID NO: 3226921 - RNA, 19 nt, Artificial Sequence
  Description of Artificial Sequence: Synthetic oligonucleotide
agaaccaaaggcuaguggc

SEQ ID NO: 3226922 - RNA, 19 nt, Artificial Sequence
  Description of Artificial Sequence: Synthetic oligonucleotide
uguguuugguuccagaagg

SEQ ID NO: 3226923 - RNA, 19 nt, Artificial Sequence
  Description of Artificial Sequence: Synthetic oligonucleotide
auauuuuccauguagaaga

SEQ ID NO: 3226924 - RNA, 19 nt, Artificial Sequence
  Description of Artificial Sequence: Synthetic oligonucleotide
uauauuauaguuggcagcg

SEQ ID NO: 3226925 - RNA, 19 nt, Artificial Sequence
  Description of Artificial Sequence: Synthetic oligonucleotide
auuuauuuaagaucgucuc

SEQ ID NO: 3226926 - RNA, 19 nt, Artificial Sequence
  Description of Artificial Sequence: Synthetic oligonucleotide
uuuuccauguagaagauac

SEQ ID NO: 3226927 - RNA, 19 nt, Artificial Sequence
  Description of Artificial Sequence: Synthetic oligonucleotide
  modified_base (16)..(16): a, c, u, g, unknown or other
uacaaagaaacagacncgg

SEQ ID NO: 3226928 - RNA, 19 nt, Artificial Sequence
  Description of Artificial Sequence: Synthetic oligonucleotide
auguagaagauacggagcc

SEQ ID NO: 3226929 - RNA, 19 nt, Artificial Sequence
  Description of Artificial Sequence: Synthetic oligonucleotide
aaggcuaguggccacauuc

SEQ ID NO: 3226930 - RNA, 19 nt, Artificial Sequence
  Description of Artificial Sequence: Synthetic oligonucleotide
uccugaggaauaaacaugg

SEQ ID NO: 3226931 - RNA, 19 nt, Artificial Sequence
  Description of Artificial Sequence: Synthetic oligonucleotide
aaauacauauuguucugag

SEQ ID NO: 3226932 - RNA, 19 nt, Artificial Sequence
  Description of Artificial Sequence: Synthetic oligonucleotide
ugugaugacacugucauag

SEQ ID NO: 3226933 - RNA, 19 nt, Artificial Sequence
  Description of Artificial Sequence: Synthetic oligonucleotide
aagauacggagccugaaag

SEQ ID NO: 3226934 - RNA, 19 nt, Artificial Sequence
  Description of Artificial Sequence: Synthetic oligonucleotide
uuauacagugucaaguuca

SEQ ID NO: 3226935 - RNA, 19 nt, Artificial Sequence
  Description of Artificial Sequence: Synthetic oligonucleotide
ugagugagaaaacaacucc

SEQ ID NO: 3226936 - RNA, 19 nt, Artificial Sequence
  Description of Artificial Sequence: Synthetic oligonucleotide
ucugagccaaauuauacag

SEQ ID NO: 3226937 - RNA, 19 nt, Artificial Sequence
  Description of Artificial Sequence: Synthetic oligonucleotide
uuacaauuuccaaagagaa

SEQ ID NO: 3226938 - RNA, 19 nt, Artificial Sequence
  Description of Artificial Sequence: Synthetic oligonucleotide
uucuaacacacaaacagug

SEQ ID NO: 3226939 - RNA, 19 nt, Artificial Sequence
  Description of Artificial Sequence: Synthetic oligonucleotide
uucuaauuuauuuaagauc

SEQ ID NO: 3226940 - RNA, 19 nt, Artificial Sequence
  Description of Artificial Sequence: Synthetic oligonucleotide
uuauauuauaguuggcagc

SEQ ID NO: 3226941 - RNA, 19 nt, Artificial Sequence
  Description of Artificial Sequence: Synthetic oligonucleotide
uauguauuuauauuauagu

SEQ ID NO: 3226942 - RNA, 19 nt, Artificial Sequence
  Description of Artificial Sequence: Synthetic oligonucleotide
cugaaagucaugcugacag

SEQ ID NO: 3226943 - RNA, 19 nt, Artificial Sequence
  Description of Artificial Sequence: Synthetic oligonucleotide
ugagccaaauuauacagug

SEQ ID NO: 3226944 - RNA, 19 nt, Artificial Sequence
  Description of Artificial Sequence: Synthetic oligonucleotide
uacagugucaaguucagac

SEQ ID NO: 3226945 - RNA, 19 nt, Artificial Sequence
  Description of Artificial Sequence: Synthetic oligonucleotide
acaacuccuaauccaaagc

SEQ ID NO: 3226946 - RNA, 19 nt, Artificial Sequence
  Description of Artificial Sequence: Synthetic oligonucleotide
aauuuauuuaagaucgucu

SEQ ID NO: 3226947 - RNA, 19 nt, Artificial Sequence
  Description of Artificial Sequence: Synthetic oligonucleotide
aauuauacagugucaaguu

SEQ ID NO: 3226948 - RNA, 19 nt, Artificial Sequence
  Description of Artificial Sequence: Synthetic oligonucleotide
aacaacuccuaauccaaag

SEQ ID NO: 3226949 - RNA, 19 nt, Artificial Sequence
  Description of Artificial Sequence: Synthetic oligonucleotide
uuuaagaucgucuccuuac

SEQ ID NO: 3226950 - RNA, 19 nt, Artificial Sequence
  Description of Artificial Sequence: Synthetic oligonucleotide
gagaaaacaacuccuaauc

SEQ ID NO: 3226951 - RNA, 19 nt, Artificial Sequence
  Description of Artificial Sequence: Synthetic oligonucleotide
aguagcuagcuucaccacc

SEQ ID NO: 3226952 - RNA, 19 nt, Artificial Sequence
  Description of Artificial Sequence: Synthetic oligonucleotide
  modified_base (8)..(8): a, c, u, g, unknown or other
aacagacncgguuucuaac

SEQ ID NO: 3226953 - RNA, 19 nt, Artificial Sequence
  Description of Artificial Sequence: Synthetic oligonucleotide
gaaaacaacuccuaaucca

SEQ ID NO: 3226954 - RNA, 19 nt, Artificial Sequence
  Description of Artificial Sequence: Synthetic oligonucleotide
acuguauguauuuauauua

SEQ ID NO: 3226955 - RNA, 19 nt, Artificial Sequence
  Description of Artificial Sequence: Synthetic oligonucleotide
auuauacagugucaaguuc

SEQ ID NO: 3226956 - RNA, 19 nt, Artificial Sequence
  Description of Artificial Sequence: Synthetic oligonucleotide
cuaacacacaaacaguggc

SEQ ID NO: 3226957 - RNA, 19 nt, Artificial Sequence
  Description of Artificial Sequence: Synthetic oligonucleotide
acugucauaggaucucagc

SEQ ID NO: 3226958 - RNA, 19 nt, Artificial Sequence
  Description of Artificial Sequence: Synthetic oligonucleotide
acaaacaguggcuggaguc

SEQ ID NO: 3226959 - RNA, 19 nt, Artificial Sequence
  Description of Artificial Sequence: Synthetic oligonucleotide
uauuauaguuggcagcgca

SEQ ID NO: 3226960 - RNA, 19 nt, Artificial Sequence
  Description of Artificial Sequence: Synthetic oligonucleotide
acuucaguauuccugagga

SEQ ID NO: 3226961 - RNA, 19 nt, Artificial Sequence
  Description of Artificial Sequence: Synthetic oligonucleotide
uuauuuaagaucgucuccu

SEQ ID NO: 3226962 - RNA, 19 nt, Artificial Sequence
  Description of Artificial Sequence: Synthetic oligonucleotide
uuuuaaagaaggugaguga

SEQ ID NO: 3226963 - RNA, 19 nt, Artificial Sequence
  Description of Artificial Sequence: Synthetic oligonucleotide
ccaaagagaaaauacaaag

SEQ ID NO: 3226964 - RNA, 19 nt, Artificial Sequence
  Description of Artificial Sequence: Synthetic oligonucleotide
uucucuuuccucccgcugg

SEQ ID NO: 3226965 - RNA, 19 nt, Artificial Sequence
  Description of Artificial Sequence: Synthetic oligonucleotide
uaauccaaagccaguagcu

SEQ ID NO: 3226966 - RNA, 19 nt, Artificial Sequence
  Description of Artificial Sequence: Synthetic oligonucleotide
auuguucugagccaaauua

SEQ ID NO: 3226967 - RNA, 19 nt, Artificial Sequence
  Description of Artificial Sequence: Synthetic oligonucleotide
cuuacaauuuccaaagaga

SEQ ID NO: 3226968 - RNA, 19 nt, Artificial Sequence
  Description of Artificial Sequence: Synthetic oligonucleotide
uuucuaacacacaaacagu

SEQ ID NO: 3226969 - RNA, 19 nt, Artificial Sequence
  Description of Artificial Sequence: Synthetic oligonucleotide
cuaauccaaagccaguagc

SEQ ID NO: 3226970 - RNA, 19 nt, Artificial Sequence
  Description of Artificial Sequence: Synthetic oligonucleotide
aauuccgacuccgacaugu

SEQ ID NO: 3226971 - RNA, 19 nt, Artificial Sequence
  Description of Artificial Sequence: Synthetic oligonucleotide
caacuccuaauccaaagcc

SEQ ID NO: 3226972 - RNA, 19 nt, Artificial Sequence
  Description of Artificial Sequence: Synthetic oligonucleotide
uccaaagagaaaauacaaa

SEQ ID NO: 3226973 - RNA, 19 nt, Artificial Sequence
  Description of Artificial Sequence: Synthetic oligonucleotide
uccgacuccgacauguucc

SEQ ID NO: 3226974 - RNA, 19 nt, Artificial Sequence
  Description of Artificial Sequence: Synthetic oligonucleotide
cauauuuuccauguagaag

SEQ ID NO: 3226975 - RNA, 19 nt, Artificial Sequence
  Description of Artificial Sequence: Synthetic oligonucleotide
aacuccagagcuccucacg

SEQ ID NO: 3226976 - RNA, 19 nt, Artificial Sequence
  Description of Artificial Sequence: Synthetic oligonucleotide
auaggaucucagcacacuc

SEQ ID NO: 3226977 - RNA, 19 nt, Artificial Sequence
  Description of Artificial Sequence: Synthetic oligonucleotide
uuguguuugguuccagaag

SEQ ID NO: 3226978 - RNA, 19 nt, Artificial Sequence
  Description of Artificial Sequence: Synthetic oligonucleotide
uaagucacugcucuuugac

SEQ ID NO: 3226979 - RNA, 19 nt, Artificial Sequence
  Description of Artificial Sequence: Synthetic oligonucleotide
  modified_base (7)..(7): a, c, u, g, unknown or other
acagacncgguuucuaaca

SEQ ID NO: 3226980 - RNA, 19 nt, Artificial Sequence
  Description of Artificial Sequence: Synthetic oligonucleotide
uuuccauguagaagauacg

SEQ ID NO: 3226981 - RNA, 19 nt, Artificial Sequence
  Description of Artificial Sequence: Synthetic oligonucleotide
ugagaaaacaacuccuaau

SEQ ID NO: 3226982 - RNA, 19 nt, Artificial Sequence
  Description of Artificial Sequence: Synthetic oligonucleotide
guauccugugcccagcugg

SEQ ID NO: 3226983 - RNA, 19 nt, Artificial Sequence
  Description of Artificial Sequence: Synthetic oligonucleotide
uuauaguuggcagcgcagg

SEQ ID NO: 3226984 - RNA, 19 nt, Artificial Sequence
  Description of Artificial Sequence: Synthetic oligonucleotide
ugcccuaguauccugugcc

SEQ ID NO: 3226985 - RNA, 19 nt, Artificial Sequence
  Description of Artificial Sequence: Synthetic oligonucleotide
uuaaagaaggugagugaga

SEQ ID NO: 3226986 - RNA, 19 nt, Artificial Sequence
  Description of Artificial Sequence: Synthetic oligonucleotide
uauuuauauuauaguuggc

SEQ ID NO: 3226987 - RNA, 19 nt, Artificial Sequence
  Description of Artificial Sequence: Synthetic oligonucleotide
uucugagccaaauuauaca

SEQ ID NO: 3226988 - RNA, 19 nt, Artificial Sequence
  Description of Artificial Sequence: Synthetic oligonucleotide
aacacacaaacaguggcug

SEQ ID NO: 3226989 - RNA, 19 nt, Artificial Sequence
  Description of Artificial Sequence: Synthetic oligonucleotide
ugucauaggaucucagcac

SEQ ID NO: 3226990 - RNA, 19 nt, Artificial Sequence
  Description of Artificial Sequence: Synthetic oligonucleotide
caaagagaaaauacaaaga

SEQ ID NO: 3226991 - RNA, 19 nt, Artificial Sequence
  Description of Artificial Sequence: Synthetic oligonucleotide
aguaggccauccccaaucc

SEQ ID NO: 3226992 - RNA, 19 nt, Artificial Sequence
  Description of Artificial Sequence: Synthetic oligonucleotide
aacaugguuucucuuuccu

SEQ ID NO: 3226993 - RNA, 19 nt, Artificial Sequence
  Description of Artificial Sequence: Synthetic oligonucleotide
uaaagaaggugagugagaa

SEQ ID NO: 3226994 - RNA, 19 nt, Artificial Sequence
  Description of Artificial Sequence: Synthetic oligonucleotide
auaaacaugguuucucuuu

SEQ ID NO: 3226995 - RNA, 19 nt, Artificial Sequence
  Description of Artificial Sequence: Synthetic oligonucleotide
aauuccuuuguguuugguu

SEQ ID NO: 3226996 - RNA, 19 nt, Artificial Sequence
  Description of Artificial Sequence: Synthetic oligonucleotide
aaaacaacuccuaauccaa

SEQ ID NO: 3226997 - RNA, 19 nt, Artificial Sequence
  Description of Artificial Sequence: Synthetic oligonucleotide
ugaugacacugucauagga

SEQ ID NO: 3226998 - RNA, 19 nt, Artificial Sequence
  Description of Artificial Sequence: Synthetic oligonucleotide
aauaaacaugguuucucuu

SEQ ID NO: 3226999 - RNA, 19 nt, Artificial Sequence
  Description of Artificial Sequence: Synthetic oligonucleotide
uuaagaucgucuccuuaca

SEQ ID NO: 3227000 - RNA, 19 nt, Artificial Sequence
  Description of Artificial Sequence: Synthetic oligonucleotide
uaauuuauuuaagaucguc

SEQ ID NO: 3227001 - RNA, 19 nt, Artificial Sequence
  Description of Artificial Sequence: Synthetic oligonucleotide
gaaagcguugugaugacac

SEQ ID NO: 3227002 - RNA, 19 nt, Artificial Sequence
  Description of Artificial Sequence: Synthetic oligonucleotide
gacuccgacauguuccccg

SEQ ID NO: 3227003 - RNA, 19 nt, Artificial Sequence
  Description of Artificial Sequence: Synthetic oligonucleotide
aagaucgucuccuuacaau

SEQ ID NO: 3227004 - RNA, 19 nt, Artificial Sequence
  Description of Artificial Sequence: Synthetic oligonucleotide
acuccagagcuccucacgg

SEQ ID NO: 3227005 - RNA, 19 nt, Artificial Sequence
  Description of Artificial Sequence: Synthetic oligonucleotide
aucgucuccuuacaauuuc

SEQ ID NO: 3227006 - RNA, 19 nt, Artificial Sequence
  Description of Artificial Sequence: Synthetic oligonucleotide
uauaguuggcagcgcaggc

SEQ ID NO: 3227007 - RNA, 19 nt, Artificial Sequence
  Description of Artificial Sequence: Synthetic oligonucleotide
  modified_base (17)..(17): a, c, u, g, unknown or other
auacaaagaaacagacncg

SEQ ID NO: 3227008 - RNA, 19 nt, Artificial Sequence
  Description of Artificial Sequence: Synthetic oligonucleotide
auaguuggcagcgcaggcc

SEQ ID NO: 3227009 - RNA, 19 nt, Artificial Sequence
  Description of Artificial Sequence: Synthetic oligonucleotide
ucccauuucuaauuuauuu

SEQ ID NO: 3227010 - RNA, 19 nt, Artificial Sequence
  Description of Artificial Sequence: Synthetic oligonucleotide
uaggaucucagcacacucc

SEQ ID NO: 3227011 - RNA, 19 nt, Artificial Sequence
  Description of Artificial Sequence: Synthetic oligonucleotide
uccaaagccaguagcuagc

SEQ ID NO: 3227012 - RNA, 19 nt, Artificial Sequence
  Description of Artificial Sequence: Synthetic oligonucleotide
acagcuuuugcccuaguau

SEQ ID NO: 3227013 - RNA, 19 nt, Artificial Sequence
  Description of Artificial Sequence: Synthetic oligonucleotide
guagcuagcuucaccaccg

SEQ ID NO: 3227014 - RNA, 19 nt, Artificial Sequence
  Description of Artificial Sequence: Synthetic oligonucleotide
aaguucagacuguauguau

SEQ ID NO: 3227015 - RNA, 19 nt, Artificial Sequence
  Description of Artificial Sequence: Synthetic oligonucleotide
uccgacauguuccccgccg

SEQ ID NO: 3227016 - RNA, 19 nt, Artificial Sequence
  Description of Artificial Sequence: Synthetic oligonucleotide
  modified_base (4)..(4): a, c, u, g, unknown or other
gacncgguuucuaacacac

SEQ ID NO: 3227017 - RNA, 19 nt, Artificial Sequence
  Description of Artificial Sequence: Synthetic oligonucleotide
uuagaaauaacaaugagau

SEQ ID NO: 3227018 - RNA, 19 nt, Artificial Sequence
  Description of Artificial Sequence: Synthetic oligonucleotide
aaauacaugaaucugggcu

SEQ ID NO: 3227019 - RNA, 19 nt, Artificial Sequence
  Description of Artificial Sequence: Synthetic oligonucleotide
uugaaaauuauucagcuga

SEQ ID NO: 3227020 - RNA, 19 nt, Artificial Sequence
  Description of Artificial Sequence: Synthetic oligonucleotide
uuauguuuaaauauuuucc

SEQ ID NO: 3227021 - RNA, 19 nt, Artificial Sequence
  Description of Artificial Sequence: Synthetic oligonucleotide
aagaucaucuuuuguacgc

SEQ ID NO: 3227022 - RNA, 19 nt, Artificial Sequence
  Description of Artificial Sequence: Synthetic oligonucleotide
aauaagaggagguaaagaa

SEQ ID NO: 3227023 - RNA, 19 nt, Artificial Sequence
  Description of Artificial Sequence: Synthetic oligonucleotide
uuuauuaaaccucuuuuga

SEQ ID NO: 3227024 - RNA, 19 nt, Artificial Sequence
  Description of Artificial Sequence: Synthetic oligonucleotide
aacucuacaguucugucag

SEQ ID NO: 3227025 - RNA, 19 nt, Artificial Sequence
  Description of Artificial Sequence: Synthetic oligonucleotide
uauggaaaaugacacaagc

SEQ ID NO: 3227026 - RNA, 19 nt, Artificial Sequence
  Description of Artificial Sequence: Synthetic oligonucleotide
aggggauuuaaauuuagac

SEQ ID NO: 3227027 - RNA, 19 nt, Artificial Sequence
  Description of Artificial Sequence: Synthetic oligonucleotide
ucuuuugaaaauauauucu

SEQ ID NO: 3227028 - RNA, 19 nt, Artificial Sequence
  Description of Artificial Sequence: Synthetic oligonucleotide
guuguugaaaauuauucag

SEQ ID NO: 3227029 - RNA, 19 nt, Artificial Sequence
  Description of Artificial Sequence: Synthetic oligonucleotide
uaagaggagguaaagaacu

SEQ ID NO: 3227030 - RNA, 19 nt, Artificial Sequence
  Description of Artificial Sequence: Synthetic oligonucleotide
ugugaaaucaguauuucau

SEQ ID NO: 3227031 - RNA, 19 nt, Artificial Sequence
  Description of Artificial Sequence: Synthetic oligonucleotide
uguguuucugguaauaggu

SEQ ID NO: 3227032 - RNA, 19 nt, Artificial Sequence
  Description of Artificial Sequence: Synthetic oligonucleotide
auaguagagaaucuuaaga

SEQ ID NO: 3227033 - RNA, 19 nt, Artificial Sequence
  Description of Artificial Sequence: Synthetic oligonucleotide
uuucugucgauucagcuca

SEQ ID NO: 3227034 - RNA, 19 nt, Artificial Sequence
  Description of Artificial Sequence: Synthetic oligonucleotide
ugucaaugcacuuugguac

SEQ ID NO: 3227035 - RNA, 19 nt, Artificial Sequence
  Description of Artificial Sequence: Synthetic oligonucleotide
aaugcuuauggaaaaugac

SEQ ID NO: 3227036 - RNA, 19 nt, Artificial Sequence
  Description of Artificial Sequence: Synthetic oligonucleotide
aauagccucauauuucuca

SEQ ID NO: 3227037 - RNA, 19 nt, Artificial Sequence
  Description of Artificial Sequence: Synthetic oligonucleotide
aacuguuuuauacuugacu

SEQ ID NO: 3227038 - RNA, 19 nt, Artificial Sequence
  Description of Artificial Sequence: Synthetic oligonucleotide
uguuccuuuauugagaacu

SEQ ID NO: 3227039 - RNA, 19 nt, Artificial Sequence
  Description of Artificial Sequence: Synthetic oligonucleotide
uauacuuuccaacuccuga

SEQ ID NO: 3227040 - RNA, 19 nt, Artificial Sequence
  Description of Artificial Sequence: Synthetic oligonucleotide
uguugaaaauuauucagcu

SEQ ID NO: 3227041 - RNA, 19 nt, Artificial Sequence
  Description of Artificial Sequence: Synthetic oligonucleotide
uaucccugugccaaaaggg

SEQ ID NO: 3227042 - RNA, 19 nt, Artificial Sequence
  Description of Artificial Sequence: Synthetic oligonucleotide
uguaaucacacugagcugc

SEQ ID NO: 3227043 - RNA, 19 nt, Artificial Sequence
  Description of Artificial Sequence: Synthetic oligonucleotide
gacucuaacuguuuuauac

SEQ ID NO: 3227044 - RNA, 19 nt, Artificial Sequence
  Description of Artificial Sequence: Synthetic oligonucleotide
agguaaagaacuuuguuca

SEQ ID NO: 3227045 - RNA, 19 nt, Artificial Sequence
  Description of Artificial Sequence: Synthetic oligonucleotide
gacacauugaugaaggcag

SEQ ID NO: 3227046 - RNA, 19 nt, Artificial Sequence
  Description of Artificial Sequence: Synthetic oligonucleotide
ucguuuucagugaugacag

SEQ ID NO: 3227047 - RNA, 19 nt, Artificial Sequence
  Description of Artificial Sequence: Synthetic oligonucleotide
aggaauaucauucauuuua

SEQ ID NO: 3227048 - RNA, 19 nt, Artificial Sequence
  Description of Artificial Sequence: Synthetic oligonucleotide
uucuguuuuccaauaaccc

SEQ ID NO: 3227049 - RNA, 19 nt, Artificial Sequence
  Description of Artificial Sequence: Synthetic oligonucleotide
aaaugacacaagcuuucac

SEQ ID NO: 3227050 - RNA, 19 nt, Artificial Sequence
  Description of Artificial Sequence: Synthetic oligonucleotide
acuuacaggaagcugucac

SEQ ID NO: 3227051 - RNA, 19 nt, Artificial Sequence
  Description of Artificial Sequence: Synthetic oligonucleotide
aguaagucggauucugugg

SEQ ID NO: 3227052 - RNA, 19 nt, Artificial Sequence
  Description of Artificial Sequence: Synthetic oligonucleotide
cuuagaaauaacaaugaga

SEQ ID NO: 3227053 - RNA, 19 nt, Artificial Sequence
  Description of Artificial Sequence: Synthetic oligonucleotide
ucugguaauaggucaauug

SEQ ID NO: 3227054 - RNA, 19 nt, Artificial Sequence
  Description of Artificial Sequence: Synthetic oligonucleotide
ugcacuuugguacaacagc

SEQ ID NO: 3227055 - RNA, 19 nt, Artificial Sequence
  Description of Artificial Sequence: Synthetic oligonucleotide
guguaugaaauuucugucg

SEQ ID NO: 3227056 - RNA, 19 nt, Artificial Sequence
  Description of Artificial Sequence: Synthetic oligonucleotide
auuucugucgauucagcuc

SEQ ID NO: 3227057 - RNA, 19 nt, Artificial Sequence
  Description of Artificial Sequence: Synthetic oligonucleotide
gaagaucaucuuuuguacg

SEQ ID NO: 3227058 - RNA, 19 nt, Artificial Sequence
  Description of Artificial Sequence: Synthetic oligonucleotide
uauuagaguucauaguaga

SEQ ID NO: 3227059 - RNA, 19 nt, Artificial Sequence
  Description of Artificial Sequence: Synthetic oligonucleotide
uaauaggucaauugucugc

SEQ ID NO: 3227060 - RNA, 19 nt, Artificial Sequence
  Description of Artificial Sequence: Synthetic oligonucleotide
cuucugaagaauuaauuuc

SEQ ID NO: 3227061 - RNA, 19 nt, Artificial Sequence
  Description of Artificial Sequence: Synthetic oligonucleotide
uuucaugagaacgugauau

SEQ ID NO: 3227062 - RNA, 19 nt, Artificial Sequence
  Description of Artificial Sequence: Synthetic oligonucleotide
cagaauuaacuuuucauuc

SEQ ID NO: 3227063 - RNA, 19 nt, Artificial Sequence
  Description of Artificial Sequence: Synthetic oligonucleotide
uugcuuuucaacagcaucu

SEQ ID NO: 3227064 - RNA, 19 nt, Artificial Sequence
  Description of Artificial Sequence: Synthetic oligonucleotide
uuguaguuucaucucaccc

SEQ ID NO: 3227065 - RNA, 19 nt, Artificial Sequence
  Description of Artificial Sequence: Synthetic oligonucleotide
uacucaacaauaagaggag

SEQ ID NO: 3227066 - RNA, 19 nt, Artificial Sequence
  Description of Artificial Sequence: Synthetic oligonucleotide
ucucaacugaacuucaaac

SEQ ID NO: 3227067 - RNA, 19 nt, Artificial Sequence
  Description of Artificial Sequence: Synthetic oligonucleotide
ugguuagucauuucuaugu

SEQ ID NO: 3227068 - RNA, 19 nt, Artificial Sequence
  Description of Artificial Sequence: Synthetic oligonucleotide
cuuuucauuugccauuucc

SEQ ID NO: 3227069 - RNA, 19 nt, Artificial Sequence
  Description of Artificial Sequence: Synthetic oligonucleotide
cauacucaacaauaagagg

SEQ ID NO: 3227070 - RNA, 19 nt, Artificial Sequence
  Description of Artificial Sequence: Synthetic oligonucleotide
agaauuaacuuuucauucu

SEQ ID NO: 3227071 - RNA, 19 nt, Artificial Sequence
  Description of Artificial Sequence: Synthetic oligonucleotide
aaauuuagacacauugaug

SEQ ID NO: 3227072 - RNA, 19 nt, Artificial Sequence
  Description of Artificial Sequence: Synthetic oligonucleotide
guuguuuuauucuauuuuc

SEQ ID NO: 3227073 - RNA, 19 nt, Artificial Sequence
  Description of Artificial Sequence: Synthetic oligonucleotide
uauugagaacugaugcucc

SEQ ID NO: 3227074 - RNA, 19 nt, Artificial Sequence
  Description of Artificial Sequence: Synthetic oligonucleotide
aauaggucaauugucugcu

SEQ ID NO: 3227075 - RNA, 19 nt, Artificial Sequence
  Description of Artificial Sequence: Synthetic oligonucleotide
acuuuguucaucuguggag

SEQ ID NO: 3227076 - RNA, 19 nt, Artificial Sequence
  Description of Artificial Sequence: Synthetic oligonucleotide
ucuggcucuugaaauagcc

SEQ ID NO: 3227077 - RNA, 19 nt, Artificial Sequence
  Description of Artificial Sequence: Synthetic oligonucleotide
gacuuagacgucuuugaag

SEQ ID NO: 3227078 - RNA, 19 nt, Artificial Sequence
  Description of Artificial Sequence: Synthetic oligonucleotide
auuguacugaccuuuaauu

SEQ ID NO: 3227079 - RNA, 19 nt, Artificial Sequence
  Description of Artificial Sequence: Synthetic oligonucleotide
uuacuuaaaauuacauaau

SEQ ID NO: 3227080 - RNA, 19 nt, Artificial Sequence
  Description of Artificial Sequence: Synthetic oligonucleotide
uuugguacaacagcuuucc

SEQ ID NO: 3227081 - RNA, 19 nt, Artificial Sequence
  Description of Artificial Sequence: Synthetic oligonucleotide
uuaccgauuccucgcaggg

SEQ ID NO: 3227082 - RNA, 19 nt, Artificial Sequence
  Description of Artificial Sequence: Synthetic oligonucleotide
ucuuuggugcauuucuucc

SEQ ID NO: 3227083 - RNA, 19 nt, Artificial Sequence
  Description of Artificial Sequence: Synthetic oligonucleotide
uuacuaguacaucaccucu

SEQ ID NO: 3227084 - RNA, 19 nt, Artificial Sequence
  Description of Artificial Sequence: Synthetic oligonucleotide
uuuaccgauuccucgcagg

SEQ ID NO: 3227085 - RNA, 19 nt, Artificial Sequence
  Description of Artificial Sequence: Synthetic oligonucleotide
uuugcuugcagcucuuuga

SEQ ID NO: 3227086 - RNA, 19 nt, Artificial Sequence
  Description of Artificial Sequence: Synthetic oligonucleotide
uuuugugcuuucaacuucu

SEQ ID NO: 3227087 - RNA, 19 nt, Artificial Sequence
  Description of Artificial Sequence: Synthetic oligonucleotide
uggaauuccgauuacuguc

SEQ ID NO: 3227088 - RNA, 19 nt, Artificial Sequence
  Description of Artificial Sequence: Synthetic oligonucleotide
auacuuuccaacuccugag

SEQ ID NO: 3227089 - RNA, 19 nt, Artificial Sequence
  Description of Artificial Sequence: Synthetic oligonucleotide
auaagaggagguaaagaac

SEQ ID NO: 3227090 - RNA, 19 nt, Artificial Sequence
  Description of Artificial Sequence: Synthetic oligonucleotide
ucuuaaauccucagucucu

SEQ ID NO: 3227091 - RNA, 19 nt, Artificial Sequence
  Description of Artificial Sequence: Synthetic oligonucleotide
uucuuaaauccucagucuc

SEQ ID NO: 3227092 - RNA, 19 nt, Artificial Sequence
  Description of Artificial Sequence: Synthetic oligonucleotide
uuaguuaacucuuccacuu

SEQ ID NO: 3227093 - RNA, 19 nt, Artificial Sequence
  Description of Artificial Sequence: Synthetic oligonucleotide
gagauauuaaaucuccaaa

SEQ ID NO: 3227094 - RNA, 19 nt, Artificial Sequence
  Description of Artificial Sequence: Synthetic oligonucleotide
ucgauauuuuaguuuggag

SEQ ID NO: 3227095 - RNA, 19 nt, Artificial Sequence
  Description of Artificial Sequence: Synthetic oligonucleotide
ucaauugucugcuuagcuc

SEQ ID NO: 3227096 - RNA, 19 nt, Artificial Sequence
  Description of Artificial Sequence: Synthetic oligonucleotide
ggaucauuucaugagaacg

SEQ ID NO: 3227097 - RNA, 19 nt, Artificial Sequence
  Description of Artificial Sequence: Synthetic oligonucleotide
uuagcugaagaucaucuuu

SEQ ID NO: 3227098 - RNA, 19 nt, Artificial Sequence
  Description of Artificial Sequence: Synthetic oligonucleotide
uauuauauuagaguucaua

SEQ ID NO: 3227099 - RNA, 19 nt, Artificial Sequence
  Description of Artificial Sequence: Synthetic oligonucleotide
uuuucguuacugcaacucu

SEQ ID NO: 3227100 - RNA, 19 nt, Artificial Sequence
  Description of Artificial Sequence: Synthetic oligonucleotide
uucauucucaacuaccuuu

SEQ ID NO: 3227101 - RNA, 19 nt, Artificial Sequence
  Description of Artificial Sequence: Synthetic oligonucleotide
aaguauaagauuauauaua

SEQ ID NO: 3227102 - RNA, 19 nt, Artificial Sequence
  Description of Artificial Sequence: Synthetic oligonucleotide
cugaaucucaaguauaaga

SEQ ID NO: 3227103 - RNA, 19 nt, Artificial Sequence
  Description of Artificial Sequence: Synthetic oligonucleotide
caagcuuucuccugauugg

SEQ ID NO: 3227104 - RNA, 19 nt, Artificial Sequence
  Description of Artificial Sequence: Synthetic oligonucleotide
aaagccacaguuuucccuu

SEQ ID NO: 3227105 - RNA, 19 nt, Artificial Sequence
  Description of Artificial Sequence: Synthetic oligonucleotide
aagcuuucuccugauuggc

SEQ ID NO: 3227106 - RNA, 19 nt, Artificial Sequence
  Description of Artificial Sequence: Synthetic oligonucleotide
uaucacgugggucucucag

SEQ ID NO: 3227107 - RNA, 19 nt, Artificial Sequence
  Description of Artificial Sequence: Synthetic oligonucleotide
auccuuuugcuuuugauuu

SEQ ID NO: 3227108 - RNA, 19 nt, Artificial Sequence
  Description of Artificial Sequence: Synthetic oligonucleotide
uucagcucacucuuuagac

SEQ ID NO: 3227109 - RNA, 19 nt, Artificial Sequence
  Description of Artificial Sequence: Synthetic oligonucleotide
uucaccauucucugcaggc

SEQ ID NO: 3227110 - RNA, 19 nt, Artificial Sequence
  Description of Artificial Sequence: Synthetic oligonucleotide
gaacuuuguucaucugugg

SEQ ID NO: 3227111 - RNA, 19 nt, Artificial Sequence
  Description of Artificial Sequence: Synthetic oligonucleotide
gaagaauuaauuucaaguu

SEQ ID NO: 3227112 - RNA, 19 nt, Artificial Sequence
  Description of Artificial Sequence: Synthetic oligonucleotide
ugaagcagcucucucuucu

SEQ ID NO: 3227113 - RNA, 19 nt, Artificial Sequence
  Description of Artificial Sequence: Synthetic oligonucleotide
ucaaucuccauacuuuguu

SEQ ID NO: 3227114 - RNA, 19 nt, Artificial Sequence
  Description of Artificial Sequence: Synthetic oligonucleotide
guugaaaauuauucagcug

SEQ ID NO: 3227115 - RNA, 19 nt, Artificial Sequence
  Description of Artificial Sequence: Synthetic oligonucleotide
uacaacagcuuucccaacu

SEQ ID NO: 3227116 - RNA, 19 nt, Artificial Sequence
  Description of Artificial Sequence: Synthetic oligonucleotide
gauauaauaucuucauccu

SEQ ID NO: 3227117 - RNA, 19 nt, Artificial Sequence
  Description of Artificial Sequence: Synthetic oligonucleotide
aaacuuauuauucaagagg

SEQ ID NO: 3227118 - RNA, 19 nt, Artificial Sequence
  Description of Artificial Sequence: Synthetic oligonucleotide
aaaucugaaaauuuauuuc

SEQ ID NO: 3227119 - RNA, 19 nt, Artificial Sequence
  Description of Artificial Sequence: Synthetic oligonucleotide
auacuuuuaaccuaagaac

SEQ ID NO: 3227120 - RNA, 19 nt, Artificial Sequence
  Description of Artificial Sequence: Synthetic oligonucleotide
uuaauuauagcacaguuaa

SEQ ID NO: 3227121 - RNA, 19 nt, Artificial Sequence
  Description of Artificial Sequence: Synthetic oligonucleotide
aauaucaacaaacuuauua

SEQ ID NO: 3227122 - RNA, 19 nt, Artificial Sequence
  Description of Artificial Sequence: Synthetic oligonucleotide
aguuuaacaauaaagcugc

SEQ ID NO: 3227123 - RNA, 19 nt, Artificial Sequence
  Description of Artificial Sequence: Synthetic oligonucleotide
uguauuacaagauaauaca

SEQ ID NO: 3227124 - RNA, 19 nt, Artificial Sequence
  Description of Artificial Sequence: Synthetic oligonucleotide
aacuuauuauucaagaggg

SEQ ID NO: 3227125 - RNA, 19 nt, Artificial Sequence
  Description of Artificial Sequence: Synthetic oligonucleotide
aauuaccugauguggauac

SEQ ID NO: 3227126 - RNA, 19 nt, Artificial Sequence
  Description of Artificial Sequence: Synthetic oligonucleotide
auugcaagcaauccaauac

SEQ ID NO: 3227127 - RNA, 19 nt, Artificial Sequence
  Description of Artificial Sequence: Synthetic oligonucleotide
uggacuuuaaauauuuuag

SEQ ID NO: 3227128 - RNA, 19 nt, Artificial Sequence
  Description of Artificial Sequence: Synthetic oligonucleotide
agaagauccaggcaggacc

SEQ ID NO: 3227129 - RNA, 19 nt, Artificial Sequence
  Description of Artificial Sequence: Synthetic oligonucleotide
uaaucuacuaagcagaaaa

SEQ ID NO: 3227130 - RNA, 19 nt, Artificial Sequence
  Description of Artificial Sequence: Synthetic oligonucleotide
cuauccaucaaguagguag

SEQ ID NO: 3227131 - RNA, 19 nt, Artificial Sequence
  Description of Artificial Sequence: Synthetic oligonucleotide
uguaugaacacacuuaauc

SEQ ID NO: 3227132 - RNA, 19 nt, Artificial Sequence
  Description of Artificial Sequence: Synthetic oligonucleotide
aauaacgguauauacagaa

SEQ ID NO: 3227133 - RNA, 19 nt, Artificial Sequence
  Description of Artificial Sequence: Synthetic oligonucleotide
aagauaaauaaaguuggac

SEQ ID NO: 3227134 - RNA, 19 nt, Artificial Sequence
  Description of Artificial Sequence: Synthetic oligonucleotide
uuuuacaauuaccugaugu

SEQ ID NO: 3227135 - RNA, 19 nt, Artificial Sequence
  Description of Artificial Sequence: Synthetic oligonucleotide
acuuaauccccacaggagc

SEQ ID NO: 3227136 - RNA, 19 nt, Artificial Sequence
  Description of Artificial Sequence: Synthetic oligonucleotide
aaugucgagaaauaacaug

SEQ ID NO: 3227137 - RNA, 19 nt, Artificial Sequence
  Description of Artificial Sequence: Synthetic oligonucleotide
cuuacauguaugaaugucg

SEQ ID NO: 3227138 - RNA, 19 nt, Artificial Sequence
  Description of Artificial Sequence: Synthetic oligonucleotide
uauacauaaguucacaaua

SEQ ID NO: 3227139 - RNA, 19 nt, Artificial Sequence
  Description of Artificial Sequence: Synthetic oligonucleotide
ugucuuacauguaugaaug

SEQ ID NO: 3227140 - RNA, 19 nt, Artificial Sequence
  Description of Artificial Sequence: Synthetic oligonucleotide
guauauacagaauucacug

SEQ ID NO: 3227141 - RNA, 19 nt, Artificial Sequence
  Description of Artificial Sequence: Synthetic oligonucleotide
uguuguaaagggauguggg

SEQ ID NO: 3227142 - RNA, 19 nt, Artificial Sequence
  Description of Artificial Sequence: Synthetic oligonucleotide
uuauuauucaagaggggag

SEQ ID NO: 3227143 - RNA, 19 nt, Artificial Sequence
  Description of Artificial Sequence: Synthetic oligonucleotide
ucuauuaauuauagcacag

SEQ ID NO: 3227144 - RNA, 19 nt, Artificial Sequence
  Description of Artificial Sequence: Synthetic oligonucleotide
auuuugaacacuuggaaga

SEQ ID NO: 3227145 - RNA, 19 nt, Artificial Sequence
  Description of Artificial Sequence: Synthetic oligonucleotide
aaauauuuuagaaucuuug

SEQ ID NO: 3227146 - RNA, 19 nt, Artificial Sequence
  Description of Artificial Sequence: Synthetic oligonucleotide
cuuuaaaucacaaguaauc

SEQ ID NO: 3227147 - RNA, 19 nt, Artificial Sequence
  Description of Artificial Sequence: Synthetic oligonucleotide
acugcuuaacauuacauug

SEQ ID NO: 3227148 - RNA, 19 nt, Artificial Sequence
  Description of Artificial Sequence: Synthetic oligonucleotide
cuauuuaaacuacagcagg

SEQ ID NO: 3227149 - RNA, 19 nt, Artificial Sequence
  Description of Artificial Sequence: Synthetic oligonucleotide
auguauuacaagauaauac

SEQ ID NO: 3227150 - RNA, 19 nt, Artificial Sequence
  Description of Artificial Sequence: Synthetic oligonucleotide
acuaauauacauaaguuca

SEQ ID NO: 3227151 - RNA, 19 nt, Artificial Sequence
  Description of Artificial Sequence: Synthetic oligonucleotide
agacauuuugaacacuugg

SEQ ID NO: 3227152 - RNA, 19 nt, Artificial Sequence
  Description of Artificial Sequence: Synthetic oligonucleotide
uuacaauuaccugaugugg

SEQ ID NO: 3227153 - RNA, 19 nt, Artificial Sequence
  Description of Artificial Sequence: Synthetic oligonucleotide
cuaaggauggcuaaucuac

SEQ ID NO: 3227154 - RNA, 19 nt, Artificial Sequence
  Description of Artificial Sequence: Synthetic oligonucleotide
ucaacaaacuuauuauuca

SEQ ID NO: 3227155 - RNA, 19 nt, Artificial Sequence
  Description of Artificial Sequence: Synthetic oligonucleotide
uucacauuauaauugauuu

SEQ ID NO: 3227156 - RNA, 19 nt, Artificial Sequence
  Description of Artificial Sequence: Synthetic oligonucleotide
guggauacaauuuuggaac

SEQ ID NO: 3227157 - RNA, 19 nt, Artificial Sequence
  Description of Artificial Sequence: Synthetic oligonucleotide
aucgcuuugucuuacaugu

SEQ ID NO: 3227158 - RNA, 19 nt, Artificial Sequence
  Description of Artificial Sequence: Synthetic oligonucleotide
uuugguagauuuccuaacc

SEQ ID NO: 3227159 - RNA, 19 nt, Artificial Sequence
  Description of Artificial Sequence: Synthetic oligonucleotide
agcauugacagauugcaag

SEQ ID NO: 3227160 - RNA, 19 nt, Artificial Sequence
  Description of Artificial Sequence: Synthetic oligonucleotide
auaucaacaaacuuauuau

SEQ ID NO: 3227161 - RNA, 19 nt, Artificial Sequence
  Description of Artificial Sequence: Synthetic oligonucleotide
acuacaauaaggaagaaau

SEQ ID NO: 3227162 - RNA, 19 nt, Artificial Sequence
  Description of Artificial Sequence: Synthetic oligonucleotide
auauacagaauucacugcu

SEQ ID NO: 3227163 - RNA, 19 nt, Artificial Sequence
  Description of Artificial Sequence: Synthetic oligonucleotide
auaaugaacagacauggaa

SEQ ID NO: 3227164 - RNA, 19 nt, Artificial Sequence
  Description of Artificial Sequence: Synthetic oligonucleotide
caauaaggaagaaaucugc

SEQ ID NO: 3227165 - RNA, 19 nt, Artificial Sequence
  Description of Artificial Sequence: Synthetic oligonucleotide
caucuauuaauuauagcac

SEQ ID NO: 3227166 - RNA, 19 nt, Artificial Sequence
  Description of Artificial Sequence: Synthetic oligonucleotide
acaauuuuggaacuuggca

SEQ ID NO: 3227167 - RNA, 19 nt, Artificial Sequence
  Description of Artificial Sequence: Synthetic oligonucleotide
uaagcuuauuguuacuaag

SEQ ID NO: 3227168 - RNA, 19 nt, Artificial Sequence
  Description of Artificial Sequence: Synthetic oligonucleotide
gagaauaaaucucacuuca

SEQ ID NO: 3227169 - RNA, 19 nt, Artificial Sequence
  Description of Artificial Sequence: Synthetic oligonucleotide
agcuuauuguuacuaaguc

SEQ ID NO: 3227170 - RNA, 19 nt, Artificial Sequence
  Description of Artificial Sequence: Synthetic oligonucleotide
gcaucuauuaauuauagca

SEQ ID NO: 3227171 - RNA, 19 nt, Artificial Sequence
  Description of Artificial Sequence: Synthetic oligonucleotide
uguggauacaauuuuggaa

SEQ ID NO: 3227172 - RNA, 19 nt, Artificial Sequence
  Description of Artificial Sequence: Synthetic oligonucleotide
cauaaccuaucuuugguag

SEQ ID NO: 3227173 - RNA, 19 nt, Artificial Sequence
  Description of Artificial Sequence: Synthetic oligonucleotide
ugggguaggaacuagaaua

SEQ ID NO: 3227174 - RNA, 19 nt, Artificial Sequence
  Description of Artificial Sequence: Synthetic oligonucleotide
aagucuuaguuuuccauga

SEQ ID NO: 3227175 - RNA, 19 nt, Artificial Sequence
  Description of Artificial Sequence: Synthetic oligonucleotide
caaaauagagaauaaaucu

SEQ ID NO: 3227176 - RNA, 19 nt, Artificial Sequence
  Description of Artificial Sequence: Synthetic oligonucleotide
uacagcaggcuucacauug

SEQ ID NO: 3227177 - RNA, 19 nt, Artificial Sequence
  Description of Artificial Sequence: Synthetic oligonucleotide
uugaacacuuggaagauaa

SEQ ID NO: 3227178 - RNA, 19 nt, Artificial Sequence
  Description of Artificial Sequence: Synthetic oligonucleotide
aacgguauauacagaauuc

SEQ ID NO: 3227179 - RNA, 19 nt, Artificial Sequence
  Description of Artificial Sequence: Synthetic oligonucleotide
auaacaguaaagcaucuau

SEQ ID NO: 3227180 - RNA, 19 nt, Artificial Sequence
  Description of Artificial Sequence: Synthetic oligonucleotide
uuaaacuacagcaggcuuc

SEQ ID NO: 3227181 - RNA, 19 nt, Artificial Sequence
  Description of Artificial Sequence: Synthetic oligonucleotide
uguuccacaucaucaaugc

SEQ ID NO: 3227182 - RNA, 19 nt, Artificial Sequence
  Description of Artificial Sequence: Synthetic oligonucleotide
aguauaaggacaucucuga

SEQ ID NO: 3227183 - RNA, 19 nt, Artificial Sequence
  Description of Artificial Sequence: Synthetic oligonucleotide
ucugcaaaguauaaccagu

SEQ ID NO: 3227184 - RNA, 19 nt, Artificial Sequence
  Description of Artificial Sequence: Synthetic oligonucleotide
guuaauacguguuucuuca

SEQ ID NO: 3227185 - RNA, 19 nt, Artificial Sequence
  Description of Artificial Sequence: Synthetic oligonucleotide
cacuaauauacauaaguuc

SEQ ID NO: 3227186 - RNA, 19 nt, Artificial Sequence
  Description of Artificial Sequence: Synthetic oligonucleotide
uuacauguaugaaugucga

SEQ ID NO: 3227187 - RNA, 19 nt, Artificial Sequence
  Description of Artificial Sequence: Synthetic oligonucleotide
cacgaaauggacaauagca

SEQ ID NO: 3227188 - RNA, 19 nt, Artificial Sequence
  Description of Artificial Sequence: Synthetic oligonucleotide
uaacauuacauugacagua

SEQ ID NO: 3227189 - RNA, 19 nt, Artificial Sequence
  Description of Artificial Sequence: Synthetic oligonucleotide
agcaucuauuaauuauagc

SEQ ID NO: 3227190 - RNA, 19 nt, Artificial Sequence
  Description of Artificial Sequence: Synthetic oligonucleotide
uuuuaaccuaagaacgugu

SEQ ID NO: 3227191 - RNA, 19 nt, Artificial Sequence
  Description of Artificial Sequence: Synthetic oligonucleotide
uggcuaaucuacuaagcag

SEQ ID NO: 3227192 - RNA, 19 nt, Artificial Sequence
  Description of Artificial Sequence: Synthetic oligonucleotide
ucacuaauauacauaaguu

SEQ ID NO: 3227193 - RNA, 19 nt, Artificial Sequence
  Description of Artificial Sequence: Synthetic oligonucleotide
aaucgcuuugucuuacaug

SEQ ID NO: 3227194 - RNA, 19 nt, Artificial Sequence
  Description of Artificial Sequence: Synthetic oligonucleotide
uuuuaacgagguuugcuca

SEQ ID NO: 3227195 - RNA, 19 nt, Artificial Sequence
  Description of Artificial Sequence: Synthetic oligonucleotide
uacaauuuuggaacuuggc

SEQ ID NO: 3227196 - RNA, 19 nt, Artificial Sequence
  Description of Artificial Sequence: Synthetic oligonucleotide
uucacgaaauggacaauag

SEQ ID NO: 3227197 - RNA, 19 nt, Artificial Sequence
  Description of Artificial Sequence: Synthetic oligonucleotide
aauggacaauagcaacuuc

SEQ ID NO: 3227198 - RNA, 19 nt, Artificial Sequence
  Description of Artificial Sequence: Synthetic oligonucleotide
accacaaagaauaucaaca

SEQ ID NO: 3227199 - RNA, 19 nt, Artificial Sequence
  Description of Artificial Sequence: Synthetic oligonucleotide
ugcugcauucuucacaucu

SEQ ID NO: 3227200 - RNA, 19 nt, Artificial Sequence
  Description of Artificial Sequence: Synthetic oligonucleotide
uagugcacuguuaauacgu

SEQ ID NO: 3227201 - RNA, 19 nt, Artificial Sequence
  Description of Artificial Sequence: Synthetic oligonucleotide
ugaauguuguaaagggaug

SEQ ID NO: 3227202 - RNA, 19 nt, Artificial Sequence
  Description of Artificial Sequence: Synthetic oligonucleotide
uaacgguauauacagaauu

SEQ ID NO: 3227203 - RNA, 19 nt, Artificial Sequence
  Description of Artificial Sequence: Synthetic oligonucleotide
uacuggauugaucucuaag

SEQ ID NO: 3227204 - RNA, 19 nt, Artificial Sequence
  Description of Artificial Sequence: Synthetic oligonucleotide
ugauguggauacaauuuug

SEQ ID NO: 3227205 - RNA, 19 nt, Artificial Sequence
  Description of Artificial Sequence: Synthetic oligonucleotide
aaguauaaggacaucucug

SEQ ID NO: 3227206 - RNA, 19 nt, Artificial Sequence
  Description of Artificial Sequence: Synthetic oligonucleotide
acaacaccaaaguuuaaca

SEQ ID NO: 3227207 - RNA, 19 nt, Artificial Sequence
  Description of Artificial Sequence: Synthetic oligonucleotide
acauugaccuuagaugacc

SEQ ID NO: 3227208 - RNA, 19 nt, Artificial Sequence
  Description of Artificial Sequence: Synthetic oligonucleotide
acauuacauugacaguagc

SEQ ID NO: 3227209 - RNA, 19 nt, Artificial Sequence
  Description of Artificial Sequence: Synthetic oligonucleotide
auauacauaaguucacaau

SEQ ID NO: 3227210 - RNA, 19 nt, Artificial Sequence
  Description of Artificial Sequence: Synthetic oligonucleotide
uaaauauuuuagaaucuuu

SEQ ID NO: 3227211 - RNA, 19 nt, Artificial Sequence
  Description of Artificial Sequence: Synthetic oligonucleotide
uuuaacgagguuugcucag

SEQ ID NO: 3227212 - RNA, 19 nt, Artificial Sequence
  Description of Artificial Sequence: Synthetic oligonucleotide
ugggccaaguauaaggaca

SEQ ID NO: 3227213 - RNA, 19 nt, Artificial Sequence
  Description of Artificial Sequence: Synthetic oligonucleotide
uugucuuacauguaugaau

SEQ ID NO: 3227214 - RNA, 19 nt, Artificial Sequence
  Description of Artificial Sequence: Synthetic oligonucleotide
uuggacuuuaaauauuuua

SEQ ID NO: 3227215 - RNA, 19 nt, Artificial Sequence
  Description of Artificial Sequence: Synthetic oligonucleotide
aacuagaauacuacaauaa

SEQ ID NO: 3227216 - RNA, 19 nt, Artificial Sequence
  Description of Artificial Sequence: Synthetic oligonucleotide
auaaguucacaauaaugaa

SEQ ID NO: 3227217 - RNA, 19 nt, Artificial Sequence
  Description of Artificial Sequence: Synthetic oligonucleotide
aagaaaauaaaagaaagac

SEQ ID NO: 3227218 - RNA, 19 nt, Artificial Sequence
  Description of Artificial Sequence: Synthetic oligonucleotide
uaaaagaaagacaagaaag

SEQ ID NO: 3227219 - RNA, 19 nt, Artificial Sequence
  Description of Artificial Sequence: Synthetic oligonucleotide
aaggaaacagaccugaagc

SEQ ID NO: 3227220 - RNA, 19 nt, Artificial Sequence
  Description of Artificial Sequence: Synthetic oligonucleotide
aaagaaaggaaacagaccu

SEQ ID NO: 3227221 - RNA, 19 nt, Artificial Sequence
  Description of Artificial Sequence: Synthetic oligonucleotide
aaagaaucuacacagaccu

SEQ ID NO: 3227222 - RNA, 19 nt, Artificial Sequence
  Description of Artificial Sequence: Synthetic oligonucleotide
aaaagaaaauaaaagaaag

SEQ ID NO: 3227223 - RNA, 19 nt, Artificial Sequence
  Description of Artificial Sequence: Synthetic oligonucleotide
aagaagacaagacaaacug

SEQ ID NO: 3227224 - RNA, 19 nt, Artificial Sequence
  Description of Artificial Sequence: Synthetic oligonucleotide
acuacauuauauuuaugcc

SEQ ID NO: 3227225 - RNA, 19 nt, Artificial Sequence
  Description of Artificial Sequence: Synthetic oligonucleotide
aaauaaaagaaagacaaga

SEQ ID NO: 3227226 - RNA, 19 nt, Artificial Sequence
  Description of Artificial Sequence: Synthetic oligonucleotide
agauugguaacacaaacac

SEQ ID NO: 3227227 - RNA, 19 nt, Artificial Sequence
  Description of Artificial Sequence: Synthetic oligonucleotide
aauacuuugguugaaaagu

SEQ ID NO: 3227228 - RNA, 19 nt, Artificial Sequence
  Description of Artificial Sequence: Synthetic oligonucleotide
gaaaauaaaagaaagacaa

SEQ ID NO: 3227229 - RNA, 19 nt, Artificial Sequence
  Description of Artificial Sequence: Synthetic oligonucleotide
aauacaagucauucuauug

SEQ ID NO: 3227230 - RNA, 19 nt, Artificial Sequence
  Description of Artificial Sequence: Synthetic oligonucleotide
auuuaugccaaccauaaga

SEQ ID NO: 3227231 - RNA, 19 nt, Artificial Sequence
  Description of Artificial Sequence: Synthetic oligonucleotide
uaugccaaccauaagaaga

SEQ ID NO: 3227232 - RNA, 19 nt, Artificial Sequence
  Description of Artificial Sequence: Synthetic oligonucleotide
aaaagaaucuacacagacc

SEQ ID NO: 3227233 - RNA, 19 nt, Artificial Sequence
  Description of Artificial Sequence: Synthetic oligonucleotide
cacuacauuauauuuaugc

SEQ ID NO: 3227234 - RNA, 19 nt, Artificial Sequence
  Description of Artificial Sequence: Synthetic oligonucleotide
aaaagaaaggaaacagacc

SEQ ID NO: 3227235 - RNA, 19 nt, Artificial Sequence
  Description of Artificial Sequence: Synthetic oligonucleotide
ugaagcaagaauacuuugg

SEQ ID NO: 3227236 - RNA, 19 nt, Artificial Sequence
  Description of Artificial Sequence: Synthetic oligonucleotide
agcaagaauacuuugguug

SEQ ID NO: 3227237 - RNA, 19 nt, Artificial Sequence
  Description of Artificial Sequence: Synthetic oligonucleotide
aaaagacuagauugguaac

SEQ ID NO: 3227238 - RNA, 19 nt, Artificial Sequence
  Description of Artificial Sequence: Synthetic oligonucleotide
aaaggaaacagaccugaag

SEQ ID NO: 3227239 - RNA, 19 nt, Artificial Sequence
  Description of Artificial Sequence: Synthetic oligonucleotide
aaaggugaguguuuaucac

SEQ ID NO: 3227240 - RNA, 19 nt, Artificial Sequence
  Description of Artificial Sequence: Synthetic oligonucleotide
aaaaggugaguguuuauca

SEQ ID NO: 3227241 - RNA, 19 nt, Artificial Sequence
  Description of Artificial Sequence: Synthetic oligonucleotide
agaaucuacacagaccucc

SEQ ID NO: 3227242 - RNA, 19 nt, Artificial Sequence
  Description of Artificial Sequence: Synthetic oligonucleotide
auugguaacacaaacacug

SEQ ID NO: 3227243 - RNA, 19 nt, Artificial Sequence
  Description of Artificial Sequence: Synthetic oligonucleotide
uuuucugaauuuuauuuug

SEQ ID NO: 3227244 - RNA, 19 nt, Artificial Sequence
  Description of Artificial Sequence: Synthetic oligonucleotide
auuauauuccacuucagaa

SEQ ID NO: 3227245 - RNA, 19 nt, Artificial Sequence
  Description of Artificial Sequence: Synthetic oligonucleotide
uacauuauauuuaugccaa

SEQ ID NO: 3227246 - RNA, 19 nt, Artificial Sequence
  Description of Artificial Sequence: Synthetic oligonucleotide
cauucuauuguaaaaggug

SEQ ID NO: 3227247 - RNA, 19 nt, Artificial Sequence
  Description of Artificial Sequence: Synthetic oligonucleotide
aaaagaaagacaagaaaga

SEQ ID NO: 3227248 - RNA, 19 nt, Artificial Sequence
  Description of Artificial Sequence: Synthetic oligonucleotide
uauauuccacuucagaaaa

SEQ ID NO: 3227249 - RNA, 19 nt, Artificial Sequence
  Description of Artificial Sequence: Synthetic oligonucleotide
aacacugccaauacaaguc

SEQ ID NO: 3227250 - RNA, 19 nt, Artificial Sequence
  Description of Artificial Sequence: Synthetic oligonucleotide
auaagaagacaagacaaac

SEQ ID NO: 3227251 - RNA, 19 nt, Artificial Sequence
  Description of Artificial Sequence: Synthetic oligonucleotide
aaacaugcaaaguaguuuu

SEQ ID NO: 3227252 - RNA, 19 nt, Artificial Sequence
  Description of Artificial Sequence: Synthetic oligonucleotide
auuauauuuaugccaacca

SEQ ID NO: 3227253 - RNA, 19 nt, Artificial Sequence
  Description of Artificial Sequence: Synthetic oligonucleotide
ucuaacacauuauauucca

SEQ ID NO: 3227254 - RNA, 19 nt, Artificial Sequence
  Description of Artificial Sequence: Synthetic oligonucleotide
ugaaaaguucacauuaaaa

SEQ ID NO: 3227255 - RNA, 19 nt, Artificial Sequence
  Description of Artificial Sequence: Synthetic oligonucleotide
aaccauaagaagacaagac

SEQ ID NO: 3227256 - RNA, 19 nt, Artificial Sequence
  Description of Artificial Sequence: Synthetic oligonucleotide
uuuaugccaaccauaagaa

SEQ ID NO: 3227257 - RNA, 19 nt, Artificial Sequence
  Description of Artificial Sequence: Synthetic oligonucleotide
auaaaagaaagacaagaaa

SEQ ID NO: 3227258 - RNA, 19 nt, Artificial Sequence
  Description of Artificial Sequence: Synthetic oligonucleotide
aaagaaaauaaaagaaaga

SEQ ID NO: 3227259 - RNA, 19 nt, Artificial Sequence
  Description of Artificial Sequence: Synthetic oligonucleotide
aaaguaguuuuguguacuc

SEQ ID NO: 3227260 - RNA, 19 nt, Artificial Sequence
  Description of Artificial Sequence: Synthetic oligonucleotide
gaauacuuugguugaaaag

SEQ ID NO: 3227261 - RNA, 19 nt, Artificial Sequence
  Description of Artificial Sequence: Synthetic oligonucleotide
aagacuagauugguaacac

SEQ ID NO: 3227262 - RNA, 19 nt, Artificial Sequence
  Description of Artificial Sequence: Synthetic oligonucleotide
agaaagacaagaaagaaaa

SEQ ID NO: 3227263 - RNA, 19 nt, Artificial Sequence
  Description of Artificial Sequence: Synthetic oligonucleotide
uuauauuccacuucagaaa

SEQ ID NO: 3227264 - RNA, 19 nt, Artificial Sequence
  Description of Artificial Sequence: Synthetic oligonucleotide
aauaaaagaaagacaagaa

SEQ ID NO: 3227265 - RNA, 19 nt, Artificial Sequence
  Description of Artificial Sequence: Synthetic oligonucleotide
uauauuuaugccaaccaua

SEQ ID NO: 3227266 - RNA, 19 nt, Artificial Sequence
  Description of Artificial Sequence: Synthetic oligonucleotide
uaagaagacaagacaaacu

SEQ ID NO: 3227267 - RNA, 19 nt, Artificial Sequence
  Description of Artificial Sequence: Synthetic oligonucleotide
aaacacugccaauacaagu

SEQ ID NO: 3227268 - RNA, 19 nt, Artificial Sequence
  Description of Artificial Sequence: Synthetic oligonucleotide
aaaauaaaagaaagacaag

SEQ ID NO: 3227269 - RNA, 19 nt, Artificial Sequence
  Description of Artificial Sequence: Synthetic oligonucleotide
uaacacauuauauuccacu

SEQ ID NO: 3227270 - RNA, 19 nt, Artificial Sequence
  Description of Artificial Sequence: Synthetic oligonucleotide
gucauucuauuguaaaagg

SEQ ID NO: 3227271 - RNA, 19 nt, Artificial Sequence
  Description of Artificial Sequence: Synthetic oligonucleotide
auacaagucauucuauugu

SEQ ID NO: 3227272 - RNA, 19 nt, Artificial Sequence
  Description of Artificial Sequence: Synthetic oligonucleotide
uuauauuuaugccaaccau

SEQ ID NO: 3227273 - RNA, 19 nt, Artificial Sequence
  Description of Artificial Sequence: Synthetic oligonucleotide
ucauucuauuguaaaaggu

SEQ ID NO: 3227274 - RNA, 19 nt, Artificial Sequence
  Description of Artificial Sequence: Synthetic oligonucleotide
uccacuucagaaaacuuac

SEQ ID NO: 3227275 - RNA, 19 nt, Artificial Sequence
  Description of Artificial Sequence: Synthetic oligonucleotide
uuuaucacuacauuauauu

SEQ ID NO: 3227276 - RNA, 19 nt, Artificial Sequence
  Description of Artificial Sequence: Synthetic oligonucleotide
uucuauuguaaaaggugag

SEQ ID NO: 3227277 - RNA, 19 nt, Artificial Sequence
  Description of Artificial Sequence: Synthetic oligonucleotide
aaguaguuuuguguacucc

SEQ ID NO: 3227278 - RNA, 19 nt, Artificial Sequence
  Description of Artificial Sequence: Synthetic oligonucleotide
uuucugaauuuuauuuugc

SEQ ID NO: 3227279 - RNA, 19 nt, Artificial Sequence
  Description of Artificial Sequence: Synthetic oligonucleotide
uagauugguaacacaaaca

SEQ ID NO: 3227280 - RNA, 19 nt, Artificial Sequence
  Description of Artificial Sequence: Synthetic oligonucleotide
aaagaaagacaagaaagaa

SEQ ID NO: 3227281 - RNA, 19 nt, Artificial Sequence
  Description of Artificial Sequence: Synthetic oligonucleotide
agucauucuauuguaaaag

SEQ ID NO: 3227282 - RNA, 19 nt, Artificial Sequence
  Description of Artificial Sequence: Synthetic oligonucleotide
accauaagaagacaagaca

SEQ ID NO: 3227283 - RNA, 19 nt, Artificial Sequence
  Description of Artificial Sequence: Synthetic oligonucleotide
aacacauuauauuccacuu

SEQ ID NO: 3227284 - RNA, 19 nt, Artificial Sequence
  Description of Artificial Sequence: Synthetic oligonucleotide
cugaauuuuauuuugcuaa

SEQ ID NO: 3227285 - RNA, 19 nt, Artificial Sequence
  Description of Artificial Sequence: Synthetic oligonucleotide
cuagauugguaacacaaac

SEQ ID NO: 3227286 - RNA, 19 nt, Artificial Sequence
  Description of Artificial Sequence: Synthetic oligonucleotide
agaaaauaaaagaaagaca

SEQ ID NO: 3227287 - RNA, 19 nt, Artificial Sequence
  Description of Artificial Sequence: Synthetic oligonucleotide
uauuguaaaaggugagugu

SEQ ID NO: 3227288 - RNA, 19 nt, Artificial Sequence
  Description of Artificial Sequence: Synthetic oligonucleotide
aguaguuuuguguacuccu

SEQ ID NO: 3227289 - RNA, 19 nt, Artificial Sequence
  Description of Artificial Sequence: Synthetic oligonucleotide
aaagacuagauugguaaca

SEQ ID NO: 3227290 - RNA, 19 nt, Artificial Sequence
  Description of Artificial Sequence: Synthetic oligonucleotide
uuuguguacuccucuaaca

SEQ ID NO: 3227291 - RNA, 19 nt, Artificial Sequence
  Description of Artificial Sequence: Synthetic oligonucleotide
cuacauuauauuuaugcca

SEQ ID NO: 3227292 - RNA, 19 nt, Artificial Sequence
  Description of Artificial Sequence: Synthetic oligonucleotide
uaucacuacauuauauuua

SEQ ID NO: 3227293 - RNA, 19 nt, Artificial Sequence
  Description of Artificial Sequence: Synthetic oligonucleotide
cauuauauuuaugccaacc

SEQ ID NO: 3227294 - RNA, 19 nt, Artificial Sequence
  Description of Artificial Sequence: Synthetic oligonucleotide
aguguuuaucacuacauua

SEQ ID NO: 3227295 - RNA, 19 nt, Artificial Sequence
  Description of Artificial Sequence: Synthetic oligonucleotide
uuaucacuacauuauauuu

SEQ ID NO: 3227296 - RNA, 19 nt, Artificial Sequence
  Description of Artificial Sequence: Synthetic oligonucleotide
cucuaacacauuauauucc

SEQ ID NO: 3227297 - RNA, 19 nt, Artificial Sequence
  Description of Artificial Sequence: Synthetic oligonucleotide
uuguguacuccucuaacac

SEQ ID NO: 3227298 - RNA, 19 nt, Artificial Sequence
  Description of Artificial Sequence: Synthetic oligonucleotide
aaggugaguguuuaucacu

SEQ ID NO: 3227299 - RNA, 19 nt, Artificial Sequence
  Description of Artificial Sequence: Synthetic oligonucleotide
aucacuacauuauauuuau

SEQ ID NO: 3227300 - RNA, 19 nt, Artificial Sequence
  Description of Artificial Sequence: Synthetic oligonucleotide
aaaacaugcaaaguaguuu

SEQ ID NO: 3227301 - RNA, 19 nt, Artificial Sequence
  Description of Artificial Sequence: Synthetic oligonucleotide
ugcaaaguaguuuugugua

SEQ ID NO: 3227302 - RNA, 19 nt, Artificial Sequence
  Description of Artificial Sequence: Synthetic oligonucleotide
acacauuauauuccacuuc

SEQ ID NO: 3227303 - RNA, 19 nt, Artificial Sequence
  Description of Artificial Sequence: Synthetic oligonucleotide
aagucauucuauuguaaaa

SEQ ID NO: 3227304 - RNA, 19 nt, Artificial Sequence
  Description of Artificial Sequence: Synthetic oligonucleotide
uuuuguguacuccucuaac

SEQ ID NO: 3227305 - RNA, 19 nt, Artificial Sequence
  Description of Artificial Sequence: Synthetic oligonucleotide
uucagaaaacuuaccaaaa

SEQ ID NO: 3227306 - RNA, 19 nt, Artificial Sequence
  Description of Artificial Sequence: Synthetic oligonucleotide
cuauuguaaaaggugagug

SEQ ID NO: 3227307 - RNA, 19 nt, Artificial Sequence
  Description of Artificial Sequence: Synthetic oligonucleotide
uugguugaaaaguucacau

SEQ ID NO: 3227308 - RNA, 19 nt, Artificial Sequence
  Description of Artificial Sequence: Synthetic oligonucleotide
ugaguguuuaucacuacau

SEQ ID NO: 3227309 - RNA, 19 nt, Artificial Sequence
  Description of Artificial Sequence: Synthetic oligonucleotide
acacaaacacugccaauac

SEQ ID NO: 3227310 - RNA, 19 nt, Artificial Sequence
  Description of Artificial Sequence: Synthetic oligonucleotide
aacacaaacacugccaaua

SEQ ID NO: 3227311 - RNA, 19 nt, Artificial Sequence
  Description of Artificial Sequence: Synthetic oligonucleotide
ugguaacacaaacacugcc

SEQ ID NO: 3227312 - RNA, 19 nt, Artificial Sequence
  Description of Artificial Sequence: Synthetic oligonucleotide
gaaacagaccugaagcaag

SEQ ID NO: 3227313 - RNA, 19 nt, Artificial Sequence
  Description of Artificial Sequence: Synthetic oligonucleotide
uugaaaaguucacauuaaa

SEQ ID NO: 3227314 - RNA, 19 nt, Artificial Sequence
  Description of Artificial Sequence: Synthetic oligonucleotide
ucugaauuuuauuuugcua

SEQ ID NO: 3227315 - RNA, 19 nt, Artificial Sequence
  Description of Artificial Sequence: Synthetic oligonucleotide
uauuccacuucagaaaacu

SEQ ID NO: 3227316 - RNA, 19 nt, Artificial Sequence
  Description of Artificial Sequence: Synthetic oligonucleotide
aagaaagacaagaaagaaa

SEQ ID NO: 3227317 - RNA, 19 nt, Artificial Sequence
  Description of Artificial Sequence: Synthetic oligonucleotide
aauacaaugggaaauuccg

SEQ ID NO: 3227318 - RNA, 19 nt, Artificial Sequence
  Description of Artificial Sequence: Synthetic oligonucleotide
  modified_base (5)..(5): a, c, u, g, unknown or other
auuunuaaaauucagguuu

SEQ ID NO: 3227319 - RNA, 19 nt, Artificial Sequence
  Description of Artificial Sequence: Synthetic oligonucleotide
aaauucagguuucucauuc

SEQ ID NO: 3227320 - RNA, 19 nt, Artificial Sequence
  Description of Artificial Sequence: Synthetic oligonucleotide
uuugaagacagccuccugg

SEQ ID NO: 3227321 - RNA, 19 nt, Artificial Sequence
  Description of Artificial Sequence: Synthetic oligonucleotide
ucguuuaucgaacaggaag

SEQ ID NO: 3227322 - RNA, 19 nt, Artificial Sequence
  Description of Artificial Sequence: Synthetic oligonucleotide
acacacauagcacauuucc

SEQ ID NO: 3227323 - RNA, 19 nt, Artificial Sequence
  Description of Artificial Sequence: Synthetic oligonucleotide
uuuucagagggcaugaucu

SEQ ID NO: 3227324 - RNA, 19 nt, Artificial Sequence
  Description of Artificial Sequence: Synthetic oligonucleotide
uucucugauaaccuggagg

SEQ ID NO: 3227325 - RNA, 19 nt, Artificial Sequence
  Description of Artificial Sequence: Synthetic oligonucleotide
guuccuuauagcuucagcg

SEQ ID NO: 3227326 - RNA, 19 nt, Artificial Sequence
  Description of Artificial Sequence: Synthetic oligonucleotide
auuucgcucaaacuugucc

SEQ ID NO: 3227327 - RNA, 19 nt, Artificial Sequence
  Description of Artificial Sequence: Synthetic oligonucleotide
gugauaaguuuucagaggg

SEQ ID NO: 3227328 - RNA, 19 nt, Artificial Sequence
  Description of Artificial Sequence: Synthetic oligonucleotide
guugcaaacacacauagca

SEQ ID NO: 3227329 - RNA, 19 nt, Artificial Sequence
  Description of Artificial Sequence: Synthetic oligonucleotide
  modified_base (14)..(14): a, c, u, g, unknown or other
acaggaaggauuunuaaaa

SEQ ID NO: 3227330 - RNA, 19 nt, Artificial Sequence
  Description of Artificial Sequence: Synthetic oligonucleotide
auugucauuucucugauaa

SEQ ID NO: 3227331 - RNA, 19 nt, Artificial Sequence
  Description of Artificial Sequence: Synthetic oligonucleotide
uaauacaaugggaaauucc

SEQ ID NO: 3227332 - RNA, 19 nt, Artificial Sequence
  Description of Artificial Sequence: Synthetic oligonucleotide
ugccuuauuaugauccugg

SEQ ID NO: 3227333 - RNA, 19 nt, Artificial Sequence
  Description of Artificial Sequence: Synthetic oligonucleotide
ugucauuucucugauaacc

SEQ ID NO: 3227334 - RNA, 19 nt, Artificial Sequence
  Description of Artificial Sequence: Synthetic oligonucleotide
gaguauuugguacugcugc

SEQ ID NO: 3227335 - RNA, 19 nt, Artificial Sequence
  Description of Artificial Sequence: Synthetic oligonucleotide
cuuauuaugauccuggcaa

SEQ ID NO: 3227336 - RNA, 19 nt, Artificial Sequence
  Description of Artificial Sequence: Synthetic oligonucleotide
  modified_base (4)..(4): a, c, u, g, unknown or other
uuunuaaaauucagguuuc

SEQ ID NO: 3227337 - RNA, 19 nt, Artificial Sequence
  Description of Artificial Sequence: Synthetic oligonucleotide
auucacauuucgcucaaac

SEQ ID NO: 3227338 - RNA, 19 nt, Artificial Sequence
  Description of Artificial Sequence: Synthetic oligonucleotide
ucugauucugcucucuugc

SEQ ID NO: 3227339 - RNA, 19 nt, Artificial Sequence
  Description of Artificial Sequence: Synthetic oligonucleotide
ucucugauaaccuggaggu

SEQ ID NO: 3227340 - RNA, 19 nt, Artificial Sequence
  Description of Artificial Sequence: Synthetic oligonucleotide
cucuccauaauacaauggg

SEQ ID NO: 3227341 - RNA, 19 nt, Artificial Sequence
  Description of Artificial Sequence: Synthetic oligonucleotide
uaugauccuggcaagccgg

SEQ ID NO: 3227342 - RNA, 19 nt, Artificial Sequence
  Description of Artificial Sequence: Synthetic oligonucleotide
ucacauuucgcucaaacuu

SEQ ID NO: 3227343 - RNA, 19 nt, Artificial Sequence
  Description of Artificial Sequence: Synthetic oligonucleotide
aaacuuguccagcaggcug

SEQ ID NO: 3227344 - RNA, 19 nt, Artificial Sequence
  Description of Artificial Sequence: Synthetic oligonucleotide
uccugccuuauuaugaucc

SEQ ID NO: 3227345 - RNA, 19 nt, Artificial Sequence
  Description of Artificial Sequence: Synthetic oligonucleotide
uuaugauccuggcaagccg

SEQ ID NO: 3227346 - RNA, 19 nt, Artificial Sequence
  Description of Artificial Sequence: Synthetic oligonucleotide
aggugauaaguuuucagag

SEQ ID NO: 3227347 - RNA, 19 nt, Artificial Sequence
  Description of Artificial Sequence: Synthetic oligonucleotide
  modified_base (9)..(9): a, c, u, g, unknown or other
aaggauuunuaaaauucag

SEQ ID NO: 3227348 - RNA, 19 nt, Artificial Sequence
  Description of Artificial Sequence: Synthetic oligonucleotide
ucaaacuuguccagcaggc

SEQ ID NO: 3227349 - RNA, 19 nt, Artificial Sequence
  Description of Artificial Sequence: Synthetic oligonucleotide
agguuucucauucuugugg

SEQ ID NO: 3227350 - RNA, 19 nt, Artificial Sequence
  Description of Artificial Sequence: Synthetic oligonucleotide
uccucuaucucucuccucc

SEQ ID NO: 3227351 - RNA, 19 nt, Artificial Sequence
  Description of Artificial Sequence: Synthetic oligonucleotide
cauuucucugauaaccugg

SEQ ID NO: 3227352 - RNA, 19 nt, Artificial Sequence
  Description of Artificial Sequence: Synthetic oligonucleotide
ucguugcaaacacacauag

SEQ ID NO: 3227353 - RNA, 19 nt, Artificial Sequence
  Description of Artificial Sequence: Synthetic oligonucleotide
uaaaauucagguuucucau

SEQ ID NO: 3227354 - RNA, 19 nt, Artificial Sequence
  Description of Artificial Sequence: Synthetic oligonucleotide
auuaugauccuggcaagcc

SEQ ID NO: 3227355 - RNA, 19 nt, Artificial Sequence
  Description of Artificial Sequence: Synthetic oligonucleotide
uuaucgaacaggaaggauu

SEQ ID NO: 3227356 - RNA, 19 nt, Artificial Sequence
  Description of Artificial Sequence: Synthetic oligonucleotide
uguucugggcuucucauug

SEQ ID NO: 3227357 - RNA, 19 nt, Artificial Sequence
  Description of Artificial Sequence: Synthetic oligonucleotide
gguacugcugcauaagucg

SEQ ID NO: 3227358 - RNA, 19 nt, Artificial Sequence
  Description of Artificial Sequence: Synthetic oligonucleotide
uuguccagcaggcugacgc

SEQ ID NO: 3227359 - RNA, 19 nt, Artificial Sequence
  Description of Artificial Sequence: Synthetic oligonucleotide
acuccaagauuauaggcag

SEQ ID NO: 3227360 - RNA, 19 nt, Artificial Sequence
  Description of Artificial Sequence: Synthetic oligonucleotide
  modified_base (15)..(15): a, c, u, g, unknown or other
aacaggaaggauuunuaaa

SEQ ID NO: 3227361 - RNA, 19 nt, Artificial Sequence
  Description of Artificial Sequence: Synthetic oligonucleotide
uucuugugguuccuuauag

SEQ ID NO: 3227362 - RNA, 19 nt, Artificial Sequence
  Description of Artificial Sequence: Synthetic oligonucleotide
acacauagcacauuuccug

SEQ ID NO: 3227363 - RNA, 19 nt, Artificial Sequence
  Description of Artificial Sequence: Synthetic oligonucleotide
uggucuuugaguauuuggu

SEQ ID NO: 3227364 - RNA, 19 nt, Artificial Sequence
  Description of Artificial Sequence: Synthetic oligonucleotide
uuucgcucaaacuugucca

SEQ ID NO: 3227365 - RNA, 19 nt, Artificial Sequence
  Description of Artificial Sequence: Synthetic oligonucleotide
aauuccguugugcucguug

SEQ ID NO: 3227366 - RNA, 19 nt, Artificial Sequence
  Description of Artificial Sequence: Synthetic oligonucleotide
  modified_base (10)..(10): a, c, u, g, unknown or other
gaaggauuunuaaaauuca

SEQ ID NO: 3227367 - RNA, 19 nt, Artificial Sequence
  Description of Artificial Sequence: Synthetic oligonucleotide
auuccguugugcucguugc

SEQ ID NO: 3227368 - RNA, 19 nt, Artificial Sequence
  Description of Artificial Sequence: Synthetic oligonucleotide
uucagcgacuccaagauua

SEQ ID NO: 3227369 - RNA, 19 nt, Artificial Sequence
  Description of Artificial Sequence: Synthetic oligonucleotide
  modified_base (8)..(8): a, c, u, g, unknown or other
aggauuunuaaaauucagg

SEQ ID NO: 3227370 - RNA, 19 nt, Artificial Sequence
  Description of Artificial Sequence: Synthetic oligonucleotide
uaagaggucguuuaucgaa

SEQ ID NO: 3227371 - RNA, 19 nt, Artificial Sequence
  Description of Artificial Sequence: Synthetic oligonucleotide
ugugguuccuuauagcuuc

SEQ ID NO: 3227372 - RNA, 19 nt, Artificial Sequence
  Description of Artificial Sequence: Synthetic oligonucleotide
ucuccauaauacaauggga

SEQ ID NO: 3227373 - RNA, 19 nt, Artificial Sequence
  Description of Artificial Sequence: Synthetic oligonucleotide
gauucugcucucuugcagc

SEQ ID NO: 3227374 - RNA, 19 nt, Artificial Sequence
  Description of Artificial Sequence: Synthetic oligonucleotide
  modified_base (7)..(7): a, c, u, g, unknown or other
ggauuunuaaaauucaggu

SEQ ID NO: 3227375 - RNA, 19 nt, Artificial Sequence
  Description of Artificial Sequence: Synthetic oligonucleotide
ucugauaaccuggagguga

SEQ ID NO: 3227376 - RNA, 19 nt, Artificial Sequence
  Description of Artificial Sequence: Synthetic oligonucleotide
aagucgcucauccucuauc

SEQ ID NO: 3227377 - RNA, 19 nt, Artificial Sequence
  Description of Artificial Sequence: Synthetic oligonucleotide
uuauuaugauccuggcaag

SEQ ID NO: 3227378 - RNA, 19 nt, Artificial Sequence
  Description of Artificial Sequence: Synthetic oligonucleotide
gagggcaugaucuucccgc

SEQ ID NO: 3227379 - RNA, 19 nt, Artificial Sequence
  Description of Artificial Sequence: Synthetic oligonucleotide
gcuaagaggucguuuaucg

SEQ ID NO: 3227380 - RNA, 19 nt, Artificial Sequence
  Description of Artificial Sequence: Synthetic oligonucleotide
gaggugauaaguuuucaga

SEQ ID NO: 3227381 - RNA, 19 nt, Artificial Sequence
  Description of Artificial Sequence: Synthetic oligonucleotide
ggaaauuccguugugcucg

SEQ ID NO: 3227382 - RNA, 19 nt, Artificial Sequence
  Description of Artificial Sequence: Synthetic oligonucleotide
uucucauugucauuucucu

SEQ ID NO: 3227383 - RNA, 19 nt, Artificial Sequence
  Description of Artificial Sequence: Synthetic oligonucleotide
ugaguauuugguacugcug

SEQ ID NO: 3227384 - RNA, 19 nt, Artificial Sequence
  Description of Artificial Sequence: Synthetic oligonucleotide
ugauucugcucucuugcag

SEQ ID NO: 3227385 - RNA, 19 nt, Artificial Sequence
  Description of Artificial Sequence: Synthetic oligonucleotide
ugacgcuugucaauguugc

SEQ ID NO: 3227386 - RNA, 19 nt, Artificial Sequence
  Description of Artificial Sequence: Synthetic oligonucleotide
gauaaguuuucagagggca

SEQ ID NO: 3227387 - RNA, 19 nt, Artificial Sequence
  Description of Artificial Sequence: Synthetic oligonucleotide
ucuaucucucuccuccucc

SEQ ID NO: 3227388 - RNA, 19 nt, Artificial Sequence
  Description of Artificial Sequence: Synthetic oligonucleotide
cucaaacuuguccagcagg

SEQ ID NO: 3227389 - RNA, 19 nt, Artificial Sequence
  Description of Artificial Sequence: Synthetic oligonucleotide
auucugcucucuugcagcc

SEQ ID NO: 3227390 - RNA, 19 nt, Artificial Sequence
  Description of Artificial Sequence: Synthetic oligonucleotide
ucagagggcaugaucuucc

SEQ ID NO: 3227391 - RNA, 19 nt, Artificial Sequence
  Description of Artificial Sequence: Synthetic oligonucleotide
uuccuuauagcuucagcga

SEQ ID NO: 3227392 - RNA, 19 nt, Artificial Sequence
  Description of Artificial Sequence: Synthetic oligonucleotide
ugucaauguugccaggucu

SEQ ID NO: 3227393 - RNA, 19 nt, Artificial Sequence
  Description of Artificial Sequence: Synthetic oligonucleotide
uugaguauuugguacugcu

SEQ ID NO: 3227394 - RNA, 19 nt, Artificial Sequence
  Description of Artificial Sequence: Synthetic oligonucleotide
ucuuugaguauuugguacu

SEQ ID NO: 3227395 - RNA, 19 nt, Artificial Sequence
  Description of Artificial Sequence: Synthetic oligonucleotide
uaaguuuucagagggcaug

SEQ ID NO: 3227396 - RNA, 19 nt, Artificial Sequence
  Description of Artificial Sequence: Synthetic oligonucleotide
acaaugggaaauuccguug

SEQ ID NO: 3227397 - RNA, 19 nt, Artificial Sequence
  Description of Artificial Sequence: Synthetic oligonucleotide
ggugauaaguuuucagagg

SEQ ID NO: 3227398 - RNA, 19 nt, Artificial Sequence
  Description of Artificial Sequence: Synthetic oligonucleotide
uccuuauagcuucagcgac

SEQ ID NO: 3227399 - RNA, 19 nt, Artificial Sequence
  Description of Artificial Sequence: Synthetic oligonucleotide
uucacauuucgcucaaacu

SEQ ID NO: 3227400 - RNA, 19 nt, Artificial Sequence
  Description of Artificial Sequence: Synthetic oligonucleotide
cuggucuuugaguauuugg

SEQ ID NO: 3227401 - RNA, 19 nt, Artificial Sequence
  Description of Artificial Sequence: Synthetic oligonucleotide
aagauuauaggcagcauuu

SEQ ID NO: 3227402 - RNA, 19 nt, Artificial Sequence
  Description of Artificial Sequence: Synthetic oligonucleotide
aagaggucguuuaucgaac

SEQ ID NO: 3227403 - RNA, 19 nt, Artificial Sequence
  Description of Artificial Sequence: Synthetic oligonucleotide
uucagguuucucauucuug

SEQ ID NO: 3227404 - RNA, 19 nt, Artificial Sequence
  Description of Artificial Sequence: Synthetic oligonucleotide
auaauacaaugggaaauuc

SEQ ID NO: 3227405 - RNA, 19 nt, Artificial Sequence
  Description of Artificial Sequence: Synthetic oligonucleotide
gucuuugaguauuugguac

SEQ ID NO: 3227406 - RNA, 19 nt, Artificial Sequence
  Description of Artificial Sequence: Synthetic oligonucleotide
cugcauaagucgcucaucc

SEQ ID NO: 3227407 - RNA, 19 nt, Artificial Sequence
  Description of Artificial Sequence: Synthetic oligonucleotide
ucauccucuaucucucucc

SEQ ID NO: 3227408 - RNA, 19 nt, Artificial Sequence
  Description of Artificial Sequence: Synthetic oligonucleotide
ugauaaguuuucagagggc

SEQ ID NO: 3227409 - RNA, 19 nt, Artificial Sequence
  Description of Artificial Sequence: Synthetic oligonucleotide
uguccucuccauaauacaa

SEQ ID NO: 3227410 - RNA, 19 nt, Artificial Sequence
  Description of Artificial Sequence: Synthetic oligonucleotide
ucauuucucugauaaccug

SEQ ID NO: 3227411 - RNA, 19 nt, Artificial Sequence
  Description of Artificial Sequence: Synthetic oligonucleotide
cacauuucgcucaaacuug

SEQ ID NO: 3227412 - RNA, 19 nt, Artificial Sequence
  Description of Artificial Sequence: Synthetic oligonucleotide
aaugggaaauuccguugug

SEQ ID NO: 3227413 - RNA, 19 nt, Artificial Sequence
  Description of Artificial Sequence: Synthetic oligonucleotide
agcacauuuccuguccugc

SEQ ID NO: 3227414 - RNA, 19 nt, Artificial Sequence
  Description of Artificial Sequence: Synthetic oligonucleotide
uccauaauacaaugggaaa

SEQ ID NO: 3227415 - RNA, 19 nt, Artificial Sequence
  Description of Artificial Sequence: Synthetic oligonucleotide
ugaucuucccgccauucac

SEQ ID NO: 3227416 - RNA, 19 nt, Artificial Sequence
  Description of Artificial Sequence: Synthetic oligonucleotide
uaucgaacaggaaggauuu

SEQ ID NO: 3227417 - RNA, 19 nt, Artificial Sequence
  Description of Artificial Sequence: Synthetic oligonucleotide
aagacagugagacacaugg

SEQ ID NO: 3227418 - RNA, 19 nt, Artificial Sequence
  Description of Artificial Sequence: Synthetic oligonucleotide
aaaucuugcagacacacuc

SEQ ID NO: 3227419 - RNA, 19 nt, Artificial Sequence
  Description of Artificial Sequence: Synthetic oligonucleotide
uugccaaucaccaugacca

SEQ ID NO: 3227420 - RNA, 19 nt, Artificial Sequence
  Description of Artificial Sequence: Synthetic oligonucleotide
aucaugaagacagugagac

SEQ ID NO: 3227421 - RNA, 19 nt, Artificial Sequence
  Description of Artificial Sequence: Synthetic oligonucleotide
gaagaagucaugcaugugc

SEQ ID NO: 3227422 - RNA, 19 nt, Artificial Sequence
  Description of Artificial Sequence: Synthetic oligonucleotide
uuggaaaucuugcagacac

SEQ ID NO: 3227423 - RNA, 19 nt, Artificial Sequence
  Description of Artificial Sequence: Synthetic oligonucleotide
uuuccaaacagcugcaugc

SEQ ID NO: 3227424 - RNA, 19 nt, Artificial Sequence
  Description of Artificial Sequence: Synthetic oligonucleotide
augaccaucaugaagacag

SEQ ID NO: 3227425 - RNA, 19 nt, Artificial Sequence
  Description of Artificial Sequence: Synthetic oligonucleotide
uguagcucuuuccaaacag

SEQ ID NO: 3227426 - RNA, 19 nt, Artificial Sequence
  Description of Artificial Sequence: Synthetic oligonucleotide
uggaagcucacaaucauug

SEQ ID NO: 3227427 - RNA, 19 nt, Artificial Sequence
  Description of Artificial Sequence: Synthetic oligonucleotide
aagaagucaugcaugugcc

SEQ ID NO: 3227428 - RNA, 19 nt, Artificial Sequence
  Description of Artificial Sequence: Synthetic oligonucleotide
aucauuggaaaucuugcag

SEQ ID NO: 3227429 - RNA, 19 nt, Artificial Sequence
  Description of Artificial Sequence: Synthetic oligonucleotide
caaucauuggaaaucuugc

SEQ ID NO: 3227430 - RNA, 19 nt, Artificial Sequence
  Description of Artificial Sequence: Synthetic oligonucleotide
aaucauuggaaaucuugca

SEQ ID NO: 3227431 - RNA, 19 nt, Artificial Sequence
  Description of Artificial Sequence: Synthetic oligonucleotide
caugaagacagugagacac

SEQ ID NO: 3227432 - RNA, 19 nt, Artificial Sequence
  Description of Artificial Sequence: Synthetic oligonucleotide
aacacgaucaggaaggagu

SEQ ID NO: 3227433 - RNA, 19 nt, Artificial Sequence
  Description of Artificial Sequence: Synthetic oligonucleotide
ucauuggaaaucuugcaga

SEQ ID NO: 3227434 - RNA, 19 nt, Artificial Sequence
  Description of Artificial Sequence: Synthetic oligonucleotide
aagucaugcaugugccagc

SEQ ID NO: 3227435 - RNA, 19 nt, Artificial Sequence
  Description of Artificial Sequence: Synthetic oligonucleotide
aucaccaugaccaucauga

SEQ ID NO: 3227436 - RNA, 19 nt, Artificial Sequence
  Description of Artificial Sequence: Synthetic oligonucleotide
aaucuugcagacacacucc

SEQ ID NO: 3227437 - RNA, 19 nt, Artificial Sequence
  Description of Artificial Sequence: Synthetic oligonucleotide
ucucuauccacucuccaca

SEQ ID NO: 3227438 - RNA, 19 nt, Artificial Sequence
  Description of Artificial Sequence: Synthetic oligonucleotide
ucaugcaugugccagcgug

SEQ ID NO: 3227439 - RNA, 19 nt, Artificial Sequence
  Description of Artificial Sequence: Synthetic oligonucleotide
uccaugcagucccacaugg

SEQ ID NO: 3227440 - RNA, 19 nt, Artificial Sequence
  Description of Artificial Sequence: Synthetic oligonucleotide
acuccuuguagcucuuucc

SEQ ID NO: 3227441 - RNA, 19 nt, Artificial Sequence
  Description of Artificial Sequence: Synthetic oligonucleotide
agcguggaagcucacaauc

SEQ ID NO: 3227442 - RNA, 19 nt, Artificial Sequence
  Description of Artificial Sequence: Synthetic oligonucleotide
gacagugagacacaugguc

SEQ ID NO: 3227443 - RNA, 19 nt, Artificial Sequence
  Description of Artificial Sequence: Synthetic oligonucleotide
ucccacauggucucuaucc

SEQ ID NO: 3227444 - RNA, 19 nt, Artificial Sequence
  Description of Artificial Sequence: Synthetic oligonucleotide
aacagcugcaugccgacca

SEQ ID NO: 3227445 - RNA, 19 nt, Artificial Sequence
  Description of Artificial Sequence: Synthetic oligonucleotide
aguggaagaagucaugcau

SEQ ID NO: 3227446 - RNA, 19 nt, Artificial Sequence
  Description of Artificial Sequence: Synthetic oligonucleotide
accaugaccaucaugaaga

SEQ ID NO: 3227447 - RNA, 19 nt, Artificial Sequence
  Description of Artificial Sequence: Synthetic oligonucleotide
cucuccacacaguacacgg

SEQ ID NO: 3227448 - RNA, 19 nt, Artificial Sequence
  Description of Artificial Sequence: Synthetic oligonucleotide
cuauccacucuccacacag

SEQ ID NO: 3227449 - RNA, 19 nt, Artificial Sequence
  Description of Artificial Sequence: Synthetic oligonucleotide
agacacauggucuggccgg

SEQ ID NO: 3227450 - RNA, 19 nt, Artificial Sequence
  Description of Artificial Sequence: Synthetic oligonucleotide
cuugcagacacacuccuug

SEQ ID NO: 3227451 - RNA, 19 nt, Artificial Sequence
  Description of Artificial Sequence: Synthetic oligonucleotide
gaagucaugcaugugccag

SEQ ID NO: 3227452 - RNA, 19 nt, Artificial Sequence
  Description of Artificial Sequence: Synthetic oligonucleotide
auggucucuauccacucuc

SEQ ID NO: 3227453 - RNA, 19 nt, Artificial Sequence
  Description of Artificial Sequence: Synthetic oligonucleotide
gagacacauggucuggccg

SEQ ID NO: 3227454 - RNA, 19 nt, Artificial Sequence
  Description of Artificial Sequence: Synthetic oligonucleotide
gaagcucacaaucauugga

SEQ ID NO: 3227455 - RNA, 19 nt, Artificial Sequence
  Description of Artificial Sequence: Synthetic oligonucleotide
acaaucauuggaaaucuug

SEQ ID NO: 3227456 - RNA, 19 nt, Artificial Sequence
  Description of Artificial Sequence: Synthetic oligonucleotide
guugccaaucaccaugacc

SEQ ID NO: 3227457 - RNA, 19 nt, Artificial Sequence
  Description of Artificial Sequence: Synthetic oligonucleotide
uggaagaagucaugcaugu

SEQ ID NO: 3227458 - RNA, 19 nt, Artificial Sequence
  Description of Artificial Sequence: Synthetic oligonucleotide
uagcucuuuccaaacagcu

SEQ ID NO: 3227459 - RNA, 19 nt, Artificial Sequence
  Description of Artificial Sequence: Synthetic oligonucleotide
cauuggaaaucuugcagac

SEQ ID NO: 3227460 - RNA, 19 nt, Artificial Sequence
  Description of Artificial Sequence: Synthetic oligonucleotide
cucacaaucauuggaaauc

SEQ ID NO: 3227461 - RNA, 19 nt, Artificial Sequence
  Description of Artificial Sequence: Synthetic oligonucleotide
uccaaacagcugcaugccg

SEQ ID NO: 3227462 - RNA, 19 nt, Artificial Sequence
  Description of Artificial Sequence: Synthetic oligonucleotide
gcucuuuccaaacagcugc

SEQ ID NO: 3227463 - RNA, 19 nt, Artificial Sequence
  Description of Artificial Sequence: Synthetic oligonucleotide
aaucaccaugaccaucaug

SEQ ID NO: 3227464 - RNA, 19 nt, Artificial Sequence
  Description of Artificial Sequence: Synthetic oligonucleotide
acggaacacgaucaggaag

SEQ ID NO: 3227465 - RNA, 19 nt, Artificial Sequence
  Description of Artificial Sequence: Synthetic oligonucleotide
aucaggaaggaguggaaga

SEQ ID NO: 3227466 - RNA, 19 nt, Artificial Sequence
  Description of Artificial Sequence: Synthetic oligonucleotide
ucacaaucauuggaaaucu

SEQ ID NO: 3227467 - RNA, 19 nt, Artificial Sequence
  Description of Artificial Sequence: Synthetic oligonucleotide
cuuguagcucuuuccaaac

SEQ ID NO: 3227468 - RNA, 19 nt, Artificial Sequence
  Description of Artificial Sequence: Synthetic oligonucleotide
gaaggaguggaagaaguca

SEQ ID NO: 3227469 - RNA, 19 nt, Artificial Sequence
  Description of Artificial Sequence: Synthetic oligonucleotide
caugcaugugccagcgugg

SEQ ID NO: 3227470 - RNA, 19 nt, Artificial Sequence
  Description of Artificial Sequence: Synthetic oligonucleotide
acacaguacacggaacacg

SEQ ID NO: 3227471 - RNA, 19 nt, Artificial Sequence
  Description of Artificial Sequence: Synthetic oligonucleotide
gaucaggaaggaguggaag

SEQ ID NO: 3227472 - RNA, 19 nt, Artificial Sequence
  Description of Artificial Sequence: Synthetic oligonucleotide
aguacacggaacacgauca

SEQ ID NO: 3227473 - RNA, 19 nt, Artificial Sequence
  Description of Artificial Sequence: Synthetic oligonucleotide
cuuuccaaacagcugcaug

SEQ ID NO: 3227474 - RNA, 19 nt, Artificial Sequence
  Description of Artificial Sequence: Synthetic oligonucleotide
uacacggaacacgaucagg

SEQ ID NO: 3227475 - RNA, 19 nt, Artificial Sequence
  Description of Artificial Sequence: Synthetic oligonucleotide
caugcagucccacaugguc

SEQ ID NO: 3227476 - RNA, 19 nt, Artificial Sequence
  Description of Artificial Sequence: Synthetic oligonucleotide
ugagacacauggucuggcc

SEQ ID NO: 3227477 - RNA, 19 nt, Artificial Sequence
  Description of Artificial Sequence: Synthetic oligonucleotide
acauggucucuauccacuc

SEQ ID NO: 3227478 - RNA, 19 nt, Artificial Sequence
  Description of Artificial Sequence: Synthetic oligonucleotide
acacacuccuuguagcucu

SEQ ID NO: 3227479 - RNA, 19 nt, Artificial Sequence
  Description of Artificial Sequence: Synthetic oligonucleotide
cagacacacuccuuguagc

SEQ ID NO: 3227480 - RNA, 19 nt, Artificial Sequence
  Description of Artificial Sequence: Synthetic oligonucleotide
uuguagcucuuuccaaaca

SEQ ID NO: 3227481 - RNA, 19 nt, Artificial Sequence
  Description of Artificial Sequence: Synthetic oligonucleotide
aagcucacaaucauuggaa

SEQ ID NO: 3227482 - RNA, 19 nt, Artificial Sequence
  Description of Artificial Sequence: Synthetic oligonucleotide
aaacagcugcaugccgacc

SEQ ID NO: 3227483 - RNA, 19 nt, Artificial Sequence
  Description of Artificial Sequence: Synthetic oligonucleotide
agucaugcaugugccagcg

SEQ ID NO: 3227484 - RNA, 19 nt, Artificial Sequence
  Description of Artificial Sequence: Synthetic oligonucleotide
agacacacuccuuguagcu

SEQ ID NO: 3227485 - RNA, 19 nt, Artificial Sequence
  Description of Artificial Sequence: Synthetic oligonucleotide
cacaguacacggaacacga

SEQ ID NO: 3227486 - RNA, 19 nt, Artificial Sequence
  Description of Artificial Sequence: Synthetic oligonucleotide
caccaugaccaucaugaag

SEQ ID NO: 3227487 - RNA, 19 nt, Artificial Sequence
  Description of Artificial Sequence: Synthetic oligonucleotide
aaggaguggaagaagucau

SEQ ID NO: 3227488 - RNA, 19 nt, Artificial Sequence
  Description of Artificial Sequence: Synthetic oligonucleotide
ccaucaugaagacagugag

SEQ ID NO: 3227489 - RNA, 19 nt, Artificial Sequence
  Description of Artificial Sequence: Synthetic oligonucleotide
ucaggaaggaguggaagaa

SEQ ID NO: 3227490 - RNA, 19 nt, Artificial Sequence
  Description of Artificial Sequence: Synthetic oligonucleotide
caguacacggaacacgauc

SEQ ID NO: 3227491 - RNA, 19 nt, Artificial Sequence
  Description of Artificial Sequence: Synthetic oligonucleotide
guggaagaagucaugcaug

SEQ ID NO: 3227492 - RNA, 19 nt, Artificial Sequence
  Description of Artificial Sequence: Synthetic oligonucleotide
uggccggcgaccuccaugc

SEQ ID NO: 3227493 - RNA, 19 nt, Artificial Sequence
  Description of Artificial Sequence: Synthetic oligonucleotide
aucuugcagacacacuccu

SEQ ID NO: 3227494 - RNA, 19 nt, Artificial Sequence
  Description of Artificial Sequence: Synthetic oligonucleotide
acagugagacacauggucu

SEQ ID NO: 3227495 - RNA, 19 nt, Artificial Sequence
  Description of Artificial Sequence: Synthetic oligonucleotide
uuccaaacagcugcaugcc

SEQ ID NO: 3227496 - RNA, 19 nt, Artificial Sequence
  Description of Artificial Sequence: Synthetic oligonucleotide
uggucucuauccacucucc

SEQ ID NO: 3227497 - RNA, 19 nt, Artificial Sequence
  Description of Artificial Sequence: Synthetic oligonucleotide
agugagacacauggucugg

SEQ ID NO: 3227498 - RNA, 19 nt, Artificial Sequence
  Description of Artificial Sequence: Synthetic oligonucleotide
gucucuauccacucuccac

SEQ ID NO: 3227499 - RNA, 19 nt, Artificial Sequence
  Description of Artificial Sequence: Synthetic oligonucleotide
acacggaacacgaucagga

SEQ ID NO: 3227500 - RNA, 19 nt, Artificial Sequence
  Description of Artificial Sequence: Synthetic oligonucleotide
cagugagacacauggucug

SEQ ID NO: 3227501 - RNA, 19 nt, Artificial Sequence
  Description of Artificial Sequence: Synthetic oligonucleotide
ucaugaagacagugagaca

SEQ ID NO: 3227502 - RNA, 19 nt, Artificial Sequence
  Description of Artificial Sequence: Synthetic oligonucleotide
caugugccagcguggaagc

SEQ ID NO: 3227503 - RNA, 19 nt, Artificial Sequence
  Description of Artificial Sequence: Synthetic oligonucleotide
cggaacacgaucaggaagg

SEQ ID NO: 3227504 - RNA, 19 nt, Artificial Sequence
  Description of Artificial Sequence: Synthetic oligonucleotide
uccacucuccacacaguac

SEQ ID NO: 3227505 - RNA, 19 nt, Artificial Sequence
  Description of Artificial Sequence: Synthetic oligonucleotide
ggaaaucuugcagacacac

SEQ ID NO: 3227506 - RNA, 19 nt, Artificial Sequence
  Description of Artificial Sequence: Synthetic oligonucleotide
gcagacacacuccuuguag

SEQ ID NO: 3227507 - RNA, 19 nt, Artificial Sequence
  Description of Artificial Sequence: Synthetic oligonucleotide
uggaaaucuugcagacaca

SEQ ID NO: 3227508 - RNA, 19 nt, Artificial Sequence
  Description of Artificial Sequence: Synthetic oligonucleotide
ggaagcucacaaucauugg

SEQ ID NO: 3227509 - RNA, 19 nt, Artificial Sequence
  Description of Artificial Sequence: Synthetic oligonucleotide
acauggucuggccggcgac

SEQ ID NO: 3227510 - RNA, 19 nt, Artificial Sequence
  Description of Artificial Sequence: Synthetic oligonucleotide
ucuauccacucuccacaca

SEQ ID NO: 3227511 - RNA, 19 nt, Artificial Sequence
  Description of Artificial Sequence: Synthetic oligonucleotide
ucuccacacaguacacgga

SEQ ID NO: 3227512 - RNA, 19 nt, Artificial Sequence
  Description of Artificial Sequence: Synthetic oligonucleotide
gaccaucaugaagacagug

SEQ ID NO: 3227513 - RNA, 19 nt, Artificial Sequence
  Description of Artificial Sequence: Synthetic oligonucleotide
acgaucaggaaggagugga

SEQ ID NO: 3227514 - RNA, 19 nt, Artificial Sequence
  Description of Artificial Sequence: Synthetic oligonucleotide
caaacagcugcaugccgac

SEQ ID NO: 3227515 - RNA, 19 nt, Artificial Sequence
  Description of Artificial Sequence: Synthetic oligonucleotide
guagcucuuuccaaacagc

SEQ ID NO: 3227516 - RNA, 19 nt, Artificial Sequence
  Description of Artificial Sequence: Synthetic oligonucleotide
accaucaugaagacaguga

SEQ ID NO: 3227517 - RNA, 19 nt, Artificial Sequence
  Description of Artificial Sequence: Synthetic oligonucleotide
gaacucuuuauccagaucc

SEQ ID NO: 3227518 - RNA, 19 nt, Artificial Sequence
  Description of Artificial Sequence: Synthetic oligonucleotide
aucauguucacaucuuucc

SEQ ID NO: 3227519 - RNA, 19 nt, Artificial Sequence
  Description of Artificial Sequence: Synthetic oligonucleotide
uuuguaaucuagcuggaug

SEQ ID NO: 3227520 - RNA, 19 nt, Artificial Sequence
  Description of Artificial Sequence: Synthetic oligonucleotide
caacacauaacccaguugc

SEQ ID NO: 3227521 - RNA, 19 nt, Artificial Sequence
  Description of Artificial Sequence: Synthetic oligonucleotide
uccagauccacauucuugg

SEQ ID NO: 3227522 - RNA, 19 nt, Artificial Sequence
  Description of Artificial Sequence: Synthetic oligonucleotide
uuuauccagauccacauuc

SEQ ID NO: 3227523 - RNA, 19 nt, Artificial Sequence
  Description of Artificial Sequence: Synthetic oligonucleotide
aacuccaucauguucacau

SEQ ID NO: 3227524 - RNA, 19 nt, Artificial Sequence
  Description of Artificial Sequence: Synthetic oligonucleotide
acguugaugacgcuguggc

SEQ ID NO: 3227525 - RNA, 19 nt, Artificial Sequence
  Description of Artificial Sequence: Synthetic oligonucleotide
aagaugaagagcagcagcg

SEQ ID NO: 3227526 - RNA, 19 nt, Artificial Sequence
  Description of Artificial Sequence: Synthetic oligonucleotide
aagacuacagugaugagca

SEQ ID NO: 3227527 - RNA, 19 nt, Artificial Sequence
  Description of Artificial Sequence: Synthetic oligonucleotide
gacaaugacguugaugacg

SEQ ID NO: 3227528 - RNA, 19 nt, Artificial Sequence
  Description of Artificial Sequence: Synthetic oligonucleotide
acaaugacguugaugacgc

SEQ ID NO: 3227529 - RNA, 19 nt, Artificial Sequence
  Description of Artificial Sequence: Synthetic oligonucleotide
cuuccugaacucuuuaucc

SEQ ID NO: 3227530 - RNA, 19 nt, Artificial Sequence
  Description of Artificial Sequence: Synthetic oligonucleotide
ugugguucagcucagcccu

SEQ ID NO: 3227531 - RNA, 19 nt, Artificial Sequence
  Description of Artificial Sequence: Synthetic oligonucleotide
uguccucaguccuauaagg

SEQ ID NO: 3227532 - RNA, 19 nt, Artificial Sequence
  Description of Artificial Sequence: Synthetic oligonucleotide
uuguaaucuagcuggaugu

SEQ ID NO: 3227533 - RNA, 19 nt, Artificial Sequence
  Description of Artificial Sequence: Synthetic oligonucleotide
agauccacauucuuggcag

SEQ ID NO: 3227534 - RNA, 19 nt, Artificial Sequence
  Description of Artificial Sequence: Synthetic oligonucleotide
ugagcagcaagaugaagag

SEQ ID NO: 3227535 - RNA, 19 nt, Artificial Sequence
  Description of Artificial Sequence: Synthetic oligonucleotide
uguagccaagacuacagug

SEQ ID NO: 3227536 - RNA, 19 nt, Artificial Sequence
  Description of Artificial Sequence: Synthetic oligonucleotide
cacauaacccaguugcugg

SEQ ID NO: 3227537 - RNA, 19 nt, Artificial Sequence
  Description of Artificial Sequence: Synthetic oligonucleotide
acugugguucagcucagcc

SEQ ID NO: 3227538 - RNA, 19 nt, Artificial Sequence
  Description of Artificial Sequence: Synthetic oligonucleotide
aggacugugguucagcuca

SEQ ID NO: 3227539 - RNA, 19 nt, Artificial Sequence
  Description of Artificial Sequence: Synthetic oligonucleotide
uacagugaugagcagcaag

SEQ ID NO: 3227540 - RNA, 19 nt, Artificial Sequence
  Description of Artificial Sequence: Synthetic oligonucleotide
gggacaaugacguugauga

SEQ ID NO: 3227541 - RNA, 19 nt, Artificial Sequence
  Description of Artificial Sequence: Synthetic oligonucleotide
aggaagaggacugugguuc

SEQ ID NO: 3227542 - RNA, 19 nt, Artificial Sequence
  Description of Artificial Sequence: Synthetic oligonucleotide
agcaaacuccaucauguuc

SEQ ID NO: 3227543 - RNA, 19 nt, Artificial Sequence
  Description of Artificial Sequence: Synthetic oligonucleotide
ucauguucacaucuuuccc

SEQ ID NO: 3227544 - RNA, 19 nt, Artificial Sequence
  Description of Artificial Sequence: Synthetic oligonucleotide
cauguucacaucuuucccc

SEQ ID NO: 3227545 - RNA, 19 nt, Artificial Sequence
  Description of Artificial Sequence: Synthetic oligonucleotide
uugcuggaagaaaugugcg

SEQ ID NO: 3227546 - RNA, 19 nt, Artificial Sequence
  Description of Artificial Sequence: Synthetic oligonucleotide
agcuggauguccucagucc

SEQ ID NO: 3227547 - RNA, 19 nt, Artificial Sequence
  Description of Artificial Sequence: Synthetic oligonucleotide
caagaugaagagcagcagc

SEQ ID NO: 3227548 - RNA, 19 nt, Artificial Sequence
  Description of Artificial Sequence: Synthetic oligonucleotide
cucgcauccuccacgaugg

SEQ ID NO: 3227549 - RNA, 19 nt, Artificial Sequence
  Description of Artificial Sequence: Synthetic oligonucleotide
uccucaguccuauaaggag

SEQ ID NO: 3227550 - RNA, 19 nt, Artificial Sequence
  Description of Artificial Sequence: Synthetic oligonucleotide
gugaugagcagcaagauga

SEQ ID NO: 3227551 - RNA, 19 nt, Artificial Sequence
  Description of Artificial Sequence: Synthetic oligonucleotide
uaaucuagcuggauguccu

SEQ ID NO: 3227552 - RNA, 19 nt, Artificial Sequence
  Description of Artificial Sequence: Synthetic oligonucleotide
auuugucaguacuccuucc

SEQ ID NO: 3227553 - RNA, 19 nt, Artificial Sequence
  Description of Artificial Sequence: Synthetic oligonucleotide
accagugugggaucugggc

SEQ ID NO: 3227554 - RNA, 19 nt, Artificial Sequence
  Description of Artificial Sequence: Synthetic oligonucleotide
uguggccugacccauuacc

SEQ ID NO: 3227555 - RNA, 19 nt, Artificial Sequence
  Description of Artificial Sequence: Synthetic oligonucleotide
guugcuggaagaaaugugc

SEQ ID NO: 3227556 - RNA, 19 nt, Artificial Sequence
  Description of Artificial Sequence: Synthetic oligonucleotide
caagacuacagugaugagc

SEQ ID NO: 3227557 - RNA, 19 nt, Artificial Sequence
  Description of Artificial Sequence: Synthetic oligonucleotide
ccuauaaggagccuggucc

SEQ ID NO: 3227558 - RNA, 19 nt, Artificial Sequence
  Description of Artificial Sequence: Synthetic oligonucleotide
ucugggacaaugacguuga

SEQ ID NO: 3227559 - RNA, 19 nt, Artificial Sequence
  Description of Artificial Sequence: Synthetic oligonucleotide
gaugaagagcagcagcgug

SEQ ID NO: 3227560 - RNA, 19 nt, Artificial Sequence
  Description of Artificial Sequence: Synthetic oligonucleotide
uguggccacagcaaacucc

SEQ ID NO: 3227561 - RNA, 19 nt, Artificial Sequence
  Description of Artificial Sequence: Synthetic oligonucleotide
uauuugucaguacuccuuc

SEQ ID NO: 3227562 - RNA, 19 nt, Artificial Sequence
  Description of Artificial Sequence: Synthetic oligonucleotide
agcagcaagaugaagagca

SEQ ID NO: 3227563 - RNA, 19 nt, Artificial Sequence
  Description of Artificial Sequence: Synthetic oligonucleotide
uuugucaguacuccuuccu

SEQ ID NO: 3227564 - RNA, 19 nt, Artificial Sequence
  Description of Artificial Sequence: Synthetic oligonucleotide
ugacccauuaccgggagag

SEQ ID NO: 3227565 - RNA, 19 nt, Artificial Sequence
  Description of Artificial Sequence: Synthetic oligonucleotide
cauuuauuugucaguacuc

SEQ ID NO: 3227566 - RNA, 19 nt, Artificial Sequence
  Description of Artificial Sequence: Synthetic oligonucleotide
uccacgauggcguguagcc

SEQ ID NO: 3227567 - RNA, 19 nt, Artificial Sequence
  Description of Artificial Sequence: Synthetic oligonucleotide
uccugaacucuuuauccag

SEQ ID NO: 3227568 - RNA, 19 nt, Artificial Sequence
  Description of Artificial Sequence: Synthetic oligonucleotide
ugggaucugggccaggagc

SEQ ID NO: 3227569 - RNA, 19 nt, Artificial Sequence
  Description of Artificial Sequence: Synthetic oligonucleotide
aagaaaugugcguggcucu

SEQ ID NO: 3227570 - RNA, 19 nt, Artificial Sequence
  Description of Artificial Sequence: Synthetic oligonucleotide
aagaggacugugguucagc

SEQ ID NO: 3227571 - RNA, 19 nt, Artificial Sequence
  Description of Artificial Sequence: Synthetic oligonucleotide
uggcguguagccaagacua

SEQ ID NO: 3227572 - RNA, 19 nt, Artificial Sequence
  Description of Artificial Sequence: Synthetic oligonucleotide
cucaguccuauaaggagcc

SEQ ID NO: 3227573 - RNA, 19 nt, Artificial Sequence
  Description of Artificial Sequence: Synthetic oligonucleotide
gaagaaaugugcguggcuc

SEQ ID NO: 3227574 - RNA, 19 nt, Artificial Sequence
  Description of Artificial Sequence: Synthetic oligonucleotide
aagagcagcagcguggcca

SEQ ID NO: 3227575 - RNA, 19 nt, Artificial Sequence
  Description of Artificial Sequence: Synthetic oligonucleotide
cuauaaggagccugguccc

SEQ ID NO: 3227576 - RNA, 19 nt, Artificial Sequence
  Description of Artificial Sequence: Synthetic oligonucleotide
acagcaaacuccaucaugu

SEQ ID NO: 3227577 - RNA, 19 nt, Artificial Sequence
  Description of Artificial Sequence: Synthetic oligonucleotide
aaucuagcuggauguccuc

SEQ ID NO: 3227578 - RNA, 19 nt, Artificial Sequence
  Description of Artificial Sequence: Synthetic oligonucleotide
agugaugagcagcaagaug

SEQ ID NO: 3227579 - RNA, 19 nt, Artificial Sequence
  Description of Artificial Sequence: Synthetic oligonucleotide
auucuuggcaggaagagga

SEQ ID NO: 3227580 - RNA, 19 nt, Artificial Sequence
  Description of Artificial Sequence: Synthetic oligonucleotide
uggccaacacauaacccag

SEQ ID NO: 3227581 - RNA, 19 nt, Artificial Sequence
  Description of Artificial Sequence: Synthetic oligonucleotide
ucgggaucuacuuaccagu

SEQ ID NO: 3227582 - RNA, 19 nt, Artificial Sequence
  Description of Artificial Sequence: Synthetic oligonucleotide
cuuggcaggaagaggacug

SEQ ID NO: 3227583 - RNA, 19 nt, Artificial Sequence
  Description of Artificial Sequence: Synthetic oligonucleotide
ugucagaggccucgcaucc

SEQ ID NO: 3227584 - RNA, 19 nt, Artificial Sequence
  Description of Artificial Sequence: Synthetic oligonucleotide
acccauuaccgggagaggc

SEQ ID NO: 3227585 - RNA, 19 nt, Artificial Sequence
  Description of Artificial Sequence: Synthetic oligonucleotide
aguacuccuuccugaacuc

SEQ ID NO: 3227586 - RNA, 19 nt, Artificial Sequence
  Description of Artificial Sequence: Synthetic oligonucleotide
uuauccagauccacauucu

SEQ ID NO: 3227587 - RNA, 19 nt, Artificial Sequence
  Description of Artificial Sequence: Synthetic oligonucleotide
cuggaagaaaugugcgugg

SEQ ID NO: 3227588 - RNA, 19 nt, Artificial Sequence
  Description of Artificial Sequence: Synthetic oligonucleotide
uuugucagaggccucgcau

SEQ ID NO: 3227589 - RNA, 19 nt, Artificial Sequence
  Description of Artificial Sequence: Synthetic oligonucleotide
aucuacuuaccaguguggg

SEQ ID NO: 3227590 - RNA, 19 nt, Artificial Sequence
  Description of Artificial Sequence: Synthetic oligonucleotide
uccccuuugauuucccagc

SEQ ID NO: 3227591 - RNA, 19 nt, Artificial Sequence
  Description of Artificial Sequence: Synthetic oligonucleotide
ugucaguacuccuuccuga

SEQ ID NO: 3227592 - RNA, 19 nt, Artificial Sequence
  Description of Artificial Sequence: Synthetic oligonucleotide
aaaugugcguggcucucug

SEQ ID NO: 3227593 - RNA, 19 nt, Artificial Sequence
  Description of Artificial Sequence: Synthetic oligonucleotide
uugucaguacuccuuccug

SEQ ID NO: 3227594 - RNA, 19 nt, Artificial Sequence
  Description of Artificial Sequence: Synthetic oligonucleotide
gaucuacuuaccagugugg

SEQ ID NO: 3227595 - RNA, 19 nt, Artificial Sequence
  Description of Artificial Sequence: Synthetic oligonucleotide
augugcguggcucucuggg

SEQ ID NO: 3227596 - RNA, 19 nt, Artificial Sequence
  Description of Artificial Sequence: Synthetic oligonucleotide
gagaggcaggagcaggugg

SEQ ID NO: 3227597 - RNA, 19 nt, Artificial Sequence
  Description of Artificial Sequence: Synthetic oligonucleotide
uuccccuuugauuucccag

SEQ ID NO: 3227598 - RNA, 19 nt, Artificial Sequence
  Description of Artificial Sequence: Synthetic oligonucleotide
augagcagcaagaugaaga

SEQ ID NO: 3227599 - RNA, 19 nt, Artificial Sequence
  Description of Artificial Sequence: Synthetic oligonucleotide
acaucuuuccccuuugauu

SEQ ID NO: 3227600 - RNA, 19 nt, Artificial Sequence
  Description of Artificial Sequence: Synthetic oligonucleotide
uuccugaacucuuuaucca

SEQ ID NO: 3227601 - RNA, 19 nt, Artificial Sequence
  Description of Artificial Sequence: Synthetic oligonucleotide
ucuagcuggauguccucag

SEQ ID NO: 3227602 - RNA, 19 nt, Artificial Sequence
  Description of Artificial Sequence: Synthetic oligonucleotide
ucagcccucuccuucagga

SEQ ID NO: 3227603 - RNA, 19 nt, Artificial Sequence
  Description of Artificial Sequence: Synthetic oligonucleotide
gacuacagugaugagcagc

SEQ ID NO: 3227604 - RNA, 19 nt, Artificial Sequence
  Description of Artificial Sequence: Synthetic oligonucleotide
ggaucuacuuaccagugug

SEQ ID NO: 3227605 - RNA, 19 nt, Artificial Sequence
  Description of Artificial Sequence: Synthetic oligonucleotide
ucuacuuaccaguguggga

SEQ ID NO: 3227606 - RNA, 19 nt, Artificial Sequence
  Description of Artificial Sequence: Synthetic oligonucleotide
guggccaacacauaaccca

SEQ ID NO: 3227607 - RNA, 19 nt, Artificial Sequence
  Description of Artificial Sequence: Synthetic oligonucleotide
uucagcucagcccucuccu

SEQ ID NO: 3227608 - RNA, 19 nt, Artificial Sequence
  Description of Artificial Sequence: Synthetic oligonucleotide
uuaccagugugggaucugg

SEQ ID NO: 3227609 - RNA, 19 nt, Artificial Sequence
  Description of Artificial Sequence: Synthetic oligonucleotide
auguccucaguccuauaag

SEQ ID NO: 3227610 - RNA, 19 nt, Artificial Sequence
  Description of Artificial Sequence: Synthetic oligonucleotide
aguccuauaaggagccugg

SEQ ID NO: 3227611 - RNA, 19 nt, Artificial Sequence
  Description of Artificial Sequence: Synthetic oligonucleotide
auguucacaucuuuccccu

SEQ ID NO: 3227612 - RNA, 19 nt, Artificial Sequence
  Description of Artificial Sequence: Synthetic oligonucleotide
uucacaucuuuccccuuug

SEQ ID NO: 3227613 - RNA, 19 nt, Artificial Sequence
  Description of Artificial Sequence: Synthetic oligonucleotide
augaagagcagcagcgugg

SEQ ID NO: 3227614 - RNA, 19 nt, Artificial Sequence
  Description of Artificial Sequence: Synthetic oligonucleotide
cucgggaucuacuuaccag

SEQ ID NO: 3227615 - RNA, 19 nt, Artificial Sequence
  Description of Artificial Sequence: Synthetic oligonucleotide
cugugguucagcucagccc

SEQ ID NO: 3227616 - RNA, 19 nt, Artificial Sequence
  Description of Artificial Sequence: Synthetic oligonucleotide
auaacccaguugcuggaag

SEQ ID NO: 3227617 - RNA, 19 nt, Artificial Sequence
  Description of Artificial Sequence: Synthetic oligonucleotide
uucgugaaagacaaaaucc

SEQ ID NO: 3227618 - RNA, 19 nt, Artificial Sequence
  Description of Artificial Sequence: Synthetic oligonucleotide
uguaucuucuuccagacac

SEQ ID NO: 3227619 - RNA, 19 nt, Artificial Sequence
  Description of Artificial Sequence: Synthetic oligonucleotide
uaugauuucgugaaagaca

SEQ ID NO: 3227620 - RNA, 19 nt, Artificial Sequence
  Description of Artificial Sequence: Synthetic oligonucleotide
ugaaagacaaaauccaugu

SEQ ID NO: 3227621 - RNA, 19 nt, Artificial Sequence
  Description of Artificial Sequence: Synthetic oligonucleotide
ucaaucugagaauugaaug

SEQ ID NO: 3227622 - RNA, 19 nt, Artificial Sequence
  Description of Artificial Sequence: Synthetic oligonucleotide
caaucugagaauugaaugg

SEQ ID NO: 3227623 - RNA, 19 nt, Artificial Sequence
  Description of Artificial Sequence: Synthetic oligonucleotide
auugggguggaauccaucc

SEQ ID NO: 3227624 - RNA, 19 nt, Artificial Sequence
  Description of Artificial Sequence: Synthetic oligonucleotide
cacagguucaauaagcugc

SEQ ID NO: 3227625 - RNA, 19 nt, Artificial Sequence
  Description of Artificial Sequence: Synthetic oligonucleotide
cuuuccuaggaucugaggc

SEQ ID NO: 3227626 - RNA, 19 nt, Artificial Sequence
  Description of Artificial Sequence: Synthetic oligonucleotide
uuucgugaaagacaaaauc

SEQ ID NO: 3227627 - RNA, 19 nt, Artificial Sequence
  Description of Artificial Sequence: Synthetic oligonucleotide
agugaagccaccucauugg

SEQ ID NO: 3227628 - RNA, 19 nt, Artificial Sequence
  Description of Artificial Sequence: Synthetic oligonucleotide
ucgugaaagacaaaaucca

SEQ ID NO: 3227629 - RNA, 19 nt, Artificial Sequence
  Description of Artificial Sequence: Synthetic oligonucleotide
acuguaucuucuuccagac

SEQ ID NO: 3227630 - RNA, 19 nt, Artificial Sequence
  Description of Artificial Sequence: Synthetic oligonucleotide
ucuucuuccagacacgguc

SEQ ID NO: 3227631 - RNA, 19 nt, Artificial Sequence
  Description of Artificial Sequence: Synthetic oligonucleotide
aauaagcugccacggcugg

SEQ ID NO: 3227632 - RNA, 19 nt, Artificial Sequence
  Description of Artificial Sequence: Synthetic oligonucleotide
ucaauaagcugccacggcu

SEQ ID NO: 3227633 - RNA, 19 nt, Artificial Sequence
  Description of Artificial Sequence: Synthetic oligonucleotide
uuuccuaggaucugaggcc

SEQ ID NO: 3227634 - RNA, 19 nt, Artificial Sequence
  Description of Artificial Sequence: Synthetic oligonucleotide
aauugaauggauucuccuu

SEQ ID NO: 3227635 - RNA, 19 nt, Artificial Sequence
  Description of Artificial Sequence: Synthetic oligonucleotide
uccucuaugauuucgugaa

SEQ ID NO: 3227636 - RNA, 19 nt, Artificial Sequence
  Description of Artificial Sequence: Synthetic oligonucleotide
cugagaauugaauggauuc

SEQ ID NO: 3227637 - RNA, 19 nt, Artificial Sequence
  Description of Artificial Sequence: Synthetic oligonucleotide
agguucaauaagcugccac

SEQ ID NO: 3227638 - RNA, 19 nt, Artificial Sequence
  Description of Artificial Sequence: Synthetic oligonucleotide
aauggauucuccuuuccua

SEQ ID NO: 3227639 - RNA, 19 nt, Artificial Sequence
  Description of Artificial Sequence: Synthetic oligonucleotide
aaucugagaauugaaugga

SEQ ID NO: 3227640 - RNA, 19 nt, Artificial Sequence
  Description of Artificial Sequence: Synthetic oligonucleotide
uucaaucugagaauugaau

SEQ ID NO: 3227641 - RNA, 19 nt, Artificial Sequence
  Description of Artificial Sequence: Synthetic oligonucleotide
agaauugaauggauucucc

SEQ ID NO: 3227642 - RNA, 19 nt, Artificial Sequence
  Description of Artificial Sequence: Synthetic oligonucleotide
ucuaugauuucgugaaaga

SEQ ID NO: 3227643 - RNA, 19 nt, Artificial Sequence
  Description of Artificial Sequence: Synthetic oligonucleotide
gguucaauaagcugccacg

SEQ ID NO: 3227644 - RNA, 19 nt, Artificial Sequence
  Description of Artificial Sequence: Synthetic oligonucleotide
ucuucaaucugagaauuga

SEQ ID NO: 3227645 - RNA, 19 nt, Artificial Sequence
  Description of Artificial Sequence: Synthetic oligonucleotide
uuuucugccacuccucuau

SEQ ID NO: 3227646 - RNA, 19 nt, Artificial Sequence
  Description of Artificial Sequence: Synthetic oligonucleotide
auggauucuccuuuccuag

SEQ ID NO: 3227647 - RNA, 19 nt, Artificial Sequence
  Description of Artificial Sequence: Synthetic oligonucleotide
gauuucgugaaagacaaaa

SEQ ID NO: 3227648 - RNA, 19 nt, Artificial Sequence
  Description of Artificial Sequence: Synthetic oligonucleotide
auccacagguucaauaagc

SEQ ID NO: 3227649 - RNA, 19 nt, Artificial Sequence
  Description of Artificial Sequence: Synthetic oligonucleotide
auucuccuuuccuaggauc

SEQ ID NO: 3227650 - RNA, 19 nt, Artificial Sequence
  Description of Artificial Sequence: Synthetic oligonucleotide
auugaauggauucuccuuu

SEQ ID NO: 3227651 - RNA, 19 nt, Artificial Sequence
  Description of Artificial Sequence: Synthetic oligonucleotide
uucuccuuuccuaggaucu

SEQ ID NO: 3227652 - RNA, 19 nt, Artificial Sequence
  Description of Artificial Sequence: Synthetic oligonucleotide
ucugccagcagcagugaag

SEQ ID NO: 3227653 - RNA, 19 nt, Artificial Sequence
  Description of Artificial Sequence: Synthetic oligonucleotide
uaucuucuuccagacacgg

SEQ ID NO: 3227654 - RNA, 19 nt, Artificial Sequence
  Description of Artificial Sequence: Synthetic oligonucleotide
aacacuucuucaaucugag

SEQ ID NO: 3227655 - RNA, 19 nt, Artificial Sequence
  Description of Artificial Sequence: Synthetic oligonucleotide
ugggacuguaucuucuucc

SEQ ID NO: 3227656 - RNA, 19 nt, Artificial Sequence
  Description of Artificial Sequence: Synthetic oligonucleotide
accucauugggguggaauc

SEQ ID NO: 3227657 - RNA, 19 nt, Artificial Sequence
  Description of Artificial Sequence: Synthetic oligonucleotide
ugaagccaccucauugggg

SEQ ID NO: 3227658 - RNA, 19 nt, Artificial Sequence
  Description of Artificial Sequence: Synthetic oligonucleotide
aggaucugaggccauuggg

SEQ ID NO: 3227659 - RNA, 19 nt, Artificial Sequence
  Description of Artificial Sequence: Synthetic oligonucleotide
ugagaauugaauggauucu

SEQ ID NO: 3227660 - RNA, 19 nt, Artificial Sequence
  Description of Artificial Sequence: Synthetic oligonucleotide
uucaauaagcugccacggc

SEQ ID NO: 3227661 - RNA, 19 nt, Artificial Sequence
  Description of Artificial Sequence: Synthetic oligonucleotide
uccacagguucaauaagcu

SEQ ID NO: 3227662 - RNA, 19 nt, Artificial Sequence
  Description of Artificial Sequence: Synthetic oligonucleotide
cacuucuucaaucugagaa

SEQ ID NO: 3227663 - RNA, 19 nt, Artificial Sequence
  Description of Artificial Sequence: Synthetic oligonucleotide
guucaauaagcugccacgg

SEQ ID NO: 3227664 - RNA, 19 nt, Artificial Sequence
  Description of Artificial Sequence: Synthetic oligonucleotide
gacuguaucuucuuccaga

SEQ ID NO: 3227665 - RNA, 19 nt, Artificial Sequence
  Description of Artificial Sequence: Synthetic oligonucleotide
gaucugaggccauugggac

SEQ ID NO: 3227666 - RNA, 19 nt, Artificial Sequence
  Description of Artificial Sequence: Synthetic oligonucleotide
gacacggucugccagcagc

SEQ ID NO: 3227667 - RNA, 19 nt, Artificial Sequence
  Description of Artificial Sequence: Synthetic oligonucleotide
acagguucaauaagcugcc

SEQ ID NO: 3227668 - RNA, 19 nt, Artificial Sequence
  Description of Artificial Sequence: Synthetic oligonucleotide
cuaugauuucgugaaagac

SEQ ID NO: 3227669 - RNA, 19 nt, Artificial Sequence
  Description of Artificial Sequence: Synthetic oligonucleotide
ugaauggauucuccuuucc

SEQ ID NO: 3227670 - RNA, 19 nt, Artificial Sequence
  Description of Artificial Sequence: Synthetic oligonucleotide
uaggaucugaggccauugg

SEQ ID NO: 3227671 - RNA, 19 nt, Artificial Sequence
  Description of Artificial Sequence: Synthetic oligonucleotide
ucugagaauugaauggauu

SEQ ID NO: 3227672 - RNA, 19 nt, Artificial Sequence
  Description of Artificial Sequence: Synthetic oligonucleotide
ucugaggccauugggacug

SEQ ID NO: 3227673 - RNA, 19 nt, Artificial Sequence
  Description of Artificial Sequence: Synthetic oligonucleotide
acuucuucaaucugagaau

SEQ ID NO: 3227674 - RNA, 19 nt, Artificial Sequence
  Description of Artificial Sequence: Synthetic oligonucleotide
ucuuuucugccacuccucu

SEQ ID NO: 3227675 - RNA, 19 nt, Artificial Sequence
  Description of Artificial Sequence: Synthetic oligonucleotide
cucuaugauuucgugaaag

SEQ ID NO: 3227676 - RNA, 19 nt, Artificial Sequence
  Description of Artificial Sequence: Synthetic oligonucleotide
aggccauugggacuguauc

SEQ ID NO: 3227677 - RNA, 19 nt, Artificial Sequence
  Description of Artificial Sequence: Synthetic oligonucleotide
gugaaagacaaaauccaug

SEQ ID NO: 3227678 - RNA, 19 nt, Artificial Sequence
  Description of Artificial Sequence: Synthetic oligonucleotide
uucuucaaucugagaauug

SEQ ID NO: 3227679 - RNA, 19 nt, Artificial Sequence
  Description of Artificial Sequence: Synthetic oligonucleotide
augauuucgugaaagacaa

SEQ ID NO: 3227680 - RNA, 19 nt, Artificial Sequence
  Description of Artificial Sequence: Synthetic oligonucleotide
cuggccaccucuuuucugc

SEQ ID NO: 3227681 - RNA, 19 nt, Artificial Sequence
  Description of Artificial Sequence: Synthetic oligonucleotide
uggauucuccuuuccuagg

SEQ ID NO: 3227682 - RNA, 19 nt, Artificial Sequence
  Description of Artificial Sequence: Synthetic oligonucleotide
uccagacacggucugccag

SEQ ID NO: 3227683 - RNA, 19 nt, Artificial Sequence
  Description of Artificial Sequence: Synthetic oligonucleotide
ugccacuccucuaugauuu

SEQ ID NO: 3227684 - RNA, 19 nt, Artificial Sequence
  Description of Artificial Sequence: Synthetic oligonucleotide
ugggguggaauccauccac

SEQ ID NO: 3227685 - RNA, 19 nt, Artificial Sequence
  Description of Artificial Sequence: Synthetic oligonucleotide
caauaagcugccacggcug

SEQ ID NO: 3227686 - RNA, 19 nt, Artificial Sequence
  Description of Artificial Sequence: Synthetic oligonucleotide
accucuuuucugccacucc

SEQ ID NO: 3227687 - RNA, 19 nt, Artificial Sequence
  Description of Artificial Sequence: Synthetic oligonucleotide
guggaauccauccacaggu

SEQ ID NO: 3227688 - RNA, 19 nt, Artificial Sequence
  Description of Artificial Sequence: Synthetic oligonucleotide
gagaauugaauggauucuc

SEQ ID NO: 3227689 - RNA, 19 nt, Artificial Sequence
  Description of Artificial Sequence: Synthetic oligonucleotide
cagugaagccaccucauug

SEQ ID NO: 3227690 - RNA, 19 nt, Artificial Sequence
  Description of Artificial Sequence: Synthetic oligonucleotide
gaagccaccucauuggggu

SEQ ID NO: 3227691 - RNA, 19 nt, Artificial Sequence
  Description of Artificial Sequence: Synthetic oligonucleotide
uccuuuccuaggaucugag

SEQ ID NO: 3227692 - RNA, 19 nt, Artificial Sequence
  Description of Artificial Sequence: Synthetic oligonucleotide
ucugccacuccucuaugau

SEQ ID NO: 3227693 - RNA, 19 nt, Artificial Sequence
  Description of Artificial Sequence: Synthetic oligonucleotide
gguggaauccauccacagg

SEQ ID NO: 3227694 - RNA, 19 nt, Artificial Sequence
  Description of Artificial Sequence: Synthetic oligonucleotide
gaauugaauggauucuccu

SEQ ID NO: 3227695 - RNA, 19 nt, Artificial Sequence
  Description of Artificial Sequence: Synthetic oligonucleotide
uugaauggauucuccuuuc

SEQ ID NO: 3227696 - RNA, 19 nt, Artificial Sequence
  Description of Artificial Sequence: Synthetic oligonucleotide
gaauccauccacagguuca

SEQ ID NO: 3227697 - RNA, 19 nt, Artificial Sequence
  Description of Artificial Sequence: Synthetic oligonucleotide
uaagcugccacggcuggcc

SEQ ID NO: 3227698 - RNA, 19 nt, Artificial Sequence
  Description of Artificial Sequence: Synthetic oligonucleotide
gugaagccaccucauuggg

SEQ ID NO: 3227699 - RNA, 19 nt, Artificial Sequence
  Description of Artificial Sequence: Synthetic oligonucleotide
cauccacagguucaauaag

SEQ ID NO: 3227700 - RNA, 19 nt, Artificial Sequence
  Description of Artificial Sequence: Synthetic oligonucleotide
uucuuccagacacggucug

SEQ ID NO: 3227701 - RNA, 19 nt, Artificial Sequence
  Description of Artificial Sequence: Synthetic oligonucleotide
uccauccacagguucaaua

SEQ ID NO: 3227702 - RNA, 19 nt, Artificial Sequence
  Description of Artificial Sequence: Synthetic oligonucleotide
guaucuucuuccagacacg

SEQ ID NO: 3227703 - RNA, 19 nt, Artificial Sequence
  Description of Artificial Sequence: Synthetic oligonucleotide
cugccagcagcagugaagc

SEQ ID NO: 3227704 - RNA, 19 nt, Artificial Sequence
  Description of Artificial Sequence: Synthetic oligonucleotide
acuccucuaugauuucgug

SEQ ID NO: 3227705 - RNA, 19 nt, Artificial Sequence
  Description of Artificial Sequence: Synthetic oligonucleotide
uugggguggaauccaucca

SEQ ID NO: 3227706 - RNA, 19 nt, Artificial Sequence
  Description of Artificial Sequence: Synthetic oligonucleotide
cuuccagacacggucugcc

SEQ ID NO: 3227707 - RNA, 19 nt, Artificial Sequence
  Description of Artificial Sequence: Synthetic oligonucleotide
uuccuaggaucugaggcca

SEQ ID NO: 3227708 - RNA, 19 nt, Artificial Sequence
  Description of Artificial Sequence: Synthetic oligonucleotide
aauccauccacagguucaa

SEQ ID NO: 3227709 - RNA, 19 nt, Artificial Sequence
  Description of Artificial Sequence: Synthetic oligonucleotide
gaaagacaaaauccaugua

SEQ ID NO: 3227710 - RNA, 19 nt, Artificial Sequence
  Description of Artificial Sequence: Synthetic oligonucleotide
uucugccacuccucuauga

SEQ ID NO: 3227711 - RNA, 19 nt, Artificial Sequence
  Description of Artificial Sequence: Synthetic oligonucleotide
uugggacuguaucuucuuc

SEQ ID NO: 3227712 - RNA, 19 nt, Artificial Sequence
  Description of Artificial Sequence: Synthetic oligonucleotide
uuucugccacuccucuaug

SEQ ID NO: 3227713 - RNA, 19 nt, Artificial Sequence
  Description of Artificial Sequence: Synthetic oligonucleotide
auuucgugaaagacaaaau

SEQ ID NO: 3227714 - RNA, 19 nt, Artificial Sequence
  Description of Artificial Sequence: Synthetic oligonucleotide
gaauggauucuccuuuccu

SEQ ID NO: 3227715 - RNA, 19 nt, Artificial Sequence
  Description of Artificial Sequence: Synthetic oligonucleotide
auaagcugccacggcuggc

SEQ ID NO: 3227716 - RNA, 19 nt, Artificial Sequence
  Description of Artificial Sequence: Synthetic oligonucleotide
cuucaaucugagaauugaa

SEQ ID NO: 3227717 - RNA, 19 nt, Artificial Sequence
  Description of Artificial Sequence: Synthetic oligonucleotide
ugcaaugucaaacagguag

SEQ ID NO: 3227718 - RNA, 19 nt, Artificial Sequence
  Description of Artificial Sequence: Synthetic oligonucleotide
auuuucuccaacuggaagc

SEQ ID NO: 3227719 - RNA, 19 nt, Artificial Sequence
  Description of Artificial Sequence: Synthetic oligonucleotide
aaaagaggaguacacuggc

SEQ ID NO: 3227720 - RNA, 19 nt, Artificial Sequence
  Description of Artificial Sequence: Synthetic oligonucleotide
aauaauggguaccacuaac

SEQ ID NO: 3227721 - RNA, 19 nt, Artificial Sequence
  Description of Artificial Sequence: Synthetic oligonucleotide
aaugcguuccuuuugcacg

SEQ ID NO: 3227722 - RNA, 19 nt, Artificial Sequence
  Description of Artificial Sequence: Synthetic oligonucleotide
uucuuuauuccuuugauca

SEQ ID NO: 3227723 - RNA, 19 nt, Artificial Sequence
  Description of Artificial Sequence: Synthetic oligonucleotide
aaacaaacauaucuucugg

SEQ ID NO: 3227724 - RNA, 19 nt, Artificial Sequence
  Description of Artificial Sequence: Synthetic oligonucleotide
uguaauacccuccugaggu

SEQ ID NO: 3227725 - RNA, 19 nt, Artificial Sequence
  Description of Artificial Sequence: Synthetic oligonucleotide
ugauguguaauuuuaaacu

SEQ ID NO: 3227726 - RNA, 19 nt, Artificial Sequence
  Description of Artificial Sequence: Synthetic oligonucleotide
uuuugagcuucuuagaugc

SEQ ID NO: 3227727 - RNA, 19 nt, Artificial Sequence
  Description of Artificial Sequence: Synthetic oligonucleotide
caucauaucuguaauaccc

SEQ ID NO: 3227728 - RNA, 19 nt, Artificial Sequence
  Description of Artificial Sequence: Synthetic oligonucleotide
uaauuuuaaacuccugucc

SEQ ID NO: 3227729 - RNA, 19 nt, Artificial Sequence
  Description of Artificial Sequence: Synthetic oligonucleotide
aauuuuaaacuccuguccu

SEQ ID NO: 3227730 - RNA, 19 nt, Artificial Sequence
  Description of Artificial Sequence: Synthetic oligonucleotide
agcaauguagauuucauug

SEQ ID NO: 3227731 - RNA, 19 nt, Artificial Sequence
  Description of Artificial Sequence: Synthetic oligonucleotide
ucauaacacucacacaugg

SEQ ID NO: 3227732 - RNA, 19 nt, Artificial Sequence
  Description of Artificial Sequence: Synthetic oligonucleotide
caugcuucaagcuaauucc

SEQ ID NO: 3227733 - RNA, 19 nt, Artificial Sequence
  Description of Artificial Sequence: Synthetic oligonucleotide
auaucuucuggcugaaugc

SEQ ID NO: 3227734 - RNA, 19 nt, Artificial Sequence
  Description of Artificial Sequence: Synthetic oligonucleotide
aagaggaguacacuggcuc

SEQ ID NO: 3227735 - RNA, 19 nt, Artificial Sequence
  Description of Artificial Sequence: Synthetic oligonucleotide
guggguaugaaucacggcg

SEQ ID NO: 3227736 - RNA, 19 nt, Artificial Sequence
  Description of Artificial Sequence: Synthetic oligonucleotide
agguacauuucuuuauucc

SEQ ID NO: 3227737 - RNA, 19 nt, Artificial Sequence
  Description of Artificial Sequence: Synthetic oligonucleotide
uacuuaggcauccacuugg

SEQ ID NO: 3227738 - RNA, 19 nt, Artificial Sequence
  Description of Artificial Sequence: Synthetic oligonucleotide
auucauucauugcaugagc

SEQ ID NO: 3227739 - RNA, 19 nt, Artificial Sequence
  Description of Artificial Sequence: Synthetic oligonucleotide
aaacauaucuucuggcuga

SEQ ID NO: 3227740 - RNA, 19 nt, Artificial Sequence
  Description of Artificial Sequence: Synthetic oligonucleotide
acuuggcucauacaauucc

SEQ ID NO: 3227741 - RNA, 19 nt, Artificial Sequence
  Description of Artificial Sequence: Synthetic oligonucleotide
uggguauucauucauugca

SEQ ID NO: 3227742 - RNA, 19 nt, Artificial Sequence
  Description of Artificial Sequence: Synthetic oligonucleotide
aagauacuuaggcauccac

SEQ ID NO: 3227743 - RNA, 19 nt, Artificial Sequence
  Description of Artificial Sequence: Synthetic oligonucleotide
uauuccuuugaucaucucu

SEQ ID NO: 3227744 - RNA, 19 nt, Artificial Sequence
  Description of Artificial Sequence: Synthetic oligonucleotide
acuuauguccuguucauug

SEQ ID NO: 3227745 - RNA, 19 nt, Artificial Sequence
  Description of Artificial Sequence: Synthetic oligonucleotide
uuuuaaacuccuguccugg

SEQ ID NO: 3227746 - RNA, 19 nt, Artificial Sequence
  Description of Artificial Sequence: Synthetic oligonucleotide
ugagcuucuuagaugcugg

SEQ ID NO: 3227747 - RNA, 19 nt, Artificial Sequence
  Description of Artificial Sequence: Synthetic oligonucleotide
uuugaucaucucuugaugu

SEQ ID NO: 3227748 - RNA, 19 nt, Artificial Sequence
  Description of Artificial Sequence: Synthetic oligonucleotide
uucauucauugcaugagcc

SEQ ID NO: 3227749 - RNA, 19 nt, Artificial Sequence
  Description of Artificial Sequence: Synthetic oligonucleotide
aauggguaccacuaacaug

SEQ ID NO: 3227750 - RNA, 19 nt, Artificial Sequence
  Description of Artificial Sequence: Synthetic oligonucleotide
ucugggauguuccuugucc

SEQ ID NO: 3227751 - RNA, 19 nt, Artificial Sequence
  Description of Artificial Sequence: Synthetic oligonucleotide
uuugcuuucucccauguuu

SEQ ID NO: 3227752 - RNA, 19 nt, Artificial Sequence
  Description of Artificial Sequence: Synthetic oligonucleotide
uguccugggaacagaaggg

SEQ ID NO: 3227753 - RNA, 19 nt, Artificial Sequence
  Description of Artificial Sequence: Synthetic oligonucleotide
gcaacaguuuccuugagcg

SEQ ID NO: 3227754 - RNA, 19 nt, Artificial Sequence
  Description of Artificial Sequence: Synthetic oligonucleotide
gucacaaacaaacauaucu

SEQ ID NO: 3227755 - RNA, 19 nt, Artificial Sequence
  Description of Artificial Sequence: Synthetic oligonucleotide
ugaugucacaaacaaacau

SEQ ID NO: 3227756 - RNA, 19 nt, Artificial Sequence
  Description of Artificial Sequence: Synthetic oligonucleotide
agcaacaguuuccuugagc

SEQ ID NO: 3227757 - RNA, 19 nt, Artificial Sequence
  Description of Artificial Sequence: Synthetic oligonucleotide
caugaaaagaggaguacac

SEQ ID NO: 3227758 - RNA, 19 nt, Artificial Sequence
  Description of Artificial Sequence: Synthetic oligonucleotide
aacagguagucauaacacu

SEQ ID NO: 3227759 - RNA, 19 nt, Artificial Sequence
  Description of Artificial Sequence: Synthetic oligonucleotide
cauaucuucuggcugaaug

SEQ ID NO: 3227760 - RNA, 19 nt, Artificial Sequence
  Description of Artificial Sequence: Synthetic oligonucleotide
caauguagauuucauugcc

SEQ ID NO: 3227761 - RNA, 19 nt, Artificial Sequence
  Description of Artificial Sequence: Synthetic oligonucleotide
aaacuguuugcaaaguucu

SEQ ID NO: 3227762 - RNA, 19 nt, Artificial Sequence
  Description of Artificial Sequence: Synthetic oligonucleotide
gguaaaacuguuugcaaag

SEQ ID NO: 3227763 - RNA, 19 nt, Artificial Sequence
  Description of Artificial Sequence: Synthetic oligonucleotide
uuuugcacgccugagggag

SEQ ID NO: 3227764 - RNA, 19 nt, Artificial Sequence
  Description of Artificial Sequence: Synthetic oligonucleotide
gaguguucucaauaauggg

SEQ ID NO: 3227765 - RNA, 19 nt, Artificial Sequence
  Description of Artificial Sequence: Synthetic oligonucleotide
cuucuuagaugcuggaggc

SEQ ID NO: 3227766 - RNA, 19 nt, Artificial Sequence
  Description of Artificial Sequence: Synthetic oligonucleotide
gauuucauugccaugcuuc

SEQ ID NO: 3227767 - RNA, 19 nt, Artificial Sequence
  Description of Artificial Sequence: Synthetic oligonucleotide
cauaucuguaauacccucc

SEQ ID NO: 3227768 - RNA, 19 nt, Artificial Sequence
  Description of Artificial Sequence: Synthetic oligonucleotide
uuaggcauccacuuggcuc

SEQ ID NO: 3227769 - RNA, 19 nt, Artificial Sequence
  Description of Artificial Sequence: Synthetic oligonucleotide
uuagaguggguaugaauca

SEQ ID NO: 3227770 - RNA, 19 nt, Artificial Sequence
  Description of Artificial Sequence: Synthetic oligonucleotide
agaaggguggccaugacag

SEQ ID NO: 3227771 - RNA, 19 nt, Artificial Sequence
  Description of Artificial Sequence: Synthetic oligonucleotide
acugcaaugucaaacaggu

SEQ ID NO: 3227772 - RNA, 19 nt, Artificial Sequence
  Description of Artificial Sequence: Synthetic oligonucleotide
uguuucuccccacacguac

SEQ ID NO: 3227773 - RNA, 19 nt, Artificial Sequence
  Description of Artificial Sequence: Synthetic oligonucleotide
ucuuagaugcuggaggccc

SEQ ID NO: 3227774 - RNA, 19 nt, Artificial Sequence
  Description of Artificial Sequence: Synthetic oligonucleotide
caaacagguagucauaaca

SEQ ID NO: 3227775 - RNA, 19 nt, Artificial Sequence
  Description of Artificial Sequence: Synthetic oligonucleotide
uuuaaacuccuguccuggg

SEQ ID NO: 3227776 - RNA, 19 nt, Artificial Sequence
  Description of Artificial Sequence: Synthetic oligonucleotide
auaucuguaauacccuccu

SEQ ID NO: 3227777 - RNA, 19 nt, Artificial Sequence
  Description of Artificial Sequence: Synthetic oligonucleotide
auuucuuuauuccuuugau

SEQ ID NO: 3227778 - RNA, 19 nt, Artificial Sequence
  Description of Artificial Sequence: Synthetic oligonucleotide
uggguaugaaucacggcgc

SEQ ID NO: 3227779 - RNA, 19 nt, Artificial Sequence
  Description of Artificial Sequence: Synthetic oligonucleotide
uaggcauccacuuggcuca

SEQ ID NO: 3227780 - RNA, 19 nt, Artificial Sequence
  Description of Artificial Sequence: Synthetic oligonucleotide
caaacauaucuucuggcug

SEQ ID NO: 3227781 - RNA, 19 nt, Artificial Sequence
  Description of Artificial Sequence: Synthetic oligonucleotide
auuuuaaacuccuguccug

SEQ ID NO: 3227782 - RNA, 19 nt, Artificial Sequence
  Description of Artificial Sequence: Synthetic oligonucleotide
uccuuuugcacgccugagg

SEQ ID NO: 3227783 - RNA, 19 nt, Artificial Sequence
  Description of Artificial Sequence: Synthetic oligonucleotide
uuccuuguccugcacgccg

SEQ ID NO: 3227784 - RNA, 19 nt, Artificial Sequence
  Description of Artificial Sequence: Synthetic oligonucleotide
uguuccuuguccugcacgc

SEQ ID NO: 3227785 - RNA, 19 nt, Artificial Sequence
  Description of Artificial Sequence: Synthetic oligonucleotide
ugguaaaacuguuugcaaa

SEQ ID NO: 3227786 - RNA, 19 nt, Artificial Sequence
  Description of Artificial Sequence: Synthetic oligonucleotide
uuucuuuauuccuuugauc

SEQ ID NO: 3227787 - RNA, 19 nt, Artificial Sequence
  Description of Artificial Sequence: Synthetic oligonucleotide
uugaugucacaaacaaaca

SEQ ID NO: 3227788 - RNA, 19 nt, Artificial Sequence
  Description of Artificial Sequence: Synthetic oligonucleotide
uugaucaucucuugaugug

SEQ ID NO: 3227789 - RNA, 19 nt, Artificial Sequence
  Description of Artificial Sequence: Synthetic oligonucleotide
acagguagucauaacacuc

SEQ ID NO: 3227790 - RNA, 19 nt, Artificial Sequence
  Description of Artificial Sequence: Synthetic oligonucleotide
ggugacccagcccagaugg

SEQ ID NO: 3227791 - RNA, 19 nt, Artificial Sequence
  Description of Artificial Sequence: Synthetic oligonucleotide
aguggguaugaaucacggc

SEQ ID NO: 3227792 - RNA, 19 nt, Artificial Sequence
  Description of Artificial Sequence: Synthetic oligonucleotide
uuaaacuccuguccuggga

SEQ ID NO: 3227793 - RNA, 19 nt, Artificial Sequence
  Description of Artificial Sequence: Synthetic oligonucleotide
gagacugcaaugucaaaca

SEQ ID NO: 3227794 - RNA, 19 nt, Artificial Sequence
  Description of Artificial Sequence: Synthetic oligonucleotide
ggaguguucucaauaaugg

SEQ ID NO: 3227795 - RNA, 19 nt, Artificial Sequence
  Description of Artificial Sequence: Synthetic oligonucleotide
ucauucauugcaugagcca

SEQ ID NO: 3227796 - RNA, 19 nt, Artificial Sequence
  Description of Artificial Sequence: Synthetic oligonucleotide
uccaacuggaagcugugcu

SEQ ID NO: 3227797 - RNA, 19 nt, Artificial Sequence
  Description of Artificial Sequence: Synthetic oligonucleotide
uaauggguaccacuaacau

SEQ ID NO: 3227798 - RNA, 19 nt, Artificial Sequence
  Description of Artificial Sequence: Synthetic oligonucleotide
ucuccccacacguacaccc

SEQ ID NO: 3227799 - RNA, 19 nt, Artificial Sequence
  Description of Artificial Sequence: Synthetic oligonucleotide
gacugcaaugucaaacagg

SEQ ID NO: 3227800 - RNA, 19 nt, Artificial Sequence
  Description of Artificial Sequence: Synthetic oligonucleotide
uucuccaacuggaagcugu

SEQ ID NO: 3227801 - RNA, 19 nt, Artificial Sequence
  Description of Artificial Sequence: Synthetic oligonucleotide
auccauucccaucuucuuc

SEQ ID NO: 3227802 - RNA, 19 nt, Artificial Sequence
  Description of Artificial Sequence: Synthetic oligonucleotide
agguagucauaacacucac

SEQ ID NO: 3227803 - RNA, 19 nt, Artificial Sequence
  Description of Artificial Sequence: Synthetic oligonucleotide
uugaagauacuuaggcauc

SEQ ID NO: 3227804 - RNA, 19 nt, Artificial Sequence
  Description of Artificial Sequence: Synthetic oligonucleotide
uauguccuguucauugaug

SEQ ID NO: 3227805 - RNA, 19 nt, Artificial Sequence
  Description of Artificial Sequence: Synthetic oligonucleotide
ugcaugagccauucguucc

SEQ ID NO: 3227806 - RNA, 19 nt, Artificial Sequence
  Description of Artificial Sequence: Synthetic oligonucleotide
aagcuaauuccuccuccag

SEQ ID NO: 3227807 - RNA, 19 nt, Artificial Sequence
  Description of Artificial Sequence: Synthetic oligonucleotide
uguucauugaugucacaaa

SEQ ID NO: 3227808 - RNA, 19 nt, Artificial Sequence
  Description of Artificial Sequence: Synthetic oligonucleotide
uguaagcauucaugaaaag

SEQ ID NO: 3227809 - RNA, 19 nt, Artificial Sequence
  Description of Artificial Sequence: Synthetic oligonucleotide
aauguagauuucauugcca

SEQ ID NO: 3227810 - RNA, 19 nt, Artificial Sequence
  Description of Artificial Sequence: Synthetic oligonucleotide
ucuugauguguaauuuuaa

SEQ ID NO: 3227811 - RNA, 19 nt, Artificial Sequence
  Description of Artificial Sequence: Synthetic oligonucleotide
cugaaugcguuccuuuugc

SEQ ID NO: 3227812 - RNA, 19 nt, Artificial Sequence
  Description of Artificial Sequence: Synthetic oligonucleotide
ucaggaguguucucaauaa

SEQ ID NO: 3227813 - RNA, 19 nt, Artificial Sequence
  Description of Artificial Sequence: Synthetic oligonucleotide
ugugcuggauccauuccca

SEQ ID NO: 3227814 - RNA, 19 nt, Artificial Sequence
  Description of Artificial Sequence: Synthetic oligonucleotide
ucucccauguuucucccca

SEQ ID NO: 3227815 - RNA, 19 nt, Artificial Sequence
  Description of Artificial Sequence: Synthetic oligonucleotide
agccauucguuccuugagg

SEQ ID NO: 3227816 - RNA, 19 nt, Artificial Sequence
  Description of Artificial Sequence: Synthetic oligonucleotide
aauuccuccuccagugccg

SEQ ID NO: 3227817 - RNA, 19 nt, Artificial Sequence
  Description of Artificial Sequence: Synthetic oligonucleotide
uuggcuaauaaauagaggg

SEQ ID NO: 3227818 - RNA, 19 nt, Artificial Sequence
  Description of Artificial Sequence: Synthetic oligonucleotide
auaaauagaggguagguac

SEQ ID NO: 3227819 - RNA, 19 nt, Artificial Sequence
  Description of Artificial Sequence: Synthetic oligonucleotide
aaauauaugagcugggcgu

SEQ ID NO: 3227820 - RNA, 19 nt, Artificial Sequence
  Description of Artificial Sequence: Synthetic oligonucleotide
uaaauauaugagcugggcg

SEQ ID NO: 3227821 - RNA, 19 nt, Artificial Sequence
  Description of Artificial Sequence: Synthetic oligonucleotide
ugaguuggcuaauaaauag

SEQ ID NO: 3227822 - RNA, 19 nt, Artificial Sequence
  Description of Artificial Sequence: Synthetic oligonucleotide
caauaaauauaugagcugg

SEQ ID NO: 3227823 - RNA, 19 nt, Artificial Sequence
  Description of Artificial Sequence: Synthetic oligonucleotide
uuuucguuuuguuuaaggc

SEQ ID NO: 3227824 - RNA, 19 nt, Artificial Sequence
  Description of Artificial Sequence: Synthetic oligonucleotide
guagguaccagcaaggagg

SEQ ID NO: 3227825 - RNA, 19 nt, Artificial Sequence
  Description of Artificial Sequence: Synthetic oligonucleotide
uucguuuuguuuaaggcac

SEQ ID NO: 3227826 - RNA, 19 nt, Artificial Sequence
  Description of Artificial Sequence: Synthetic oligonucleotide
auaaauauaugagcugggc

SEQ ID NO: 3227827 - RNA, 19 nt, Artificial Sequence
  Description of Artificial Sequence: Synthetic oligonucleotide
agcaccaccguacaggugg

SEQ ID NO: 3227828 - RNA, 19 nt, Artificial Sequence
  Description of Artificial Sequence: Synthetic oligonucleotide
uuucguuuuguuuaaggca

SEQ ID NO: 3227829 - RNA, 19 nt, Artificial Sequence
  Description of Artificial Sequence: Synthetic oligonucleotide
uuuuguuuaaggcacugaa

SEQ ID NO: 3227830 - RNA, 19 nt, Artificial Sequence
  Description of Artificial Sequence: Synthetic oligonucleotide
aauaaauauaugagcuggg

SEQ ID NO: 3227831 - RNA, 19 nt, Artificial Sequence
  Description of Artificial Sequence: Synthetic oligonucleotide
uuguuuaaggcacugaauu

SEQ ID NO: 3227832 - RNA, 19 nt, Artificial Sequence
  Description of Artificial Sequence: Synthetic oligonucleotide
gacggcaauaaauauauga

SEQ ID NO: 3227833 - RNA, 19 nt, Artificial Sequence
  Description of Artificial Sequence: Synthetic oligonucleotide
gagcgagucauucagcagg

SEQ ID NO: 3227834 - RNA, 19 nt, Artificial Sequence
  Description of Artificial Sequence: Synthetic oligonucleotide
uaaauagaggguagguacc

SEQ ID NO: 3227835 - RNA, 19 nt, Artificial Sequence
  Description of Artificial Sequence: Synthetic oligonucleotide
aacagcaccaccguacagg

SEQ ID NO: 3227836 - RNA, 19 nt, Artificial Sequence
  Description of Artificial Sequence: Synthetic oligonucleotide
auagaggguagguaccagc

SEQ ID NO: 3227837 - RNA, 19 nt, Artificial Sequence
  Description of Artificial Sequence: Synthetic oligonucleotide
uucagcagggaugaguugg

SEQ ID NO: 3227838 - RNA, 19 nt, Artificial Sequence
  Description of Artificial Sequence: Synthetic oligonucleotide
uucuaugccccuuaucuug

SEQ ID NO: 3227839 - RNA, 19 nt, Artificial Sequence
  Description of Artificial Sequence: Synthetic oligonucleotide
accuccagggaacagcacc

SEQ ID NO: 3227840 - RNA, 19 nt, Artificial Sequence
  Description of Artificial Sequence: Synthetic oligonucleotide
auuccugaggguccugucc

SEQ ID NO: 3227841 - RNA, 19 nt, Artificial Sequence
  Description of Artificial Sequence: Synthetic oligonucleotide
uuaucuuggagggagcgag

SEQ ID NO: 3227842 - RNA, 19 nt, Artificial Sequence
  Description of Artificial Sequence: Synthetic oligonucleotide
cuaauaaauagaggguagg

SEQ ID NO: 3227843 - RNA, 19 nt, Artificial Sequence
  Description of Artificial Sequence: Synthetic oligonucleotide
guuuaaggcacugaauucc

SEQ ID NO: 3227844 - RNA, 19 nt, Artificial Sequence
  Description of Artificial Sequence: Synthetic oligonucleotide
ucuaugccccuuaucuugg

SEQ ID NO: 3227845 - RNA, 19 nt, Artificial Sequence
  Description of Artificial Sequence: Synthetic oligonucleotide
aauaaauagaggguaggua

SEQ ID NO: 3227846 - RNA, 19 nt, Artificial Sequence
  Description of Artificial Sequence: Synthetic oligonucleotide
aauauaugagcugggcgug

SEQ ID NO: 3227847 - RNA, 19 nt, Artificial Sequence
  Description of Artificial Sequence: Synthetic oligonucleotide
aaggcacugaauuccugag

SEQ ID NO: 3227848 - RNA, 19 nt, Artificial Sequence
  Description of Artificial Sequence: Synthetic oligonucleotide
uucugcuucucucucuucc

SEQ ID NO: 3227849 - RNA, 19 nt, Artificial Sequence
  Description of Artificial Sequence: Synthetic oligonucleotide
aguuggcuaauaaauagag

SEQ ID NO: 3227850 - RNA, 19 nt, Artificial Sequence
  Description of Artificial Sequence: Synthetic oligonucleotide
uuuaaggcacugaauuccu

SEQ ID NO: 3227851 - RNA, 19 nt, Artificial Sequence
  Description of Artificial Sequence: Synthetic oligonucleotide
uagguaccagcaaggaggg

SEQ ID NO: 3227852 - RNA, 19 nt, Artificial Sequence
  Description of Artificial Sequence: Synthetic oligonucleotide
ggcacugaauuccugaggg

SEQ ID NO: 3227853 - RNA, 19 nt, Artificial Sequence
  Description of Artificial Sequence: Synthetic oligonucleotide
acggcaauaaauauaugag

SEQ ID NO: 3227854 - RNA, 19 nt, Artificial Sequence
  Description of Artificial Sequence: Synthetic oligonucleotide
gaggguagguaccagcaag

SEQ ID NO: 3227855 - RNA, 19 nt, Artificial Sequence
  Description of Artificial Sequence: Synthetic oligonucleotide
uaauaaauagaggguaggu

SEQ ID NO: 3227856 - RNA, 19 nt, Artificial Sequence
  Description of Artificial Sequence: Synthetic oligonucleotide
ugccccuuaucuuggaggg

SEQ ID NO: 3227857 - RNA, 19 nt, Artificial Sequence
  Description of Artificial Sequence: Synthetic oligonucleotide
uaaggcacugaauuccuga

SEQ ID NO: 3227858 - RNA, 19 nt, Artificial Sequence
  Description of Artificial Sequence: Synthetic oligonucleotide
caaggagggauuugggagg

SEQ ID NO: 3227859 - RNA, 19 nt, Artificial Sequence
  Description of Artificial Sequence: Synthetic oligonucleotide
uuuguuuaaggcacugaau

SEQ ID NO: 3227860 - RNA, 19 nt, Artificial Sequence
  Description of Artificial Sequence: Synthetic oligonucleotide
uguuuaaggcacugaauuc

SEQ ID NO: 3227861 - RNA, 19 nt, Artificial Sequence
  Description of Artificial Sequence: Synthetic oligonucleotide
uggcuaauaaauagagggu

SEQ ID NO: 3227862 - RNA, 19 nt, Artificial Sequence
  Description of Artificial Sequence: Synthetic oligonucleotide
acugaauuccugagggucc

SEQ ID NO: 3227863 - RNA, 19 nt, Artificial Sequence
  Description of Artificial Sequence: Synthetic oligonucleotide
aauuccugaggguccuguc

SEQ ID NO: 3227864 - RNA, 19 nt, Artificial Sequence
  Description of Artificial Sequence: Synthetic oligonucleotide
gagggagcgagucauucag

SEQ ID NO: 3227865 - RNA, 19 nt, Artificial Sequence
  Description of Artificial Sequence: Synthetic oligonucleotide
uagaggguagguaccagca

SEQ ID NO: 3227866 - RNA, 19 nt, Artificial Sequence
  Description of Artificial Sequence: Synthetic oligonucleotide
augccccuuaucuuggagg

SEQ ID NO: 3227867 - RNA, 19 nt, Artificial Sequence
  Description of Artificial Sequence: Synthetic oligonucleotide
aaauagaggguagguacca

SEQ ID NO: 3227868 - RNA, 19 nt, Artificial Sequence
  Description of Artificial Sequence: Synthetic oligonucleotide
ucagucuguggauuucugc

SEQ ID NO: 3227869 - RNA, 19 nt, Artificial Sequence
  Description of Artificial Sequence: Synthetic oligonucleotide
gaugaguuggcuaauaaau

SEQ ID NO: 3227870 - RNA, 19 nt, Artificial Sequence
  Description of Artificial Sequence: Synthetic oligonucleotide
uggauuucugcuucucucu

SEQ ID NO: 3227871 - RNA, 19 nt, Artificial Sequence
  Description of Artificial Sequence: Synthetic oligonucleotide
guuggcuaauaaauagagg

SEQ ID NO: 3227872 - RNA, 19 nt, Artificial Sequence
  Description of Artificial Sequence: Synthetic oligonucleotide
gagucauucagcagggaug

SEQ ID NO: 3227873 - RNA, 19 nt, Artificial Sequence
  Description of Artificial Sequence: Synthetic oligonucleotide
uccucugaggggcugguca

SEQ ID NO: 3227874 - RNA, 19 nt, Artificial Sequence
  Description of Artificial Sequence: Synthetic oligonucleotide
uguggauuucugcuucucu

SEQ ID NO: 3227875 - RNA, 19 nt, Artificial Sequence
  Description of Artificial Sequence: Synthetic oligonucleotide
gcaaggagggauuugggag

SEQ ID NO: 3227876 - RNA, 19 nt, Artificial Sequence
  Description of Artificial Sequence: Synthetic oligonucleotide
ugaggggcuggucaccucc

SEQ ID NO: 3227877 - RNA, 19 nt, Artificial Sequence
  Description of Artificial Sequence: Synthetic oligonucleotide
aaggagggauuugggaggg

SEQ ID NO: 3227878 - RNA, 19 nt, Artificial Sequence
  Description of Artificial Sequence: Synthetic oligonucleotide
ucaccuccagggaacagca

SEQ ID NO: 3227879 - RNA, 19 nt, Artificial Sequence
  Description of Artificial Sequence: Synthetic oligonucleotide
gcaauaaauauaugagcug

SEQ ID NO: 3227880 - RNA, 19 nt, Artificial Sequence
  Description of Artificial Sequence: Synthetic oligonucleotide
aauagaggguagguaccag

SEQ ID NO: 3227881 - RNA, 19 nt, Artificial Sequence
  Description of Artificial Sequence: Synthetic oligonucleotide
uaugccccuuaucuuggag

SEQ ID NO: 3227882 - RNA, 19 nt, Artificial Sequence
  Description of Artificial Sequence: Synthetic oligonucleotide
uauaugagcugggcguggg

SEQ ID NO: 3227883 - RNA, 19 nt, Artificial Sequence
  Description of Artificial Sequence: Synthetic oligonucleotide
ggauuugggagggugacgg

SEQ ID NO: 3227884 - RNA, 19 nt, Artificial Sequence
  Description of Artificial Sequence: Synthetic oligonucleotide
ucauucagcagggaugagu

SEQ ID NO: 3227885 - RNA, 19 nt, Artificial Sequence
  Description of Artificial Sequence: Synthetic oligonucleotide
agucauucagcagggauga

SEQ ID NO: 3227886 - RNA, 19 nt, Artificial Sequence
  Description of Artificial Sequence: Synthetic oligonucleotide
agcaaggagggauuuggga

SEQ ID NO: 3227887 - RNA, 19 nt, Artificial Sequence
  Description of Artificial Sequence: Synthetic oligonucleotide
uuaaggcacugaauuccug

SEQ ID NO: 3227888 - RNA, 19 nt, Artificial Sequence
  Description of Artificial Sequence: Synthetic oligonucleotide
uuccugaggguccuguccu

SEQ ID NO: 3227889 - RNA, 19 nt, Artificial Sequence
  Description of Artificial Sequence: Synthetic oligonucleotide
aggcacugaauuccugagg

SEQ ID NO: 3227890 - RNA, 19 nt, Artificial Sequence
  Description of Artificial Sequence: Synthetic oligonucleotide
ucagcagggaugaguuggc

SEQ ID NO: 3227891 - RNA, 19 nt, Artificial Sequence
  Description of Artificial Sequence: Synthetic oligonucleotide
gcuaauaaauagaggguag

SEQ ID NO: 3227892 - RNA, 19 nt, Artificial Sequence
  Description of Artificial Sequence: Synthetic oligonucleotide
guggauuucugcuucucuc

SEQ ID NO: 3227893 - RNA, 19 nt, Artificial Sequence
  Description of Artificial Sequence: Synthetic oligonucleotide
uuugggagggugacggcaa

SEQ ID NO: 3227894 - RNA, 19 nt, Artificial Sequence
  Description of Artificial Sequence: Synthetic oligonucleotide
agggauuugggagggugac

SEQ ID NO: 3227895 - RNA, 19 nt, Artificial Sequence
  Description of Artificial Sequence: Synthetic oligonucleotide
ccagggaacagcaccaccg

SEQ ID NO: 3227896 - RNA, 19 nt, Artificial Sequence
  Description of Artificial Sequence: Synthetic oligonucleotide
uccuguccuucuaugcccc

SEQ ID NO: 3227897 - RNA, 19 nt, Artificial Sequence
  Description of Artificial Sequence: Synthetic oligonucleotide
ggcaauaaauauaugagcu

SEQ ID NO: 3227898 - RNA, 19 nt, Artificial Sequence
  Description of Artificial Sequence: Synthetic oligonucleotide
acagcaccaccguacaggu

SEQ ID NO: 3227899 - RNA, 19 nt, Artificial Sequence
  Description of Artificial Sequence: Synthetic oligonucleotide
ggggucucuccucugaggg

SEQ ID NO: 3227900 - RNA, 19 nt, Artificial Sequence
  Description of Artificial Sequence: Synthetic oligonucleotide
ucugcuucucucucuuccu

SEQ ID NO: 3227901 - RNA, 19 nt, Artificial Sequence
  Description of Artificial Sequence: Synthetic oligonucleotide
cacugaauuccugaggguc

SEQ ID NO: 3227902 - RNA, 19 nt, Artificial Sequence
  Description of Artificial Sequence: Synthetic oligonucleotide
uacaggugggguuccucag

SEQ ID NO: 3227903 - RNA, 19 nt, Artificial Sequence
  Description of Artificial Sequence: Synthetic oligonucleotide
guccuguccuucuaugccc

SEQ ID NO: 3227904 - RNA, 19 nt, Artificial Sequence
  Description of Artificial Sequence: Synthetic oligonucleotide
uggggucucuccucugagg

SEQ ID NO: 3227905 - RNA, 19 nt, Artificial Sequence
  Description of Artificial Sequence: Synthetic oligonucleotide
ucuuggagggagcgaguca

SEQ ID NO: 3227906 - RNA, 19 nt, Artificial Sequence
  Description of Artificial Sequence: Synthetic oligonucleotide
gaguuggcuaauaaauaga

SEQ ID NO: 3227907 - RNA, 19 nt, Artificial Sequence
  Description of Artificial Sequence: Synthetic oligonucleotide
uccagggaacagcaccacc

SEQ ID NO: 3227908 - RNA, 19 nt, Artificial Sequence
  Description of Artificial Sequence: Synthetic oligonucleotide
auaugagcugggcgugggg

SEQ ID NO: 3227909 - RNA, 19 nt, Artificial Sequence
  Description of Artificial Sequence: Synthetic oligonucleotide
augagcugggcgugggguc

SEQ ID NO: 3227910 - RNA, 19 nt, Artificial Sequence
  Description of Artificial Sequence: Synthetic oligonucleotide
uaugagcugggcguggggu

SEQ ID NO: 3227911 - RNA, 19 nt, Artificial Sequence
  Description of Artificial Sequence: Synthetic oligonucleotide
aucuuggagggagcgaguc

SEQ ID NO: 3227912 - RNA, 19 nt, Artificial Sequence
  Description of Artificial Sequence: Synthetic oligonucleotide
gguagguaccagcaaggag

SEQ ID NO: 3227913 - RNA, 19 nt, Artificial Sequence
  Description of Artificial Sequence: Synthetic oligonucleotide
auauaugagcugggcgugg

SEQ ID NO: 3227914 - RNA, 19 nt, Artificial Sequence
  Description of Artificial Sequence: Synthetic oligonucleotide
ugcuucucucucuuccucu

SEQ ID NO: 3227915 - RNA, 19 nt, Artificial Sequence
  Description of Artificial Sequence: Synthetic oligonucleotide
auuucugcuucucucucuu

SEQ ID NO: 3227916 - RNA, 19 nt, Artificial Sequence
  Description of Artificial Sequence: Synthetic oligonucleotide
gggcuggucaccuccaggg

SEQ ID NO: 3227917 - RNA, 19 nt, Artificial Sequence
  Description of Artificial Sequence: Synthetic oligonucleotide
aaaguugccaaaauaaucc

SEQ ID NO: 3227918 - RNA, 19 nt, Artificial Sequence
  Description of Artificial Sequence: Synthetic oligonucleotide
aaaaucuuccgcuuggucg

SEQ ID NO: 3227919 - RNA, 19 nt, Artificial Sequence
  Description of Artificial Sequence: Synthetic oligonucleotide
uuggucguaaugaagaggg

SEQ ID NO: 3227920 - RNA, 19 nt, Artificial Sequence
  Description of Artificial Sequence: Synthetic oligonucleotide
ucuacuuccaaaaucuucc

SEQ ID NO: 3227921 - RNA, 19 nt, Artificial Sequence
  Description of Artificial Sequence: Synthetic oligonucleotide
aauacgaugaccaggaacu

SEQ ID NO: 3227922 - RNA, 19 nt, Artificial Sequence
  Description of Artificial Sequence: Synthetic oligonucleotide
aaauaauccucacugguga

SEQ ID NO: 3227923 - RNA, 19 nt, Artificial Sequence
  Description of Artificial Sequence: Synthetic oligonucleotide
aaaaguugccaaaauaauc

SEQ ID NO: 3227924 - RNA, 19 nt, Artificial Sequence
  Description of Artificial Sequence: Synthetic oligonucleotide
gacaggauugcugaaaggg

SEQ ID NO: 3227925 - RNA, 19 nt, Artificial Sequence
  Description of Artificial Sequence: Synthetic oligonucleotide
aaagggaauacgaugacca

SEQ ID NO: 3227926 - RNA, 19 nt, Artificial Sequence
  Description of Artificial Sequence: Synthetic oligonucleotide
ugaagagggaagcagacuc

SEQ ID NO: 3227927 - RNA, 19 nt, Artificial Sequence
  Description of Artificial Sequence: Synthetic oligonucleotide
aaugucagcagcagcacgg

SEQ ID NO: 3227928 - RNA, 19 nt, Artificial Sequence
  Description of Artificial Sequence: Synthetic oligonucleotide
uccaaaaucuuccgcuugg

SEQ ID NO: 3227929 - RNA, 19 nt, Artificial Sequence
  Description of Artificial Sequence: Synthetic oligonucleotide
aaaucuuccgcuuggucgu

SEQ ID NO: 3227930 - RNA, 19 nt, Artificial Sequence
  Description of Artificial Sequence: Synthetic oligonucleotide
aaugaagagggaagcagac

SEQ ID NO: 3227931 - RNA, 19 nt, Artificial Sequence
  Description of Artificial Sequence: Synthetic oligonucleotide
aaaauaauccucacuggug

SEQ ID NO: 3227932 - RNA, 19 nt, Artificial Sequence
  Description of Artificial Sequence: Synthetic oligonucleotide
auaaaaguugccaaaauaa

SEQ ID NO: 3227933 - RNA, 19 nt, Artificial Sequence
  Description of Artificial Sequence: Synthetic oligonucleotide
uaaugaagagggaagcaga

SEQ ID NO: 3227934 - RNA, 19 nt, Artificial Sequence
  Description of Artificial Sequence: Synthetic oligonucleotide
uaaaaguugccaaaauaau

SEQ ID NO: 3227935 - RNA, 19 nt, Artificial Sequence
  Description of Artificial Sequence: Synthetic oligonucleotide
uaggaagaucccaagggag

SEQ ID NO: 3227936 - RNA, 19 nt, Artificial Sequence
  Description of Artificial Sequence: Synthetic oligonucleotide
acuuccaaaaucuuccgcu

SEQ ID NO: 3227937 - RNA, 19 nt, Artificial Sequence
  Description of Artificial Sequence: Synthetic oligonucleotide
uagacaggauugcugaaag

SEQ ID NO: 3227938 - RNA, 19 nt, Artificial Sequence
  Description of Artificial Sequence: Synthetic oligonucleotide
gccaaaauaauccucacug

SEQ ID NO: 3227939 - RNA, 19 nt, Artificial Sequence
  Description of Artificial Sequence: Synthetic oligonucleotide
gaauacgaugaccaggaac

SEQ ID NO: 3227940 - RNA, 19 nt, Artificial Sequence
  Description of Artificial Sequence: Synthetic oligonucleotide
aagaucccaagggaguacc

SEQ ID NO: 3227941 - RNA, 19 nt, Artificial Sequence
  Description of Artificial Sequence: Synthetic oligonucleotide
uuuuccccauaaaaguugc

SEQ ID NO: 3227942 - RNA, 19 nt, Artificial Sequence
  Description of Artificial Sequence: Synthetic oligonucleotide
auugcugaaagggaauacg

SEQ ID NO: 3227943 - RNA, 19 nt, Artificial Sequence
  Description of Artificial Sequence: Synthetic oligonucleotide
uaauccucacuggugaagg

SEQ ID NO: 3227944 - RNA, 19 nt, Artificial Sequence
  Description of Artificial Sequence: Synthetic oligonucleotide
uccagggucaggaauguca

SEQ ID NO: 3227945 - RNA, 19 nt, Artificial Sequence
  Description of Artificial Sequence: Synthetic oligonucleotide
aaguugccaaaauaauccu

SEQ ID NO: 3227946 - RNA, 19 nt, Artificial Sequence
  Description of Artificial Sequence: Synthetic oligonucleotide
guaaugaagagggaagcag

SEQ ID NO: 3227947 - RNA, 19 nt, Artificial Sequence
  Description of Artificial Sequence: Synthetic oligonucleotide
uugcugaaagggaauacga

SEQ ID NO: 3227948 - RNA, 19 nt, Artificial Sequence
  Description of Artificial Sequence: Synthetic oligonucleotide
accaggaacuucuccaggg

SEQ ID NO: 3227949 - RNA, 19 nt, Artificial Sequence
  Description of Artificial Sequence: Synthetic oligonucleotide
uucuccagggucaggaaug

SEQ ID NO: 3227950 - RNA, 19 nt, Artificial Sequence
  Description of Artificial Sequence: Synthetic oligonucleotide
cugaaagggaauacgauga

SEQ ID NO: 3227951 - RNA, 19 nt, Artificial Sequence
  Description of Artificial Sequence: Synthetic oligonucleotide
aacggcugcuaugaggaac

SEQ ID NO: 3227952 - RNA, 19 nt, Artificial Sequence
  Description of Artificial Sequence: Synthetic oligonucleotide
augaccaggaacuucucca

SEQ ID NO: 3227953 - RNA, 19 nt, Artificial Sequence
  Description of Artificial Sequence: Synthetic oligonucleotide
agcacggagaccuccgugg

SEQ ID NO: 3227954 - RNA, 19 nt, Artificial Sequence
  Description of Artificial Sequence: Synthetic oligonucleotide
aauccucacuggugaaggg

SEQ ID NO: 3227955 - RNA, 19 nt, Artificial Sequence
  Description of Artificial Sequence: Synthetic oligonucleotide
aagggaauacgaugaccag

SEQ ID NO: 3227956 - RNA, 19 nt, Artificial Sequence
  Description of Artificial Sequence: Synthetic oligonucleotide
cuaugaggaacccuacccc

SEQ ID NO: 3227957 - RNA, 19 nt, Artificial Sequence
  Description of Artificial Sequence: Synthetic oligonucleotide
gaaugucagcagcagcacg

SEQ ID NO: 3227958 - RNA, 19 nt, Artificial Sequence
  Description of Artificial Sequence: Synthetic oligonucleotide
ucagcagcagcacggagac

SEQ ID NO: 3227959 - RNA, 19 nt, Artificial Sequence
  Description of Artificial Sequence: Synthetic oligonucleotide
gagaccuccguggacagcg

SEQ ID NO: 3227960 - RNA, 19 nt, Artificial Sequence
  Description of Artificial Sequence: Synthetic oligonucleotide
agguagacaggauugcuga

SEQ ID NO: 3227961 - RNA, 19 nt, Artificial Sequence
  Description of Artificial Sequence: Synthetic oligonucleotide
acccucuacuuccaaaauc

SEQ ID NO: 3227962 - RNA, 19 nt, Artificial Sequence
  Description of Artificial Sequence: Synthetic oligonucleotide
uacuuccaaaaucuuccgc

SEQ ID NO: 3227963 - RNA, 19 nt, Artificial Sequence
  Description of Artificial Sequence: Synthetic oligonucleotide
gaugaccaggaacuucucc

SEQ ID NO: 3227964 - RNA, 19 nt, Artificial Sequence
  Description of Artificial Sequence: Synthetic oligonucleotide
uuccaaaaucuuccgcuug

SEQ ID NO: 3227965 - RNA, 19 nt, Artificial Sequence
  Description of Artificial Sequence: Synthetic oligonucleotide
gaaagggaauacgaugacc

SEQ ID NO: 3227966 - RNA, 19 nt, Artificial Sequence
  Description of Artificial Sequence: Synthetic oligonucleotide
aauaauccucacuggugaa

SEQ ID NO: 3227967 - RNA, 19 nt, Artificial Sequence
  Description of Artificial Sequence: Synthetic oligonucleotide
guugccaaaauaauccuca

SEQ ID NO: 3227968 - RNA, 19 nt, Artificial Sequence
  Description of Artificial Sequence: Synthetic oligonucleotide
aagggaacggcugcuauga

SEQ ID NO: 3227969 - RNA, 19 nt, Artificial Sequence
  Description of Artificial Sequence: Synthetic oligonucleotide
agggaauacgaugaccagg

SEQ ID NO: 3227970 - RNA, 19 nt, Artificial Sequence
  Description of Artificial Sequence: Synthetic oligonucleotide
ucguaaugaagagggaagc

SEQ ID NO: 3227971 - RNA, 19 nt, Artificial Sequence
  Description of Artificial Sequence: Synthetic oligonucleotide
aacuucuccagggucagga

SEQ ID NO: 3227972 - RNA, 19 nt, Artificial Sequence
  Description of Artificial Sequence: Synthetic oligonucleotide
ugaaagggaauacgaugac

SEQ ID NO: 3227973 - RNA, 19 nt, Artificial Sequence
  Description of Artificial Sequence: Synthetic oligonucleotide
cuacuuccaaaaucuuccg

SEQ ID NO: 3227974 - RNA, 19 nt, Artificial Sequence
  Description of Artificial Sequence: Synthetic oligonucleotide
ugaccaggaacuucuccag

SEQ ID NO: 3227975 - RNA, 19 nt, Artificial Sequence
  Description of Artificial Sequence: Synthetic oligonucleotide
gaugccggcgagcaccacg

SEQ ID NO: 3227976 - RNA, 19 nt, Artificial Sequence
  Description of Artificial Sequence: Synthetic oligonucleotide
uuccccauaaaaguugcca

SEQ ID NO: 3227977 - RNA, 19 nt, Artificial Sequence
  Description of Artificial Sequence: Synthetic oligonucleotide
cucuacuuccaaaaucuuc

SEQ ID NO: 3227978 - RNA, 19 nt, Artificial Sequence
  Description of Artificial Sequence: Synthetic oligonucleotide
ugccaaaauaauccucacu

SEQ ID NO: 3227979 - RNA, 19 nt, Artificial Sequence
  Description of Artificial Sequence: Synthetic oligonucleotide
gucguaaugaagagggaag

SEQ ID NO: 3227980 - RNA, 19 nt, Artificial Sequence
  Description of Artificial Sequence: Synthetic oligonucleotide
gcugaaagggaauacgaug

SEQ ID NO: 3227981 - RNA, 19 nt, Artificial Sequence
  Description of Artificial Sequence: Synthetic oligonucleotide
agggaguacccucuacuuc

SEQ ID NO: 3227982 - RNA, 19 nt, Artificial Sequence
  Description of Artificial Sequence: Synthetic oligonucleotide
gcuaugaggaacccuaccc

SEQ ID NO: 3227983 - RNA, 19 nt, Artificial Sequence
  Description of Artificial Sequence: Synthetic oligonucleotide
agcaccacggcagucuggc

SEQ ID NO: 3227984 - RNA, 19 nt, Artificial Sequence
  Description of Artificial Sequence: Synthetic oligonucleotide
cauaaaaguugccaaaaua

SEQ ID NO: 3227985 - RNA, 19 nt, Artificial Sequence
  Description of Artificial Sequence: Synthetic oligonucleotide
agcagcagcacggagaccu

SEQ ID NO: 3227986 - RNA, 19 nt, Artificial Sequence
  Description of Artificial Sequence: Synthetic oligonucleotide
ugcuaugaggaacccuacc

SEQ ID NO: 3227987 - RNA, 19 nt, Artificial Sequence
  Description of Artificial Sequence: Synthetic oligonucleotide
cuuggucguaaugaagagg

SEQ ID NO: 3227988 - RNA, 19 nt, Artificial Sequence
  Description of Artificial Sequence: Synthetic oligonucleotide
aucccaagggaguacccuc

SEQ ID NO: 3227989 - RNA, 19 nt, Artificial Sequence
  Description of Artificial Sequence: Synthetic oligonucleotide
gggaguacccucuacuucc

SEQ ID NO: 3227990 - RNA, 19 nt, Artificial Sequence
  Description of Artificial Sequence: Synthetic oligonucleotide
aggaaugucagcagcagca

SEQ ID NO: 3227991 - RNA, 19 nt, Artificial Sequence
  Description of Artificial Sequence: Synthetic oligonucleotide
gacagcguggccaggaagc

SEQ ID NO: 3227992 - RNA, 19 nt, Artificial Sequence
  Description of Artificial Sequence: Synthetic oligonucleotide
acggcugcuaugaggaacc

SEQ ID NO: 3227993 - RNA, 19 nt, Artificial Sequence
  Description of Artificial Sequence: Synthetic oligonucleotide
aguugccaaaauaauccuc

SEQ ID NO: 3227994 - RNA, 19 nt, Artificial Sequence
  Description of Artificial Sequence: Synthetic oligonucleotide
agacaggauugcugaaagg

SEQ ID NO: 3227995 - RNA, 19 nt, Artificial Sequence
  Description of Artificial Sequence: Synthetic oligonucleotide
uccccauaaaaguugccaa

SEQ ID NO: 3227996 - RNA, 19 nt, Artificial Sequence
  Description of Artificial Sequence: Synthetic oligonucleotide
ucaggaaugucagcagcag

SEQ ID NO: 3227997 - RNA, 19 nt, Artificial Sequence
  Description of Artificial Sequence: Synthetic oligonucleotide
ugcugaaagggaauacgau

SEQ ID NO: 3227998 - RNA, 19 nt, Artificial Sequence
  Description of Artificial Sequence: Synthetic oligonucleotide
aagggaguacccucuacuu

SEQ ID NO: 3227999 - RNA, 19 nt, Artificial Sequence
  Description of Artificial Sequence: Synthetic oligonucleotide
uggugaagggaacggcugc

SEQ ID NO: 3228000 - RNA, 19 nt, Artificial Sequence
  Description of Artificial Sequence: Synthetic oligonucleotide
ccaaaauaauccucacugg

SEQ ID NO: 3228001 - RNA, 19 nt, Artificial Sequence
  Description of Artificial Sequence: Synthetic oligonucleotide
gaagggaacggcugcuaug

SEQ ID NO: 3228002 - RNA, 19 nt, Artificial Sequence
  Description of Artificial Sequence: Synthetic oligonucleotide
aagcccaggaggcggcagg

SEQ ID NO: 3228003 - RNA, 19 nt, Artificial Sequence
  Description of Artificial Sequence: Synthetic oligonucleotide
ucacuggugaagggaacgg

SEQ ID NO: 3228004 - RNA, 19 nt, Artificial Sequence
  Description of Artificial Sequence: Synthetic oligonucleotide
auaauccucacuggugaag

SEQ ID NO: 3228005 - RNA, 19 nt, Artificial Sequence
  Description of Artificial Sequence: Synthetic oligonucleotide
uuccgcuuggucguaauga

SEQ ID NO: 3228006 - RNA, 19 nt, Artificial Sequence
  Description of Artificial Sequence: Synthetic oligonucleotide
agggucaggaaugucagca

SEQ ID NO: 3228007 - RNA, 19 nt, Artificial Sequence
  Description of Artificial Sequence: Synthetic oligonucleotide
gaccaggaacuucuccagg

SEQ ID NO: 3228008 - RNA, 19 nt, Artificial Sequence
  Description of Artificial Sequence: Synthetic oligonucleotide
uccucacuggugaagggaa

SEQ ID NO: 3228009 - RNA, 19 nt, Artificial Sequence
  Description of Artificial Sequence: Synthetic oligonucleotide
cagguagacaggauugcug

SEQ ID NO: 3228010 - RNA, 19 nt, Artificial Sequence
  Description of Artificial Sequence: Synthetic oligonucleotide
cucacuggugaagggaacg

SEQ ID NO: 3228011 - RNA, 19 nt, Artificial Sequence
  Description of Artificial Sequence: Synthetic oligonucleotide
aagagggaagcagacucca

SEQ ID NO: 3228012 - RNA, 19 nt, Artificial Sequence
  Description of Artificial Sequence: Synthetic oligonucleotide
cuaggaagaucccaaggga

SEQ ID NO: 3228013 - RNA, 19 nt, Artificial Sequence
  Description of Artificial Sequence: Synthetic oligonucleotide
caaaauaauccucacuggu

SEQ ID NO: 3228014 - RNA, 19 nt, Artificial Sequence
  Description of Artificial Sequence: Synthetic oligonucleotide
gauugcugaaagggaauac

SEQ ID NO: 3228015 - RNA, 19 nt, Artificial Sequence
  Description of Artificial Sequence: Synthetic oligonucleotide
gaagagggaagcagacucc

SEQ ID NO: 3228016 - RNA, 19 nt, Artificial Sequence
  Description of Artificial Sequence: Synthetic oligonucleotide
uuuccccauaaaaguugcc

SEQ ID NO: 3228017 - RNA, 19 nt, Artificial Sequence
  Description of Artificial Sequence: Synthetic oligonucleotide
aacuauaaagcagagaccc

SEQ ID NO: 3228018 - RNA, 19 nt, Artificial Sequence
  Description of Artificial Sequence: Synthetic oligonucleotide
agauuuuauaaauacuggc

SEQ ID NO: 3228019 - RNA, 19 nt, Artificial Sequence
  Description of Artificial Sequence: Synthetic oligonucleotide
aaccaugguaaccagaugg

SEQ ID NO: 3228020 - RNA, 19 nt, Artificial Sequence
  Description of Artificial Sequence: Synthetic oligonucleotide
agcaagauuuuauaaauac

SEQ ID NO: 3228021 - RNA, 19 nt, Artificial Sequence
  Description of Artificial Sequence: Synthetic oligonucleotide
auaaauacuggcuauagcu

SEQ ID NO: 3228022 - RNA, 19 nt, Artificial Sequence
  Description of Artificial Sequence: Synthetic oligonucleotide
caagauuuuauaaauacug

SEQ ID NO: 3228023 - RNA, 19 nt, Artificial Sequence
  Description of Artificial Sequence: Synthetic oligonucleotide
aaauacuggcuauagcuuc

SEQ ID NO: 3228024 - RNA, 19 nt, Artificial Sequence
  Description of Artificial Sequence: Synthetic oligonucleotide
ucuuucuccaggaagaccc

SEQ ID NO: 3228025 - RNA, 19 nt, Artificial Sequence
  Description of Artificial Sequence: Synthetic oligonucleotide
aaagcagagacccuugcag

SEQ ID NO: 3228026 - RNA, 19 nt, Artificial Sequence
  Description of Artificial Sequence: Synthetic oligonucleotide
uauaguucuggaaaccuag

SEQ ID NO: 3228027 - RNA, 19 nt, Artificial Sequence
  Description of Artificial Sequence: Synthetic oligonucleotide
acaguugcauuucagcacc

SEQ ID NO: 3228028 - RNA, 19 nt, Artificial Sequence
  Description of Artificial Sequence: Synthetic oligonucleotide
aagauuuuauaaauacugg

SEQ ID NO: 3228029 - RNA, 19 nt, Artificial Sequence
  Description of Artificial Sequence: Synthetic oligonucleotide
gcaacuauaaagcagagac

SEQ ID NO: 3228030 - RNA, 19 nt, Artificial Sequence
  Description of Artificial Sequence: Synthetic oligonucleotide
aagcagagacccuugcagc

SEQ ID NO: 3228031 - RNA, 19 nt, Artificial Sequence
  Description of Artificial Sequence: Synthetic oligonucleotide
cuugcgggcaacuauaaag

SEQ ID NO: 3228032 - RNA, 19 nt, Artificial Sequence
  Description of Artificial Sequence: Synthetic oligonucleotide
augguaaccagauggcccc

SEQ ID NO: 3228033 - RNA, 19 nt, Artificial Sequence
  Description of Artificial Sequence: Synthetic oligonucleotide
aaaccuagaguaaccaugg

SEQ ID NO: 3228034 - RNA, 19 nt, Artificial Sequence
  Description of Artificial Sequence: Synthetic oligonucleotide
ugaacagccuucucuaccg

SEQ ID NO: 3228035 - RNA, 19 nt, Artificial Sequence
  Description of Artificial Sequence: Synthetic oligonucleotide
uuuggggcccaccauauag

SEQ ID NO: 3228036 - RNA, 19 nt, Artificial Sequence
  Description of Artificial Sequence: Synthetic oligonucleotide
accauauaguucuggaaac

SEQ ID NO: 3228037 - RNA, 19 nt, Artificial Sequence
  Description of Artificial Sequence: Synthetic oligonucleotide
uauaaauacuggcuauagc

SEQ ID NO: 3228038 - RNA, 19 nt, Artificial Sequence
  Description of Artificial Sequence: Synthetic oligonucleotide
auuuuauaaauacuggcua

SEQ ID NO: 3228039 - RNA, 19 nt, Artificial Sequence
  Description of Artificial Sequence: Synthetic oligonucleotide
aauacuggcuauagcuucc

SEQ ID NO: 3228040 - RNA, 19 nt, Artificial Sequence
  Description of Artificial Sequence: Synthetic oligonucleotide
uuauaaauacuggcuauag

SEQ ID NO: 3228041 - RNA, 19 nt, Artificial Sequence
  Description of Artificial Sequence: Synthetic oligonucleotide
uauagcuuccucagggaag

SEQ ID NO: 3228042 - RNA, 19 nt, Artificial Sequence
  Description of Artificial Sequence: Synthetic oligonucleotide
uuuuauaaauacuggcuau

SEQ ID NO: 3228043 - RNA, 19 nt, Artificial Sequence
  Description of Artificial Sequence: Synthetic oligonucleotide
gaaaccuagaguaaccaug

SEQ ID NO: 3228044 - RNA, 19 nt, Artificial Sequence
  Description of Artificial Sequence: Synthetic oligonucleotide
auaaagcagagacccuugc

SEQ ID NO: 3228045 - RNA, 19 nt, Artificial Sequence
  Description of Artificial Sequence: Synthetic oligonucleotide
ucugccagugaccucaggc

SEQ ID NO: 3228046 - RNA, 19 nt, Artificial Sequence
  Description of Artificial Sequence: Synthetic oligonucleotide
caugguaaccagauggccc

SEQ ID NO: 3228047 - RNA, 19 nt, Artificial Sequence
  Description of Artificial Sequence: Synthetic oligonucleotide
uaguucuggaaaccuagag

SEQ ID NO: 3228048 - RNA, 19 nt, Artificial Sequence
  Description of Artificial Sequence: Synthetic oligonucleotide
uugcgggcaacuauaaagc

SEQ ID NO: 3228049 - RNA, 19 nt, Artificial Sequence
  Description of Artificial Sequence: Synthetic oligonucleotide
uauaaagcagagacccuug

SEQ ID NO: 3228050 - RNA, 19 nt, Artificial Sequence
  Description of Artificial Sequence: Synthetic oligonucleotide
cauuucagcaccuggcagc

SEQ ID NO: 3228051 - RNA, 19 nt, Artificial Sequence
  Description of Artificial Sequence: Synthetic oligonucleotide
ucuaccgucucuuucucca

SEQ ID NO: 3228052 - RNA, 19 nt, Artificial Sequence
  Description of Artificial Sequence: Synthetic oligonucleotide
uugaacagccuucucuacc

SEQ ID NO: 3228053 - RNA, 19 nt, Artificial Sequence
  Description of Artificial Sequence: Synthetic oligonucleotide
aguucuggaaaccuagagu

SEQ ID NO: 3228054 - RNA, 19 nt, Artificial Sequence
  Description of Artificial Sequence: Synthetic oligonucleotide
guugcauuucagcaccugg

SEQ ID NO: 3228055 - RNA, 19 nt, Artificial Sequence
  Description of Artificial Sequence: Synthetic oligonucleotide
uugcauuucagcaccuggc

SEQ ID NO: 3228056 - RNA, 19 nt, Artificial Sequence
  Description of Artificial Sequence: Synthetic oligonucleotide
aucuugaacagccuucucu

SEQ ID NO: 3228057 - RNA, 19 nt, Artificial Sequence
  Description of Artificial Sequence: Synthetic oligonucleotide
uggagcaagauuuuauaaa

SEQ ID NO: 3228058 - RNA, 19 nt, Artificial Sequence
  Description of Artificial Sequence: Synthetic oligonucleotide
ucagggaaggcucuucucu

SEQ ID NO: 3228059 - RNA, 19 nt, Artificial Sequence
  Description of Artificial Sequence: Synthetic oligonucleotide
gauuuuauaaauacuggcu

SEQ ID NO: 3228060 - RNA, 19 nt, Artificial Sequence
  Description of Artificial Sequence: Synthetic oligonucleotide
agaguaaccaugguaacca

SEQ ID NO: 3228061 - RNA, 19 nt, Artificial Sequence
  Description of Artificial Sequence: Synthetic oligonucleotide
uaaauacuggcuauagcuu

SEQ ID NO: 3228062 - RNA, 19 nt, Artificial Sequence
  Description of Artificial Sequence: Synthetic oligonucleotide
guucuggaaaccuagagua

SEQ ID NO: 3228063 - RNA, 19 nt, Artificial Sequence
  Description of Artificial Sequence: Synthetic oligonucleotide
aacagccuucucuaccguc

SEQ ID NO: 3228064 - RNA, 19 nt, Artificial Sequence
  Description of Artificial Sequence: Synthetic oligonucleotide
auagcuuccucagggaagg

SEQ ID NO: 3228065 - RNA, 19 nt, Artificial Sequence
  Description of Artificial Sequence: Synthetic oligonucleotide
caacuauaaagcagagacc

SEQ ID NO: 3228066 - RNA, 19 nt, Artificial Sequence
  Description of Artificial Sequence: Synthetic oligonucleotide
uucucuaccgucucuuucu

SEQ ID NO: 3228067 - RNA, 19 nt, Artificial Sequence
  Description of Artificial Sequence: Synthetic oligonucleotide
auuucagcaccuggcagcc

SEQ ID NO: 3228068 - RNA, 19 nt, Artificial Sequence
  Description of Artificial Sequence: Synthetic oligonucleotide
ugcauuucagcaccuggca

SEQ ID NO: 3228069 - RNA, 19 nt, Artificial Sequence
  Description of Artificial Sequence: Synthetic oligonucleotide
cuggcuauagcuuccucag

SEQ ID NO: 3228070 - RNA, 19 nt, Artificial Sequence
  Description of Artificial Sequence: Synthetic oligonucleotide
uaaagcagagacccuugca

SEQ ID NO: 3228071 - RNA, 19 nt, Artificial Sequence
  Description of Artificial Sequence: Synthetic oligonucleotide
ggcuauagcuuccucaggg

SEQ ID NO: 3228072 - RNA, 19 nt, Artificial Sequence
  Description of Artificial Sequence: Synthetic oligonucleotide
ucuugaacagccuucucua

SEQ ID NO: 3228073 - RNA, 19 nt, Artificial Sequence
  Description of Artificial Sequence: Synthetic oligonucleotide
cuugcagcaggccugugag

SEQ ID NO: 3228074 - RNA, 19 nt, Artificial Sequence
  Description of Artificial Sequence: Synthetic oligonucleotide
gaaggcucuucucugccag

SEQ ID NO: 3228075 - RNA, 19 nt, Artificial Sequence
  Description of Artificial Sequence: Synthetic oligonucleotide
uagaguaaccaugguaacc

SEQ ID NO: 3228076 - RNA, 19 nt, Artificial Sequence
  Description of Artificial Sequence: Synthetic oligonucleotide
ucuggaaaccuagaguaac

SEQ ID NO: 3228077 - RNA, 19 nt, Artificial Sequence
  Description of Artificial Sequence: Synthetic oligonucleotide
uccaggaagaccccagaga

SEQ ID NO: 3228078 - RNA, 19 nt, Artificial Sequence
  Description of Artificial Sequence: Synthetic oligonucleotide
acuggcuauagcuuccuca

SEQ ID NO: 3228079 - RNA, 19 nt, Artificial Sequence
  Description of Artificial Sequence: Synthetic oligonucleotide
uucucugccagugaccuca

SEQ ID NO: 3228080 - RNA, 19 nt, Artificial Sequence
  Description of Artificial Sequence: Synthetic oligonucleotide
uucagcaccuggcagccug

SEQ ID NO: 3228081 - RNA, 19 nt, Artificial Sequence
  Description of Artificial Sequence: Synthetic oligonucleotide
aggaagaccccagagaacu

SEQ ID NO: 3228082 - RNA, 19 nt, Artificial Sequence
  Description of Artificial Sequence: Synthetic oligonucleotide
uuuauaaauacuggcuaua

SEQ ID NO: 3228083 - RNA, 19 nt, Artificial Sequence
  Description of Artificial Sequence: Synthetic oligonucleotide
ugaccucaggcacuggagc

SEQ ID NO: 3228084 - RNA, 19 nt, Artificial Sequence
  Description of Artificial Sequence: Synthetic oligonucleotide
gccugugaguauuugaggg

SEQ ID NO: 3228085 - RNA, 19 nt, Artificial Sequence
  Description of Artificial Sequence: Synthetic oligonucleotide
cacaguugcauuucagcac

SEQ ID NO: 3228086 - RNA, 19 nt, Artificial Sequence
  Description of Artificial Sequence: Synthetic oligonucleotide
agggaaggcucuucucugc

SEQ ID NO: 3228087 - RNA, 19 nt, Artificial Sequence
  Description of Artificial Sequence: Synthetic oligonucleotide
cuggaaaccuagaguaacc

SEQ ID NO: 3228088 - RNA, 19 nt, Artificial Sequence
  Description of Artificial Sequence: Synthetic oligonucleotide
ugcaucuugaacagccuuc

SEQ ID NO: 3228089 - RNA, 19 nt, Artificial Sequence
  Description of Artificial Sequence: Synthetic oligonucleotide
ucuucucugccagugaccu

SEQ ID NO: 3228090 - RNA, 19 nt, Artificial Sequence
  Description of Artificial Sequence: Synthetic oligonucleotide
accaugguaaccagauggc

SEQ ID NO: 3228091 - RNA, 19 nt, Artificial Sequence
  Description of Artificial Sequence: Synthetic oligonucleotide
aggucagccagucugcgca

SEQ ID NO: 3228092 - RNA, 19 nt, Artificial Sequence
  Description of Artificial Sequence: Synthetic oligonucleotide
uucuccaggaagaccccag

SEQ ID NO: 3228093 - RNA, 19 nt, Artificial Sequence
  Description of Artificial Sequence: Synthetic oligonucleotide
uaccgucucuuucuccagg

SEQ ID NO: 3228094 - RNA, 19 nt, Artificial Sequence
  Description of Artificial Sequence: Synthetic oligonucleotide
cuagaguaaccaugguaac

SEQ ID NO: 3228095 - RNA, 19 nt, Artificial Sequence
  Description of Artificial Sequence: Synthetic oligonucleotide
uggaaaccuagaguaacca

SEQ ID NO: 3228096 - RNA, 19 nt, Artificial Sequence
  Description of Artificial Sequence: Synthetic oligonucleotide
ucagccagucugcgcaggg

SEQ ID NO: 3228097 - RNA, 19 nt, Artificial Sequence
  Description of Artificial Sequence: Synthetic oligonucleotide
caccauauaguucuggaaa

SEQ ID NO: 3228098 - RNA, 19 nt, Artificial Sequence
  Description of Artificial Sequence: Synthetic oligonucleotide
gaccucaggcacuggagcc

SEQ ID NO: 3228099 - RNA, 19 nt, Artificial Sequence
  Description of Artificial Sequence: Synthetic oligonucleotide
gcagccugcaucuugaaca

SEQ ID NO: 3228100 - RNA, 19 nt, Artificial Sequence
  Description of Artificial Sequence: Synthetic oligonucleotide
accuagaguaaccauggua

SEQ ID NO: 3228101 - RNA, 19 nt, Artificial Sequence
  Description of Artificial Sequence: Synthetic oligonucleotide
agugaccucaggcacugga

SEQ ID NO: 3228102 - RNA, 19 nt, Artificial Sequence
  Description of Artificial Sequence: Synthetic oligonucleotide
uaaccaugguaaccagaug

SEQ ID NO: 3228103 - RNA, 19 nt, Artificial Sequence
  Description of Artificial Sequence: Synthetic oligonucleotide
ugccagugaccucaggcac

SEQ ID NO: 3228104 - RNA, 19 nt, Artificial Sequence
  Description of Artificial Sequence: Synthetic oligonucleotide
cagcaggucagccagucug

SEQ ID NO: 3228105 - RNA, 19 nt, Artificial Sequence
  Description of Artificial Sequence: Synthetic oligonucleotide
agcagagacccuugcagca

SEQ ID NO: 3228106 - RNA, 19 nt, Artificial Sequence
  Description of Artificial Sequence: Synthetic oligonucleotide
uggcuauagcuuccucagg

SEQ ID NO: 3228107 - RNA, 19 nt, Artificial Sequence
  Description of Artificial Sequence: Synthetic oligonucleotide
ccuagaguaaccaugguaa

SEQ ID NO: 3228108 - RNA, 19 nt, Artificial Sequence
  Description of Artificial Sequence: Synthetic oligonucleotide
uucuggaaaccuagaguaa

SEQ ID NO: 3228109 - RNA, 19 nt, Artificial Sequence
  Description of Artificial Sequence: Synthetic oligonucleotide
gcuucagcaggucagccag

SEQ ID NO: 3228110 - RNA, 19 nt, Artificial Sequence
  Description of Artificial Sequence: Synthetic oligonucleotide
ugcgggcaacuauaaagca

SEQ ID NO: 3228111 - RNA, 19 nt, Artificial Sequence
  Description of Artificial Sequence: Synthetic oligonucleotide
agacccuugcagcaggccu

SEQ ID NO: 3228112 - RNA, 19 nt, Artificial Sequence
  Description of Artificial Sequence: Synthetic oligonucleotide
gaguaaccaugguaaccag

SEQ ID NO: 3228113 - RNA, 19 nt, Artificial Sequence
  Description of Artificial Sequence: Synthetic oligonucleotide
ggcacaguugcauuucagc

SEQ ID NO: 3228114 - RNA, 19 nt, Artificial Sequence
  Description of Artificial Sequence: Synthetic oligonucleotide
aggccugugaguauuugag

SEQ ID NO: 3228115 - RNA, 19 nt, Artificial Sequence
  Description of Artificial Sequence: Synthetic oligonucleotide
cuugaacagccuucucuac

SEQ ID NO: 3228116 - RNA, 19 nt, Artificial Sequence
  Description of Artificial Sequence: Synthetic oligonucleotide
ggcacuggagcccuugcgg

SEQ ID NO: 3228117 - RNA, 19 nt, Artificial Sequence
  Description of Artificial Sequence: Synthetic oligonucleotide
  modified_base (3)..(3): a, c, u, g, unknown or other
aanauuuucacguucaaca

SEQ ID NO: 3228118 - RNA, 19 nt, Artificial Sequence
  Description of Artificial Sequence: Synthetic oligonucleotide
ucaaguaggacucuggagg

SEQ ID NO: 3228119 - RNA, 19 nt, Artificial Sequence
  Description of Artificial Sequence: Synthetic oligonucleotide
  modified_base (10)..(10): a, c, u, g, unknown or other
uuggauaaanauuuucacg

SEQ ID NO: 3228120 - RNA, 19 nt, Artificial Sequence
  Description of Artificial Sequence: Synthetic oligonucleotide
  modified_base (15)..(15): a, c, u, g, unknown or other
uuuauuuggauaaanauuu

SEQ ID NO: 3228121 - RNA, 19 nt, Artificial Sequence
  Description of Artificial Sequence: Synthetic oligonucleotide
uucacaagcaaacaaaaug

SEQ ID NO: 3228122 - RNA, 19 nt, Artificial Sequence
  Description of Artificial Sequence: Synthetic oligonucleotide
aacaacagcuuucuucucc

SEQ ID NO: 3228123 - RNA, 19 nt, Artificial Sequence
  Description of Artificial Sequence: Synthetic oligonucleotide
aguaauuacgccuggcugc

SEQ ID NO: 3228124 - RNA, 19 nt, Artificial Sequence
  Description of Artificial Sequence: Synthetic oligonucleotide
aagcaaacaaaaugaaggg

SEQ ID NO: 3228125 - RNA, 19 nt, Artificial Sequence
  Description of Artificial Sequence: Synthetic oligonucleotide
  modified_base (9)..(9): a, c, u, g, unknown or other
uggauaaanauuuucacgu

SEQ ID NO: 3228126 - RNA, 19 nt, Artificial Sequence
  Description of Artificial Sequence: Synthetic oligonucleotide
uucacguucaacaacagcu

SEQ ID NO: 3228127 - RNA, 19 nt, Artificial Sequence
  Description of Artificial Sequence: Synthetic oligonucleotide
acuaagacgacuuuagaag

SEQ ID NO: 3228128 - RNA, 19 nt, Artificial Sequence
  Description of Artificial Sequence: Synthetic oligonucleotide
  modified_base (4)..(4): a, c, u, g, unknown or other
aaanauuuucacguucaac

SEQ ID NO: 3228129 - RNA, 19 nt, Artificial Sequence
  Description of Artificial Sequence: Synthetic oligonucleotide
agaguugguguucacaagc

SEQ ID NO: 3228130 - RNA, 19 nt, Artificial Sequence
  Description of Artificial Sequence: Synthetic oligonucleotide
gaaauauggagaaagugcc

SEQ ID NO: 3228131 - RNA, 19 nt, Artificial Sequence
  Description of Artificial Sequence: Synthetic oligonucleotide
aaguucuccgucuuguccg

SEQ ID NO: 3228132 - RNA, 19 nt, Artificial Sequence
  Description of Artificial Sequence: Synthetic oligonucleotide
aagggcaaaggaaauaugg

SEQ ID NO: 3228133 - RNA, 19 nt, Artificial Sequence
  Description of Artificial Sequence: Synthetic oligonucleotide
  modified_base (11)..(11): a, c, u, g, unknown or other
uuuggauaaanauuuucac

SEQ ID NO: 3228134 - RNA, 19 nt, Artificial Sequence
  Description of Artificial Sequence: Synthetic oligonucleotide
aaaguaauuacgccuggcu

SEQ ID NO: 3228135 - RNA, 19 nt, Artificial Sequence
  Description of Artificial Sequence: Synthetic oligonucleotide
aaguaauuacgccuggcug

SEQ ID NO: 3228136 - RNA, 19 nt, Artificial Sequence
  Description of Artificial Sequence: Synthetic oligonucleotide
uguguacacagacaucgcg

SEQ ID NO: 3228137 - RNA, 19 nt, Artificial Sequence
  Description of Artificial Sequence: Synthetic oligonucleotide
ugaugcuucaaguaggacu

SEQ ID NO: 3228138 - RNA, 19 nt, Artificial Sequence
  Description of Artificial Sequence: Synthetic oligonucleotide
aaaggagacaggguagagc

SEQ ID NO: 3228139 - RNA, 19 nt, Artificial Sequence
  Description of Artificial Sequence: Synthetic oligonucleotide
aauauggagaaagugccug

SEQ ID NO: 3228140 - RNA, 19 nt, Artificial Sequence
  Description of Artificial Sequence: Synthetic oligonucleotide
  modified_base (13)..(13): a, c, u, g, unknown or other
uauuuggauaaanauuuuc

SEQ ID NO: 3228141 - RNA, 19 nt, Artificial Sequence
  Description of Artificial Sequence: Synthetic oligonucleotide
uacugaguugcccauuacg

SEQ ID NO: 3228142 - RNA, 19 nt, Artificial Sequence
  Description of Artificial Sequence: Synthetic oligonucleotide
uugaucagccucaggaagg

SEQ ID NO: 3228143 - RNA, 19 nt, Artificial Sequence
  Description of Artificial Sequence: Synthetic oligonucleotide
  modified_base (2)..(2): a, c, u, g, unknown or other
anauuuucacguucaacaa

SEQ ID NO: 3228144 - RNA, 19 nt, Artificial Sequence
  Description of Artificial Sequence: Synthetic oligonucleotide
acgucaaaguaauuacgcc

SEQ ID NO: 3228145 - RNA, 19 nt, Artificial Sequence
  Description of Artificial Sequence: Synthetic oligonucleotide
uguaagcuggcacagugug

SEQ ID NO: 3228146 - RNA, 19 nt, Artificial Sequence
  Description of Artificial Sequence: Synthetic oligonucleotide
ucuguaagcuggcacagug

SEQ ID NO: 3228147 - RNA, 19 nt, Artificial Sequence
  Description of Artificial Sequence: Synthetic oligonucleotide
  modified_base (16)..(16): a, c, u, g, unknown or other
auuuauuuggauaaanauu

SEQ ID NO: 3228148 - RNA, 19 nt, Artificial Sequence
  Description of Artificial Sequence: Synthetic oligonucleotide
agaauuacccacgucaaag

SEQ ID NO: 3228149 - RNA, 19 nt, Artificial Sequence
  Description of Artificial Sequence: Synthetic oligonucleotide
acgacuuuagaagaggccg

SEQ ID NO: 3228150 - RNA, 19 nt, Artificial Sequence
  Description of Artificial Sequence: Synthetic oligonucleotide
agcaaacaaaaugaagggc

SEQ ID NO: 3228151 - RNA, 19 nt, Artificial Sequence
  Description of Artificial Sequence: Synthetic oligonucleotide
gacuugaucagccucagga

SEQ ID NO: 3228152 - RNA, 19 nt, Artificial Sequence
  Description of Artificial Sequence: Synthetic oligonucleotide
ugaguugcccauuacggcc

SEQ ID NO: 3228153 - RNA, 19 nt, Artificial Sequence
  Description of Artificial Sequence: Synthetic oligonucleotide
cacgucaaaguaauuacgc

SEQ ID NO: 3228154 - RNA, 19 nt, Artificial Sequence
  Description of Artificial Sequence: Synthetic oligonucleotide
uuuugagagggaaugucac

SEQ ID NO: 3228155 - RNA, 19 nt, Artificial Sequence
  Description of Artificial Sequence: Synthetic oligonucleotide
caugaugacaaccuugcug

SEQ ID NO: 3228156 - RNA, 19 nt, Artificial Sequence
  Description of Artificial Sequence: Synthetic oligonucleotide
  modified_base (12)..(12): a, c, u, g, unknown or other
auuuggauaaanauuuuca

SEQ ID NO: 3228157 - RNA, 19 nt, Artificial Sequence
  Description of Artificial Sequence: Synthetic oligonucleotide
gaagaggccgcacacaaac

SEQ ID NO: 3228158 - RNA, 19 nt, Artificial Sequence
  Description of Artificial Sequence: Synthetic oligonucleotide
uguucacaagcaaacaaaa

SEQ ID NO: 3228159 - RNA, 19 nt, Artificial Sequence
  Description of Artificial Sequence: Synthetic oligonucleotide
ucaaaguaauuacgccugg

SEQ ID NO: 3228160 - RNA, 19 nt, Artificial Sequence
  Description of Artificial Sequence: Synthetic oligonucleotide
ggaaauauggagaaagugc

SEQ ID NO: 3228161 - RNA, 19 nt, Artificial Sequence
  Description of Artificial Sequence: Synthetic oligonucleotide
aagcaaaggagacagggua

SEQ ID NO: 3228162 - RNA, 19 nt, Artificial Sequence
  Description of Artificial Sequence: Synthetic oligonucleotide
aagacgacuuuagaagagg

SEQ ID NO: 3228163 - RNA, 19 nt, Artificial Sequence
  Description of Artificial Sequence: Synthetic oligonucleotide
cuucuccucagaauuaccc

SEQ ID NO: 3228164 - RNA, 19 nt, Artificial Sequence
  Description of Artificial Sequence: Synthetic oligonucleotide
uugguguucacaagcaaac

SEQ ID NO: 3228165 - RNA, 19 nt, Artificial Sequence
  Description of Artificial Sequence: Synthetic oligonucleotide
cucagaauuacccacguca

SEQ ID NO: 3228166 - RNA, 19 nt, Artificial Sequence
  Description of Artificial Sequence: Synthetic oligonucleotide
gaauucagagggaaggaag

SEQ ID NO: 3228167 - RNA, 19 nt, Artificial Sequence
  Description of Artificial Sequence: Synthetic oligonucleotide
acugcuucuucccaaaagu

SEQ ID NO: 3228168 - RNA, 19 nt, Artificial Sequence
  Description of Artificial Sequence: Synthetic oligonucleotide
cacaacagcaucuucaaca

SEQ ID NO: 3228169 - RNA, 19 nt, Artificial Sequence
  Description of Artificial Sequence: Synthetic oligonucleotide
uagagugguacugaguugc

SEQ ID NO: 3228170 - RNA, 19 nt, Artificial Sequence
  Description of Artificial Sequence: Synthetic oligonucleotide
aaagucaggguuucuucca

SEQ ID NO: 3228171 - RNA, 19 nt, Artificial Sequence
  Description of Artificial Sequence: Synthetic oligonucleotide
gaugcuucaaguaggacuc

SEQ ID NO: 3228172 - RNA, 19 nt, Artificial Sequence
  Description of Artificial Sequence: Synthetic oligonucleotide
acugaguugcccauuacgg

SEQ ID NO: 3228173 - RNA, 19 nt, Artificial Sequence
  Description of Artificial Sequence: Synthetic oligonucleotide
  modified_base (6)..(6): a, c, u, g, unknown or other
auaaanauuuucacguuca

SEQ ID NO: 3228174 - RNA, 19 nt, Artificial Sequence
  Description of Artificial Sequence: Synthetic oligonucleotide
acacaagcaaaggagacag

SEQ ID NO: 3228175 - RNA, 19 nt, Artificial Sequence
  Description of Artificial Sequence: Synthetic oligonucleotide
acaaaaugaagggcaaagg

SEQ ID NO: 3228176 - RNA, 19 nt, Artificial Sequence
  Description of Artificial Sequence: Synthetic oligonucleotide
aacagcuuucuucuccuca

SEQ ID NO: 3228177 - RNA, 19 nt, Artificial Sequence
  Description of Artificial Sequence: Synthetic oligonucleotide
uguacacagacaucgcgca

SEQ ID NO: 3228178 - RNA, 19 nt, Artificial Sequence
  Description of Artificial Sequence: Synthetic oligonucleotide
auuuucacguucaacaaca

SEQ ID NO: 3228179 - RNA, 19 nt, Artificial Sequence
  Description of Artificial Sequence: Synthetic oligonucleotide
gacuaagacgacuuuagaa

SEQ ID NO: 3228180 - RNA, 19 nt, Artificial Sequence
  Description of Artificial Sequence: Synthetic oligonucleotide
guagaagaccgucugguug

SEQ ID NO: 3228181 - RNA, 19 nt, Artificial Sequence
  Description of Artificial Sequence: Synthetic oligonucleotide
caaaaugaagggcaaagga

SEQ ID NO: 3228182 - RNA, 19 nt, Artificial Sequence
  Description of Artificial Sequence: Synthetic oligonucleotide
aauucagagggaaggaaga

SEQ ID NO: 3228183 - RNA, 19 nt, Artificial Sequence
  Description of Artificial Sequence: Synthetic oligonucleotide
uggagaaagugccugugcu

SEQ ID NO: 3228184 - RNA, 19 nt, Artificial Sequence
  Description of Artificial Sequence: Synthetic oligonucleotide
gcaagugugacuaagacga

SEQ ID NO: 3228185 - RNA, 19 nt, Artificial Sequence
  Description of Artificial Sequence: Synthetic oligonucleotide
  modified_base (5)..(5): a, c, u, g, unknown or other
uaaanauuuucacguucaa

SEQ ID NO: 3228186 - RNA, 19 nt, Artificial Sequence
  Description of Artificial Sequence: Synthetic oligonucleotide
agugguacugaguugccca

SEQ ID NO: 3228187 - RNA, 19 nt, Artificial Sequence
  Description of Artificial Sequence: Synthetic oligonucleotide
aauuacccacgucaaagua

SEQ ID NO: 3228188 - RNA, 19 nt, Artificial Sequence
  Description of Artificial Sequence: Synthetic oligonucleotide
aggaaauauggagaaagug

SEQ ID NO: 3228189 - RNA, 19 nt, Artificial Sequence
  Description of Artificial Sequence: Synthetic oligonucleotide
aagaccgucugguuguggu

SEQ ID NO: 3228190 - RNA, 19 nt, Artificial Sequence
  Description of Artificial Sequence: Synthetic oligonucleotide
uagaagaccgucugguugu

SEQ ID NO: 3228191 - RNA, 19 nt, Artificial Sequence
  Description of Artificial Sequence: Synthetic oligonucleotide
uuacccacgucaaaguaau

SEQ ID NO: 3228192 - RNA, 19 nt, Artificial Sequence
  Description of Artificial Sequence: Synthetic oligonucleotide
caggcaguagccaugauga

SEQ ID NO: 3228193 - RNA, 19 nt, Artificial Sequence
  Description of Artificial Sequence: Synthetic oligonucleotide
aaaacugcuucuucccaaa

SEQ ID NO: 3228194 - RNA, 19 nt, Artificial Sequence
  Description of Artificial Sequence: Synthetic oligonucleotide
acaaccuugcuguccgugg

SEQ ID NO: 3228195 - RNA, 19 nt, Artificial Sequence
  Description of Artificial Sequence: Synthetic oligonucleotide
gucaaaguaauuacgccug

SEQ ID NO: 3228196 - RNA, 19 nt, Artificial Sequence
  Description of Artificial Sequence: Synthetic oligonucleotide
acagcuuucuucuccucag

SEQ ID NO: 3228197 - RNA, 19 nt, Artificial Sequence
  Description of Artificial Sequence: Synthetic oligonucleotide
uagaagaggccgcacacaa

SEQ ID NO: 3228198 - RNA, 19 nt, Artificial Sequence
  Description of Artificial Sequence: Synthetic oligonucleotide
gaaggaagagccaguagug

SEQ ID NO: 3228199 - RNA, 19 nt, Artificial Sequence
  Description of Artificial Sequence: Synthetic oligonucleotide
ugaagggcaaaggaaauau

SEQ ID NO: 3228200 - RNA, 19 nt, Artificial Sequence
  Description of Artificial Sequence: Synthetic oligonucleotide
uuuucacguucaacaacag

SEQ ID NO: 3228201 - RNA, 19 nt, Artificial Sequence
  Description of Artificial Sequence: Synthetic oligonucleotide
aacacaagcaaaggagaca

SEQ ID NO: 3228202 - RNA, 19 nt, Artificial Sequence
  Description of Artificial Sequence: Synthetic oligonucleotide
uggcacaguguguacacag

SEQ ID NO: 3228203 - RNA, 19 nt, Artificial Sequence
  Description of Artificial Sequence: Synthetic oligonucleotide
cuaagacgacuuuagaaga

SEQ ID NO: 3228204 - RNA, 19 nt, Artificial Sequence
  Description of Artificial Sequence: Synthetic oligonucleotide
uuugagagggaaugucaca

SEQ ID NO: 3228205 - RNA, 19 nt, Artificial Sequence
  Description of Artificial Sequence: Synthetic oligonucleotide
aucagcaggccuuuggaga

SEQ ID NO: 3228206 - RNA, 19 nt, Artificial Sequence
  Description of Artificial Sequence: Synthetic oligonucleotide
uucccaaaaguucuuucaa

SEQ ID NO: 3228207 - RNA, 19 nt, Artificial Sequence
  Description of Artificial Sequence: Synthetic oligonucleotide
cuuccagggaucagcaggc

SEQ ID NO: 3228208 - RNA, 19 nt, Artificial Sequence
  Description of Artificial Sequence: Synthetic oligonucleotide
agacgacuuuagaagaggc

SEQ ID NO: 3228209 - RNA, 19 nt, Artificial Sequence
  Description of Artificial Sequence: Synthetic oligonucleotide
cagacaucgcgcaugguac

SEQ ID NO: 3228210 - RNA, 19 nt, Artificial Sequence
  Description of Artificial Sequence: Synthetic oligonucleotide
gugacuaagacgacuuuag

SEQ ID NO: 3228211 - RNA, 19 nt, Artificial Sequence
  Description of Artificial Sequence: Synthetic oligonucleotide
ucaggaagguggcaagugu

SEQ ID NO: 3228212 - RNA, 19 nt, Artificial Sequence
  Description of Artificial Sequence: Synthetic oligonucleotide
ggcaagugugacuaagacg

SEQ ID NO: 3228213 - RNA, 19 nt, Artificial Sequence
  Description of Artificial Sequence: Synthetic oligonucleotide
acaggguagagccugcgcu

SEQ ID NO: 3228214 - RNA, 19 nt, Artificial Sequence
  Description of Artificial Sequence: Synthetic oligonucleotide
gaugacaaccuugcugucc

SEQ ID NO: 3228215 - RNA, 19 nt, Artificial Sequence
  Description of Artificial Sequence: Synthetic oligonucleotide
acacagacaucgcgcaugg

SEQ ID NO: 3228216 - RNA, 19 nt, Artificial Sequence
  Description of Artificial Sequence: Synthetic oligonucleotide
uugagagggaaugucacaa

SEQ ID NO: 3228217 - RNA, 19 nt, Artificial Sequence
  Description of Artificial Sequence: Synthetic oligonucleotide
  modified_base (3)..(3): a, c, u, g, unknown or other
acncuuuaaaggcacagcc

SEQ ID NO: 3228218 - RNA, 19 nt, Artificial Sequence
  Description of Artificial Sequence: Synthetic oligonucleotide
uuuucggugaugaugaggu

SEQ ID NO: 3228219 - RNA, 19 nt, Artificial Sequence
  Description of Artificial Sequence: Synthetic oligonucleotide
ucaaacacggccuuuucgg

SEQ ID NO: 3228220 - RNA, 19 nt, Artificial Sequence
  Description of Artificial Sequence: Synthetic oligonucleotide
accacuuuggucuugucac

SEQ ID NO: 3228221 - RNA, 19 nt, Artificial Sequence
  Description of Artificial Sequence: Synthetic oligonucleotide
aucagguuugaucugcugc

SEQ ID NO: 3228222 - RNA, 19 nt, Artificial Sequence
  Description of Artificial Sequence: Synthetic oligonucleotide
gaugaugagguucacgcag

SEQ ID NO: 3228223 - RNA, 19 nt, Artificial Sequence
  Description of Artificial Sequence: Synthetic oligonucleotide
uucuccaagauuuugggcu

SEQ ID NO: 3228224 - RNA, 19 nt, Artificial Sequence
  Description of Artificial Sequence: Synthetic oligonucleotide
auuucuccaagauuuuggg

SEQ ID NO: 3228225 - RNA, 19 nt, Artificial Sequence
  Description of Artificial Sequence: Synthetic oligonucleotide
gugaugaugagguucacgc

SEQ ID NO: 3228226 - RNA, 19 nt, Artificial Sequence
  Description of Artificial Sequence: Synthetic oligonucleotide
cauuucuccaagauuuugg

SEQ ID NO: 3228227 - RNA, 19 nt, Artificial Sequence
  Description of Artificial Sequence: Synthetic oligonucleotide
augcccuucaccuucuggc

SEQ ID NO: 3228228 - RNA, 19 nt, Artificial Sequence
  Description of Artificial Sequence: Synthetic oligonucleotide
uuucuuggugcaaugcucc

SEQ ID NO: 3228229 - RNA, 19 nt, Artificial Sequence
  Description of Artificial Sequence: Synthetic oligonucleotide
ucaagcaucagguuugauc

SEQ ID NO: 3228230 - RNA, 19 nt, Artificial Sequence
  Description of Artificial Sequence: Synthetic oligonucleotide
agcuccaccagcgucagcc

SEQ ID NO: 3228231 - RNA, 19 nt, Artificial Sequence
  Description of Artificial Sequence: Synthetic oligonucleotide
ucacccgacaccaagucca

SEQ ID NO: 3228232 - RNA, 19 nt, Artificial Sequence
  Description of Artificial Sequence: Synthetic oligonucleotide
aaaggcacagccuguggug

SEQ ID NO: 3228233 - RNA, 19 nt, Artificial Sequence
  Description of Artificial Sequence: Synthetic oligonucleotide
uuugaucugcugcaugggc

SEQ ID NO: 3228234 - RNA, 19 nt, Artificial Sequence
  Description of Artificial Sequence: Synthetic oligonucleotide
uuuucuuggugcaaugcuc

SEQ ID NO: 3228235 - RNA, 19 nt, Artificial Sequence
  Description of Artificial Sequence: Synthetic oligonucleotide
uuaaaggcacagccugugg

SEQ ID NO: 3228236 - RNA, 19 nt, Artificial Sequence
  Description of Artificial Sequence: Synthetic oligonucleotide
uccucaagcaucagguuug

SEQ ID NO: 3228237 - RNA, 19 nt, Artificial Sequence
  Description of Artificial Sequence: Synthetic oligonucleotide
accucauccagugacgagc

SEQ ID NO: 3228238 - RNA, 19 nt, Artificial Sequence
  Description of Artificial Sequence: Synthetic oligonucleotide
ucagguuugaucugcugca

SEQ ID NO: 3228239 - RNA, 19 nt, Artificial Sequence
  Description of Artificial Sequence: Synthetic oligonucleotide
ugcugcaugggcuuaaggu

SEQ ID NO: 3228240 - RNA, 19 nt, Artificial Sequence
  Description of Artificial Sequence: Synthetic oligonucleotide
cuugaccucauccagugac

SEQ ID NO: 3228241 - RNA, 19 nt, Artificial Sequence
  Description of Artificial Sequence: Synthetic oligonucleotide
augagguucacgcagcgcu

SEQ ID NO: 3228242 - RNA, 19 nt, Artificial Sequence
  Description of Artificial Sequence: Synthetic oligonucleotide
uuugggcugcuuuucuugg

SEQ ID NO: 3228243 - RNA, 19 nt, Artificial Sequence
  Description of Artificial Sequence: Synthetic oligonucleotide
uuuugggcugcuuuucuug

SEQ ID NO: 3228244 - RNA, 19 nt, Artificial Sequence
  Description of Artificial Sequence: Synthetic oligonucleotide
cugcaugggcuuaaggucg

SEQ ID NO: 3228245 - RNA, 19 nt, Artificial Sequence
  Description of Artificial Sequence: Synthetic oligonucleotide
gguuugaucugcugcaugg

SEQ ID NO: 3228246 - RNA, 19 nt, Artificial Sequence
  Description of Artificial Sequence: Synthetic oligonucleotide
aaacacggccuuuucggug

SEQ ID NO: 3228247 - RNA, 19 nt, Artificial Sequence
  Description of Artificial Sequence: Synthetic oligonucleotide
agcaucagguuugaucugc

SEQ ID NO: 3228248 - RNA, 19 nt, Artificial Sequence
  Description of Artificial Sequence: Synthetic oligonucleotide
uaaaggcacagccuguggu

SEQ ID NO: 3228249 - RNA, 19 nt, Artificial Sequence
  Description of Artificial Sequence: Synthetic oligonucleotide
gacaccaaguccauggccc

SEQ ID NO: 3228250 - RNA, 19 nt, Artificial Sequence
  Description of Artificial Sequence: Synthetic oligonucleotide
uugaccucauccagugacg

SEQ ID NO: 3228251 - RNA, 19 nt, Artificial Sequence
  Description of Artificial Sequence: Synthetic oligonucleotide
aacacggccuuuucgguga

SEQ ID NO: 3228252 - RNA, 19 nt, Artificial Sequence
  Description of Artificial Sequence: Synthetic oligonucleotide
aagauuuugggcugcuuuu

SEQ ID NO: 3228253 - RNA, 19 nt, Artificial Sequence
  Description of Artificial Sequence: Synthetic oligonucleotide
uccacgucaaacacggccu

SEQ ID NO: 3228254 - RNA, 19 nt, Artificial Sequence
  Description of Artificial Sequence: Synthetic oligonucleotide
aaguccauggccccgccca

SEQ ID NO: 3228255 - RNA, 19 nt, Artificial Sequence
  Description of Artificial Sequence: Synthetic oligonucleotide
uugaucugcugcaugggcu

SEQ ID NO: 3228256 - RNA, 19 nt, Artificial Sequence
  Description of Artificial Sequence: Synthetic oligonucleotide
uuuaaaggcacagccugug

SEQ ID NO: 3228257 - RNA, 19 nt, Artificial Sequence
  Description of Artificial Sequence: Synthetic oligonucleotide
ugaugagguucacgcagcg

SEQ ID NO: 3228258 - RNA, 19 nt, Artificial Sequence
  Description of Artificial Sequence: Synthetic oligonucleotide
ucggugaugaugagguuca

SEQ ID NO: 3228259 - RNA, 19 nt, Artificial Sequence
  Description of Artificial Sequence: Synthetic oligonucleotide
uuucuccaagauuuugggc

SEQ ID NO: 3228260 - RNA, 19 nt, Artificial Sequence
  Description of Artificial Sequence: Synthetic oligonucleotide
gucaaacacggccuuuucg

SEQ ID NO: 3228261 - RNA, 19 nt, Artificial Sequence
  Description of Artificial Sequence: Synthetic oligonucleotide
agcgucagccccuucuucg

SEQ ID NO: 3228262 - RNA, 19 nt, Artificial Sequence
  Description of Artificial Sequence: Synthetic oligonucleotide
gugaccaccacuuuggucu

SEQ ID NO: 3228263 - RNA, 19 nt, Artificial Sequence
  Description of Artificial Sequence: Synthetic oligonucleotide
caagcaucagguuugaucu

SEQ ID NO: 3228264 - RNA, 19 nt, Artificial Sequence
  Description of Artificial Sequence: Synthetic oligonucleotide
ucccacagcuccaccagcg

SEQ ID NO: 3228265 - RNA, 19 nt, Artificial Sequence
  Description of Artificial Sequence: Synthetic oligonucleotide
guccacgucaaacacggcc

SEQ ID NO: 3228266 - RNA, 19 nt, Artificial Sequence
  Description of Artificial Sequence: Synthetic oligonucleotide
ucaccuucuggccuggcac

SEQ ID NO: 3228267 - RNA, 19 nt, Artificial Sequence
  Description of Artificial Sequence: Synthetic oligonucleotide
  modified_base (4)..(4): a, c, u, g, unknown or other
gacncuuuaaaggcacagc

SEQ ID NO: 3228268 - RNA, 19 nt, Artificial Sequence
  Description of Artificial Sequence: Synthetic oligonucleotide
ucuccaagauuuugggcug

SEQ ID NO: 3228269 - RNA, 19 nt, Artificial Sequence
  Description of Artificial Sequence: Synthetic oligonucleotide
ccuggcaccauccaguugg

SEQ ID NO: 3228270 - RNA, 19 nt, Artificial Sequence
  Description of Artificial Sequence: Synthetic oligonucleotide
uucggguccacgucaaaca

SEQ ID NO: 3228271 - RNA, 19 nt, Artificial Sequence
  Description of Artificial Sequence: Synthetic oligonucleotide
ugcuccauggugaccacca

SEQ ID NO: 3228272 - RNA, 19 nt, Artificial Sequence
  Description of Artificial Sequence: Synthetic oligonucleotide
acaccaaguccauggcccc

SEQ ID NO: 3228273 - RNA, 19 nt, Artificial Sequence
  Description of Artificial Sequence: Synthetic oligonucleotide
aaggcacagccuguggugg

SEQ ID NO: 3228274 - RNA, 19 nt, Artificial Sequence
  Description of Artificial Sequence: Synthetic oligonucleotide
ggugcaaugcuccauggug

SEQ ID NO: 3228275 - RNA, 19 nt, Artificial Sequence
  Description of Artificial Sequence: Synthetic oligonucleotide
cuugucacccgacaccaag

SEQ ID NO: 3228276 - RNA, 19 nt, Artificial Sequence
  Description of Artificial Sequence: Synthetic oligonucleotide
uccauggugaccaccacuu

SEQ ID NO: 3228277 - RNA, 19 nt, Artificial Sequence
  Description of Artificial Sequence: Synthetic oligonucleotide
aaugcuccauggugaccac

SEQ ID NO: 3228278 - RNA, 19 nt, Artificial Sequence
  Description of Artificial Sequence: Synthetic oligonucleotide
cuuuucggugaugaugagg

SEQ ID NO: 3228279 - RNA, 19 nt, Artificial Sequence
  Description of Artificial Sequence: Synthetic oligonucleotide
cauggugaccaccacuuug

SEQ ID NO: 3228280 - RNA, 19 nt, Artificial Sequence
  Description of Artificial Sequence: Synthetic oligonucleotide
auggugaccaccacuuugg

SEQ ID NO: 3228281 - RNA, 19 nt, Artificial Sequence
  Description of Artificial Sequence: Synthetic oligonucleotide
uuggugcaaugcuccaugg

SEQ ID NO: 3228282 - RNA, 19 nt, Artificial Sequence
  Description of Artificial Sequence: Synthetic oligonucleotide
cuuggugcaaugcuccaug

SEQ ID NO: 3228283 - RNA, 19 nt, Artificial Sequence
  Description of Artificial Sequence: Synthetic oligonucleotide
ugaugaugagguucacgca

SEQ ID NO: 3228284 - RNA, 19 nt, Artificial Sequence
  Description of Artificial Sequence: Synthetic oligonucleotide
uucacgcagcgcuugccgg

SEQ ID NO: 3228285 - RNA, 19 nt, Artificial Sequence
  Description of Artificial Sequence: Synthetic oligonucleotide
cauggugcauuucuccaag

SEQ ID NO: 3228286 - RNA, 19 nt, Artificial Sequence
  Description of Artificial Sequence: Synthetic oligonucleotide
uucggugaugaugagguuc

SEQ ID NO: 3228287 - RNA, 19 nt, Artificial Sequence
  Description of Artificial Sequence: Synthetic oligonucleotide
acuuuggucuugucacccg

SEQ ID NO: 3228288 - RNA, 19 nt, Artificial Sequence
  Description of Artificial Sequence: Synthetic oligonucleotide
uggccuugaccucauccag

SEQ ID NO: 3228289 - RNA, 19 nt, Artificial Sequence
  Description of Artificial Sequence: Synthetic oligonucleotide
augaugagguucacgcagc

SEQ ID NO: 3228290 - RNA, 19 nt, Artificial Sequence
  Description of Artificial Sequence: Synthetic oligonucleotide
agauuuugggcugcuuuuc

SEQ ID NO: 3228291 - RNA, 19 nt, Artificial Sequence
  Description of Artificial Sequence: Synthetic oligonucleotide
guucacgcagcgcuugccg

SEQ ID NO: 3228292 - RNA, 19 nt, Artificial Sequence
  Description of Artificial Sequence: Synthetic oligonucleotide
ugggcugcuuuucuuggug

SEQ ID NO: 3228293 - RNA, 19 nt, Artificial Sequence
  Description of Artificial Sequence: Synthetic oligonucleotide
ugcaugggcuuaaggucgg

SEQ ID NO: 3228294 - RNA, 19 nt, Artificial Sequence
  Description of Artificial Sequence: Synthetic oligonucleotide
agcggcauggugcauuucu

SEQ ID NO: 3228295 - RNA, 19 nt, Artificial Sequence
  Description of Artificial Sequence: Synthetic oligonucleotide
ucauccagugacgagcccu

SEQ ID NO: 3228296 - RNA, 19 nt, Artificial Sequence
  Description of Artificial Sequence: Synthetic oligonucleotide
uggucuugucacccgacac

SEQ ID NO: 3228297 - RNA, 19 nt, Artificial Sequence
  Description of Artificial Sequence: Synthetic oligonucleotide
cauccaguuggccagguca

SEQ ID NO: 3228298 - RNA, 19 nt, Artificial Sequence
  Description of Artificial Sequence: Synthetic oligonucleotide
uugccggucagcggcaugg

SEQ ID NO: 3228299 - RNA, 19 nt, Artificial Sequence
  Description of Artificial Sequence: Synthetic oligonucleotide
uuggucuugucacccgaca

SEQ ID NO: 3228300 - RNA, 19 nt, Artificial Sequence
  Description of Artificial Sequence: Synthetic oligonucleotide
uuuggucuugucacccgac

SEQ ID NO: 3228301 - RNA, 19 nt, Artificial Sequence
  Description of Artificial Sequence: Synthetic oligonucleotide
uggugcauuucuccaagau

SEQ ID NO: 3228302 - RNA, 19 nt, Artificial Sequence
  Description of Artificial Sequence: Synthetic oligonucleotide
ugcaaugcuccauggugac

SEQ ID NO: 3228303 - RNA, 19 nt, Artificial Sequence
  Description of Artificial Sequence: Synthetic oligonucleotide
aagcaucagguuugaucug

SEQ ID NO: 3228304 - RNA, 19 nt, Artificial Sequence
  Description of Artificial Sequence: Synthetic oligonucleotide
gugacgagcccucccacag

SEQ ID NO: 3228305 - RNA, 19 nt, Artificial Sequence
  Description of Artificial Sequence: Synthetic oligonucleotide
ugcuuuucuuggugcaaug

SEQ ID NO: 3228306 - RNA, 19 nt, Artificial Sequence
  Description of Artificial Sequence: Synthetic oligonucleotide
uucaccuucuggccuggca

SEQ ID NO: 3228307 - RNA, 19 nt, Artificial Sequence
  Description of Artificial Sequence: Synthetic oligonucleotide
uugucacccgacaccaagu

SEQ ID NO: 3228308 - RNA, 19 nt, Artificial Sequence
  Description of Artificial Sequence: Synthetic oligonucleotide
guuugaucugcugcauggg

SEQ ID NO: 3228309 - RNA, 19 nt, Artificial Sequence
  Description of Artificial Sequence: Synthetic oligonucleotide
ucggguccacgucaaacac

SEQ ID NO: 3228310 - RNA, 19 nt, Artificial Sequence
  Description of Artificial Sequence: Synthetic oligonucleotide
uggccuggcaccauccagu

SEQ ID NO: 3228311 - RNA, 19 nt, Artificial Sequence
  Description of Artificial Sequence: Synthetic oligonucleotide
ugugguggccuugaccuca

SEQ ID NO: 3228312 - RNA, 19 nt, Artificial Sequence
  Description of Artificial Sequence: Synthetic oligonucleotide
ugcccuucaccuucuggcc

SEQ ID NO: 3228313 - RNA, 19 nt, Artificial Sequence
  Description of Artificial Sequence: Synthetic oligonucleotide
ugucacccgacaccaaguc

SEQ ID NO: 3228314 - RNA, 19 nt, Artificial Sequence
  Description of Artificial Sequence: Synthetic oligonucleotide
uccauggccccgcccaugc

SEQ ID NO: 3228315 - RNA, 19 nt, Artificial Sequence
  Description of Artificial Sequence: Synthetic oligonucleotide
ggguccacgucaaacacgg

SEQ ID NO: 3228316 - RNA, 19 nt, Artificial Sequence
  Description of Artificial Sequence: Synthetic oligonucleotide
caaugcuccauggugacca

SEQ ID NO: 3228317 - RNA, 19 nt, Artificial Sequence
  Description of Artificial Sequence: Synthetic oligonucleotide
aauaauacaacucuaucac

SEQ ID NO: 3228318 - RNA, 19 nt, Artificial Sequence
  Description of Artificial Sequence: Synthetic oligonucleotide
aauauauauauuuauauau

SEQ ID NO: 3228319 - RNA, 19 nt, Artificial Sequence
  Description of Artificial Sequence: Synthetic oligonucleotide
aaaugagacaggcaaaagc

SEQ ID NO: 3228320 - RNA, 19 nt, Artificial Sequence
  Description of Artificial Sequence: Synthetic oligonucleotide
aauagcaauaaaaugaagg

SEQ ID NO: 3228321 - RNA, 19 nt, Artificial Sequence
  Description of Artificial Sequence: Synthetic oligonucleotide
auagcaauaaaaugaaggc

SEQ ID NO: 3228322 - RNA, 19 nt, Artificial Sequence
  Description of Artificial Sequence: Synthetic oligonucleotide
uuuguuacaaacaaucacc

SEQ ID NO: 3228323 - RNA, 19 nt, Artificial Sequence
  Description of Artificial Sequence: Synthetic oligonucleotide
uauaaugauauuuacauaa

SEQ ID NO: 3228324 - RNA, 19 nt, Artificial Sequence
  Description of Artificial Sequence: Synthetic oligonucleotide
uuuauauauauuuauauau

SEQ ID NO: 3228325 - RNA, 19 nt, Artificial Sequence
  Description of Artificial Sequence: Synthetic oligonucleotide
uauauauuuauauauauuu

SEQ ID NO: 3228326 - RNA, 19 nt, Artificial Sequence
  Description of Artificial Sequence: Synthetic oligonucleotide
aacuaauacuucuuuaguc

SEQ ID NO: 3228327 - RNA, 19 nt, Artificial Sequence
  Description of Artificial Sequence: Synthetic oligonucleotide
auaguuaguuaauaaagac

SEQ ID NO: 3228328 - RNA, 19 nt, Artificial Sequence
  Description of Artificial Sequence: Synthetic oligonucleotide
aacaaauguguuuuaacag

SEQ ID NO: 3228329 - RNA, 19 nt, Artificial Sequence
  Description of Artificial Sequence: Synthetic oligonucleotide
aaacaaauguguuuuaaca

SEQ ID NO: 3228330 - RNA, 19 nt, Artificial Sequence
  Description of Artificial Sequence: Synthetic oligonucleotide
ugucaaauaaggcacaugu

SEQ ID NO: 3228331 - RNA, 19 nt, Artificial Sequence
  Description of Artificial Sequence: Synthetic oligonucleotide
auaacuaauacuucuuuag

SEQ ID NO: 3228332 - RNA, 19 nt, Artificial Sequence
  Description of Artificial Sequence: Synthetic oligonucleotide
aaagaaggaauugagccac

SEQ ID NO: 3228333 - RNA, 19 nt, Artificial Sequence
  Description of Artificial Sequence: Synthetic oligonucleotide
ugaaguaacuuuaaguugu

SEQ ID NO: 3228334 - RNA, 19 nt, Artificial Sequence
  Description of Artificial Sequence: Synthetic oligonucleotide
gaauaguuaguuaauaaag

SEQ ID NO: 3228335 - RNA, 19 nt, Artificial Sequence
  Description of Artificial Sequence: Synthetic oligonucleotide
uaaguuacuacucacugga

SEQ ID NO: 3228336 - RNA, 19 nt, Artificial Sequence
  Description of Artificial Sequence: Synthetic oligonucleotide
aauuuaaaguuaaugaccu

SEQ ID NO: 3228337 - RNA, 19 nt, Artificial Sequence
  Description of Artificial Sequence: Synthetic oligonucleotide
ucugucauaacuuccaugu

SEQ ID NO: 3228338 - RNA, 19 nt, Artificial Sequence
  Description of Artificial Sequence: Synthetic oligonucleotide
gaauaauacaacucuauca

SEQ ID NO: 3228339 - RNA, 19 nt, Artificial Sequence
  Description of Artificial Sequence: Synthetic oligonucleotide
uuuacaaaguacauguagu

SEQ ID NO: 3228340 - RNA, 19 nt, Artificial Sequence
  Description of Artificial Sequence: Synthetic oligonucleotide
aagugaaguaacuuuaagu

SEQ ID NO: 3228341 - RNA, 19 nt, Artificial Sequence
  Description of Artificial Sequence: Synthetic oligonucleotide
auaauuaacaaaucucuca

SEQ ID NO: 3228342 - RNA, 19 nt, Artificial Sequence
  Description of Artificial Sequence: Synthetic oligonucleotide
aguuaguuaauaaagacug

SEQ ID NO: 3228343 - RNA, 19 nt, Artificial Sequence
  Description of Artificial Sequence: Synthetic oligonucleotide
uauauauauuuauauauau

SEQ ID NO: 3228344 - RNA, 19 nt, Artificial Sequence
  Description of Artificial Sequence: Synthetic oligonucleotide
aaauaugggagagaacugg

SEQ ID NO: 3228345 - RNA, 19 nt, Artificial Sequence
  Description of Artificial Sequence: Synthetic oligonucleotide
uuuaaguuguucuucuugc

SEQ ID NO: 3228346 - RNA, 19 nt, Artificial Sequence
  Description of Artificial Sequence: Synthetic oligonucleotide
gauguuaguagauggaaug

SEQ ID NO: 3228347 - RNA, 19 nt, Artificial Sequence
  Description of Artificial Sequence: Synthetic oligonucleotide
aauaauuaacaaaucucuc

SEQ ID NO: 3228348 - RNA, 19 nt, Artificial Sequence
  Description of Artificial Sequence: Synthetic oligonucleotide
uuaaaagaaccucuaauau

SEQ ID NO: 3228349 - RNA, 19 nt, Artificial Sequence
  Description of Artificial Sequence: Synthetic oligonucleotide
aauaacagacaauuuuacu

SEQ ID NO: 3228350 - RNA, 19 nt, Artificial Sequence
  Description of Artificial Sequence: Synthetic oligonucleotide
uguaauaaagggugauugg

SEQ ID NO: 3228351 - RNA, 19 nt, Artificial Sequence
  Description of Artificial Sequence: Synthetic oligonucleotide
aguaacuuuaaguuguucu

SEQ ID NO: 3228352 - RNA, 19 nt, Artificial Sequence
  Description of Artificial Sequence: Synthetic oligonucleotide
gucgauacuguuuacaaag

SEQ ID NO: 3228353 - RNA, 19 nt, Artificial Sequence
  Description of Artificial Sequence: Synthetic oligonucleotide
gauaccuaaaaccaagcac

SEQ ID NO: 3228354 - RNA, 19 nt, Artificial Sequence
  Description of Artificial Sequence: Synthetic oligonucleotide
ugacauugcacacagcuca

SEQ ID NO: 3228355 - RNA, 19 nt, Artificial Sequence
  Description of Artificial Sequence: Synthetic oligonucleotide
guuuacaaaguacauguag

SEQ ID NO: 3228356 - RNA, 19 nt, Artificial Sequence
  Description of Artificial Sequence: Synthetic oligonucleotide
agugaaguaacuuuaaguu

SEQ ID NO: 3228357 - RNA, 19 nt, Artificial Sequence
  Description of Artificial Sequence: Synthetic oligonucleotide
ucaucgauuagaugaaucc

SEQ ID NO: 3228358 - RNA, 19 nt, Artificial Sequence
  Description of Artificial Sequence: Synthetic oligonucleotide
uaagcagaguuaaugagca

SEQ ID NO: 3228359 - RNA, 19 nt, Artificial Sequence
  Description of Artificial Sequence: Synthetic oligonucleotide
aaaaccaagcacuguauga

SEQ ID NO: 3228360 - RNA, 19 nt, Artificial Sequence
  Description of Artificial Sequence: Synthetic oligonucleotide
uggcuuauuaauuuaauaa

SEQ ID NO: 3228361 - RNA, 19 nt, Artificial Sequence
  Description of Artificial Sequence: Synthetic oligonucleotide
uguuuuagaagaaaacauc

SEQ ID NO: 3228362 - RNA, 19 nt, Artificial Sequence
  Description of Artificial Sequence: Synthetic oligonucleotide
auugaacuggaauugaaca

SEQ ID NO: 3228363 - RNA, 19 nt, Artificial Sequence
  Description of Artificial Sequence: Synthetic oligonucleotide
ugagacaucuccuucagcu

SEQ ID NO: 3228364 - RNA, 19 nt, Artificial Sequence
  Description of Artificial Sequence: Synthetic oligonucleotide
aaaugucaccagcauuugc

SEQ ID NO: 3228365 - RNA, 19 nt, Artificial Sequence
  Description of Artificial Sequence: Synthetic oligonucleotide
auaugcucuguucaucugc

SEQ ID NO: 3228366 - RNA, 19 nt, Artificial Sequence
  Description of Artificial Sequence: Synthetic oligonucleotide
uuauauauauuuauauaua

SEQ ID NO: 3228367 - RNA, 19 nt, Artificial Sequence
  Description of Artificial Sequence: Synthetic oligonucleotide
uaguuaguuaauaaagacu

SEQ ID NO: 3228368 - RNA, 19 nt, Artificial Sequence
  Description of Artificial Sequence: Synthetic oligonucleotide
uucaacaucuucaggaugu

SEQ ID NO: 3228369 - RNA, 19 nt, Artificial Sequence
  Description of Artificial Sequence: Synthetic oligonucleotide
aauaguuaguuaauaaaga

SEQ ID NO: 3228370 - RNA, 19 nt, Artificial Sequence
  Description of Artificial Sequence: Synthetic oligonucleotide
uaauuaacaaaucucucau

SEQ ID NO: 3228371 - RNA, 19 nt, Artificial Sequence
  Description of Artificial Sequence: Synthetic oligonucleotide
ucuacauugaacuggaauu

SEQ ID NO: 3228372 - RNA, 19 nt, Artificial Sequence
  Description of Artificial Sequence: Synthetic oligonucleotide
uaacacauaaagcucacaa

SEQ ID NO: 3228373 - RNA, 19 nt, Artificial Sequence
  Description of Artificial Sequence: Synthetic oligonucleotide
gauauuuccucaucaauca

SEQ ID NO: 3228374 - RNA, 19 nt, Artificial Sequence
  Description of Artificial Sequence: Synthetic oligonucleotide
aaucuguugaaaaggcccc

SEQ ID NO: 3228375 - RNA, 19 nt, Artificial Sequence
  Description of Artificial Sequence: Synthetic oligonucleotide
aauacuucuuuagucugac

SEQ ID NO: 3228376 - RNA, 19 nt, Artificial Sequence
  Description of Artificial Sequence: Synthetic oligonucleotide
agugaaagacaauauauau

SEQ ID NO: 3228377 - RNA, 19 nt, Artificial Sequence
  Description of Artificial Sequence: Synthetic oligonucleotide
accaaguugauauuuccuc

SEQ ID NO: 3228378 - RNA, 19 nt, Artificial Sequence
  Description of Artificial Sequence: Synthetic oligonucleotide
uuucaauuccgacaagaug

SEQ ID NO: 3228379 - RNA, 19 nt, Artificial Sequence
  Description of Artificial Sequence: Synthetic oligonucleotide
aagugcaguaagcaaauga

SEQ ID NO: 3228380 - RNA, 19 nt, Artificial Sequence
  Description of Artificial Sequence: Synthetic oligonucleotide
uagcauauuuguuacaaac

SEQ ID NO: 3228381 - RNA, 19 nt, Artificial Sequence
  Description of Artificial Sequence: Synthetic oligonucleotide
ugaguucuuacugacauug

SEQ ID NO: 3228382 - RNA, 19 nt, Artificial Sequence
  Description of Artificial Sequence: Synthetic oligonucleotide
ucucucauuuauaaauaag

SEQ ID NO: 3228383 - RNA, 19 nt, Artificial Sequence
  Description of Artificial Sequence: Synthetic oligonucleotide
ugagaaaugcaacaugaaa

SEQ ID NO: 3228384 - RNA, 19 nt, Artificial Sequence
  Description of Artificial Sequence: Synthetic oligonucleotide
acaaauguguuuuaacaga

SEQ ID NO: 3228385 - RNA, 19 nt, Artificial Sequence
  Description of Artificial Sequence: Synthetic oligonucleotide
uuauuccuaauccaccagc

SEQ ID NO: 3228386 - RNA, 19 nt, Artificial Sequence
  Description of Artificial Sequence: Synthetic oligonucleotide
augguuauucaacaucuuc

SEQ ID NO: 3228387 - RNA, 19 nt, Artificial Sequence
  Description of Artificial Sequence: Synthetic oligonucleotide
ugcaacaugaaauuauaaa

SEQ ID NO: 3228388 - RNA, 19 nt, Artificial Sequence
  Description of Artificial Sequence: Synthetic oligonucleotide
ucaaagaucaggucggggu

SEQ ID NO: 3228389 - RNA, 19 nt, Artificial Sequence
  Description of Artificial Sequence: Synthetic oligonucleotide
aacuuuaaguuguucuucu

SEQ ID NO: 3228390 - RNA, 19 nt, Artificial Sequence
  Description of Artificial Sequence: Synthetic oligonucleotide
gaaccucuaauauauccag

SEQ ID NO: 3228391 - RNA, 19 nt, Artificial Sequence
  Description of Artificial Sequence: Synthetic oligonucleotide
uuguuacaaacaaucacca

SEQ ID NO: 3228392 - RNA, 19 nt, Artificial Sequence
  Description of Artificial Sequence: Synthetic oligonucleotide
uguaguucaaagucuguca

SEQ ID NO: 3228393 - RNA, 19 nt, Artificial Sequence
  Description of Artificial Sequence: Synthetic oligonucleotide
aauacuggcgauguaauaa

SEQ ID NO: 3228394 - RNA, 19 nt, Artificial Sequence
  Description of Artificial Sequence: Synthetic oligonucleotide
augauauuuacauaauaaa

SEQ ID NO: 3228395 - RNA, 19 nt, Artificial Sequence
  Description of Artificial Sequence: Synthetic oligonucleotide
agauuuauuccuaauccac

SEQ ID NO: 3228396 - RNA, 19 nt, Artificial Sequence
  Description of Artificial Sequence: Synthetic oligonucleotide
ucuguauuaaacucaucga

SEQ ID NO: 3228397 - RNA, 19 nt, Artificial Sequence
  Description of Artificial Sequence: Synthetic oligonucleotide
uucuaaagcauuagcauau

SEQ ID NO: 3228398 - RNA, 19 nt, Artificial Sequence
  Description of Artificial Sequence: Synthetic oligonucleotide
uauaauacuggcgauguaa

SEQ ID NO: 3228399 - RNA, 19 nt, Artificial Sequence
  Description of Artificial Sequence: Synthetic oligonucleotide
uggggauguuaguagaugg

SEQ ID NO: 3228400 - RNA, 19 nt, Artificial Sequence
  Description of Artificial Sequence: Synthetic oligonucleotide
acugaaauaacagacaauu

SEQ ID NO: 3228401 - RNA, 19 nt, Artificial Sequence
  Description of Artificial Sequence: Synthetic oligonucleotide
uauacacacgaguaagcag

SEQ ID NO: 3228402 - RNA, 19 nt, Artificial Sequence
  Description of Artificial Sequence: Synthetic oligonucleotide
ugauaucugagucuuucca

SEQ ID NO: 3228403 - RNA, 19 nt, Artificial Sequence
  Description of Artificial Sequence: Synthetic oligonucleotide
aaccuauacugcugcauuc

SEQ ID NO: 3228404 - RNA, 19 nt, Artificial Sequence
  Description of Artificial Sequence: Synthetic oligonucleotide
aauacaacucuaucacccu

SEQ ID NO: 3228405 - RNA, 19 nt, Artificial Sequence
  Description of Artificial Sequence: Synthetic oligonucleotide
uuucccagagucuaaaauc

SEQ ID NO: 3228406 - RNA, 19 nt, Artificial Sequence
  Description of Artificial Sequence: Synthetic oligonucleotide
ucagguguauaauacuggc

SEQ ID NO: 3228407 - RNA, 19 nt, Artificial Sequence
  Description of Artificial Sequence: Synthetic oligonucleotide
auaccuaaaaccaagcacu

SEQ ID NO: 3228408 - RNA, 19 nt, Artificial Sequence
  Description of Artificial Sequence: Synthetic oligonucleotide
uggaauugaacaauggcuu

SEQ ID NO: 3228409 - RNA, 19 nt, Artificial Sequence
  Description of Artificial Sequence: Synthetic oligonucleotide
uuaguuaauaaagacugaa

SEQ ID NO: 3228410 - RNA, 19 nt, Artificial Sequence
  Description of Artificial Sequence: Synthetic oligonucleotide
uaacuaauacuucuuuagu

SEQ ID NO: 3228411 - RNA, 19 nt, Artificial Sequence
  Description of Artificial Sequence: Synthetic oligonucleotide
aaggcuuaaguuacuacuc

SEQ ID NO: 3228412 - RNA, 19 nt, Artificial Sequence
  Description of Artificial Sequence: Synthetic oligonucleotide
acaaaugcucauaaacccc

SEQ ID NO: 3228413 - RNA, 19 nt, Artificial Sequence
  Description of Artificial Sequence: Synthetic oligonucleotide
uaaugaccuauuuccaugc

SEQ ID NO: 3228414 - RNA, 19 nt, Artificial Sequence
  Description of Artificial Sequence: Synthetic oligonucleotide
auguaauaaagggugauug

SEQ ID NO: 3228415 - RNA, 19 nt, Artificial Sequence
  Description of Artificial Sequence: Synthetic oligonucleotide
ucugcuucaaauagcaaua

SEQ ID NO: 3228416 - RNA, 19 nt, Artificial Sequence
  Description of Artificial Sequence: Synthetic oligonucleotide
ugaccuauuuccaugcagu

SEQ ID NO: 3228417 - RNA, 19 nt, Artificial Sequence
  Description of Artificial Sequence: Synthetic oligonucleotide
ucuauuaugaaauuuaagg

SEQ ID NO: 3228418 - RNA, 19 nt, Artificial Sequence
  Description of Artificial Sequence: Synthetic oligonucleotide
agucaauucacccaaauuc

SEQ ID NO: 3228419 - RNA, 19 nt, Artificial Sequence
  Description of Artificial Sequence: Synthetic oligonucleotide
uauuaugaaauuuaaggcc

SEQ ID NO: 3228420 - RNA, 19 nt, Artificial Sequence
  Description of Artificial Sequence: Synthetic oligonucleotide
acuguuaucauguaaaugu

SEQ ID NO: 3228421 - RNA, 19 nt, Artificial Sequence
  Description of Artificial Sequence: Synthetic oligonucleotide
gacaaaggcaaauauaaag

SEQ ID NO: 3228422 - RNA, 19 nt, Artificial Sequence
  Description of Artificial Sequence: Synthetic oligonucleotide
auuaugaaauuuaaggccc

SEQ ID NO: 3228423 - RNA, 19 nt, Artificial Sequence
  Description of Artificial Sequence: Synthetic oligonucleotide
uauaaauugguuccaacug

SEQ ID NO: 3228424 - RNA, 19 nt, Artificial Sequence
  Description of Artificial Sequence: Synthetic oligonucleotide
aauuagaguaaauaacaca

SEQ ID NO: 3228425 - RNA, 19 nt, Artificial Sequence
  Description of Artificial Sequence: Synthetic oligonucleotide
acauucuuaacugacauac

SEQ ID NO: 3228426 - RNA, 19 nt, Artificial Sequence
  Description of Artificial Sequence: Synthetic oligonucleotide
aaccauguaacaucuaaag

SEQ ID NO: 3228427 - RNA, 19 nt, Artificial Sequence
  Description of Artificial Sequence: Synthetic oligonucleotide
uugauaugaaguuuguucc

SEQ ID NO: 3228428 - RNA, 19 nt, Artificial Sequence
  Description of Artificial Sequence: Synthetic oligonucleotide
uuaauguccaucuaacagc

SEQ ID NO: 3228429 - RNA, 19 nt, Artificial Sequence
  Description of Artificial Sequence: Synthetic oligonucleotide
aauucacccaaauuccaac

SEQ ID NO: 3228430 - RNA, 19 nt, Artificial Sequence
  Description of Artificial Sequence: Synthetic oligonucleotide
uacauaagcauuuauuuga

SEQ ID NO: 3228431 - RNA, 19 nt, Artificial Sequence
  Description of Artificial Sequence: Synthetic oligonucleotide
aacuagauugcuuaacuca

SEQ ID NO: 3228432 - RNA, 19 nt, Artificial Sequence
  Description of Artificial Sequence: Synthetic oligonucleotide
auaaauugguuccaacugg

SEQ ID NO: 3228433 - RNA, 19 nt, Artificial Sequence
  Description of Artificial Sequence: Synthetic oligonucleotide
ugguuuauaaauugguucc

SEQ ID NO: 3228434 - RNA, 19 nt, Artificial Sequence
  Description of Artificial Sequence: Synthetic oligonucleotide
cuuaauguccaucuaacag

SEQ ID NO: 3228435 - RNA, 19 nt, Artificial Sequence
  Description of Artificial Sequence: Synthetic oligonucleotide
uacagcauacccuaggugc

SEQ ID NO: 3228436 - RNA, 19 nt, Artificial Sequence
  Description of Artificial Sequence: Synthetic oligonucleotide
aagaguucuagacagugca

SEQ ID NO: 3228437 - RNA, 19 nt, Artificial Sequence
  Description of Artificial Sequence: Synthetic oligonucleotide
uugcaaacaacaauaauaa

SEQ ID NO: 3228438 - RNA, 19 nt, Artificial Sequence
  Description of Artificial Sequence: Synthetic oligonucleotide
gaaguuauucuuaaugucc

SEQ ID NO: 3228439 - RNA, 19 nt, Artificial Sequence
  Description of Artificial Sequence: Synthetic oligonucleotide
uagauaaagacauugcuau

SEQ ID NO: 3228440 - RNA, 19 nt, Artificial Sequence
  Description of Artificial Sequence: Synthetic oligonucleotide
aguaacaaggaugaguuuc

SEQ ID NO: 3228441 - RNA, 19 nt, Artificial Sequence
  Description of Artificial Sequence: Synthetic oligonucleotide
aagauugugagcuaucuuu

SEQ ID NO: 3228442 - RNA, 19 nt, Artificial Sequence
  Description of Artificial Sequence: Synthetic oligonucleotide
uccacaaguagauaaagac

SEQ ID NO: 3228443 - RNA, 19 nt, Artificial Sequence
  Description of Artificial Sequence: Synthetic oligonucleotide
auuuauggcaaguaggagu

SEQ ID NO: 3228444 - RNA, 19 nt, Artificial Sequence
  Description of Artificial Sequence: Synthetic oligonucleotide
uaaaaguggaacuaauagu

SEQ ID NO: 3228445 - RNA, 19 nt, Artificial Sequence
  Description of Artificial Sequence: Synthetic oligonucleotide
uccauuaaggaugaaauga

SEQ ID NO: 3228446 - RNA, 19 nt, Artificial Sequence
  Description of Artificial Sequence: Synthetic oligonucleotide
uauuuaaagaucugaagau

SEQ ID NO: 3228447 - RNA, 19 nt, Artificial Sequence
  Description of Artificial Sequence: Synthetic oligonucleotide
ccauguaacaucuaaaggg

SEQ ID NO: 3228448 - RNA, 19 nt, Artificial Sequence
  Description of Artificial Sequence: Synthetic oligonucleotide
auaauuagaguaaauaaca

SEQ ID NO: 3228449 - RNA, 19 nt, Artificial Sequence
  Description of Artificial Sequence: Synthetic oligonucleotide
cuuaauuaagauuaucuga

SEQ ID NO: 3228450 - RNA, 19 nt, Artificial Sequence
  Description of Artificial Sequence: Synthetic oligonucleotide
ugaaguuuguuccaauuac

SEQ ID NO: 3228451 - RNA, 19 nt, Artificial Sequence
  Description of Artificial Sequence: Synthetic oligonucleotide
auucuuaacugacauacug

SEQ ID NO: 3228452 - RNA, 19 nt, Artificial Sequence
  Description of Artificial Sequence: Synthetic oligonucleotide
uccaagaaaaccuugcuaa

SEQ ID NO: 3228453 - RNA, 19 nt, Artificial Sequence
  Description of Artificial Sequence: Synthetic oligonucleotide
uauacuagcuugcaaauua

SEQ ID NO: 3228454 - RNA, 19 nt, Artificial Sequence
  Description of Artificial Sequence: Synthetic oligonucleotide
aaagguacuguuaucaugu

SEQ ID NO: 3228455 - RNA, 19 nt, Artificial Sequence
  Description of Artificial Sequence: Synthetic oligonucleotide
aggaauagagguuacauaa

SEQ ID NO: 3228456 - RNA, 19 nt, Artificial Sequence
  Description of Artificial Sequence: Synthetic oligonucleotide
ucuuaacugacauacugug

SEQ ID NO: 3228457 - RNA, 19 nt, Artificial Sequence
  Description of Artificial Sequence: Synthetic oligonucleotide
uaaacucacuucaugauaa

SEQ ID NO: 3228458 - RNA, 19 nt, Artificial Sequence
  Description of Artificial Sequence: Synthetic oligonucleotide
uauaauacaccuucauaca

SEQ ID NO: 3228459 - RNA, 19 nt, Artificial Sequence
  Description of Artificial Sequence: Synthetic oligonucleotide
aguagauaaagacauugcu

SEQ ID NO: 3228460 - RNA, 19 nt, Artificial Sequence
  Description of Artificial Sequence: Synthetic oligonucleotide
acucacuucaugauaagcc

SEQ ID NO: 3228461 - RNA, 19 nt, Artificial Sequence
  Description of Artificial Sequence: Synthetic oligonucleotide
aaccuugaagaguaauuuc

SEQ ID NO: 3228462 - RNA, 19 nt, Artificial Sequence
  Description of Artificial Sequence: Synthetic oligonucleotide
uaauuagaguaaauaacac

SEQ ID NO: 3228463 - RNA, 19 nt, Artificial Sequence
  Description of Artificial Sequence: Synthetic oligonucleotide
aauauacuagcuugcaaau

SEQ ID NO: 3228464 - RNA, 19 nt, Artificial Sequence
  Description of Artificial Sequence: Synthetic oligonucleotide
auuagaguaaauaacacau

SEQ ID NO: 3228465 - RNA, 19 nt, Artificial Sequence
  Description of Artificial Sequence: Synthetic oligonucleotide
agaucugaagauugugagc

SEQ ID NO: 3228466 - RNA, 19 nt, Artificial Sequence
  Description of Artificial Sequence: Synthetic oligonucleotide
aagacaaguucaaguaugc

SEQ ID NO: 3228467 - RNA, 19 nt, Artificial Sequence
  Description of Artificial Sequence: Synthetic oligonucleotide
aguacccuaaauuacaaau

SEQ ID NO: 3228468 - RNA, 19 nt, Artificial Sequence
  Description of Artificial Sequence: Synthetic oligonucleotide
uguguuucauuggagaaag

SEQ ID NO: 3228469 - RNA, 19 nt, Artificial Sequence
  Description of Artificial Sequence: Synthetic oligonucleotide
aagagguuaacauucuaaa

SEQ ID NO: 3228470 - RNA, 19 nt, Artificial Sequence
  Description of Artificial Sequence: Synthetic oligonucleotide
uugauaaguacccuaaauu

SEQ ID NO: 3228471 - RNA, 19 nt, Artificial Sequence
  Description of Artificial Sequence: Synthetic oligonucleotide
uuauuuugggauauguuua

SEQ ID NO: 3228472 - RNA, 19 nt, Artificial Sequence
  Description of Artificial Sequence: Synthetic oligonucleotide
aagaaaaccuugcuaacau

SEQ ID NO: 3228473 - RNA, 19 nt, Artificial Sequence
  Description of Artificial Sequence: Synthetic oligonucleotide
accauguaacaucuaaagg

SEQ ID NO: 3228474 - RNA, 19 nt, Artificial Sequence
  Description of Artificial Sequence: Synthetic oligonucleotide
uaagaaaauauacuagcuu

SEQ ID NO: 3228475 - RNA, 19 nt, Artificial Sequence
  Description of Artificial Sequence: Synthetic oligonucleotide
ugcagguaugaaaagaggu

SEQ ID NO: 3228476 - RNA, 19 nt, Artificial Sequence
  Description of Artificial Sequence: Synthetic oligonucleotide
gagaagaaaccuugaagag

SEQ ID NO: 3228477 - RNA, 19 nt, Artificial Sequence
  Description of Artificial Sequence: Synthetic oligonucleotide
ugcauacccaguaaguggc

SEQ ID NO: 3228478 - RNA, 19 nt, Artificial Sequence
  Description of Artificial Sequence: Synthetic oligonucleotide
aacaugagaagaaaccuug

SEQ ID NO: 3228479 - RNA, 19 nt, Artificial Sequence
  Description of Artificial Sequence: Synthetic oligonucleotide
uucacacagagguaguucc

SEQ ID NO: 3228480 - RNA, 19 nt, Artificial Sequence
  Description of Artificial Sequence: Synthetic oligonucleotide
uagucaaaauaucaaaaua

SEQ ID NO: 3228481 - RNA, 19 nt, Artificial Sequence
  Description of Artificial Sequence: Synthetic oligonucleotide
aguugucucaaaugguuuc

SEQ ID NO: 3228482 - RNA, 19 nt, Artificial Sequence
  Description of Artificial Sequence: Synthetic oligonucleotide
uaaauugguuccaacugga

SEQ ID NO: 3228483 - RNA, 19 nt, Artificial Sequence
  Description of Artificial Sequence: Synthetic oligonucleotide
uaggcuucgucuuucaaug

SEQ ID NO: 3228484 - RNA, 19 nt, Artificial Sequence
  Description of Artificial Sequence: Synthetic oligonucleotide
augcauacccaguaagugg

SEQ ID NO: 3228485 - RNA, 19 nt, Artificial Sequence
  Description of Artificial Sequence: Synthetic oligonucleotide
aggaucaacccacucugcc

SEQ ID NO: 3228486 - RNA, 19 nt, Artificial Sequence
  Description of Artificial Sequence: Synthetic oligonucleotide
aagucgaggaucaacccac

SEQ ID NO: 3228487 - RNA, 19 nt, Artificial Sequence
  Description of Artificial Sequence: Synthetic oligonucleotide
uuacuagcccuuaauuaag

SEQ ID NO: 3228488 - RNA, 19 nt, Artificial Sequence
  Description of Artificial Sequence: Synthetic oligonucleotide
acuaguuugauuaacuaga

SEQ ID NO: 3228489 - RNA, 19 nt, Artificial Sequence
  Description of Artificial Sequence: Synthetic oligonucleotide
uggaagaaaugaaauugug

SEQ ID NO: 3228490 - RNA, 19 nt, Artificial Sequence
  Description of Artificial Sequence: Synthetic oligonucleotide
ugcuuaacucaacaagaag

SEQ ID NO: 3228491 - RNA, 19 nt, Artificial Sequence
  Description of Artificial Sequence: Synthetic oligonucleotide
uuaagguugccuagaaaac

SEQ ID NO: 3228492 - RNA, 19 nt, Artificial Sequence
  Description of Artificial Sequence: Synthetic oligonucleotide
uaucuuuugccacaauuuc

SEQ ID NO: 3228493 - RNA, 19 nt, Artificial Sequence
  Description of Artificial Sequence: Synthetic oligonucleotide
cuuacgagcccucucauug

SEQ ID NO: 3228494 - RNA, 19 nt, Artificial Sequence
  Description of Artificial Sequence: Synthetic oligonucleotide
uaucauguaaauguagcac

SEQ ID NO: 3228495 - RNA, 19 nt, Artificial Sequence
  Description of Artificial Sequence: Synthetic oligonucleotide
auguugacugguuuaauca

SEQ ID NO: 3228496 - RNA, 19 nt, Artificial Sequence
  Description of Artificial Sequence: Synthetic oligonucleotide
uucuuaacugacauacugu

SEQ ID NO: 3228497 - RNA, 19 nt, Artificial Sequence
  Description of Artificial Sequence: Synthetic oligonucleotide
uaugucgggagucauggcu

SEQ ID NO: 3228498 - RNA, 19 nt, Artificial Sequence
  Description of Artificial Sequence: Synthetic oligonucleotide
auaaagacauugcuaucag

SEQ ID NO: 3228499 - RNA, 19 nt, Artificial Sequence
  Description of Artificial Sequence: Synthetic oligonucleotide
acaagucgaggaucaaccc

SEQ ID NO: 3228500 - RNA, 19 nt, Artificial Sequence
  Description of Artificial Sequence: Synthetic oligonucleotide
ucucaaaugguuucagacu

SEQ ID NO: 3228501 - RNA, 19 nt, Artificial Sequence
  Description of Artificial Sequence: Synthetic oligonucleotide
cagaggauguguuucauug

SEQ ID NO: 3228502 - RNA, 19 nt, Artificial Sequence
  Description of Artificial Sequence: Synthetic oligonucleotide
aaauuauccacaaguagau

SEQ ID NO: 3228503 - RNA, 19 nt, Artificial Sequence
  Description of Artificial Sequence: Synthetic oligonucleotide
uuaugaaauuuaaggcccc

SEQ ID NO: 3228504 - RNA, 19 nt, Artificial Sequence
  Description of Artificial Sequence: Synthetic oligonucleotide
aaagaucugaagauuguga

SEQ ID NO: 3228505 - RNA, 19 nt, Artificial Sequence
  Description of Artificial Sequence: Synthetic oligonucleotide
ugcaaauuaagguugccua

SEQ ID NO: 3228506 - RNA, 19 nt, Artificial Sequence
  Description of Artificial Sequence: Synthetic oligonucleotide
uucuaaucuccuuauaaua

SEQ ID NO: 3228507 - RNA, 19 nt, Artificial Sequence
  Description of Artificial Sequence: Synthetic oligonucleotide
aaguaugcagguaugaaaa

SEQ ID NO: 3228508 - RNA, 19 nt, Artificial Sequence
  Description of Artificial Sequence: Synthetic oligonucleotide
ugauaagccacgaaucaau

SEQ ID NO: 3228509 - RNA, 19 nt, Artificial Sequence
  Description of Artificial Sequence: Synthetic oligonucleotide
ugggauauguuuauuuaaa

SEQ ID NO: 3228510 - RNA, 19 nt, Artificial Sequence
  Description of Artificial Sequence: Synthetic oligonucleotide
ucaauucacccaaauucca

SEQ ID NO: 3228511 - RNA, 19 nt, Artificial Sequence
  Description of Artificial Sequence: Synthetic oligonucleotide
guuacuagcccuuaauuaa

SEQ ID NO: 3228512 - RNA, 19 nt, Artificial Sequence
  Description of Artificial Sequence: Synthetic oligonucleotide
aagcgguuccuacucuuac

SEQ ID NO: 3228513 - RNA, 19 nt, Artificial Sequence
  Description of Artificial Sequence: Synthetic oligonucleotide
acccacucugccuuuaaac

SEQ ID NO: 3228514 - RNA, 19 nt, Artificial Sequence
  Description of Artificial Sequence: Synthetic oligonucleotide
ucuaauguugacugguuua

SEQ ID NO: 3228515 - RNA, 19 nt, Artificial Sequence
  Description of Artificial Sequence: Synthetic oligonucleotide
ugagccucgguuccugugg

SEQ ID NO: 3228516 - RNA, 19 nt, Artificial Sequence
  Description of Artificial Sequence: Synthetic oligonucleotide
aaauuaagguugccuagaa

SEQ ID NO: 3228517 - RNA, 19 nt, Artificial Sequence
  Description of Artificial Sequence: Synthetic oligonucleotide
aauccuuuuagacuuaacc

SEQ ID NO: 3228518 - RNA, 19 nt, Artificial Sequence
  Description of Artificial Sequence: Synthetic oligonucleotide
aacuaaauuaaaugaaagc

SEQ ID NO: 3228519 - RNA, 19 nt, Artificial Sequence
  Description of Artificial Sequence: Synthetic oligonucleotide
ucuaucaucauccuuauag

SEQ ID NO: 3228520 - RNA, 19 nt, Artificial Sequence
  Description of Artificial Sequence: Synthetic oligonucleotide
aauuuaacugaguaaggcc

SEQ ID NO: 3228521 - RNA, 19 nt, Artificial Sequence
  Description of Artificial Sequence: Synthetic oligonucleotide
aagagaaacaccuuuuagg

SEQ ID NO: 3228522 - RNA, 19 nt, Artificial Sequence
  Description of Artificial Sequence: Synthetic oligonucleotide
uuuauaauaaauuuguuuu

SEQ ID NO: 3228523 - RNA, 19 nt, Artificial Sequence
  Description of Artificial Sequence: Synthetic oligonucleotide
uaaauuaaaugaaagcaag

SEQ ID NO: 3228524 - RNA, 19 nt, Artificial Sequence
  Description of Artificial Sequence: Synthetic oligonucleotide
acugugaacauuuagaaug

SEQ ID NO: 3228525 - RNA, 19 nt, Artificial Sequence
  Description of Artificial Sequence: Synthetic oligonucleotide
aauccaacuaaauuaaaug

SEQ ID NO: 3228526 - RNA, 19 nt, Artificial Sequence
  Description of Artificial Sequence: Synthetic oligonucleotide
auaggaaccaagcugaagg

SEQ ID NO: 3228527 - RNA, 19 nt, Artificial Sequence
  Description of Artificial Sequence: Synthetic oligonucleotide
ugaaauguaaucuccauca

SEQ ID NO: 3228528 - RNA, 19 nt, Artificial Sequence
  Description of Artificial Sequence: Synthetic oligonucleotide
auugauuacuuuuaggaag

SEQ ID NO: 3228529 - RNA, 19 nt, Artificial Sequence
  Description of Artificial Sequence: Synthetic oligonucleotide
agagaaacaccuuuuaggg

SEQ ID NO: 3228530 - RNA, 19 nt, Artificial Sequence
  Description of Artificial Sequence: Synthetic oligonucleotide
auauugauuacuuuuagga

SEQ ID NO: 3228531 - RNA, 19 nt, Artificial Sequence
  Description of Artificial Sequence: Synthetic oligonucleotide
uuuacugugaacauuuaga

SEQ ID NO: 3228532 - RNA, 19 nt, Artificial Sequence
  Description of Artificial Sequence: Synthetic oligonucleotide
acuaaauuaaaugaaagca

SEQ ID NO: 3228533 - RNA, 19 nt, Artificial Sequence
  Description of Artificial Sequence: Synthetic oligonucleotide
uuccaaauuacuuuugucc

SEQ ID NO: 3228534 - RNA, 19 nt, Artificial Sequence
  Description of Artificial Sequence: Synthetic oligonucleotide
uaaaugaaagcaaggauga

SEQ ID NO: 3228535 - RNA, 19 nt, Artificial Sequence
  Description of Artificial Sequence: Synthetic oligonucleotide
aacaaacgaagacagaugu

SEQ ID NO: 3228536 - RNA, 19 nt, Artificial Sequence
  Description of Artificial Sequence: Synthetic oligonucleotide
uauaaaguuacaaaacaaa

SEQ ID NO: 3228537 - RNA, 19 nt, Artificial Sequence
  Description of Artificial Sequence: Synthetic oligonucleotide
aucuuuaugcaaaugaccc

SEQ ID NO: 3228538 - RNA, 19 nt, Artificial Sequence
  Description of Artificial Sequence: Synthetic oligonucleotide
uuauguaaaaggacuuucg

SEQ ID NO: 3228539 - RNA, 19 nt, Artificial Sequence
  Description of Artificial Sequence: Synthetic oligonucleotide
aaagacauaacaagguaac

SEQ ID NO: 3228540 - RNA, 19 nt, Artificial Sequence
  Description of Artificial Sequence: Synthetic oligonucleotide
uuagacuuaaccaauuuaa

SEQ ID NO: 3228541 - RNA, 19 nt, Artificial Sequence
  Description of Artificial Sequence: Synthetic oligonucleotide
uucacaaauaguuaagugu

SEQ ID NO: 3228542 - RNA, 19 nt, Artificial Sequence
  Description of Artificial Sequence: Synthetic oligonucleotide
uauaucugcacacuguagc

SEQ ID NO: 3228543 - RNA, 19 nt, Artificial Sequence
  Description of Artificial Sequence: Synthetic oligonucleotide
aaauucaugucaucauagg

SEQ ID NO: 3228544 - RNA, 19 nt, Artificial Sequence
  Description of Artificial Sequence: Synthetic oligonucleotide
aggugcaagaaauaggaac

SEQ ID NO: 3228545 - RNA, 19 nt, Artificial Sequence
  Description of Artificial Sequence: Synthetic oligonucleotide
aguggcauuauaaauagac

SEQ ID NO: 3228546 - RNA, 19 nt, Artificial Sequence
  Description of Artificial Sequence: Synthetic oligonucleotide
aauaucuuaccauuucacu

SEQ ID NO: 3228547 - RNA, 19 nt, Artificial Sequence
  Description of Artificial Sequence: Synthetic oligonucleotide
uuauaggaagagaacagcc

SEQ ID NO: 3228548 - RNA, 19 nt, Artificial Sequence
  Description of Artificial Sequence: Synthetic oligonucleotide
cauaaauaugggaaggugc

SEQ ID NO: 3228549 - RNA, 19 nt, Artificial Sequence
  Description of Artificial Sequence: Synthetic oligonucleotide
agugagauuacugagcaac

SEQ ID NO: 3228550 - RNA, 19 nt, Artificial Sequence
  Description of Artificial Sequence: Synthetic oligonucleotide
augcaaaugacccacacug

SEQ ID NO: 3228551 - RNA, 19 nt, Artificial Sequence
  Description of Artificial Sequence: Synthetic oligonucleotide
aagauaacacauaaaauca

SEQ ID NO: 3228552 - RNA, 19 nt, Artificial Sequence
  Description of Artificial Sequence: Synthetic oligonucleotide
auugacacaauccuaucuc

SEQ ID NO: 3228553 - RNA, 19 nt, Artificial Sequence
  Description of Artificial Sequence: Synthetic oligonucleotide
uguacaaaggcagugacug

SEQ ID NO: 3228554 - RNA, 19 nt, Artificial Sequence
  Description of Artificial Sequence: Synthetic oligonucleotide
aauucaugucaucauagga

SEQ ID NO: 3228555 - RNA, 19 nt, Artificial Sequence
  Description of Artificial Sequence: Synthetic oligonucleotide
ugacuauguacaaaggcag

SEQ ID NO: 3228556 - RNA, 19 nt, Artificial Sequence
  Description of Artificial Sequence: Synthetic oligonucleotide
ugaugugaacauuuggagg

SEQ ID NO: 3228557 - RNA, 19 nt, Artificial Sequence
  Description of Artificial Sequence: Synthetic oligonucleotide
aaauaucuuaccauuucac

SEQ ID NO: 3228558 - RNA, 19 nt, Artificial Sequence
  Description of Artificial Sequence: Synthetic oligonucleotide
ucgacaacguuacagagca

SEQ ID NO: 3228559 - RNA, 19 nt, Artificial Sequence
  Description of Artificial Sequence: Synthetic oligonucleotide
uuuaaaggugaauuuauaa

SEQ ID NO: 3228560 - RNA, 19 nt, Artificial Sequence
  Description of Artificial Sequence: Synthetic oligonucleotide
agaaacaccuuuuagggcu

SEQ ID NO: 3228561 - RNA, 19 nt, Artificial Sequence
  Description of Artificial Sequence: Synthetic oligonucleotide
auaucuuaccauuucacug

SEQ ID NO: 3228562 - RNA, 19 nt, Artificial Sequence
  Description of Artificial Sequence: Synthetic oligonucleotide
uugauuacuuuuaggaagc

SEQ ID NO: 3228563 - RNA, 19 nt, Artificial Sequence
  Description of Artificial Sequence: Synthetic oligonucleotide
uccaaauuacuuuuguccc

SEQ ID NO: 3228564 - RNA, 19 nt, Artificial Sequence
  Description of Artificial Sequence: Synthetic oligonucleotide
gaugugaacauuuggagga

SEQ ID NO: 3228565 - RNA, 19 nt, Artificial Sequence
  Description of Artificial Sequence: Synthetic oligonucleotide
caaacgaagacagaugucg

SEQ ID NO: 3228566 - RNA, 19 nt, Artificial Sequence
  Description of Artificial Sequence: Synthetic oligonucleotide
uucaugucaucauaggaag

SEQ ID NO: 3228567 - RNA, 19 nt, Artificial Sequence
  Description of Artificial Sequence: Synthetic oligonucleotide
uaaauagacaaaaggcaca

SEQ ID NO: 3228568 - RNA, 19 nt, Artificial Sequence
  Description of Artificial Sequence: Synthetic oligonucleotide
auagacaaaaggcacauaa

SEQ ID NO: 3228569 - RNA, 19 nt, Artificial Sequence
  Description of Artificial Sequence: Synthetic oligonucleotide
aaguuggcaagucuuuagg

SEQ ID NO: 3228570 - RNA, 19 nt, Artificial Sequence
  Description of Artificial Sequence: Synthetic oligonucleotide
cugagcaacucuaaguugg

SEQ ID NO: 3228571 - RNA, 19 nt, Artificial Sequence
  Description of Artificial Sequence: Synthetic oligonucleotide
uggcauuauaaauagacaa

SEQ ID NO: 3228572 - RNA, 19 nt, Artificial Sequence
  Description of Artificial Sequence: Synthetic oligonucleotide
aacgaagacagaugucgac

SEQ ID NO: 3228573 - RNA, 19 nt, Artificial Sequence
  Description of Artificial Sequence: Synthetic oligonucleotide
auccaacuaaauuaaauga

SEQ ID NO: 3228574 - RNA, 19 nt, Artificial Sequence
  Description of Artificial Sequence: Synthetic oligonucleotide
aguguuuauuuccagugag

SEQ ID NO: 3228575 - RNA, 19 nt, Artificial Sequence
  Description of Artificial Sequence: Synthetic oligonucleotide
ggaaucauaauccuuuuag

SEQ ID NO: 3228576 - RNA, 19 nt, Artificial Sequence
  Description of Artificial Sequence: Synthetic oligonucleotide
uaucuuaccauuucacuga

SEQ ID NO: 3228577 - RNA, 19 nt, Artificial Sequence
  Description of Artificial Sequence: Synthetic oligonucleotide
aaggaugaaaucaucaccu

SEQ ID NO: 3228578 - RNA, 19 nt, Artificial Sequence
  Description of Artificial Sequence: Synthetic oligonucleotide
aaguccucccuccucuucc

SEQ ID NO: 3228579 - RNA, 19 nt, Artificial Sequence
  Description of Artificial Sequence: Synthetic oligonucleotide
aauuuguuuucagauaccu

SEQ ID NO: 3228580 - RNA, 19 nt, Artificial Sequence
  Description of Artificial Sequence: Synthetic oligonucleotide
uccaacuaaauuaaaugaa

SEQ ID NO: 3228581 - RNA, 19 nt, Artificial Sequence
  Description of Artificial Sequence: Synthetic oligonucleotide
aaauaugggaaggugcaag

SEQ ID NO: 3228582 - RNA, 19 nt, Artificial Sequence
  Description of Artificial Sequence: Synthetic oligonucleotide
uaguuaaguguguuuaaag

SEQ ID NO: 3228583 - RNA, 19 nt, Artificial Sequence
  Description of Artificial Sequence: Synthetic oligonucleotide
uuuaggaagcuuugaaaug

SEQ ID NO: 3228584 - RNA, 19 nt, Artificial Sequence
  Description of Artificial Sequence: Synthetic oligonucleotide
aguguuugcagcuucaaaa

SEQ ID NO: 3228585 - RNA, 19 nt, Artificial Sequence
  Description of Artificial Sequence: Synthetic oligonucleotide
agacauaacaagguaacuc

SEQ ID NO: 3228586 - RNA, 19 nt, Artificial Sequence
  Description of Artificial Sequence: Synthetic oligonucleotide
caaauugagaaguguuucg

SEQ ID NO: 3228587 - RNA, 19 nt, Artificial Sequence
  Description of Artificial Sequence: Synthetic oligonucleotide
uuuccagugagauuacuga

SEQ ID NO: 3228588 - RNA, 19 nt, Artificial Sequence
  Description of Artificial Sequence: Synthetic oligonucleotide
aggaucuuuaugcaaauga

SEQ ID NO: 3228589 - RNA, 19 nt, Artificial Sequence
  Description of Artificial Sequence: Synthetic oligonucleotide
auccuuuuagacuuaacca

SEQ ID NO: 3228590 - RNA, 19 nt, Artificial Sequence
  Description of Artificial Sequence: Synthetic oligonucleotide
aaauuuguuuucagauacc

SEQ ID NO: 3228591 - RNA, 19 nt, Artificial Sequence
  Description of Artificial Sequence: Synthetic oligonucleotide
uauaggaagagaacagccu

SEQ ID NO: 3228592 - RNA, 19 nt, Artificial Sequence
  Description of Artificial Sequence: Synthetic oligonucleotide
aauaugggaaggugcaaga

SEQ ID NO: 3228593 - RNA, 19 nt, Artificial Sequence
  Description of Artificial Sequence: Synthetic oligonucleotide
aacguuacagagcaucagu

SEQ ID NO: 3228594 - RNA, 19 nt, Artificial Sequence
  Description of Artificial Sequence: Synthetic oligonucleotide
cuuucgaacauuuccgcag

SEQ ID NO: 3228595 - RNA, 19 nt, Artificial Sequence
  Description of Artificial Sequence: Synthetic oligonucleotide
uuuagacuuaaccaauuua

SEQ ID NO: 3228596 - RNA, 19 nt, Artificial Sequence
  Description of Artificial Sequence: Synthetic oligonucleotide
uuacuuuugucccaguaau

SEQ ID NO: 3228597 - RNA, 19 nt, Artificial Sequence
  Description of Artificial Sequence: Synthetic oligonucleotide
aaaggcagugacuggacca

SEQ ID NO: 3228598 - RNA, 19 nt, Artificial Sequence
  Description of Artificial Sequence: Synthetic oligonucleotide
guuacagagcaucaguccc

SEQ ID NO: 3228599 - RNA, 19 nt, Artificial Sequence
  Description of Artificial Sequence: Synthetic oligonucleotide
cuaaauuaaaugaaagcaa

SEQ ID NO: 3228600 - RNA, 19 nt, Artificial Sequence
  Description of Artificial Sequence: Synthetic oligonucleotide
acuuaaccaauuuaacuga

SEQ ID NO: 3228601 - RNA, 19 nt, Artificial Sequence
  Description of Artificial Sequence: Synthetic oligonucleotide
aagguaacucugucgaucu

SEQ ID NO: 3228602 - RNA, 19 nt, Artificial Sequence
  Description of Artificial Sequence: Synthetic oligonucleotide
aggauuaguguuuacugug

SEQ ID NO: 3228603 - RNA, 19 nt, Artificial Sequence
  Description of Artificial Sequence: Synthetic oligonucleotide
agaacagccuuguaaaacu

SEQ ID NO: 3228604 - RNA, 19 nt, Artificial Sequence
  Description of Artificial Sequence: Synthetic oligonucleotide
gaucuuuaugcaaaugacc

SEQ ID NO: 3228605 - RNA, 19 nt, Artificial Sequence
  Description of Artificial Sequence: Synthetic oligonucleotide
uuaggaagcuuugaaaugu

SEQ ID NO: 3228606 - RNA, 19 nt, Artificial Sequence
  Description of Artificial Sequence: Synthetic oligonucleotide
gaggguuaggcuuucauuc

SEQ ID NO: 3228607 - RNA, 19 nt, Artificial Sequence
  Description of Artificial Sequence: Synthetic oligonucleotide
uuugucccaguaauuaucu

SEQ ID NO: 3228608 - RNA, 19 nt, Artificial Sequence
  Description of Artificial Sequence: Synthetic oligonucleotide
ucaucagccaagauugaca

SEQ ID NO: 3228609 - RNA, 19 nt, Artificial Sequence
  Description of Artificial Sequence: Synthetic oligonucleotide
uccuuauaggaagagaaca

SEQ ID NO: 3228610 - RNA, 19 nt, Artificial Sequence
  Description of Artificial Sequence: Synthetic oligonucleotide
uaccauuucacugaguuaa

SEQ ID NO: 3228611 - RNA, 19 nt, Artificial Sequence
  Description of Artificial Sequence: Synthetic oligonucleotide
aacauuuagaaugcaacau

SEQ ID NO: 3228612 - RNA, 19 nt, Artificial Sequence
  Description of Artificial Sequence: Synthetic oligonucleotide
augucgacaacacauacau

SEQ ID NO: 3228613 - RNA, 19 nt, Artificial Sequence
  Description of Artificial Sequence: Synthetic oligonucleotide
ucaaagacauaacaaggua

SEQ ID NO: 3228614 - RNA, 19 nt, Artificial Sequence
  Description of Artificial Sequence: Synthetic oligonucleotide
gugaugugaacauuuggag

SEQ ID NO: 3228615 - RNA, 19 nt, Artificial Sequence
  Description of Artificial Sequence: Synthetic oligonucleotide
ucuccaucaaauugagaag

SEQ ID NO: 3228616 - RNA, 19 nt, Artificial Sequence
  Description of Artificial Sequence: Synthetic oligonucleotide
ucagccaagauugacacaa

SEQ ID NO: 3228617 - RNA, 19 nt, Artificial Sequence
  Description of Artificial Sequence: Synthetic oligonucleotide
aauaauuuaaauaaaaggc

SEQ ID NO: 3228618 - RNA, 19 nt, Artificial Sequence
  Description of Artificial Sequence: Synthetic oligonucleotide
aaauaauuuaaauaaaagg

SEQ ID NO: 3228619 - RNA, 19 nt, Artificial Sequence
  Description of Artificial Sequence: Synthetic oligonucleotide
aaucaaauuuucuucagcc

SEQ ID NO: 3228620 - RNA, 19 nt, Artificial Sequence
  Description of Artificial Sequence: Synthetic oligonucleotide
aaaggaauaauagagaauc

SEQ ID NO: 3228621 - RNA, 19 nt, Artificial Sequence
  Description of Artificial Sequence: Synthetic oligonucleotide
acuaaaauaauuuaaauaa

SEQ ID NO: 3228622 - RNA, 19 nt, Artificial Sequence
  Description of Artificial Sequence: Synthetic oligonucleotide
cuuacuauugaaaugagcc

SEQ ID NO: 3228623 - RNA, 19 nt, Artificial Sequence
  Description of Artificial Sequence: Synthetic oligonucleotide
uagagaaucacuaaaacug

SEQ ID NO: 3228624 - RNA, 19 nt, Artificial Sequence
  Description of Artificial Sequence: Synthetic oligonucleotide
aauagagaaucacuaaaac

SEQ ID NO: 3228625 - RNA, 19 nt, Artificial Sequence
  Description of Artificial Sequence: Synthetic oligonucleotide
ucauauauacacaaaauca

SEQ ID NO: 3228626 - RNA, 19 nt, Artificial Sequence
  Description of Artificial Sequence: Synthetic oligonucleotide
gaaauuacagaaaagacag

SEQ ID NO: 3228627 - RNA, 19 nt, Artificial Sequence
  Description of Artificial Sequence: Synthetic oligonucleotide
aaugaaauuacagaaaaga

SEQ ID NO: 3228628 - RNA, 19 nt, Artificial Sequence
  Description of Artificial Sequence: Synthetic oligonucleotide
aaaauauuuaguuuucagu

SEQ ID NO: 3228629 - RNA, 19 nt, Artificial Sequence
  Description of Artificial Sequence: Synthetic oligonucleotide
aauauuuaguuuucaguuc

SEQ ID NO: 3228630 - RNA, 19 nt, Artificial Sequence
  Description of Artificial Sequence: Synthetic oligonucleotide
ugaaauuacagaaaagaca

SEQ ID NO: 3228631 - RNA, 19 nt, Artificial Sequence
  Description of Artificial Sequence: Synthetic oligonucleotide
aaauauuuaguuuucaguu

SEQ ID NO: 3228632 - RNA, 19 nt, Artificial Sequence
  Description of Artificial Sequence: Synthetic oligonucleotide
aaaaugaaauuacagaaaa

SEQ ID NO: 3228633 - RNA, 19 nt, Artificial Sequence
  Description of Artificial Sequence: Synthetic oligonucleotide
aauuacagaaaagacagag

SEQ ID NO: 3228634 - RNA, 19 nt, Artificial Sequence
  Description of Artificial Sequence: Synthetic oligonucleotide
aaaauaauuuaaauaaaag

SEQ ID NO: 3228635 - RNA, 19 nt, Artificial Sequence
  Description of Artificial Sequence: Synthetic oligonucleotide
uuaaauaaaaggcaagcac

SEQ ID NO: 3228636 - RNA, 19 nt, Artificial Sequence
  Description of Artificial Sequence: Synthetic oligonucleotide
uuuaaagugaaaguaauug

SEQ ID NO: 3228637 - RNA, 19 nt, Artificial Sequence
  Description of Artificial Sequence: Synthetic oligonucleotide
auuuaaauaaaaggcaagc

SEQ ID NO: 3228638 - RNA, 19 nt, Artificial Sequence
  Description of Artificial Sequence: Synthetic oligonucleotide
uaaaauaauuuaaauaaaa

SEQ ID NO: 3228639 - RNA, 19 nt, Artificial Sequence
  Description of Artificial Sequence: Synthetic oligonucleotide
uaaauaaaaggcaagcacu

SEQ ID NO: 3228640 - RNA, 19 nt, Artificial Sequence
  Description of Artificial Sequence: Synthetic oligonucleotide
aauauuuacauggcaaagg

SEQ ID NO: 3228641 - RNA, 19 nt, Artificial Sequence
  Description of Artificial Sequence: Synthetic oligonucleotide
auugaaaugagccaguaga

SEQ ID NO: 3228642 - RNA, 19 nt, Artificial Sequence
  Description of Artificial Sequence: Synthetic oligonucleotide
aaagacagaguccaucggg

SEQ ID NO: 3228643 - RNA, 19 nt, Artificial Sequence
  Description of Artificial Sequence: Synthetic oligonucleotide
gaaaagacagaguccaucg

SEQ ID NO: 3228644 - RNA, 19 nt, Artificial Sequence
  Description of Artificial Sequence: Synthetic oligonucleotide
uuacagaaaagacagaguc

SEQ ID NO: 3228645 - RNA, 19 nt, Artificial Sequence
  Description of Artificial Sequence: Synthetic oligonucleotide
uaagguuuuaaagugaaag

SEQ ID NO: 3228646 - RNA, 19 nt, Artificial Sequence
  Description of Artificial Sequence: Synthetic oligonucleotide
uaaagugaaaguaauugca

SEQ ID NO: 3228647 - RNA, 19 nt, Artificial Sequence
  Description of Artificial Sequence: Synthetic oligonucleotide
uaagccaagugucucaugg

SEQ ID NO: 3228648 - RNA, 19 nt, Artificial Sequence
  Description of Artificial Sequence: Synthetic oligonucleotide
uggcaaaggaauaauagag

SEQ ID NO: 3228649 - RNA, 19 nt, Artificial Sequence
  Description of Artificial Sequence: Synthetic oligonucleotide
aaggcaagcacucauauau

SEQ ID NO: 3228650 - RNA, 19 nt, Artificial Sequence
  Description of Artificial Sequence: Synthetic oligonucleotide
uuuaaucaaauuuucuuca

SEQ ID NO: 3228651 - RNA, 19 nt, Artificial Sequence
  Description of Artificial Sequence: Synthetic oligonucleotide
ugaaaguaauugcagaagc

SEQ ID NO: 3228652 - RNA, 19 nt, Artificial Sequence
  Description of Artificial Sequence: Synthetic oligonucleotide
uuaaagugaaaguaauugc

SEQ ID NO: 3228653 - RNA, 19 nt, Artificial Sequence
  Description of Artificial Sequence: Synthetic oligonucleotide
uaaaauauuuaguuuucag

SEQ ID NO: 3228654 - RNA, 19 nt, Artificial Sequence
  Description of Artificial Sequence: Synthetic oligonucleotide
uaauuuaaauaaaaggcaa

SEQ ID NO: 3228655 - RNA, 19 nt, Artificial Sequence
  Description of Artificial Sequence: Synthetic oligonucleotide
ucauaaggaaucauguaag

SEQ ID NO: 3228656 - RNA, 19 nt, Artificial Sequence
  Description of Artificial Sequence: Synthetic oligonucleotide
uauauacacaaaaucauuc

SEQ ID NO: 3228657 - RNA, 19 nt, Artificial Sequence
  Description of Artificial Sequence: Synthetic oligonucleotide
cauuccaucagccuaagcc

SEQ ID NO: 3228658 - RNA, 19 nt, Artificial Sequence
  Description of Artificial Sequence: Synthetic oligonucleotide
ugcaaaaugaaauuacaga

SEQ ID NO: 3228659 - RNA, 19 nt, Artificial Sequence
  Description of Artificial Sequence: Synthetic oligonucleotide
uuagucuuuaaucaaauuu

SEQ ID NO: 3228660 - RNA, 19 nt, Artificial Sequence
  Description of Artificial Sequence: Synthetic oligonucleotide
aaaauauuuacauggcaaa

SEQ ID NO: 3228661 - RNA, 19 nt, Artificial Sequence
  Description of Artificial Sequence: Synthetic oligonucleotide
auuuucuucagccucacug

SEQ ID NO: 3228662 - RNA, 19 nt, Artificial Sequence
  Description of Artificial Sequence: Synthetic oligonucleotide
ucauguaagguuuuaaagu

SEQ ID NO: 3228663 - RNA, 19 nt, Artificial Sequence
  Description of Artificial Sequence: Synthetic oligonucleotide
ucagcuuagucuuuaauca

SEQ ID NO: 3228664 - RNA, 19 nt, Artificial Sequence
  Description of Artificial Sequence: Synthetic oligonucleotide
aauaauagagaaucacuaa

SEQ ID NO: 3228665 - RNA, 19 nt, Artificial Sequence
  Description of Artificial Sequence: Synthetic oligonucleotide
aaauaaaaggcaagcacuc

SEQ ID NO: 3228666 - RNA, 19 nt, Artificial Sequence
  Description of Artificial Sequence: Synthetic oligonucleotide
aucauguaagguuuuaaag

SEQ ID NO: 3228667 - RNA, 19 nt, Artificial Sequence
  Description of Artificial Sequence: Synthetic oligonucleotide
caguagaucauuaacaguc

SEQ ID NO: 3228668 - RNA, 19 nt, Artificial Sequence
  Description of Artificial Sequence: Synthetic oligonucleotide
ucaggagucaacuacucag

SEQ ID NO: 3228669 - RNA, 19 nt, Artificial Sequence
  Description of Artificial Sequence: Synthetic oligonucleotide
cuuuaaucaaauuuucuuc

SEQ ID NO: 3228670 - RNA, 19 nt, Artificial Sequence
  Description of Artificial Sequence: Synthetic oligonucleotide
aacaguccaagauuucagg

SEQ ID NO: 3228671 - RNA, 19 nt, Artificial Sequence
  Description of Artificial Sequence: Synthetic oligonucleotide
gaaaugagccaguagauca

SEQ ID NO: 3228672 - RNA, 19 nt, Artificial Sequence
  Description of Artificial Sequence: Synthetic oligonucleotide
uacuaaaauauuuaguuuu

SEQ ID NO: 3228673 - RNA, 19 nt, Artificial Sequence
  Description of Artificial Sequence: Synthetic oligonucleotide
aauuuaaauaaaaggcaag

SEQ ID NO: 3228674 - RNA, 19 nt, Artificial Sequence
  Description of Artificial Sequence: Synthetic oligonucleotide
aagguuuuaaagugaaagu

SEQ ID NO: 3228675 - RNA, 19 nt, Artificial Sequence
  Description of Artificial Sequence: Synthetic oligonucleotide
auaauuuaaauaaaaggca

SEQ ID NO: 3228676 - RNA, 19 nt, Artificial Sequence
  Description of Artificial Sequence: Synthetic oligonucleotide
aauaauccucuccagacau

SEQ ID NO: 3228677 - RNA, 19 nt, Artificial Sequence
  Description of Artificial Sequence: Synthetic oligonucleotide
cauguaagguuuuaaagug

SEQ ID NO: 3228678 - RNA, 19 nt, Artificial Sequence
  Description of Artificial Sequence: Synthetic oligonucleotide
ucaaauuuucuucagccuc

SEQ ID NO: 3228679 - RNA, 19 nt, Artificial Sequence
  Description of Artificial Sequence: Synthetic oligonucleotide
agcauacuaaaauauuuag

SEQ ID NO: 3228680 - RNA, 19 nt, Artificial Sequence
  Description of Artificial Sequence: Synthetic oligonucleotide
uguaauaauccucuccaga

SEQ ID NO: 3228681 - RNA, 19 nt, Artificial Sequence
  Description of Artificial Sequence: Synthetic oligonucleotide
aaauauuuacauggcaaag

SEQ ID NO: 3228682 - RNA, 19 nt, Artificial Sequence
  Description of Artificial Sequence: Synthetic oligonucleotide
auagagaaucacuaaaacu

SEQ ID NO: 3228683 - RNA, 19 nt, Artificial Sequence
  Description of Artificial Sequence: Synthetic oligonucleotide
ucuccagacaucauaagga

SEQ ID NO: 3228684 - RNA, 19 nt, Artificial Sequence
  Description of Artificial Sequence: Synthetic oligonucleotide
aguaauugcagaagcauac

SEQ ID NO: 3228685 - RNA, 19 nt, Artificial Sequence
  Description of Artificial Sequence: Synthetic oligonucleotide
uuaguuuucaguucuuacu

SEQ ID NO: 3228686 - RNA, 19 nt, Artificial Sequence
  Description of Artificial Sequence: Synthetic oligonucleotide
cauggcaaaggaauaauag

SEQ ID NO: 3228687 - RNA, 19 nt, Artificial Sequence
  Description of Artificial Sequence: Synthetic oligonucleotide
auauuuaguuuucaguucu

SEQ ID NO: 3228688 - RNA, 19 nt, Artificial Sequence
  Description of Artificial Sequence: Synthetic oligonucleotide
uuuaaauaaaaggcaagca

SEQ ID NO: 3228689 - RNA, 19 nt, Artificial Sequence
  Description of Artificial Sequence: Synthetic oligonucleotide
uuuucaguucuuacuauug

SEQ ID NO: 3228690 - RNA, 19 nt, Artificial Sequence
  Description of Artificial Sequence: Synthetic oligonucleotide
ucuuuaaucaaauuuucuu

SEQ ID NO: 3228691 - RNA, 19 nt, Artificial Sequence
  Description of Artificial Sequence: Synthetic oligonucleotide
uaauagagaaucacuaaaa

SEQ ID NO: 3228692 - RNA, 19 nt, Artificial Sequence
  Description of Artificial Sequence: Synthetic oligonucleotide
augaaauuacagaaaagac

SEQ ID NO: 3228693 - RNA, 19 nt, Artificial Sequence
  Description of Artificial Sequence: Synthetic oligonucleotide
agguguaauaauccucucc

SEQ ID NO: 3228694 - RNA, 19 nt, Artificial Sequence
  Description of Artificial Sequence: Synthetic oligonucleotide
aaaacuggcaauugcugca

SEQ ID NO: 3228695 - RNA, 19 nt, Artificial Sequence
  Description of Artificial Sequence: Synthetic oligonucleotide
cucauauauacacaaaauc

SEQ ID NO: 3228696 - RNA, 19 nt, Artificial Sequence
  Description of Artificial Sequence: Synthetic oligonucleotide
gauuucaggagucaacuac

SEQ ID NO: 3228697 - RNA, 19 nt, Artificial Sequence
  Description of Artificial Sequence: Synthetic oligonucleotide
aucauaaggaaucauguaa

SEQ ID NO: 3228698 - RNA, 19 nt, Artificial Sequence
  Description of Artificial Sequence: Synthetic oligonucleotide
caagcacucauauauacac

SEQ ID NO: 3228699 - RNA, 19 nt, Artificial Sequence
  Description of Artificial Sequence: Synthetic oligonucleotide
aggacuuccggcuuauccc

SEQ ID NO: 3228700 - RNA, 19 nt, Artificial Sequence
  Description of Artificial Sequence: Synthetic oligonucleotide
uacuauugaaaugagccag

SEQ ID NO: 3228701 - RNA, 19 nt, Artificial Sequence
  Description of Artificial Sequence: Synthetic oligonucleotide
uaaucaaauuuucuucagc

SEQ ID NO: 3228702 - RNA, 19 nt, Artificial Sequence
  Description of Artificial Sequence: Synthetic oligonucleotide
auauuuacauggcaaagga

SEQ ID NO: 3228703 - RNA, 19 nt, Artificial Sequence
  Description of Artificial Sequence: Synthetic oligonucleotide
uaaaacuggcaauugcugc

SEQ ID NO: 3228704 - RNA, 19 nt, Artificial Sequence
  Description of Artificial Sequence: Synthetic oligonucleotide
aaagugaaaguaauugcag

SEQ ID NO: 3228705 - RNA, 19 nt, Artificial Sequence
  Description of Artificial Sequence: Synthetic oligonucleotide
aaaagacagaguccaucgg

SEQ ID NO: 3228706 - RNA, 19 nt, Artificial Sequence
  Description of Artificial Sequence: Synthetic oligonucleotide
aaucauguaagguuuuaaa

SEQ ID NO: 3228707 - RNA, 19 nt, Artificial Sequence
  Description of Artificial Sequence: Synthetic oligonucleotide
uuaaucaaauuuucuucag

SEQ ID NO: 3228708 - RNA, 19 nt, Artificial Sequence
  Description of Artificial Sequence: Synthetic oligonucleotide
auaauagagaaucacuaaa

SEQ ID NO: 3228709 - RNA, 19 nt, Artificial Sequence
  Description of Artificial Sequence: Synthetic oligonucleotide
uaaacacuaaaauaauuua

SEQ ID NO: 3228710 - RNA, 19 nt, Artificial Sequence
  Description of Artificial Sequence: Synthetic oligonucleotide
guaauaauccucuccagac

SEQ ID NO: 3228711 - RNA, 19 nt, Artificial Sequence
  Description of Artificial Sequence: Synthetic oligonucleotide
uaaggaaucauguaagguu

SEQ ID NO: 3228712 - RNA, 19 nt, Artificial Sequence
  Description of Artificial Sequence: Synthetic oligonucleotide
aggaauaauagagaaucac

SEQ ID NO: 3228713 - RNA, 19 nt, Artificial Sequence
  Description of Artificial Sequence: Synthetic oligonucleotide
uagucuuuaaucaaauuuu

SEQ ID NO: 3228714 - RNA, 19 nt, Artificial Sequence
  Description of Artificial Sequence: Synthetic oligonucleotide
aagugaaaguaauugcaga

SEQ ID NO: 3228715 - RNA, 19 nt, Artificial Sequence
  Description of Artificial Sequence: Synthetic oligonucleotide
ugcagaagcauacuaaaau

SEQ ID NO: 3228716 - RNA, 19 nt, Artificial Sequence
  Description of Artificial Sequence: Synthetic oligonucleotide
aucauuaacaguccaagau

SEQ ID NO: 3228717 - RNA, 19 nt, Artificial Sequence
  Description of Artificial Sequence: Synthetic oligonucleotide
uuaguuauggaucugcugg

SEQ ID NO: 3228718 - RNA, 19 nt, Artificial Sequence
  Description of Artificial Sequence: Synthetic oligonucleotide
uccuccauaauucucaaag

SEQ ID NO: 3228719 - RNA, 19 nt, Artificial Sequence
  Description of Artificial Sequence: Synthetic oligonucleotide
uggcaaaggagaaagaucc

SEQ ID NO: 3228720 - RNA, 19 nt, Artificial Sequence
  Description of Artificial Sequence: Synthetic oligonucleotide
aggagaaagauccuccucc

SEQ ID NO: 3228721 - RNA, 19 nt, Artificial Sequence
  Description of Artificial Sequence: Synthetic oligonucleotide
guagucaggauucagagug

SEQ ID NO: 3228722 - RNA, 19 nt, Artificial Sequence
  Description of Artificial Sequence: Synthetic oligonucleotide
uuuugagugaaccacugga

SEQ ID NO: 3228723 - RNA, 19 nt, Artificial Sequence
  Description of Artificial Sequence: Synthetic oligonucleotide
aauucgguggagaagcgcc

SEQ ID NO: 3228724 - RNA, 19 nt, Artificial Sequence
  Description of Artificial Sequence: Synthetic oligonucleotide
aaagccugugucuuuguuc

SEQ ID NO: 3228725 - RNA, 19 nt, Artificial Sequence
  Description of Artificial Sequence: Synthetic oligonucleotide
aguugcuucggacaaaguc

SEQ ID NO: 3228726 - RNA, 19 nt, Artificial Sequence
  Description of Artificial Sequence: Synthetic oligonucleotide
uccauaauucucaaagagc

SEQ ID NO: 3228727 - RNA, 19 nt, Artificial Sequence
  Description of Artificial Sequence: Synthetic oligonucleotide
cuggcaaugcugaugaugg

SEQ ID NO: 3228728 - RNA, 19 nt, Artificial Sequence
  Description of Artificial Sequence: Synthetic oligonucleotide
auaauucucaaagagcguc

SEQ ID NO: 3228729 - RNA, 19 nt, Artificial Sequence
  Description of Artificial Sequence: Synthetic oligonucleotide
ccauaauucucaaagagcg

SEQ ID NO: 3228730 - RNA, 19 nt, Artificial Sequence
  Description of Artificial Sequence: Synthetic oligonucleotide
uuugagugaaccacuggag

SEQ ID NO: 3228731 - RNA, 19 nt, Artificial Sequence
  Description of Artificial Sequence: Synthetic oligonucleotide
ugcagcucgaauucggugg

SEQ ID NO: 3228732 - RNA, 19 nt, Artificial Sequence
  Description of Artificial Sequence: Synthetic oligonucleotide
gaugagauuggcaaaggag

SEQ ID NO: 3228733 - RNA, 19 nt, Artificial Sequence
  Description of Artificial Sequence: Synthetic oligonucleotide
aaagucccaaaccagaguu

SEQ ID NO: 3228734 - RNA, 19 nt, Artificial Sequence
  Description of Artificial Sequence: Synthetic oligonucleotide
agucgaguggcucucaggg

SEQ ID NO: 3228735 - RNA, 19 nt, Artificial Sequence
  Description of Artificial Sequence: Synthetic oligonucleotide
uugauguuggcuuucgucu

SEQ ID NO: 3228736 - RNA, 19 nt, Artificial Sequence
  Description of Artificial Sequence: Synthetic oligonucleotide
agggccaggaucuacuggc

SEQ ID NO: 3228737 - RNA, 19 nt, Artificial Sequence
  Description of Artificial Sequence: Synthetic oligonucleotide
ugugucuuuguucuccucc

SEQ ID NO: 3228738 - RNA, 19 nt, Artificial Sequence
  Description of Artificial Sequence: Synthetic oligonucleotide
aggacagagagccugaaca

SEQ ID NO: 3228739 - RNA, 19 nt, Artificial Sequence
  Description of Artificial Sequence: Synthetic oligonucleotide
cuuaaacugcuccagcugc

SEQ ID NO: 3228740 - RNA, 19 nt, Artificial Sequence
  Description of Artificial Sequence: Synthetic oligonucleotide
aagccugugucuuuguucu

SEQ ID NO: 3228741 - RNA, 19 nt, Artificial Sequence
  Description of Artificial Sequence: Synthetic oligonucleotide
caaaggagaaagauccucc

SEQ ID NO: 3228742 - RNA, 19 nt, Artificial Sequence
  Description of Artificial Sequence: Synthetic oligonucleotide
auguagucaggauucagag

SEQ ID NO: 3228743 - RNA, 19 nt, Artificial Sequence
  Description of Artificial Sequence: Synthetic oligonucleotide
cuccauaauucucaaagag

SEQ ID NO: 3228744 - RNA, 19 nt, Artificial Sequence
  Description of Artificial Sequence: Synthetic oligonucleotide
uccuuguucuccuucaccc

SEQ ID NO: 3228745 - RNA, 19 nt, Artificial Sequence
  Description of Artificial Sequence: Synthetic oligonucleotide
ucgaauucgguggagaagc

SEQ ID NO: 3228746 - RNA, 19 nt, Artificial Sequence
  Description of Artificial Sequence: Synthetic oligonucleotide
uugagugaaccacuggagc

SEQ ID NO: 3228747 - RNA, 19 nt, Artificial Sequence
  Description of Artificial Sequence: Synthetic oligonucleotide
aaggagaaagauccuccuc

SEQ ID NO: 3228748 - RNA, 19 nt, Artificial Sequence
  Description of Artificial Sequence: Synthetic oligonucleotide
uccuucacccacuugaugu

SEQ ID NO: 3228749 - RNA, 19 nt, Artificial Sequence
  Description of Artificial Sequence: Synthetic oligonucleotide
uuuaguuauggaucugcug

SEQ ID NO: 3228750 - RNA, 19 nt, Artificial Sequence
  Description of Artificial Sequence: Synthetic oligonucleotide
ucaggauucagaguguagc

SEQ ID NO: 3228751 - RNA, 19 nt, Artificial Sequence
  Description of Artificial Sequence: Synthetic oligonucleotide
aaaggagaaagauccuccu

SEQ ID NO: 3228752 - RNA, 19 nt, Artificial Sequence
  Description of Artificial Sequence: Synthetic oligonucleotide
agauuggcaaaggagaaag

SEQ ID NO: 3228753 - RNA, 19 nt, Artificial Sequence
  Description of Artificial Sequence: Synthetic oligonucleotide
ugagugaaccacuggagca

SEQ ID NO: 3228754 - RNA, 19 nt, Artificial Sequence
  Description of Artificial Sequence: Synthetic oligonucleotide
guugcuucggacaaagucc

SEQ ID NO: 3228755 - RNA, 19 nt, Artificial Sequence
  Description of Artificial Sequence: Synthetic oligonucleotide
cacauuacuggcaaugcug

SEQ ID NO: 3228756 - RNA, 19 nt, Artificial Sequence
  Description of Artificial Sequence: Synthetic oligonucleotide
uuggcuuucgucuucucca

SEQ ID NO: 3228757 - RNA, 19 nt, Artificial Sequence
  Description of Artificial Sequence: Synthetic oligonucleotide
uguuuugagugaaccacug

SEQ ID NO: 3228758 - RNA, 19 nt, Artificial Sequence
  Description of Artificial Sequence: Synthetic oligonucleotide
ucggacaaagucccaaacc

SEQ ID NO: 3228759 - RNA, 19 nt, Artificial Sequence
  Description of Artificial Sequence: Synthetic oligonucleotide
uuuuaguuauggaucugcu

SEQ ID NO: 3228760 - RNA, 19 nt, Artificial Sequence
  Description of Artificial Sequence: Synthetic oligonucleotide
ucgaguggcucucagggcc

SEQ ID NO: 3228761 - RNA, 19 nt, Artificial Sequence
  Description of Artificial Sequence: Synthetic oligonucleotide
uuguucuccuccuuaaacu

SEQ ID NO: 3228762 - RNA, 19 nt, Artificial Sequence
  Description of Artificial Sequence: Synthetic oligonucleotide
acagagagccugaacaggc

SEQ ID NO: 3228763 - RNA, 19 nt, Artificial Sequence
  Description of Artificial Sequence: Synthetic oligonucleotide
gagcucugaggacagagag

SEQ ID NO: 3228764 - RNA, 19 nt, Artificial Sequence
  Description of Artificial Sequence: Synthetic oligonucleotide
ucuacuggcuguuuugagu

SEQ ID NO: 3228765 - RNA, 19 nt, Artificial Sequence
  Description of Artificial Sequence: Synthetic oligonucleotide
cuacuggcuguuuugagug

SEQ ID NO: 3228766 - RNA, 19 nt, Artificial Sequence
  Description of Artificial Sequence: Synthetic oligonucleotide
uuggaugagauuggcaaag

SEQ ID NO: 3228767 - RNA, 19 nt, Artificial Sequence
  Description of Artificial Sequence: Synthetic oligonucleotide
aucugcuggugucuggagc

SEQ ID NO: 3228768 - RNA, 19 nt, Artificial Sequence
  Description of Artificial Sequence: Synthetic oligonucleotide
uuggcaaaggagaaagauc

SEQ ID NO: 3228769 - RNA, 19 nt, Artificial Sequence
  Description of Artificial Sequence: Synthetic oligonucleotide
uaauucucaaagagcgucu

SEQ ID NO: 3228770 - RNA, 19 nt, Artificial Sequence
  Description of Artificial Sequence: Synthetic oligonucleotide
uugcuucggacaaaguccc

SEQ ID NO: 3228771 - RNA, 19 nt, Artificial Sequence
  Description of Artificial Sequence: Synthetic oligonucleotide
agauccuccuccauaauuc

SEQ ID NO: 3228772 - RNA, 19 nt, Artificial Sequence
  Description of Artificial Sequence: Synthetic oligonucleotide
ugagauuggcaaaggagaa

SEQ ID NO: 3228773 - RNA, 19 nt, Artificial Sequence
  Description of Artificial Sequence: Synthetic oligonucleotide
cuugauguuggcuuucguc

SEQ ID NO: 3228774 - RNA, 19 nt, Artificial Sequence
  Description of Artificial Sequence: Synthetic oligonucleotide
agcaccaccuccuuguucu

SEQ ID NO: 3228775 - RNA, 19 nt, Artificial Sequence
  Description of Artificial Sequence: Synthetic oligonucleotide
gaaagauccuccuccauaa

SEQ ID NO: 3228776 - RNA, 19 nt, Artificial Sequence
  Description of Artificial Sequence: Synthetic oligonucleotide
cacuccuuggaugagauug

SEQ ID NO: 3228777 - RNA, 19 nt, Artificial Sequence
  Description of Artificial Sequence: Synthetic oligonucleotide
uucacccacuugauguugg

SEQ ID NO: 3228778 - RNA, 19 nt, Artificial Sequence
  Description of Artificial Sequence: Synthetic oligonucleotide
ucugaggacagagagccug

SEQ ID NO: 3228779 - RNA, 19 nt, Artificial Sequence
  Description of Artificial Sequence: Synthetic oligonucleotide
augagauuggcaaaggaga

SEQ ID NO: 3228780 - RNA, 19 nt, Artificial Sequence
  Description of Artificial Sequence: Synthetic oligonucleotide
uccuuaaacugcuccagcu

SEQ ID NO: 3228781 - RNA, 19 nt, Artificial Sequence
  Description of Artificial Sequence: Synthetic oligonucleotide
ugcccggccacauuacugg

SEQ ID NO: 3228782 - RNA, 19 nt, Artificial Sequence
  Description of Artificial Sequence: Synthetic oligonucleotide
caaaccagaguuugcccgg

SEQ ID NO: 3228783 - RNA, 19 nt, Artificial Sequence
  Description of Artificial Sequence: Synthetic oligonucleotide
ugucccacggagucgagug

SEQ ID NO: 3228784 - RNA, 19 nt, Artificial Sequence
  Description of Artificial Sequence: Synthetic oligonucleotide
ugagccaaagccugugucu

SEQ ID NO: 3228785 - RNA, 19 nt, Artificial Sequence
  Description of Artificial Sequence: Synthetic oligonucleotide
augcugaugaugguggagg

SEQ ID NO: 3228786 - RNA, 19 nt, Artificial Sequence
  Description of Artificial Sequence: Synthetic oligonucleotide
aagauccuccuccauaauu

SEQ ID NO: 3228787 - RNA, 19 nt, Artificial Sequence
  Description of Artificial Sequence: Synthetic oligonucleotide
guuuugagugaaccacugg

SEQ ID NO: 3228788 - RNA, 19 nt, Artificial Sequence
  Description of Artificial Sequence: Synthetic oligonucleotide
uuucgucuucuccagggcu

SEQ ID NO: 3228789 - RNA, 19 nt, Artificial Sequence
  Description of Artificial Sequence: Synthetic oligonucleotide
ugcugcagcucgaauucgg

SEQ ID NO: 3228790 - RNA, 19 nt, Artificial Sequence
  Description of Artificial Sequence: Synthetic oligonucleotide
ucgucggugucccacggag

SEQ ID NO: 3228791 - RNA, 19 nt, Artificial Sequence
  Description of Artificial Sequence: Synthetic oligonucleotide
auuggcaaaggagaaagau

SEQ ID NO: 3228792 - RNA, 19 nt, Artificial Sequence
  Description of Artificial Sequence: Synthetic oligonucleotide
aaaccagaguuugcccggc

SEQ ID NO: 3228793 - RNA, 19 nt, Artificial Sequence
  Description of Artificial Sequence: Synthetic oligonucleotide
aaccagaguuugcccggcc

SEQ ID NO: 3228794 - RNA, 19 nt, Artificial Sequence
  Description of Artificial Sequence: Synthetic oligonucleotide
gauguagucaggauucaga

SEQ ID NO: 3228795 - RNA, 19 nt, Artificial Sequence
  Description of Artificial Sequence: Synthetic oligonucleotide
gaacaggcugcugagcuag

SEQ ID NO: 3228796 - RNA, 19 nt, Artificial Sequence
  Description of Artificial Sequence: Synthetic oligonucleotide
uuaaacugcuccagcugcu

SEQ ID NO: 3228797 - RNA, 19 nt, Artificial Sequence
  Description of Artificial Sequence: Synthetic oligonucleotide
agaaagauccuccuccaua

SEQ ID NO: 3228798 - RNA, 19 nt, Artificial Sequence
  Description of Artificial Sequence: Synthetic oligonucleotide
uggagcaccaccuccuugu

SEQ ID NO: 3228799 - RNA, 19 nt, Artificial Sequence
  Description of Artificial Sequence: Synthetic oligonucleotide
uuauggaucugcugguguc

SEQ ID NO: 3228800 - RNA, 19 nt, Artificial Sequence
  Description of Artificial Sequence: Synthetic oligonucleotide
ucccaaaccagaguuugcc

SEQ ID NO: 3228801 - RNA, 19 nt, Artificial Sequence
  Description of Artificial Sequence: Synthetic oligonucleotide
ucuggagcucugaggacag

SEQ ID NO: 3228802 - RNA, 19 nt, Artificial Sequence
  Description of Artificial Sequence: Synthetic oligonucleotide
gugucuggagcucugagga

SEQ ID NO: 3228803 - RNA, 19 nt, Artificial Sequence
  Description of Artificial Sequence: Synthetic oligonucleotide
uguagucaggauucagagu

SEQ ID NO: 3228804 - RNA, 19 nt, Artificial Sequence
  Description of Artificial Sequence: Synthetic oligonucleotide
agaagcgccuggucacucc

SEQ ID NO: 3228805 - RNA, 19 nt, Artificial Sequence
  Description of Artificial Sequence: Synthetic oligonucleotide
uucggacaaagucccaaac

SEQ ID NO: 3228806 - RNA, 19 nt, Artificial Sequence
  Description of Artificial Sequence: Synthetic oligonucleotide
ucuuccaguugcuucggac

SEQ ID NO: 3228807 - RNA, 19 nt, Artificial Sequence
  Description of Artificial Sequence: Synthetic oligonucleotide
aacugcuccagcugcugca

SEQ ID NO: 3228808 - RNA, 19 nt, Artificial Sequence
  Description of Artificial Sequence: Synthetic oligonucleotide
uccggauguagucaggauu

SEQ ID NO: 3228809 - RNA, 19 nt, Artificial Sequence
  Description of Artificial Sequence: Synthetic oligonucleotide
uccuccuuaaacugcucca

SEQ ID NO: 3228810 - RNA, 19 nt, Artificial Sequence
  Description of Artificial Sequence: Synthetic oligonucleotide
guuggcuuucgucuucucc

SEQ ID NO: 3228811 - RNA, 19 nt, Artificial Sequence
  Description of Artificial Sequence: Synthetic oligonucleotide
agugaaccacuggagcacc

SEQ ID NO: 3228812 - RNA, 19 nt, Artificial Sequence
  Description of Artificial Sequence: Synthetic oligonucleotide
gacaaagucccaaaccaga

SEQ ID NO: 3228813 - RNA, 19 nt, Artificial Sequence
  Description of Artificial Sequence: Synthetic oligonucleotide
cuuguucuccuucacccac

SEQ ID NO: 3228814 - RNA, 19 nt, Artificial Sequence
  Description of Artificial Sequence: Synthetic oligonucleotide
ucucaaagagcgucuucca

SEQ ID NO: 3228815 - RNA, 19 nt, Artificial Sequence
  Description of Artificial Sequence: Synthetic oligonucleotide
acaaagucccaaaccagag

SEQ ID NO: 3228816 - RNA, 19 nt, Artificial Sequence
  Description of Artificial Sequence: Synthetic oligonucleotide
acuggcaaugcugaugaug

SEQ ID NO: 3228817 - RNA, 19 nt, Artificial Sequence
  Description of Artificial Sequence: Synthetic oligonucleotide
aagguuucugauccgaagc

SEQ ID NO: 3228818 - RNA, 19 nt, Artificial Sequence
  Description of Artificial Sequence: Synthetic oligonucleotide
aaacuugacaaacaggacu

SEQ ID NO: 3228819 - RNA, 19 nt, Artificial Sequence
  Description of Artificial Sequence: Synthetic oligonucleotide
uauucauugguucaucaag

SEQ ID NO: 3228820 - RNA, 19 nt, Artificial Sequence
  Description of Artificial Sequence: Synthetic oligonucleotide
gauucuacgagguuccugg

SEQ ID NO: 3228821 - RNA, 19 nt, Artificial Sequence
  Description of Artificial Sequence: Synthetic oligonucleotide
guagaaaccacuuucuugc

SEQ ID NO: 3228822 - RNA, 19 nt, Artificial Sequence
  Description of Artificial Sequence: Synthetic oligonucleotide
agugguagaaaccacuuuc

SEQ ID NO: 3228823 - RNA, 19 nt, Artificial Sequence
  Description of Artificial Sequence: Synthetic oligonucleotide
ugaaccagcggauaguggg

SEQ ID NO: 3228824 - RNA, 19 nt, Artificial Sequence
  Description of Artificial Sequence: Synthetic oligonucleotide
ucauucuugaaccagcgga

SEQ ID NO: 3228825 - RNA, 19 nt, Artificial Sequence
  Description of Artificial Sequence: Synthetic oligonucleotide
aggagcaucauucuugaac

SEQ ID NO: 3228826 - RNA, 19 nt, Artificial Sequence
  Description of Artificial Sequence: Synthetic oligonucleotide
uucaucaaggguuaaauaa

SEQ ID NO: 3228827 - RNA, 19 nt, Artificial Sequence
  Description of Artificial Sequence: Synthetic oligonucleotide
ucaucaaggguuaaauaag

SEQ ID NO: 3228828 - RNA, 19 nt, Artificial Sequence
  Description of Artificial Sequence: Synthetic oligonucleotide
acuggaaguaaccaguguc

SEQ ID NO: 3228829 - RNA, 19 nt, Artificial Sequence
  Description of Artificial Sequence: Synthetic oligonucleotide
acaaacaggacuccagugg

SEQ ID NO: 3228830 - RNA, 19 nt, Artificial Sequence
  Description of Artificial Sequence: Synthetic oligonucleotide
acuuucuugccauuugucg

SEQ ID NO: 3228831 - RNA, 19 nt, Artificial Sequence
  Description of Artificial Sequence: Synthetic oligonucleotide
aacuugacaaacaggacuc

SEQ ID NO: 3228832 - RNA, 19 nt, Artificial Sequence
  Description of Artificial Sequence: Synthetic oligonucleotide
ucuacgagguuccuggacc

SEQ ID NO: 3228833 - RNA, 19 nt, Artificial Sequence
  Description of Artificial Sequence: Synthetic oligonucleotide
uuugucgccacacacugga

SEQ ID NO: 3228834 - RNA, 19 nt, Artificial Sequence
  Description of Artificial Sequence: Synthetic oligonucleotide
uucauugguucaucaaggg

SEQ ID NO: 3228835 - RNA, 19 nt, Artificial Sequence
  Description of Artificial Sequence: Synthetic oligonucleotide
agguuucugauccgaagcc

SEQ ID NO: 3228836 - RNA, 19 nt, Artificial Sequence
  Description of Artificial Sequence: Synthetic oligonucleotide
ucagcagucugucccaggg

SEQ ID NO: 3228837 - RNA, 19 nt, Artificial Sequence
  Description of Artificial Sequence: Synthetic oligonucleotide
cuuucuugccauuugucgc

SEQ ID NO: 3228838 - RNA, 19 nt, Artificial Sequence
  Description of Artificial Sequence: Synthetic oligonucleotide
ucugauccgaagccgagag

SEQ ID NO: 3228839 - RNA, 19 nt, Artificial Sequence
  Description of Artificial Sequence: Synthetic oligonucleotide
gugucaagguuucugaucc

SEQ ID NO: 3228840 - RNA, 19 nt, Artificial Sequence
  Description of Artificial Sequence: Synthetic oligonucleotide
gauguuauucauugguuca

SEQ ID NO: 3228841 - RNA, 19 nt, Artificial Sequence
  Description of Artificial Sequence: Synthetic oligonucleotide
ugauccgaagccgagagcc

SEQ ID NO: 3228842 - RNA, 19 nt, Artificial Sequence
  Description of Artificial Sequence: Synthetic oligonucleotide
uugacaaacaggacuccag

SEQ ID NO: 3228843 - RNA, 19 nt, Artificial Sequence
  Description of Artificial Sequence: Synthetic oligonucleotide
uaguugguugcccggaagg

SEQ ID NO: 3228844 - RNA, 19 nt, Artificial Sequence
  Description of Artificial Sequence: Synthetic oligonucleotide
ugauguuauucauugguuc

SEQ ID NO: 3228845 - RNA, 19 nt, Artificial Sequence
  Description of Artificial Sequence: Synthetic oligonucleotide
gauagugggagguggauuc

SEQ ID NO: 3228846 - RNA, 19 nt, Artificial Sequence
  Description of Artificial Sequence: Synthetic oligonucleotide
guggugauguuauucauug

SEQ ID NO: 3228847 - RNA, 19 nt, Artificial Sequence
  Description of Artificial Sequence: Synthetic oligonucleotide
gaaguaaccagugucugug

SEQ ID NO: 3228848 - RNA, 19 nt, Artificial Sequence
  Description of Artificial Sequence: Synthetic oligonucleotide
agcagucugucccagggac

SEQ ID NO: 3228849 - RNA, 19 nt, Artificial Sequence
  Description of Artificial Sequence: Synthetic oligonucleotide
uucuugaaccagcggauag

SEQ ID NO: 3228850 - RNA, 19 nt, Artificial Sequence
  Description of Artificial Sequence: Synthetic oligonucleotide
auucauugguucaucaagg

SEQ ID NO: 3228851 - RNA, 19 nt, Artificial Sequence
  Description of Artificial Sequence: Synthetic oligonucleotide
uuucuugccauuugucgcc

SEQ ID NO: 3228852 - RNA, 19 nt, Artificial Sequence
  Description of Artificial Sequence: Synthetic oligonucleotide
ggagcaucauucuugaacc

SEQ ID NO: 3228853 - RNA, 19 nt, Artificial Sequence
  Description of Artificial Sequence: Synthetic oligonucleotide
ugcagugcaguucagcagu

SEQ ID NO: 3228854 - RNA, 19 nt, Artificial Sequence
  Description of Artificial Sequence: Synthetic oligonucleotide
aggagauucuacgagguuc

SEQ ID NO: 3228855 - RNA, 19 nt, Artificial Sequence
  Description of Artificial Sequence: Synthetic oligonucleotide
uggauucccagacaccuug

SEQ ID NO: 3228856 - RNA, 19 nt, Artificial Sequence
  Description of Artificial Sequence: Synthetic oligonucleotide
aacaggacuccagugguag

SEQ ID NO: 3228857 - RNA, 19 nt, Artificial Sequence
  Description of Artificial Sequence: Synthetic oligonucleotide
aaguaaccagugucugugg

SEQ ID NO: 3228858 - RNA, 19 nt, Artificial Sequence
  Description of Artificial Sequence: Synthetic oligonucleotide
caucauucuugaaccagcg

SEQ ID NO: 3228859 - RNA, 19 nt, Artificial Sequence
  Description of Artificial Sequence: Synthetic oligonucleotide
ucauugguucaucaagggu

SEQ ID NO: 3228860 - RNA, 19 nt, Artificial Sequence
  Description of Artificial Sequence: Synthetic oligonucleotide
uucccagacaccuugcagu

SEQ ID NO: 3228861 - RNA, 19 nt, Artificial Sequence
  Description of Artificial Sequence: Synthetic oligonucleotide
ggaaggagauucuacgagg

SEQ ID NO: 3228862 - RNA, 19 nt, Artificial Sequence
  Description of Artificial Sequence: Synthetic oligonucleotide
ugacaaacaggacuccagu

SEQ ID NO: 3228863 - RNA, 19 nt, Artificial Sequence
  Description of Artificial Sequence: Synthetic oligonucleotide
caguucagcagucuguccc

SEQ ID NO: 3228864 - RNA, 19 nt, Artificial Sequence
  Description of Artificial Sequence: Synthetic oligonucleotide
ugucgccacacacuggaag

SEQ ID NO: 3228865 - RNA, 19 nt, Artificial Sequence
  Description of Artificial Sequence: Synthetic oligonucleotide
cacaggagcaucauucuug

SEQ ID NO: 3228866 - RNA, 19 nt, Artificial Sequence
  Description of Artificial Sequence: Synthetic oligonucleotide
gacaaacaggacuccagug

SEQ ID NO: 3228867 - RNA, 19 nt, Artificial Sequence
  Description of Artificial Sequence: Synthetic oligonucleotide
cauuugucgccacacacug

SEQ ID NO: 3228868 - RNA, 19 nt, Artificial Sequence
  Description of Artificial Sequence: Synthetic oligonucleotide
gguagaaaccacuuucuug

SEQ ID NO: 3228869 - RNA, 19 nt, Artificial Sequence
  Description of Artificial Sequence: Synthetic oligonucleotide
uuauucauugguucaucaa

SEQ ID NO: 3228870 - RNA, 19 nt, Artificial Sequence
  Description of Artificial Sequence: Synthetic oligonucleotide
uccagugguagaaaccacu

SEQ ID NO: 3228871 - RNA, 19 nt, Artificial Sequence
  Description of Artificial Sequence: Synthetic oligonucleotide
agccgagagccauaguugg

SEQ ID NO: 3228872 - RNA, 19 nt, Artificial Sequence
  Description of Artificial Sequence: Synthetic oligonucleotide
agagccauaguugguugcc

SEQ ID NO: 3228873 - RNA, 19 nt, Artificial Sequence
  Description of Artificial Sequence: Synthetic oligonucleotide
ccaaacuugacaaacagga

SEQ ID NO: 3228874 - RNA, 19 nt, Artificial Sequence
  Description of Artificial Sequence: Synthetic oligonucleotide
acacacuggaaguaaccag

SEQ ID NO: 3228875 - RNA, 19 nt, Artificial Sequence
  Description of Artificial Sequence: Synthetic oligonucleotide
gagguggauucccagacac

SEQ ID NO: 3228876 - RNA, 19 nt, Artificial Sequence
  Description of Artificial Sequence: Synthetic oligonucleotide
aucauucuugaaccagcgg

SEQ ID NO: 3228877 - RNA, 19 nt, Artificial Sequence
  Description of Artificial Sequence: Synthetic oligonucleotide
agugucuguggugucaagg

SEQ ID NO: 3228878 - RNA, 19 nt, Artificial Sequence
  Description of Artificial Sequence: Synthetic oligonucleotide
uguggugucaagguuucug

SEQ ID NO: 3228879 - RNA, 19 nt, Artificial Sequence
  Description of Artificial Sequence: Synthetic oligonucleotide
agugcaguucagcagucug

SEQ ID NO: 3228880 - RNA, 19 nt, Artificial Sequence
  Description of Artificial Sequence: Synthetic oligonucleotide
uuucugauccgaagccgag

SEQ ID NO: 3228881 - RNA, 19 nt, Artificial Sequence
  Description of Artificial Sequence: Synthetic oligonucleotide
uugguugcccggaaggaga

SEQ ID NO: 3228882 - RNA, 19 nt, Artificial Sequence
  Description of Artificial Sequence: Synthetic oligonucleotide
uugaaccagcggauagugg

SEQ ID NO: 3228883 - RNA, 19 nt, Artificial Sequence
  Description of Artificial Sequence: Synthetic oligonucleotide
caagguuucugauccgaag

SEQ ID NO: 3228884 - RNA, 19 nt, Artificial Sequence
  Description of Artificial Sequence: Synthetic oligonucleotide
gacguggugauguuauuca

SEQ ID NO: 3228885 - RNA, 19 nt, Artificial Sequence
  Description of Artificial Sequence: Synthetic oligonucleotide
auucccagacaccuugcag

SEQ ID NO: 3228886 - RNA, 19 nt, Artificial Sequence
  Description of Artificial Sequence: Synthetic oligonucleotide
guuauucauugguucauca

SEQ ID NO: 3228887 - RNA, 19 nt, Artificial Sequence
  Description of Artificial Sequence: Synthetic oligonucleotide
uaaccagugucuguggugu

SEQ ID NO: 3228888 - RNA, 19 nt, Artificial Sequence
  Description of Artificial Sequence: Synthetic oligonucleotide
caaacuugacaaacaggac

SEQ ID NO: 3228889 - RNA, 19 nt, Artificial Sequence
  Description of Artificial Sequence: Synthetic oligonucleotide
guuccuggaccacaggagc

SEQ ID NO: 3228890 - RNA, 19 nt, Artificial Sequence
  Description of Artificial Sequence: Synthetic oligonucleotide
agccauaguugguugcccg

SEQ ID NO: 3228891 - RNA, 19 nt, Artificial Sequence
  Description of Artificial Sequence: Synthetic oligonucleotide
cuugcagugcaguucagca

SEQ ID NO: 3228892 - RNA, 19 nt, Artificial Sequence
  Description of Artificial Sequence: Synthetic oligonucleotide
gaccacaggagcaucauuc

SEQ ID NO: 3228893 - RNA, 19 nt, Artificial Sequence
  Description of Artificial Sequence: Synthetic oligonucleotide
uggugauguuauucauugg

SEQ ID NO: 3228894 - RNA, 19 nt, Artificial Sequence
  Description of Artificial Sequence: Synthetic oligonucleotide
uugcagugcaguucagcag

SEQ ID NO: 3228895 - RNA, 19 nt, Artificial Sequence
  Description of Artificial Sequence: Synthetic oligonucleotide
auaguugguugcccggaag

SEQ ID NO: 3228896 - RNA, 19 nt, Artificial Sequence
  Description of Artificial Sequence: Synthetic oligonucleotide
acuccagugguagaaacca

SEQ ID NO: 3228897 - RNA, 19 nt, Artificial Sequence
  Description of Artificial Sequence: Synthetic oligonucleotide
agcaucauucuugaaccag

SEQ ID NO: 3228898 - RNA, 19 nt, Artificial Sequence
  Description of Artificial Sequence: Synthetic oligonucleotide
caucaaggguuaaauaaga

SEQ ID NO: 3228899 - RNA, 19 nt, Artificial Sequence
  Description of Artificial Sequence: Synthetic oligonucleotide
acaggagcaucauucuuga

SEQ ID NO: 3228900 - RNA, 19 nt, Artificial Sequence
  Description of Artificial Sequence: Synthetic oligonucleotide
acuugacaaacaggacucc

SEQ ID NO: 3228901 - RNA, 19 nt, Artificial Sequence
  Description of Artificial Sequence: Synthetic oligonucleotide
agaaaccacuuucuugcca

SEQ ID NO: 3228902 - RNA, 19 nt, Artificial Sequence
  Description of Artificial Sequence: Synthetic oligonucleotide
aguaaccagugucuguggu

SEQ ID NO: 3228903 - RNA, 19 nt, Artificial Sequence
  Description of Artificial Sequence: Synthetic oligonucleotide
guaaccagugucuguggug

SEQ ID NO: 3228904 - RNA, 19 nt, Artificial Sequence
  Description of Artificial Sequence: Synthetic oligonucleotide
ucuguggugucaagguuuc

SEQ ID NO: 3228905 - RNA, 19 nt, Artificial Sequence
  Description of Artificial Sequence: Synthetic oligonucleotide
aagccgagagccauaguug

SEQ ID NO: 3228906 - RNA, 19 nt, Artificial Sequence
  Description of Artificial Sequence: Synthetic oligonucleotide
ugucaagguuucugauccg

SEQ ID NO: 3228907 - RNA, 19 nt, Artificial Sequence
  Description of Artificial Sequence: Synthetic oligonucleotide
uggaaguaaccagugucug

SEQ ID NO: 3228908 - RNA, 19 nt, Artificial Sequence
  Description of Artificial Sequence: Synthetic oligonucleotide
uucuacgagguuccuggac

SEQ ID NO: 3228909 - RNA, 19 nt, Artificial Sequence
  Description of Artificial Sequence: Synthetic oligonucleotide
uagaaaccacuuucuugcc

SEQ ID NO: 3228910 - RNA, 19 nt, Artificial Sequence
  Description of Artificial Sequence: Synthetic oligonucleotide
agguuccuggaccacagga

SEQ ID NO: 3228911 - RNA, 19 nt, Artificial Sequence
  Description of Artificial Sequence: Synthetic oligonucleotide
ugucccagggacgugguga

SEQ ID NO: 3228912 - RNA, 19 nt, Artificial Sequence
  Description of Artificial Sequence: Synthetic oligonucleotide
ucaagguuucugauccgaa

SEQ ID NO: 3228913 - RNA, 19 nt, Artificial Sequence
  Description of Artificial Sequence: Synthetic oligonucleotide
cuugaaccagcggauagug

SEQ ID NO: 3228914 - RNA, 19 nt, Artificial Sequence
  Description of Artificial Sequence: Synthetic oligonucleotide
gagagccauaguugguugc

SEQ ID NO: 3228915 - RNA, 19 nt, Artificial Sequence
  Description of Artificial Sequence: Synthetic oligonucleotide
ucccagacaccuugcagug

SEQ ID NO: 3228916 - RNA, 19 nt, Artificial Sequence
  Description of Artificial Sequence: Synthetic oligonucleotide
accacuuucuugccauuug

SEQ ID NO: 3228917 - RNA, 19 nt, Artificial Sequence
  Description of Artificial Sequence: Synthetic oligonucleotide
auuaaguauugauuuaucc

SEQ ID NO: 3228918 - RNA, 19 nt, Artificial Sequence
  Description of Artificial Sequence: Synthetic oligonucleotide
aaagcuuugaaucgcaauc

SEQ ID NO: 3228919 - RNA, 19 nt, Artificial Sequence
  Description of Artificial Sequence: Synthetic oligonucleotide
aaggcuuccaaguuucugc

SEQ ID NO: 3228920 - RNA, 19 nt, Artificial Sequence
  Description of Artificial Sequence: Synthetic oligonucleotide
uugaugauccuccauaucc

SEQ ID NO: 3228921 - RNA, 19 nt, Artificial Sequence
  Description of Artificial Sequence: Synthetic oligonucleotide
uuuuauguacucuuggucu

SEQ ID NO: 3228922 - RNA, 19 nt, Artificial Sequence
  Description of Artificial Sequence: Synthetic oligonucleotide
uuaaguauugauuuauccu

SEQ ID NO: 3228923 - RNA, 19 nt, Artificial Sequence
  Description of Artificial Sequence: Synthetic oligonucleotide
uaaguauugauuuauccuc

SEQ ID NO: 3228924 - RNA, 19 nt, Artificial Sequence
  Description of Artificial Sequence: Synthetic oligonucleotide
cuuugaaucgcaaucuggg

SEQ ID NO: 3228925 - RNA, 19 nt, Artificial Sequence
  Description of Artificial Sequence: Synthetic oligonucleotide
uauugauuuauccucuucu

SEQ ID NO: 3228926 - RNA, 19 nt, Artificial Sequence
  Description of Artificial Sequence: Synthetic oligonucleotide
aguacugacgauuucaggu

SEQ ID NO: 3228927 - RNA, 19 nt, Artificial Sequence
  Description of Artificial Sequence: Synthetic oligonucleotide
gacgauuucagguguaagg

SEQ ID NO: 3228928 - RNA, 19 nt, Artificial Sequence
  Description of Artificial Sequence: Synthetic oligonucleotide
ugauuuauccucuucuucu

SEQ ID NO: 3228929 - RNA, 19 nt, Artificial Sequence
  Description of Artificial Sequence: Synthetic oligonucleotide
acuaaaagcuuugaaucgc

SEQ ID NO: 3228930 - RNA, 19 nt, Artificial Sequence
  Description of Artificial Sequence: Synthetic oligonucleotide
aaucucuccucucuuaaca

SEQ ID NO: 3228931 - RNA, 19 nt, Artificial Sequence
  Description of Artificial Sequence: Synthetic oligonucleotide
acgauuucagguguaaggc

SEQ ID NO: 3228932 - RNA, 19 nt, Artificial Sequence
  Description of Artificial Sequence: Synthetic oligonucleotide
uuuauccucuucuucuggg

SEQ ID NO: 3228933 - RNA, 19 nt, Artificial Sequence
  Description of Artificial Sequence: Synthetic oligonucleotide
cacuaaaagcuuugaaucg

SEQ ID NO: 3228934 - RNA, 19 nt, Artificial Sequence
  Description of Artificial Sequence: Synthetic oligonucleotide
uccacuaaaagcuuugaau

SEQ ID NO: 3228935 - RNA, 19 nt, Artificial Sequence
  Description of Artificial Sequence: Synthetic oligonucleotide
cauauccagacucacuugg

SEQ ID NO: 3228936 - RNA, 19 nt, Artificial Sequence
  Description of Artificial Sequence: Synthetic oligonucleotide
uuggucuugaugauccucc

SEQ ID NO: 3228937 - RNA, 19 nt, Artificial Sequence
  Description of Artificial Sequence: Synthetic oligonucleotide
ucucuuaacagauuccaaa

SEQ ID NO: 3228938 - RNA, 19 nt, Artificial Sequence
  Description of Artificial Sequence: Synthetic oligonucleotide
uguacucuuggucuugaug

SEQ ID NO: 3228939 - RNA, 19 nt, Artificial Sequence
  Description of Artificial Sequence: Synthetic oligonucleotide
uguaaggcuuccaaguuuc

SEQ ID NO: 3228940 - RNA, 19 nt, Artificial Sequence
  Description of Artificial Sequence: Synthetic oligonucleotide
guacucuuggucuugauga

SEQ ID NO: 3228941 - RNA, 19 nt, Artificial Sequence
  Description of Artificial Sequence: Synthetic oligonucleotide
aaaagcuuugaaucgcaau

SEQ ID NO: 3228942 - RNA, 19 nt, Artificial Sequence
  Description of Artificial Sequence: Synthetic oligonucleotide
cucuuggucuugaugaucc

SEQ ID NO: 3228943 - RNA, 19 nt, Artificial Sequence
  Description of Artificial Sequence: Synthetic oligonucleotide
ugauccuccauauccagac

SEQ ID NO: 3228944 - RNA, 19 nt, Artificial Sequence
  Description of Artificial Sequence: Synthetic oligonucleotide
uccauauccagacucacuu

SEQ ID NO: 3228945 - RNA, 19 nt, Artificial Sequence
  Description of Artificial Sequence: Synthetic oligonucleotide
auuuauccucuucuucugg

SEQ ID NO: 3228946 - RNA, 19 nt, Artificial Sequence
  Description of Artificial Sequence: Synthetic oligonucleotide
uuauccucuucuucugggg

SEQ ID NO: 3228947 - RNA, 19 nt, Artificial Sequence
  Description of Artificial Sequence: Synthetic oligonucleotide
caaguuucugcccuucucc

SEQ ID NO: 3228948 - RNA, 19 nt, Artificial Sequence
  Description of Artificial Sequence: Synthetic oligonucleotide
caaucuggguuuuauguac

SEQ ID NO: 3228949 - RNA, 19 nt, Artificial Sequence
  Description of Artificial Sequence: Synthetic oligonucleotide
gauuuauccucuucuucug

SEQ ID NO: 3228950 - RNA, 19 nt, Artificial Sequence
  Description of Artificial Sequence: Synthetic oligonucleotide
auccuccauauccagacuc

SEQ ID NO: 3228951 - RNA, 19 nt, Artificial Sequence
  Description of Artificial Sequence: Synthetic oligonucleotide
uugauuuauccucuucuuc

SEQ ID NO: 3228952 - RNA, 19 nt, Artificial Sequence
  Description of Artificial Sequence: Synthetic oligonucleotide
ugaugauccuccauaucca

SEQ ID NO: 3228953 - RNA, 19 nt, Artificial Sequence
  Description of Artificial Sequence: Synthetic oligonucleotide
guuuuauguacucuugguc

SEQ ID NO: 3228954 - RNA, 19 nt, Artificial Sequence
  Description of Artificial Sequence: Synthetic oligonucleotide
aggcuuccaaguuucugcc

SEQ ID NO: 3228955 - RNA, 19 nt, Artificial Sequence
  Description of Artificial Sequence: Synthetic oligonucleotide
agucgcugaagcuccaggg

SEQ ID NO: 3228956 - RNA, 19 nt, Artificial Sequence
  Description of Artificial Sequence: Synthetic oligonucleotide
gaugauccuccauauccag

SEQ ID NO: 3228957 - RNA, 19 nt, Artificial Sequence
  Description of Artificial Sequence: Synthetic oligonucleotide
ucuucuucuggggaggaag

SEQ ID NO: 3228958 - RNA, 19 nt, Artificial Sequence
  Description of Artificial Sequence: Synthetic oligonucleotide
auggaccagucgcugaagc

SEQ ID NO: 3228959 - RNA, 19 nt, Artificial Sequence
  Description of Artificial Sequence: Synthetic oligonucleotide
uugaaucgcaaucuggguu

SEQ ID NO: 3228960 - RNA, 19 nt, Artificial Sequence
  Description of Artificial Sequence: Synthetic oligonucleotide
agguguaaggcuuccaagu

SEQ ID NO: 3228961 - RNA, 19 nt, Artificial Sequence
  Description of Artificial Sequence: Synthetic oligonucleotide
uccagacucacuuggcugc

SEQ ID NO: 3228962 - RNA, 19 nt, Artificial Sequence
  Description of Artificial Sequence: Synthetic oligonucleotide
ugcccuucuccacuaaaag

SEQ ID NO: 3228963 - RNA, 19 nt, Artificial Sequence
  Description of Artificial Sequence: Synthetic oligonucleotide
uucuccacuaaaagcuuug

SEQ ID NO: 3228964 - RNA, 19 nt, Artificial Sequence
  Description of Artificial Sequence: Synthetic oligonucleotide
uuugaaucgcaaucugggu

SEQ ID NO: 3228965 - RNA, 19 nt, Artificial Sequence
  Description of Artificial Sequence: Synthetic oligonucleotide
gaggaaggaguacugacga

SEQ ID NO: 3228966 - RNA, 19 nt, Artificial Sequence
  Description of Artificial Sequence: Synthetic oligonucleotide
aagcuuugaaucgcaaucu

SEQ ID NO: 3228967 - RNA, 19 nt, Artificial Sequence
  Description of Artificial Sequence: Synthetic oligonucleotide
uggguuuuauguacucuug

SEQ ID NO: 3228968 - RNA, 19 nt, Artificial Sequence
  Description of Artificial Sequence: Synthetic oligonucleotide
aaguauugauuuauccucu

SEQ ID NO: 3228969 - RNA, 19 nt, Artificial Sequence
  Description of Artificial Sequence: Synthetic oligonucleotide
uauccagacucacuuggcu

SEQ ID NO: 3228970 - RNA, 19 nt, Artificial Sequence
  Description of Artificial Sequence: Synthetic oligonucleotide
aaguuucugcccuucucca

SEQ ID NO: 3228971 - RNA, 19 nt, Artificial Sequence
  Description of Artificial Sequence: Synthetic oligonucleotide
ugaaucgcaaucuggguuu

SEQ ID NO: 3228972 - RNA, 19 nt, Artificial Sequence
  Description of Artificial Sequence: Synthetic oligonucleotide
gaguacugacgauuucagg

SEQ ID NO: 3228973 - RNA, 19 nt, Artificial Sequence
  Description of Artificial Sequence: Synthetic oligonucleotide
acucacuuggcugccaugg

SEQ ID NO: 3228974 - RNA, 19 nt, Artificial Sequence
  Description of Artificial Sequence: Synthetic oligonucleotide
guacugacgauuucaggug

SEQ ID NO: 3228975 - RNA, 19 nt, Artificial Sequence
  Description of Artificial Sequence: Synthetic oligonucleotide
ucagguguaaggcuuccaa

SEQ ID NO: 3228976 - RNA, 19 nt, Artificial Sequence
  Description of Artificial Sequence: Synthetic oligonucleotide
uauccucuucuucugggga

SEQ ID NO: 3228977 - RNA, 19 nt, Artificial Sequence
  Description of Artificial Sequence: Synthetic oligonucleotide
aaggaguacugacgauuuc

SEQ ID NO: 3228978 - RNA, 19 nt, Artificial Sequence
  Description of Artificial Sequence: Synthetic oligonucleotide
ccacuaaaagcuuugaauc

SEQ ID NO: 3228979 - RNA, 19 nt, Artificial Sequence
  Description of Artificial Sequence: Synthetic oligonucleotide
cauuaaguauugauuuauc

SEQ ID NO: 3228980 - RNA, 19 nt, Artificial Sequence
  Description of Artificial Sequence: Synthetic oligonucleotide
ucuugaugauccuccauau

SEQ ID NO: 3228981 - RNA, 19 nt, Artificial Sequence
  Description of Artificial Sequence: Synthetic oligonucleotide
cuucuucuggggaggaagg

SEQ ID NO: 3228982 - RNA, 19 nt, Artificial Sequence
  Description of Artificial Sequence: Synthetic oligonucleotide
aguuucugcccuucuccac

SEQ ID NO: 3228983 - RNA, 19 nt, Artificial Sequence
  Description of Artificial Sequence: Synthetic oligonucleotide
auugauuuauccucuucuu

SEQ ID NO: 3228984 - RNA, 19 nt, Artificial Sequence
  Description of Artificial Sequence: Synthetic oligonucleotide
aucucuccucucuuaacag

SEQ ID NO: 3228985 - RNA, 19 nt, Artificial Sequence
  Description of Artificial Sequence: Synthetic oligonucleotide
uuuauguacucuuggucuu

SEQ ID NO: 3228986 - RNA, 19 nt, Artificial Sequence
  Description of Artificial Sequence: Synthetic oligonucleotide
uccucucuuaacagauucc

SEQ ID NO: 3228987 - RNA, 19 nt, Artificial Sequence
  Description of Artificial Sequence: Synthetic oligonucleotide
cacuuggcugccauggacc

SEQ ID NO: 3228988 - RNA, 19 nt, Artificial Sequence
  Description of Artificial Sequence: Synthetic oligonucleotide
uaaaagcuuugaaucgcaa

SEQ ID NO: 3228989 - RNA, 19 nt, Artificial Sequence
  Description of Artificial Sequence: Synthetic oligonucleotide
ucuucuggggaggaaggag

SEQ ID NO: 3228990 - RNA, 19 nt, Artificial Sequence
  Description of Artificial Sequence: Synthetic oligonucleotide
ucgcugaagcuccagggga

SEQ ID NO: 3228991 - RNA, 19 nt, Artificial Sequence
  Description of Artificial Sequence: Synthetic oligonucleotide
uacugacgauuucaggugu

SEQ ID NO: 3228992 - RNA, 19 nt, Artificial Sequence
  Description of Artificial Sequence: Synthetic oligonucleotide
auccagacucacuuggcug

SEQ ID NO: 3228993 - RNA, 19 nt, Artificial Sequence
  Description of Artificial Sequence: Synthetic oligonucleotide
ggguuuuauguacucuugg

SEQ ID NO: 3228994 - RNA, 19 nt, Artificial Sequence
  Description of Artificial Sequence: Synthetic oligonucleotide
gcugccauggaccagucgc

SEQ ID NO: 3228995 - RNA, 19 nt, Artificial Sequence
  Description of Artificial Sequence: Synthetic oligonucleotide
ucacuuggcugccauggac

SEQ ID NO: 3228996 - RNA, 19 nt, Artificial Sequence
  Description of Artificial Sequence: Synthetic oligonucleotide
aucuggguuuuauguacuc

SEQ ID NO: 3228997 - RNA, 19 nt, Artificial Sequence
  Description of Artificial Sequence: Synthetic oligonucleotide
uccuccauauccagacuca

SEQ ID NO: 3228998 - RNA, 19 nt, Artificial Sequence
  Description of Artificial Sequence: Synthetic oligonucleotide
auauccagacucacuuggc

SEQ ID NO: 3228999 - RNA, 19 nt, Artificial Sequence
  Description of Artificial Sequence: Synthetic oligonucleotide
gucgcugaagcuccagggg

SEQ ID NO: 3229000 - RNA, 19 nt, Artificial Sequence
  Description of Artificial Sequence: Synthetic oligonucleotide
cucuuaacagauuccaaaa

SEQ ID NO: 3229001 - RNA, 19 nt, Artificial Sequence
  Description of Artificial Sequence: Synthetic oligonucleotide
aggaguacugacgauuuca

SEQ ID NO: 3229002 - RNA, 19 nt, Artificial Sequence
  Description of Artificial Sequence: Synthetic oligonucleotide
agcuuugaaucgcaaucug

SEQ ID NO: 3229003 - RNA, 19 nt, Artificial Sequence
  Description of Artificial Sequence: Synthetic oligonucleotide
cuccucucuuaacagauuc

SEQ ID NO: 3229004 - RNA, 19 nt, Artificial Sequence
  Description of Artificial Sequence: Synthetic oligonucleotide
cuaaaagcuuugaaucgca

SEQ ID NO: 3229005 - RNA, 19 nt, Artificial Sequence
  Description of Artificial Sequence: Synthetic oligonucleotide
ucucuccucucuuaacaga

SEQ ID NO: 3229006 - RNA, 19 nt, Artificial Sequence
  Description of Artificial Sequence: Synthetic oligonucleotide
auccucuucuucuggggag

SEQ ID NO: 3229007 - RNA, 19 nt, Artificial Sequence
  Description of Artificial Sequence: Synthetic oligonucleotide
cagguguaaggcuuccaag

SEQ ID NO: 3229008 - RNA, 19 nt, Artificial Sequence
  Description of Artificial Sequence: Synthetic oligonucleotide
ugaagcuccaggggaaucu

SEQ ID NO: 3229009 - RNA, 19 nt, Artificial Sequence
  Description of Artificial Sequence: Synthetic oligonucleotide
gaaucucuccucucuuaac

SEQ ID NO: 3229010 - RNA, 19 nt, Artificial Sequence
  Description of Artificial Sequence: Synthetic oligonucleotide
uaaggcuuccaaguuucug

SEQ ID NO: 3229011 - RNA, 19 nt, Artificial Sequence
  Description of Artificial Sequence: Synthetic oligonucleotide
uuauguacucuuggucuug

SEQ ID NO: 3229012 - RNA, 19 nt, Artificial Sequence
  Description of Artificial Sequence: Synthetic oligonucleotide
guauugauuuauccucuuc

SEQ ID NO: 3229013 - RNA, 19 nt, Artificial Sequence
  Description of Artificial Sequence: Synthetic oligonucleotide
ggaggaaggaguacugacg

SEQ ID NO: 3229014 - RNA, 19 nt, Artificial Sequence
  Description of Artificial Sequence: Synthetic oligonucleotide
aaucuggguuuuauguacu

SEQ ID NO: 3229015 - RNA, 19 nt, Artificial Sequence
  Description of Artificial Sequence: Synthetic oligonucleotide
aggggaaucucuccucucu

SEQ ID NO: 3229016 - RNA, 19 nt, Artificial Sequence
  Description of Artificial Sequence: Synthetic oligonucleotide
auuucagguguaaggcuuc

SEQ ID NO: 3229017 - RNA, 19 nt, Artificial Sequence
  Description of Artificial Sequence: Synthetic oligonucleotide
ugaaugaucacgcucaccg

SEQ ID NO: 3229018 - RNA, 19 nt, Artificial Sequence
  Description of Artificial Sequence: Synthetic oligonucleotide
uacgguaacaaccugauca

SEQ ID NO: 3229019 - RNA, 19 nt, Artificial Sequence
  Description of Artificial Sequence: Synthetic oligonucleotide
ucuaccaucuucuuguagg

SEQ ID NO: 3229020 - RNA, 19 nt, Artificial Sequence
  Description of Artificial Sequence: Synthetic oligonucleotide
ucuguaucaaugcagugag

SEQ ID NO: 3229021 - RNA, 19 nt, Artificial Sequence
  Description of Artificial Sequence: Synthetic oligonucleotide
uaaugcaacgcucagcacc

SEQ ID NO: 3229022 - RNA, 19 nt, Artificial Sequence
  Description of Artificial Sequence: Synthetic oligonucleotide
gagagaagaacucagcuac

SEQ ID NO: 3229023 - RNA, 19 nt, Artificial Sequence
  Description of Artificial Sequence: Synthetic oligonucleotide
acauuugcgaauuacucag

SEQ ID NO: 3229024 - RNA, 19 nt, Artificial Sequence
  Description of Artificial Sequence: Synthetic oligonucleotide
aauacuugacugcgggugg

SEQ ID NO: 3229025 - RNA, 19 nt, Artificial Sequence
  Description of Artificial Sequence: Synthetic oligonucleotide
gacgcuacaagucuacagg

SEQ ID NO: 3229026 - RNA, 19 nt, Artificial Sequence
  Description of Artificial Sequence: Synthetic oligonucleotide
aaugcaacgcucagcaccc

SEQ ID NO: 3229027 - RNA, 19 nt, Artificial Sequence
  Description of Artificial Sequence: Synthetic oligonucleotide
agaaguaccaucuggggca

SEQ ID NO: 3229028 - RNA, 19 nt, Artificial Sequence
  Description of Artificial Sequence: Synthetic oligonucleotide
augaccauccaucuguauc

SEQ ID NO: 3229029 - RNA, 19 nt, Artificial Sequence
  Description of Artificial Sequence: Synthetic oligonucleotide
guuuuccagauauggaugg

SEQ ID NO: 3229030 - RNA, 19 nt, Artificial Sequence
  Description of Artificial Sequence: Synthetic oligonucleotide
ucguuuaggguguacuugg

SEQ ID NO: 3229031 - RNA, 19 nt, Artificial Sequence
  Description of Artificial Sequence: Synthetic oligonucleotide
agucagacagaaucugggc

SEQ ID NO: 3229032 - RNA, 19 nt, Artificial Sequence
  Description of Artificial Sequence: Synthetic oligonucleotide
aguacuuuuguguguacug

SEQ ID NO: 3229033 - RNA, 19 nt, Artificial Sequence
  Description of Artificial Sequence: Synthetic oligonucleotide
gacaucaaagaugaaauga

SEQ ID NO: 3229034 - RNA, 19 nt, Artificial Sequence
  Description of Artificial Sequence: Synthetic oligonucleotide
uggauuagcaucagugaug

SEQ ID NO: 3229035 - RNA, 19 nt, Artificial Sequence
  Description of Artificial Sequence: Synthetic oligonucleotide
acuauacccacuccagacg

SEQ ID NO: 3229036 - RNA, 19 nt, Artificial Sequence
  Description of Artificial Sequence: Synthetic oligonucleotide
cagguuuccagacagugcc

SEQ ID NO: 3229037 - RNA, 19 nt, Artificial Sequence
  Description of Artificial Sequence: Synthetic oligonucleotide
ucagaggucuguaaccuug

SEQ ID NO: 3229038 - RNA, 19 nt, Artificial Sequence
  Description of Artificial Sequence: Synthetic oligonucleotide
aagucagacagaaucuggg

SEQ ID NO: 3229039 - RNA, 19 nt, Artificial Sequence
  Description of Artificial Sequence: Synthetic oligonucleotide
uaaggauccggccaucuga

SEQ ID NO: 3229040 - RNA, 19 nt, Artificial Sequence
  Description of Artificial Sequence: Synthetic oligonucleotide
cauaaugcaacgcucagca

SEQ ID NO: 3229041 - RNA, 19 nt, Artificial Sequence
  Description of Artificial Sequence: Synthetic oligonucleotide
aucucgcacacucuccucc

SEQ ID NO: 3229042 - RNA, 19 nt, Artificial Sequence
  Description of Artificial Sequence: Synthetic oligonucleotide
uucagauugguuccccgag

SEQ ID NO: 3229043 - RNA, 19 nt, Artificial Sequence
  Description of Artificial Sequence: Synthetic oligonucleotide
ugcgaauuacucaggagac

SEQ ID NO: 3229044 - RNA, 19 nt, Artificial Sequence
  Description of Artificial Sequence: Synthetic oligonucleotide
aguauugcucaggagaaag

SEQ ID NO: 3229045 - RNA, 19 nt, Artificial Sequence
  Description of Artificial Sequence: Synthetic oligonucleotide
acaacuguauuggauuuac

SEQ ID NO: 3229046 - RNA, 19 nt, Artificial Sequence
  Description of Artificial Sequence: Synthetic oligonucleotide
agugguaaacuauugguuu

SEQ ID NO: 3229047 - RNA, 19 nt, Artificial Sequence
  Description of Artificial Sequence: Synthetic oligonucleotide
aaagacgcuacaagucuac

SEQ ID NO: 3229048 - RNA, 19 nt, Artificial Sequence
  Description of Artificial Sequence: Synthetic oligonucleotide
aaacuucacaaugaacuca

SEQ ID NO: 3229049 - RNA, 19 nt, Artificial Sequence
  Description of Artificial Sequence: Synthetic oligonucleotide
gauaccgcaaugauaaaca

SEQ ID NO: 3229050 - RNA, 19 nt, Artificial Sequence
  Description of Artificial Sequence: Synthetic oligonucleotide
uugucaccauccuuggagg

SEQ ID NO: 3229051 - RNA, 19 nt, Artificial Sequence
  Description of Artificial Sequence: Synthetic oligonucleotide
ucgaucaucaggucuguga

SEQ ID NO: 3229052 - RNA, 19 nt, Artificial Sequence
  Description of Artificial Sequence: Synthetic oligonucleotide
agaacucagcuacagccag

SEQ ID NO: 3229053 - RNA, 19 nt, Artificial Sequence
  Description of Artificial Sequence: Synthetic oligonucleotide
uuggauuuacaaucaagau

SEQ ID NO: 3229054 - RNA, 19 nt, Artificial Sequence
  Description of Artificial Sequence: Synthetic oligonucleotide
agcccgugagcacucagcc

SEQ ID NO: 3229055 - RNA, 19 nt, Artificial Sequence
  Description of Artificial Sequence: Synthetic oligonucleotide
cuauacccacuccagacgc

SEQ ID NO: 3229056 - RNA, 19 nt, Artificial Sequence
  Description of Artificial Sequence: Synthetic oligonucleotide
uguacgguaacaaccugau

SEQ ID NO: 3229057 - RNA, 19 nt, Artificial Sequence
  Description of Artificial Sequence: Synthetic oligonucleotide
gagguaagguccaagucag

SEQ ID NO: 3229058 - RNA, 19 nt, Artificial Sequence
  Description of Artificial Sequence: Synthetic oligonucleotide
ucugacguccagcuugacc

SEQ ID NO: 3229059 - RNA, 19 nt, Artificial Sequence
  Description of Artificial Sequence: Synthetic oligonucleotide
agcuugaccuuagaggugg

SEQ ID NO: 3229060 - RNA, 19 nt, Artificial Sequence
  Description of Artificial Sequence: Synthetic oligonucleotide
acgucugacguccagcuug

SEQ ID NO: 3229061 - RNA, 19 nt, Artificial Sequence
  Description of Artificial Sequence: Synthetic oligonucleotide
guauaggucagucucgguc

SEQ ID NO: 3229062 - RNA, 19 nt, Artificial Sequence
  Description of Artificial Sequence: Synthetic oligonucleotide
aagcgcagcggcaaucugc

SEQ ID NO: 3229063 - RNA, 19 nt, Artificial Sequence
  Description of Artificial Sequence: Synthetic oligonucleotide
acaaccugaucaaugaucu

SEQ ID NO: 3229064 - RNA, 19 nt, Artificial Sequence
  Description of Artificial Sequence: Synthetic oligonucleotide
agacgcuacaagucuacag

SEQ ID NO: 3229065 - RNA, 19 nt, Artificial Sequence
  Description of Artificial Sequence: Synthetic oligonucleotide
accaucuggggcaagguac

SEQ ID NO: 3229066 - RNA, 19 nt, Artificial Sequence
  Description of Artificial Sequence: Synthetic oligonucleotide
ucggcagugaccgucacug

SEQ ID NO: 3229067 - RNA, 19 nt, Artificial Sequence
  Description of Artificial Sequence: Synthetic oligonucleotide
ggcaagguacaccuuaagg

SEQ ID NO: 3229068 - RNA, 19 nt, Artificial Sequence
  Description of Artificial Sequence: Synthetic oligonucleotide
cuuguagguagagaucucc

SEQ ID NO: 3229069 - RNA, 19 nt, Artificial Sequence
  Description of Artificial Sequence: Synthetic oligonucleotide
uugaccuuagagguggagc

SEQ ID NO: 3229070 - RNA, 19 nt, Artificial Sequence
  Description of Artificial Sequence: Synthetic oligonucleotide
ucuuccuccaguagcagua

SEQ ID NO: 3229071 - RNA, 19 nt, Artificial Sequence
  Description of Artificial Sequence: Synthetic oligonucleotide
acaagucuacaggaggugg

SEQ ID NO: 3229072 - RNA, 19 nt, Artificial Sequence
  Description of Artificial Sequence: Synthetic oligonucleotide
ugcauccucuacuggagag

SEQ ID NO: 3229073 - RNA, 19 nt, Artificial Sequence
  Description of Artificial Sequence: Synthetic oligonucleotide
auaacugacagggaggcau

SEQ ID NO: 3229074 - RNA, 19 nt, Artificial Sequence
  Description of Artificial Sequence: Synthetic oligonucleotide
guacuuuuguguguacugg

SEQ ID NO: 3229075 - RNA, 19 nt, Artificial Sequence
  Description of Artificial Sequence: Synthetic oligonucleotide
gacaagaugaggguggcuc

SEQ ID NO: 3229076 - RNA, 19 nt, Artificial Sequence
  Description of Artificial Sequence: Synthetic oligonucleotide
aucuguaucaaugcaguga

SEQ ID NO: 3229077 - RNA, 19 nt, Artificial Sequence
  Description of Artificial Sequence: Synthetic oligonucleotide
ucagauugguuccccgagc

SEQ ID NO: 3229078 - RNA, 19 nt, Artificial Sequence
  Description of Artificial Sequence: Synthetic oligonucleotide
ucugccaaguguguguuca

SEQ ID NO: 3229079 - RNA, 19 nt, Artificial Sequence
  Description of Artificial Sequence: Synthetic oligonucleotide
aucugcugcaggcggaagg

SEQ ID NO: 3229080 - RNA, 19 nt, Artificial Sequence
  Description of Artificial Sequence: Synthetic oligonucleotide
auacagacuggacagguuu

SEQ ID NO: 3229081 - RNA, 19 nt, Artificial Sequence
  Description of Artificial Sequence: Synthetic oligonucleotide
gcaagguacaccuuaagga

SEQ ID NO: 3229082 - RNA, 19 nt, Artificial Sequence
  Description of Artificial Sequence: Synthetic oligonucleotide
ucauaaugcaacgcucagc

SEQ ID NO: 3229083 - RNA, 19 nt, Artificial Sequence
  Description of Artificial Sequence: Synthetic oligonucleotide
ugggagucacgacacugag

SEQ ID NO: 3229084 - RNA, 19 nt, Artificial Sequence
  Description of Artificial Sequence: Synthetic oligonucleotide
acagguuuccagacagugc

SEQ ID NO: 3229085 - RNA, 19 nt, Artificial Sequence
  Description of Artificial Sequence: Synthetic oligonucleotide
caauauggccauucucggc

SEQ ID NO: 3229086 - RNA, 19 nt, Artificial Sequence
  Description of Artificial Sequence: Synthetic oligonucleotide
aagaacucagcuacagcca

SEQ ID NO: 3229087 - RNA, 19 nt, Artificial Sequence
  Description of Artificial Sequence: Synthetic oligonucleotide
aagccuuccagcugggauu

SEQ ID NO: 3229088 - RNA, 19 nt, Artificial Sequence
  Description of Artificial Sequence: Synthetic oligonucleotide
ugcugggagacucccaccu

SEQ ID NO: 3229089 - RNA, 19 nt, Artificial Sequence
  Description of Artificial Sequence: Synthetic oligonucleotide
aagugguaaacuauugguu

SEQ ID NO: 3229090 - RNA, 19 nt, Artificial Sequence
  Description of Artificial Sequence: Synthetic oligonucleotide
gaaggggaagccaaggcuc

SEQ ID NO: 3229091 - RNA, 19 nt, Artificial Sequence
  Description of Artificial Sequence: Synthetic oligonucleotide
uuuccucagcccgugagca

SEQ ID NO: 3229092 - RNA, 19 nt, Artificial Sequence
  Description of Artificial Sequence: Synthetic oligonucleotide
aagaugaaaugaggguucu

SEQ ID NO: 3229093 - RNA, 19 nt, Artificial Sequence
  Description of Artificial Sequence: Synthetic oligonucleotide
ccagugauggcccucaaag

SEQ ID NO: 3229094 - RNA, 19 nt, Artificial Sequence
  Description of Artificial Sequence: Synthetic oligonucleotide
ugagucaggguggguaggg

SEQ ID NO: 3229095 - RNA, 19 nt, Artificial Sequence
  Description of Artificial Sequence: Synthetic oligonucleotide
ugaccgucacugcugucag

SEQ ID NO: 3229096 - RNA, 19 nt, Artificial Sequence
  Description of Artificial Sequence: Synthetic oligonucleotide
cugacguccagcuugaccu

SEQ ID NO: 3229097 - RNA, 19 nt, Artificial Sequence
  Description of Artificial Sequence: Synthetic oligonucleotide
ucauacucccgcucggccu

SEQ ID NO: 3229098 - RNA, 19 nt, Artificial Sequence
  Description of Artificial Sequence: Synthetic oligonucleotide
aaggauccggccaucugag

SEQ ID NO: 3229099 - RNA, 19 nt, Artificial Sequence
  Description of Artificial Sequence: Synthetic oligonucleotide
ucugcacagcguccacugg

SEQ ID NO: 3229100 - RNA, 19 nt, Artificial Sequence
  Description of Artificial Sequence: Synthetic oligonucleotide
ucagaggugcauacucgac

SEQ ID NO: 3229101 - RNA, 19 nt, Artificial Sequence
  Description of Artificial Sequence: Synthetic oligonucleotide
agugccugcgccccauggg

SEQ ID NO: 3229102 - RNA, 19 nt, Artificial Sequence
  Description of Artificial Sequence: Synthetic oligonucleotide
aggcacauuugcgaauuac

SEQ ID NO: 3229103 - RNA, 19 nt, Artificial Sequence
  Description of Artificial Sequence: Synthetic oligonucleotide
ccauucaaggaccacacug

SEQ ID NO: 3229104 - RNA, 19 nt, Artificial Sequence
  Description of Artificial Sequence: Synthetic oligonucleotide
acgcuacaagucuacagga

SEQ ID NO: 3229105 - RNA, 19 nt, Artificial Sequence
  Description of Artificial Sequence: Synthetic oligonucleotide
ggcauccaccacuucaugg

SEQ ID NO: 3229106 - RNA, 19 nt, Artificial Sequence
  Description of Artificial Sequence: Synthetic oligonucleotide
uauacccacuccagacgcc

SEQ ID NO: 3229107 - RNA, 19 nt, Artificial Sequence
  Description of Artificial Sequence: Synthetic oligonucleotide
ugcucugugcgaguacagg

SEQ ID NO: 3229108 - RNA, 19 nt, Artificial Sequence
  Description of Artificial Sequence: Synthetic oligonucleotide
uaguacuuuuguguguacu

SEQ ID NO: 3229109 - RNA, 19 nt, Artificial Sequence
  Description of Artificial Sequence: Synthetic oligonucleotide
aaacaccaugggcaccaug

SEQ ID NO: 3229110 - RNA, 19 nt, Artificial Sequence
  Description of Artificial Sequence: Synthetic oligonucleotide
ucugugcgaguacaggcau

SEQ ID NO: 3229111 - RNA, 19 nt, Artificial Sequence
  Description of Artificial Sequence: Synthetic oligonucleotide
accuuaucaugggucauag

SEQ ID NO: 3229112 - RNA, 19 nt, Artificial Sequence
  Description of Artificial Sequence: Synthetic oligonucleotide
uggcaggcagauacagucc

SEQ ID NO: 3229113 - RNA, 19 nt, Artificial Sequence
  Description of Artificial Sequence: Synthetic oligonucleotide
uccccaagcagcccugugu

SEQ ID NO: 3229114 - RNA, 19 nt, Artificial Sequence
  Description of Artificial Sequence: Synthetic oligonucleotide
uccaugaaugucugugcaa

SEQ ID NO: 3229115 - RNA, 19 nt, Artificial Sequence
  Description of Artificial Sequence: Synthetic oligonucleotide
gugucucgcguauagguca

SEQ ID NO: 3229116 - RNA, 19 nt, Artificial Sequence
  Description of Artificial Sequence: Synthetic oligonucleotide
gauucaggccccacgguac

SEQ ID NO: 3229117 - RNA, 19 nt, Artificial Sequence
  Description of Artificial Sequence: Synthetic oligonucleotide
aagcacauguuucucaucc

SEQ ID NO: 3229118 - RNA, 19 nt, Artificial Sequence
  Description of Artificial Sequence: Synthetic oligonucleotide
aagagcuacgaacagacuc

SEQ ID NO: 3229119 - RNA, 19 nt, Artificial Sequence
  Description of Artificial Sequence: Synthetic oligonucleotide
aaucuuuucuucuagcucu

SEQ ID NO: 3229120 - RNA, 19 nt, Artificial Sequence
  Description of Artificial Sequence: Synthetic oligonucleotide
agagauguuucguucaugc

SEQ ID NO: 3229121 - RNA, 19 nt, Artificial Sequence
  Description of Artificial Sequence: Synthetic oligonucleotide
uguucauccaggaaggucc

SEQ ID NO: 3229122 - RNA, 19 nt, Artificial Sequence
  Description of Artificial Sequence: Synthetic oligonucleotide
ugaucuggaggcaaaaggg

SEQ ID NO: 3229123 - RNA, 19 nt, Artificial Sequence
  Description of Artificial Sequence: Synthetic oligonucleotide
aaagaaagaaaggaggugu

SEQ ID NO: 3229124 - RNA, 19 nt, Artificial Sequence
  Description of Artificial Sequence: Synthetic oligonucleotide
acgagcaucauacugccgc

SEQ ID NO: 3229125 - RNA, 19 nt, Artificial Sequence
  Description of Artificial Sequence: Synthetic oligonucleotide
aacccgauugcuucgaauc

SEQ ID NO: 3229126 - RNA, 19 nt, Artificial Sequence
  Description of Artificial Sequence: Synthetic oligonucleotide
cuuucagguauucagcucg

SEQ ID NO: 3229127 - RNA, 19 nt, Artificial Sequence
  Description of Artificial Sequence: Synthetic oligonucleotide
agauguuucguucaugcag

SEQ ID NO: 3229128 - RNA, 19 nt, Artificial Sequence
  Description of Artificial Sequence: Synthetic oligonucleotide
gagguguucauccaggaag

SEQ ID NO: 3229129 - RNA, 19 nt, Artificial Sequence
  Description of Artificial Sequence: Synthetic oligonucleotide
ugugcaagagcuacgaaca

SEQ ID NO: 3229130 - RNA, 19 nt, Artificial Sequence
  Description of Artificial Sequence: Synthetic oligonucleotide
agcucaauaacccgauugc

SEQ ID NO: 3229131 - RNA, 19 nt, Artificial Sequence
  Description of Artificial Sequence: Synthetic oligonucleotide
uucagcucgagccaugagg

SEQ ID NO: 3229132 - RNA, 19 nt, Artificial Sequence
  Description of Artificial Sequence: Synthetic oligonucleotide
aacagacuccgacagcccc

SEQ ID NO: 3229133 - RNA, 19 nt, Artificial Sequence
  Description of Artificial Sequence: Synthetic oligonucleotide
uguuucucaucccaugggg

SEQ ID NO: 3229134 - RNA, 19 nt, Artificial Sequence
  Description of Artificial Sequence: Synthetic oligonucleotide
gagagcuucauacaggaug

SEQ ID NO: 3229135 - RNA, 19 nt, Artificial Sequence
  Description of Artificial Sequence: Synthetic oligonucleotide
acaugugcugugcaaagcc

SEQ ID NO: 3229136 - RNA, 19 nt, Artificial Sequence
  Description of Artificial Sequence: Synthetic oligonucleotide
ugugcaaagccaaagucug

SEQ ID NO: 3229137 - RNA, 19 nt, Artificial Sequence
  Description of Artificial Sequence: Synthetic oligonucleotide
ucuucuagcucugagaaug

SEQ ID NO: 3229138 - RNA, 19 nt, Artificial Sequence
  Description of Artificial Sequence: Synthetic oligonucleotide
auugcuucgaaucuuuucu

SEQ ID NO: 3229139 - RNA, 19 nt, Artificial Sequence
  Description of Artificial Sequence: Synthetic oligonucleotide
augaucuggaggcaaaagg

SEQ ID NO: 3229140 - RNA, 19 nt, Artificial Sequence
  Description of Artificial Sequence: Synthetic oligonucleotide
cagguauucagcucgagcc

SEQ ID NO: 3229141 - RNA, 19 nt, Artificial Sequence
  Description of Artificial Sequence: Synthetic oligonucleotide
aaaggggcuucccaaagag

SEQ ID NO: 3229142 - RNA, 19 nt, Artificial Sequence
  Description of Artificial Sequence: Synthetic oligonucleotide
ugcucuuucagguauucag

SEQ ID NO: 3229143 - RNA, 19 nt, Artificial Sequence
  Description of Artificial Sequence: Synthetic oligonucleotide
gucugcuaguuucagaugg

SEQ ID NO: 3229144 - RNA, 19 nt, Artificial Sequence
  Description of Artificial Sequence: Synthetic oligonucleotide
ucuaaggagaguuggggcc

SEQ ID NO: 3229145 - RNA, 19 nt, Artificial Sequence
  Description of Artificial Sequence: Synthetic oligonucleotide
aaguggagcucaauaaccc

SEQ ID NO: 3229146 - RNA, 19 nt, Artificial Sequence
  Description of Artificial Sequence: Synthetic oligonucleotide
gauguuucguucaugcagg

SEQ ID NO: 3229147 - RNA, 19 nt, Artificial Sequence
  Description of Artificial Sequence: Synthetic oligonucleotide
uacgaacagacuccgacag

SEQ ID NO: 3229148 - RNA, 19 nt, Artificial Sequence
  Description of Artificial Sequence: Synthetic oligonucleotide
ucaauaacccgauugcuuc

SEQ ID NO: 3229149 - RNA, 19 nt, Artificial Sequence
  Description of Artificial Sequence: Synthetic oligonucleotide
guuucguucaugcaggaac

SEQ ID NO: 3229150 - RNA, 19 nt, Artificial Sequence
  Description of Artificial Sequence: Synthetic oligonucleotide
aaagaaagaaaggaaggaa

SEQ ID NO: 3229151 - RNA, 19 nt, Artificial Sequence
  Description of Artificial Sequence: Synthetic oligonucleotide
uuucagauggggcuucucc

SEQ ID NO: 3229152 - RNA, 19 nt, Artificial Sequence
  Description of Artificial Sequence: Synthetic oligonucleotide
aucauacugccgcugacac

SEQ ID NO: 3229153 - RNA, 19 nt, Artificial Sequence
  Description of Artificial Sequence: Synthetic oligonucleotide
agagcuacgaacagacucc

SEQ ID NO: 3229154 - RNA, 19 nt, Artificial Sequence
  Description of Artificial Sequence: Synthetic oligonucleotide
uucgaaucuuuucuucuag

SEQ ID NO: 3229155 - RNA, 19 nt, Artificial Sequence
  Description of Artificial Sequence: Synthetic oligonucleotide
ucuccaaagagcucagcag

SEQ ID NO: 3229156 - RNA, 19 nt, Artificial Sequence
  Description of Artificial Sequence: Synthetic oligonucleotide
ugacacaccaucucaggag

SEQ ID NO: 3229157 - RNA, 19 nt, Artificial Sequence
  Description of Artificial Sequence: Synthetic oligonucleotide
aggugcacaggugugaacc

SEQ ID NO: 3229158 - RNA, 19 nt, Artificial Sequence
  Description of Artificial Sequence: Synthetic oligonucleotide
cacacgagcaucauacugc

SEQ ID NO: 3229159 - RNA, 19 nt, Artificial Sequence
  Description of Artificial Sequence: Synthetic oligonucleotide
acacgagcaucauacugcc

SEQ ID NO: 3229160 - RNA, 19 nt, Artificial Sequence
  Description of Artificial Sequence: Synthetic oligonucleotide
cauguuucucaucccaugg

SEQ ID NO: 3229161 - RNA, 19 nt, Artificial Sequence
  Description of Artificial Sequence: Synthetic oligonucleotide
caaagcuucucucuaggcc

SEQ ID NO: 3229162 - RNA, 19 nt, Artificial Sequence
  Description of Artificial Sequence: Synthetic oligonucleotide
gagcucaauaacccgauug

SEQ ID NO: 3229163 - RNA, 19 nt, Artificial Sequence
  Description of Artificial Sequence: Synthetic oligonucleotide
gugagauucccuuaucuug

SEQ ID NO: 3229164 - RNA, 19 nt, Artificial Sequence
  Description of Artificial Sequence: Synthetic oligonucleotide
uugaucugcucuuucaggu

SEQ ID NO: 3229165 - RNA, 19 nt, Artificial Sequence
  Description of Artificial Sequence: Synthetic oligonucleotide
gaaguggagcucaauaacc

SEQ ID NO: 3229166 - RNA, 19 nt, Artificial Sequence
  Description of Artificial Sequence: Synthetic oligonucleotide
ucagguauucagcucgagc

SEQ ID NO: 3229167 - RNA, 19 nt, Artificial Sequence
  Description of Artificial Sequence: Synthetic oligonucleotide
cauacugccgcugacacac

SEQ ID NO: 3229168 - RNA, 19 nt, Artificial Sequence
  Description of Artificial Sequence: Synthetic oligonucleotide
aacuucagggcacuagcca

SEQ ID NO: 3229169 - RNA, 19 nt, Artificial Sequence
  Description of Artificial Sequence: Synthetic oligonucleotide
agcucugagaaugaucugg

SEQ ID NO: 3229170 - RNA, 19 nt, Artificial Sequence
  Description of Artificial Sequence: Synthetic oligonucleotide
uguuacuguagugugcaag

SEQ ID NO: 3229171 - RNA, 19 nt, Artificial Sequence
  Description of Artificial Sequence: Synthetic oligonucleotide
uguagugugcaagagcuac

SEQ ID NO: 3229172 - RNA, 19 nt, Artificial Sequence
  Description of Artificial Sequence: Synthetic oligonucleotide
gaaagaaagaaaggaggug

SEQ ID NO: 3229173 - RNA, 19 nt, Artificial Sequence
  Description of Artificial Sequence: Synthetic oligonucleotide
ucugcuaguuucagauggg

SEQ ID NO: 3229174 - RNA, 19 nt, Artificial Sequence
  Description of Artificial Sequence: Synthetic oligonucleotide
ugcacaggugugaaccugg

SEQ ID NO: 3229175 - RNA, 19 nt, Artificial Sequence
  Description of Artificial Sequence: Synthetic oligonucleotide
uuucguucaugcaggaacu

SEQ ID NO: 3229176 - RNA, 19 nt, Artificial Sequence
  Description of Artificial Sequence: Synthetic oligonucleotide
uacuguagugugcaagagc

SEQ ID NO: 3229177 - RNA, 19 nt, Artificial Sequence
  Description of Artificial Sequence: Synthetic oligonucleotide
aguggagcucaauaacccg

SEQ ID NO: 3229178 - RNA, 19 nt, Artificial Sequence
  Description of Artificial Sequence: Synthetic oligonucleotide
aagaaaggagguguucauc

SEQ ID NO: 3229179 - RNA, 19 nt, Artificial Sequence
  Description of Artificial Sequence: Synthetic oligonucleotide
aaugaucuggaggcaaaag

SEQ ID NO: 3229180 - RNA, 19 nt, Artificial Sequence
  Description of Artificial Sequence: Synthetic oligonucleotide
aaagaaaggagguguucau

SEQ ID NO: 3229181 - RNA, 19 nt, Artificial Sequence
  Description of Artificial Sequence: Synthetic oligonucleotide
acuguagugugcaagagcu

SEQ ID NO: 3229182 - RNA, 19 nt, Artificial Sequence
  Description of Artificial Sequence: Synthetic oligonucleotide
acuucagggcacuagccag

SEQ ID NO: 3229183 - RNA, 19 nt, Artificial Sequence
  Description of Artificial Sequence: Synthetic oligonucleotide
agucuaaggagaguugggg

SEQ ID NO: 3229184 - RNA, 19 nt, Artificial Sequence
  Description of Artificial Sequence: Synthetic oligonucleotide
ucuagaagccgcugcagca

SEQ ID NO: 3229185 - RNA, 19 nt, Artificial Sequence
  Description of Artificial Sequence: Synthetic oligonucleotide
gacacaccaucucaggagc

SEQ ID NO: 3229186 - RNA, 19 nt, Artificial Sequence
  Description of Artificial Sequence: Synthetic oligonucleotide
uucaugcaggaacuucagg

SEQ ID NO: 3229187 - RNA, 19 nt, Artificial Sequence
  Description of Artificial Sequence: Synthetic oligonucleotide
uagaccagagguccacacg

SEQ ID NO: 3229188 - RNA, 19 nt, Artificial Sequence
  Description of Artificial Sequence: Synthetic oligonucleotide
aaaaggggcuucccaaaga

SEQ ID NO: 3229189 - RNA, 19 nt, Artificial Sequence
  Description of Artificial Sequence: Synthetic oligonucleotide
caaagagcucagcagaaug

SEQ ID NO: 3229190 - RNA, 19 nt, Artificial Sequence
  Description of Artificial Sequence: Synthetic oligonucleotide
agcuucauacaggaugacc

SEQ ID NO: 3229191 - RNA, 19 nt, Artificial Sequence
  Description of Artificial Sequence: Synthetic oligonucleotide
ugcuaguuucagauggggc

SEQ ID NO: 3229192 - RNA, 19 nt, Artificial Sequence
  Description of Artificial Sequence: Synthetic oligonucleotide
uggggcuucuccaaagagc

SEQ ID NO: 3229193 - RNA, 19 nt, Artificial Sequence
  Description of Artificial Sequence: Synthetic oligonucleotide
uuuugaaccucugugugaa

SEQ ID NO: 3229194 - RNA, 19 nt, Artificial Sequence
  Description of Artificial Sequence: Synthetic oligonucleotide
cuucauacaggaugacccc

SEQ ID NO: 3229195 - RNA, 19 nt, Artificial Sequence
  Description of Artificial Sequence: Synthetic oligonucleotide
cucugugugaaggagcucc

SEQ ID NO: 3229196 - RNA, 19 nt, Artificial Sequence
  Description of Artificial Sequence: Synthetic oligonucleotide
agcacauguuucucauccc

SEQ ID NO: 3229197 - RNA, 19 nt, Artificial Sequence
  Description of Artificial Sequence: Synthetic oligonucleotide
aucuggaggcaaaaggggc

SEQ ID NO: 3229198 - RNA, 19 nt, Artificial Sequence
  Description of Artificial Sequence: Synthetic oligonucleotide
agaccagagguccacacga

SEQ ID NO: 3229199 - RNA, 19 nt, Artificial Sequence
  Description of Artificial Sequence: Synthetic oligonucleotide
guuacuguagugugcaaga

SEQ ID NO: 3229200 - RNA, 19 nt, Artificial Sequence
  Description of Artificial Sequence: Synthetic oligonucleotide
gugugcaagagcuacgaac

SEQ ID NO: 3229201 - RNA, 19 nt, Artificial Sequence
  Description of Artificial Sequence: Synthetic oligonucleotide
agguuuugaaccucugugu

SEQ ID NO: 3229202 - RNA, 19 nt, Artificial Sequence
  Description of Artificial Sequence: Synthetic oligonucleotide
ucuggaggcaaaaggggcu

SEQ ID NO: 3229203 - RNA, 19 nt, Artificial Sequence
  Description of Artificial Sequence: Synthetic oligonucleotide
gauugcuucgaaucuuuuc

SEQ ID NO: 3229204 - RNA, 19 nt, Artificial Sequence
  Description of Artificial Sequence: Synthetic oligonucleotide
uccguuguuacuguagugu

SEQ ID NO: 3229205 - RNA, 19 nt, Artificial Sequence
  Description of Artificial Sequence: Synthetic oligonucleotide
uucagauggggcuucucca

SEQ ID NO: 3229206 - RNA, 19 nt, Artificial Sequence
  Description of Artificial Sequence: Synthetic oligonucleotide
ugguacaaagcuucucucu

SEQ ID NO: 3229207 - RNA, 19 nt, Artificial Sequence
  Description of Artificial Sequence: Synthetic oligonucleotide
ucgaaucuuuucuucuagc

SEQ ID NO: 3229208 - RNA, 19 nt, Artificial Sequence
  Description of Artificial Sequence: Synthetic oligonucleotide
aaccuggguugguacaaag

SEQ ID NO: 3229209 - RNA, 19 nt, Artificial Sequence
  Description of Artificial Sequence: Synthetic oligonucleotide
gcuucauacaggaugaccc

SEQ ID NO: 3229210 - RNA, 19 nt, Artificial Sequence
  Description of Artificial Sequence: Synthetic oligonucleotide
caauaacccgauugcuucg

SEQ ID NO: 3229211 - RNA, 19 nt, Artificial Sequence
  Description of Artificial Sequence: Synthetic oligonucleotide
aguccuuccguuguuacug

SEQ ID NO: 3229212 - RNA, 19 nt, Artificial Sequence
  Description of Artificial Sequence: Synthetic oligonucleotide
agauccaggugagagaugu

SEQ ID NO: 3229213 - RNA, 19 nt, Artificial Sequence
  Description of Artificial Sequence: Synthetic oligonucleotide
acauguuucucaucccaug

SEQ ID NO: 3229214 - RNA, 19 nt, Artificial Sequence
  Description of Artificial Sequence: Synthetic oligonucleotide
ucagauccaggugagagau

SEQ ID NO: 3229215 - RNA, 19 nt, Artificial Sequence
  Description of Artificial Sequence: Synthetic oligonucleotide
gucuaaggagaguuggggc

SEQ ID NO: 3229216 - RNA, 19 nt, Artificial Sequence
  Description of Artificial Sequence: Synthetic oligonucleotide
cccaaagagagcuucauac

SEQ ID NO: 3229217 - RNA, 19 nt, Artificial Sequence
  Description of Artificial Sequence: Synthetic oligonucleotide
uuuaaugucacacuucuug

SEQ ID NO: 3229218 - RNA, 19 nt, Artificial Sequence
  Description of Artificial Sequence: Synthetic oligonucleotide
ucugucucuaagcagaugg

SEQ ID NO: 3229219 - RNA, 19 nt, Artificial Sequence
  Description of Artificial Sequence: Synthetic oligonucleotide
ucacguaagagguugaugg

SEQ ID NO: 3229220 - RNA, 19 nt, Artificial Sequence
  Description of Artificial Sequence: Synthetic oligonucleotide
caaagcuacauccaaaucc

SEQ ID NO: 3229221 - RNA, 19 nt, Artificial Sequence
  Description of Artificial Sequence: Synthetic oligonucleotide
aauuggaccugucugauca

SEQ ID NO: 3229222 - RNA, 19 nt, Artificial Sequence
  Description of Artificial Sequence: Synthetic oligonucleotide
ucuccaauugccaacaccc

SEQ ID NO: 3229223 - RNA, 19 nt, Artificial Sequence
  Description of Artificial Sequence: Synthetic oligonucleotide
aaaugcgugcagcaggacc

SEQ ID NO: 3229224 - RNA, 19 nt, Artificial Sequence
  Description of Artificial Sequence: Synthetic oligonucleotide
uuguacuucucaauaauag

SEQ ID NO: 3229225 - RNA, 19 nt, Artificial Sequence
  Description of Artificial Sequence: Synthetic oligonucleotide
uguacuucucaauaauagg

SEQ ID NO: 3229226 - RNA, 19 nt, Artificial Sequence
  Description of Artificial Sequence: Synthetic oligonucleotide
uuaaugucacacuucuugg

SEQ ID NO: 3229227 - RNA, 19 nt, Artificial Sequence
  Description of Artificial Sequence: Synthetic oligonucleotide
aauugccaacacccgaucc

SEQ ID NO: 3229228 - RNA, 19 nt, Artificial Sequence
  Description of Artificial Sequence: Synthetic oligonucleotide
uagucuuuuggccaauugg

SEQ ID NO: 3229229 - RNA, 19 nt, Artificial Sequence
  Description of Artificial Sequence: Synthetic oligonucleotide
ucaauaauaggcaaagcua

SEQ ID NO: 3229230 - RNA, 19 nt, Artificial Sequence
  Description of Artificial Sequence: Synthetic oligonucleotide
aaugcgugcagcaggaccc

SEQ ID NO: 3229231 - RNA, 19 nt, Artificial Sequence
  Description of Artificial Sequence: Synthetic oligonucleotide
caauaauaggcaaagcuac

SEQ ID NO: 3229232 - RNA, 19 nt, Artificial Sequence
  Description of Artificial Sequence: Synthetic oligonucleotide
acggccaaccaucaaaugc

SEQ ID NO: 3229233 - RNA, 19 nt, Artificial Sequence
  Description of Artificial Sequence: Synthetic oligonucleotide
aaaguucuugaacugggug

SEQ ID NO: 3229234 - RNA, 19 nt, Artificial Sequence
  Description of Artificial Sequence: Synthetic oligonucleotide
uccaaauccuuuaauguca

SEQ ID NO: 3229235 - RNA, 19 nt, Artificial Sequence
  Description of Artificial Sequence: Synthetic oligonucleotide
aaguucuugaacuggguga

SEQ ID NO: 3229236 - RNA, 19 nt, Artificial Sequence
  Description of Artificial Sequence: Synthetic oligonucleotide
accuuguucacguaagagg

SEQ ID NO: 3229237 - RNA, 19 nt, Artificial Sequence
  Description of Artificial Sequence: Synthetic oligonucleotide
auccaaauccuuuaauguc

SEQ ID NO: 3229238 - RNA, 19 nt, Artificial Sequence
  Description of Artificial Sequence: Synthetic oligonucleotide
uuguucuucuuucuguucc

SEQ ID NO: 3229239 - RNA, 19 nt, Artificial Sequence
  Description of Artificial Sequence: Synthetic oligonucleotide
acauccaaauccuuuaaug

SEQ ID NO: 3229240 - RNA, 19 nt, Artificial Sequence
  Description of Artificial Sequence: Synthetic oligonucleotide
aucaaaugcgugcagcagg

SEQ ID NO: 3229241 - RNA, 19 nt, Artificial Sequence
  Description of Artificial Sequence: Synthetic oligonucleotide
cuucuuaugauggacggcg

SEQ ID NO: 3229242 - RNA, 19 nt, Artificial Sequence
  Description of Artificial Sequence: Synthetic oligonucleotide
agcagauggagcuuagagg

SEQ ID NO: 3229243 - RNA, 19 nt, Artificial Sequence
  Description of Artificial Sequence: Synthetic oligonucleotide
cacauuuagucuuuuggcc

SEQ ID NO: 3229244 - RNA, 19 nt, Artificial Sequence
  Description of Artificial Sequence: Synthetic oligonucleotide
cuuucuguuccucagugcc

SEQ ID NO: 3229245 - RNA, 19 nt, Artificial Sequence
  Description of Artificial Sequence: Synthetic oligonucleotide
uuaaaggcacauuuagucu

SEQ ID NO: 3229246 - RNA, 19 nt, Artificial Sequence
  Description of Artificial Sequence: Synthetic oligonucleotide
uucucaauaauaggcaaag

SEQ ID NO: 3229247 - RNA, 19 nt, Artificial Sequence
  Description of Artificial Sequence: Synthetic oligonucleotide
ugggucuuccugcugagcg

SEQ ID NO: 3229248 - RNA, 19 nt, Artificial Sequence
  Description of Artificial Sequence: Synthetic oligonucleotide
aagagguugaugguggguc

SEQ ID NO: 3229249 - RNA, 19 nt, Artificial Sequence
  Description of Artificial Sequence: Synthetic oligonucleotide
ucuuuuggccaauuggacc

SEQ ID NO: 3229250 - RNA, 19 nt, Artificial Sequence
  Description of Artificial Sequence: Synthetic oligonucleotide
ugaacucccagacauggca

SEQ ID NO: 3229251 - RNA, 19 nt, Artificial Sequence
  Description of Artificial Sequence: Synthetic oligonucleotide
uacuucucaauaauaggca

SEQ ID NO: 3229252 - RNA, 19 nt, Artificial Sequence
  Description of Artificial Sequence: Synthetic oligonucleotide
auugagaaguaguagccug

SEQ ID NO: 3229253 - RNA, 19 nt, Artificial Sequence
  Description of Artificial Sequence: Synthetic oligonucleotide
ucucuaagcagauggagcu

SEQ ID NO: 3229254 - RNA, 19 nt, Artificial Sequence
  Description of Artificial Sequence: Synthetic oligonucleotide
ugagugcacguuuaaaggc

SEQ ID NO: 3229255 - RNA, 19 nt, Artificial Sequence
  Description of Artificial Sequence: Synthetic oligonucleotide
agaaguaguagccugcccu

SEQ ID NO: 3229256 - RNA, 19 nt, Artificial Sequence
  Description of Artificial Sequence: Synthetic oligonucleotide
guacuucucaauaauaggc

SEQ ID NO: 3229257 - RNA, 19 nt, Artificial Sequence
  Description of Artificial Sequence: Synthetic oligonucleotide
agugccagcaaaucugggg

SEQ ID NO: 3229258 - RNA, 19 nt, Artificial Sequence
  Description of Artificial Sequence: Synthetic oligonucleotide
aaagcuacauccaaauccu

SEQ ID NO: 3229259 - RNA, 19 nt, Artificial Sequence
  Description of Artificial Sequence: Synthetic oligonucleotide
gugagugcacguuuaaagg

SEQ ID NO: 3229260 - RNA, 19 nt, Artificial Sequence
  Description of Artificial Sequence: Synthetic oligonucleotide
acugggugaacucccagac

SEQ ID NO: 3229261 - RNA, 19 nt, Artificial Sequence
  Description of Artificial Sequence: Synthetic oligonucleotide
ucugcuucuguccacuucu

SEQ ID NO: 3229262 - RNA, 19 nt, Artificial Sequence
  Description of Artificial Sequence: Synthetic oligonucleotide
ucuuaugauggacggcggg

SEQ ID NO: 3229263 - RNA, 19 nt, Artificial Sequence
  Description of Artificial Sequence: Synthetic oligonucleotide
acauuuagucuuuuggcca

SEQ ID NO: 3229264 - RNA, 19 nt, Artificial Sequence
  Description of Artificial Sequence: Synthetic oligonucleotide
ucagugccagcaaaucugg

SEQ ID NO: 3229265 - RNA, 19 nt, Artificial Sequence
  Description of Artificial Sequence: Synthetic oligonucleotide
ucuucuuucuguuccucag

SEQ ID NO: 3229266 - RNA, 19 nt, Artificial Sequence
  Description of Artificial Sequence: Synthetic oligonucleotide
uucuuucuguuccucagug

SEQ ID NO: 3229267 - RNA, 19 nt, Artificial Sequence
  Description of Artificial Sequence: Synthetic oligonucleotide
ucuuuguucuucuuucugu

SEQ ID NO: 3229268 - RNA, 19 nt, Artificial Sequence
  Description of Artificial Sequence: Synthetic oligonucleotide
acaagcuucugcuucuguc

SEQ ID NO: 3229269 - RNA, 19 nt, Artificial Sequence
  Description of Artificial Sequence: Synthetic oligonucleotide
ggcacauuuagucuuuugg

SEQ ID NO: 3229270 - RNA, 19 nt, Artificial Sequence
  Description of Artificial Sequence: Synthetic oligonucleotide
aaugucacacuucuugguu

SEQ ID NO: 3229271 - RNA, 19 nt, Artificial Sequence
  Description of Artificial Sequence: Synthetic oligonucleotide
ucaaaugcgugcagcagga

SEQ ID NO: 3229272 - RNA, 19 nt, Artificial Sequence
  Description of Artificial Sequence: Synthetic oligonucleotide
ugggugaacucccagacau

SEQ ID NO: 3229273 - RNA, 19 nt, Artificial Sequence
  Description of Artificial Sequence: Synthetic oligonucleotide
uugagaaguaguagccugc

SEQ ID NO: 3229274 - RNA, 19 nt, Artificial Sequence
  Description of Artificial Sequence: Synthetic oligonucleotide
gaaucugucucuaagcaga

SEQ ID NO: 3229275 - RNA, 19 nt, Artificial Sequence
  Description of Artificial Sequence: Synthetic oligonucleotide
aacucccagacauggcagg

SEQ ID NO: 3229276 - RNA, 19 nt, Artificial Sequence
  Description of Artificial Sequence: Synthetic oligonucleotide
uuagucuuuuggccaauug

SEQ ID NO: 3229277 - RNA, 19 nt, Artificial Sequence
  Description of Artificial Sequence: Synthetic oligonucleotide
agacauggcaggaugaauc

SEQ ID NO: 3229278 - RNA, 19 nt, Artificial Sequence
  Description of Artificial Sequence: Synthetic oligonucleotide
cucagugccagcaaaucug

SEQ ID NO: 3229279 - RNA, 19 nt, Artificial Sequence
  Description of Artificial Sequence: Synthetic oligonucleotide
cacuucuuaugauggacgg

SEQ ID NO: 3229280 - RNA, 19 nt, Artificial Sequence
  Description of Artificial Sequence: Synthetic oligonucleotide
gacauggcaggaugaaucc

SEQ ID NO: 3229281 - RNA, 19 nt, Artificial Sequence
  Description of Artificial Sequence: Synthetic oligonucleotide
cacuucuugguucuucugg

SEQ ID NO: 3229282 - RNA, 19 nt, Artificial Sequence
  Description of Artificial Sequence: Synthetic oligonucleotide
uaaaggcacauuuagucuu

SEQ ID NO: 3229283 - RNA, 19 nt, Artificial Sequence
  Description of Artificial Sequence: Synthetic oligonucleotide
augucacacuucuugguuc

SEQ ID NO: 3229284 - RNA, 19 nt, Artificial Sequence
  Description of Artificial Sequence: Synthetic oligonucleotide
uuucuggucccagagcagg

SEQ ID NO: 3229285 - RNA, 19 nt, Artificial Sequence
  Description of Artificial Sequence: Synthetic oligonucleotide
uugauggugggucuuccug

SEQ ID NO: 3229286 - RNA, 19 nt, Artificial Sequence
  Description of Artificial Sequence: Synthetic oligonucleotide
uucuucuggugaaaguucu

SEQ ID NO: 3229287 - RNA, 19 nt, Artificial Sequence
  Description of Artificial Sequence: Synthetic oligonucleotide
gggauugagaaguaguagc

SEQ ID NO: 3229288 - RNA, 19 nt, Artificial Sequence
  Description of Artificial Sequence: Synthetic oligonucleotide
accaucaaaugcgugcagc

SEQ ID NO: 3229289 - RNA, 19 nt, Artificial Sequence
  Description of Artificial Sequence: Synthetic oligonucleotide
uuguucacguaagagguug

SEQ ID NO: 3229290 - RNA, 19 nt, Artificial Sequence
  Description of Artificial Sequence: Synthetic oligonucleotide
uccaauugccaacacccga

SEQ ID NO: 3229291 - RNA, 19 nt, Artificial Sequence
  Description of Artificial Sequence: Synthetic oligonucleotide
aauaauaggcaaagcuaca

SEQ ID NO: 3229292 - RNA, 19 nt, Artificial Sequence
  Description of Artificial Sequence: Synthetic oligonucleotide
uucuguccacuucuuauga

SEQ ID NO: 3229293 - RNA, 19 nt, Artificial Sequence
  Description of Artificial Sequence: Synthetic oligonucleotide
uucuuaugauggacggcgg

SEQ ID NO: 3229294 - RNA, 19 nt, Artificial Sequence
  Description of Artificial Sequence: Synthetic oligonucleotide
gaccugucugaucaggacc

SEQ ID NO: 3229295 - RNA, 19 nt, Artificial Sequence
  Description of Artificial Sequence: Synthetic oligonucleotide
gaaguaguagccugcccug

SEQ ID NO: 3229296 - RNA, 19 nt, Artificial Sequence
  Description of Artificial Sequence: Synthetic oligonucleotide
ggagcuuagaggcagcugc

SEQ ID NO: 3229297 - RNA, 19 nt, Artificial Sequence
  Description of Artificial Sequence: Synthetic oligonucleotide
ugucucuaagcagauggag

SEQ ID NO: 3229298 - RNA, 19 nt, Artificial Sequence
  Description of Artificial Sequence: Synthetic oligonucleotide
aggcagcugcuucacaagc

SEQ ID NO: 3229299 - RNA, 19 nt, Artificial Sequence
  Description of Artificial Sequence: Synthetic oligonucleotide
gugaaaguucuugaacugg

SEQ ID NO: 3229300 - RNA, 19 nt, Artificial Sequence
  Description of Artificial Sequence: Synthetic oligonucleotide
ugauggugggucuuccugc

SEQ ID NO: 3229301 - RNA, 19 nt, Artificial Sequence
  Description of Artificial Sequence: Synthetic oligonucleotide
cucaauaauaggcaaagcu

SEQ ID NO: 3229302 - RNA, 19 nt, Artificial Sequence
  Description of Artificial Sequence: Synthetic oligonucleotide
auugccaacacccgauccu

SEQ ID NO: 3229303 - RNA, 19 nt, Artificial Sequence
  Description of Artificial Sequence: Synthetic oligonucleotide
uaaugucacacuucuuggu

SEQ ID NO: 3229304 - RNA, 19 nt, Artificial Sequence
  Description of Artificial Sequence: Synthetic oligonucleotide
aacugggugaacucccaga

SEQ ID NO: 3229305 - RNA, 19 nt, Artificial Sequence
  Description of Artificial Sequence: Synthetic oligonucleotide
aguaguagccugcccugac

SEQ ID NO: 3229306 - RNA, 19 nt, Artificial Sequence
  Description of Artificial Sequence: Synthetic oligonucleotide
uggacggcgggauugagaa

SEQ ID NO: 3229307 - RNA, 19 nt, Artificial Sequence
  Description of Artificial Sequence: Synthetic oligonucleotide
aggaugaauccaguauacc

SEQ ID NO: 3229308 - RNA, 19 nt, Artificial Sequence
  Description of Artificial Sequence: Synthetic oligonucleotide
uucuggugaaaguucuuga

SEQ ID NO: 3229309 - RNA, 19 nt, Artificial Sequence
  Description of Artificial Sequence: Synthetic oligonucleotide
cuugaacugggugaacucc

SEQ ID NO: 3229310 - RNA, 19 nt, Artificial Sequence
  Description of Artificial Sequence: Synthetic oligonucleotide
aguagccugcccugacucc

SEQ ID NO: 3229311 - RNA, 19 nt, Artificial Sequence
  Description of Artificial Sequence: Synthetic oligonucleotide
agucuagccccaccucucc

SEQ ID NO: 3229312 - RNA, 19 nt, Artificial Sequence
  Description of Artificial Sequence: Synthetic oligonucleotide
aacacccgauccuuguacu

SEQ ID NO: 3229313 - RNA, 19 nt, Artificial Sequence
  Description of Artificial Sequence: Synthetic oligonucleotide
acuucuuaugauggacggc

SEQ ID NO: 3229314 - RNA, 19 nt, Artificial Sequence
  Description of Artificial Sequence: Synthetic oligonucleotide
agaagucuagccccaccuc

SEQ ID NO: 3229315 - RNA, 19 nt, Artificial Sequence
  Description of Artificial Sequence: Synthetic oligonucleotide
uaggcaaagcuacauccaa

SEQ ID NO: 3229316 - RNA, 19 nt, Artificial Sequence
  Description of Artificial Sequence: Synthetic oligonucleotide
cuucuguccacuucuuaug

SEQ ID NO: 3229317 - RNA, 19 nt, Artificial Sequence
  Description of Artificial Sequence: Synthetic oligonucleotide
auuagcuggaaccuucugc

SEQ ID NO: 3229318 - RNA, 19 nt, Artificial Sequence
  Description of Artificial Sequence: Synthetic oligonucleotide
aaaccucacagucuuuacc

SEQ ID NO: 3229319 - RNA, 19 nt, Artificial Sequence
  Description of Artificial Sequence: Synthetic oligonucleotide
ucugauuuucugcagcucc

SEQ ID NO: 3229320 - RNA, 19 nt, Artificial Sequence
  Description of Artificial Sequence: Synthetic oligonucleotide
ugcgaaaccacgagaaccg

SEQ ID NO: 3229321 - RNA, 19 nt, Artificial Sequence
  Description of Artificial Sequence: Synthetic oligonucleotide
uuagcuggaaccuucugcc

SEQ ID NO: 3229322 - RNA, 19 nt, Artificial Sequence
  Description of Artificial Sequence: Synthetic oligonucleotide
auuuucugcagcuccaguc

SEQ ID NO: 3229323 - RNA, 19 nt, Artificial Sequence
  Description of Artificial Sequence: Synthetic oligonucleotide
uguuccuaggguaacggag

SEQ ID NO: 3229324 - RNA, 19 nt, Artificial Sequence
  Description of Artificial Sequence: Synthetic oligonucleotide
aaccucacagucuuuaccu

SEQ ID NO: 3229325 - RNA, 19 nt, Artificial Sequence
  Description of Artificial Sequence: Synthetic oligonucleotide
ugaggcuuccgcuauagcc

SEQ ID NO: 3229326 - RNA, 19 nt, Artificial Sequence
  Description of Artificial Sequence: Synthetic oligonucleotide
uuuucugcagcuccagucc

SEQ ID NO: 3229327 - RNA, 19 nt, Artificial Sequence
  Description of Artificial Sequence: Synthetic oligonucleotide
uucugcucuagcuucagcc

SEQ ID NO: 3229328 - RNA, 19 nt, Artificial Sequence
  Description of Artificial Sequence: Synthetic oligonucleotide
agcuucagcccucagcacc

SEQ ID NO: 3229329 - RNA, 19 nt, Artificial Sequence
  Description of Artificial Sequence: Synthetic oligonucleotide
guuucugggcccuaggucc

SEQ ID NO: 3229330 - RNA, 19 nt, Artificial Sequence
  Description of Artificial Sequence: Synthetic oligonucleotide
uuccgcuauagccugaggc

SEQ ID NO: 3229331 - RNA, 19 nt, Artificial Sequence
  Description of Artificial Sequence: Synthetic oligonucleotide
gucuuuaccuguuucuggg

SEQ ID NO: 3229332 - RNA, 19 nt, Artificial Sequence
  Description of Artificial Sequence: Synthetic oligonucleotide
ucagcugggaccuccaccc

SEQ ID NO: 3229333 - RNA, 19 nt, Artificial Sequence
  Description of Artificial Sequence: Synthetic oligonucleotide
ucuagcuucagcccucagc

SEQ ID NO: 3229334 - RNA, 19 nt, Artificial Sequence
  Description of Artificial Sequence: Synthetic oligonucleotide
ucugaaaccucacagucuu

SEQ ID NO: 3229335 - RNA, 19 nt, Artificial Sequence
  Description of Artificial Sequence: Synthetic oligonucleotide
caguccuuucauuagcugg

SEQ ID NO: 3229336 - RNA, 19 nt, Artificial Sequence
  Description of Artificial Sequence: Synthetic oligonucleotide
agucuuuaccuguuucugg

SEQ ID NO: 3229337 - RNA, 19 nt, Artificial Sequence
  Description of Artificial Sequence: Synthetic oligonucleotide
gaaaccacgagaaccgucc

SEQ ID NO: 3229338 - RNA, 19 nt, Artificial Sequence
  Description of Artificial Sequence: Synthetic oligonucleotide
uucucuguguuccacuucu

SEQ ID NO: 3229339 - RNA, 19 nt, Artificial Sequence
  Description of Artificial Sequence: Synthetic oligonucleotide
aaggcuggcaaccggggag

SEQ ID NO: 3229340 - RNA, 19 nt, Artificial Sequence
  Description of Artificial Sequence: Synthetic oligonucleotide
acagcuguuccucuucuuc

SEQ ID NO: 3229341 - RNA, 19 nt, Artificial Sequence
  Description of Artificial Sequence: Synthetic oligonucleotide
uugcgaaaccacgagaacc

SEQ ID NO: 3229342 - RNA, 19 nt, Artificial Sequence
  Description of Artificial Sequence: Synthetic oligonucleotide
uccgcuauagccugaggcc

SEQ ID NO: 3229343 - RNA, 19 nt, Artificial Sequence
  Description of Artificial Sequence: Synthetic oligonucleotide
uauagccugaggcccagcc

SEQ ID NO: 3229344 - RNA, 19 nt, Artificial Sequence
  Description of Artificial Sequence: Synthetic oligonucleotide
uucauuagcuggaaccuuc

SEQ ID NO: 3229345 - RNA, 19 nt, Artificial Sequence
  Description of Artificial Sequence: Synthetic oligonucleotide
cuuuaccuguuucugggcc

SEQ ID NO: 3229346 - RNA, 19 nt, Artificial Sequence
  Description of Artificial Sequence: Synthetic oligonucleotide
uaacggagccagcugaggc

SEQ ID NO: 3229347 - RNA, 19 nt, Artificial Sequence
  Description of Artificial Sequence: Synthetic oligonucleotide
ccuuucauuagcuggaacc

SEQ ID NO: 3229348 - RNA, 19 nt, Artificial Sequence
  Description of Artificial Sequence: Synthetic oligonucleotide
ucuguguuccacuucugcu

SEQ ID NO: 3229349 - RNA, 19 nt, Artificial Sequence
  Description of Artificial Sequence: Synthetic oligonucleotide
uuuaccuguuucugggccc

SEQ ID NO: 3229350 - RNA, 19 nt, Artificial Sequence
  Description of Artificial Sequence: Synthetic oligonucleotide
ugccagaaagcccuucugc

SEQ ID NO: 3229351 - RNA, 19 nt, Artificial Sequence
  Description of Artificial Sequence: Synthetic oligonucleotide
ucugcucuagcuucagccc

SEQ ID NO: 3229352 - RNA, 19 nt, Artificial Sequence
  Description of Artificial Sequence: Synthetic oligonucleotide
uguguuccacuucugcucu

SEQ ID NO: 3229353 - RNA, 19 nt, Artificial Sequence
  Description of Artificial Sequence: Synthetic oligonucleotide
cuagcuucagcccucagca

SEQ ID NO: 3229354 - RNA, 19 nt, Artificial Sequence
  Description of Artificial Sequence: Synthetic oligonucleotide
acgagaaccguccuggggu

SEQ ID NO: 3229355 - RNA, 19 nt, Artificial Sequence
  Description of Artificial Sequence: Synthetic oligonucleotide
acagucuuuaccuguuucu

SEQ ID NO: 3229356 - RNA, 19 nt, Artificial Sequence
  Description of Artificial Sequence: Synthetic oligonucleotide
accacgagaaccguccugg

SEQ ID NO: 3229357 - RNA, 19 nt, Artificial Sequence
  Description of Artificial Sequence: Synthetic oligonucleotide
uguuucugggcccuagguc

SEQ ID NO: 3229358 - RNA, 19 nt, Artificial Sequence
  Description of Artificial Sequence: Synthetic oligonucleotide
aacggagccagcugaggcu

SEQ ID NO: 3229359 - RNA, 19 nt, Artificial Sequence
  Description of Artificial Sequence: Synthetic oligonucleotide
cucucuugggcaaggcugg

SEQ ID NO: 3229360 - RNA, 19 nt, Artificial Sequence
  Description of Artificial Sequence: Synthetic oligonucleotide
cucuucuucucuguguucc

SEQ ID NO: 3229361 - RNA, 19 nt, Artificial Sequence
  Description of Artificial Sequence: Synthetic oligonucleotide
ugcagcuccaguccuuuca

SEQ ID NO: 3229362 - RNA, 19 nt, Artificial Sequence
  Description of Artificial Sequence: Synthetic oligonucleotide
ugugccagaaagcccuucu

SEQ ID NO: 3229363 - RNA, 19 nt, Artificial Sequence
  Description of Artificial Sequence: Synthetic oligonucleotide
ugcgcuugcgaaaccacga

SEQ ID NO: 3229364 - RNA, 19 nt, Artificial Sequence
  Description of Artificial Sequence: Synthetic oligonucleotide
ucuugggcaaggcuggcaa

SEQ ID NO: 3229365 - RNA, 19 nt, Artificial Sequence
  Description of Artificial Sequence: Synthetic oligonucleotide
uccaguccuuucauuagcu

SEQ ID NO: 3229366 - RNA, 19 nt, Artificial Sequence
  Description of Artificial Sequence: Synthetic oligonucleotide
gaaccuucugcccucugac

SEQ ID NO: 3229367 - RNA, 19 nt, Artificial Sequence
  Description of Artificial Sequence: Synthetic oligonucleotide
aaagcccuucugcgcuugc

SEQ ID NO: 3229368 - RNA, 19 nt, Artificial Sequence
  Description of Artificial Sequence: Synthetic oligonucleotide
uuccacuucugcucuagcu

SEQ ID NO: 3229369 - RNA, 19 nt, Artificial Sequence
  Description of Artificial Sequence: Synthetic oligonucleotide
uccacuucugcucuagcuu

SEQ ID NO: 3229370 - RNA, 19 nt, Artificial Sequence
  Description of Artificial Sequence: Synthetic oligonucleotide
ucuuuaccuguuucugggc

SEQ ID NO: 3229371 - RNA, 19 nt, Artificial Sequence
  Description of Artificial Sequence: Synthetic oligonucleotide
cuguguuccacuucugcuc

SEQ ID NO: 3229372 - RNA, 19 nt, Artificial Sequence
  Description of Artificial Sequence: Synthetic oligonucleotide
uuccuaggguaacggagcc

SEQ ID NO: 3229373 - RNA, 19 nt, Artificial Sequence
  Description of Artificial Sequence: Synthetic oligonucleotide
ucauuagcuggaaccuucu

SEQ ID NO: 3229374 - RNA, 19 nt, Artificial Sequence
  Description of Artificial Sequence: Synthetic oligonucleotide
agcuguuccucuucuucuc

SEQ ID NO: 3229375 - RNA, 19 nt, Artificial Sequence
  Description of Artificial Sequence: Synthetic oligonucleotide
gaaaccucacagucuuuac

SEQ ID NO: 3229376 - RNA, 19 nt, Artificial Sequence
  Description of Artificial Sequence: Synthetic oligonucleotide
acucucuugggcaaggcug

SEQ ID NO: 3229377 - RNA, 19 nt, Artificial Sequence
  Description of Artificial Sequence: Synthetic oligonucleotide
cucuguguuccacuucugc

SEQ ID NO: 3229378 - RNA, 19 nt, Artificial Sequence
  Description of Artificial Sequence: Synthetic oligonucleotide
ugauuuucugcagcuccag

SEQ ID NO: 3229379 - RNA, 19 nt, Artificial Sequence
  Description of Artificial Sequence: Synthetic oligonucleotide
ugaaaccucacagucuuua

SEQ ID NO: 3229380 - RNA, 19 nt, Artificial Sequence
  Description of Artificial Sequence: Synthetic oligonucleotide
uagccugaggcccagccuc

SEQ ID NO: 3229381 - RNA, 19 nt, Artificial Sequence
  Description of Artificial Sequence: Synthetic oligonucleotide
aaccacgagaaccguccug

SEQ ID NO: 3229382 - RNA, 19 nt, Artificial Sequence
  Description of Artificial Sequence: Synthetic oligonucleotide
ggggucugaaaccucacag

SEQ ID NO: 3229383 - RNA, 19 nt, Artificial Sequence
  Description of Artificial Sequence: Synthetic oligonucleotide
gccagaaagcccuucugcg

SEQ ID NO: 3229384 - RNA, 19 nt, Artificial Sequence
  Description of Artificial Sequence: Synthetic oligonucleotide
uuucugcagcuccaguccu

SEQ ID NO: 3229385 - RNA, 19 nt, Artificial Sequence
  Description of Artificial Sequence: Synthetic oligonucleotide
guuccuaggguaacggagc

SEQ ID NO: 3229386 - RNA, 19 nt, Artificial Sequence
  Description of Artificial Sequence: Synthetic oligonucleotide
uagguccuggggcuguucc

SEQ ID NO: 3229387 - RNA, 19 nt, Artificial Sequence
  Description of Artificial Sequence: Synthetic oligonucleotide
uguuccucuucuucucugu

SEQ ID NO: 3229388 - RNA, 19 nt, Artificial Sequence
  Description of Artificial Sequence: Synthetic oligonucleotide
uccucuucuucucuguguu

SEQ ID NO: 3229389 - RNA, 19 nt, Artificial Sequence
  Description of Artificial Sequence: Synthetic oligonucleotide
agcuggaaccuucugcccu

SEQ ID NO: 3229390 - RNA, 19 nt, Artificial Sequence
  Description of Artificial Sequence: Synthetic oligonucleotide
uguuccacuucugcucuag

SEQ ID NO: 3229391 - RNA, 19 nt, Artificial Sequence
  Description of Artificial Sequence: Synthetic oligonucleotide
ggucugaaaccucacaguc

SEQ ID NO: 3229392 - RNA, 19 nt, Artificial Sequence
  Description of Artificial Sequence: Synthetic oligonucleotide
cuccaguccuuucauuagc

SEQ ID NO: 3229393 - RNA, 19 nt, Artificial Sequence
  Description of Artificial Sequence: Synthetic oligonucleotide
uucuucucuguguuccacu

SEQ ID NO: 3229394 - RNA, 19 nt, Artificial Sequence
  Description of Artificial Sequence: Synthetic oligonucleotide
ucagcccucagcacccuga

SEQ ID NO: 3229395 - RNA, 19 nt, Artificial Sequence
  Description of Artificial Sequence: Synthetic oligonucleotide
uugggcaaggcuggcaacc

SEQ ID NO: 3229396 - RNA, 19 nt, Artificial Sequence
  Description of Artificial Sequence: Synthetic oligonucleotide
uaggguaacggagccagcu

SEQ ID NO: 3229397 - RNA, 19 nt, Artificial Sequence
  Description of Artificial Sequence: Synthetic oligonucleotide
uuccucuucuucucugugu

SEQ ID NO: 3229398 - RNA, 19 nt, Artificial Sequence
  Description of Artificial Sequence: Synthetic oligonucleotide
agcacccugaggcuccuag

SEQ ID NO: 3229399 - RNA, 19 nt, Artificial Sequence
  Description of Artificial Sequence: Synthetic oligonucleotide
agcuccaguccuuucauua

SEQ ID NO: 3229400 - RNA, 19 nt, Artificial Sequence
  Description of Artificial Sequence: Synthetic oligonucleotide
cacccugaggcuccuagcc

SEQ ID NO: 3229401 - RNA, 19 nt, Artificial Sequence
  Description of Artificial Sequence: Synthetic oligonucleotide
aaaccacgagaaccguccu

SEQ ID NO: 3229402 - RNA, 19 nt, Artificial Sequence
  Description of Artificial Sequence: Synthetic oligonucleotide
aaccuucugcccucugacu

SEQ ID NO: 3229403 - RNA, 19 nt, Artificial Sequence
  Description of Artificial Sequence: Synthetic oligonucleotide
cugcgcuugcgaaaccacg

SEQ ID NO: 3229404 - RNA, 19 nt, Artificial Sequence
  Description of Artificial Sequence: Synthetic oligonucleotide
agccagcugaggcuuccgc

SEQ ID NO: 3229405 - RNA, 19 nt, Artificial Sequence
  Description of Artificial Sequence: Synthetic oligonucleotide
aguccuuucauuagcugga

SEQ ID NO: 3229406 - RNA, 19 nt, Artificial Sequence
  Description of Artificial Sequence: Synthetic oligonucleotide
ucugcgcuugcgaaaccac

SEQ ID NO: 3229407 - RNA, 19 nt, Artificial Sequence
  Description of Artificial Sequence: Synthetic oligonucleotide
ucuucucuguguuccacuu

SEQ ID NO: 3229408 - RNA, 19 nt, Artificial Sequence
  Description of Artificial Sequence: Synthetic oligonucleotide
gcccucagcacccugaggc

SEQ ID NO: 3229409 - RNA, 19 nt, Artificial Sequence
  Description of Artificial Sequence: Synthetic oligonucleotide
cuugcgaaaccacgagaac

SEQ ID NO: 3229410 - RNA, 19 nt, Artificial Sequence
  Description of Artificial Sequence: Synthetic oligonucleotide
cacgagaaccguccugggg

SEQ ID NO: 3229411 - RNA, 19 nt, Artificial Sequence
  Description of Artificial Sequence: Synthetic oligonucleotide
uggggucugaaaccucaca

SEQ ID NO: 3229412 - RNA, 19 nt, Artificial Sequence
  Description of Artificial Sequence: Synthetic oligonucleotide
uccuuucauuagcuggaac

SEQ ID NO: 3229413 - RNA, 19 nt, Artificial Sequence
  Description of Artificial Sequence: Synthetic oligonucleotide
uccacccucugauuuucug

SEQ ID NO: 3229414 - RNA, 19 nt, Artificial Sequence
  Description of Artificial Sequence: Synthetic oligonucleotide
ucuucuucucuguguucca

SEQ ID NO: 3229415 - RNA, 19 nt, Artificial Sequence
  Description of Artificial Sequence: Synthetic oligonucleotide
cucagcacccugaggcucc

SEQ ID NO: 3229416 - RNA, 19 nt, Artificial Sequence
  Description of Artificial Sequence: Synthetic oligonucleotide
gggagugugccagaaagcc

SEQ ID NO: 3229417 - RNA, 19 nt, Artificial Sequence
  Description of Artificial Sequence: Synthetic oligonucleotide
aauaauguuaaauagaaag

SEQ ID NO: 3229418 - RNA, 19 nt, Artificial Sequence
  Description of Artificial Sequence: Synthetic oligonucleotide
ucagauaagaauuauauga

SEQ ID NO: 3229419 - RNA, 19 nt, Artificial Sequence
  Description of Artificial Sequence: Synthetic oligonucleotide
aaauaaaauacauggauca

SEQ ID NO: 3229420 - RNA, 19 nt, Artificial Sequence
  Description of Artificial Sequence: Synthetic oligonucleotide
aaauacauggaucagauaa

SEQ ID NO: 3229421 - RNA, 19 nt, Artificial Sequence
  Description of Artificial Sequence: Synthetic oligonucleotide
aaugcauggauauugauca

SEQ ID NO: 3229422 - RNA, 19 nt, Artificial Sequence
  Description of Artificial Sequence: Synthetic oligonucleotide
uaugaauaauguuaaauag

SEQ ID NO: 3229423 - RNA, 19 nt, Artificial Sequence
  Description of Artificial Sequence: Synthetic oligonucleotide
uuuguuuucauucagcuuc

SEQ ID NO: 3229424 - RNA, 19 nt, Artificial Sequence
  Description of Artificial Sequence: Synthetic oligonucleotide
aauguuaaauagaaagugc

SEQ ID NO: 3229425 - RNA, 19 nt, Artificial Sequence
  Description of Artificial Sequence: Synthetic oligonucleotide
acuacagaaggucagaggg

SEQ ID NO: 3229426 - RNA, 19 nt, Artificial Sequence
  Description of Artificial Sequence: Synthetic oligonucleotide
aaaguacaacuacagaagg

SEQ ID NO: 3229427 - RNA, 19 nt, Artificial Sequence
  Description of Artificial Sequence: Synthetic oligonucleotide
aaugcauuuaaccaaggga

SEQ ID NO: 3229428 - RNA, 19 nt, Artificial Sequence
  Description of Artificial Sequence: Synthetic oligonucleotide
ugaauaauguuaaauagaa

SEQ ID NO: 3229429 - RNA, 19 nt, Artificial Sequence
  Description of Artificial Sequence: Synthetic oligonucleotide
uggauauugaucaauuucc

SEQ ID NO: 3229430 - RNA, 19 nt, Artificial Sequence
  Description of Artificial Sequence: Synthetic oligonucleotide
uuacuaagggaccauauag

SEQ ID NO: 3229431 - RNA, 19 nt, Artificial Sequence
  Description of Artificial Sequence: Synthetic oligonucleotide
aauuauaugaauaauguua

SEQ ID NO: 3229432 - RNA, 19 nt, Artificial Sequence
  Description of Artificial Sequence: Synthetic oligonucleotide
ucuauaaauaaaauacaug

SEQ ID NO: 3229433 - RNA, 19 nt, Artificial Sequence
  Description of Artificial Sequence: Synthetic oligonucleotide
aguaaugagaaccaggcug

SEQ ID NO: 3229434 - RNA, 19 nt, Artificial Sequence
  Description of Artificial Sequence: Synthetic oligonucleotide
aacacugcuguucagagcu

SEQ ID NO: 3229435 - RNA, 19 nt, Artificial Sequence
  Description of Artificial Sequence: Synthetic oligonucleotide
uuuguaagauggaacaucc

SEQ ID NO: 3229436 - RNA, 19 nt, Artificial Sequence
  Description of Artificial Sequence: Synthetic oligonucleotide
uuuagacugacacucaucu

SEQ ID NO: 3229437 - RNA, 19 nt, Artificial Sequence
  Description of Artificial Sequence: Synthetic oligonucleotide
uaaauaaaauacauggauc

SEQ ID NO: 3229438 - RNA, 19 nt, Artificial Sequence
  Description of Artificial Sequence: Synthetic oligonucleotide
uuccauauggaucaaaccu

SEQ ID NO: 3229439 - RNA, 19 nt, Artificial Sequence
  Description of Artificial Sequence: Synthetic oligonucleotide
agaaaguacaacuacagaa

SEQ ID NO: 3229440 - RNA, 19 nt, Artificial Sequence
  Description of Artificial Sequence: Synthetic oligonucleotide
uaauguuaaauagaaagug

SEQ ID NO: 3229441 - RNA, 19 nt, Artificial Sequence
  Description of Artificial Sequence: Synthetic oligonucleotide
auggauauugaucaauuuc

SEQ ID NO: 3229442 - RNA, 19 nt, Artificial Sequence
  Description of Artificial Sequence: Synthetic oligonucleotide
gagaagucaaggcagaaag

SEQ ID NO: 3229443 - RNA, 19 nt, Artificial Sequence
  Description of Artificial Sequence: Synthetic oligonucleotide
auauugaucaauuucccug

SEQ ID NO: 3229444 - RNA, 19 nt, Artificial Sequence
  Description of Artificial Sequence: Synthetic oligonucleotide
agaacugugacauuuguga

SEQ ID NO: 3229445 - RNA, 19 nt, Artificial Sequence
  Description of Artificial Sequence: Synthetic oligonucleotide
augaaaaugcauuuaacca

SEQ ID NO: 3229446 - RNA, 19 nt, Artificial Sequence
  Description of Artificial Sequence: Synthetic oligonucleotide
uagacugacacucaucuug

SEQ ID NO: 3229447 - RNA, 19 nt, Artificial Sequence
  Description of Artificial Sequence: Synthetic oligonucleotide
caaaguaucaguaauuuca

SEQ ID NO: 3229448 - RNA, 19 nt, Artificial Sequence
  Description of Artificial Sequence: Synthetic oligonucleotide
uuuuccguuaauuuuguca

SEQ ID NO: 3229449 - RNA, 19 nt, Artificial Sequence
  Description of Artificial Sequence: Synthetic oligonucleotide
auauagcuaaugaaaaugc

SEQ ID NO: 3229450 - RNA, 19 nt, Artificial Sequence
  Description of Artificial Sequence: Synthetic oligonucleotide
uacaaauucugcaagugga

SEQ ID NO: 3229451 - RNA, 19 nt, Artificial Sequence
  Description of Artificial Sequence: Synthetic oligonucleotide
uuaaauagaaagugcauau

SEQ ID NO: 3229452 - RNA, 19 nt, Artificial Sequence
  Description of Artificial Sequence: Synthetic oligonucleotide
caguaaaaugcucacaagg

SEQ ID NO: 3229453 - RNA, 19 nt, Artificial Sequence
  Description of Artificial Sequence: Synthetic oligonucleotide
aagcagguuauuuuguaag

SEQ ID NO: 3229454 - RNA, 19 nt, Artificial Sequence
  Description of Artificial Sequence: Synthetic oligonucleotide
ugaaaaugcauuuaaccaa

SEQ ID NO: 3229455 - RNA, 19 nt, Artificial Sequence
  Description of Artificial Sequence: Synthetic oligonucleotide
uuauuuuguaagauggaac

SEQ ID NO: 3229456 - RNA, 19 nt, Artificial Sequence
  Description of Artificial Sequence: Synthetic oligonucleotide
aauuucagauugcaauauc

SEQ ID NO: 3229457 - RNA, 19 nt, Artificial Sequence
  Description of Artificial Sequence: Synthetic oligonucleotide
gaaaguacaacuacagaag

SEQ ID NO: 3229458 - RNA, 19 nt, Artificial Sequence
  Description of Artificial Sequence: Synthetic oligonucleotide
uuaaccaagggacugcuga

SEQ ID NO: 3229459 - RNA, 19 nt, Artificial Sequence
  Description of Artificial Sequence: Synthetic oligonucleotide
auaugaauaauguuaaaua

SEQ ID NO: 3229460 - RNA, 19 nt, Artificial Sequence
  Description of Artificial Sequence: Synthetic oligonucleotide
ugcaauaucuauaaauaaa

SEQ ID NO: 3229461 - RNA, 19 nt, Artificial Sequence
  Description of Artificial Sequence: Synthetic oligonucleotide
aguacaacuacagaagguc

SEQ ID NO: 3229462 - RNA, 19 nt, Artificial Sequence
  Description of Artificial Sequence: Synthetic oligonucleotide
uaagggaccauauagcuaa

SEQ ID NO: 3229463 - RNA, 19 nt, Artificial Sequence
  Description of Artificial Sequence: Synthetic oligonucleotide
guaggcacagccuugacag

SEQ ID NO: 3229464 - RNA, 19 nt, Artificial Sequence
  Description of Artificial Sequence: Synthetic oligonucleotide
uaagauggaacauccaugu

SEQ ID NO: 3229465 - RNA, 19 nt, Artificial Sequence
  Description of Artificial Sequence: Synthetic oligonucleotide
uaaggaaggaauucuaagu

SEQ ID NO: 3229466 - RNA, 19 nt, Artificial Sequence
  Description of Artificial Sequence: Synthetic oligonucleotide
aauaaaauacauggaucag

SEQ ID NO: 3229467 - RNA, 19 nt, Artificial Sequence
  Description of Artificial Sequence: Synthetic oligonucleotide
uauaccuugagaagucaag

SEQ ID NO: 3229468 - RNA, 19 nt, Artificial Sequence
  Description of Artificial Sequence: Synthetic oligonucleotide
aacuacagaaggucagagg

SEQ ID NO: 3229469 - RNA, 19 nt, Artificial Sequence
  Description of Artificial Sequence: Synthetic oligonucleotide
uguaagauggaacauccau

SEQ ID NO: 3229470 - RNA, 19 nt, Artificial Sequence
  Description of Artificial Sequence: Synthetic oligonucleotide
ugucacuuauucuaguuca

SEQ ID NO: 3229471 - RNA, 19 nt, Artificial Sequence
  Description of Artificial Sequence: Synthetic oligonucleotide
caccagagcaucuagacag

SEQ ID NO: 3229472 - RNA, 19 nt, Artificial Sequence
  Description of Artificial Sequence: Synthetic oligonucleotide
agguuauuuuguaagaugg

SEQ ID NO: 3229473 - RNA, 19 nt, Artificial Sequence
  Description of Artificial Sequence: Synthetic oligonucleotide
cauauagcuaaugaaaaug

SEQ ID NO: 3229474 - RNA, 19 nt, Artificial Sequence
  Description of Artificial Sequence: Synthetic oligonucleotide
ucuggagugauaacugugc

SEQ ID NO: 3229475 - RNA, 19 nt, Artificial Sequence
  Description of Artificial Sequence: Synthetic oligonucleotide
aauucugcaaguggagaac

SEQ ID NO: 3229476 - RNA, 19 nt, Artificial Sequence
  Description of Artificial Sequence: Synthetic oligonucleotide
uguaucuggagugauaacu

SEQ ID NO: 3229477 - RNA, 19 nt, Artificial Sequence
  Description of Artificial Sequence: Synthetic oligonucleotide
aaugcucacaaggaauaac

SEQ ID NO: 3229478 - RNA, 19 nt, Artificial Sequence
  Description of Artificial Sequence: Synthetic oligonucleotide
uauagcuaaugaaaaugca

SEQ ID NO: 3229479 - RNA, 19 nt, Artificial Sequence
  Description of Artificial Sequence: Synthetic oligonucleotide
aaauucugcaaguggagaa

SEQ ID NO: 3229480 - RNA, 19 nt, Artificial Sequence
  Description of Artificial Sequence: Synthetic oligonucleotide
uggauaucaaauucagagc

SEQ ID NO: 3229481 - RNA, 19 nt, Artificial Sequence
  Description of Artificial Sequence: Synthetic oligonucleotide
uuucauucagcuuccuucc

SEQ ID NO: 3229482 - RNA, 19 nt, Artificial Sequence
  Description of Artificial Sequence: Synthetic oligonucleotide
aaaguaucaguaauuucag

SEQ ID NO: 3229483 - RNA, 19 nt, Artificial Sequence
  Description of Artificial Sequence: Synthetic oligonucleotide
cuugaagcagguuauuuug

SEQ ID NO: 3229484 - RNA, 19 nt, Artificial Sequence
  Description of Artificial Sequence: Synthetic oligonucleotide
uacaacuacagaaggucag

SEQ ID NO: 3229485 - RNA, 19 nt, Artificial Sequence
  Description of Artificial Sequence: Synthetic oligonucleotide
accaagggacugcugaucc

SEQ ID NO: 3229486 - RNA, 19 nt, Artificial Sequence
  Description of Artificial Sequence: Synthetic oligonucleotide
uugacaguaaugagaacca

SEQ ID NO: 3229487 - RNA, 19 nt, Artificial Sequence
  Description of Artificial Sequence: Synthetic oligonucleotide
uacuaagggaccauauagc

SEQ ID NO: 3229488 - RNA, 19 nt, Artificial Sequence
  Description of Artificial Sequence: Synthetic oligonucleotide
uuuuacaaauucugcaagu

SEQ ID NO: 3229489 - RNA, 19 nt, Artificial Sequence
  Description of Artificial Sequence: Synthetic oligonucleotide
uaucaaauucagagcaaag

SEQ ID NO: 3229490 - RNA, 19 nt, Artificial Sequence
  Description of Artificial Sequence: Synthetic oligonucleotide
guaaggaaggaauucuaag

SEQ ID NO: 3229491 - RNA, 19 nt, Artificial Sequence
  Description of Artificial Sequence: Synthetic oligonucleotide
cuuuuacaaauucugcaag

SEQ ID NO: 3229492 - RNA, 19 nt, Artificial Sequence
  Description of Artificial Sequence: Synthetic oligonucleotide
uuuucgaagucaaagcuuu

SEQ ID NO: 3229493 - RNA, 19 nt, Artificial Sequence
  Description of Artificial Sequence: Synthetic oligonucleotide
augcucacaaggaauaacc

SEQ ID NO: 3229494 - RNA, 19 nt, Artificial Sequence
  Description of Artificial Sequence: Synthetic oligonucleotide
cauguuauaccuugagaag

SEQ ID NO: 3229495 - RNA, 19 nt, Artificial Sequence
  Description of Artificial Sequence: Synthetic oligonucleotide
acauccauguuauaccuug

SEQ ID NO: 3229496 - RNA, 19 nt, Artificial Sequence
  Description of Artificial Sequence: Synthetic oligonucleotide
acuaagggaccauauagcu

SEQ ID NO: 3229497 - RNA, 19 nt, Artificial Sequence
  Description of Artificial Sequence: Synthetic oligonucleotide
aauacauggaucagauaag

SEQ ID NO: 3229498 - RNA, 19 nt, Artificial Sequence
  Description of Artificial Sequence: Synthetic oligonucleotide
auaacacugcuguucagag

SEQ ID NO: 3229499 - RNA, 19 nt, Artificial Sequence
  Description of Artificial Sequence: Synthetic oligonucleotide
ucagauugcaauaucuaua

SEQ ID NO: 3229500 - RNA, 19 nt, Artificial Sequence
  Description of Artificial Sequence: Synthetic oligonucleotide
agcuuuuacaaauucugca

SEQ ID NO: 3229501 - RNA, 19 nt, Artificial Sequence
  Description of Artificial Sequence: Synthetic oligonucleotide
guaaugagaaccaggcugg

SEQ ID NO: 3229502 - RNA, 19 nt, Artificial Sequence
  Description of Artificial Sequence: Synthetic oligonucleotide
auucuaguucaguaaaaug

SEQ ID NO: 3229503 - RNA, 19 nt, Artificial Sequence
  Description of Artificial Sequence: Synthetic oligonucleotide
uuuccauauggaucaaacc

SEQ ID NO: 3229504 - RNA, 19 nt, Artificial Sequence
  Description of Artificial Sequence: Synthetic oligonucleotide
augagaaccaggcuggugu

SEQ ID NO: 3229505 - RNA, 19 nt, Artificial Sequence
  Description of Artificial Sequence: Synthetic oligonucleotide
aucagauaagaauuauaug

SEQ ID NO: 3229506 - RNA, 19 nt, Artificial Sequence
  Description of Artificial Sequence: Synthetic oligonucleotide
uguuaaauagaaagugcau

SEQ ID NO: 3229507 - RNA, 19 nt, Artificial Sequence
  Description of Artificial Sequence: Synthetic oligonucleotide
aauucuaagucuggauauc

SEQ ID NO: 3229508 - RNA, 19 nt, Artificial Sequence
  Description of Artificial Sequence: Synthetic oligonucleotide
acagagcuuuuacaaauuc

SEQ ID NO: 3229509 - RNA, 19 nt, Artificial Sequence
  Description of Artificial Sequence: Synthetic oligonucleotide
ugauccuaagaacugugac

SEQ ID NO: 3229510 - RNA, 19 nt, Artificial Sequence
  Description of Artificial Sequence: Synthetic oligonucleotide
gauugcaauaucuauaaau

SEQ ID NO: 3229511 - RNA, 19 nt, Artificial Sequence
  Description of Artificial Sequence: Synthetic oligonucleotide
aacugugacauuugugagu

SEQ ID NO: 3229512 - RNA, 19 nt, Artificial Sequence
  Description of Artificial Sequence: Synthetic oligonucleotide
gauaagaauuauaugaaua

SEQ ID NO: 3229513 - RNA, 19 nt, Artificial Sequence
  Description of Artificial Sequence: Synthetic oligonucleotide
aagucaaggcagaaaguac

SEQ ID NO: 3229514 - RNA, 19 nt, Artificial Sequence
  Description of Artificial Sequence: Synthetic oligonucleotide
aaguggagaacuuauucuu

SEQ ID NO: 3229515 - RNA, 19 nt, Artificial Sequence
  Description of Artificial Sequence: Synthetic oligonucleotide
uggagugauaacugugccg

SEQ ID NO: 3229516 - RNA, 19 nt, Artificial Sequence
  Description of Artificial Sequence: Synthetic oligonucleotide
uagcuaaugaaaaugcauu

SEQ ID NO: 3229517 - RNA, 19 nt, Artificial Sequence
  Description of Artificial Sequence: Synthetic oligonucleotide
auuccugucaguuagagac

SEQ ID NO: 3229518 - RNA, 19 nt, Artificial Sequence
  Description of Artificial Sequence: Synthetic oligonucleotide
uaaaggaugccaauaauag

SEQ ID NO: 3229519 - RNA, 19 nt, Artificial Sequence
  Description of Artificial Sequence: Synthetic oligonucleotide
aacauaggcuuucaaagac

SEQ ID NO: 3229520 - RNA, 19 nt, Artificial Sequence
  Description of Artificial Sequence: Synthetic oligonucleotide
aaucugguauuucugcucc

SEQ ID NO: 3229521 - RNA, 19 nt, Artificial Sequence
  Description of Artificial Sequence: Synthetic oligonucleotide
aaacauuuuaaaguguugg

SEQ ID NO: 3229522 - RNA, 19 nt, Artificial Sequence
  Description of Artificial Sequence: Synthetic oligonucleotide
aaagggaaacauuuuaaag

SEQ ID NO: 3229523 - RNA, 19 nt, Artificial Sequence
  Description of Artificial Sequence: Synthetic oligonucleotide
aagggaaacauuuuaaagu

SEQ ID NO: 3229524 - RNA, 19 nt, Artificial Sequence
  Description of Artificial Sequence: Synthetic oligonucleotide
aaaggaugccaauaauagc

SEQ ID NO: 3229525 - RNA, 19 nt, Artificial Sequence
  Description of Artificial Sequence: Synthetic oligonucleotide
agacccauaacauauacag

SEQ ID NO: 3229526 - RNA, 19 nt, Artificial Sequence
  Description of Artificial Sequence: Synthetic oligonucleotide
acaacauaggcuuucaaag

SEQ ID NO: 3229527 - RNA, 19 nt, Artificial Sequence
  Description of Artificial Sequence: Synthetic oligonucleotide
uuuguagagguagagaagg

SEQ ID NO: 3229528 - RNA, 19 nt, Artificial Sequence
  Description of Artificial Sequence: Synthetic oligonucleotide
gauauagcuuaguagauug

SEQ ID NO: 3229529 - RNA, 19 nt, Artificial Sequence
  Description of Artificial Sequence: Synthetic oligonucleotide
cauuguauauuagagaacg

SEQ ID NO: 3229530 - RNA, 19 nt, Artificial Sequence
  Description of Artificial Sequence: Synthetic oligonucleotide
ucugaggaauucuaaaggg

SEQ ID NO: 3229531 - RNA, 19 nt, Artificial Sequence
  Description of Artificial Sequence: Synthetic oligonucleotide
uucugaggaauucuaaagg

SEQ ID NO: 3229532 - RNA, 19 nt, Artificial Sequence
  Description of Artificial Sequence: Synthetic oligonucleotide
uaaaguguugguuuuguag

SEQ ID NO: 3229533 - RNA, 19 nt, Artificial Sequence
  Description of Artificial Sequence: Synthetic oligonucleotide
aaacauuugucaaaggauc

SEQ ID NO: 3229534 - RNA, 19 nt, Artificial Sequence
  Description of Artificial Sequence: Synthetic oligonucleotide
guugauauagcuuaguaga

SEQ ID NO: 3229535 - RNA, 19 nt, Artificial Sequence
  Description of Artificial Sequence: Synthetic oligonucleotide
aaaguguugguuuuguaga

SEQ ID NO: 3229536 - RNA, 19 nt, Artificial Sequence
  Description of Artificial Sequence: Synthetic oligonucleotide
auacagguacaacauaggc

SEQ ID NO: 3229537 - RNA, 19 nt, Artificial Sequence
  Description of Artificial Sequence: Synthetic oligonucleotide
uauauuagagaacguaucu

SEQ ID NO: 3229538 - RNA, 19 nt, Artificial Sequence
  Description of Artificial Sequence: Synthetic oligonucleotide
uguugauauagcuuaguag

SEQ ID NO: 3229539 - RNA, 19 nt, Artificial Sequence
  Description of Artificial Sequence: Synthetic oligonucleotide
aauaauagccuccaaugau

SEQ ID NO: 3229540 - RNA, 19 nt, Artificial Sequence
  Description of Artificial Sequence: Synthetic oligonucleotide
ugucuuuaaguacacuggg

SEQ ID NO: 3229541 - RNA, 19 nt, Artificial Sequence
  Description of Artificial Sequence: Synthetic oligonucleotide
aacauuugucaaaggaucc

SEQ ID NO: 3229542 - RNA, 19 nt, Artificial Sequence
  Description of Artificial Sequence: Synthetic oligonucleotide
uuagagacccauaacauau

SEQ ID NO: 3229543 - RNA, 19 nt, Artificial Sequence
  Description of Artificial Sequence: Synthetic oligonucleotide
uguauauuagagaacguau

SEQ ID NO: 3229544 - RNA, 19 nt, Artificial Sequence
  Description of Artificial Sequence: Synthetic oligonucleotide
ucuaugucuauguugauau

SEQ ID NO: 3229545 - RNA, 19 nt, Artificial Sequence
  Description of Artificial Sequence: Synthetic oligonucleotide
acccauaacauauacaggu

SEQ ID NO: 3229546 - RNA, 19 nt, Artificial Sequence
  Description of Artificial Sequence: Synthetic oligonucleotide
auuuucagucaguagacag

SEQ ID NO: 3229547 - RNA, 19 nt, Artificial Sequence
  Description of Artificial Sequence: Synthetic oligonucleotide
ucuuuaaguacacuggguc

SEQ ID NO: 3229548 - RNA, 19 nt, Artificial Sequence
  Description of Artificial Sequence: Synthetic oligonucleotide
agggaaacauuuuaaagug

SEQ ID NO: 3229549 - RNA, 19 nt, Artificial Sequence
  Description of Artificial Sequence: Synthetic oligonucleotide
ccuccaaugauauacaugg

SEQ ID NO: 3229550 - RNA, 19 nt, Artificial Sequence
  Description of Artificial Sequence: Synthetic oligonucleotide
uucuuugaaggccuaaggc

SEQ ID NO: 3229551 - RNA, 19 nt, Artificial Sequence
  Description of Artificial Sequence: Synthetic oligonucleotide
acguaucuuauuuucaguc

SEQ ID NO: 3229552 - RNA, 19 nt, Artificial Sequence
  Description of Artificial Sequence: Synthetic oligonucleotide
gaaaucucuuuaugcaugg

SEQ ID NO: 3229553 - RNA, 19 nt, Artificial Sequence
  Description of Artificial Sequence: Synthetic oligonucleotide
auucugaggaauucuaaag

SEQ ID NO: 3229554 - RNA, 19 nt, Artificial Sequence
  Description of Artificial Sequence: Synthetic oligonucleotide
aaucucuuuaugcauggga

SEQ ID NO: 3229555 - RNA, 19 nt, Artificial Sequence
  Description of Artificial Sequence: Synthetic oligonucleotide
aaggcauuguauauuagag

SEQ ID NO: 3229556 - RNA, 19 nt, Artificial Sequence
  Description of Artificial Sequence: Synthetic oligonucleotide
agaucugucugccucugcc

SEQ ID NO: 3229557 - RNA, 19 nt, Artificial Sequence
  Description of Artificial Sequence: Synthetic oligonucleotide
gaacguaucuuauuuucag

SEQ ID NO: 3229558 - RNA, 19 nt, Artificial Sequence
  Description of Artificial Sequence: Synthetic oligonucleotide
ucaguagacagcuucuuug

SEQ ID NO: 3229559 - RNA, 19 nt, Artificial Sequence
  Description of Artificial Sequence: Synthetic oligonucleotide
uuuucagucaguagacagc

SEQ ID NO: 3229560 - RNA, 19 nt, Artificial Sequence
  Description of Artificial Sequence: Synthetic oligonucleotide
uaugcaugggauucaaggc

SEQ ID NO: 3229561 - RNA, 19 nt, Artificial Sequence
  Description of Artificial Sequence: Synthetic oligonucleotide
uuuuguagagguagagaag

SEQ ID NO: 3229562 - RNA, 19 nt, Artificial Sequence
  Description of Artificial Sequence: Synthetic oligonucleotide
ugaggaauucuaaagggaa

SEQ ID NO: 3229563 - RNA, 19 nt, Artificial Sequence
  Description of Artificial Sequence: Synthetic oligonucleotide
ugauaaaggaugccaauaa

SEQ ID NO: 3229564 - RNA, 19 nt, Artificial Sequence
  Description of Artificial Sequence: Synthetic oligonucleotide
cugucuuuaaguacacugg

SEQ ID NO: 3229565 - RNA, 19 nt, Artificial Sequence
  Description of Artificial Sequence: Synthetic oligonucleotide
uaggcuuucaaagacaggu

SEQ ID NO: 3229566 - RNA, 19 nt, Artificial Sequence
  Description of Artificial Sequence: Synthetic oligonucleotide
gaaccugcuauguagacca

SEQ ID NO: 3229567 - RNA, 19 nt, Artificial Sequence
  Description of Artificial Sequence: Synthetic oligonucleotide
accagguuggccuugaugu

SEQ ID NO: 3229568 - RNA, 19 nt, Artificial Sequence
  Description of Artificial Sequence: Synthetic oligonucleotide
guaucuuauuuucagucag

SEQ ID NO: 3229569 - RNA, 19 nt, Artificial Sequence
  Description of Artificial Sequence: Synthetic oligonucleotide
auauacagguacaacauag

SEQ ID NO: 3229570 - RNA, 19 nt, Artificial Sequence
  Description of Artificial Sequence: Synthetic oligonucleotide
auaugugaaccucugauaa

SEQ ID NO: 3229571 - RNA, 19 nt, Artificial Sequence
  Description of Artificial Sequence: Synthetic oligonucleotide
aaggaucccauaugugaac

SEQ ID NO: 3229572 - RNA, 19 nt, Artificial Sequence
  Description of Artificial Sequence: Synthetic oligonucleotide
uauuagagaacguaucuua

SEQ ID NO: 3229573 - RNA, 19 nt, Artificial Sequence
  Description of Artificial Sequence: Synthetic oligonucleotide
uacagguacaacauaggcu

SEQ ID NO: 3229574 - RNA, 19 nt, Artificial Sequence
  Description of Artificial Sequence: Synthetic oligonucleotide
ugggaaaucucuuuaugca

SEQ ID NO: 3229575 - RNA, 19 nt, Artificial Sequence
  Description of Artificial Sequence: Synthetic oligonucleotide
cuuugaaggccuaaggcug

SEQ ID NO: 3229576 - RNA, 19 nt, Artificial Sequence
  Description of Artificial Sequence: Synthetic oligonucleotide
aggaauucuaaagggaaac

SEQ ID NO: 3229577 - RNA, 19 nt, Artificial Sequence
  Description of Artificial Sequence: Synthetic oligonucleotide
acagguucucacuguagcc

SEQ ID NO: 3229578 - RNA, 19 nt, Artificial Sequence
  Description of Artificial Sequence: Synthetic oligonucleotide
cucacuguagccauggcug

SEQ ID NO: 3229579 - RNA, 19 nt, Artificial Sequence
  Description of Artificial Sequence: Synthetic oligonucleotide
guugguuuuguagagguag

SEQ ID NO: 3229580 - RNA, 19 nt, Artificial Sequence
  Description of Artificial Sequence: Synthetic oligonucleotide
guuuuguagagguagagaa

SEQ ID NO: 3229581 - RNA, 19 nt, Artificial Sequence
  Description of Artificial Sequence: Synthetic oligonucleotide
ucagucaguagacagcuuc

SEQ ID NO: 3229582 - RNA, 19 nt, Artificial Sequence
  Description of Artificial Sequence: Synthetic oligonucleotide
cugggaaaucucuuuaugc

SEQ ID NO: 3229583 - RNA, 19 nt, Artificial Sequence
  Description of Artificial Sequence: Synthetic oligonucleotide
uaaagggaaacauuuuaaa

SEQ ID NO: 3229584 - RNA, 19 nt, Artificial Sequence
  Description of Artificial Sequence: Synthetic oligonucleotide
ccaaugauauacauggugg

SEQ ID NO: 3229585 - RNA, 19 nt, Artificial Sequence
  Description of Artificial Sequence: Synthetic oligonucleotide
uacaacauaggcuuucaaa

SEQ ID NO: 3229586 - RNA, 19 nt, Artificial Sequence
  Description of Artificial Sequence: Synthetic oligonucleotide
aaugauauacaugguggcu

SEQ ID NO: 3229587 - RNA, 19 nt, Artificial Sequence
  Description of Artificial Sequence: Synthetic oligonucleotide
uagagaacguaucuuauuu

SEQ ID NO: 3229588 - RNA, 19 nt, Artificial Sequence
  Description of Artificial Sequence: Synthetic oligonucleotide
ugugaaccucugauaaagg

SEQ ID NO: 3229589 - RNA, 19 nt, Artificial Sequence
  Description of Artificial Sequence: Synthetic oligonucleotide
caaugauauacaugguggc

SEQ ID NO: 3229590 - RNA, 19 nt, Artificial Sequence
  Description of Artificial Sequence: Synthetic oligonucleotide
cauuucaaauuccugucag

SEQ ID NO: 3229591 - RNA, 19 nt, Artificial Sequence
  Description of Artificial Sequence: Synthetic oligonucleotide
ucugguauaaucugguauu

SEQ ID NO: 3229592 - RNA, 19 nt, Artificial Sequence
  Description of Artificial Sequence: Synthetic oligonucleotide
ucugggaaaucucuuuaug

SEQ ID NO: 3229593 - RNA, 19 nt, Artificial Sequence
  Description of Artificial Sequence: Synthetic oligonucleotide
gaaccucugauaaaggaug

SEQ ID NO: 3229594 - RNA, 19 nt, Artificial Sequence
  Description of Artificial Sequence: Synthetic oligonucleotide
aguacacugggucuauguc

SEQ ID NO: 3229595 - RNA, 19 nt, Artificial Sequence
  Description of Artificial Sequence: Synthetic oligonucleotide
uacauuucaaauuccuguc

SEQ ID NO: 3229596 - RNA, 19 nt, Artificial Sequence
  Description of Artificial Sequence: Synthetic oligonucleotide
ugaaccucugauaaaggau

SEQ ID NO: 3229597 - RNA, 19 nt, Artificial Sequence
  Description of Artificial Sequence: Synthetic oligonucleotide
uucaaagacagguucucac

SEQ ID NO: 3229598 - RNA, 19 nt, Artificial Sequence
  Description of Artificial Sequence: Synthetic oligonucleotide
aaauuccugucaguuagag

SEQ ID NO: 3229599 - RNA, 19 nt, Artificial Sequence
  Description of Artificial Sequence: Synthetic oligonucleotide
uagagguagagaagguucc

SEQ ID NO: 3229600 - RNA, 19 nt, Artificial Sequence
  Description of Artificial Sequence: Synthetic oligonucleotide
acauuugucaaaggauccc

SEQ ID NO: 3229601 - RNA, 19 nt, Artificial Sequence
  Description of Artificial Sequence: Synthetic oligonucleotide
aacguaucuuauuuucagu

SEQ ID NO: 3229602 - RNA, 19 nt, Artificial Sequence
  Description of Artificial Sequence: Synthetic oligonucleotide
uugucaaaggaucccauau

SEQ ID NO: 3229603 - RNA, 19 nt, Artificial Sequence
  Description of Artificial Sequence: Synthetic oligonucleotide
guagacagcuucuuugaag

SEQ ID NO: 3229604 - RNA, 19 nt, Artificial Sequence
  Description of Artificial Sequence: Synthetic oligonucleotide
uauacaugguggcugugga

SEQ ID NO: 3229605 - RNA, 19 nt, Artificial Sequence
  Description of Artificial Sequence: Synthetic oligonucleotide
aaguacacugggucuaugu

SEQ ID NO: 3229606 - RNA, 19 nt, Artificial Sequence
  Description of Artificial Sequence: Synthetic oligonucleotide
aaagacagguucucacugu

SEQ ID NO: 3229607 - RNA, 19 nt, Artificial Sequence
  Description of Artificial Sequence: Synthetic oligonucleotide
cuucuuugaaggccuaagg

SEQ ID NO: 3229608 - RNA, 19 nt, Artificial Sequence
  Description of Artificial Sequence: Synthetic oligonucleotide
caaaggaucccauauguga

SEQ ID NO: 3229609 - RNA, 19 nt, Artificial Sequence
  Description of Artificial Sequence: Synthetic oligonucleotide
augugaaccucugauaaag

SEQ ID NO: 3229610 - RNA, 19 nt, Artificial Sequence
  Description of Artificial Sequence: Synthetic oligonucleotide
aaggcugucuuuaaguaca

SEQ ID NO: 3229611 - RNA, 19 nt, Artificial Sequence
  Description of Artificial Sequence: Synthetic oligonucleotide
aaccucugauaaaggaugc

SEQ ID NO: 3229612 - RNA, 19 nt, Artificial Sequence
  Description of Artificial Sequence: Synthetic oligonucleotide
ucaaaggaucccauaugug

SEQ ID NO: 3229613 - RNA, 19 nt, Artificial Sequence
  Description of Artificial Sequence: Synthetic oligonucleotide
agaaccugcuauguagacc

SEQ ID NO: 3229614 - RNA, 19 nt, Artificial Sequence
  Description of Artificial Sequence: Synthetic oligonucleotide
uacaugguggcuguggacc

SEQ ID NO: 3229615 - RNA, 19 nt, Artificial Sequence
  Description of Artificial Sequence: Synthetic oligonucleotide
uuucagucaguagacagcu

SEQ ID NO: 3229616 - RNA, 19 nt, Artificial Sequence
  Description of Artificial Sequence: Synthetic oligonucleotide
auaaucugguauuucugcu

SEQ ID NO: 3229617 - RNA, 19 nt, Artificial Sequence
  Description of Artificial Sequence: Synthetic oligonucleotide
uauaauaaaaugauuaaug

SEQ ID NO: 3229618 - RNA, 19 nt, Artificial Sequence
  Description of Artificial Sequence: Synthetic oligonucleotide
aauaggaugauuaaggcac

SEQ ID NO: 3229619 - RNA, 19 nt, Artificial Sequence
  Description of Artificial Sequence: Synthetic oligonucleotide
agaaggaucacauaugggc

SEQ ID NO: 3229620 - RNA, 19 nt, Artificial Sequence
  Description of Artificial Sequence: Synthetic oligonucleotide
uucaauaggaugauuaagg

SEQ ID NO: 3229621 - RNA, 19 nt, Artificial Sequence
  Description of Artificial Sequence: Synthetic oligonucleotide
aaugcuaaugauuuaauau

SEQ ID NO: 3229622 - RNA, 19 nt, Artificial Sequence
  Description of Artificial Sequence: Synthetic oligonucleotide
uaaugauuuaauauaaaga

SEQ ID NO: 3229623 - RNA, 19 nt, Artificial Sequence
  Description of Artificial Sequence: Synthetic oligonucleotide
auaaagauagugcaaggac

SEQ ID NO: 3229624 - RNA, 19 nt, Artificial Sequence
  Description of Artificial Sequence: Synthetic oligonucleotide
uuaaggcacaucuuaaugg

SEQ ID NO: 3229625 - RNA, 19 nt, Artificial Sequence
  Description of Artificial Sequence: Synthetic oligonucleotide
aaagagugcauuuagguaa

SEQ ID NO: 3229626 - RNA, 19 nt, Artificial Sequence
  Description of Artificial Sequence: Synthetic oligonucleotide
acauacaaaauaaagauag

SEQ ID NO: 3229627 - RNA, 19 nt, Artificial Sequence
  Description of Artificial Sequence: Synthetic oligonucleotide
uugacauacaaaauaaaga

SEQ ID NO: 3229628 - RNA, 19 nt, Artificial Sequence
  Description of Artificial Sequence: Synthetic oligonucleotide
uauuuuaggaucaauuggu

SEQ ID NO: 3229629 - RNA, 19 nt, Artificial Sequence
  Description of Artificial Sequence: Synthetic oligonucleotide
aaauaaagauagugcaagg

SEQ ID NO: 3229630 - RNA, 19 nt, Artificial Sequence
  Description of Artificial Sequence: Synthetic oligonucleotide
gaagaaggaucacauaugg

SEQ ID NO: 3229631 - RNA, 19 nt, Artificial Sequence
  Description of Artificial Sequence: Synthetic oligonucleotide
acagucuucaaauaaacug

SEQ ID NO: 3229632 - RNA, 19 nt, Artificial Sequence
  Description of Artificial Sequence: Synthetic oligonucleotide
uuuugaaauguacucaaug

SEQ ID NO: 3229633 - RNA, 19 nt, Artificial Sequence
  Description of Artificial Sequence: Synthetic oligonucleotide
ugacauacaaaauaaagau

SEQ ID NO: 3229634 - RNA, 19 nt, Artificial Sequence
  Description of Artificial Sequence: Synthetic oligonucleotide
uauacaaucacugacugcu

SEQ ID NO: 3229635 - RNA, 19 nt, Artificial Sequence
  Description of Artificial Sequence: Synthetic oligonucleotide
ucauccauagaccagucag

SEQ ID NO: 3229636 - RNA, 19 nt, Artificial Sequence
  Description of Artificial Sequence: Synthetic oligonucleotide
augguauacaaucacugac

SEQ ID NO: 3229637 - RNA, 19 nt, Artificial Sequence
  Description of Artificial Sequence: Synthetic oligonucleotide
ugauuaaugcuaaugauuu

SEQ ID NO: 3229638 - RNA, 19 nt, Artificial Sequence
  Description of Artificial Sequence: Synthetic oligonucleotide
ucuuaauggggcucaaugg

SEQ ID NO: 3229639 - RNA, 19 nt, Artificial Sequence
  Description of Artificial Sequence: Synthetic oligonucleotide
aucagugugggacuggccc

SEQ ID NO: 3229640 - RNA, 19 nt, Artificial Sequence
  Description of Artificial Sequence: Synthetic oligonucleotide
ucuucagauuuuaugcugg

SEQ ID NO: 3229641 - RNA, 19 nt, Artificial Sequence
  Description of Artificial Sequence: Synthetic oligonucleotide
gauuccauucaauaggaug

SEQ ID NO: 3229642 - RNA, 19 nt, Artificial Sequence
  Description of Artificial Sequence: Synthetic oligonucleotide
uuagguaauuuucugcuug

SEQ ID NO: 3229643 - RNA, 19 nt, Artificial Sequence
  Description of Artificial Sequence: Synthetic oligonucleotide
aaugauuaaugcuaaugau

SEQ ID NO: 3229644 - RNA, 19 nt, Artificial Sequence
  Description of Artificial Sequence: Synthetic oligonucleotide
guuagauuccauucaauag

SEQ ID NO: 3229645 - RNA, 19 nt, Artificial Sequence
  Description of Artificial Sequence: Synthetic oligonucleotide
uaaagauagugcaaggacu

SEQ ID NO: 3229646 - RNA, 19 nt, Artificial Sequence
  Description of Artificial Sequence: Synthetic oligonucleotide
ugagauuuugguuaugaac

SEQ ID NO: 3229647 - RNA, 19 nt, Artificial Sequence
  Description of Artificial Sequence: Synthetic oligonucleotide
auugacauacaaaauaaag

SEQ ID NO: 3229648 - RNA, 19 nt, Artificial Sequence
  Description of Artificial Sequence: Synthetic oligonucleotide
gaacuguacagcuugcuag

SEQ ID NO: 3229649 - RNA, 19 nt, Artificial Sequence
  Description of Artificial Sequence: Synthetic oligonucleotide
uguagagagaucuaacacu

SEQ ID NO: 3229650 - RNA, 19 nt, Artificial Sequence
  Description of Artificial Sequence: Synthetic oligonucleotide
cuuaauggggcucaauggg

SEQ ID NO: 3229651 - RNA, 19 nt, Artificial Sequence
  Description of Artificial Sequence: Synthetic oligonucleotide
ucaaaaccuacacagugca

SEQ ID NO: 3229652 - RNA, 19 nt, Artificial Sequence
  Description of Artificial Sequence: Synthetic oligonucleotide
auacaaaauaaagauagug

SEQ ID NO: 3229653 - RNA, 19 nt, Artificial Sequence
  Description of Artificial Sequence: Synthetic oligonucleotide
ucaauaggaugauuaaggc

SEQ ID NO: 3229654 - RNA, 19 nt, Artificial Sequence
  Description of Artificial Sequence: Synthetic oligonucleotide
acuagaaauauuuuaggau

SEQ ID NO: 3229655 - RNA, 19 nt, Artificial Sequence
  Description of Artificial Sequence: Synthetic oligonucleotide
aauaaagauagugcaagga

SEQ ID NO: 3229656 - RNA, 19 nt, Artificial Sequence
  Description of Artificial Sequence: Synthetic oligonucleotide
uaagggaauguuaggauca

SEQ ID NO: 3229657 - RNA, 19 nt, Artificial Sequence
  Description of Artificial Sequence: Synthetic oligonucleotide
auuaaggcacaucuuaaug

SEQ ID NO: 3229658 - RNA, 19 nt, Artificial Sequence
  Description of Artificial Sequence: Synthetic oligonucleotide
acugugaagaaucaagaga

SEQ ID NO: 3229659 - RNA, 19 nt, Artificial Sequence
  Description of Artificial Sequence: Synthetic oligonucleotide
uacucaauggcaaacugac

SEQ ID NO: 3229660 - RNA, 19 nt, Artificial Sequence
  Description of Artificial Sequence: Synthetic oligonucleotide
uucgaaagagugcauuuag

SEQ ID NO: 3229661 - RNA, 19 nt, Artificial Sequence
  Description of Artificial Sequence: Synthetic oligonucleotide
uuuaggaucaauugguuuu

SEQ ID NO: 3229662 - RNA, 19 nt, Artificial Sequence
  Description of Artificial Sequence: Synthetic oligonucleotide
uugcguucgagucacagug

SEQ ID NO: 3229663 - RNA, 19 nt, Artificial Sequence
  Description of Artificial Sequence: Synthetic oligonucleotide
ucuguagguuacaaaauga

SEQ ID NO: 3229664 - RNA, 19 nt, Artificial Sequence
  Description of Artificial Sequence: Synthetic oligonucleotide
ucaaucuuaucaguguggg

SEQ ID NO: 3229665 - RNA, 19 nt, Artificial Sequence
  Description of Artificial Sequence: Synthetic oligonucleotide
ucagauuuuaugcugguuu

SEQ ID NO: 3229666 - RNA, 19 nt, Artificial Sequence
  Description of Artificial Sequence: Synthetic oligonucleotide
uguagguuacaaaaugaac

SEQ ID NO: 3229667 - RNA, 19 nt, Artificial Sequence
  Description of Artificial Sequence: Synthetic oligonucleotide
aaauacucucaaaaccuac

SEQ ID NO: 3229668 - RNA, 19 nt, Artificial Sequence
  Description of Artificial Sequence: Synthetic oligonucleotide
agagaucuaacacuccauc

SEQ ID NO: 3229669 - RNA, 19 nt, Artificial Sequence
  Description of Artificial Sequence: Synthetic oligonucleotide
gaaggaucacauaugggcg

SEQ ID NO: 3229670 - RNA, 19 nt, Artificial Sequence
  Description of Artificial Sequence: Synthetic oligonucleotide
gugaagaaucaagagaugg

SEQ ID NO: 3229671 - RNA, 19 nt, Artificial Sequence
  Description of Artificial Sequence: Synthetic oligonucleotide
ugcuaaugauuuaauauaa

SEQ ID NO: 3229672 - RNA, 19 nt, Artificial Sequence
  Description of Artificial Sequence: Synthetic oligonucleotide
acugaggucucuucguagc

SEQ ID NO: 3229673 - RNA, 19 nt, Artificial Sequence
  Description of Artificial Sequence: Synthetic oligonucleotide
aaauauuuuaggaucaauu

SEQ ID NO: 3229674 - RNA, 19 nt, Artificial Sequence
  Description of Artificial Sequence: Synthetic oligonucleotide
ugcauuuagguaauuuucu

SEQ ID NO: 3229675 - RNA, 19 nt, Artificial Sequence
  Description of Artificial Sequence: Synthetic oligonucleotide
uguacagcuugcuagagau

SEQ ID NO: 3229676 - RNA, 19 nt, Artificial Sequence
  Description of Artificial Sequence: Synthetic oligonucleotide
guagguuacaaaaugaaca

SEQ ID NO: 3229677 - RNA, 19 nt, Artificial Sequence
  Description of Artificial Sequence: Synthetic oligonucleotide
aauuccugagcaacuaagg

SEQ ID NO: 3229678 - RNA, 19 nt, Artificial Sequence
  Description of Artificial Sequence: Synthetic oligonucleotide
gaugauagcuccucuguug

SEQ ID NO: 3229679 - RNA, 19 nt, Artificial Sequence
  Description of Artificial Sequence: Synthetic oligonucleotide
gacuagaaauauuuuagga

SEQ ID NO: 3229680 - RNA, 19 nt, Artificial Sequence
  Description of Artificial Sequence: Synthetic oligonucleotide
aucuuaauggggcucaaug

SEQ ID NO: 3229681 - RNA, 19 nt, Artificial Sequence
  Description of Artificial Sequence: Synthetic oligonucleotide
guagccgugguccauaaag

SEQ ID NO: 3229682 - RNA, 19 nt, Artificial Sequence
  Description of Artificial Sequence: Synthetic oligonucleotide
uuucauuuguaguacucca

SEQ ID NO: 3229683 - RNA, 19 nt, Artificial Sequence
  Description of Artificial Sequence: Synthetic oligonucleotide
agaccagucagucagcucu

SEQ ID NO: 3229684 - RNA, 19 nt, Artificial Sequence
  Description of Artificial Sequence: Synthetic oligonucleotide
uacacagugcaugaggcgg

SEQ ID NO: 3229685 - RNA, 19 nt, Artificial Sequence
  Description of Artificial Sequence: Synthetic oligonucleotide
aucagacaaauccacuuuc

SEQ ID NO: 3229686 - RNA, 19 nt, Artificial Sequence
  Description of Artificial Sequence: Synthetic oligonucleotide
uacagcuugcuagagaugc

SEQ ID NO: 3229687 - RNA, 19 nt, Artificial Sequence
  Description of Artificial Sequence: Synthetic oligonucleotide
uagauuccauucaauagga

SEQ ID NO: 3229688 - RNA, 19 nt, Artificial Sequence
  Description of Artificial Sequence: Synthetic oligonucleotide
ugguauacaaucacugacu

SEQ ID NO: 3229689 - RNA, 19 nt, Artificial Sequence
  Description of Artificial Sequence: Synthetic oligonucleotide
augauagcuccucuguugg

SEQ ID NO: 3229690 - RNA, 19 nt, Artificial Sequence
  Description of Artificial Sequence: Synthetic oligonucleotide
uucauuuguaguacuccag

SEQ ID NO: 3229691 - RNA, 19 nt, Artificial Sequence
  Description of Artificial Sequence: Synthetic oligonucleotide
uguuagauuccauucaaua

SEQ ID NO: 3229692 - RNA, 19 nt, Artificial Sequence
  Description of Artificial Sequence: Synthetic oligonucleotide
ucgaaagagugcauuuagg

SEQ ID NO: 3229693 - RNA, 19 nt, Artificial Sequence
  Description of Artificial Sequence: Synthetic oligonucleotide
uuaauggggcucaaugggc

SEQ ID NO: 3229694 - RNA, 19 nt, Artificial Sequence
  Description of Artificial Sequence: Synthetic oligonucleotide
uccugagcaacuaagggaa

SEQ ID NO: 3229695 - RNA, 19 nt, Artificial Sequence
  Description of Artificial Sequence: Synthetic oligonucleotide
ucaaugggcagcuugcugu

SEQ ID NO: 3229696 - RNA, 19 nt, Artificial Sequence
  Description of Artificial Sequence: Synthetic oligonucleotide
uaguacuccagcaacugca

SEQ ID NO: 3229697 - RNA, 19 nt, Artificial Sequence
  Description of Artificial Sequence: Synthetic oligonucleotide
acagugaggucuaaggggc

SEQ ID NO: 3229698 - RNA, 19 nt, Artificial Sequence
  Description of Artificial Sequence: Synthetic oligonucleotide
aggacuagaaauauuuuag

SEQ ID NO: 3229699 - RNA, 19 nt, Artificial Sequence
  Description of Artificial Sequence: Synthetic oligonucleotide
agcaacugcauuuucagaa

SEQ ID NO: 3229700 - RNA, 19 nt, Artificial Sequence
  Description of Artificial Sequence: Synthetic oligonucleotide
gacugugaagaaucaagag

SEQ ID NO: 3229701 - RNA, 19 nt, Artificial Sequence
  Description of Artificial Sequence: Synthetic oligonucleotide
uuucuugaauuuuaccacu

SEQ ID NO: 3229702 - RNA, 19 nt, Artificial Sequence
  Description of Artificial Sequence: Synthetic oligonucleotide
auuccauucaauaggauga

SEQ ID NO: 3229703 - RNA, 19 nt, Artificial Sequence
  Description of Artificial Sequence: Synthetic oligonucleotide
ucauccugaaggcaguucu

SEQ ID NO: 3229704 - RNA, 19 nt, Artificial Sequence
  Description of Artificial Sequence: Synthetic oligonucleotide
uucucaucaguuuucauuu

SEQ ID NO: 3229705 - RNA, 19 nt, Artificial Sequence
  Description of Artificial Sequence: Synthetic oligonucleotide
uagguuacaaaaugaacau

SEQ ID NO: 3229706 - RNA, 19 nt, Artificial Sequence
  Description of Artificial Sequence: Synthetic oligonucleotide
uagguaauuuucugcuugg

SEQ ID NO: 3229707 - RNA, 19 nt, Artificial Sequence
  Description of Artificial Sequence: Synthetic oligonucleotide
aagcccuucuaaaauacuc

SEQ ID NO: 3229708 - RNA, 19 nt, Artificial Sequence
  Description of Artificial Sequence: Synthetic oligonucleotide
uuccugagcaacuaaggga

SEQ ID NO: 3229709 - RNA, 19 nt, Artificial Sequence
  Description of Artificial Sequence: Synthetic oligonucleotide
agaucacaggacuagaaau

SEQ ID NO: 3229710 - RNA, 19 nt, Artificial Sequence
  Description of Artificial Sequence: Synthetic oligonucleotide
gauagcuccucuguuggcg

SEQ ID NO: 3229711 - RNA, 19 nt, Artificial Sequence
  Description of Artificial Sequence: Synthetic oligonucleotide
agagagaucuaacacucca

SEQ ID NO: 3229712 - RNA, 19 nt, Artificial Sequence
  Description of Artificial Sequence: Synthetic oligonucleotide
augauuaaggcacaucuua

SEQ ID NO: 3229713 - RNA, 19 nt, Artificial Sequence
  Description of Artificial Sequence: Synthetic oligonucleotide
agccgugguccauaaagcc

SEQ ID NO: 3229714 - RNA, 19 nt, Artificial Sequence
  Description of Artificial Sequence: Synthetic oligonucleotide
augcuaaugauuuaauaua

SEQ ID NO: 3229715 - RNA, 19 nt, Artificial Sequence
  Description of Artificial Sequence: Synthetic oligonucleotide
uucugcuuggcauucaauc

SEQ ID NO: 3229716 - RNA, 19 nt, Artificial Sequence
  Description of Artificial Sequence: Synthetic oligonucleotide
auuuucagaagaaggauca

SEQ ID NO: 3229717 - RNA, 19 nt, Artificial Sequence
  Description of Artificial Sequence: Synthetic oligonucleotide
aauaaaauuaauuaaucac

SEQ ID NO: 3229718 - RNA, 19 nt, Artificial Sequence
  Description of Artificial Sequence: Synthetic oligonucleotide
auuguaacaagccuuacgc

SEQ ID NO: 3229719 - RNA, 19 nt, Artificial Sequence
  Description of Artificial Sequence: Synthetic oligonucleotide
aguguuuacauacauaagg

SEQ ID NO: 3229720 - RNA, 19 nt, Artificial Sequence
  Description of Artificial Sequence: Synthetic oligonucleotide
auguggaacaccuaaaugc

SEQ ID NO: 3229721 - RNA, 19 nt, Artificial Sequence
  Description of Artificial Sequence: Synthetic oligonucleotide
aauucuuucaugcuucacg

SEQ ID NO: 3229722 - RNA, 19 nt, Artificial Sequence
  Description of Artificial Sequence: Synthetic oligonucleotide
ugugaauucguucaugacg

SEQ ID NO: 3229723 - RNA, 19 nt, Artificial Sequence
  Description of Artificial Sequence: Synthetic oligonucleotide
uaauuaaucacgcaaguug

SEQ ID NO: 3229724 - RNA, 19 nt, Artificial Sequence
  Description of Artificial Sequence: Synthetic oligonucleotide
auacauaaggcuuuucucc

SEQ ID NO: 3229725 - RNA, 19 nt, Artificial Sequence
  Description of Artificial Sequence: Synthetic oligonucleotide
uaaaauuaauuaaucacgc

SEQ ID NO: 3229726 - RNA, 19 nt, Artificial Sequence
  Description of Artificial Sequence: Synthetic oligonucleotide
cuuucaugcauauaaaggg

SEQ ID NO: 3229727 - RNA, 19 nt, Artificial Sequence
  Description of Artificial Sequence: Synthetic oligonucleotide
ucuuucaugcauauaaagg

SEQ ID NO: 3229728 - RNA, 19 nt, Artificial Sequence
  Description of Artificial Sequence: Synthetic oligonucleotide
auaaaauuaauuaaucacg

SEQ ID NO: 3229729 - RNA, 19 nt, Artificial Sequence
  Description of Artificial Sequence: Synthetic oligonucleotide
auauauaagguuucucucc

SEQ ID NO: 3229730 - RNA, 19 nt, Artificial Sequence
  Description of Artificial Sequence: Synthetic oligonucleotide
aaauuaauuaaucacgcaa

SEQ ID NO: 3229731 - RNA, 19 nt, Artificial Sequence
  Description of Artificial Sequence: Synthetic oligonucleotide
aaggccaucagauauacug

SEQ ID NO: 3229732 - RNA, 19 nt, Artificial Sequence
  Description of Artificial Sequence: Synthetic oligonucleotide
uaauaaaauuaauuaauca

SEQ ID NO: 3229733 - RNA, 19 nt, Artificial Sequence
  Description of Artificial Sequence: Synthetic oligonucleotide
aacaccuaaaugcuuuccc

SEQ ID NO: 3229734 - RNA, 19 nt, Artificial Sequence
  Description of Artificial Sequence: Synthetic oligonucleotide
augugggacacauaaaagc

SEQ ID NO: 3229735 - RNA, 19 nt, Artificial Sequence
  Description of Artificial Sequence: Synthetic oligonucleotide
aaucacugaaggcuuuucc

SEQ ID NO: 3229736 - RNA, 19 nt, Artificial Sequence
  Description of Artificial Sequence: Synthetic oligonucleotide
ucaauggcugauaagauga

SEQ ID NO: 3229737 - RNA, 19 nt, Artificial Sequence
  Description of Artificial Sequence: Synthetic oligonucleotide
aauuaauuaaucacgcaag

SEQ ID NO: 3229738 - RNA, 19 nt, Artificial Sequence
  Description of Artificial Sequence: Synthetic oligonucleotide
acauggauaagguuucucc

SEQ ID NO: 3229739 - RNA, 19 nt, Artificial Sequence
  Description of Artificial Sequence: Synthetic oligonucleotide
aaacacuucaguucuuuuc

SEQ ID NO: 3229740 - RNA, 19 nt, Artificial Sequence
  Description of Artificial Sequence: Synthetic oligonucleotide
aaguuguccacagacaagg

SEQ ID NO: 3229741 - RNA, 19 nt, Artificial Sequence
  Description of Artificial Sequence: Synthetic oligonucleotide
cuaauaaaauuaauuaauc

SEQ ID NO: 3229742 - RNA, 19 nt, Artificial Sequence
  Description of Artificial Sequence: Synthetic oligonucleotide
acauauauaagguuucucu

SEQ ID NO: 3229743 - RNA, 19 nt, Artificial Sequence
  Description of Artificial Sequence: Synthetic oligonucleotide
uguuuuggcucuuucaugc

SEQ ID NO: 3229744 - RNA, 19 nt, Artificial Sequence
  Description of Artificial Sequence: Synthetic oligonucleotide
uuuuacauguguaagguuu

SEQ ID NO: 3229745 - RNA, 19 nt, Artificial Sequence
  Description of Artificial Sequence: Synthetic oligonucleotide
uguaacaagccuuacgcug

SEQ ID NO: 3229746 - RNA, 19 nt, Artificial Sequence
  Description of Artificial Sequence: Synthetic oligonucleotide
aacacuucaguucuuuucu

SEQ ID NO: 3229747 - RNA, 19 nt, Artificial Sequence
  Description of Artificial Sequence: Synthetic oligonucleotide
aaaauuaauuaaucacgca

SEQ ID NO: 3229748 - RNA, 19 nt, Artificial Sequence
  Description of Artificial Sequence: Synthetic oligonucleotide
gauuguaacaagccuuacg

SEQ ID NO: 3229749 - RNA, 19 nt, Artificial Sequence
  Description of Artificial Sequence: Synthetic oligonucleotide
auauaaagggaugugggac

SEQ ID NO: 3229750 - RNA, 19 nt, Artificial Sequence
  Description of Artificial Sequence: Synthetic oligonucleotide
acaguguuuacauacauaa

SEQ ID NO: 3229751 - RNA, 19 nt, Artificial Sequence
  Description of Artificial Sequence: Synthetic oligonucleotide
auggauaagguuucucccc

SEQ ID NO: 3229752 - RNA, 19 nt, Artificial Sequence
  Description of Artificial Sequence: Synthetic oligonucleotide
auguguaagguuucucucc

SEQ ID NO: 3229753 - RNA, 19 nt, Artificial Sequence
  Description of Artificial Sequence: Synthetic oligonucleotide
aguucuuuucuguuuuggc

SEQ ID NO: 3229754 - RNA, 19 nt, Artificial Sequence
  Description of Artificial Sequence: Synthetic oligonucleotide
ugcuucacgagauagcugc

SEQ ID NO: 3229755 - RNA, 19 nt, Artificial Sequence
  Description of Artificial Sequence: Synthetic oligonucleotide
uaagguuucucuccaauga

SEQ ID NO: 3229756 - RNA, 19 nt, Artificial Sequence
  Description of Artificial Sequence: Synthetic oligonucleotide
uauauaagguuucucucca

SEQ ID NO: 3229757 - RNA, 19 nt, Artificial Sequence
  Description of Artificial Sequence: Synthetic oligonucleotide
aaugcuuucccacaguguu

SEQ ID NO: 3229758 - RNA, 19 nt, Artificial Sequence
  Description of Artificial Sequence: Synthetic oligonucleotide
ugugggacacauaaaagcu

SEQ ID NO: 3229759 - RNA, 19 nt, Artificial Sequence
  Description of Artificial Sequence: Synthetic oligonucleotide
uucucaauggcugauaaga

SEQ ID NO: 3229760 - RNA, 19 nt, Artificial Sequence
  Description of Artificial Sequence: Synthetic oligonucleotide
ugcauauaaagggaugugg

SEQ ID NO: 3229761 - RNA, 19 nt, Artificial Sequence
  Description of Artificial Sequence: Synthetic oligonucleotide
ucuccaaugaauucuuuca

SEQ ID NO: 3229762 - RNA, 19 nt, Artificial Sequence
  Description of Artificial Sequence: Synthetic oligonucleotide
ucuuucaugcuucacgaga

SEQ ID NO: 3229763 - RNA, 19 nt, Artificial Sequence
  Description of Artificial Sequence: Synthetic oligonucleotide
uuucaugcauauaaaggga

SEQ ID NO: 3229764 - RNA, 19 nt, Artificial Sequence
  Description of Artificial Sequence: Synthetic oligonucleotide
gugaauucguucaugacgg

SEQ ID NO: 3229765 - RNA, 19 nt, Artificial Sequence
  Description of Artificial Sequence: Synthetic oligonucleotide
ugaaugaaagcuuucccac

SEQ ID NO: 3229766 - RNA, 19 nt, Artificial Sequence
  Description of Artificial Sequence: Synthetic oligonucleotide
aauuaaucacgcaaguugu

SEQ ID NO: 3229767 - RNA, 19 nt, Artificial Sequence
  Description of Artificial Sequence: Synthetic oligonucleotide
uauacugcuguaaacacuu

SEQ ID NO: 3229768 - RNA, 19 nt, Artificial Sequence
  Description of Artificial Sequence: Synthetic oligonucleotide
aaucacgcaaguuguccac

SEQ ID NO: 3229769 - RNA, 19 nt, Artificial Sequence
  Description of Artificial Sequence: Synthetic oligonucleotide
uuguccacagacaaggcca

SEQ ID NO: 3229770 - RNA, 19 nt, Artificial Sequence
  Description of Artificial Sequence: Synthetic oligonucleotide
auuaauuaaucacgcaagu

SEQ ID NO: 3229771 - RNA, 19 nt, Artificial Sequence
  Description of Artificial Sequence: Synthetic oligonucleotide
uuuacauacauaaggcuuu

SEQ ID NO: 3229772 - RNA, 19 nt, Artificial Sequence
  Description of Artificial Sequence: Synthetic oligonucleotide
uauguggaacaccuaaaug

SEQ ID NO: 3229773 - RNA, 19 nt, Artificial Sequence
  Description of Artificial Sequence: Synthetic oligonucleotide
gauauacugcuguaaacac

SEQ ID NO: 3229774 - RNA, 19 nt, Artificial Sequence
  Description of Artificial Sequence: Synthetic oligonucleotide
ucguucaugacgguaacgg

SEQ ID NO: 3229775 - RNA, 19 nt, Artificial Sequence
  Description of Artificial Sequence: Synthetic oligonucleotide
uguggaacaccuaaaugcu

SEQ ID NO: 3229776 - RNA, 19 nt, Artificial Sequence
  Description of Artificial Sequence: Synthetic oligonucleotide
uguuuacauacauaaggcu

SEQ ID NO: 3229777 - RNA, 19 nt, Artificial Sequence
  Description of Artificial Sequence: Synthetic oligonucleotide
acauacauaaggcuuuucu

SEQ ID NO: 3229778 - RNA, 19 nt, Artificial Sequence
  Description of Artificial Sequence: Synthetic oligonucleotide
uauaaagggaugugggaca

SEQ ID NO: 3229779 - RNA, 19 nt, Artificial Sequence
  Description of Artificial Sequence: Synthetic oligonucleotide
uggaucuucucaauggcug

SEQ ID NO: 3229780 - RNA, 19 nt, Artificial Sequence
  Description of Artificial Sequence: Synthetic oligonucleotide
ucagauauacugcuguaaa

SEQ ID NO: 3229781 - RNA, 19 nt, Artificial Sequence
  Description of Artificial Sequence: Synthetic oligonucleotide
ucaugauuguaacaagccu

SEQ ID NO: 3229782 - RNA, 19 nt, Artificial Sequence
  Description of Artificial Sequence: Synthetic oligonucleotide
uuuuacauacauacgguuu

SEQ ID NO: 3229783 - RNA, 19 nt, Artificial Sequence
  Description of Artificial Sequence: Synthetic oligonucleotide
acgcaaguuguccacagac

SEQ ID NO: 3229784 - RNA, 19 nt, Artificial Sequence
  Description of Artificial Sequence: Synthetic oligonucleotide
cuuacauauauaagguuuc

SEQ ID NO: 3229785 - RNA, 19 nt, Artificial Sequence
  Description of Artificial Sequence: Synthetic oligonucleotide
ucuguuuuggcucuuucau

SEQ ID NO: 3229786 - RNA, 19 nt, Artificial Sequence
  Description of Artificial Sequence: Synthetic oligonucleotide
cauauauaagguuucucuc

SEQ ID NO: 3229787 - RNA, 19 nt, Artificial Sequence
  Description of Artificial Sequence: Synthetic oligonucleotide
agauauacugcuguaaaca

SEQ ID NO: 3229788 - RNA, 19 nt, Artificial Sequence
  Description of Artificial Sequence: Synthetic oligonucleotide
aaggcuuuuccacaaugcu

SEQ ID NO: 3229789 - RNA, 19 nt, Artificial Sequence
  Description of Artificial Sequence: Synthetic oligonucleotide
uucaugguuccgaagauau

SEQ ID NO: 3229790 - RNA, 19 nt, Artificial Sequence
  Description of Artificial Sequence: Synthetic oligonucleotide
uuaaucacgcaaguugucc

SEQ ID NO: 3229791 - RNA, 19 nt, Artificial Sequence
  Description of Artificial Sequence: Synthetic oligonucleotide
auucuuucaugcuucacga

SEQ ID NO: 3229792 - RNA, 19 nt, Artificial Sequence
  Description of Artificial Sequence: Synthetic oligonucleotide
cauggauaagguuucuccc

SEQ ID NO: 3229793 - RNA, 19 nt, Artificial Sequence
  Description of Artificial Sequence: Synthetic oligonucleotide
ugugugaaggcuuuuccac

SEQ ID NO: 3229794 - RNA, 19 nt, Artificial Sequence
  Description of Artificial Sequence: Synthetic oligonucleotide
uguggaucuucucaauggc

SEQ ID NO: 3229795 - RNA, 19 nt, Artificial Sequence
  Description of Artificial Sequence: Synthetic oligonucleotide
uucuuuucuguuuuggcuc

SEQ ID NO: 3229796 - RNA, 19 nt, Artificial Sequence
  Description of Artificial Sequence: Synthetic oligonucleotide
uucaugacgguaacgggca

SEQ ID NO: 3229797 - RNA, 19 nt, Artificial Sequence
  Description of Artificial Sequence: Synthetic oligonucleotide
gaugugugaaggcuuuucc

SEQ ID NO: 3229798 - RNA, 19 nt, Artificial Sequence
  Description of Artificial Sequence: Synthetic oligonucleotide
ugugaguucguucaugauu

SEQ ID NO: 3229799 - RNA, 19 nt, Artificial Sequence
  Description of Artificial Sequence: Synthetic oligonucleotide
cucuuucaugcauauaaag

SEQ ID NO: 3229800 - RNA, 19 nt, Artificial Sequence
  Description of Artificial Sequence: Synthetic oligonucleotide
guguggaucuucucaaugg

SEQ ID NO: 3229801 - RNA, 19 nt, Artificial Sequence
  Description of Artificial Sequence: Synthetic oligonucleotide
acauguguaagguuucucu

SEQ ID NO: 3229802 - RNA, 19 nt, Artificial Sequence
  Description of Artificial Sequence: Synthetic oligonucleotide
agauauguggaacaccuaa

SEQ ID NO: 3229803 - RNA, 19 nt, Artificial Sequence
  Description of Artificial Sequence: Synthetic oligonucleotide
cuuacauggauaagguuuc

SEQ ID NO: 3229804 - RNA, 19 nt, Artificial Sequence
  Description of Artificial Sequence: Synthetic oligonucleotide
uccaaugaauucuuucaug

SEQ ID NO: 3229805 - RNA, 19 nt, Artificial Sequence
  Description of Artificial Sequence: Synthetic oligonucleotide
ucaugcauauaaagggaug

SEQ ID NO: 3229806 - RNA, 19 nt, Artificial Sequence
  Description of Artificial Sequence: Synthetic oligonucleotide
cauacauaaggcuuuucuc

SEQ ID NO: 3229807 - RNA, 19 nt, Artificial Sequence
  Description of Artificial Sequence: Synthetic oligonucleotide
uguguggaucuucucaaug

SEQ ID NO: 3229808 - RNA, 19 nt, Artificial Sequence
  Description of Artificial Sequence: Synthetic oligonucleotide
acaagccuuacgcugaaug

SEQ ID NO: 3229809 - RNA, 19 nt, Artificial Sequence
  Description of Artificial Sequence: Synthetic oligonucleotide
guguuuacauacauaaggc

SEQ ID NO: 3229810 - RNA, 19 nt, Artificial Sequence
  Description of Artificial Sequence: Synthetic oligonucleotide
uuuacauguguaagguuuc

SEQ ID NO: 3229811 - RNA, 19 nt, Artificial Sequence
  Description of Artificial Sequence: Synthetic oligonucleotide
ugguuccgaagauaugugg

SEQ ID NO: 3229812 - RNA, 19 nt, Artificial Sequence
  Description of Artificial Sequence: Synthetic oligonucleotide
uucaugcuucacgagauag

SEQ ID NO: 3229813 - RNA, 19 nt, Artificial Sequence
  Description of Artificial Sequence: Synthetic oligonucleotide
uuucucuccaaugaauucu

SEQ ID NO: 3229814 - RNA, 19 nt, Artificial Sequence
  Description of Artificial Sequence: Synthetic oligonucleotide
uggcugauaagaugacugg

SEQ ID NO: 3229815 - RNA, 19 nt, Artificial Sequence
  Description of Artificial Sequence: Synthetic oligonucleotide
ucguucaugauuguaacaa

SEQ ID NO: 3229816 - RNA, 19 nt, Artificial Sequence
  Description of Artificial Sequence: Synthetic oligonucleotide
ccaaugaauucuuucaugc

SEQ ID NO: 3229817 - RNA, 19 nt, Artificial Sequence
  Description of Artificial Sequence: Synthetic oligonucleotide
aggaauauuauauacucgc

SEQ ID NO: 3229818 - RNA, 19 nt, Artificial Sequence
  Description of Artificial Sequence: Synthetic oligonucleotide
aaggauauuguuugguugc

SEQ ID NO: 3229819 - RNA, 19 nt, Artificial Sequence
  Description of Artificial Sequence: Synthetic oligonucleotide
aaacauuugaugcauucgg

SEQ ID NO: 3229820 - RNA, 19 nt, Artificial Sequence
  Description of Artificial Sequence: Synthetic oligonucleotide
guggauauaguuuucaucg

SEQ ID NO: 3229821 - RNA, 19 nt, Artificial Sequence
  Description of Artificial Sequence: Synthetic oligonucleotide
uauuaaagaaugcaacuag

SEQ ID NO: 3229822 - RNA, 19 nt, Artificial Sequence
  Description of Artificial Sequence: Synthetic oligonucleotide
aucuauucaccauaggagc

SEQ ID NO: 3229823 - RNA, 19 nt, Artificial Sequence
  Description of Artificial Sequence: Synthetic oligonucleotide
ucgauuaucuacauacucg

SEQ ID NO: 3229824 - RNA, 19 nt, Artificial Sequence
  Description of Artificial Sequence: Synthetic oligonucleotide
auuucagucuuguagaauc

SEQ ID NO: 3229825 - RNA, 19 nt, Artificial Sequence
  Description of Artificial Sequence: Synthetic oligonucleotide
uuaugaaacuuucacagca

SEQ ID NO: 3229826 - RNA, 19 nt, Artificial Sequence
  Description of Artificial Sequence: Synthetic oligonucleotide
acaggaauauuauauacuc

SEQ ID NO: 3229827 - RNA, 19 nt, Artificial Sequence
  Description of Artificial Sequence: Synthetic oligonucleotide
ugaucuauucaccauagga

SEQ ID NO: 3229828 - RNA, 19 nt, Artificial Sequence
  Description of Artificial Sequence: Synthetic oligonucleotide
aaagaaugcaacuagugua

SEQ ID NO: 3229829 - RNA, 19 nt, Artificial Sequence
  Description of Artificial Sequence: Synthetic oligonucleotide
aauauuauauacucgcuua

SEQ ID NO: 3229830 - RNA, 19 nt, Artificial Sequence
  Description of Artificial Sequence: Synthetic oligonucleotide
uucaauaaaccguacagga

SEQ ID NO: 3229831 - RNA, 19 nt, Artificial Sequence
  Description of Artificial Sequence: Synthetic oligonucleotide
uagaugacaagcuacauaa

SEQ ID NO: 3229832 - RNA, 19 nt, Artificial Sequence
  Description of Artificial Sequence: Synthetic oligonucleotide
aacuaguguauauggcugc

SEQ ID NO: 3229833 - RNA, 19 nt, Artificial Sequence
  Description of Artificial Sequence: Synthetic oligonucleotide
cuuuguguuauucugacug

SEQ ID NO: 3229834 - RNA, 19 nt, Artificial Sequence
  Description of Artificial Sequence: Synthetic oligonucleotide
uacauaaugguccaucuac

SEQ ID NO: 3229835 - RNA, 19 nt, Artificial Sequence
  Description of Artificial Sequence: Synthetic oligonucleotide
uaaugguccaucuacagcu

SEQ ID NO: 3229836 - RNA, 19 nt, Artificial Sequence
  Description of Artificial Sequence: Synthetic oligonucleotide
uauauggcugcuuagaauc

SEQ ID NO: 3229837 - RNA, 19 nt, Artificial Sequence
  Description of Artificial Sequence: Synthetic oligonucleotide
uuuucuucccagcacgugg

SEQ ID NO: 3229838 - RNA, 19 nt, Artificial Sequence
  Description of Artificial Sequence: Synthetic oligonucleotide
auaaugguccaucuacagc

SEQ ID NO: 3229839 - RNA, 19 nt, Artificial Sequence
  Description of Artificial Sequence: Synthetic oligonucleotide
ugauggauagguuucuggg

SEQ ID NO: 3229840 - RNA, 19 nt, Artificial Sequence
  Description of Artificial Sequence: Synthetic oligonucleotide
cugucaauaagaaccaggg

SEQ ID NO: 3229841 - RNA, 19 nt, Artificial Sequence
  Description of Artificial Sequence: Synthetic oligonucleotide
uaagaaaugauccauccuu

SEQ ID NO: 3229842 - RNA, 19 nt, Artificial Sequence
  Description of Artificial Sequence: Synthetic oligonucleotide
cuugucugugacuagaccc

SEQ ID NO: 3229843 - RNA, 19 nt, Artificial Sequence
  Description of Artificial Sequence: Synthetic oligonucleotide
gaucuauucaccauaggag

SEQ ID NO: 3229844 - RNA, 19 nt, Artificial Sequence
  Description of Artificial Sequence: Synthetic oligonucleotide
cuuguuuucgcugagggcc

SEQ ID NO: 3229845 - RNA, 19 nt, Artificial Sequence
  Description of Artificial Sequence: Synthetic oligonucleotide
uauucugacugucaauaag

SEQ ID NO: 3229846 - RNA, 19 nt, Artificial Sequence
  Description of Artificial Sequence: Synthetic oligonucleotide
uggauuuucauagucacug

SEQ ID NO: 3229847 - RNA, 19 nt, Artificial Sequence
  Description of Artificial Sequence: Synthetic oligonucleotide
acaaacauuugaugcauuc

SEQ ID NO: 3229848 - RNA, 19 nt, Artificial Sequence
  Description of Artificial Sequence: Synthetic oligonucleotide
augacuuggagucccagac

SEQ ID NO: 3229849 - RNA, 19 nt, Artificial Sequence
  Description of Artificial Sequence: Synthetic oligonucleotide
aucgauuaucuacauacuc

SEQ ID NO: 3229850 - RNA, 19 nt, Artificial Sequence
  Description of Artificial Sequence: Synthetic oligonucleotide
ugugacuagacccucggug

SEQ ID NO: 3229851 - RNA, 19 nt, Artificial Sequence
  Description of Artificial Sequence: Synthetic oligonucleotide
uugucugcugcucagcggg

SEQ ID NO: 3229852 - RNA, 19 nt, Artificial Sequence
  Description of Artificial Sequence: Synthetic oligonucleotide
ggaucgauuaucuacauac

SEQ ID NO: 3229853 - RNA, 19 nt, Artificial Sequence
  Description of Artificial Sequence: Synthetic oligonucleotide
aaaaguggaauuagaugac

SEQ ID NO: 3229854 - RNA, 19 nt, Artificial Sequence
  Description of Artificial Sequence: Synthetic oligonucleotide
uggaauuagaugacaagcu

SEQ ID NO: 3229855 - RNA, 19 nt, Artificial Sequence
  Description of Artificial Sequence: Synthetic oligonucleotide
uauauacucgcuuauuaaa

SEQ ID NO: 3229856 - RNA, 19 nt, Artificial Sequence
  Description of Artificial Sequence: Synthetic oligonucleotide
acuuucacagcauauuuca

SEQ ID NO: 3229857 - RNA, 19 nt, Artificial Sequence
  Description of Artificial Sequence: Synthetic oligonucleotide
uacaggaauauuauauacu

SEQ ID NO: 3229858 - RNA, 19 nt, Artificial Sequence
  Description of Artificial Sequence: Synthetic oligonucleotide
uuccgaauaagaaaugauc

SEQ ID NO: 3229859 - RNA, 19 nt, Artificial Sequence
  Description of Artificial Sequence: Synthetic oligonucleotide
augcaacuaguguauaugg

SEQ ID NO: 3229860 - RNA, 19 nt, Artificial Sequence
  Description of Artificial Sequence: Synthetic oligonucleotide
augacaagcuacauaaugg

SEQ ID NO: 3229861 - RNA, 19 nt, Artificial Sequence
  Description of Artificial Sequence: Synthetic oligonucleotide
aacacuuccaaaguacucu

SEQ ID NO: 3229862 - RNA, 19 nt, Artificial Sequence
  Description of Artificial Sequence: Synthetic oligonucleotide
ugaugguucuggaugaugu

SEQ ID NO: 3229863 - RNA, 19 nt, Artificial Sequence
  Description of Artificial Sequence: Synthetic oligonucleotide
ucgguagagagguaacugg

SEQ ID NO: 3229864 - RNA, 19 nt, Artificial Sequence
  Description of Artificial Sequence: Synthetic oligonucleotide
uauacucgcuuauuaaaga

SEQ ID NO: 3229865 - RNA, 19 nt, Artificial Sequence
  Description of Artificial Sequence: Synthetic oligonucleotide
uuauauacucgcuuauuaa

SEQ ID NO: 3229866 - RNA, 19 nt, Artificial Sequence
  Description of Artificial Sequence: Synthetic oligonucleotide
gauauuguuugguugcuuc

SEQ ID NO: 3229867 - RNA, 19 nt, Artificial Sequence
  Description of Artificial Sequence: Synthetic oligonucleotide
aauuagaugacaagcuaca

SEQ ID NO: 3229868 - RNA, 19 nt, Artificial Sequence
  Description of Artificial Sequence: Synthetic oligonucleotide
auuauauacucgcuuauua

SEQ ID NO: 3229869 - RNA, 19 nt, Artificial Sequence
  Description of Artificial Sequence: Synthetic oligonucleotide
gaugcuuucucuggggugg

SEQ ID NO: 3229870 - RNA, 19 nt, Artificial Sequence
  Description of Artificial Sequence: Synthetic oligonucleotide
agucggaauguucaucugg

SEQ ID NO: 3229871 - RNA, 19 nt, Artificial Sequence
  Description of Artificial Sequence: Synthetic oligonucleotide
aguggaauuagaugacaag

SEQ ID NO: 3229872 - RNA, 19 nt, Artificial Sequence
  Description of Artificial Sequence: Synthetic oligonucleotide
aaaguagaagucauccuug

SEQ ID NO: 3229873 - RNA, 19 nt, Artificial Sequence
  Description of Artificial Sequence: Synthetic oligonucleotide
ucuauucaccauaggagcu

SEQ ID NO: 3229874 - RNA, 19 nt, Artificial Sequence
  Description of Artificial Sequence: Synthetic oligonucleotide
ucugugacuagacccucgg

SEQ ID NO: 3229875 - RNA, 19 nt, Artificial Sequence
  Description of Artificial Sequence: Synthetic oligonucleotide
uucuucacaaacauuugau

SEQ ID NO: 3229876 - RNA, 19 nt, Artificial Sequence
  Description of Artificial Sequence: Synthetic oligonucleotide
gugacuagacccucggugg

SEQ ID NO: 3229877 - RNA, 19 nt, Artificial Sequence
  Description of Artificial Sequence: Synthetic oligonucleotide
aacuuucacagcauauuuc

SEQ ID NO: 3229878 - RNA, 19 nt, Artificial Sequence
  Description of Artificial Sequence: Synthetic oligonucleotide
auggauagguuucugggug

SEQ ID NO: 3229879 - RNA, 19 nt, Artificial Sequence
  Description of Artificial Sequence: Synthetic oligonucleotide
uuuuccgaauaagaaauga

SEQ ID NO: 3229880 - RNA, 19 nt, Artificial Sequence
  Description of Artificial Sequence: Synthetic oligonucleotide
cuugguugaucuauucacc

SEQ ID NO: 3229881 - RNA, 19 nt, Artificial Sequence
  Description of Artificial Sequence: Synthetic oligonucleotide
uguguuauucugacuguca

SEQ ID NO: 3229882 - RNA, 19 nt, Artificial Sequence
  Description of Artificial Sequence: Synthetic oligonucleotide
auaggaaucgucgccaguc

SEQ ID NO: 3229883 - RNA, 19 nt, Artificial Sequence
  Description of Artificial Sequence: Synthetic oligonucleotide
caggaauauuauauacucg

SEQ ID NO: 3229884 - RNA, 19 nt, Artificial Sequence
  Description of Artificial Sequence: Synthetic oligonucleotide
gaugcauucgguagagagg

SEQ ID NO: 3229885 - RNA, 19 nt, Artificial Sequence
  Description of Artificial Sequence: Synthetic oligonucleotide
uuagaugacaagcuacaua

SEQ ID NO: 3229886 - RNA, 19 nt, Artificial Sequence
  Description of Artificial Sequence: Synthetic oligonucleotide
uguuugguugcuucaauaa

SEQ ID NO: 3229887 - RNA, 19 nt, Artificial Sequence
  Description of Artificial Sequence: Synthetic oligonucleotide
agugggaugcuuucucugg

SEQ ID NO: 3229888 - RNA, 19 nt, Artificial Sequence
  Description of Artificial Sequence: Synthetic oligonucleotide
ugguugcuucaauaaaccg

SEQ ID NO: 3229889 - RNA, 19 nt, Artificial Sequence
  Description of Artificial Sequence: Synthetic oligonucleotide
cauaaugguccaucuacag

SEQ ID NO: 3229890 - RNA, 19 nt, Artificial Sequence
  Description of Artificial Sequence: Synthetic oligonucleotide
agugccgcuggcuggaucg

SEQ ID NO: 3229891 - RNA, 19 nt, Artificial Sequence
  Description of Artificial Sequence: Synthetic oligonucleotide
auauacucgcuuauuaaag

SEQ ID NO: 3229892 - RNA, 19 nt, Artificial Sequence
  Description of Artificial Sequence: Synthetic oligonucleotide
ucaauaaaccguacaggaa

SEQ ID NO: 3229893 - RNA, 19 nt, Artificial Sequence
  Description of Artificial Sequence: Synthetic oligonucleotide
ugcaacuaguguauauggc

SEQ ID NO: 3229894 - RNA, 19 nt, Artificial Sequence
  Description of Artificial Sequence: Synthetic oligonucleotide
gaaaccguggcagaggaac

SEQ ID NO: 3229895 - RNA, 19 nt, Artificial Sequence
  Description of Artificial Sequence: Synthetic oligonucleotide
auuggcuuggagcagcugu

SEQ ID NO: 3229896 - RNA, 19 nt, Artificial Sequence
  Description of Artificial Sequence: Synthetic oligonucleotide
ugaaacuuucacagcauau

SEQ ID NO: 3229897 - RNA, 19 nt, Artificial Sequence
  Description of Artificial Sequence: Synthetic oligonucleotide
uuuccgaauaagaaaugau

SEQ ID NO: 3229898 - RNA, 19 nt, Artificial Sequence
  Description of Artificial Sequence: Synthetic oligonucleotide
aucacguacaucucggagu

SEQ ID NO: 3229899 - RNA, 19 nt, Artificial Sequence
  Description of Artificial Sequence: Synthetic oligonucleotide
gugacauuggcuuggagca

SEQ ID NO: 3229900 - RNA, 19 nt, Artificial Sequence
  Description of Artificial Sequence: Synthetic oligonucleotide
acagugucuugucugugac

SEQ ID NO: 3229901 - RNA, 19 nt, Artificial Sequence
  Description of Artificial Sequence: Synthetic oligonucleotide
acugucaauaagaaccagg

SEQ ID NO: 3229902 - RNA, 19 nt, Artificial Sequence
  Description of Artificial Sequence: Synthetic oligonucleotide
uguagaauccuuuguguua

SEQ ID NO: 3229903 - RNA, 19 nt, Artificial Sequence
  Description of Artificial Sequence: Synthetic oligonucleotide
gauauaguuuucaucguga

SEQ ID NO: 3229904 - RNA, 19 nt, Artificial Sequence
  Description of Artificial Sequence: Synthetic oligonucleotide
aaguagaagucauccuugu

SEQ ID NO: 3229905 - RNA, 19 nt, Artificial Sequence
  Description of Artificial Sequence: Synthetic oligonucleotide
caacuaguguauauggcug

SEQ ID NO: 3229906 - RNA, 19 nt, Artificial Sequence
  Description of Artificial Sequence: Synthetic oligonucleotide
guuggaucugugcagggcc

SEQ ID NO: 3229907 - RNA, 19 nt, Artificial Sequence
  Description of Artificial Sequence: Synthetic oligonucleotide
uauaguuuucaucgugauc

SEQ ID NO: 3229908 - RNA, 19 nt, Artificial Sequence
  Description of Artificial Sequence: Synthetic oligonucleotide
uugaucuauucaccauagg

SEQ ID NO: 3229909 - RNA, 19 nt, Artificial Sequence
  Description of Artificial Sequence: Synthetic oligonucleotide
ucgcuuauuaaagaaugca

SEQ ID NO: 3229910 - RNA, 19 nt, Artificial Sequence
  Description of Artificial Sequence: Synthetic oligonucleotide
ugaaggguggagagugccg

SEQ ID NO: 3229911 - RNA, 19 nt, Artificial Sequence
  Description of Artificial Sequence: Synthetic oligonucleotide
aaaccguacaggaauauua

SEQ ID NO: 3229912 - RNA, 19 nt, Artificial Sequence
  Description of Artificial Sequence: Synthetic oligonucleotide
aguguauauggcugcuuag

SEQ ID NO: 3229913 - RNA, 19 nt, Artificial Sequence
  Description of Artificial Sequence: Synthetic oligonucleotide
aaaguggaauuagaugaca

SEQ ID NO: 3229914 - RNA, 19 nt, Artificial Sequence
  Description of Artificial Sequence: Synthetic oligonucleotide
ucagcaggcagugggaugc

SEQ ID NO: 3229915 - RNA, 19 nt, Artificial Sequence
  Description of Artificial Sequence: Synthetic oligonucleotide
cacuguuucgaccugugac

SEQ ID NO: 3229916 - RNA, 19 nt, Artificial Sequence
  Description of Artificial Sequence: Synthetic oligonucleotide
uaugaaacuuucacagcau

SEQ ID NO: 3229917 - RNA, 19 nt, Artificial Sequence
  Description of Artificial Sequence: Synthetic oligonucleotide
aguguggccacuuauagcc

SEQ ID NO: 3229918 - RNA, 19 nt, Artificial Sequence
  Description of Artificial Sequence: Synthetic oligonucleotide
auugcuucgauuucgauuc

SEQ ID NO: 3229919 - RNA, 19 nt, Artificial Sequence
  Description of Artificial Sequence: Synthetic oligonucleotide
aaaguuacucuugaaauac

SEQ ID NO: 3229920 - RNA, 19 nt, Artificial Sequence
  Description of Artificial Sequence: Synthetic oligonucleotide
aaaaccgucgucuuuacca

SEQ ID NO: 3229921 - RNA, 19 nt, Artificial Sequence
  Description of Artificial Sequence: Synthetic oligonucleotide
uguccagagacguaaaugg

SEQ ID NO: 3229922 - RNA, 19 nt, Artificial Sequence
  Description of Artificial Sequence: Synthetic oligonucleotide
agcuuucagaauuucaccc

SEQ ID NO: 3229923 - RNA, 19 nt, Artificial Sequence
  Description of Artificial Sequence: Synthetic oligonucleotide
cuugaaauacguuuuguag

SEQ ID NO: 3229924 - RNA, 19 nt, Artificial Sequence
  Description of Artificial Sequence: Synthetic oligonucleotide
uuguagauuucauugacug

SEQ ID NO: 3229925 - RNA, 19 nt, Artificial Sequence
  Description of Artificial Sequence: Synthetic oligonucleotide
cugauuauggacgacaugc

SEQ ID NO: 3229926 - RNA, 19 nt, Artificial Sequence
  Description of Artificial Sequence: Synthetic oligonucleotide
uugaaauacguuuuguaga

SEQ ID NO: 3229927 - RNA, 19 nt, Artificial Sequence
  Description of Artificial Sequence: Synthetic oligonucleotide
aaugguccuguccacuagc

SEQ ID NO: 3229928 - RNA, 19 nt, Artificial Sequence
  Description of Artificial Sequence: Synthetic oligonucleotide
auuuaugucagccagcaaa

SEQ ID NO: 3229929 - RNA, 19 nt, Artificial Sequence
  Description of Artificial Sequence: Synthetic oligonucleotide
aaauacguuuuguagauuu

SEQ ID NO: 3229930 - RNA, 19 nt, Artificial Sequence
  Description of Artificial Sequence: Synthetic oligonucleotide
uuagcuuccuccacuaucc

SEQ ID NO: 3229931 - RNA, 19 nt, Artificial Sequence
  Description of Artificial Sequence: Synthetic oligonucleotide
gauuucauugacugugccg

SEQ ID NO: 3229932 - RNA, 19 nt, Artificial Sequence
  Description of Artificial Sequence: Synthetic oligonucleotide
uuuaccacauuagagaagu

SEQ ID NO: 3229933 - RNA, 19 nt, Artificial Sequence
  Description of Artificial Sequence: Synthetic oligonucleotide
agucauuuaugucagccag

SEQ ID NO: 3229934 - RNA, 19 nt, Artificial Sequence
  Description of Artificial Sequence: Synthetic oligonucleotide
acauuagagaagucgcagc

SEQ ID NO: 3229935 - RNA, 19 nt, Artificial Sequence
  Description of Artificial Sequence: Synthetic oligonucleotide
ucagccagcaaaaccgucg

SEQ ID NO: 3229936 - RNA, 19 nt, Artificial Sequence
  Description of Artificial Sequence: Synthetic oligonucleotide
uaugucagccagcaaaacc

SEQ ID NO: 3229937 - RNA, 19 nt, Artificial Sequence
  Description of Artificial Sequence: Synthetic oligonucleotide
aaaccgucgucuuuaccac

SEQ ID NO: 3229938 - RNA, 19 nt, Artificial Sequence
  Description of Artificial Sequence: Synthetic oligonucleotide
uuuguaagagccuguuuag

SEQ ID NO: 3229939 - RNA, 19 nt, Artificial Sequence
  Description of Artificial Sequence: Synthetic oligonucleotide
agaagucgcagccugcagc

SEQ ID NO: 3229940 - RNA, 19 nt, Artificial Sequence
  Description of Artificial Sequence: Synthetic oligonucleotide
acuuccucugggcagagcg

SEQ ID NO: 3229941 - RNA, 19 nt, Artificial Sequence
  Description of Artificial Sequence: Synthetic oligonucleotide
uaccacauuagagaagucg

SEQ ID NO: 3229942 - RNA, 19 nt, Artificial Sequence
  Description of Artificial Sequence: Synthetic oligonucleotide
aauugcuucgauuucgauu

SEQ ID NO: 3229943 - RNA, 19 nt, Artificial Sequence
  Description of Artificial Sequence: Synthetic oligonucleotide
caugacagcaauugcuucg

SEQ ID NO: 3229944 - RNA, 19 nt, Artificial Sequence
  Description of Artificial Sequence: Synthetic oligonucleotide
guagauuucauugacugug

SEQ ID NO: 3229945 - RNA, 19 nt, Artificial Sequence
  Description of Artificial Sequence: Synthetic oligonucleotide
uuagagaagucgcagccug

SEQ ID NO: 3229946 - RNA, 19 nt, Artificial Sequence
  Description of Artificial Sequence: Synthetic oligonucleotide
ugaaauacguuuuguagau

SEQ ID NO: 3229947 - RNA, 19 nt, Artificial Sequence
  Description of Artificial Sequence: Synthetic oligonucleotide
uguaagagccuguuuagcu

SEQ ID NO: 3229948 - RNA, 19 nt, Artificial Sequence
  Description of Artificial Sequence: Synthetic oligonucleotide
agccuguuuagcuuccucc

SEQ ID NO: 3229949 - RNA, 19 nt, Artificial Sequence
  Description of Artificial Sequence: Synthetic oligonucleotide
ucaguguggccacuuauag

SEQ ID NO: 3229950 - RNA, 19 nt, Artificial Sequence
  Description of Artificial Sequence: Synthetic oligonucleotide
gaagucauuuaugucagcc

SEQ ID NO: 3229951 - RNA, 19 nt, Artificial Sequence
  Description of Artificial Sequence: Synthetic oligonucleotide
accacauuagagaagucgc

SEQ ID NO: 3229952 - RNA, 19 nt, Artificial Sequence
  Description of Artificial Sequence: Synthetic oligonucleotide
caagcuguccacuggaggg

SEQ ID NO: 3229953 - RNA, 19 nt, Artificial Sequence
  Description of Artificial Sequence: Synthetic oligonucleotide
uuacucuugaaauacguuu

SEQ ID NO: 3229954 - RNA, 19 nt, Artificial Sequence
  Description of Artificial Sequence: Synthetic oligonucleotide
ucuuuaccacauuagagaa

SEQ ID NO: 3229955 - RNA, 19 nt, Artificial Sequence
  Description of Artificial Sequence: Synthetic oligonucleotide
cauuagagaagucgcagcc

SEQ ID NO: 3229956 - RNA, 19 nt, Artificial Sequence
  Description of Artificial Sequence: Synthetic oligonucleotide
augucagccagcaaaaccg

SEQ ID NO: 3229957 - RNA, 19 nt, Artificial Sequence
  Description of Artificial Sequence: Synthetic oligonucleotide
uuucgauucgacuuccucu

SEQ ID NO: 3229958 - RNA, 19 nt, Artificial Sequence
  Description of Artificial Sequence: Synthetic oligonucleotide
uuucacccaaguuuguaag

SEQ ID NO: 3229959 - RNA, 19 nt, Artificial Sequence
  Description of Artificial Sequence: Synthetic oligonucleotide
uuuaugucagccagcaaaa

SEQ ID NO: 3229960 - RNA, 19 nt, Artificial Sequence
  Description of Artificial Sequence: Synthetic oligonucleotide
acagcaauugcuucgauuu

SEQ ID NO: 3229961 - RNA, 19 nt, Artificial Sequence
  Description of Artificial Sequence: Synthetic oligonucleotide
uucgauuucgauucgacuu

SEQ ID NO: 3229962 - RNA, 19 nt, Artificial Sequence
  Description of Artificial Sequence: Synthetic oligonucleotide
agauuucauugacugugcc

SEQ ID NO: 3229963 - RNA, 19 nt, Artificial Sequence
  Description of Artificial Sequence: Synthetic oligonucleotide
agaauuucacccaaguuug

SEQ ID NO: 3229964 - RNA, 19 nt, Artificial Sequence
  Description of Artificial Sequence: Synthetic oligonucleotide
acccaaguuuguaagagcc

SEQ ID NO: 3229965 - RNA, 19 nt, Artificial Sequence
  Description of Artificial Sequence: Synthetic oligonucleotide
uucagaauuucacccaagu

SEQ ID NO: 3229966 - RNA, 19 nt, Artificial Sequence
  Description of Artificial Sequence: Synthetic oligonucleotide
gucuuuaccacauuagaga

SEQ ID NO: 3229967 - RNA, 19 nt, Artificial Sequence
  Description of Artificial Sequence: Synthetic oligonucleotide
aagucauuuaugucagcca

SEQ ID NO: 3229968 - RNA, 19 nt, Artificial Sequence
  Description of Artificial Sequence: Synthetic oligonucleotide
uucgauucgacuuccucug

SEQ ID NO: 3229969 - RNA, 19 nt, Artificial Sequence
  Description of Artificial Sequence: Synthetic oligonucleotide
uguccacuagcacagcuug

SEQ ID NO: 3229970 - RNA, 19 nt, Artificial Sequence
  Description of Artificial Sequence: Synthetic oligonucleotide
acguaaaugguccugucca

SEQ ID NO: 3229971 - RNA, 19 nt, Artificial Sequence
  Description of Artificial Sequence: Synthetic oligonucleotide
auuucgauucgacuuccuc

SEQ ID NO: 3229972 - RNA, 19 nt, Artificial Sequence
  Description of Artificial Sequence: Synthetic oligonucleotide
ucauuuaugucagccagca

SEQ ID NO: 3229973 - RNA, 19 nt, Artificial Sequence
  Description of Artificial Sequence: Synthetic oligonucleotide
uggcuguaggcaccgaugg

SEQ ID NO: 3229974 - RNA, 19 nt, Artificial Sequence
  Description of Artificial Sequence: Synthetic oligonucleotide
accuuucugauuauggacg

SEQ ID NO: 3229975 - RNA, 19 nt, Artificial Sequence
  Description of Artificial Sequence: Synthetic oligonucleotide
aggaaaguuacucuugaaa

SEQ ID NO: 3229976 - RNA, 19 nt, Artificial Sequence
  Description of Artificial Sequence: Synthetic oligonucleotide
uccacuaucccuccuggca

SEQ ID NO: 3229977 - RNA, 19 nt, Artificial Sequence
  Description of Artificial Sequence: Synthetic oligonucleotide
ucgucuuuaccacauuaga

SEQ ID NO: 3229978 - RNA, 19 nt, Artificial Sequence
  Description of Artificial Sequence: Synthetic oligonucleotide
aauacguuuuguagauuuc

SEQ ID NO: 3229979 - RNA, 19 nt, Artificial Sequence
  Description of Artificial Sequence: Synthetic oligonucleotide
uuucugauuauggacgaca

SEQ ID NO: 3229980 - RNA, 19 nt, Artificial Sequence
  Description of Artificial Sequence: Synthetic oligonucleotide
ucuugaaauacguuuugua

SEQ ID NO: 3229981 - RNA, 19 nt, Artificial Sequence
  Description of Artificial Sequence: Synthetic oligonucleotide
guuuguaagagccuguuua

SEQ ID NO: 3229982 - RNA, 19 nt, Artificial Sequence
  Description of Artificial Sequence: Synthetic oligonucleotide
ugugccgaagucauuuaug

SEQ ID NO: 3229983 - RNA, 19 nt, Artificial Sequence
  Description of Artificial Sequence: Synthetic oligonucleotide
agcaauugcuucgauuucg

SEQ ID NO: 3229984 - RNA, 19 nt, Artificial Sequence
  Description of Artificial Sequence: Synthetic oligonucleotide
agccaaccuguccagagac

SEQ ID NO: 3229985 - RNA, 19 nt, Artificial Sequence
  Description of Artificial Sequence: Synthetic oligonucleotide
acuuauagcccugcggugg

SEQ ID NO: 3229986 - RNA, 19 nt, Artificial Sequence
  Description of Artificial Sequence: Synthetic oligonucleotide
uagauuucauugacugugc

SEQ ID NO: 3229987 - RNA, 19 nt, Artificial Sequence
  Description of Artificial Sequence: Synthetic oligonucleotide
aaaugguccuguccacuag

SEQ ID NO: 3229988 - RNA, 19 nt, Artificial Sequence
  Description of Artificial Sequence: Synthetic oligonucleotide
acaagcuguccacuggagg

SEQ ID NO: 3229989 - RNA, 19 nt, Artificial Sequence
  Description of Artificial Sequence: Synthetic oligonucleotide
gacguaaaugguccugucc

SEQ ID NO: 3229990 - RNA, 19 nt, Artificial Sequence
  Description of Artificial Sequence: Synthetic oligonucleotide
ucauugacugugccgaagu

SEQ ID NO: 3229991 - RNA, 19 nt, Artificial Sequence
  Description of Artificial Sequence: Synthetic oligonucleotide
uaucccuccuggcacaagc

SEQ ID NO: 3229992 - RNA, 19 nt, Artificial Sequence
  Description of Artificial Sequence: Synthetic oligonucleotide
acuagcacagcuuggcugu

SEQ ID NO: 3229993 - RNA, 19 nt, Artificial Sequence
  Description of Artificial Sequence: Synthetic oligonucleotide
ucaccuuucugauuaugga

SEQ ID NO: 3229994 - RNA, 19 nt, Artificial Sequence
  Description of Artificial Sequence: Synthetic oligonucleotide
uccagagacguaaaugguc

SEQ ID NO: 3229995 - RNA, 19 nt, Artificial Sequence
  Description of Artificial Sequence: Synthetic oligonucleotide
ucacccaaguuuguaagag

SEQ ID NO: 3229996 - RNA, 19 nt, Artificial Sequence
  Description of Artificial Sequence: Synthetic oligonucleotide
aucaccuuucugauuaugg

SEQ ID NO: 3229997 - RNA, 19 nt, Artificial Sequence
  Description of Artificial Sequence: Synthetic oligonucleotide
uuucagaauuucacccaag

SEQ ID NO: 3229998 - RNA, 19 nt, Artificial Sequence
  Description of Artificial Sequence: Synthetic oligonucleotide
gaaaguuacucuugaaaua

SEQ ID NO: 3229999 - RNA, 19 nt, Artificial Sequence
  Description of Artificial Sequence: Synthetic oligonucleotide
uacucuugaaauacguuuu

SEQ ID NO: 3230000 - RNA, 19 nt, Artificial Sequence
  Description of Artificial Sequence: Synthetic oligonucleotide
uguagauuucauugacugu

SEQ ID NO: 3230001 - RNA, 19 nt, Artificial Sequence
  Description of Artificial Sequence: Synthetic oligonucleotide
gauucgacuuccucugggc

SEQ ID NO: 3230002 - RNA, 19 nt, Artificial Sequence
  Description of Artificial Sequence: Synthetic oligonucleotide
acuggagggauccaagcca

SEQ ID NO: 3230003 - RNA, 19 nt, Artificial Sequence
  Description of Artificial Sequence: Synthetic oligonucleotide
ugauuauggacgacaugcu

SEQ ID NO: 3230004 - RNA, 19 nt, Artificial Sequence
  Description of Artificial Sequence: Synthetic oligonucleotide
uucgacuuccucugggcag

SEQ ID NO: 3230005 - RNA, 19 nt, Artificial Sequence
  Description of Artificial Sequence: Synthetic oligonucleotide
ucgauuucgauucgacuuc

SEQ ID NO: 3230006 - RNA, 19 nt, Artificial Sequence
  Description of Artificial Sequence: Synthetic oligonucleotide
aaguuacucuugaaauacg

SEQ ID NO: 3230007 - RNA, 19 nt, Artificial Sequence
  Description of Artificial Sequence: Synthetic oligonucleotide
ucugauuauggacgacaug

SEQ ID NO: 3230008 - RNA, 19 nt, Artificial Sequence
  Description of Artificial Sequence: Synthetic oligonucleotide
uaagagccuguuuagcuuc

SEQ ID NO: 3230009 - RNA, 19 nt, Artificial Sequence
  Description of Artificial Sequence: Synthetic oligonucleotide
auccaagccaaccugucca

SEQ ID NO: 3230010 - RNA, 19 nt, Artificial Sequence
  Description of Artificial Sequence: Synthetic oligonucleotide
ugcagcuuucagaauuuca

SEQ ID NO: 3230011 - RNA, 19 nt, Artificial Sequence
  Description of Artificial Sequence: Synthetic oligonucleotide
auuucacccaaguuuguaa

SEQ ID NO: 3230012 - RNA, 19 nt, Artificial Sequence
  Description of Artificial Sequence: Synthetic oligonucleotide
ucuggcaggaaaguuacuc

SEQ ID NO: 3230013 - RNA, 19 nt, Artificial Sequence
  Description of Artificial Sequence: Synthetic oligonucleotide
cuuuaccacauuagagaag

SEQ ID NO: 3230014 - RNA, 19 nt, Artificial Sequence
  Description of Artificial Sequence: Synthetic oligonucleotide
caccuuucugauuauggac

SEQ ID NO: 3230015 - RNA, 19 nt, Artificial Sequence
  Description of Artificial Sequence: Synthetic oligonucleotide
cagcuuucagaauuucacc

SEQ ID NO: 3230016 - RNA, 19 nt, Artificial Sequence
  Description of Artificial Sequence: Synthetic oligonucleotide
cguuuuguagauuucauug

SEQ ID NO: 3230017 - RNA, 19 nt, Artificial Sequence
  Description of Artificial Sequence: Synthetic oligonucleotide
uuuaauaugguacagcagg

SEQ ID NO: 3230018 - RNA, 19 nt, Artificial Sequence
  Description of Artificial Sequence: Synthetic oligonucleotide
aaauaaauagaaaauauac

SEQ ID NO: 3230019 - RNA, 19 nt, Artificial Sequence
  Description of Artificial Sequence: Synthetic oligonucleotide
auauauaauaaauaaauag

SEQ ID NO: 3230020 - RNA, 19 nt, Artificial Sequence
  Description of Artificial Sequence: Synthetic oligonucleotide
acaagaaacauuuacagac

SEQ ID NO: 3230021 - RNA, 19 nt, Artificial Sequence
  Description of Artificial Sequence: Synthetic oligonucleotide
uauauaauaaauaaauaga

SEQ ID NO: 3230022 - RNA, 19 nt, Artificial Sequence
  Description of Artificial Sequence: Synthetic oligonucleotide
aauaaauagaaaauauacc

SEQ ID NO: 3230023 - RNA, 19 nt, Artificial Sequence
  Description of Artificial Sequence: Synthetic oligonucleotide
auaaauagaaaauauaccu

SEQ ID NO: 3230024 - RNA, 19 nt, Artificial Sequence
  Description of Artificial Sequence: Synthetic oligonucleotide
cuuuguauguuuaauaugg

SEQ ID NO: 3230025 - RNA, 19 nt, Artificial Sequence
  Description of Artificial Sequence: Synthetic oligonucleotide
auaauaaauaaauagaaaa

SEQ ID NO: 3230026 - RNA, 19 nt, Artificial Sequence
  Description of Artificial Sequence: Synthetic oligonucleotide
aacauuuacagacaaaaca

SEQ ID NO: 3230027 - RNA, 19 nt, Artificial Sequence
  Description of Artificial Sequence: Synthetic oligonucleotide
agaaaauauaccuuuguuc

SEQ ID NO: 3230028 - RNA, 19 nt, Artificial Sequence
  Description of Artificial Sequence: Synthetic oligonucleotide
gaaaauauaccuuuguuca

SEQ ID NO: 3230029 - RNA, 19 nt, Artificial Sequence
  Description of Artificial Sequence: Synthetic oligonucleotide
uguauguuuaauaugguac

SEQ ID NO: 3230030 - RNA, 19 nt, Artificial Sequence
  Description of Artificial Sequence: Synthetic oligonucleotide
uaacagaauacuuaagagg

SEQ ID NO: 3230031 - RNA, 19 nt, Artificial Sequence
  Description of Artificial Sequence: Synthetic oligonucleotide
ucuaacagaauacuuaaga

SEQ ID NO: 3230032 - RNA, 19 nt, Artificial Sequence
  Description of Artificial Sequence: Synthetic oligonucleotide
uuagccaacaggaagaaga

SEQ ID NO: 3230033 - RNA, 19 nt, Artificial Sequence
  Description of Artificial Sequence: Synthetic oligonucleotide
uaauaaauaaauagaaaau

SEQ ID NO: 3230034 - RNA, 19 nt, Artificial Sequence
  Description of Artificial Sequence: Synthetic oligonucleotide
aauaaauaaauagaaaaua

SEQ ID NO: 3230035 - RNA, 19 nt, Artificial Sequence
  Description of Artificial Sequence: Synthetic oligonucleotide
aauauaccuuuguucaugg

SEQ ID NO: 3230036 - RNA, 19 nt, Artificial Sequence
  Description of Artificial Sequence: Synthetic oligonucleotide
aaauagaaaauauaccuuu

SEQ ID NO: 3230037 - RNA, 19 nt, Artificial Sequence
  Description of Artificial Sequence: Synthetic oligonucleotide
uguuuaauaugguacagca

SEQ ID NO: 3230038 - RNA, 19 nt, Artificial Sequence
  Description of Artificial Sequence: Synthetic oligonucleotide
aacagaauacuuaagagga

SEQ ID NO: 3230039 - RNA, 19 nt, Artificial Sequence
  Description of Artificial Sequence: Synthetic oligonucleotide
uauaauaaauaaauagaaa

SEQ ID NO: 3230040 - RNA, 19 nt, Artificial Sequence
  Description of Artificial Sequence: Synthetic oligonucleotide
auuuacagacaaaacaugc

SEQ ID NO: 3230041 - RNA, 19 nt, Artificial Sequence
  Description of Artificial Sequence: Synthetic oligonucleotide
uauaccuuuguucauggug

SEQ ID NO: 3230042 - RNA, 19 nt, Artificial Sequence
  Description of Artificial Sequence: Synthetic oligonucleotide
cuacaagaaacauuuacag

SEQ ID NO: 3230043 - RNA, 19 nt, Artificial Sequence
  Description of Artificial Sequence: Synthetic oligonucleotide
uauuuagccaacaggaaga

SEQ ID NO: 3230044 - RNA, 19 nt, Artificial Sequence
  Description of Artificial Sequence: Synthetic oligonucleotide
uaaauaaauagaaaauaua

SEQ ID NO: 3230045 - RNA, 19 nt, Artificial Sequence
  Description of Artificial Sequence: Synthetic oligonucleotide
accuacaagaaacauuuac

SEQ ID NO: 3230046 - RNA, 19 nt, Artificial Sequence
  Description of Artificial Sequence: Synthetic oligonucleotide
uuuacagacaaaacaugcc

SEQ ID NO: 3230047 - RNA, 19 nt, Artificial Sequence
  Description of Artificial Sequence: Synthetic oligonucleotide
uuacagacaaaacaugcca

SEQ ID NO: 3230048 - RNA, 19 nt, Artificial Sequence
  Description of Artificial Sequence: Synthetic oligonucleotide
cuaacagaauacuuaagag

SEQ ID NO: 3230049 - RNA, 19 nt, Artificial Sequence
  Description of Artificial Sequence: Synthetic oligonucleotide
aaggaccagcuauuuagcc

SEQ ID NO: 3230050 - RNA, 19 nt, Artificial Sequence
  Description of Artificial Sequence: Synthetic oligonucleotide
ucuuuaaaggacauccucu

SEQ ID NO: 3230051 - RNA, 19 nt, Artificial Sequence
  Description of Artificial Sequence: Synthetic oligonucleotide
ucuugaagugcauauauaa

SEQ ID NO: 3230052 - RNA, 19 nt, Artificial Sequence
  Description of Artificial Sequence: Synthetic oligonucleotide
uuuuccaaaccagagcugg

SEQ ID NO: 3230053 - RNA, 19 nt, Artificial Sequence
  Description of Artificial Sequence: Synthetic oligonucleotide
ugaagugcauauauaauaa

SEQ ID NO: 3230054 - RNA, 19 nt, Artificial Sequence
  Description of Artificial Sequence: Synthetic oligonucleotide
uuaaaggacauccucuaac

SEQ ID NO: 3230055 - RNA, 19 nt, Artificial Sequence
  Description of Artificial Sequence: Synthetic oligonucleotide
augccaugcacccaauucc

SEQ ID NO: 3230056 - RNA, 19 nt, Artificial Sequence
  Description of Artificial Sequence: Synthetic oligonucleotide
auauaauaaauaaauagaa

SEQ ID NO: 3230057 - RNA, 19 nt, Artificial Sequence
  Description of Artificial Sequence: Synthetic oligonucleotide
ugcauauauaauaaauaaa

SEQ ID NO: 3230058 - RNA, 19 nt, Artificial Sequence
  Description of Artificial Sequence: Synthetic oligonucleotide
cuauuuagccaacaggaag

SEQ ID NO: 3230059 - RNA, 19 nt, Artificial Sequence
  Description of Artificial Sequence: Synthetic oligonucleotide
uugaagugcauauauaaua

SEQ ID NO: 3230060 - RNA, 19 nt, Artificial Sequence
  Description of Artificial Sequence: Synthetic oligonucleotide
uaaauagaaaauauaccuu

SEQ ID NO: 3230061 - RNA, 19 nt, Artificial Sequence
  Description of Artificial Sequence: Synthetic oligonucleotide
aaauauaccuuuguucaug

SEQ ID NO: 3230062 - RNA, 19 nt, Artificial Sequence
  Description of Artificial Sequence: Synthetic oligonucleotide
aaacauuuacagacaaaac

SEQ ID NO: 3230063 - RNA, 19 nt, Artificial Sequence
  Description of Artificial Sequence: Synthetic oligonucleotide
gaaacauuuacagacaaaa

SEQ ID NO: 3230064 - RNA, 19 nt, Artificial Sequence
  Description of Artificial Sequence: Synthetic oligonucleotide
caaaacaugccaugcaccc

SEQ ID NO: 3230065 - RNA, 19 nt, Artificial Sequence
  Description of Artificial Sequence: Synthetic oligonucleotide
auaaauaaauagaaaauau

SEQ ID NO: 3230066 - RNA, 19 nt, Artificial Sequence
  Description of Artificial Sequence: Synthetic oligonucleotide
aaggacauccucuaacaga

SEQ ID NO: 3230067 - RNA, 19 nt, Artificial Sequence
  Description of Artificial Sequence: Synthetic oligonucleotide
uaaaggacauccucuaaca

SEQ ID NO: 3230068 - RNA, 19 nt, Artificial Sequence
  Description of Artificial Sequence: Synthetic oligonucleotide
aaaggacauccucuaacag

SEQ ID NO: 3230069 - RNA, 19 nt, Artificial Sequence
  Description of Artificial Sequence: Synthetic oligonucleotide
cauggugacaccuacaaga

SEQ ID NO: 3230070 - RNA, 19 nt, Artificial Sequence
  Description of Artificial Sequence: Synthetic oligonucleotide
aauagaaaauauaccuuug

SEQ ID NO: 3230071 - RNA, 19 nt, Artificial Sequence
  Description of Artificial Sequence: Synthetic oligonucleotide
uuaauaugguacagcagga

SEQ ID NO: 3230072 - RNA, 19 nt, Artificial Sequence
  Description of Artificial Sequence: Synthetic oligonucleotide
aauaugguacagcaggauu

SEQ ID NO: 3230073 - RNA, 19 nt, Artificial Sequence
  Description of Artificial Sequence: Synthetic oligonucleotide
auagaaaauauaccuuugu

SEQ ID NO: 3230074 - RNA, 19 nt, Artificial Sequence
  Description of Artificial Sequence: Synthetic oligonucleotide
aagaaacauuuacagacaa

SEQ ID NO: 3230075 - RNA, 19 nt, Artificial Sequence
  Description of Artificial Sequence: Synthetic oligonucleotide
gacaaaacaugccaugcac

SEQ ID NO: 3230076 - RNA, 19 nt, Artificial Sequence
  Description of Artificial Sequence: Synthetic oligonucleotide
ggaaggaccagcuauuuag

SEQ ID NO: 3230077 - RNA, 19 nt, Artificial Sequence
  Description of Artificial Sequence: Synthetic oligonucleotide
uacaagaaacauuuacaga

SEQ ID NO: 3230078 - RNA, 19 nt, Artificial Sequence
  Description of Artificial Sequence: Synthetic oligonucleotide
auguuuaauaugguacagc

SEQ ID NO: 3230079 - RNA, 19 nt, Artificial Sequence
  Description of Artificial Sequence: Synthetic oligonucleotide
acuuaagaggacucuucac

SEQ ID NO: 3230080 - RNA, 19 nt, Artificial Sequence
  Description of Artificial Sequence: Synthetic oligonucleotide
uccuuuguauguuuaauau

SEQ ID NO: 3230081 - RNA, 19 nt, Artificial Sequence
  Description of Artificial Sequence: Synthetic oligonucleotide
uuuggcucugggcacaccc

SEQ ID NO: 3230082 - RNA, 19 nt, Artificial Sequence
  Description of Artificial Sequence: Synthetic oligonucleotide
uauguuuaauaugguacag

SEQ ID NO: 3230083 - RNA, 19 nt, Artificial Sequence
  Description of Artificial Sequence: Synthetic oligonucleotide
uucauggugacaccuacaa

SEQ ID NO: 3230084 - RNA, 19 nt, Artificial Sequence
  Description of Artificial Sequence: Synthetic oligonucleotide
uacuuaagaggacucuuca

SEQ ID NO: 3230085 - RNA, 19 nt, Artificial Sequence
  Description of Artificial Sequence: Synthetic oligonucleotide
aaaauauaccuuuguucau

SEQ ID NO: 3230086 - RNA, 19 nt, Artificial Sequence
  Description of Artificial Sequence: Synthetic oligonucleotide
agcuauuuagccaacagga

SEQ ID NO: 3230087 - RNA, 19 nt, Artificial Sequence
  Description of Artificial Sequence: Synthetic oligonucleotide
acaaaacaugccaugcacc

SEQ ID NO: 3230088 - RNA, 19 nt, Artificial Sequence
  Description of Artificial Sequence: Synthetic oligonucleotide
uccucuaacagaauacuua

SEQ ID NO: 3230089 - RNA, 19 nt, Artificial Sequence
  Description of Artificial Sequence: Synthetic oligonucleotide
uagaaaauauaccuuuguu

SEQ ID NO: 3230090 - RNA, 19 nt, Artificial Sequence
  Description of Artificial Sequence: Synthetic oligonucleotide
uuaagaggacucuucacuc

SEQ ID NO: 3230091 - RNA, 19 nt, Artificial Sequence
  Description of Artificial Sequence: Synthetic oligonucleotide
gugcauauauaauaaauaa

SEQ ID NO: 3230092 - RNA, 19 nt, Artificial Sequence
  Description of Artificial Sequence: Synthetic oligonucleotide
aaacaugccaugcacccaa

SEQ ID NO: 3230093 - RNA, 19 nt, Artificial Sequence
  Description of Artificial Sequence: Synthetic oligonucleotide
guauguuuaauaugguaca

SEQ ID NO: 3230094 - RNA, 19 nt, Artificial Sequence
  Description of Artificial Sequence: Synthetic oligonucleotide
aagugcauauauaauaaau

SEQ ID NO: 3230095 - RNA, 19 nt, Artificial Sequence
  Description of Artificial Sequence: Synthetic oligonucleotide
cauuuacagacaaaacaug

SEQ ID NO: 3230096 - RNA, 19 nt, Artificial Sequence
  Description of Artificial Sequence: Synthetic oligonucleotide
ucugacagugacuucuuga

SEQ ID NO: 3230097 - RNA, 19 nt, Artificial Sequence
  Description of Artificial Sequence: Synthetic oligonucleotide
acauuuacagacaaaacau

SEQ ID NO: 3230098 - RNA, 19 nt, Artificial Sequence
  Description of Artificial Sequence: Synthetic oligonucleotide
uuuguauguuuaauauggu

SEQ ID NO: 3230099 - RNA, 19 nt, Artificial Sequence
  Description of Artificial Sequence: Synthetic oligonucleotide
acagacaaaacaugccaug

SEQ ID NO: 3230100 - RNA, 19 nt, Artificial Sequence
  Description of Artificial Sequence: Synthetic oligonucleotide
cucuucacuccucugacag

SEQ ID NO: 3230101 - RNA, 19 nt, Artificial Sequence
  Description of Artificial Sequence: Synthetic oligonucleotide
aagaggacucuucacuccu

SEQ ID NO: 3230102 - RNA, 19 nt, Artificial Sequence
  Description of Artificial Sequence: Synthetic oligonucleotide
uagccaacaggaagaagag

SEQ ID NO: 3230103 - RNA, 19 nt, Artificial Sequence
  Description of Artificial Sequence: Synthetic oligonucleotide
cagcuauuuagccaacagg

SEQ ID NO: 3230104 - RNA, 19 nt, Artificial Sequence
  Description of Artificial Sequence: Synthetic oligonucleotide
acauccucuaacagaauac

SEQ ID NO: 3230105 - RNA, 19 nt, Artificial Sequence
  Description of Artificial Sequence: Synthetic oligonucleotide
cauauauaauaaauaaaua

SEQ ID NO: 3230106 - RNA, 19 nt, Artificial Sequence
  Description of Artificial Sequence: Synthetic oligonucleotide
uguucauggugacaccuac

SEQ ID NO: 3230107 - RNA, 19 nt, Artificial Sequence
  Description of Artificial Sequence: Synthetic oligonucleotide
uaagaggacucuucacucc

SEQ ID NO: 3230108 - RNA, 19 nt, Artificial Sequence
  Description of Artificial Sequence: Synthetic oligonucleotide
uuguauguuuaauauggua

SEQ ID NO: 3230109 - RNA, 19 nt, Artificial Sequence
  Description of Artificial Sequence: Synthetic oligonucleotide
aauacuuaagaggacucuu

SEQ ID NO: 3230110 - RNA, 19 nt, Artificial Sequence
  Description of Artificial Sequence: Synthetic oligonucleotide
caauucccgaggaaggacc

SEQ ID NO: 3230111 - RNA, 19 nt, Artificial Sequence
  Description of Artificial Sequence: Synthetic oligonucleotide
agaauacuuaagaggacuc

SEQ ID NO: 3230112 - RNA, 19 nt, Artificial Sequence
  Description of Artificial Sequence: Synthetic oligonucleotide
ugacagugacuucuugaag

SEQ ID NO: 3230113 - RNA, 19 nt, Artificial Sequence
  Description of Artificial Sequence: Synthetic oligonucleotide
uacagacaaaacaugccau

SEQ ID NO: 3230114 - RNA, 19 nt, Artificial Sequence
  Description of Artificial Sequence: Synthetic oligonucleotide
uuuaaaggacauccucuaa

SEQ ID NO: 3230115 - RNA, 19 nt, Artificial Sequence
  Description of Artificial Sequence: Synthetic oligonucleotide
uuuguucauggugacaccu

SEQ ID NO: 3230116 - RNA, 19 nt, Artificial Sequence
  Description of Artificial Sequence: Synthetic oligonucleotide
gugucuuuggcucugggca

SEQ ID NO: 3230117 - RNA, 19 nt, Artificial Sequence
  Description of Artificial Sequence: Synthetic oligonucleotide
aguagaaaaggacacagcg

SEQ ID NO: 3230118 - RNA, 19 nt, Artificial Sequence
  Description of Artificial Sequence: Synthetic oligonucleotide
aauaaguagaaaaggacac

SEQ ID NO: 3230119 - RNA, 19 nt, Artificial Sequence
  Description of Artificial Sequence: Synthetic oligonucleotide
aauggcagauucuggaugc

SEQ ID NO: 3230120 - RNA, 19 nt, Artificial Sequence
  Description of Artificial Sequence: Synthetic oligonucleotide
uagaaaaggacacagcgag

SEQ ID NO: 3230121 - RNA, 19 nt, Artificial Sequence
  Description of Artificial Sequence: Synthetic oligonucleotide
agacccauuaccugaaugc

SEQ ID NO: 3230122 - RNA, 19 nt, Artificial Sequence
  Description of Artificial Sequence: Synthetic oligonucleotide
aaauaaguagaaaaggaca

SEQ ID NO: 3230123 - RNA, 19 nt, Artificial Sequence
  Description of Artificial Sequence: Synthetic oligonucleotide
uggaaauaaguagaaaagg

SEQ ID NO: 3230124 - RNA, 19 nt, Artificial Sequence
  Description of Artificial Sequence: Synthetic oligonucleotide
cuggaaauaaguagaaaag

SEQ ID NO: 3230125 - RNA, 19 nt, Artificial Sequence
  Description of Artificial Sequence: Synthetic oligonucleotide
uuaagguacuccaucucgg

SEQ ID NO: 3230126 - RNA, 19 nt, Artificial Sequence
  Description of Artificial Sequence: Synthetic oligonucleotide
guuaagguacuccaucucg

SEQ ID NO: 3230127 - RNA, 19 nt, Artificial Sequence
  Description of Artificial Sequence: Synthetic oligonucleotide
uguucauccacuacugacc

SEQ ID NO: 3230128 - RNA, 19 nt, Artificial Sequence
  Description of Artificial Sequence: Synthetic oligonucleotide
uaaguagaaaaggacacag

SEQ ID NO: 3230129 - RNA, 19 nt, Artificial Sequence
  Description of Artificial Sequence: Synthetic oligonucleotide
uuugaaauggcagauucug

SEQ ID NO: 3230130 - RNA, 19 nt, Artificial Sequence
  Description of Artificial Sequence: Synthetic oligonucleotide
ucuugagaaguguucaucc

SEQ ID NO: 3230131 - RNA, 19 nt, Artificial Sequence
  Description of Artificial Sequence: Synthetic oligonucleotide
gaaauaaguagaaaaggac

SEQ ID NO: 3230132 - RNA, 19 nt, Artificial Sequence
  Description of Artificial Sequence: Synthetic oligonucleotide
agaguuaagguacuccauc

SEQ ID NO: 3230133 - RNA, 19 nt, Artificial Sequence
  Description of Artificial Sequence: Synthetic oligonucleotide
gaaaaggacacagcgagag

SEQ ID NO: 3230134 - RNA, 19 nt, Artificial Sequence
  Description of Artificial Sequence: Synthetic oligonucleotide
aaauggcagauucuggaug

SEQ ID NO: 3230135 - RNA, 19 nt, Artificial Sequence
  Description of Artificial Sequence: Synthetic oligonucleotide
ugaaauggcagauucugga

SEQ ID NO: 3230136 - RNA, 19 nt, Artificial Sequence
  Description of Artificial Sequence: Synthetic oligonucleotide
ucucccuggaaauaaguag

SEQ ID NO: 3230137 - RNA, 19 nt, Artificial Sequence
  Description of Artificial Sequence: Synthetic oligonucleotide
gacacagcgagaguuaagg

SEQ ID NO: 3230138 - RNA, 19 nt, Artificial Sequence
  Description of Artificial Sequence: Synthetic oligonucleotide
uugaaauggcagauucugg

SEQ ID NO: 3230139 - RNA, 19 nt, Artificial Sequence
  Description of Artificial Sequence: Synthetic oligonucleotide
acagcgagaguuaagguac

SEQ ID NO: 3230140 - RNA, 19 nt, Artificial Sequence
  Description of Artificial Sequence: Synthetic oligonucleotide
gauucuggaugcaaggugc

SEQ ID NO: 3230141 - RNA, 19 nt, Artificial Sequence
  Description of Artificial Sequence: Synthetic oligonucleotide
aaguagaaaaggacacagc

SEQ ID NO: 3230142 - RNA, 19 nt, Artificial Sequence
  Description of Artificial Sequence: Synthetic oligonucleotide
uccacuacugacccaaugu

SEQ ID NO: 3230143 - RNA, 19 nt, Artificial Sequence
  Description of Artificial Sequence: Synthetic oligonucleotide
ucuggaugcaaggugcugg

SEQ ID NO: 3230144 - RNA, 19 nt, Artificial Sequence
  Description of Artificial Sequence: Synthetic oligonucleotide
agaaguguucauccacuac

SEQ ID NO: 3230145 - RNA, 19 nt, Artificial Sequence
  Description of Artificial Sequence: Synthetic oligonucleotide
uugagaaguguucauccac

SEQ ID NO: 3230146 - RNA, 19 nt, Artificial Sequence
  Description of Artificial Sequence: Synthetic oligonucleotide
ugagaaguguucauccacu

SEQ ID NO: 3230147 - RNA, 19 nt, Artificial Sequence
  Description of Artificial Sequence: Synthetic oligonucleotide
uuuugaaauggcagauucu

SEQ ID NO: 3230148 - RNA, 19 nt, Artificial Sequence
  Description of Artificial Sequence: Synthetic oligonucleotide
aguuaagguacuccaucuc

SEQ ID NO: 3230149 - RNA, 19 nt, Artificial Sequence
  Description of Artificial Sequence: Synthetic oligonucleotide
agauucuggaugcaaggug

SEQ ID NO: 3230150 - RNA, 19 nt, Artificial Sequence
  Description of Artificial Sequence: Synthetic oligonucleotide
aaaggacacagcgagaguu

SEQ ID NO: 3230151 - RNA, 19 nt, Artificial Sequence
  Description of Artificial Sequence: Synthetic oligonucleotide
agguacuccaucucggcag

SEQ ID NO: 3230152 - RNA, 19 nt, Artificial Sequence
  Description of Artificial Sequence: Synthetic oligonucleotide
caaggugcuggcuuggccc

SEQ ID NO: 3230153 - RNA, 19 nt, Artificial Sequence
  Description of Artificial Sequence: Synthetic oligonucleotide
auuaccugaaugccccauc

SEQ ID NO: 3230154 - RNA, 19 nt, Artificial Sequence
  Description of Artificial Sequence: Synthetic oligonucleotide
acuacugacccaaugucuc

SEQ ID NO: 3230155 - RNA, 19 nt, Artificial Sequence
  Description of Artificial Sequence: Synthetic oligonucleotide
gaaguguucauccacuacu

SEQ ID NO: 3230156 - RNA, 19 nt, Artificial Sequence
  Description of Artificial Sequence: Synthetic oligonucleotide
accugaaugccccaucuug

SEQ ID NO: 3230157 - RNA, 19 nt, Artificial Sequence
  Description of Artificial Sequence: Synthetic oligonucleotide
gaugcaaggugcuggcuug

SEQ ID NO: 3230158 - RNA, 19 nt, Artificial Sequence
  Description of Artificial Sequence: Synthetic oligonucleotide
uuaccugaaugccccaucu

SEQ ID NO: 3230159 - RNA, 19 nt, Artificial Sequence
  Description of Artificial Sequence: Synthetic oligonucleotide
guucauccacuacugaccc

SEQ ID NO: 3230160 - RNA, 19 nt, Artificial Sequence
  Description of Artificial Sequence: Synthetic oligonucleotide
ugacccaaugucucccugg

SEQ ID NO: 3230161 - RNA, 19 nt, Artificial Sequence
  Description of Artificial Sequence: Synthetic oligonucleotide
aaugucucccuggaaauaa

SEQ ID NO: 3230162 - RNA, 19 nt, Artificial Sequence
  Description of Artificial Sequence: Synthetic oligonucleotide
uaagguacuccaucucggc

SEQ ID NO: 3230163 - RNA, 19 nt, Artificial Sequence
  Description of Artificial Sequence: Synthetic oligonucleotide
aggcuggucuuucuccucc

SEQ ID NO: 3230164 - RNA, 19 nt, Artificial Sequence
  Description of Artificial Sequence: Synthetic oligonucleotide
ggaaauaaguagaaaagga

SEQ ID NO: 3230165 - RNA, 19 nt, Artificial Sequence
  Description of Artificial Sequence: Synthetic oligonucleotide
aagguacuccaucucggca

SEQ ID NO: 3230166 - RNA, 19 nt, Artificial Sequence
  Description of Artificial Sequence: Synthetic oligonucleotide
guguucauccacuacugac

SEQ ID NO: 3230167 - RNA, 19 nt, Artificial Sequence
  Description of Artificial Sequence: Synthetic oligonucleotide
aaaaggacacagcgagagu

SEQ ID NO: 3230168 - RNA, 19 nt, Artificial Sequence
  Description of Artificial Sequence: Synthetic oligonucleotide
aaguguucauccacuacug

SEQ ID NO: 3230169 - RNA, 19 nt, Artificial Sequence
  Description of Artificial Sequence: Synthetic oligonucleotide
aagcucuugagaaguguuc

SEQ ID NO: 3230170 - RNA, 19 nt, Artificial Sequence
  Description of Artificial Sequence: Synthetic oligonucleotide
gagacccauuaccugaaug

SEQ ID NO: 3230171 - RNA, 19 nt, Artificial Sequence
  Description of Artificial Sequence: Synthetic oligonucleotide
uggcccaaagcucuugaga

SEQ ID NO: 3230172 - RNA, 19 nt, Artificial Sequence
  Description of Artificial Sequence: Synthetic oligonucleotide
ucauccacuacugacccaa

SEQ ID NO: 3230173 - RNA, 19 nt, Artificial Sequence
  Description of Artificial Sequence: Synthetic oligonucleotide
auaaguagaaaaggacaca

SEQ ID NO: 3230174 - RNA, 19 nt, Artificial Sequence
  Description of Artificial Sequence: Synthetic oligonucleotide
ugucucccuggaaauaagu

SEQ ID NO: 3230175 - RNA, 19 nt, Artificial Sequence
  Description of Artificial Sequence: Synthetic oligonucleotide
gcagauucuggaugcaagg

SEQ ID NO: 3230176 - RNA, 19 nt, Artificial Sequence
  Description of Artificial Sequence: Synthetic oligonucleotide
acccauuaccugaaugccc

SEQ ID NO: 3230177 - RNA, 19 nt, Artificial Sequence
  Description of Artificial Sequence: Synthetic oligonucleotide
cucccuggaaauaaguaga

SEQ ID NO: 3230178 - RNA, 19 nt, Artificial Sequence
  Description of Artificial Sequence: Synthetic oligonucleotide
uggcuuggcccaaagcucu

SEQ ID NO: 3230179 - RNA, 19 nt, Artificial Sequence
  Description of Artificial Sequence: Synthetic oligonucleotide
gacccauuaccugaaugcc

SEQ ID NO: 3230180 - RNA, 19 nt, Artificial Sequence
  Description of Artificial Sequence: Synthetic oligonucleotide
ccuggaaauaaguagaaaa

SEQ ID NO: 3230181 - RNA, 19 nt, Artificial Sequence
  Description of Artificial Sequence: Synthetic oligonucleotide
cuacugacccaaugucucc

SEQ ID NO: 3230182 - RNA, 19 nt, Artificial Sequence
  Description of Artificial Sequence: Synthetic oligonucleotide
aaagcucuugagaaguguu

SEQ ID NO: 3230183 - RNA, 19 nt, Artificial Sequence
  Description of Artificial Sequence: Synthetic oligonucleotide
ucccuggaaauaaguagaa

SEQ ID NO: 3230184 - RNA, 19 nt, Artificial Sequence
  Description of Artificial Sequence: Synthetic oligonucleotide
gaguuaagguacuccaucu

SEQ ID NO: 3230185 - RNA, 19 nt, Artificial Sequence
  Description of Artificial Sequence: Synthetic oligonucleotide
aaggugcuggcuuggccca

SEQ ID NO: 3230186 - RNA, 19 nt, Artificial Sequence
  Description of Artificial Sequence: Synthetic oligonucleotide
cccauuaccugaaugcccc

SEQ ID NO: 3230187 - RNA, 19 nt, Artificial Sequence
  Description of Artificial Sequence: Synthetic oligonucleotide
guagaaaaggacacagcga

SEQ ID NO: 3230188 - RNA, 19 nt, Artificial Sequence
  Description of Artificial Sequence: Synthetic oligonucleotide
agcucuugagaaguguuca

SEQ ID NO: 3230189 - RNA, 19 nt, Artificial Sequence
  Description of Artificial Sequence: Synthetic oligonucleotide
aguguucauccacuacuga

SEQ ID NO: 3230190 - RNA, 19 nt, Artificial Sequence
  Description of Artificial Sequence: Synthetic oligonucleotide
acuccaucucggcaggcug

SEQ ID NO: 3230191 - RNA, 19 nt, Artificial Sequence
  Description of Artificial Sequence: Synthetic oligonucleotide
cuggaugcaaggugcuggc

SEQ ID NO: 3230192 - RNA, 19 nt, Artificial Sequence
  Description of Artificial Sequence: Synthetic oligonucleotide
uuggcccaaagcucuugag

SEQ ID NO: 3230193 - RNA, 19 nt, Artificial Sequence
  Description of Artificial Sequence: Synthetic oligonucleotide
cuccaucucggcaggcugg

SEQ ID NO: 3230194 - RNA, 19 nt, Artificial Sequence
  Description of Artificial Sequence: Synthetic oligonucleotide
uacugacccaaugucuccc

SEQ ID NO: 3230195 - RNA, 19 nt, Artificial Sequence
  Description of Artificial Sequence: Synthetic oligonucleotide
cuggcuuggcccaaagcuc

SEQ ID NO: 3230196 - RNA, 19 nt, Artificial Sequence
  Description of Artificial Sequence: Synthetic oligonucleotide
cuugagaaguguucaucca

SEQ ID NO: 3230197 - RNA, 19 nt, Artificial Sequence
  Description of Artificial Sequence: Synthetic oligonucleotide
auccacuacugacccaaug

SEQ ID NO: 3230198 - RNA, 19 nt, Artificial Sequence
  Description of Artificial Sequence: Synthetic oligonucleotide
ccugaaugccccaucuugc

SEQ ID NO: 3230199 - RNA, 19 nt, Artificial Sequence
  Description of Artificial Sequence: Synthetic oligonucleotide
cucuugagaaguguucauc

SEQ ID NO: 3230200 - RNA, 19 nt, Artificial Sequence
  Description of Artificial Sequence: Synthetic oligonucleotide
cacagcgagaguuaaggua

SEQ ID NO: 3230201 - RNA, 19 nt, Artificial Sequence
  Description of Artificial Sequence: Synthetic oligonucleotide
gguacuccaucucggcagg

SEQ ID NO: 3230202 - RNA, 19 nt, Artificial Sequence
  Description of Artificial Sequence: Synthetic oligonucleotide
acacagcgagaguuaaggu

SEQ ID NO: 3230203 - RNA, 19 nt, Artificial Sequence
  Description of Artificial Sequence: Synthetic oligonucleotide
gaaauggcagauucuggau

SEQ ID NO: 3230204 - RNA, 19 nt, Artificial Sequence
  Description of Artificial Sequence: Synthetic oligonucleotide
ugaaugccccaucuugcuu

SEQ ID NO: 3230205 - RNA, 19 nt, Artificial Sequence
  Description of Artificial Sequence: Synthetic oligonucleotide
ugcuggcuuggcccaaagc

SEQ ID NO: 3230206 - RNA, 19 nt, Artificial Sequence
  Description of Artificial Sequence: Synthetic oligonucleotide
gacccaaugucucccugga

SEQ ID NO: 3230207 - RNA, 19 nt, Artificial Sequence
  Description of Artificial Sequence: Synthetic oligonucleotide
aaugccccaucuugcuuuu

SEQ ID NO: 3230208 - RNA, 19 nt, Artificial Sequence
  Description of Artificial Sequence: Synthetic oligonucleotide
gagaaguguucauccacua

SEQ ID NO: 3230209 - RNA, 19 nt, Artificial Sequence
  Description of Artificial Sequence: Synthetic oligonucleotide
ggcccaaagcucuugagaa

SEQ ID NO: 3230210 - RNA, 19 nt, Artificial Sequence
  Description of Artificial Sequence: Synthetic oligonucleotide
acugacccaaugucucccu

SEQ ID NO: 3230211 - RNA, 19 nt, Artificial Sequence
  Description of Artificial Sequence: Synthetic oligonucleotide
ggcagauucuggaugcaag

SEQ ID NO: 3230212 - RNA, 19 nt, Artificial Sequence
  Description of Artificial Sequence: Synthetic oligonucleotide
uucauccacuacugaccca

SEQ ID NO: 3230213 - RNA, 19 nt, Artificial Sequence
  Description of Artificial Sequence: Synthetic oligonucleotide
agcgagaguuaagguacuc

SEQ ID NO: 3230214 - RNA, 19 nt, Artificial Sequence
  Description of Artificial Sequence: Synthetic oligonucleotide
gaaugccccaucuugcuuu

SEQ ID NO: 3230215 - RNA, 19 nt, Artificial Sequence
  Description of Artificial Sequence: Synthetic oligonucleotide
uucuggaugcaaggugcug

SEQ ID NO: 3230216 - RNA, 19 nt, Artificial Sequence
  Description of Artificial Sequence: Synthetic oligonucleotide
ggcaggcuggucuuucucc

SEQ ID NO: 3230217 - RNA, 19 nt, Artificial Sequence
  Description of Artificial Sequence: Synthetic oligonucleotide
aguaguauuauucuugugc

SEQ ID NO: 3230218 - RNA, 19 nt, Artificial Sequence
  Description of Artificial Sequence: Synthetic oligonucleotide
uauaaauuaauuaugagau

SEQ ID NO: 3230219 - RNA, 19 nt, Artificial Sequence
  Description of Artificial Sequence: Synthetic oligonucleotide
ugauuuauuaucuuuagag

SEQ ID NO: 3230220 - RNA, 19 nt, Artificial Sequence
  Description of Artificial Sequence: Synthetic oligonucleotide
aagaaaucagaacauacac

SEQ ID NO: 3230221 - RNA, 19 nt, Artificial Sequence
  Description of Artificial Sequence: Synthetic oligonucleotide
auuauggauagcuaaaugg

SEQ ID NO: 3230222 - RNA, 19 nt, Artificial Sequence
  Description of Artificial Sequence: Synthetic oligonucleotide
caaacuaaaauauucagug

SEQ ID NO: 3230223 - RNA, 19 nt, Artificial Sequence
  Description of Artificial Sequence: Synthetic oligonucleotide
aaacuaaaauauucagugc

SEQ ID NO: 3230224 - RNA, 19 nt, Artificial Sequence
  Description of Artificial Sequence: Synthetic oligonucleotide
caaaaugucaucuuuaaug

SEQ ID NO: 3230225 - RNA, 19 nt, Artificial Sequence
  Description of Artificial Sequence: Synthetic oligonucleotide
aaaaugucaucuuuaauga

SEQ ID NO: 3230226 - RNA, 19 nt, Artificial Sequence
  Description of Artificial Sequence: Synthetic oligonucleotide
uaucuagucauuaagaauc

SEQ ID NO: 3230227 - RNA, 19 nt, Artificial Sequence
  Description of Artificial Sequence: Synthetic oligonucleotide
uuaaauuccauaucauggg

SEQ ID NO: 3230228 - RNA, 19 nt, Artificial Sequence
  Description of Artificial Sequence: Synthetic oligonucleotide
aaaaggaugucuuaaacaa

SEQ ID NO: 3230229 - RNA, 19 nt, Artificial Sequence
  Description of Artificial Sequence: Synthetic oligonucleotide
uuauaugaaagauuucuag

SEQ ID NO: 3230230 - RNA, 19 nt, Artificial Sequence
  Description of Artificial Sequence: Synthetic oligonucleotide
uuaagaaucauuuuggcuu

SEQ ID NO: 3230231 - RNA, 19 nt, Artificial Sequence
  Description of Artificial Sequence: Synthetic oligonucleotide
ucauauaccaaacuaaaau

SEQ ID NO: 3230232 - RNA, 19 nt, Artificial Sequence
  Description of Artificial Sequence: Synthetic oligonucleotide
ucuucuagaguccauuggg

SEQ ID NO: 3230233 - RNA, 19 nt, Artificial Sequence
  Description of Artificial Sequence: Synthetic oligonucleotide
aaucucuucaugcugcuag

SEQ ID NO: 3230234 - RNA, 19 nt, Artificial Sequence
  Description of Artificial Sequence: Synthetic oligonucleotide
uucaauugugcucauauac

SEQ ID NO: 3230235 - RNA, 19 nt, Artificial Sequence
  Description of Artificial Sequence: Synthetic oligonucleotide
uauaugaaagauuucuagc

SEQ ID NO: 3230236 - RNA, 19 nt, Artificial Sequence
  Description of Artificial Sequence: Synthetic oligonucleotide
aauucaauugugcucauau

SEQ ID NO: 3230237 - RNA, 19 nt, Artificial Sequence
  Description of Artificial Sequence: Synthetic oligonucleotide
uuuacaauuauauugccuu

SEQ ID NO: 3230238 - RNA, 19 nt, Artificial Sequence
  Description of Artificial Sequence: Synthetic oligonucleotide
ugagauuauuuauauaaug

SEQ ID NO: 3230239 - RNA, 19 nt, Artificial Sequence
  Description of Artificial Sequence: Synthetic oligonucleotide
acuacuaaccaacugaaca

SEQ ID NO: 3230240 - RNA, 19 nt, Artificial Sequence
  Description of Artificial Sequence: Synthetic oligonucleotide
ucaguuuugaagaauucug

SEQ ID NO: 3230241 - RNA, 19 nt, Artificial Sequence
  Description of Artificial Sequence: Synthetic oligonucleotide
acaucugacacaucauucc

SEQ ID NO: 3230242 - RNA, 19 nt, Artificial Sequence
  Description of Artificial Sequence: Synthetic oligonucleotide
gaacauacacauuauauga

SEQ ID NO: 3230243 - RNA, 19 nt, Artificial Sequence
  Description of Artificial Sequence: Synthetic oligonucleotide
gauaguauaguuuccuaug

SEQ ID NO: 3230244 - RNA, 19 nt, Artificial Sequence
  Description of Artificial Sequence: Synthetic oligonucleotide
auguuagucaaagacaugg

SEQ ID NO: 3230245 - RNA, 19 nt, Artificial Sequence
  Description of Artificial Sequence: Synthetic oligonucleotide
aauuccauaucaugggucu

SEQ ID NO: 3230246 - RNA, 19 nt, Artificial Sequence
  Description of Artificial Sequence: Synthetic oligonucleotide
acuacuacuaaccaacuga

SEQ ID NO: 3230247 - RNA, 19 nt, Artificial Sequence
  Description of Artificial Sequence: Synthetic oligonucleotide
uuauggauagcuaaauggu

SEQ ID NO: 3230248 - RNA, 19 nt, Artificial Sequence
  Description of Artificial Sequence: Synthetic oligonucleotide
uauucuugugcauuuaaca

SEQ ID NO: 3230249 - RNA, 19 nt, Artificial Sequence
  Description of Artificial Sequence: Synthetic oligonucleotide
ucuucugcuaagcugagca

SEQ ID NO: 3230250 - RNA, 19 nt, Artificial Sequence
  Description of Artificial Sequence: Synthetic oligonucleotide
acaauuuaaauuccauauc

SEQ ID NO: 3230251 - RNA, 19 nt, Artificial Sequence
  Description of Artificial Sequence: Synthetic oligonucleotide
gaugucuuaaacaacuaag

SEQ ID NO: 3230252 - RNA, 19 nt, Artificial Sequence
  Description of Artificial Sequence: Synthetic oligonucleotide
aaaguaguauuauucuugu

SEQ ID NO: 3230253 - RNA, 19 nt, Artificial Sequence
  Description of Artificial Sequence: Synthetic oligonucleotide
uuguggaaaauauaguaca

SEQ ID NO: 3230254 - RNA, 19 nt, Artificial Sequence
  Description of Artificial Sequence: Synthetic oligonucleotide
caugauuuccaguaggaag

SEQ ID NO: 3230255 - RNA, 19 nt, Artificial Sequence
  Description of Artificial Sequence: Synthetic oligonucleotide
ucaauugugcucauauacc

SEQ ID NO: 3230256 - RNA, 19 nt, Artificial Sequence
  Description of Artificial Sequence: Synthetic oligonucleotide
ugucuuaaacaacuaagga

SEQ ID NO: 3230257 - RNA, 19 nt, Artificial Sequence
  Description of Artificial Sequence: Synthetic oligonucleotide
ucgaauauuauggauagcu

SEQ ID NO: 3230258 - RNA, 19 nt, Artificial Sequence
  Description of Artificial Sequence: Synthetic oligonucleotide
agagaacuuucauaccucc

SEQ ID NO: 3230259 - RNA, 19 nt, Artificial Sequence
  Description of Artificial Sequence: Synthetic oligonucleotide
gaaaguaguauuauucuug

SEQ ID NO: 3230260 - RNA, 19 nt, Artificial Sequence
  Description of Artificial Sequence: Synthetic oligonucleotide
auucaaucggcucauagga

SEQ ID NO: 3230261 - RNA, 19 nt, Artificial Sequence
  Description of Artificial Sequence: Synthetic oligonucleotide
uccucaucauguaauauug

SEQ ID NO: 3230262 - RNA, 19 nt, Artificial Sequence
  Description of Artificial Sequence: Synthetic oligonucleotide
aucuuguuacuuuugaugu

SEQ ID NO: 3230263 - RNA, 19 nt, Artificial Sequence
  Description of Artificial Sequence: Synthetic oligonucleotide
uuuccuauguuagucaaag

SEQ ID NO: 3230264 - RNA, 19 nt, Artificial Sequence
  Description of Artificial Sequence: Synthetic oligonucleotide
aaugagagaaggcaagaaa

SEQ ID NO: 3230265 - RNA, 19 nt, Artificial Sequence
  Description of Artificial Sequence: Synthetic oligonucleotide
uauuauggauagcuaaaug

SEQ ID NO: 3230266 - RNA, 19 nt, Artificial Sequence
  Description of Artificial Sequence: Synthetic oligonucleotide
ucuaauaaucauucauuca

SEQ ID NO: 3230267 - RNA, 19 nt, Artificial Sequence
  Description of Artificial Sequence: Synthetic oligonucleotide
guuuucaggaaucagaaaa

SEQ ID NO: 3230268 - RNA, 19 nt, Artificial Sequence
  Description of Artificial Sequence: Synthetic oligonucleotide
auaaaauaaaaggaugucu

SEQ ID NO: 3230269 - RNA, 19 nt, Artificial Sequence
  Description of Artificial Sequence: Synthetic oligonucleotide
cuaacuagaaaauuccuca

SEQ ID NO: 3230270 - RNA, 19 nt, Artificial Sequence
  Description of Artificial Sequence: Synthetic oligonucleotide
cuauuaucuagucauuaag

SEQ ID NO: 3230271 - RNA, 19 nt, Artificial Sequence
  Description of Artificial Sequence: Synthetic oligonucleotide
cuaauaaucauucauucaa

SEQ ID NO: 3230272 - RNA, 19 nt, Artificial Sequence
  Description of Artificial Sequence: Synthetic oligonucleotide
cuacuaaccaacugaacag

SEQ ID NO: 3230273 - RNA, 19 nt, Artificial Sequence
  Description of Artificial Sequence: Synthetic oligonucleotide
uaagaagucggauguauga

SEQ ID NO: 3230274 - RNA, 19 nt, Artificial Sequence
  Description of Artificial Sequence: Synthetic oligonucleotide
ucaucgaauauuauggaua

SEQ ID NO: 3230275 - RNA, 19 nt, Artificial Sequence
  Description of Artificial Sequence: Synthetic oligonucleotide
cauacacauuauaugaaag

SEQ ID NO: 3230276 - RNA, 19 nt, Artificial Sequence
  Description of Artificial Sequence: Synthetic oligonucleotide
caacugaacagucauauuc

SEQ ID NO: 3230277 - RNA, 19 nt, Artificial Sequence
  Description of Artificial Sequence: Synthetic oligonucleotide
auuaucuagucauuaagaa

SEQ ID NO: 3230278 - RNA, 19 nt, Artificial Sequence
  Description of Artificial Sequence: Synthetic oligonucleotide
agaagucggauguaugaac

SEQ ID NO: 3230279 - RNA, 19 nt, Artificial Sequence
  Description of Artificial Sequence: Synthetic oligonucleotide
aacuauauuuauaugacuu

SEQ ID NO: 3230280 - RNA, 19 nt, Artificial Sequence
  Description of Artificial Sequence: Synthetic oligonucleotide
ugaauauuaccucaugauu

SEQ ID NO: 3230281 - RNA, 19 nt, Artificial Sequence
  Description of Artificial Sequence: Synthetic oligonucleotide
ucaucauguaauauuguuc

SEQ ID NO: 3230282 - RNA, 19 nt, Artificial Sequence
  Description of Artificial Sequence: Synthetic oligonucleotide
guaauauuguucuucugug

SEQ ID NO: 3230283 - RNA, 19 nt, Artificial Sequence
  Description of Artificial Sequence: Synthetic oligonucleotide
gaaaucagaacauacacau

SEQ ID NO: 3230284 - RNA, 19 nt, Artificial Sequence
  Description of Artificial Sequence: Synthetic oligonucleotide
caucuuguuacuuuugaug

SEQ ID NO: 3230285 - RNA, 19 nt, Artificial Sequence
  Description of Artificial Sequence: Synthetic oligonucleotide
aauauuaccucaugauuua

SEQ ID NO: 3230286 - RNA, 19 nt, Artificial Sequence
  Description of Artificial Sequence: Synthetic oligonucleotide
agucauauucaaucggcuc

SEQ ID NO: 3230287 - RNA, 19 nt, Artificial Sequence
  Description of Artificial Sequence: Synthetic oligonucleotide
ugaaagauuucuagcugag

SEQ ID NO: 3230288 - RNA, 19 nt, Artificial Sequence
  Description of Artificial Sequence: Synthetic oligonucleotide
uagaaaauuccucaaucuc

SEQ ID NO: 3230289 - RNA, 19 nt, Artificial Sequence
  Description of Artificial Sequence: Synthetic oligonucleotide
aauuaauuaugagaucaga

SEQ ID NO: 3230290 - RNA, 19 nt, Artificial Sequence
  Description of Artificial Sequence: Synthetic oligonucleotide
cuuaaguacuaaaucauca

SEQ ID NO: 3230291 - RNA, 19 nt, Artificial Sequence
  Description of Artificial Sequence: Synthetic oligonucleotide
aaauuccauaucauggguc

SEQ ID NO: 3230292 - RNA, 19 nt, Artificial Sequence
  Description of Artificial Sequence: Synthetic oligonucleotide
ucuaccagaguccugacuu

SEQ ID NO: 3230293 - RNA, 19 nt, Artificial Sequence
  Description of Artificial Sequence: Synthetic oligonucleotide
uuaaguacuaaaucaucaa

SEQ ID NO: 3230294 - RNA, 19 nt, Artificial Sequence
  Description of Artificial Sequence: Synthetic oligonucleotide
uugaauuggcccuguaucc

SEQ ID NO: 3230295 - RNA, 19 nt, Artificial Sequence
  Description of Artificial Sequence: Synthetic oligonucleotide
uuagcugaaaugagagaag

SEQ ID NO: 3230296 - RNA, 19 nt, Artificial Sequence
  Description of Artificial Sequence: Synthetic oligonucleotide
uguucacuguccaaguggc

SEQ ID NO: 3230297 - RNA, 19 nt, Artificial Sequence
  Description of Artificial Sequence: Synthetic oligonucleotide
agacaugauuuccaguagg

SEQ ID NO: 3230298 - RNA, 19 nt, Artificial Sequence
  Description of Artificial Sequence: Synthetic oligonucleotide
ucauucauucaaagcauug

SEQ ID NO: 3230299 - RNA, 19 nt, Artificial Sequence
  Description of Artificial Sequence: Synthetic oligonucleotide
uucuugugcauuuaacaca

SEQ ID NO: 3230300 - RNA, 19 nt, Artificial Sequence
  Description of Artificial Sequence: Synthetic oligonucleotide
auuauauugccuuuucuuu

SEQ ID NO: 3230301 - RNA, 19 nt, Artificial Sequence
  Description of Artificial Sequence: Synthetic oligonucleotide
augggucucucuuuguagc

SEQ ID NO: 3230302 - RNA, 19 nt, Artificial Sequence
  Description of Artificial Sequence: Synthetic oligonucleotide
caugcugcuagagagaaag

SEQ ID NO: 3230303 - RNA, 19 nt, Artificial Sequence
  Description of Artificial Sequence: Synthetic oligonucleotide
ucuugugcauuuaacacau

SEQ ID NO: 3230304 - RNA, 19 nt, Artificial Sequence
  Description of Artificial Sequence: Synthetic oligonucleotide
ugcaauucuaauaaucauu

SEQ ID NO: 3230305 - RNA, 19 nt, Artificial Sequence
  Description of Artificial Sequence: Synthetic oligonucleotide
uaaauuccauaucaugggu

SEQ ID NO: 3230306 - RNA, 19 nt, Artificial Sequence
  Description of Artificial Sequence: Synthetic oligonucleotide
uagcuaaaugguuugcugc

SEQ ID NO: 3230307 - RNA, 19 nt, Artificial Sequence
  Description of Artificial Sequence: Synthetic oligonucleotide
uugugcauuuaacacauaa

SEQ ID NO: 3230308 - RNA, 19 nt, Artificial Sequence
  Description of Artificial Sequence: Synthetic oligonucleotide
cuugaauuggcccuguauc

SEQ ID NO: 3230309 - RNA, 19 nt, Artificial Sequence
  Description of Artificial Sequence: Synthetic oligonucleotide
aaguucucccaauuuauaa

SEQ ID NO: 3230310 - RNA, 19 nt, Artificial Sequence
  Description of Artificial Sequence: Synthetic oligonucleotide
uuaucuagucauuaagaau

SEQ ID NO: 3230311 - RNA, 19 nt, Artificial Sequence
  Description of Artificial Sequence: Synthetic oligonucleotide
ucugcauggugacucuugg

SEQ ID NO: 3230312 - RNA, 19 nt, Artificial Sequence
  Description of Artificial Sequence: Synthetic oligonucleotide
uaccucaugauuuauuauc

SEQ ID NO: 3230313 - RNA, 19 nt, Artificial Sequence
  Description of Artificial Sequence: Synthetic oligonucleotide
aaagcauuguggaaaauau

SEQ ID NO: 3230314 - RNA, 19 nt, Artificial Sequence
  Description of Artificial Sequence: Synthetic oligonucleotide
aaaaccugacuucucacua

SEQ ID NO: 3230315 - RNA, 19 nt, Artificial Sequence
  Description of Artificial Sequence: Synthetic oligonucleotide
aaggcuagguuuccuuuuc

SEQ ID NO: 3230316 - RNA, 19 nt, Artificial Sequence
  Description of Artificial Sequence: Synthetic oligonucleotide
caguuuugaagaauucugc

SEQ ID NO: 3230317 - RNA, 19 nt, Artificial Sequence
  Description of Artificial Sequence: Synthetic oligonucleotide
uuuauaauuauauaacacg

SEQ ID NO: 3230318 - RNA, 19 nt, Artificial Sequence
  Description of Artificial Sequence: Synthetic oligonucleotide
uuuauuuauaauuauauaa

SEQ ID NO: 3230319 - RNA, 19 nt, Artificial Sequence
  Description of Artificial Sequence: Synthetic oligonucleotide
auacauuuaaucuauuuac

SEQ ID NO: 3230320 - RNA, 19 nt, Artificial Sequence
  Description of Artificial Sequence: Synthetic oligonucleotide
uauucuaacuuagagaugg

SEQ ID NO: 3230321 - RNA, 19 nt, Artificial Sequence
  Description of Artificial Sequence: Synthetic oligonucleotide
uuauuuauaauuauauaac

SEQ ID NO: 3230322 - RNA, 19 nt, Artificial Sequence
  Description of Artificial Sequence: Synthetic oligonucleotide
auuuaaucuauuuacacug

SEQ ID NO: 3230323 - RNA, 19 nt, Artificial Sequence
  Description of Artificial Sequence: Synthetic oligonucleotide
uuauaauuauauaacacgu

SEQ ID NO: 3230324 - RNA, 19 nt, Artificial Sequence
  Description of Artificial Sequence: Synthetic oligonucleotide
ugcagcuuaauuuauaaag

SEQ ID NO: 3230325 - RNA, 19 nt, Artificial Sequence
  Description of Artificial Sequence: Synthetic oligonucleotide
uauauaacacguuuaauac

SEQ ID NO: 3230326 - RNA, 19 nt, Artificial Sequence
  Description of Artificial Sequence: Synthetic oligonucleotide
aaacuauucuaacuuagag

SEQ ID NO: 3230327 - RNA, 19 nt, Artificial Sequence
  Description of Artificial Sequence: Synthetic oligonucleotide
aaauccuuuauuuauaauu

SEQ ID NO: 3230328 - RNA, 19 nt, Artificial Sequence
  Description of Artificial Sequence: Synthetic oligonucleotide
acuauucuaacuuagagau

SEQ ID NO: 3230329 - RNA, 19 nt, Artificial Sequence
  Description of Artificial Sequence: Synthetic oligonucleotide
uguacaaaguauuuaaugu

SEQ ID NO: 3230330 - RNA, 19 nt, Artificial Sequence
  Description of Artificial Sequence: Synthetic oligonucleotide
uauuuauaauuauauaaca

SEQ ID NO: 3230331 - RNA, 19 nt, Artificial Sequence
  Description of Artificial Sequence: Synthetic oligonucleotide
acguuuaauacauuuaauc

SEQ ID NO: 3230332 - RNA, 19 nt, Artificial Sequence
  Description of Artificial Sequence: Synthetic oligonucleotide
uuauauaacacguuuaaua

SEQ ID NO: 3230333 - RNA, 19 nt, Artificial Sequence
  Description of Artificial Sequence: Synthetic oligonucleotide
aaguauuuaauguucaaaa

SEQ ID NO: 3230334 - RNA, 19 nt, Artificial Sequence
  Description of Artificial Sequence: Synthetic oligonucleotide
acauuuaaucuauuuacac

SEQ ID NO: 3230335 - RNA, 19 nt, Artificial Sequence
  Description of Artificial Sequence: Synthetic oligonucleotide
aaucuauuuacacuguaca

SEQ ID NO: 3230336 - RNA, 19 nt, Artificial Sequence
  Description of Artificial Sequence: Synthetic oligonucleotide
aauuauauaacacguuuaa

SEQ ID NO: 3230337 - RNA, 19 nt, Artificial Sequence
  Description of Artificial Sequence: Synthetic oligonucleotide
uuuaauacauuuaaucuau

SEQ ID NO: 3230338 - RNA, 19 nt, Artificial Sequence
  Description of Artificial Sequence: Synthetic oligonucleotide
aauacauuuaaucuauuua

SEQ ID NO: 3230339 - RNA, 19 nt, Artificial Sequence
  Description of Artificial Sequence: Synthetic oligonucleotide
auuuauaauuauauaacac

SEQ ID NO: 3230340 - RNA, 19 nt, Artificial Sequence
  Description of Artificial Sequence: Synthetic oligonucleotide
uauaacacguuuaauacau

SEQ ID NO: 3230341 - RNA, 19 nt, Artificial Sequence
  Description of Artificial Sequence: Synthetic oligonucleotide
aacuauucuaacuuagaga

SEQ ID NO: 3230342 - RNA, 19 nt, Artificial Sequence
  Description of Artificial Sequence: Synthetic oligonucleotide
ucuaacuuagagauggucu

SEQ ID NO: 3230343 - RNA, 19 nt, Artificial Sequence
  Description of Artificial Sequence: Synthetic oligonucleotide
uuagagauggucucuaagc

SEQ ID NO: 3230344 - RNA, 19 nt, Artificial Sequence
  Description of Artificial Sequence: Synthetic oligonucleotide
cuauuuacacuguacaaag

SEQ ID NO: 3230345 - RNA, 19 nt, Artificial Sequence
  Description of Artificial Sequence: Synthetic oligonucleotide
aauuuauaaaggugcuuug

SEQ ID NO: 3230346 - RNA, 19 nt, Artificial Sequence
  Description of Artificial Sequence: Synthetic oligonucleotide
auaauuauauaacacguuu

SEQ ID NO: 3230347 - RNA, 19 nt, Artificial Sequence
  Description of Artificial Sequence: Synthetic oligonucleotide
uacaaaguauuuaauguuc

SEQ ID NO: 3230348 - RNA, 19 nt, Artificial Sequence
  Description of Artificial Sequence: Synthetic oligonucleotide
ucagauugcagcuuaauuu

SEQ ID NO: 3230349 - RNA, 19 nt, Artificial Sequence
  Description of Artificial Sequence: Synthetic oligonucleotide
uacauuuaaucuauuuaca

SEQ ID NO: 3230350 - RNA, 19 nt, Artificial Sequence
  Description of Artificial Sequence: Synthetic oligonucleotide
uaaucuauuuacacuguac

SEQ ID NO: 3230351 - RNA, 19 nt, Artificial Sequence
  Description of Artificial Sequence: Synthetic oligonucleotide
cuguacaaaguauuuaaug

SEQ ID NO: 3230352 - RNA, 19 nt, Artificial Sequence
  Description of Artificial Sequence: Synthetic oligonucleotide
cuaagcuucucccagguug

SEQ ID NO: 3230353 - RNA, 19 nt, Artificial Sequence
  Description of Artificial Sequence: Synthetic oligonucleotide
uggauggccauguuaacag

SEQ ID NO: 3230354 - RNA, 19 nt, Artificial Sequence
  Description of Artificial Sequence: Synthetic oligonucleotide
uaauuauauaacacguuua

SEQ ID NO: 3230355 - RNA, 19 nt, Artificial Sequence
  Description of Artificial Sequence: Synthetic oligonucleotide
uaagcuucucccagguugg

SEQ ID NO: 3230356 - RNA, 19 nt, Artificial Sequence
  Description of Artificial Sequence: Synthetic oligonucleotide
uuuauaaaggugcuuugua

SEQ ID NO: 3230357 - RNA, 19 nt, Artificial Sequence
  Description of Artificial Sequence: Synthetic oligonucleotide
uaauuuauaaaggugcuuu

SEQ ID NO: 3230358 - RNA, 19 nt, Artificial Sequence
  Description of Artificial Sequence: Synthetic oligonucleotide
uuuacacuguacaaaguau

SEQ ID NO: 3230359 - RNA, 19 nt, Artificial Sequence
  Description of Artificial Sequence: Synthetic oligonucleotide
ucuauuuacacuguacaaa

SEQ ID NO: 3230360 - RNA, 19 nt, Artificial Sequence
  Description of Artificial Sequence: Synthetic oligonucleotide
uauaauuauauaacacguu

SEQ ID NO: 3230361 - RNA, 19 nt, Artificial Sequence
  Description of Artificial Sequence: Synthetic oligonucleotide
aaaguauuuaauguucaaa

SEQ ID NO: 3230362 - RNA, 19 nt, Artificial Sequence
  Description of Artificial Sequence: Synthetic oligonucleotide
auuuacacuguacaaagua

SEQ ID NO: 3230363 - RNA, 19 nt, Artificial Sequence
  Description of Artificial Sequence: Synthetic oligonucleotide
gcuuaauuuauaaaggugc

SEQ ID NO: 3230364 - RNA, 19 nt, Artificial Sequence
  Description of Artificial Sequence: Synthetic oligonucleotide
auggucucuaagcuucucc

SEQ ID NO: 3230365 - RNA, 19 nt, Artificial Sequence
  Description of Artificial Sequence: Synthetic oligonucleotide
uuauaaaggugcuuuguau

SEQ ID NO: 3230366 - RNA, 19 nt, Artificial Sequence
  Description of Artificial Sequence: Synthetic oligonucleotide
aauccuuuauuuauaauua

SEQ ID NO: 3230367 - RNA, 19 nt, Artificial Sequence
  Description of Artificial Sequence: Synthetic oligonucleotide
uuuaaucuauuuacacugu

SEQ ID NO: 3230368 - RNA, 19 nt, Artificial Sequence
  Description of Artificial Sequence: Synthetic oligonucleotide
guuuaauacauuuaaucua

SEQ ID NO: 3230369 - RNA, 19 nt, Artificial Sequence
  Description of Artificial Sequence: Synthetic oligonucleotide
uagagauggucucuaagcu

SEQ ID NO: 3230370 - RNA, 19 nt, Artificial Sequence
  Description of Artificial Sequence: Synthetic oligonucleotide
auauaacacguuuaauaca

SEQ ID NO: 3230371 - RNA, 19 nt, Artificial Sequence
  Description of Artificial Sequence: Synthetic oligonucleotide
uauaaaggugcuuuguauu

SEQ ID NO: 3230372 - RNA, 19 nt, Artificial Sequence
  Description of Artificial Sequence: Synthetic oligonucleotide
cuaacuuagagauggucuc

SEQ ID NO: 3230373 - RNA, 19 nt, Artificial Sequence
  Description of Artificial Sequence: Synthetic oligonucleotide
acacguuuaauacauuuaa

SEQ ID NO: 3230374 - RNA, 19 nt, Artificial Sequence
  Description of Artificial Sequence: Synthetic oligonucleotide
uaauacauuuaaucuauuu

SEQ ID NO: 3230375 - RNA, 19 nt, Artificial Sequence
  Description of Artificial Sequence: Synthetic oligonucleotide
uccuuuauuuauaauuaua

SEQ ID NO: 3230376 - RNA, 19 nt, Artificial Sequence
  Description of Artificial Sequence: Synthetic oligonucleotide
auugcagcuuaauuuauaa

SEQ ID NO: 3230377 - RNA, 19 nt, Artificial Sequence
  Description of Artificial Sequence: Synthetic oligonucleotide
aaaacuauucuaacuuaga

SEQ ID NO: 3230378 - RNA, 19 nt, Artificial Sequence
  Description of Artificial Sequence: Synthetic oligonucleotide
uuacacuguacaaaguauu

SEQ ID NO: 3230379 - RNA, 19 nt, Artificial Sequence
  Description of Artificial Sequence: Synthetic oligonucleotide
uuaaucuauuuacacugua

SEQ ID NO: 3230380 - RNA, 19 nt, Artificial Sequence
  Description of Artificial Sequence: Synthetic oligonucleotide
uaacacguuuaauacauuu

SEQ ID NO: 3230381 - RNA, 19 nt, Artificial Sequence
  Description of Artificial Sequence: Synthetic oligonucleotide
cuuagagauggucucuaag

SEQ ID NO: 3230382 - RNA, 19 nt, Artificial Sequence
  Description of Artificial Sequence: Synthetic oligonucleotide
uggucucuaagcuucuccc

SEQ ID NO: 3230383 - RNA, 19 nt, Artificial Sequence
  Description of Artificial Sequence: Synthetic oligonucleotide
ucccagguuggcuggaugg

SEQ ID NO: 3230384 - RNA, 19 nt, Artificial Sequence
  Description of Artificial Sequence: Synthetic oligonucleotide
uauuuacacuguacaaagu

SEQ ID NO: 3230385 - RNA, 19 nt, Artificial Sequence
  Description of Artificial Sequence: Synthetic oligonucleotide
ucucuaagcuucucccagg

SEQ ID NO: 3230386 - RNA, 19 nt, Artificial Sequence
  Description of Artificial Sequence: Synthetic oligonucleotide
auaaaggugcuuuguauua

SEQ ID NO: 3230387 - RNA, 19 nt, Artificial Sequence
  Description of Artificial Sequence: Synthetic oligonucleotide
aucuauuuacacuguacaa

SEQ ID NO: 3230388 - RNA, 19 nt, Artificial Sequence
  Description of Artificial Sequence: Synthetic oligonucleotide
gcagcuuaauuuauaaagg

SEQ ID NO: 3230389 - RNA, 19 nt, Artificial Sequence
  Description of Artificial Sequence: Synthetic oligonucleotide
agcuuaauuuauaaaggug

SEQ ID NO: 3230390 - RNA, 19 nt, Artificial Sequence
  Description of Artificial Sequence: Synthetic oligonucleotide
auuuauaaaggugcuuugu

SEQ ID NO: 3230391 - RNA, 19 nt, Artificial Sequence
  Description of Artificial Sequence: Synthetic oligonucleotide
uacacuguacaaaguauuu

SEQ ID NO: 3230392 - RNA, 19 nt, Artificial Sequence
  Description of Artificial Sequence: Synthetic oligonucleotide
aaacucagauugcagcuua

SEQ ID NO: 3230393 - RNA, 19 nt, Artificial Sequence
  Description of Artificial Sequence: Synthetic oligonucleotide
gagauggucucuaagcuuc

SEQ ID NO: 3230394 - RNA, 19 nt, Artificial Sequence
  Description of Artificial Sequence: Synthetic oligonucleotide
cuuuauuuauaauuauaua

SEQ ID NO: 3230395 - RNA, 19 nt, Artificial Sequence
  Description of Artificial Sequence: Synthetic oligonucleotide
gucucuaagcuucucccag

SEQ ID NO: 3230396 - RNA, 19 nt, Artificial Sequence
  Description of Artificial Sequence: Synthetic oligonucleotide
aaaggugcuuuguauuauu

SEQ ID NO: 3230397 - RNA, 19 nt, Artificial Sequence
  Description of Artificial Sequence: Synthetic oligonucleotide
acaaaguauuuaauguuca

SEQ ID NO: 3230398 - RNA, 19 nt, Artificial Sequence
  Description of Artificial Sequence: Synthetic oligonucleotide
cauuuaaucuauuuacacu

SEQ ID NO: 3230399 - RNA, 19 nt, Artificial Sequence
  Description of Artificial Sequence: Synthetic oligonucleotide
cacuguacaaaguauuuaa

SEQ ID NO: 3230400 - RNA, 19 nt, Artificial Sequence
  Description of Artificial Sequence: Synthetic oligonucleotide
uuaauuuauaaaggugcuu

SEQ ID NO: 3230401 - RNA, 19 nt, Artificial Sequence
  Description of Artificial Sequence: Synthetic oligonucleotide
cuuaauuuauaaaggugcu

SEQ ID NO: 3230402 - RNA, 19 nt, Artificial Sequence
  Description of Artificial Sequence: Synthetic oligonucleotide
auuauauaacacguuuaau

SEQ ID NO: 3230403 - RNA, 19 nt, Artificial Sequence
  Description of Artificial Sequence: Synthetic oligonucleotide
auccuuuauuuauaauuau

SEQ ID NO: 3230404 - RNA, 19 nt, Artificial Sequence
  Description of Artificial Sequence: Synthetic oligonucleotide
aacacguuuaauacauuua

SEQ ID NO: 3230405 - RNA, 19 nt, Artificial Sequence
  Description of Artificial Sequence: Synthetic oligonucleotide
cuauucuaacuuagagaug

SEQ ID NO: 3230406 - RNA, 19 nt, Artificial Sequence
  Description of Artificial Sequence: Synthetic oligonucleotide
uuaauacauuuaaucuauu

SEQ ID NO: 3230407 - RNA, 19 nt, Artificial Sequence
  Description of Artificial Sequence: Synthetic oligonucleotide
uucuaacuuagagaugguc

SEQ ID NO: 3230408 - RNA, 19 nt, Artificial Sequence
  Description of Artificial Sequence: Synthetic oligonucleotide
aaaacucagauugcagcuu

SEQ ID NO: 3230409 - RNA, 19 nt, Artificial Sequence
  Description of Artificial Sequence: Synthetic oligonucleotide
cagauugcagcuuaauuua

SEQ ID NO: 3230410 - RNA, 19 nt, Artificial Sequence
  Description of Artificial Sequence: Synthetic oligonucleotide
ggugcuuuguauuauuaaa

SEQ ID NO: 3230411 - RNA, 19 nt, Artificial Sequence
  Description of Artificial Sequence: Synthetic oligonucleotide
agagauggucucuaagcuu

SEQ ID NO: 3230412 - RNA, 19 nt, Artificial Sequence
  Description of Artificial Sequence: Synthetic oligonucleotide
uaacuuagagauggucucu

SEQ ID NO: 3230413 - RNA, 19 nt, Artificial Sequence
  Description of Artificial Sequence: Synthetic oligonucleotide
uugcagcuuaauuuauaaa

SEQ ID NO: 3230414 - RNA, 19 nt, Artificial Sequence
  Description of Artificial Sequence: Synthetic oligonucleotide
aggugcuuuguauuauuaa

SEQ ID NO: 3230415 - RNA, 19 nt, Artificial Sequence
  Description of Artificial Sequence: Synthetic oligonucleotide
guacaaaguauuuaauguu

SEQ ID NO: 3230416 - RNA, 19 nt, Artificial Sequence
  Description of Artificial Sequence: Synthetic oligonucleotide
uaaaggugcuuuguauuau

SEQ ID NO: 3230417 - RNA, 19 nt, Artificial Sequence
  Description of Artificial Sequence: Synthetic oligonucleotide
auuauuacuaaauaaaacc

SEQ ID NO: 3230418 - RNA, 19 nt, Artificial Sequence
  Description of Artificial Sequence: Synthetic oligonucleotide
uaaaacauucuaaugaggg

SEQ ID NO: 3230419 - RNA, 19 nt, Artificial Sequence
  Description of Artificial Sequence: Synthetic oligonucleotide
ucaacacucagcaagaggg

SEQ ID NO: 3230420 - RNA, 19 nt, Artificial Sequence
  Description of Artificial Sequence: Synthetic oligonucleotide
uauuaugucagcacaaagg

SEQ ID NO: 3230421 - RNA, 19 nt, Artificial Sequence
  Description of Artificial Sequence: Synthetic oligonucleotide
ucuaaagaaaauccuaccg

SEQ ID NO: 3230422 - RNA, 19 nt, Artificial Sequence
  Description of Artificial Sequence: Synthetic oligonucleotide
agaacugcuacauacacac

SEQ ID NO: 3230423 - RNA, 19 nt, Artificial Sequence
  Description of Artificial Sequence: Synthetic oligonucleotide
uauaucaacaguauuacac

SEQ ID NO: 3230424 - RNA, 19 nt, Artificial Sequence
  Description of Artificial Sequence: Synthetic oligonucleotide
aacaguauuacacacguca

SEQ ID NO: 3230425 - RNA, 19 nt, Artificial Sequence
  Description of Artificial Sequence: Synthetic oligonucleotide
aaaucaaacaacuccaaca

SEQ ID NO: 3230426 - RNA, 19 nt, Artificial Sequence
  Description of Artificial Sequence: Synthetic oligonucleotide
aauuauuacuaaauaaaac

SEQ ID NO: 3230427 - RNA, 19 nt, Artificial Sequence
  Description of Artificial Sequence: Synthetic oligonucleotide
uuauuacuaaauaaaacca

SEQ ID NO: 3230428 - RNA, 19 nt, Artificial Sequence
  Description of Artificial Sequence: Synthetic oligonucleotide
aauaggaagaaguacauua

SEQ ID NO: 3230429 - RNA, 19 nt, Artificial Sequence
  Description of Artificial Sequence: Synthetic oligonucleotide
uuggagauaaacuagcuug

SEQ ID NO: 3230430 - RNA, 19 nt, Artificial Sequence
  Description of Artificial Sequence: Synthetic oligonucleotide
aacuacagauaucaauacc

SEQ ID NO: 3230431 - RNA, 19 nt, Artificial Sequence
  Description of Artificial Sequence: Synthetic oligonucleotide
auagaagugagucagauaa

SEQ ID NO: 3230432 - RNA, 19 nt, Artificial Sequence
  Description of Artificial Sequence: Synthetic oligonucleotide
auuauguucagaauaaaac

SEQ ID NO: 3230433 - RNA, 19 nt, Artificial Sequence
  Description of Artificial Sequence: Synthetic oligonucleotide
ucuuucauaauacugcuga

SEQ ID NO: 3230434 - RNA, 19 nt, Artificial Sequence
  Description of Artificial Sequence: Synthetic oligonucleotide
auuugaacaguuucuaaac

SEQ ID NO: 3230435 - RNA, 19 nt, Artificial Sequence
  Description of Artificial Sequence: Synthetic oligonucleotide
gagucagauaacuagaaag

SEQ ID NO: 3230436 - RNA, 19 nt, Artificial Sequence
  Description of Artificial Sequence: Synthetic oligonucleotide
aaaguuaauaggaagaagu

SEQ ID NO: 3230437 - RNA, 19 nt, Artificial Sequence
  Description of Artificial Sequence: Synthetic oligonucleotide
auagucaugaacuauacaa

SEQ ID NO: 3230438 - RNA, 19 nt, Artificial Sequence
  Description of Artificial Sequence: Synthetic oligonucleotide
uaaagaaaauccuaccgag

SEQ ID NO: 3230439 - RNA, 19 nt, Artificial Sequence
  Description of Artificial Sequence: Synthetic oligonucleotide
uucaauuauguucagaaua

SEQ ID NO: 3230440 - RNA, 19 nt, Artificial Sequence
  Description of Artificial Sequence: Synthetic oligonucleotide
ugcuuuacaugcaaaagag

SEQ ID NO: 3230441 - RNA, 19 nt, Artificial Sequence
  Description of Artificial Sequence: Synthetic oligonucleotide
uuuucuuaaaaguaagcac

SEQ ID NO: 3230442 - RNA, 19 nt, Artificial Sequence
  Description of Artificial Sequence: Synthetic oligonucleotide
auaucaauaccuguggagc

SEQ ID NO: 3230443 - RNA, 19 nt, Artificial Sequence
  Description of Artificial Sequence: Synthetic oligonucleotide
agcuucuuaacauuugugg

SEQ ID NO: 3230444 - RNA, 19 nt, Artificial Sequence
  Description of Artificial Sequence: Synthetic oligonucleotide
aacaggaggugucaucugc

SEQ ID NO: 3230445 - RNA, 19 nt, Artificial Sequence
  Description of Artificial Sequence: Synthetic oligonucleotide
uuuuaaaagacagauuucu

SEQ ID NO: 3230446 - RNA, 19 nt, Artificial Sequence
  Description of Artificial Sequence: Synthetic oligonucleotide
ucuaucuauugaaagcccg

SEQ ID NO: 3230447 - RNA, 19 nt, Artificial Sequence
  Description of Artificial Sequence: Synthetic oligonucleotide
aauuuucaugaucagaaau

SEQ ID NO: 3230448 - RNA, 19 nt, Artificial Sequence
  Description of Artificial Sequence: Synthetic oligonucleotide
uuaaaacucaaacacaguu

SEQ ID NO: 3230449 - RNA, 19 nt, Artificial Sequence
  Description of Artificial Sequence: Synthetic oligonucleotide
aacucgucacuuuauuuac

SEQ ID NO: 3230450 - RNA, 19 nt, Artificial Sequence
  Description of Artificial Sequence: Synthetic oligonucleotide
uagaacauugcucaaguga

SEQ ID NO: 3230451 - RNA, 19 nt, Artificial Sequence
  Description of Artificial Sequence: Synthetic oligonucleotide
aacugcuacauacacacca

SEQ ID NO: 3230452 - RNA, 19 nt, Artificial Sequence
  Description of Artificial Sequence: Synthetic oligonucleotide
auuuaaagcauaaacagcu

SEQ ID NO: 3230453 - RNA, 19 nt, Artificial Sequence
  Description of Artificial Sequence: Synthetic oligonucleotide
gauaucaauaccuguggag

SEQ ID NO: 3230454 - RNA, 19 nt, Artificial Sequence
  Description of Artificial Sequence: Synthetic oligonucleotide
auuaugucagcacaaaggu

SEQ ID NO: 3230455 - RNA, 19 nt, Artificial Sequence
  Description of Artificial Sequence: Synthetic oligonucleotide
aaaggauucuucuccaugu

SEQ ID NO: 3230456 - RNA, 19 nt, Artificial Sequence
  Description of Artificial Sequence: Synthetic oligonucleotide
cuuaaaaguaagcacugcc

SEQ ID NO: 3230457 - RNA, 19 nt, Artificial Sequence
  Description of Artificial Sequence: Synthetic oligonucleotide
aaccauugauaacagaacu

SEQ ID NO: 3230458 - RNA, 19 nt, Artificial Sequence
  Description of Artificial Sequence: Synthetic oligonucleotide
uuuucaagcaacugacuag

SEQ ID NO: 3230459 - RNA, 19 nt, Artificial Sequence
  Description of Artificial Sequence: Synthetic oligonucleotide
uauuacuaaauaaaaccaa

SEQ ID NO: 3230460 - RNA, 19 nt, Artificial Sequence
  Description of Artificial Sequence: Synthetic oligonucleotide
aaagaaaauccuaccgagc

SEQ ID NO: 3230461 - RNA, 19 nt, Artificial Sequence
  Description of Artificial Sequence: Synthetic oligonucleotide
aaaucacaagcuucucuac

SEQ ID NO: 3230462 - RNA, 19 nt, Artificial Sequence
  Description of Artificial Sequence: Synthetic oligonucleotide
acucaaacacaguuugugc

SEQ ID NO: 3230463 - RNA, 19 nt, Artificial Sequence
  Description of Artificial Sequence: Synthetic oligonucleotide
gaaacuggaacuucccuag

SEQ ID NO: 3230464 - RNA, 19 nt, Artificial Sequence
  Description of Artificial Sequence: Synthetic oligonucleotide
acagaauuuauuuguucac

SEQ ID NO: 3230465 - RNA, 19 nt, Artificial Sequence
  Description of Artificial Sequence: Synthetic oligonucleotide
aauaaaacucgucacuuua

SEQ ID NO: 3230466 - RNA, 19 nt, Artificial Sequence
  Description of Artificial Sequence: Synthetic oligonucleotide
aguauuacacacgucaauc

SEQ ID NO: 3230467 - RNA, 19 nt, Artificial Sequence
  Description of Artificial Sequence: Synthetic oligonucleotide
uucacagaaaaugacacca

SEQ ID NO: 3230468 - RNA, 19 nt, Artificial Sequence
  Description of Artificial Sequence: Synthetic oligonucleotide
uucauaauacugcugauuu

SEQ ID NO: 3230469 - RNA, 19 nt, Artificial Sequence
  Description of Artificial Sequence: Synthetic oligonucleotide
cuucucuacaccuagucag

SEQ ID NO: 3230470 - RNA, 19 nt, Artificial Sequence
  Description of Artificial Sequence: Synthetic oligonucleotide
acuaaauaaaaccaauuuu

SEQ ID NO: 3230471 - RNA, 19 nt, Artificial Sequence
  Description of Artificial Sequence: Synthetic oligonucleotide
aaauuauuacuaaauaaaa

SEQ ID NO: 3230472 - RNA, 19 nt, Artificial Sequence
  Description of Artificial Sequence: Synthetic oligonucleotide
ucuauugaaagcccguugu

SEQ ID NO: 3230473 - RNA, 19 nt, Artificial Sequence
  Description of Artificial Sequence: Synthetic oligonucleotide
uccccauaaaguuaauagg

SEQ ID NO: 3230474 - RNA, 19 nt, Artificial Sequence
  Description of Artificial Sequence: Synthetic oligonucleotide
uaaccaucauugaacaugc

SEQ ID NO: 3230475 - RNA, 19 nt, Artificial Sequence
  Description of Artificial Sequence: Synthetic oligonucleotide
aaaccauugauaacagaac

SEQ ID NO: 3230476 - RNA, 19 nt, Artificial Sequence
  Description of Artificial Sequence: Synthetic oligonucleotide
auccgaucucacuagaugg

SEQ ID NO: 3230477 - RNA, 19 nt, Artificial Sequence
  Description of Artificial Sequence: Synthetic oligonucleotide
aucacaagcuucucuacac

SEQ ID NO: 3230478 - RNA, 19 nt, Artificial Sequence
  Description of Artificial Sequence: Synthetic oligonucleotide
cauaaaguuaauaggaaga

SEQ ID NO: 3230479 - RNA, 19 nt, Artificial Sequence
  Description of Artificial Sequence: Synthetic oligonucleotide
aaguaagcacugccaaagc

SEQ ID NO: 3230480 - RNA, 19 nt, Artificial Sequence
  Description of Artificial Sequence: Synthetic oligonucleotide
aacagaacugccgauagca

SEQ ID NO: 3230481 - RNA, 19 nt, Artificial Sequence
  Description of Artificial Sequence: Synthetic oligonucleotide
ucagaauaaaacucgucac

SEQ ID NO: 3230482 - RNA, 19 nt, Artificial Sequence
  Description of Artificial Sequence: Synthetic oligonucleotide
auugaaagcccguuguaag

SEQ ID NO: 3230483 - RNA, 19 nt, Artificial Sequence
  Description of Artificial Sequence: Synthetic oligonucleotide
aacauugcucaagugaaag

SEQ ID NO: 3230484 - RNA, 19 nt, Artificial Sequence
  Description of Artificial Sequence: Synthetic oligonucleotide
aguagaaacuggaacuucc

SEQ ID NO: 3230485 - RNA, 19 nt, Artificial Sequence
  Description of Artificial Sequence: Synthetic oligonucleotide
agucagauaacuagaaagg

SEQ ID NO: 3230486 - RNA, 19 nt, Artificial Sequence
  Description of Artificial Sequence: Synthetic oligonucleotide
uaccaaauagaacauugcu

SEQ ID NO: 3230487 - RNA, 19 nt, Artificial Sequence
  Description of Artificial Sequence: Synthetic oligonucleotide
aacacauccgaucucacua

SEQ ID NO: 3230488 - RNA, 19 nt, Artificial Sequence
  Description of Artificial Sequence: Synthetic oligonucleotide
aaacucgucacuuuauuua

SEQ ID NO: 3230489 - RNA, 19 nt, Artificial Sequence
  Description of Artificial Sequence: Synthetic oligonucleotide
uggugaaugcaguagaaac

SEQ ID NO: 3230490 - RNA, 19 nt, Artificial Sequence
  Description of Artificial Sequence: Synthetic oligonucleotide
uuaccaaauagaacauugc

SEQ ID NO: 3230491 - RNA, 19 nt, Artificial Sequence
  Description of Artificial Sequence: Synthetic oligonucleotide
guuaauaggaagaaguaca

SEQ ID NO: 3230492 - RNA, 19 nt, Artificial Sequence
  Description of Artificial Sequence: Synthetic oligonucleotide
ugaacaguuucuaaacuuc

SEQ ID NO: 3230493 - RNA, 19 nt, Artificial Sequence
  Description of Artificial Sequence: Synthetic oligonucleotide
auaacagaacugccgauag

SEQ ID NO: 3230494 - RNA, 19 nt, Artificial Sequence
  Description of Artificial Sequence: Synthetic oligonucleotide
caaagguugagcuggacac

SEQ ID NO: 3230495 - RNA, 19 nt, Artificial Sequence
  Description of Artificial Sequence: Synthetic oligonucleotide
auaaacuagcuugaggguc

SEQ ID NO: 3230496 - RNA, 19 nt, Artificial Sequence
  Description of Artificial Sequence: Synthetic oligonucleotide
gauagcaaugcugagggug

SEQ ID NO: 3230497 - RNA, 19 nt, Artificial Sequence
  Description of Artificial Sequence: Synthetic oligonucleotide
ucacugaaacuacagauau

SEQ ID NO: 3230498 - RNA, 19 nt, Artificial Sequence
  Description of Artificial Sequence: Synthetic oligonucleotide
uguggagcauaaaucagug

SEQ ID NO: 3230499 - RNA, 19 nt, Artificial Sequence
  Description of Artificial Sequence: Synthetic oligonucleotide
guaaccaucauugaacaug

SEQ ID NO: 3230500 - RNA, 19 nt, Artificial Sequence
  Description of Artificial Sequence: Synthetic oligonucleotide
aaagcccaaugacaagaac

SEQ ID NO: 3230501 - RNA, 19 nt, Artificial Sequence
  Description of Artificial Sequence: Synthetic oligonucleotide
acuuaggauuuucucauag

SEQ ID NO: 3230502 - RNA, 19 nt, Artificial Sequence
  Description of Artificial Sequence: Synthetic oligonucleotide
ucaugaucagaaaugguau

SEQ ID NO: 3230503 - RNA, 19 nt, Artificial Sequence
  Description of Artificial Sequence: Synthetic oligonucleotide
agaaaugguauuaugucag

SEQ ID NO: 3230504 - RNA, 19 nt, Artificial Sequence
  Description of Artificial Sequence: Synthetic oligonucleotide
acuacagauaucaauaccu

SEQ ID NO: 3230505 - RNA, 19 nt, Artificial Sequence
  Description of Artificial Sequence: Synthetic oligonucleotide
ugaaaucacaagcuucucu

SEQ ID NO: 3230506 - RNA, 19 nt, Artificial Sequence
  Description of Artificial Sequence: Synthetic oligonucleotide
uuuguggucugacagaauu

SEQ ID NO: 3230507 - RNA, 19 nt, Artificial Sequence
  Description of Artificial Sequence: Synthetic oligonucleotide
ucuacaccuagucaguccu

SEQ ID NO: 3230508 - RNA, 19 nt, Artificial Sequence
  Description of Artificial Sequence: Synthetic oligonucleotide
uuaauaggaagaaguacau

SEQ ID NO: 3230509 - RNA, 19 nt, Artificial Sequence
  Description of Artificial Sequence: Synthetic oligonucleotide
gaaacuacagauaucaaua

SEQ ID NO: 3230510 - RNA, 19 nt, Artificial Sequence
  Description of Artificial Sequence: Synthetic oligonucleotide
acauuggagauaaacuagc

SEQ ID NO: 3230511 - RNA, 19 nt, Artificial Sequence
  Description of Artificial Sequence: Synthetic oligonucleotide
aaucacaagcuucucuaca

SEQ ID NO: 3230512 - RNA, 19 nt, Artificial Sequence
  Description of Artificial Sequence: Synthetic oligonucleotide
aauagucaugaacuauaca

SEQ ID NO: 3230513 - RNA, 19 nt, Artificial Sequence
  Description of Artificial Sequence: Synthetic oligonucleotide
agaaauaucacugcggcau

SEQ ID NO: 3230514 - RNA, 19 nt, Artificial Sequence
  Description of Artificial Sequence: Synthetic oligonucleotide
uuuacaccuuccaaaauua

SEQ ID NO: 3230515 - RNA, 19 nt, Artificial Sequence
  Description of Artificial Sequence: Synthetic oligonucleotide
cuuuaugaggcgaguaacc

SEQ ID NO: 3230516 - RNA, 19 nt, Artificial Sequence
  Description of Artificial Sequence: Synthetic oligonucleotide
uaaacuucggaggacuucc

SEQ ID NO: 3230517 - RNA, 19 nt, Artificial Sequence
  Description of Artificial Sequence: Synthetic oligonucleotide
ugcauuuucaaacaaggcc

SEQ ID NO: 3230518 - RNA, 19 nt, Artificial Sequence
  Description of Artificial Sequence: Synthetic oligonucleotide
gauuuauacucccaguugg

SEQ ID NO: 3230519 - RNA, 19 nt, Artificial Sequence
  Description of Artificial Sequence: Synthetic oligonucleotide
aaaagcaugaagcaucuga

SEQ ID NO: 3230520 - RNA, 19 nt, Artificial Sequence
  Description of Artificial Sequence: Synthetic oligonucleotide
aauaaucccacauucuucu

SEQ ID NO: 3230521 - RNA, 19 nt, Artificial Sequence
  Description of Artificial Sequence: Synthetic oligonucleotide
cuggauauagcuuuagugc

SEQ ID NO: 3230522 - RNA, 19 nt, Artificial Sequence
  Description of Artificial Sequence: Synthetic oligonucleotide
aaucccacauucuucuugg

SEQ ID NO: 3230523 - RNA, 19 nt, Artificial Sequence
  Description of Artificial Sequence: Synthetic oligonucleotide
uuuaagagcagcacucucc

SEQ ID NO: 3230524 - RNA, 19 nt, Artificial Sequence
  Description of Artificial Sequence: Synthetic oligonucleotide
aagcaugaagcaucugacc

SEQ ID NO: 3230525 - RNA, 19 nt, Artificial Sequence
  Description of Artificial Sequence: Synthetic oligonucleotide
uucacugggauaaauguga

SEQ ID NO: 3230526 - RNA, 19 nt, Artificial Sequence
  Description of Artificial Sequence: Synthetic oligonucleotide
uucauaagccuuucgagcc

SEQ ID NO: 3230527 - RNA, 19 nt, Artificial Sequence
  Description of Artificial Sequence: Synthetic oligonucleotide
aaagcaugaagcaucugac

SEQ ID NO: 3230528 - RNA, 19 nt, Artificial Sequence
  Description of Artificial Sequence: Synthetic oligonucleotide
uucgauugcaaacagccga

SEQ ID NO: 3230529 - RNA, 19 nt, Artificial Sequence
  Description of Artificial Sequence: Synthetic oligonucleotide
acuuauucugaaucuguac

SEQ ID NO: 3230530 - RNA, 19 nt, Artificial Sequence
  Description of Artificial Sequence: Synthetic oligonucleotide
gaucccuauagucaaauac

SEQ ID NO: 3230531 - RNA, 19 nt, Artificial Sequence
  Description of Artificial Sequence: Synthetic oligonucleotide
uggauauagcuuuagugcc

SEQ ID NO: 3230532 - RNA, 19 nt, Artificial Sequence
  Description of Artificial Sequence: Synthetic oligonucleotide
ugcuauauccccucgguag

SEQ ID NO: 3230533 - RNA, 19 nt, Artificial Sequence
  Description of Artificial Sequence: Synthetic oligonucleotide
uuugaggagauucuuggcu

SEQ ID NO: 3230534 - RNA, 19 nt, Artificial Sequence
  Description of Artificial Sequence: Synthetic oligonucleotide
auagggacugcucucaguc

SEQ ID NO: 3230535 - RNA, 19 nt, Artificial Sequence
  Description of Artificial Sequence: Synthetic oligonucleotide
uauagucaaauacuggaaa

SEQ ID NO: 3230536 - RNA, 19 nt, Artificial Sequence
  Description of Artificial Sequence: Synthetic oligonucleotide
aacaccuguccauauaugu

SEQ ID NO: 3230537 - RNA, 19 nt, Artificial Sequence
  Description of Artificial Sequence: Synthetic oligonucleotide
auagcuuuagugccucugc

SEQ ID NO: 3230538 - RNA, 19 nt, Artificial Sequence
  Description of Artificial Sequence: Synthetic oligonucleotide
uucuuggugaaauagcgcu

SEQ ID NO: 3230539 - RNA, 19 nt, Artificial Sequence
  Description of Artificial Sequence: Synthetic oligonucleotide
ucuggcauccucuauguug

SEQ ID NO: 3230540 - RNA, 19 nt, Artificial Sequence
  Description of Artificial Sequence: Synthetic oligonucleotide
uaugugcacagcagcaucg

SEQ ID NO: 3230541 - RNA, 19 nt, Artificial Sequence
  Description of Artificial Sequence: Synthetic oligonucleotide
ugacugaucguaaaucccc

SEQ ID NO: 3230542 - RNA, 19 nt, Artificial Sequence
  Description of Artificial Sequence: Synthetic oligonucleotide
uguaccuugcuauaucccc

SEQ ID NO: 3230543 - RNA, 19 nt, Artificial Sequence
  Description of Artificial Sequence: Synthetic oligonucleotide
cacacuaguguucaugugg

SEQ ID NO: 3230544 - RNA, 19 nt, Artificial Sequence
  Description of Artificial Sequence: Synthetic oligonucleotide
gagagauuuauacucccag

SEQ ID NO: 3230545 - RNA, 19 nt, Artificial Sequence
  Description of Artificial Sequence: Synthetic oligonucleotide
ucagugugcaauaauccca

SEQ ID NO: 3230546 - RNA, 19 nt, Artificial Sequence
  Description of Artificial Sequence: Synthetic oligonucleotide
aaaacuucaaauacauccu

SEQ ID NO: 3230547 - RNA, 19 nt, Artificial Sequence
  Description of Artificial Sequence: Synthetic oligonucleotide
guugacugaucguaaaucc

SEQ ID NO: 3230548 - RNA, 19 nt, Artificial Sequence
  Description of Artificial Sequence: Synthetic oligonucleotide
cucggcauaaagcagacug

SEQ ID NO: 3230549 - RNA, 19 nt, Artificial Sequence
  Description of Artificial Sequence: Synthetic oligonucleotide
guucauaagccuuucgagc

SEQ ID NO: 3230550 - RNA, 19 nt, Artificial Sequence
  Description of Artificial Sequence: Synthetic oligonucleotide
aacacauggacagcucggc

SEQ ID NO: 3230551 - RNA, 19 nt, Artificial Sequence
  Description of Artificial Sequence: Synthetic oligonucleotide
agcaucgaucccuauaguc

SEQ ID NO: 3230552 - RNA, 19 nt, Artificial Sequence
  Description of Artificial Sequence: Synthetic oligonucleotide
uuuuagugugccacccugg

SEQ ID NO: 3230553 - RNA, 19 nt, Artificial Sequence
  Description of Artificial Sequence: Synthetic oligonucleotide
cuuguaccuugcuauaucc

SEQ ID NO: 3230554 - RNA, 19 nt, Artificial Sequence
  Description of Artificial Sequence: Synthetic oligonucleotide
acaggucugucccagacag

SEQ ID NO: 3230555 - RNA, 19 nt, Artificial Sequence
  Description of Artificial Sequence: Synthetic oligonucleotide
gucuuguuagcacuguggg

SEQ ID NO: 3230556 - RNA, 19 nt, Artificial Sequence
  Description of Artificial Sequence: Synthetic oligonucleotide
ucccuauagucaaauacug

SEQ ID NO: 3230557 - RNA, 19 nt, Artificial Sequence
  Description of Artificial Sequence: Synthetic oligonucleotide
uagaacacaccuuugcuuc

SEQ ID NO: 3230558 - RNA, 19 nt, Artificial Sequence
  Description of Artificial Sequence: Synthetic oligonucleotide
acauaugcccuccagagaa

SEQ ID NO: 3230559 - RNA, 19 nt, Artificial Sequence
  Description of Artificial Sequence: Synthetic oligonucleotide
uugacugaucguaaauccc

SEQ ID NO: 3230560 - RNA, 19 nt, Artificial Sequence
  Description of Artificial Sequence: Synthetic oligonucleotide
cuuauucugaaucuguaca

SEQ ID NO: 3230561 - RNA, 19 nt, Artificial Sequence
  Description of Artificial Sequence: Synthetic oligonucleotide
uaaucccacauucuucuug

SEQ ID NO: 3230562 - RNA, 19 nt, Artificial Sequence
  Description of Artificial Sequence: Synthetic oligonucleotide
aaucgcagcagacuuguau

SEQ ID NO: 3230563 - RNA, 19 nt, Artificial Sequence
  Description of Artificial Sequence: Synthetic oligonucleotide
cuaguguucauguggaauc

SEQ ID NO: 3230564 - RNA, 19 nt, Artificial Sequence
  Description of Artificial Sequence: Synthetic oligonucleotide
uagucaaauacuggaaaag

SEQ ID NO: 3230565 - RNA, 19 nt, Artificial Sequence
  Description of Artificial Sequence: Synthetic oligonucleotide
aguccaaggacucugcagu

SEQ ID NO: 3230566 - RNA, 19 nt, Artificial Sequence
  Description of Artificial Sequence: Synthetic oligonucleotide
gauaaaugugacuggcuca

SEQ ID NO: 3230567 - RNA, 19 nt, Artificial Sequence
  Description of Artificial Sequence: Synthetic oligonucleotide
auaaaugugacuggcucag

SEQ ID NO: 3230568 - RNA, 19 nt, Artificial Sequence
  Description of Artificial Sequence: Synthetic oligonucleotide
uugcauuuucaaacaaggc

SEQ ID NO: 3230569 - RNA, 19 nt, Artificial Sequence
  Description of Artificial Sequence: Synthetic oligonucleotide
uacacacuaguguucaugu

SEQ ID NO: 3230570 - RNA, 19 nt, Artificial Sequence
  Description of Artificial Sequence: Synthetic oligonucleotide
gaggcaaaaguuguugcgg

SEQ ID NO: 3230571 - RNA, 19 nt, Artificial Sequence
  Description of Artificial Sequence: Synthetic oligonucleotide
agucagucgaguuaacaca

SEQ ID NO: 3230572 - RNA, 19 nt, Artificial Sequence
  Description of Artificial Sequence: Synthetic oligonucleotide
auugcaaacagccgaggcu

SEQ ID NO: 3230573 - RNA, 19 nt, Artificial Sequence
  Description of Artificial Sequence: Synthetic oligonucleotide
uucucagucaucacaucca

SEQ ID NO: 3230574 - RNA, 19 nt, Artificial Sequence
  Description of Artificial Sequence: Synthetic oligonucleotide
agaggguacacacuagugu

SEQ ID NO: 3230575 - RNA, 19 nt, Artificial Sequence
  Description of Artificial Sequence: Synthetic oligonucleotide
uaccucucgagucaggcga

SEQ ID NO: 3230576 - RNA, 19 nt, Artificial Sequence
  Description of Artificial Sequence: Synthetic oligonucleotide
ucgauugcaaacagccgag

SEQ ID NO: 3230577 - RNA, 19 nt, Artificial Sequence
  Description of Artificial Sequence: Synthetic oligonucleotide
aguccugcagcgcauguuc

SEQ ID NO: 3230578 - RNA, 19 nt, Artificial Sequence
  Description of Artificial Sequence: Synthetic oligonucleotide
agacuuguaugcaucaggg

SEQ ID NO: 3230579 - RNA, 19 nt, Artificial Sequence
  Description of Artificial Sequence: Synthetic oligonucleotide
ugggaaguacuccauggca

SEQ ID NO: 3230580 - RNA, 19 nt, Artificial Sequence
  Description of Artificial Sequence: Synthetic oligonucleotide
cuuaggauuaaugcccagg

SEQ ID NO: 3230581 - RNA, 19 nt, Artificial Sequence
  Description of Artificial Sequence: Synthetic oligonucleotide
ucuccuuguuuccuaagga

SEQ ID NO: 3230582 - RNA, 19 nt, Artificial Sequence
  Description of Artificial Sequence: Synthetic oligonucleotide
cagucgaguuaacacaugg

SEQ ID NO: 3230583 - RNA, 19 nt, Artificial Sequence
  Description of Artificial Sequence: Synthetic oligonucleotide
cagacuuguaugcaucagg

SEQ ID NO: 3230584 - RNA, 19 nt, Artificial Sequence
  Description of Artificial Sequence: Synthetic oligonucleotide
caagcaaccacuccaggug

SEQ ID NO: 3230585 - RNA, 19 nt, Artificial Sequence
  Description of Artificial Sequence: Synthetic oligonucleotide
gugcauacugcuuccagag

SEQ ID NO: 3230586 - RNA, 19 nt, Artificial Sequence
  Description of Artificial Sequence: Synthetic oligonucleotide
uguaguugacugaucguaa

SEQ ID NO: 3230587 - RNA, 19 nt, Artificial Sequence
  Description of Artificial Sequence: Synthetic oligonucleotide
agaccuggugacuccgucc

SEQ ID NO: 3230588 - RNA, 19 nt, Artificial Sequence
  Description of Artificial Sequence: Synthetic oligonucleotide
auaugcccuccagagaacc

SEQ ID NO: 3230589 - RNA, 19 nt, Artificial Sequence
  Description of Artificial Sequence: Synthetic oligonucleotide
agagauuuauacucccagu

SEQ ID NO: 3230590 - RNA, 19 nt, Artificial Sequence
  Description of Artificial Sequence: Synthetic oligonucleotide
aaacagccgaggcuccagg

SEQ ID NO: 3230591 - RNA, 19 nt, Artificial Sequence
  Description of Artificial Sequence: Synthetic oligonucleotide
cucagcuucgauugcaaac

SEQ ID NO: 3230592 - RNA, 19 nt, Artificial Sequence
  Description of Artificial Sequence: Synthetic oligonucleotide
cagucagucgaguuaacac

SEQ ID NO: 3230593 - RNA, 19 nt, Artificial Sequence
  Description of Artificial Sequence: Synthetic oligonucleotide
uucccuuucucuuguaccu

SEQ ID NO: 3230594 - RNA, 19 nt, Artificial Sequence
  Description of Artificial Sequence: Synthetic oligonucleotide
ugggauaaaugugacuggc

SEQ ID NO: 3230595 - RNA, 19 nt, Artificial Sequence
  Description of Artificial Sequence: Synthetic oligonucleotide
uaguguucauguggaaucg

SEQ ID NO: 3230596 - RNA, 19 nt, Artificial Sequence
  Description of Artificial Sequence: Synthetic oligonucleotide
uuguaccuugcuauauccc

SEQ ID NO: 3230597 - RNA, 19 nt, Artificial Sequence
  Description of Artificial Sequence: Synthetic oligonucleotide
aaggccuucugggagaaca

SEQ ID NO: 3230598 - RNA, 19 nt, Artificial Sequence
  Description of Artificial Sequence: Synthetic oligonucleotide
guucccuuucucuuguacc

SEQ ID NO: 3230599 - RNA, 19 nt, Artificial Sequence
  Description of Artificial Sequence: Synthetic oligonucleotide
cuucgauugcaaacagccg

SEQ ID NO: 3230600 - RNA, 19 nt, Artificial Sequence
  Description of Artificial Sequence: Synthetic oligonucleotide
cacaccuuugcuucucucc

SEQ ID NO: 3230601 - RNA, 19 nt, Artificial Sequence
  Description of Artificial Sequence: Synthetic oligonucleotide
auauccccucgguagagag

SEQ ID NO: 3230602 - RNA, 19 nt, Artificial Sequence
  Description of Artificial Sequence: Synthetic oligonucleotide
aauacuggaaaagcaugaa

SEQ ID NO: 3230603 - RNA, 19 nt, Artificial Sequence
  Description of Artificial Sequence: Synthetic oligonucleotide
uccgaauugcauuuucaaa

SEQ ID NO: 3230604 - RNA, 19 nt, Artificial Sequence
  Description of Artificial Sequence: Synthetic oligonucleotide
aagcaaccacuccaggugu

SEQ ID NO: 3230605 - RNA, 19 nt, Artificial Sequence
  Description of Artificial Sequence: Synthetic oligonucleotide
cagagaaccugauugccug

SEQ ID NO: 3230606 - RNA, 19 nt, Artificial Sequence
  Description of Artificial Sequence: Synthetic oligonucleotide
gugcaauaaucccacauuc

SEQ ID NO: 3230607 - RNA, 19 nt, Artificial Sequence
  Description of Artificial Sequence: Synthetic oligonucleotide
gcuucgauugcaaacagcc

SEQ ID NO: 3230608 - RNA, 19 nt, Artificial Sequence
  Description of Artificial Sequence: Synthetic oligonucleotide
uauagcuuuagugccucug

SEQ ID NO: 3230609 - RNA, 19 nt, Artificial Sequence
  Description of Artificial Sequence: Synthetic oligonucleotide
gugacuccguccaagaacc

SEQ ID NO: 3230610 - RNA, 19 nt, Artificial Sequence
  Description of Artificial Sequence: Synthetic oligonucleotide
cugggauaaaugugacugg

SEQ ID NO: 3230611 - RNA, 19 nt, Artificial Sequence
  Description of Artificial Sequence: Synthetic oligonucleotide
agggacugcucucagucag

SEQ ID NO: 3230612 - RNA, 19 nt, Artificial Sequence
  Description of Artificial Sequence: Synthetic oligonucleotide
acauccaggaucucuugca

SEQ ID NO: 3230613 - RNA, 19 nt, Artificial Sequence
  Description of Artificial Sequence: Synthetic oligonucleotide
gaccaagcuccccaggcag

SEQ ID NO: 3230614 - RNA, 19 nt, Artificial Sequence
  Description of Artificial Sequence: Synthetic oligonucleotide
ucuuguuagcacuguggga

SEQ ID NO: 3230615 - RNA, 19 nt, Artificial Sequence
  Description of Artificial Sequence: Synthetic oligonucleotide
ucugaccaagcuccccagg

SEQ ID NO: 3230616 - RNA, 19 nt, Artificial Sequence
  Description of Artificial Sequence: Synthetic oligonucleotide
ggauaaaugugacuggcuc

SEQ ID NO: 3230617 - RNA, 19 nt, Artificial Sequence
  Description of Artificial Sequence: Synthetic oligonucleotide
aauuaaacaggauugcugg

SEQ ID NO: 3230618 - RNA, 19 nt, Artificial Sequence
  Description of Artificial Sequence: Synthetic oligonucleotide
aaugccaaugacuauuugc

SEQ ID NO: 3230619 - RNA, 19 nt, Artificial Sequence
  Description of Artificial Sequence: Synthetic oligonucleotide
aaugacuauuugcaggagc

SEQ ID NO: 3230620 - RNA, 19 nt, Artificial Sequence
  Description of Artificial Sequence: Synthetic oligonucleotide
guaaugaagaccaaggugg

SEQ ID NO: 3230621 - RNA, 19 nt, Artificial Sequence
  Description of Artificial Sequence: Synthetic oligonucleotide
cuagguaggaauuaaacag

SEQ ID NO: 3230622 - RNA, 19 nt, Artificial Sequence
  Description of Artificial Sequence: Synthetic oligonucleotide
accuuauucagguucagcc

SEQ ID NO: 3230623 - RNA, 19 nt, Artificial Sequence
  Description of Artificial Sequence: Synthetic oligonucleotide
uaggaauuaaacaggauug

SEQ ID NO: 3230624 - RNA, 19 nt, Artificial Sequence
  Description of Artificial Sequence: Synthetic oligonucleotide
uguaguacugcgaggaugg

SEQ ID NO: 3230625 - RNA, 19 nt, Artificial Sequence
  Description of Artificial Sequence: Synthetic oligonucleotide
uuuucuaccuuauucaggu

SEQ ID NO: 3230626 - RNA, 19 nt, Artificial Sequence
  Description of Artificial Sequence: Synthetic oligonucleotide
uccagcaccacuuucagcc

SEQ ID NO: 3230627 - RNA, 19 nt, Artificial Sequence
  Description of Artificial Sequence: Synthetic oligonucleotide
accacuuucagccucgugg

SEQ ID NO: 3230628 - RNA, 19 nt, Artificial Sequence
  Description of Artificial Sequence: Synthetic oligonucleotide
uggcauuggacauaaagag

SEQ ID NO: 3230629 - RNA, 19 nt, Artificial Sequence
  Description of Artificial Sequence: Synthetic oligonucleotide
ucuugugugccccaaaagc

SEQ ID NO: 3230630 - RNA, 19 nt, Artificial Sequence
  Description of Artificial Sequence: Synthetic oligonucleotide
aguaaugaagaccaaggug

SEQ ID NO: 3230631 - RNA, 19 nt, Artificial Sequence
  Description of Artificial Sequence: Synthetic oligonucleotide
uagguaggaauuaaacagg

SEQ ID NO: 3230632 - RNA, 19 nt, Artificial Sequence
  Description of Artificial Sequence: Synthetic oligonucleotide
cauaaagagcgccacaucc

SEQ ID NO: 3230633 - RNA, 19 nt, Artificial Sequence
  Description of Artificial Sequence: Synthetic oligonucleotide
aaaauguugaugaccacag

SEQ ID NO: 3230634 - RNA, 19 nt, Artificial Sequence
  Description of Artificial Sequence: Synthetic oligonucleotide
aauguugaugaccacagua

SEQ ID NO: 3230635 - RNA, 19 nt, Artificial Sequence
  Description of Artificial Sequence: Synthetic oligonucleotide
uaaacaggauugcuggagg

SEQ ID NO: 3230636 - RNA, 19 nt, Artificial Sequence
  Description of Artificial Sequence: Synthetic oligonucleotide
agcagagagacacugauga

SEQ ID NO: 3230637 - RNA, 19 nt, Artificial Sequence
  Description of Artificial Sequence: Synthetic oligonucleotide
aaugaccacaagaagaaug

SEQ ID NO: 3230638 - RNA, 19 nt, Artificial Sequence
  Description of Artificial Sequence: Synthetic oligonucleotide
guugagcugguuuagacgc

SEQ ID NO: 3230639 - RNA, 19 nt, Artificial Sequence
  Description of Artificial Sequence: Synthetic oligonucleotide
uauuugcaggagcagagag

SEQ ID NO: 3230640 - RNA, 19 nt, Artificial Sequence
  Description of Artificial Sequence: Synthetic oligonucleotide
uugaugaccacaguaauga

SEQ ID NO: 3230641 - RNA, 19 nt, Artificial Sequence
  Description of Artificial Sequence: Synthetic oligonucleotide
uugguuuucuaccuuauuc

SEQ ID NO: 3230642 - RNA, 19 nt, Artificial Sequence
  Description of Artificial Sequence: Synthetic oligonucleotide
aguacugcgaggauggccc

SEQ ID NO: 3230643 - RNA, 19 nt, Artificial Sequence
  Description of Artificial Sequence: Synthetic oligonucleotide
uguugagcugguuuagacg

SEQ ID NO: 3230644 - RNA, 19 nt, Artificial Sequence
  Description of Artificial Sequence: Synthetic oligonucleotide
cugaugagggcgaugaggg

SEQ ID NO: 3230645 - RNA, 19 nt, Artificial Sequence
  Description of Artificial Sequence: Synthetic oligonucleotide
ucugccacacucuucuugg

SEQ ID NO: 3230646 - RNA, 19 nt, Artificial Sequence
  Description of Artificial Sequence: Synthetic oligonucleotide
augaccacaagaagaaugc

SEQ ID NO: 3230647 - RNA, 19 nt, Artificial Sequence
  Description of Artificial Sequence: Synthetic oligonucleotide
gaauuaaacaggauugcug

SEQ ID NO: 3230648 - RNA, 19 nt, Artificial Sequence
  Description of Artificial Sequence: Synthetic oligonucleotide
acaguaaugaagaccaagg

SEQ ID NO: 3230649 - RNA, 19 nt, Artificial Sequence
  Description of Artificial Sequence: Synthetic oligonucleotide
augaagaccaagguggugg

SEQ ID NO: 3230650 - RNA, 19 nt, Artificial Sequence
  Description of Artificial Sequence: Synthetic oligonucleotide
ugguuuucuaccuuauuca

SEQ ID NO: 3230651 - RNA, 19 nt, Artificial Sequence
  Description of Artificial Sequence: Synthetic oligonucleotide
agagacacugaugagggcg

SEQ ID NO: 3230652 - RNA, 19 nt, Artificial Sequence
  Description of Artificial Sequence: Synthetic oligonucleotide
uuaaacaggauugcuggag

SEQ ID NO: 3230653 - RNA, 19 nt, Artificial Sequence
  Description of Artificial Sequence: Synthetic oligonucleotide
uaaagagcgccacauccag

SEQ ID NO: 3230654 - RNA, 19 nt, Artificial Sequence
  Description of Artificial Sequence: Synthetic oligonucleotide
uucagguucagccuggcaa

SEQ ID NO: 3230655 - RNA, 19 nt, Artificial Sequence
  Description of Artificial Sequence: Synthetic oligonucleotide
acgccauugguuuucuacc

SEQ ID NO: 3230656 - RNA, 19 nt, Artificial Sequence
  Description of Artificial Sequence: Synthetic oligonucleotide
auuggacauaaagagcgcc

SEQ ID NO: 3230657 - RNA, 19 nt, Artificial Sequence
  Description of Artificial Sequence: Synthetic oligonucleotide
aagagcgccacauccagca

SEQ ID NO: 3230658 - RNA, 19 nt, Artificial Sequence
  Description of Artificial Sequence: Synthetic oligonucleotide
aggaauuaaacaggauugc

SEQ ID NO: 3230659 - RNA, 19 nt, Artificial Sequence
  Description of Artificial Sequence: Synthetic oligonucleotide
aagaagaaugccaaugacu

SEQ ID NO: 3230660 - RNA, 19 nt, Artificial Sequence
  Description of Artificial Sequence: Synthetic oligonucleotide
uuugcaggagcagagagac

SEQ ID NO: 3230661 - RNA, 19 nt, Artificial Sequence
  Description of Artificial Sequence: Synthetic oligonucleotide
acaagaagaaugccaauga

SEQ ID NO: 3230662 - RNA, 19 nt, Artificial Sequence
  Description of Artificial Sequence: Synthetic oligonucleotide
ucuaccuuauucagguuca

SEQ ID NO: 3230663 - RNA, 19 nt, Artificial Sequence
  Description of Artificial Sequence: Synthetic oligonucleotide
uucuaccuuauucagguuc

SEQ ID NO: 3230664 - RNA, 19 nt, Artificial Sequence
  Description of Artificial Sequence: Synthetic oligonucleotide
uucagccuggcaaugacca

SEQ ID NO: 3230665 - RNA, 19 nt, Artificial Sequence
  Description of Artificial Sequence: Synthetic oligonucleotide
gcauuggacauaaagagcg

SEQ ID NO: 3230666 - RNA, 19 nt, Artificial Sequence
  Description of Artificial Sequence: Synthetic oligonucleotide
acaggauugcuggaggucc

SEQ ID NO: 3230667 - RNA, 19 nt, Artificial Sequence
  Description of Artificial Sequence: Synthetic oligonucleotide
uuauucagguucagccugg

SEQ ID NO: 3230668 - RNA, 19 nt, Artificial Sequence
  Description of Artificial Sequence: Synthetic oligonucleotide
accacaguaaugaagacca

SEQ ID NO: 3230669 - RNA, 19 nt, Artificial Sequence
  Description of Artificial Sequence: Synthetic oligonucleotide
gaugaccacaguaaugaag

SEQ ID NO: 3230670 - RNA, 19 nt, Artificial Sequence
  Description of Artificial Sequence: Synthetic oligonucleotide
agagagacacugaugaggg

SEQ ID NO: 3230671 - RNA, 19 nt, Artificial Sequence
  Description of Artificial Sequence: Synthetic oligonucleotide
cuuauucagguucagccug

SEQ ID NO: 3230672 - RNA, 19 nt, Artificial Sequence
  Description of Artificial Sequence: Synthetic oligonucleotide
uugugugccccaaaagcag

SEQ ID NO: 3230673 - RNA, 19 nt, Artificial Sequence
  Description of Artificial Sequence: Synthetic oligonucleotide
ugcaggagcagagagacac

SEQ ID NO: 3230674 - RNA, 19 nt, Artificial Sequence
  Description of Artificial Sequence: Synthetic oligonucleotide
aagaccaaggugguggcag

SEQ ID NO: 3230675 - RNA, 19 nt, Artificial Sequence
  Description of Artificial Sequence: Synthetic oligonucleotide
cagagagacacugaugagg

SEQ ID NO: 3230676 - RNA, 19 nt, Artificial Sequence
  Description of Artificial Sequence: Synthetic oligonucleotide
acugaugagggcgaugagg

SEQ ID NO: 3230677 - RNA, 19 nt, Artificial Sequence
  Description of Artificial Sequence: Synthetic oligonucleotide
aagaaugccaaugacuauu

SEQ ID NO: 3230678 - RNA, 19 nt, Artificial Sequence
  Description of Artificial Sequence: Synthetic oligonucleotide
uuggacauaaagagcgcca

SEQ ID NO: 3230679 - RNA, 19 nt, Artificial Sequence
  Description of Artificial Sequence: Synthetic oligonucleotide
augaccacaguaaugaaga

SEQ ID NO: 3230680 - RNA, 19 nt, Artificial Sequence
  Description of Artificial Sequence: Synthetic oligonucleotide
gacgccauugguuuucuac

SEQ ID NO: 3230681 - RNA, 19 nt, Artificial Sequence
  Description of Artificial Sequence: Synthetic oligonucleotide
aaacaggauugcuggaggu

SEQ ID NO: 3230682 - RNA, 19 nt, Artificial Sequence
  Description of Artificial Sequence: Synthetic oligonucleotide
agaagaaugccaaugacua

SEQ ID NO: 3230683 - RNA, 19 nt, Artificial Sequence
  Description of Artificial Sequence: Synthetic oligonucleotide
uguugaugaccacaguaau

SEQ ID NO: 3230684 - RNA, 19 nt, Artificial Sequence
  Description of Artificial Sequence: Synthetic oligonucleotide
aacaggauugcuggagguc

SEQ ID NO: 3230685 - RNA, 19 nt, Artificial Sequence
  Description of Artificial Sequence: Synthetic oligonucleotide
guuuucuaccuuauucagg

SEQ ID NO: 3230686 - RNA, 19 nt, Artificial Sequence
  Description of Artificial Sequence: Synthetic oligonucleotide
gaugagggcgaugagggug

SEQ ID NO: 3230687 - RNA, 19 nt, Artificial Sequence
  Description of Artificial Sequence: Synthetic oligonucleotide
gccaaugacuauuugcagg

SEQ ID NO: 3230688 - RNA, 19 nt, Artificial Sequence
  Description of Artificial Sequence: Synthetic oligonucleotide
uggcaaugaccacaagaag

SEQ ID NO: 3230689 - RNA, 19 nt, Artificial Sequence
  Description of Artificial Sequence: Synthetic oligonucleotide
acuauuugcaggagcagag

SEQ ID NO: 3230690 - RNA, 19 nt, Artificial Sequence
  Description of Artificial Sequence: Synthetic oligonucleotide
acauaaagagcgccacauc

SEQ ID NO: 3230691 - RNA, 19 nt, Artificial Sequence
  Description of Artificial Sequence: Synthetic oligonucleotide
uaaugaagaccaagguggu

SEQ ID NO: 3230692 - RNA, 19 nt, Artificial Sequence
  Description of Artificial Sequence: Synthetic oligonucleotide
cacaagaagaaugccaaug

SEQ ID NO: 3230693 - RNA, 19 nt, Artificial Sequence
  Description of Artificial Sequence: Synthetic oligonucleotide
augagggugguguaguacu

SEQ ID NO: 3230694 - RNA, 19 nt, Artificial Sequence
  Description of Artificial Sequence: Synthetic oligonucleotide
ugguguaguacugcgagga

SEQ ID NO: 3230695 - RNA, 19 nt, Artificial Sequence
  Description of Artificial Sequence: Synthetic oligonucleotide
ugcuccagcaccacuuuca

SEQ ID NO: 3230696 - RNA, 19 nt, Artificial Sequence
  Description of Artificial Sequence: Synthetic oligonucleotide
cugguuuagacgccauugg

SEQ ID NO: 3230697 - RNA, 19 nt, Artificial Sequence
  Description of Artificial Sequence: Synthetic oligonucleotide
uuguugagcugguuuagac

SEQ ID NO: 3230698 - RNA, 19 nt, Artificial Sequence
  Description of Artificial Sequence: Synthetic oligonucleotide
ugguuuagacgccauuggu

SEQ ID NO: 3230699 - RNA, 19 nt, Artificial Sequence
  Description of Artificial Sequence: Synthetic oligonucleotide
cuugugugccccaaaagca

SEQ ID NO: 3230700 - RNA, 19 nt, Artificial Sequence
  Description of Artificial Sequence: Synthetic oligonucleotide
uugcuggagguccuggcag

SEQ ID NO: 3230701 - RNA, 19 nt, Artificial Sequence
  Description of Artificial Sequence: Synthetic oligonucleotide
gaccacaguaaugaagacc

SEQ ID NO: 3230702 - RNA, 19 nt, Artificial Sequence
  Description of Artificial Sequence: Synthetic oligonucleotide
caagaagaaugccaaugac

SEQ ID NO: 3230703 - RNA, 19 nt, Artificial Sequence
  Description of Artificial Sequence: Synthetic oligonucleotide
aaauguugaugaccacagu

SEQ ID NO: 3230704 - RNA, 19 nt, Artificial Sequence
  Description of Artificial Sequence: Synthetic oligonucleotide
ggugguguaguacugcgag

SEQ ID NO: 3230705 - RNA, 19 nt, Artificial Sequence
  Description of Artificial Sequence: Synthetic oligonucleotide
gguuuucuaccuuauucag

SEQ ID NO: 3230706 - RNA, 19 nt, Artificial Sequence
  Description of Artificial Sequence: Synthetic oligonucleotide
cuggcaaugaccacaagaa

SEQ ID NO: 3230707 - RNA, 19 nt, Artificial Sequence
  Description of Artificial Sequence: Synthetic oligonucleotide
acauccagcaugcucucug

SEQ ID NO: 3230708 - RNA, 19 nt, Artificial Sequence
  Description of Artificial Sequence: Synthetic oligonucleotide
ugccaaugacuauuugcag

SEQ ID NO: 3230709 - RNA, 19 nt, Artificial Sequence
  Description of Artificial Sequence: Synthetic oligonucleotide
augccaaugacuauuugca

SEQ ID NO: 3230710 - RNA, 19 nt, Artificial Sequence
  Description of Artificial Sequence: Synthetic oligonucleotide
augacuauuugcaggagca

SEQ ID NO: 3230711 - RNA, 19 nt, Artificial Sequence
  Description of Artificial Sequence: Synthetic oligonucleotide
agggugguguaguacugcg

SEQ ID NO: 3230712 - RNA, 19 nt, Artificial Sequence
  Description of Artificial Sequence: Synthetic oligonucleotide
guaggaauuaaacaggauu

SEQ ID NO: 3230713 - RNA, 19 nt, Artificial Sequence
  Description of Artificial Sequence: Synthetic oligonucleotide
aaagagcgccacauccagc

SEQ ID NO: 3230714 - RNA, 19 nt, Artificial Sequence
  Description of Artificial Sequence: Synthetic oligonucleotide
auuaaacaggauugcugga

SEQ ID NO: 3230715 - RNA, 19 nt, Artificial Sequence
  Description of Artificial Sequence: Synthetic oligonucleotide
cacaguaaugaagaccaag

SEQ ID NO: 3230716 - RNA, 19 nt, Artificial Sequence
  Description of Artificial Sequence: Synthetic oligonucleotide
ugucuugugugccccaaaa

SEQ ID NO: 3230717 - RNA, 19 nt, Artificial Sequence
  Description of Artificial Sequence: Synthetic oligonucleotide
aacggagacuucuagacac

SEQ ID NO: 3230718 - RNA, 19 nt, Artificial Sequence
  Description of Artificial Sequence: Synthetic oligonucleotide
aaucaggccagauuucccc

SEQ ID NO: 3230719 - RNA, 19 nt, Artificial Sequence
  Description of Artificial Sequence: Synthetic oligonucleotide
aagucauucuucccaaagc

SEQ ID NO: 3230720 - RNA, 19 nt, Artificial Sequence
  Description of Artificial Sequence: Synthetic oligonucleotide
agcagaauggcucacagag

SEQ ID NO: 3230721 - RNA, 19 nt, Artificial Sequence
  Description of Artificial Sequence: Synthetic oligonucleotide
gagacuucuagacacacag

SEQ ID NO: 3230722 - RNA, 19 nt, Artificial Sequence
  Description of Artificial Sequence: Synthetic oligonucleotide
aauaggggaauuguccugc

SEQ ID NO: 3230723 - RNA, 19 nt, Artificial Sequence
  Description of Artificial Sequence: Synthetic oligonucleotide
gacuucuagacacacagcc

SEQ ID NO: 3230724 - RNA, 19 nt, Artificial Sequence
  Description of Artificial Sequence: Synthetic oligonucleotide
aaagcauccuuguaaucag

SEQ ID NO: 3230725 - RNA, 19 nt, Artificial Sequence
  Description of Artificial Sequence: Synthetic oligonucleotide
aagaguggacagcagaaug

SEQ ID NO: 3230726 - RNA, 19 nt, Artificial Sequence
  Description of Artificial Sequence: Synthetic oligonucleotide
uaagucauucuucccaaag

SEQ ID NO: 3230727 - RNA, 19 nt, Artificial Sequence
  Description of Artificial Sequence: Synthetic oligonucleotide
uuguaaucaggccagauuu

SEQ ID NO: 3230728 - RNA, 19 nt, Artificial Sequence
  Description of Artificial Sequence: Synthetic oligonucleotide
ucaguagcagaacuggccc

SEQ ID NO: 3230729 - RNA, 19 nt, Artificial Sequence
  Description of Artificial Sequence: Synthetic oligonucleotide
uucaguagcagaacuggcc

SEQ ID NO: 3230730 - RNA, 19 nt, Artificial Sequence
  Description of Artificial Sequence: Synthetic oligonucleotide
ucucugaaccuucccaugg

SEQ ID NO: 3230731 - RNA, 19 nt, Artificial Sequence
  Description of Artificial Sequence: Synthetic oligonucleotide
cuucuagacacacagcccc

SEQ ID NO: 3230732 - RNA, 19 nt, Artificial Sequence
  Description of Artificial Sequence: Synthetic oligonucleotide
aacaagaguggacagcaga

SEQ ID NO: 3230733 - RNA, 19 nt, Artificial Sequence
  Description of Artificial Sequence: Synthetic oligonucleotide
cuggcugugagaauagggg

SEQ ID NO: 3230734 - RNA, 19 nt, Artificial Sequence
  Description of Artificial Sequence: Synthetic oligonucleotide
aggggaauuguccugcaac

SEQ ID NO: 3230735 - RNA, 19 nt, Artificial Sequence
  Description of Artificial Sequence: Synthetic oligonucleotide
gagaauaggggaauugucc

SEQ ID NO: 3230736 - RNA, 19 nt, Artificial Sequence
  Description of Artificial Sequence: Synthetic oligonucleotide
cucucuaagucauucuucc

SEQ ID NO: 3230737 - RNA, 19 nt, Artificial Sequence
  Description of Artificial Sequence: Synthetic oligonucleotide
agucauucuucccaaagca

SEQ ID NO: 3230738 - RNA, 19 nt, Artificial Sequence
  Description of Artificial Sequence: Synthetic oligonucleotide
ucauucuucccaaagcauc

SEQ ID NO: 3230739 - RNA, 19 nt, Artificial Sequence
  Description of Artificial Sequence: Synthetic oligonucleotide
ucucuaacaagaguggaca

SEQ ID NO: 3230740 - RNA, 19 nt, Artificial Sequence
  Description of Artificial Sequence: Synthetic oligonucleotide
cauucuucccaaagcaucc

SEQ ID NO: 3230741 - RNA, 19 nt, Artificial Sequence
  Description of Artificial Sequence: Synthetic oligonucleotide
agaauaggggaauuguccu

SEQ ID NO: 3230742 - RNA, 19 nt, Artificial Sequence
  Description of Artificial Sequence: Synthetic oligonucleotide
agcagaacuggcccagucc

SEQ ID NO: 3230743 - RNA, 19 nt, Artificial Sequence
  Description of Artificial Sequence: Synthetic oligonucleotide
ugagaauaggggaauuguc

SEQ ID NO: 3230744 - RNA, 19 nt, Artificial Sequence
  Description of Artificial Sequence: Synthetic oligonucleotide
ucccaaagcauccuuguaa

SEQ ID NO: 3230745 - RNA, 19 nt, Artificial Sequence
  Description of Artificial Sequence: Synthetic oligonucleotide
auuguccugcaacggagac

SEQ ID NO: 3230746 - RNA, 19 nt, Artificial Sequence
  Description of Artificial Sequence: Synthetic oligonucleotide
ugaaccuucccaugggcug

SEQ ID NO: 3230747 - RNA, 19 nt, Artificial Sequence
  Description of Artificial Sequence: Synthetic oligonucleotide
agauuuccccacuggcugc

SEQ ID NO: 3230748 - RNA, 19 nt, Artificial Sequence
  Description of Artificial Sequence: Synthetic oligonucleotide
ugggcugagagucccaucu

SEQ ID NO: 3230749 - RNA, 19 nt, Artificial Sequence
  Description of Artificial Sequence: Synthetic oligonucleotide
ucuucccaaagcauccuug

SEQ ID NO: 3230750 - RNA, 19 nt, Artificial Sequence
  Description of Artificial Sequence: Synthetic oligonucleotide
ucuaacaagaguggacagc

SEQ ID NO: 3230751 - RNA, 19 nt, Artificial Sequence
  Description of Artificial Sequence: Synthetic oligonucleotide
gaauuguccugcaacggag

SEQ ID NO: 3230752 - RNA, 19 nt, Artificial Sequence
  Description of Artificial Sequence: Synthetic oligonucleotide
uggcucacagagcugagca

SEQ ID NO: 3230753 - RNA, 19 nt, Artificial Sequence
  Description of Artificial Sequence: Synthetic oligonucleotide
ucuaagucauucuucccaa

SEQ ID NO: 3230754 - RNA, 19 nt, Artificial Sequence
  Description of Artificial Sequence: Synthetic oligonucleotide
ucugaaccuucccaugggc

SEQ ID NO: 3230755 - RNA, 19 nt, Artificial Sequence
  Description of Artificial Sequence: Synthetic oligonucleotide
agaguggacagcagaaugg

SEQ ID NO: 3230756 - RNA, 19 nt, Artificial Sequence
  Description of Artificial Sequence: Synthetic oligonucleotide
agcauccuuguaaucaggc

SEQ ID NO: 3230757 - RNA, 19 nt, Artificial Sequence
  Description of Artificial Sequence: Synthetic oligonucleotide
acuucuagacacacagccc

SEQ ID NO: 3230758 - RNA, 19 nt, Artificial Sequence
  Description of Artificial Sequence: Synthetic oligonucleotide
ucucucucucucuaaguca

SEQ ID NO: 3230759 - RNA, 19 nt, Artificial Sequence
  Description of Artificial Sequence: Synthetic oligonucleotide
aucucuaacaagaguggac

SEQ ID NO: 3230760 - RNA, 19 nt, Artificial Sequence
  Description of Artificial Sequence: Synthetic oligonucleotide
ugugagaauaggggaauug

SEQ ID NO: 3230761 - RNA, 19 nt, Artificial Sequence
  Description of Artificial Sequence: Synthetic oligonucleotide
acagcagaauggcucacag

SEQ ID NO: 3230762 - RNA, 19 nt, Artificial Sequence
  Description of Artificial Sequence: Synthetic oligonucleotide
ucucucuaagucauucuuc

SEQ ID NO: 3230763 - RNA, 19 nt, Artificial Sequence
  Description of Artificial Sequence: Synthetic oligonucleotide
agucccaucucuaacaaga

SEQ ID NO: 3230764 - RNA, 19 nt, Artificial Sequence
  Description of Artificial Sequence: Synthetic oligonucleotide
gaauaggggaauuguccug

SEQ ID NO: 3230765 - RNA, 19 nt, Artificial Sequence
  Description of Artificial Sequence: Synthetic oligonucleotide
uaaucaggccagauuuccc

SEQ ID NO: 3230766 - RNA, 19 nt, Artificial Sequence
  Description of Artificial Sequence: Synthetic oligonucleotide
acacagccccuucaguagc

SEQ ID NO: 3230767 - RNA, 19 nt, Artificial Sequence
  Description of Artificial Sequence: Synthetic oligonucleotide
uccaugcugaugcccagag

SEQ ID NO: 3230768 - RNA, 19 nt, Artificial Sequence
  Description of Artificial Sequence: Synthetic oligonucleotide
cauccuuguaaucaggcca

SEQ ID NO: 3230769 - RNA, 19 nt, Artificial Sequence
  Description of Artificial Sequence: Synthetic oligonucleotide
ugagagucccaucucuaac

SEQ ID NO: 3230770 - RNA, 19 nt, Artificial Sequence
  Description of Artificial Sequence: Synthetic oligonucleotide
cccaucucuaacaagagug

SEQ ID NO: 3230771 - RNA, 19 nt, Artificial Sequence
  Description of Artificial Sequence: Synthetic oligonucleotide
guaaucaggccagauuucc

SEQ ID NO: 3230772 - RNA, 19 nt, Artificial Sequence
  Description of Artificial Sequence: Synthetic oligonucleotide
caaagcauccuuguaauca

SEQ ID NO: 3230773 - RNA, 19 nt, Artificial Sequence
  Description of Artificial Sequence: Synthetic oligonucleotide
cagauuuccccacuggcug

SEQ ID NO: 3230774 - RNA, 19 nt, Artificial Sequence
  Description of Artificial Sequence: Synthetic oligonucleotide
gagagucccaucucuaaca

SEQ ID NO: 3230775 - RNA, 19 nt, Artificial Sequence
  Description of Artificial Sequence: Synthetic oligonucleotide
cuaacaagaguggacagca

SEQ ID NO: 3230776 - RNA, 19 nt, Artificial Sequence
  Description of Artificial Sequence: Synthetic oligonucleotide
uguaaucaggccagauuuc

SEQ ID NO: 3230777 - RNA, 19 nt, Artificial Sequence
  Description of Artificial Sequence: Synthetic oligonucleotide
agagcugagcaacugcaca

SEQ ID NO: 3230778 - RNA, 19 nt, Artificial Sequence
  Description of Artificial Sequence: Synthetic oligonucleotide
cucuaagucauucuuccca

SEQ ID NO: 3230779 - RNA, 19 nt, Artificial Sequence
  Description of Artificial Sequence: Synthetic oligonucleotide
uggacagcagaauggcuca

SEQ ID NO: 3230780 - RNA, 19 nt, Artificial Sequence
  Description of Artificial Sequence: Synthetic oligonucleotide
uggcugugagaauagggga

SEQ ID NO: 3230781 - RNA, 19 nt, Artificial Sequence
  Description of Artificial Sequence: Synthetic oligonucleotide
ugcaacggagacuucuaga

SEQ ID NO: 3230782 - RNA, 19 nt, Artificial Sequence
  Description of Artificial Sequence: Synthetic oligonucleotide
cuucaguagcagaacuggc

SEQ ID NO: 3230783 - RNA, 19 nt, Artificial Sequence
  Description of Artificial Sequence: Synthetic oligonucleotide
uguccugcaacggagacuu

SEQ ID NO: 3230784 - RNA, 19 nt, Artificial Sequence
  Description of Artificial Sequence: Synthetic oligonucleotide
ggggaauuguccugcaacg

SEQ ID NO: 3230785 - RNA, 19 nt, Artificial Sequence
  Description of Artificial Sequence: Synthetic oligonucleotide
ucucuaagucauucuuccc

SEQ ID NO: 3230786 - RNA, 19 nt, Artificial Sequence
  Description of Artificial Sequence: Synthetic oligonucleotide
uggcugcugagccaagugc

SEQ ID NO: 3230787 - RNA, 19 nt, Artificial Sequence
  Description of Artificial Sequence: Synthetic oligonucleotide
uucccaugggcugagaguc

SEQ ID NO: 3230788 - RNA, 19 nt, Artificial Sequence
  Description of Artificial Sequence: Synthetic oligonucleotide
uagacacacagccccuuca

SEQ ID NO: 3230789 - RNA, 19 nt, Artificial Sequence
  Description of Artificial Sequence: Synthetic oligonucleotide
cucuaacaagaguggacag

SEQ ID NO: 3230790 - RNA, 19 nt, Artificial Sequence
  Description of Artificial Sequence: Synthetic oligonucleotide
gaauggcucacagagcuga

SEQ ID NO: 3230791 - RNA, 19 nt, Artificial Sequence
  Description of Artificial Sequence: Synthetic oligonucleotide
agacacacagccccuucag

SEQ ID NO: 3230792 - RNA, 19 nt, Artificial Sequence
  Description of Artificial Sequence: Synthetic oligonucleotide
uaacaagaguggacagcag

SEQ ID NO: 3230793 - RNA, 19 nt, Artificial Sequence
  Description of Artificial Sequence: Synthetic oligonucleotide
caugcugaugcccagagcu

SEQ ID NO: 3230794 - RNA, 19 nt, Artificial Sequence
  Description of Artificial Sequence: Synthetic oligonucleotide
agcucucugaaccuuccca

SEQ ID NO: 3230795 - RNA, 19 nt, Artificial Sequence
  Description of Artificial Sequence: Synthetic oligonucleotide
cacacagccccuucaguag

SEQ ID NO: 3230796 - RNA, 19 nt, Artificial Sequence
  Description of Artificial Sequence: Synthetic oligonucleotide
cucucucucucucuaaguc

SEQ ID NO: 3230797 - RNA, 19 nt, Artificial Sequence
  Description of Artificial Sequence: Synthetic oligonucleotide
ugagccaagugcuggcugu

SEQ ID NO: 3230798 - RNA, 19 nt, Artificial Sequence
  Description of Artificial Sequence: Synthetic oligonucleotide
gcaacggagacuucuagac

SEQ ID NO: 3230799 - RNA, 19 nt, Artificial Sequence
  Description of Artificial Sequence: Synthetic oligonucleotide
gaguggacagcagaauggc

SEQ ID NO: 3230800 - RNA, 19 nt, Artificial Sequence
  Description of Artificial Sequence: Synthetic oligonucleotide
ucccaucucuaacaagagu

SEQ ID NO: 3230801 - RNA, 19 nt, Artificial Sequence
  Description of Artificial Sequence: Synthetic oligonucleotide
cacagagcugagcaacugc

SEQ ID NO: 3230802 - RNA, 19 nt, Artificial Sequence
  Description of Artificial Sequence: Synthetic oligonucleotide
ucucucucuaagucauucu

SEQ ID NO: 3230803 - RNA, 19 nt, Artificial Sequence
  Description of Artificial Sequence: Synthetic oligonucleotide
gaacuggcccaguccaugc

SEQ ID NO: 3230804 - RNA, 19 nt, Artificial Sequence
  Description of Artificial Sequence: Synthetic oligonucleotide
aguagcagaacuggcccag

SEQ ID NO: 3230805 - RNA, 19 nt, Artificial Sequence
  Description of Artificial Sequence: Synthetic oligonucleotide
aagcauccuuguaaucagg

SEQ ID NO: 3230806 - RNA, 19 nt, Artificial Sequence
  Description of Artificial Sequence: Synthetic oligonucleotide
acacacagccccuucagua

SEQ ID NO: 3230807 - RNA, 19 nt, Artificial Sequence
  Description of Artificial Sequence: Synthetic oligonucleotide
cucugaaccuucccauggg

SEQ ID NO: 3230808 - RNA, 19 nt, Artificial Sequence
  Description of Artificial Sequence: Synthetic oligonucleotide
auccuuguaaucaggccag

SEQ ID NO: 3230809 - RNA, 19 nt, Artificial Sequence
  Description of Artificial Sequence: Synthetic oligonucleotide
ucucucucucucucuaagu

SEQ ID NO: 3230810 - RNA, 19 nt, Artificial Sequence
  Description of Artificial Sequence: Synthetic oligonucleotide
agacuucuagacacacagc

SEQ ID NO: 3230811 - RNA, 19 nt, Artificial Sequence
  Description of Artificial Sequence: Synthetic oligonucleotide
agagcucucugaaccuucc

SEQ ID NO: 3230812 - RNA, 19 nt, Artificial Sequence
  Description of Artificial Sequence: Synthetic oligonucleotide
aauuguccugcaacggaga

SEQ ID NO: 3230813 - RNA, 19 nt, Artificial Sequence
  Description of Artificial Sequence: Synthetic oligonucleotide
cucucucucucucucuaag

SEQ ID NO: 3230814 - RNA, 19 nt, Artificial Sequence
  Description of Artificial Sequence: Synthetic oligonucleotide
uucuagacacacagccccu

SEQ ID NO: 3230815 - RNA, 19 nt, Artificial Sequence
  Description of Artificial Sequence: Synthetic oligonucleotide
ccaucucuaacaagagugg

SEQ ID NO: 3230816 - RNA, 19 nt, Artificial Sequence
  Description of Artificial Sequence: Synthetic oligonucleotide
agugcuggcugugagaaua

SEQ ID NO: 3230817 - RNA, 19 nt, Artificial Sequence
  Description of Artificial Sequence: Synthetic oligonucleotide
accuuguacacauagacgg

SEQ ID NO: 3230818 - RNA, 19 nt, Artificial Sequence
  Description of Artificial Sequence: Synthetic oligonucleotide
gaagaugucguucacgaag

SEQ ID NO: 3230819 - RNA, 19 nt, Artificial Sequence
  Description of Artificial Sequence: Synthetic oligonucleotide
guuguaaugcgccaggcgg

SEQ ID NO: 3230820 - RNA, 19 nt, Artificial Sequence
  Description of Artificial Sequence: Synthetic oligonucleotide
gaguucaugaugcccaugg

SEQ ID NO: 3230821 - RNA, 19 nt, Artificial Sequence
  Description of Artificial Sequence: Synthetic oligonucleotide
acauagacggaauagcucu

SEQ ID NO: 3230822 - RNA, 19 nt, Artificial Sequence
  Description of Artificial Sequence: Synthetic oligonucleotide
uucacgaaggaguucauga

SEQ ID NO: 3230823 - RNA, 19 nt, Artificial Sequence
  Description of Artificial Sequence: Synthetic oligonucleotide
uucuuuugcgccuugguga

SEQ ID NO: 3230824 - RNA, 19 nt, Artificial Sequence
  Description of Artificial Sequence: Synthetic oligonucleotide
uucaugaugcccauggccu

SEQ ID NO: 3230825 - RNA, 19 nt, Artificial Sequence
  Description of Artificial Sequence: Synthetic oligonucleotide
uuggugacggccuucuugg

SEQ ID NO: 3230826 - RNA, 19 nt, Artificial Sequence
  Description of Artificial Sequence: Synthetic oligonucleotide
auggccuuggaggagaugc

SEQ ID NO: 3230827 - RNA, 19 nt, Artificial Sequence
  Description of Artificial Sequence: Synthetic oligonucleotide
uguuguaaugcgccaggcg

SEQ ID NO: 3230828 - RNA, 19 nt, Artificial Sequence
  Description of Artificial Sequence: Synthetic oligonucleotide
augcccauggccuuggagg

SEQ ID NO: 3230829 - RNA, 19 nt, Artificial Sequence
  Description of Artificial Sequence: Synthetic oligonucleotide
uuucuuuugcgccuuggug

SEQ ID NO: 3230830 - RNA, 19 nt, Artificial Sequence
  Description of Artificial Sequence: Synthetic oligonucleotide
acgaaggaguucaugaugc

SEQ ID NO: 3230831 - RNA, 19 nt, Artificial Sequence
  Description of Artificial Sequence: Synthetic oligonucleotide
gacggaauagcucuccuug

SEQ ID NO: 3230832 - RNA, 19 nt, Artificial Sequence
  Description of Artificial Sequence: Synthetic oligonucleotide
aagaugucguucacgaagg

SEQ ID NO: 3230833 - RNA, 19 nt, Artificial Sequence
  Description of Artificial Sequence: Synthetic oligonucleotide
ugcuucaggaccuuguaca

SEQ ID NO: 3230834 - RNA, 19 nt, Artificial Sequence
  Description of Artificial Sequence: Synthetic oligonucleotide
ucgaagaugucguucacga

SEQ ID NO: 3230835 - RNA, 19 nt, Artificial Sequence
  Description of Artificial Sequence: Synthetic oligonucleotide
uuguaaugcgccaggcggg

SEQ ID NO: 3230836 - RNA, 19 nt, Artificial Sequence
  Description of Artificial Sequence: Synthetic oligonucleotide
gaauagcucuccuugcggc

SEQ ID NO: 3230837 - RNA, 19 nt, Artificial Sequence
  Description of Artificial Sequence: Synthetic oligonucleotide
uacacauagacggaauagc

SEQ ID NO: 3230838 - RNA, 19 nt, Artificial Sequence
  Description of Artificial Sequence: Synthetic oligonucleotide
guucaugaugcccauggcc

SEQ ID NO: 3230839 - RNA, 19 nt, Artificial Sequence
  Description of Artificial Sequence: Synthetic oligonucleotide
uuuugcgccuuggugacgg

SEQ ID NO: 3230840 - RNA, 19 nt, Artificial Sequence
  Description of Artificial Sequence: Synthetic oligonucleotide
gaugcgcucgaagaugucg

SEQ ID NO: 3230841 - RNA, 19 nt, Artificial Sequence
  Description of Artificial Sequence: Synthetic oligonucleotide
cuuguuguaaugcgccagg

SEQ ID NO: 3230842 - RNA, 19 nt, Artificial Sequence
  Description of Artificial Sequence: Synthetic oligonucleotide
aaggaguucaugaugccca

SEQ ID NO: 3230843 - RNA, 19 nt, Artificial Sequence
  Description of Artificial Sequence: Synthetic oligonucleotide
aguucaugaugcccauggc

SEQ ID NO: 3230844 - RNA, 19 nt, Artificial Sequence
  Description of Artificial Sequence: Synthetic oligonucleotide
acggaauagcucuccuugc

SEQ ID NO: 3230845 - RNA, 19 nt, Artificial Sequence
  Description of Artificial Sequence: Synthetic oligonucleotide
aauagcucuccuugcggcu

SEQ ID NO: 3230846 - RNA, 19 nt, Artificial Sequence
  Description of Artificial Sequence: Synthetic oligonucleotide
aaugcgccaggcgggaagc

SEQ ID NO: 3230847 - RNA, 19 nt, Artificial Sequence
  Description of Artificial Sequence: Synthetic oligonucleotide
cuugccgucuuucuuuugc

SEQ ID NO: 3230848 - RNA, 19 nt, Artificial Sequence
  Description of Artificial Sequence: Synthetic oligonucleotide
auagacggaauagcucucc

SEQ ID NO: 3230849 - RNA, 19 nt, Artificial Sequence
  Description of Artificial Sequence: Synthetic oligonucleotide
uucaggaccuuguacacau

SEQ ID NO: 3230850 - RNA, 19 nt, Artificial Sequence
  Description of Artificial Sequence: Synthetic oligonucleotide
gaccuuguacacauagacg

SEQ ID NO: 3230851 - RNA, 19 nt, Artificial Sequence
  Description of Artificial Sequence: Synthetic oligonucleotide
uguacacauagacggaaua

SEQ ID NO: 3230852 - RNA, 19 nt, Artificial Sequence
  Description of Artificial Sequence: Synthetic oligonucleotide
ucguucacgaaggaguuca

SEQ ID NO: 3230853 - RNA, 19 nt, Artificial Sequence
  Description of Artificial Sequence: Synthetic oligonucleotide
guacacauagacggaauag

SEQ ID NO: 3230854 - RNA, 19 nt, Artificial Sequence
  Description of Artificial Sequence: Synthetic oligonucleotide
ucccgggaagugauggucg

SEQ ID NO: 3230855 - RNA, 19 nt, Artificial Sequence
  Description of Artificial Sequence: Synthetic oligonucleotide
gaaggaguucaugaugccc

SEQ ID NO: 3230856 - RNA, 19 nt, Artificial Sequence
  Description of Artificial Sequence: Synthetic oligonucleotide
gaugucguucacgaaggag

SEQ ID NO: 3230857 - RNA, 19 nt, Artificial Sequence
  Description of Artificial Sequence: Synthetic oligonucleotide
uaaugcgccaggcgggaag

SEQ ID NO: 3230858 - RNA, 19 nt, Artificial Sequence
  Description of Artificial Sequence: Synthetic oligonucleotide
gagcgcuuguuguaaugcg

SEQ ID NO: 3230859 - RNA, 19 nt, Artificial Sequence
  Description of Artificial Sequence: Synthetic oligonucleotide
ggaccuuguacacauagac

SEQ ID NO: 3230860 - RNA, 19 nt, Artificial Sequence
  Description of Artificial Sequence: Synthetic oligonucleotide
ucuuuugcgccuuggugac

SEQ ID NO: 3230861 - RNA, 19 nt, Artificial Sequence
  Description of Artificial Sequence: Synthetic oligonucleotide
cuuggugacggccuucuug

SEQ ID NO: 3230862 - RNA, 19 nt, Artificial Sequence
  Description of Artificial Sequence: Synthetic oligonucleotide
augucguucacgaaggagu

SEQ ID NO: 3230863 - RNA, 19 nt, Artificial Sequence
  Description of Artificial Sequence: Synthetic oligonucleotide
uugccgucuuucuuuugcg

SEQ ID NO: 3230864 - RNA, 19 nt, Artificial Sequence
  Description of Artificial Sequence: Synthetic oligonucleotide
caggaccuuguacacauag

SEQ ID NO: 3230865 - RNA, 19 nt, Artificial Sequence
  Description of Artificial Sequence: Synthetic oligonucleotide
cacauagacggaauagcuc

SEQ ID NO: 3230866 - RNA, 19 nt, Artificial Sequence
  Description of Artificial Sequence: Synthetic oligonucleotide
agcgcuuguuguaaugcgc

SEQ ID NO: 3230867 - RNA, 19 nt, Artificial Sequence
  Description of Artificial Sequence: Synthetic oligonucleotide
uuggaggagaugccggugu

SEQ ID NO: 3230868 - RNA, 19 nt, Artificial Sequence
  Description of Artificial Sequence: Synthetic oligonucleotide
gugacggccuucuuggagc

SEQ ID NO: 3230869 - RNA, 19 nt, Artificial Sequence
  Description of Artificial Sequence: Synthetic oligonucleotide
gaggagaugccggugucgg

SEQ ID NO: 3230870 - RNA, 19 nt, Artificial Sequence
  Description of Artificial Sequence: Synthetic oligonucleotide
cacgaaggaguucaugaug

SEQ ID NO: 3230871 - RNA, 19 nt, Artificial Sequence
  Description of Artificial Sequence: Synthetic oligonucleotide
ugcaccugcuucaggaccu

SEQ ID NO: 3230872 - RNA, 19 nt, Artificial Sequence
  Description of Artificial Sequence: Synthetic oligonucleotide
ugcgcuugcgcuucuugcc

SEQ ID NO: 3230873 - RNA, 19 nt, Artificial Sequence
  Description of Artificial Sequence: Synthetic oligonucleotide
ggaauagcucuccuugcgg

SEQ ID NO: 3230874 - RNA, 19 nt, Artificial Sequence
  Description of Artificial Sequence: Synthetic oligonucleotide
ucuuucuuuugcgccuugg

SEQ ID NO: 3230875 - RNA, 19 nt, Artificial Sequence
  Description of Artificial Sequence: Synthetic oligonucleotide
gauggucgagcgcuuguug

SEQ ID NO: 3230876 - RNA, 19 nt, Artificial Sequence
  Description of Artificial Sequence: Synthetic oligonucleotide
gaagccucgcccgcgaugc

SEQ ID NO: 3230877 - RNA, 19 nt, Artificial Sequence
  Description of Artificial Sequence: Synthetic oligonucleotide
gaugcccauggccuuggag

SEQ ID NO: 3230878 - RNA, 19 nt, Artificial Sequence
  Description of Artificial Sequence: Synthetic oligonucleotide
gaagugauggucgagcgcu

SEQ ID NO: 3230879 - RNA, 19 nt, Artificial Sequence
  Description of Artificial Sequence: Synthetic oligonucleotide
acacauagacggaauagcu

SEQ ID NO: 3230880 - RNA, 19 nt, Artificial Sequence
  Description of Artificial Sequence: Synthetic oligonucleotide
aucucccgggaagugaugg

SEQ ID NO: 3230881 - RNA, 19 nt, Artificial Sequence
  Description of Artificial Sequence: Synthetic oligonucleotide
uuguacacauagacggaau

SEQ ID NO: 3230882 - RNA, 19 nt, Artificial Sequence
  Description of Artificial Sequence: Synthetic oligonucleotide
ucacgaaggaguucaugau

SEQ ID NO: 3230883 - RNA, 19 nt, Artificial Sequence
  Description of Artificial Sequence: Synthetic oligonucleotide
gucuggaucucccgggaag

SEQ ID NO: 3230884 - RNA, 19 nt, Artificial Sequence
  Description of Artificial Sequence: Synthetic oligonucleotide
cucgaagaugucguucacg

SEQ ID NO: 3230885 - RNA, 19 nt, Artificial Sequence
  Description of Artificial Sequence: Synthetic oligonucleotide
auggucgagcgcuuguugu

SEQ ID NO: 3230886 - RNA, 19 nt, Artificial Sequence
  Description of Artificial Sequence: Synthetic oligonucleotide
ugucguucacgaaggaguu

SEQ ID NO: 3230887 - RNA, 19 nt, Artificial Sequence
  Description of Artificial Sequence: Synthetic oligonucleotide
gggaagugauggucgagcg

SEQ ID NO: 3230888 - RNA, 19 nt, Artificial Sequence
  Description of Artificial Sequence: Synthetic oligonucleotide
ugcccauggccuuggagga

SEQ ID NO: 3230889 - RNA, 19 nt, Artificial Sequence
  Description of Artificial Sequence: Synthetic oligonucleotide
uagacggaauagcucuccu

SEQ ID NO: 3230890 - RNA, 19 nt, Artificial Sequence
  Description of Artificial Sequence: Synthetic oligonucleotide
uuguuguaaugcgccaggc

SEQ ID NO: 3230891 - RNA, 19 nt, Artificial Sequence
  Description of Artificial Sequence: Synthetic oligonucleotide
ugcgccuuggugacggccu

SEQ ID NO: 3230892 - RNA, 19 nt, Artificial Sequence
  Description of Artificial Sequence: Synthetic oligonucleotide
ugccgucuuucuuuugcgc

SEQ ID NO: 3230893 - RNA, 19 nt, Artificial Sequence
  Description of Artificial Sequence: Synthetic oligonucleotide
ggagaugccggugucgggg

SEQ ID NO: 3230894 - RNA, 19 nt, Artificial Sequence
  Description of Artificial Sequence: Synthetic oligonucleotide
ucgagcgcuuguuguaaug

SEQ ID NO: 3230895 - RNA, 19 nt, Artificial Sequence
  Description of Artificial Sequence: Synthetic oligonucleotide
uguaaugcgccaggcggga

SEQ ID NO: 3230896 - RNA, 19 nt, Artificial Sequence
  Description of Artificial Sequence: Synthetic oligonucleotide
cuugcggcugcgcuugcgc

SEQ ID NO: 3230897 - RNA, 19 nt, Artificial Sequence
  Description of Artificial Sequence: Synthetic oligonucleotide
ucuggaucucccgggaagu

SEQ ID NO: 3230898 - RNA, 19 nt, Artificial Sequence
  Description of Artificial Sequence: Synthetic oligonucleotide
cugcgcuugcgcuucuugc

SEQ ID NO: 3230899 - RNA, 19 nt, Artificial Sequence
  Description of Artificial Sequence: Synthetic oligonucleotide
gugcaccugcuucaggacc

SEQ ID NO: 3230900 - RNA, 19 nt, Artificial Sequence
  Description of Artificial Sequence: Synthetic oligonucleotide
cauagacggaauagcucuc

SEQ ID NO: 3230901 - RNA, 19 nt, Artificial Sequence
  Description of Artificial Sequence: Synthetic oligonucleotide
ucggggugcaccugcuuca

SEQ ID NO: 3230902 - RNA, 19 nt, Artificial Sequence
  Description of Artificial Sequence: Synthetic oligonucleotide
ugacggccuucuuggagcc

SEQ ID NO: 3230903 - RNA, 19 nt, Artificial Sequence
  Description of Artificial Sequence: Synthetic oligonucleotide
caggcgggaagccucgccc

SEQ ID NO: 3230904 - RNA, 19 nt, Artificial Sequence
  Description of Artificial Sequence: Synthetic oligonucleotide
uggccuuggaggagaugcc

SEQ ID NO: 3230905 - RNA, 19 nt, Artificial Sequence
  Description of Artificial Sequence: Synthetic oligonucleotide
aggcgggaagccucgcccg

SEQ ID NO: 3230906 - RNA, 19 nt, Artificial Sequence
  Description of Artificial Sequence: Synthetic oligonucleotide
ggugacggccuucuuggag

SEQ ID NO: 3230907 - RNA, 19 nt, Artificial Sequence
  Description of Artificial Sequence: Synthetic oligonucleotide
cugcuucaggaccuuguac

SEQ ID NO: 3230908 - RNA, 19 nt, Artificial Sequence
  Description of Artificial Sequence: Synthetic oligonucleotide
uggaucucccgggaaguga

SEQ ID NO: 3230909 - RNA, 19 nt, Artificial Sequence
  Description of Artificial Sequence: Synthetic oligonucleotide
gccgucuuucuuuugcgcc

SEQ ID NO: 3230910 - RNA, 19 nt, Artificial Sequence
  Description of Artificial Sequence: Synthetic oligonucleotide
auagcucuccuugcggcug

SEQ ID NO: 3230911 - RNA, 19 nt, Artificial Sequence
  Description of Artificial Sequence: Synthetic oligonucleotide
cuuguacacauagacggaa

SEQ ID NO: 3230912 - RNA, 19 nt, Artificial Sequence
  Description of Artificial Sequence: Synthetic oligonucleotide
ggcagcagcaggcgcacgg

SEQ ID NO: 3230913 - RNA, 19 nt, Artificial Sequence
  Description of Artificial Sequence: Synthetic oligonucleotide
aggagaugccggugucggg

SEQ ID NO: 3230914 - RNA, 19 nt, Artificial Sequence
  Description of Artificial Sequence: Synthetic oligonucleotide
ggaagugauggucgagcgc

SEQ ID NO: 3230915 - RNA, 19 nt, Artificial Sequence
  Description of Artificial Sequence: Synthetic oligonucleotide
gaugccggugucggggugc

SEQ ID NO: 3230916 - RNA, 19 nt, Artificial Sequence
  Description of Artificial Sequence: Synthetic oligonucleotide
guucacgaaggaguucaug

SEQ ID NO: 3230917 - RNA, 19 nt, Artificial Sequence
  Description of Artificial Sequence: Synthetic oligonucleotide
uauaaaucaaacuucaaag

SEQ ID NO: 3230918 - RNA, 19 nt, Artificial Sequence
  Description of Artificial Sequence: Synthetic oligonucleotide
auaauaaaacaguagaauc

SEQ ID NO: 3230919 - RNA, 19 nt, Artificial Sequence
  Description of Artificial Sequence: Synthetic oligonucleotide
auaaaucaaacuucaaagc

SEQ ID NO: 3230920 - RNA, 19 nt, Artificial Sequence
  Description of Artificial Sequence: Synthetic oligonucleotide
uagucuaauaauaaaacag

SEQ ID NO: 3230921 - RNA, 19 nt, Artificial Sequence
  Description of Artificial Sequence: Synthetic oligonucleotide
aauagucuaauaauaaaac

SEQ ID NO: 3230922 - RNA, 19 nt, Artificial Sequence
  Description of Artificial Sequence: Synthetic oligonucleotide
uaaaucaaacuucaaagcc

SEQ ID NO: 3230923 - RNA, 19 nt, Artificial Sequence
  Description of Artificial Sequence: Synthetic oligonucleotide
ucuaauaauaaaacaguag

SEQ ID NO: 3230924 - RNA, 19 nt, Artificial Sequence
  Description of Artificial Sequence: Synthetic oligonucleotide
aacaguagaaucuauaaau

SEQ ID NO: 3230925 - RNA, 19 nt, Artificial Sequence
  Description of Artificial Sequence: Synthetic oligonucleotide
uaauaaaacaguagaaucu

SEQ ID NO: 3230926 - RNA, 19 nt, Artificial Sequence
  Description of Artificial Sequence: Synthetic oligonucleotide
augccuaccaccuugaccg

SEQ ID NO: 3230927 - RNA, 19 nt, Artificial Sequence
  Description of Artificial Sequence: Synthetic oligonucleotide
aaagaagagcuccuugggc

SEQ ID NO: 3230928 - RNA, 19 nt, Artificial Sequence
  Description of Artificial Sequence: Synthetic oligonucleotide
aaugccuaccaccuugacc

SEQ ID NO: 3230929 - RNA, 19 nt, Artificial Sequence
  Description of Artificial Sequence: Synthetic oligonucleotide
aauaauaaaacaguagaau

SEQ ID NO: 3230930 - RNA, 19 nt, Artificial Sequence
  Description of Artificial Sequence: Synthetic oligonucleotide
aaucuauaaaucaaacuuc

SEQ ID NO: 3230931 - RNA, 19 nt, Artificial Sequence
  Description of Artificial Sequence: Synthetic oligonucleotide
auugacgugguacuugucc

SEQ ID NO: 3230932 - RNA, 19 nt, Artificial Sequence
  Description of Artificial Sequence: Synthetic oligonucleotide
aaaagaagagcuccuuggg

SEQ ID NO: 3230933 - RNA, 19 nt, Artificial Sequence
  Description of Artificial Sequence: Synthetic oligonucleotide
aaaacaguagaaucuauaa

SEQ ID NO: 3230934 - RNA, 19 nt, Artificial Sequence
  Description of Artificial Sequence: Synthetic oligonucleotide
aacucauugcuucuguuuc

SEQ ID NO: 3230935 - RNA, 19 nt, Artificial Sequence
  Description of Artificial Sequence: Synthetic oligonucleotide
aaacuucaaagccucuagc

SEQ ID NO: 3230936 - RNA, 19 nt, Artificial Sequence
  Description of Artificial Sequence: Synthetic oligonucleotide
cuaauaauaaaacaguaga

SEQ ID NO: 3230937 - RNA, 19 nt, Artificial Sequence
  Description of Artificial Sequence: Synthetic oligonucleotide
uguggaaauagucuaauaa

SEQ ID NO: 3230938 - RNA, 19 nt, Artificial Sequence
  Description of Artificial Sequence: Synthetic oligonucleotide
acguaguucauucacaaag

SEQ ID NO: 3230939 - RNA, 19 nt, Artificial Sequence
  Description of Artificial Sequence: Synthetic oligonucleotide
aacuccguaacguaguuca

SEQ ID NO: 3230940 - RNA, 19 nt, Artificial Sequence
  Description of Artificial Sequence: Synthetic oligonucleotide
uaauaauaaaacaguagaa

SEQ ID NO: 3230941 - RNA, 19 nt, Artificial Sequence
  Description of Artificial Sequence: Synthetic oligonucleotide
ucauguuuguuauugacgu

SEQ ID NO: 3230942 - RNA, 19 nt, Artificial Sequence
  Description of Artificial Sequence: Synthetic oligonucleotide
uggauagucauccaacuca

SEQ ID NO: 3230943 - RNA, 19 nt, Artificial Sequence
  Description of Artificial Sequence: Synthetic oligonucleotide
auagucauccaacucauug

SEQ ID NO: 3230944 - RNA, 19 nt, Artificial Sequence
  Description of Artificial Sequence: Synthetic oligonucleotide
uaugcuguggaaauagucu

SEQ ID NO: 3230945 - RNA, 19 nt, Artificial Sequence
  Description of Artificial Sequence: Synthetic oligonucleotide
uuuguuauugacgugguac

SEQ ID NO: 3230946 - RNA, 19 nt, Artificial Sequence
  Description of Artificial Sequence: Synthetic oligonucleotide
caaaagaagagcuccuugg

SEQ ID NO: 3230947 - RNA, 19 nt, Artificial Sequence
  Description of Artificial Sequence: Synthetic oligonucleotide
aaauagucuaauaauaaaa

SEQ ID NO: 3230948 - RNA, 19 nt, Artificial Sequence
  Description of Artificial Sequence: Synthetic oligonucleotide
aagaagagcuccuugggcu

SEQ ID NO: 3230949 - RNA, 19 nt, Artificial Sequence
  Description of Artificial Sequence: Synthetic oligonucleotide
aagguugccaagcccauuc

SEQ ID NO: 3230950 - RNA, 19 nt, Artificial Sequence
  Description of Artificial Sequence: Synthetic oligonucleotide
aacuucaaagccucuagca

SEQ ID NO: 3230951 - RNA, 19 nt, Artificial Sequence
  Description of Artificial Sequence: Synthetic oligonucleotide
aaucaaacuucaaagccuc

SEQ ID NO: 3230952 - RNA, 19 nt, Artificial Sequence
  Description of Artificial Sequence: Synthetic oligonucleotide
auagucuaauaauaaaaca

SEQ ID NO: 3230953 - RNA, 19 nt, Artificial Sequence
  Description of Artificial Sequence: Synthetic oligonucleotide
gaaucuauaaaucaaacuu

SEQ ID NO: 3230954 - RNA, 19 nt, Artificial Sequence
  Description of Artificial Sequence: Synthetic oligonucleotide
gaugaucuuguuuggaggc

SEQ ID NO: 3230955 - RNA, 19 nt, Artificial Sequence
  Description of Artificial Sequence: Synthetic oligonucleotide
uucauucacaaagugcucg

SEQ ID NO: 3230956 - RNA, 19 nt, Artificial Sequence
  Description of Artificial Sequence: Synthetic oligonucleotide
cuuguuuggaggcaguggg

SEQ ID NO: 3230957 - RNA, 19 nt, Artificial Sequence
  Description of Artificial Sequence: Synthetic oligonucleotide
uguuucuuguuucuggaga

SEQ ID NO: 3230958 - RNA, 19 nt, Artificial Sequence
  Description of Artificial Sequence: Synthetic oligonucleotide
uaguucauucacaaagugc

SEQ ID NO: 3230959 - RNA, 19 nt, Artificial Sequence
  Description of Artificial Sequence: Synthetic oligonucleotide
agaaucuauaaaucaaacu

SEQ ID NO: 3230960 - RNA, 19 nt, Artificial Sequence
  Description of Artificial Sequence: Synthetic oligonucleotide
ugugcuuuauuguaugcug

SEQ ID NO: 3230961 - RNA, 19 nt, Artificial Sequence
  Description of Artificial Sequence: Synthetic oligonucleotide
auguuuguuauugacgugg

SEQ ID NO: 3230962 - RNA, 19 nt, Artificial Sequence
  Description of Artificial Sequence: Synthetic oligonucleotide
uggaaauagucuaauaaua

SEQ ID NO: 3230963 - RNA, 19 nt, Artificial Sequence
  Description of Artificial Sequence: Synthetic oligonucleotide
aaaucaaacuucaaagccu

SEQ ID NO: 3230964 - RNA, 19 nt, Artificial Sequence
  Description of Artificial Sequence: Synthetic oligonucleotide
aguucauucacaaagugcu

SEQ ID NO: 3230965 - RNA, 19 nt, Artificial Sequence
  Description of Artificial Sequence: Synthetic oligonucleotide
uucuguuucuuguuucugg

SEQ ID NO: 3230966 - RNA, 19 nt, Artificial Sequence
  Description of Artificial Sequence: Synthetic oligonucleotide
cuagcaaaagaagagcucc

SEQ ID NO: 3230967 - RNA, 19 nt, Artificial Sequence
  Description of Artificial Sequence: Synthetic oligonucleotide
uagaaucuauaaaucaaac

SEQ ID NO: 3230968 - RNA, 19 nt, Artificial Sequence
  Description of Artificial Sequence: Synthetic oligonucleotide
aauaaaacaguagaaucua

SEQ ID NO: 3230969 - RNA, 19 nt, Artificial Sequence
  Description of Artificial Sequence: Synthetic oligonucleotide
acuccaaugaggcccaagg

SEQ ID NO: 3230970 - RNA, 19 nt, Artificial Sequence
  Description of Artificial Sequence: Synthetic oligonucleotide
aaacaguagaaucuauaaa

SEQ ID NO: 3230971 - RNA, 19 nt, Artificial Sequence
  Description of Artificial Sequence: Synthetic oligonucleotide
aaucuccuuccccaccagc

SEQ ID NO: 3230972 - RNA, 19 nt, Artificial Sequence
  Description of Artificial Sequence: Synthetic oligonucleotide
gaaauagucuaauaauaaa

SEQ ID NO: 3230973 - RNA, 19 nt, Artificial Sequence
  Description of Artificial Sequence: Synthetic oligonucleotide
uaaaacaguagaaucuaua

SEQ ID NO: 3230974 - RNA, 19 nt, Artificial Sequence
  Description of Artificial Sequence: Synthetic oligonucleotide
cuuguagugaaucuccuuc

SEQ ID NO: 3230975 - RNA, 19 nt, Artificial Sequence
  Description of Artificial Sequence: Synthetic oligonucleotide
uggaugaucuuguuuggag

SEQ ID NO: 3230976 - RNA, 19 nt, Artificial Sequence
  Description of Artificial Sequence: Synthetic oligonucleotide
aaagccucuagcaaaagaa

SEQ ID NO: 3230977 - RNA, 19 nt, Artificial Sequence
  Description of Artificial Sequence: Synthetic oligonucleotide
uugaccgcaucucugaccu

SEQ ID NO: 3230978 - RNA, 19 nt, Artificial Sequence
  Description of Artificial Sequence: Synthetic oligonucleotide
uauuguaugcuguggaaau

SEQ ID NO: 3230979 - RNA, 19 nt, Artificial Sequence
  Description of Artificial Sequence: Synthetic oligonucleotide
uagucauccaacucauugc

SEQ ID NO: 3230980 - RNA, 19 nt, Artificial Sequence
  Description of Artificial Sequence: Synthetic oligonucleotide
agucuaauaauaaaacagu

SEQ ID NO: 3230981 - RNA, 19 nt, Artificial Sequence
  Description of Artificial Sequence: Synthetic oligonucleotide
ucauccaacucauugcuuc

SEQ ID NO: 3230982 - RNA, 19 nt, Artificial Sequence
  Description of Artificial Sequence: Synthetic oligonucleotide
cuauaaaucaaacuucaaa

SEQ ID NO: 3230983 - RNA, 19 nt, Artificial Sequence
  Description of Artificial Sequence: Synthetic oligonucleotide
acaguagaaucuauaaauc

SEQ ID NO: 3230984 - RNA, 19 nt, Artificial Sequence
  Description of Artificial Sequence: Synthetic oligonucleotide
uuguaugcuguggaaauag

SEQ ID NO: 3230985 - RNA, 19 nt, Artificial Sequence
  Description of Artificial Sequence: Synthetic oligonucleotide
uccagcaaugccuaccacc

SEQ ID NO: 3230986 - RNA, 19 nt, Artificial Sequence
  Description of Artificial Sequence: Synthetic oligonucleotide
gucauguuuguuauugacg

SEQ ID NO: 3230987 - RNA, 19 nt, Artificial Sequence
  Description of Artificial Sequence: Synthetic oligonucleotide
uguagugaaucuccuuccc

SEQ ID NO: 3230988 - RNA, 19 nt, Artificial Sequence
  Description of Artificial Sequence: Synthetic oligonucleotide
ugucauguuuguuauugac

SEQ ID NO: 3230989 - RNA, 19 nt, Artificial Sequence
  Description of Artificial Sequence: Synthetic oligonucleotide
ucuugugcuuuauuguaug

SEQ ID NO: 3230990 - RNA, 19 nt, Artificial Sequence
  Description of Artificial Sequence: Synthetic oligonucleotide
accaggacuccaaugaggc

SEQ ID NO: 3230991 - RNA, 19 nt, Artificial Sequence
  Description of Artificial Sequence: Synthetic oligonucleotide
uuuauuguaugcuguggaa

SEQ ID NO: 3230992 - RNA, 19 nt, Artificial Sequence
  Description of Artificial Sequence: Synthetic oligonucleotide
auucacaaagugcucgcag

SEQ ID NO: 3230993 - RNA, 19 nt, Artificial Sequence
  Description of Artificial Sequence: Synthetic oligonucleotide
uagugaaucuccuucccca

SEQ ID NO: 3230994 - RNA, 19 nt, Artificial Sequence
  Description of Artificial Sequence: Synthetic oligonucleotide
uuucuggagaccaggacuc

SEQ ID NO: 3230995 - RNA, 19 nt, Artificial Sequence
  Description of Artificial Sequence: Synthetic oligonucleotide
ucacuggucagcuuguagu

SEQ ID NO: 3230996 - RNA, 19 nt, Artificial Sequence
  Description of Artificial Sequence: Synthetic oligonucleotide
agcuccuugggcuggauag

SEQ ID NO: 3230997 - RNA, 19 nt, Artificial Sequence
  Description of Artificial Sequence: Synthetic oligonucleotide
caaacuucaaagccucuag

SEQ ID NO: 3230998 - RNA, 19 nt, Artificial Sequence
  Description of Artificial Sequence: Synthetic oligonucleotide
aagcccauuccagcaaugc

SEQ ID NO: 3230999 - RNA, 19 nt, Artificial Sequence
  Description of Artificial Sequence: Synthetic oligonucleotide
ugaaucuccuuccccacca

SEQ ID NO: 3231000 - RNA, 19 nt, Artificial Sequence
  Description of Artificial Sequence: Synthetic oligonucleotide
uuguuauugacgugguacu

SEQ ID NO: 3231001 - RNA, 19 nt, Artificial Sequence
  Description of Artificial Sequence: Synthetic oligonucleotide
uuauugacgugguacuugu

SEQ ID NO: 3231002 - RNA, 19 nt, Artificial Sequence
  Description of Artificial Sequence: Synthetic oligonucleotide
uuguagugaaucuccuucc

SEQ ID NO: 3231003 - RNA, 19 nt, Artificial Sequence
  Description of Artificial Sequence: Synthetic oligonucleotide
ucuagcaaaagaagagcuc

SEQ ID NO: 3231004 - RNA, 19 nt, Artificial Sequence
  Description of Artificial Sequence: Synthetic oligonucleotide
gagaccaggacuccaauga

SEQ ID NO: 3231005 - RNA, 19 nt, Artificial Sequence
  Description of Artificial Sequence: Synthetic oligonucleotide
ucuguuucuuguuucugga

SEQ ID NO: 3231006 - RNA, 19 nt, Artificial Sequence
  Description of Artificial Sequence: Synthetic oligonucleotide
uucgcugucauguuuguua

SEQ ID NO: 3231007 - RNA, 19 nt, Artificial Sequence
  Description of Artificial Sequence: Synthetic oligonucleotide
uaacguaguucauucacaa

SEQ ID NO: 3231008 - RNA, 19 nt, Artificial Sequence
  Description of Artificial Sequence: Synthetic oligonucleotide
agugaaucuccuuccccac

SEQ ID NO: 3231009 - RNA, 19 nt, Artificial Sequence
  Description of Artificial Sequence: Synthetic oligonucleotide
uugacgugguacuuguccc

SEQ ID NO: 3231010 - RNA, 19 nt, Artificial Sequence
  Description of Artificial Sequence: Synthetic oligonucleotide
agucauccaacucauugcu

SEQ ID NO: 3231011 - RNA, 19 nt, Artificial Sequence
  Description of Artificial Sequence: Synthetic oligonucleotide
agcaaugccuaccaccuug

SEQ ID NO: 3231012 - RNA, 19 nt, Artificial Sequence
  Description of Artificial Sequence: Synthetic oligonucleotide
aucuauaaaucaaacuuca

SEQ ID NO: 3231013 - RNA, 19 nt, Artificial Sequence
  Description of Artificial Sequence: Synthetic oligonucleotide
guucucacuggucagcuug

SEQ ID NO: 3231014 - RNA, 19 nt, Artificial Sequence
  Description of Artificial Sequence: Synthetic oligonucleotide
agcccauuccagcaaugcc

SEQ ID NO: 3231015 - RNA, 19 nt, Artificial Sequence
  Description of Artificial Sequence: Synthetic oligonucleotide
ucuucagcccgcuggauga

SEQ ID NO: 3231016 - RNA, 19 nt, Artificial Sequence
  Description of Artificial Sequence: Synthetic oligonucleotide
acaaagugcucgcaguucu

SEQ ID NO: 3231017 - RNA, 19 nt, Artificial Sequence
  Description of Artificial Sequence: Synthetic oligonucleotide
aaaugcaucagcuucuccc

SEQ ID NO: 3231018 - RNA, 19 nt, Artificial Sequence
  Description of Artificial Sequence: Synthetic oligonucleotide
ugaaagauguccuugaaug

SEQ ID NO: 3231019 - RNA, 19 nt, Artificial Sequence
  Description of Artificial Sequence: Synthetic oligonucleotide
ucugacuucuuuauaaacg

SEQ ID NO: 3231020 - RNA, 19 nt, Artificial Sequence
  Description of Artificial Sequence: Synthetic oligonucleotide
uugaaugagauccugaaca

SEQ ID NO: 3231021 - RNA, 19 nt, Artificial Sequence
  Description of Artificial Sequence: Synthetic oligonucleotide
agaaugaucucauuagagc

SEQ ID NO: 3231022 - RNA, 19 nt, Artificial Sequence
  Description of Artificial Sequence: Synthetic oligonucleotide
cauaauuccagucacagac

SEQ ID NO: 3231023 - RNA, 19 nt, Artificial Sequence
  Description of Artificial Sequence: Synthetic oligonucleotide
uucaccaggacaauauugg

SEQ ID NO: 3231024 - RNA, 19 nt, Artificial Sequence
  Description of Artificial Sequence: Synthetic oligonucleotide
aaugagauccugaacacgg

SEQ ID NO: 3231025 - RNA, 19 nt, Artificial Sequence
  Description of Artificial Sequence: Synthetic oligonucleotide
aauauuggcagagacuggg

SEQ ID NO: 3231026 - RNA, 19 nt, Artificial Sequence
  Description of Artificial Sequence: Synthetic oligonucleotide
auuccagucacagacaagc

SEQ ID NO: 3231027 - RNA, 19 nt, Artificial Sequence
  Description of Artificial Sequence: Synthetic oligonucleotide
gacagaaugaucucauuag

SEQ ID NO: 3231028 - RNA, 19 nt, Artificial Sequence
  Description of Artificial Sequence: Synthetic oligonucleotide
uuuauaaacguagucuucc

SEQ ID NO: 3231029 - RNA, 19 nt, Artificial Sequence
  Description of Artificial Sequence: Synthetic oligonucleotide
acaauauuggcagagacug

SEQ ID NO: 3231030 - RNA, 19 nt, Artificial Sequence
  Description of Artificial Sequence: Synthetic oligonucleotide
aaggggcuuuucuucaucc

SEQ ID NO: 3231031 - RNA, 19 nt, Artificial Sequence
  Description of Artificial Sequence: Synthetic oligonucleotide
uucuuuauaaacguagucu

SEQ ID NO: 3231032 - RNA, 19 nt, Artificial Sequence
  Description of Artificial Sequence: Synthetic oligonucleotide
uuuacaaucuccagaugug

SEQ ID NO: 3231033 - RNA, 19 nt, Artificial Sequence
  Description of Artificial Sequence: Synthetic oligonucleotide
ucaaaguuuccacagucug

SEQ ID NO: 3231034 - RNA, 19 nt, Artificial Sequence
  Description of Artificial Sequence: Synthetic oligonucleotide
gaugugaacaaaugcauca

SEQ ID NO: 3231035 - RNA, 19 nt, Artificial Sequence
  Description of Artificial Sequence: Synthetic oligonucleotide
aaagauguccuugaaugag

SEQ ID NO: 3231036 - RNA, 19 nt, Artificial Sequence
  Description of Artificial Sequence: Synthetic oligonucleotide
agucuucccauucuaaggg

SEQ ID NO: 3231037 - RNA, 19 nt, Artificial Sequence
  Description of Artificial Sequence: Synthetic oligonucleotide
uccagaugugaacaaaugc

SEQ ID NO: 3231038 - RNA, 19 nt, Artificial Sequence
  Description of Artificial Sequence: Synthetic oligonucleotide
accaggacaauauuggcag

SEQ ID NO: 3231039 - RNA, 19 nt, Artificial Sequence
  Description of Artificial Sequence: Synthetic oligonucleotide
cacaaugucccauaauucc

SEQ ID NO: 3231040 - RNA, 19 nt, Artificial Sequence
  Description of Artificial Sequence: Synthetic oligonucleotide
caagcugccaucuucgagg

SEQ ID NO: 3231041 - RNA, 19 nt, Artificial Sequence
  Description of Artificial Sequence: Synthetic oligonucleotide
ucgaggaaaguucaccagg

SEQ ID NO: 3231042 - RNA, 19 nt, Artificial Sequence
  Description of Artificial Sequence: Synthetic oligonucleotide
aaacguagucuucccauuc

SEQ ID NO: 3231043 - RNA, 19 nt, Artificial Sequence
  Description of Artificial Sequence: Synthetic oligonucleotide
ucucuuuuccagauccucg

SEQ ID NO: 3231044 - RNA, 19 nt, Artificial Sequence
  Description of Artificial Sequence: Synthetic oligonucleotide
gaacaaaugcaucagcuuc

SEQ ID NO: 3231045 - RNA, 19 nt, Artificial Sequence
  Description of Artificial Sequence: Synthetic oligonucleotide
acucaaaguuuccacaguc

SEQ ID NO: 3231046 - RNA, 19 nt, Artificial Sequence
  Description of Artificial Sequence: Synthetic oligonucleotide
uaguuaacagccauccuug

SEQ ID NO: 3231047 - RNA, 19 nt, Artificial Sequence
  Description of Artificial Sequence: Synthetic oligonucleotide
cuuuucuucauccauucac

SEQ ID NO: 3231048 - RNA, 19 nt, Artificial Sequence
  Description of Artificial Sequence: Synthetic oligonucleotide
aucagcuucucccuuacuc

SEQ ID NO: 3231049 - RNA, 19 nt, Artificial Sequence
  Description of Artificial Sequence: Synthetic oligonucleotide
gacuucuuuauaaacguag

SEQ ID NO: 3231050 - RNA, 19 nt, Artificial Sequence
  Description of Artificial Sequence: Synthetic oligonucleotide
uuuucuucauccauucacu

SEQ ID NO: 3231051 - RNA, 19 nt, Artificial Sequence
  Description of Artificial Sequence: Synthetic oligonucleotide
aaaguuuccacagucugca

SEQ ID NO: 3231052 - RNA, 19 nt, Artificial Sequence
  Description of Artificial Sequence: Synthetic oligonucleotide
augugguucuucucaagcc

SEQ ID NO: 3231053 - RNA, 19 nt, Artificial Sequence
  Description of Artificial Sequence: Synthetic oligonucleotide
ucuuuauaaacguagucuu

SEQ ID NO: 3231054 - RNA, 19 nt, Artificial Sequence
  Description of Artificial Sequence: Synthetic oligonucleotide
uagucuucccauucuaagg

SEQ ID NO: 3231055 - RNA, 19 nt, Artificial Sequence
  Description of Artificial Sequence: Synthetic oligonucleotide
cugaacacgggacagaaug

SEQ ID NO: 3231056 - RNA, 19 nt, Artificial Sequence
  Description of Artificial Sequence: Synthetic oligonucleotide
acaaucuccagaugugaac

SEQ ID NO: 3231057 - RNA, 19 nt, Artificial Sequence
  Description of Artificial Sequence: Synthetic oligonucleotide
ugucccauaauuccaguca

SEQ ID NO: 3231058 - RNA, 19 nt, Artificial Sequence
  Description of Artificial Sequence: Synthetic oligonucleotide
ucuucauccauucacucau

SEQ ID NO: 3231059 - RNA, 19 nt, Artificial Sequence
  Description of Artificial Sequence: Synthetic oligonucleotide
aaugcaucagcuucucccu

SEQ ID NO: 3231060 - RNA, 19 nt, Artificial Sequence
  Description of Artificial Sequence: Synthetic oligonucleotide
ucacucaaaguuuccacag

SEQ ID NO: 3231061 - RNA, 19 nt, Artificial Sequence
  Description of Artificial Sequence: Synthetic oligonucleotide
uucuucucaagccauuucu

SEQ ID NO: 3231062 - RNA, 19 nt, Artificial Sequence
  Description of Artificial Sequence: Synthetic oligonucleotide
uucauccauucacucaugg

SEQ ID NO: 3231063 - RNA, 19 nt, Artificial Sequence
  Description of Artificial Sequence: Synthetic oligonucleotide
acagucugcacacaauguc

SEQ ID NO: 3231064 - RNA, 19 nt, Artificial Sequence
  Description of Artificial Sequence: Synthetic oligonucleotide
acuccuucuucucacuggc

SEQ ID NO: 3231065 - RNA, 19 nt, Artificial Sequence
  Description of Artificial Sequence: Synthetic oligonucleotide
ucucaagccauuucuuuag

SEQ ID NO: 3231066 - RNA, 19 nt, Artificial Sequence
  Description of Artificial Sequence: Synthetic oligonucleotide
cucacugggaagcugaaag

SEQ ID NO: 3231067 - RNA, 19 nt, Artificial Sequence
  Description of Artificial Sequence: Synthetic oligonucleotide
uguauccuuuacaaucucc

SEQ ID NO: 3231068 - RNA, 19 nt, Artificial Sequence
  Description of Artificial Sequence: Synthetic oligonucleotide
ugugaacaaaugcaucagc

SEQ ID NO: 3231069 - RNA, 19 nt, Artificial Sequence
  Description of Artificial Sequence: Synthetic oligonucleotide
ucauuagagcugcugucgg

SEQ ID NO: 3231070 - RNA, 19 nt, Artificial Sequence
  Description of Artificial Sequence: Synthetic oligonucleotide
augaucucauuagagcugc

SEQ ID NO: 3231071 - RNA, 19 nt, Artificial Sequence
  Description of Artificial Sequence: Synthetic oligonucleotide
cagaaugaucucauuagag

SEQ ID NO: 3231072 - RNA, 19 nt, Artificial Sequence
  Description of Artificial Sequence: Synthetic oligonucleotide
auuucuuuaggcuauucuu

SEQ ID NO: 3231073 - RNA, 19 nt, Artificial Sequence
  Description of Artificial Sequence: Synthetic oligonucleotide
ugugguucuucucaagcca

SEQ ID NO: 3231074 - RNA, 19 nt, Artificial Sequence
  Description of Artificial Sequence: Synthetic oligonucleotide
uauaaacguagucuuccca

SEQ ID NO: 3231075 - RNA, 19 nt, Artificial Sequence
  Description of Artificial Sequence: Synthetic oligonucleotide
ucacucaugguuaccagcu

SEQ ID NO: 3231076 - RNA, 19 nt, Artificial Sequence
  Description of Artificial Sequence: Synthetic oligonucleotide
acagccauccuugauacuc

SEQ ID NO: 3231077 - RNA, 19 nt, Artificial Sequence
  Description of Artificial Sequence: Synthetic oligonucleotide
uuuuccagauccucggggc

SEQ ID NO: 3231078 - RNA, 19 nt, Artificial Sequence
  Description of Artificial Sequence: Synthetic oligonucleotide
acucaugguuaccagcugg

SEQ ID NO: 3231079 - RNA, 19 nt, Artificial Sequence
  Description of Artificial Sequence: Synthetic oligonucleotide
uguugggccucucacuggg

SEQ ID NO: 3231080 - RNA, 19 nt, Artificial Sequence
  Description of Artificial Sequence: Synthetic oligonucleotide
uucacucaaaguuuccaca

SEQ ID NO: 3231081 - RNA, 19 nt, Artificial Sequence
  Description of Artificial Sequence: Synthetic oligonucleotide
gaaugaucucauuagagcu

SEQ ID NO: 3231082 - RNA, 19 nt, Artificial Sequence
  Description of Artificial Sequence: Synthetic oligonucleotide
uuauaaacguagucuuccc

SEQ ID NO: 3231083 - RNA, 19 nt, Artificial Sequence
  Description of Artificial Sequence: Synthetic oligonucleotide
uuucuuuaggcuauucuuu

SEQ ID NO: 3231084 - RNA, 19 nt, Artificial Sequence
  Description of Artificial Sequence: Synthetic oligonucleotide
aaugaucucauuagagcug

SEQ ID NO: 3231085 - RNA, 19 nt, Artificial Sequence
  Description of Artificial Sequence: Synthetic oligonucleotide
uaauuccagucacagacaa

SEQ ID NO: 3231086 - RNA, 19 nt, Artificial Sequence
  Description of Artificial Sequence: Synthetic oligonucleotide
auaaacguagucuucccau

SEQ ID NO: 3231087 - RNA, 19 nt, Artificial Sequence
  Description of Artificial Sequence: Synthetic oligonucleotide
ugaaugagauccugaacac

SEQ ID NO: 3231088 - RNA, 19 nt, Artificial Sequence
  Description of Artificial Sequence: Synthetic oligonucleotide
uauccuuuacaaucuccag

SEQ ID NO: 3231089 - RNA, 19 nt, Artificial Sequence
  Description of Artificial Sequence: Synthetic oligonucleotide
caaaguuuccacagucugc

SEQ ID NO: 3231090 - RNA, 19 nt, Artificial Sequence
  Description of Artificial Sequence: Synthetic oligonucleotide
guagucuucccauucuaag

SEQ ID NO: 3231091 - RNA, 19 nt, Artificial Sequence
  Description of Artificial Sequence: Synthetic oligonucleotide
uccagucacagacaagcug

SEQ ID NO: 3231092 - RNA, 19 nt, Artificial Sequence
  Description of Artificial Sequence: Synthetic oligonucleotide
ucuucccauucuaaggggc

SEQ ID NO: 3231093 - RNA, 19 nt, Artificial Sequence
  Description of Artificial Sequence: Synthetic oligonucleotide
cucuuuuccagauccucgg

SEQ ID NO: 3231094 - RNA, 19 nt, Artificial Sequence
  Description of Artificial Sequence: Synthetic oligonucleotide
aguguugggccucucacug

SEQ ID NO: 3231095 - RNA, 19 nt, Artificial Sequence
  Description of Artificial Sequence: Synthetic oligonucleotide
ucuaaggggcuuuucuuca

SEQ ID NO: 3231096 - RNA, 19 nt, Artificial Sequence
  Description of Artificial Sequence: Synthetic oligonucleotide
cuguaguuaacagccaucc

SEQ ID NO: 3231097 - RNA, 19 nt, Artificial Sequence
  Description of Artificial Sequence: Synthetic oligonucleotide
ucuuuuccagauccucggg

SEQ ID NO: 3231098 - RNA, 19 nt, Artificial Sequence
  Description of Artificial Sequence: Synthetic oligonucleotide
aucucauuagagcugcugu

SEQ ID NO: 3231099 - RNA, 19 nt, Artificial Sequence
  Description of Artificial Sequence: Synthetic oligonucleotide
uacuccuucuucucacugg

SEQ ID NO: 3231100 - RNA, 19 nt, Artificial Sequence
  Description of Artificial Sequence: Synthetic oligonucleotide
uucucacuggcuaucacuc

SEQ ID NO: 3231101 - RNA, 19 nt, Artificial Sequence
  Description of Artificial Sequence: Synthetic oligonucleotide
cuuuuccagauccucgggg

SEQ ID NO: 3231102 - RNA, 19 nt, Artificial Sequence
  Description of Artificial Sequence: Synthetic oligonucleotide
uuuaggcuauucuuucucu

SEQ ID NO: 3231103 - RNA, 19 nt, Artificial Sequence
  Description of Artificial Sequence: Synthetic oligonucleotide
uucacucaugguuaccagc

SEQ ID NO: 3231104 - RNA, 19 nt, Artificial Sequence
  Description of Artificial Sequence: Synthetic oligonucleotide
uugauacuccuucuucuca

SEQ ID NO: 3231105 - RNA, 19 nt, Artificial Sequence
  Description of Artificial Sequence: Synthetic oligonucleotide
ucaagccauuucuuuaggc

SEQ ID NO: 3231106 - RNA, 19 nt, Artificial Sequence
  Description of Artificial Sequence: Synthetic oligonucleotide
cagucugcacacaaugucc

SEQ ID NO: 3231107 - RNA, 19 nt, Artificial Sequence
  Description of Artificial Sequence: Synthetic oligonucleotide
ucugugguccccuucacuc

SEQ ID NO: 3231108 - RNA, 19 nt, Artificial Sequence
  Description of Artificial Sequence: Synthetic oligonucleotide
ucuucgaggaaaguucacc

SEQ ID NO: 3231109 - RNA, 19 nt, Artificial Sequence
  Description of Artificial Sequence: Synthetic oligonucleotide
acagaaugaucucauuaga

SEQ ID NO: 3231110 - RNA, 19 nt, Artificial Sequence
  Description of Artificial Sequence: Synthetic oligonucleotide
uucuucauccauucacuca

SEQ ID NO: 3231111 - RNA, 19 nt, Artificial Sequence
  Description of Artificial Sequence: Synthetic oligonucleotide
auccuuuacaaucuccaga

SEQ ID NO: 3231112 - RNA, 19 nt, Artificial Sequence
  Description of Artificial Sequence: Synthetic oligonucleotide
cucauuagagcugcugucg

SEQ ID NO: 3231113 - RNA, 19 nt, Artificial Sequence
  Description of Artificial Sequence: Synthetic oligonucleotide
gaaugagauccugaacacg

SEQ ID NO: 3231114 - RNA, 19 nt, Artificial Sequence
  Description of Artificial Sequence: Synthetic oligonucleotide
gaaagauguccuugaauga

SEQ ID NO: 3231115 - RNA, 19 nt, Artificial Sequence
  Description of Artificial Sequence: Synthetic oligonucleotide
cuuuauaaacguagucuuc

SEQ ID NO: 3231116 - RNA, 19 nt, Artificial Sequence
  Description of Artificial Sequence: Synthetic oligonucleotide
aacaaaugcaucagcuucu

SEQ ID NO: 3231117 - RNA, 19 nt, Artificial Sequence
  Description of Artificial Sequence: Synthetic oligonucleotide
aucacagucaucuuuacag

SEQ ID NO: 3231118 - RNA, 19 nt, Artificial Sequence
  Description of Artificial Sequence: Synthetic oligonucleotide
caaaggaugaggaacaccc

SEQ ID NO: 3231119 - RNA, 19 nt, Artificial Sequence
  Description of Artificial Sequence: Synthetic oligonucleotide
guuuguuuuggucagaggc

SEQ ID NO: 3231120 - RNA, 19 nt, Artificial Sequence
  Description of Artificial Sequence: Synthetic oligonucleotide
ugaccauccaaccaacugg

SEQ ID NO: 3231121 - RNA, 19 nt, Artificial Sequence
  Description of Artificial Sequence: Synthetic oligonucleotide
uguguguuuguuuugguca

SEQ ID NO: 3231122 - RNA, 19 nt, Artificial Sequence
  Description of Artificial Sequence: Synthetic oligonucleotide
ucuccauauagcaaguagc

SEQ ID NO: 3231123 - RNA, 19 nt, Artificial Sequence
  Description of Artificial Sequence: Synthetic oligonucleotide
uuuguuuuggucagaggcc

SEQ ID NO: 3231124 - RNA, 19 nt, Artificial Sequence
  Description of Artificial Sequence: Synthetic oligonucleotide
agcaaguagccuaagaugg

SEQ ID NO: 3231125 - RNA, 19 nt, Artificial Sequence
  Description of Artificial Sequence: Synthetic oligonucleotide
uuggaaacaguccuacuug

SEQ ID NO: 3231126 - RNA, 19 nt, Artificial Sequence
  Description of Artificial Sequence: Synthetic oligonucleotide
uacagugugaccauccaac

SEQ ID NO: 3231127 - RNA, 19 nt, Artificial Sequence
  Description of Artificial Sequence: Synthetic oligonucleotide
uugcuugccucccaggugg

SEQ ID NO: 3231128 - RNA, 19 nt, Artificial Sequence
  Description of Artificial Sequence: Synthetic oligonucleotide
ucagggugagcccacaaag

SEQ ID NO: 3231129 - RNA, 19 nt, Artificial Sequence
  Description of Artificial Sequence: Synthetic oligonucleotide
cuugcuguggaucagggug

SEQ ID NO: 3231130 - RNA, 19 nt, Artificial Sequence
  Description of Artificial Sequence: Synthetic oligonucleotide
ucuggcaucuccuuguggc

SEQ ID NO: 3231131 - RNA, 19 nt, Artificial Sequence
  Description of Artificial Sequence: Synthetic oligonucleotide
augaggaacaccccucccc

SEQ ID NO: 3231132 - RNA, 19 nt, Artificial Sequence
  Description of Artificial Sequence: Synthetic oligonucleotide
cuccauauagcaaguagcc

SEQ ID NO: 3231133 - RNA, 19 nt, Artificial Sequence
  Description of Artificial Sequence: Synthetic oligonucleotide
auagcaaguagccuaagau

SEQ ID NO: 3231134 - RNA, 19 nt, Artificial Sequence
  Description of Artificial Sequence: Synthetic oligonucleotide
aacaguccuacuugucaac

SEQ ID NO: 3231135 - RNA, 19 nt, Artificial Sequence
  Description of Artificial Sequence: Synthetic oligonucleotide
uacuugucaacccacggcu

SEQ ID NO: 3231136 - RNA, 19 nt, Artificial Sequence
  Description of Artificial Sequence: Synthetic oligonucleotide
uagcaaguagccuaagaug

SEQ ID NO: 3231137 - RNA, 19 nt, Artificial Sequence
  Description of Artificial Sequence: Synthetic oligonucleotide
acagugugaccauccaacc

SEQ ID NO: 3231138 - RNA, 19 nt, Artificial Sequence
  Description of Artificial Sequence: Synthetic oligonucleotide
uuuguuguguguguguuug

SEQ ID NO: 3231139 - RNA, 19 nt, Artificial Sequence
  Description of Artificial Sequence: Synthetic oligonucleotide
aaggaugaggaacaccccu

SEQ ID NO: 3231140 - RNA, 19 nt, Artificial Sequence
  Description of Artificial Sequence: Synthetic oligonucleotide
gaaacaguccuacuuguca

SEQ ID NO: 3231141 - RNA, 19 nt, Artificial Sequence
  Description of Artificial Sequence: Synthetic oligonucleotide
aucuccuuguggcugauag

SEQ ID NO: 3231142 - RNA, 19 nt, Artificial Sequence
  Description of Artificial Sequence: Synthetic oligonucleotide
cuuuacagugugaccaucc

SEQ ID NO: 3231143 - RNA, 19 nt, Artificial Sequence
  Description of Artificial Sequence: Synthetic oligonucleotide
uauagcaaguagccuaaga

SEQ ID NO: 3231144 - RNA, 19 nt, Artificial Sequence
  Description of Artificial Sequence: Synthetic oligonucleotide
auagucaggggcuguacuc

SEQ ID NO: 3231145 - RNA, 19 nt, Artificial Sequence
  Description of Artificial Sequence: Synthetic oligonucleotide
aaacaguccuacuugucaa

SEQ ID NO: 3231146 - RNA, 19 nt, Artificial Sequence
  Description of Artificial Sequence: Synthetic oligonucleotide
aaaggaugaggaacacccc

SEQ ID NO: 3231147 - RNA, 19 nt, Artificial Sequence
  Description of Artificial Sequence: Synthetic oligonucleotide
guggcugauagucaggggc

SEQ ID NO: 3231148 - RNA, 19 nt, Artificial Sequence
  Description of Artificial Sequence: Synthetic oligonucleotide
acuguugcuugcuugccuc

SEQ ID NO: 3231149 - RNA, 19 nt, Artificial Sequence
  Description of Artificial Sequence: Synthetic oligonucleotide
agugugaccauccaaccaa

SEQ ID NO: 3231150 - RNA, 19 nt, Artificial Sequence
  Description of Artificial Sequence: Synthetic oligonucleotide
uuuacagugugaccaucca

SEQ ID NO: 3231151 - RNA, 19 nt, Artificial Sequence
  Description of Artificial Sequence: Synthetic oligonucleotide
aagaccuccuggcacucuc

SEQ ID NO: 3231152 - RNA, 19 nt, Artificial Sequence
  Description of Artificial Sequence: Synthetic oligonucleotide
uuggucagaggccuggugu

SEQ ID NO: 3231153 - RNA, 19 nt, Artificial Sequence
  Description of Artificial Sequence: Synthetic oligonucleotide
cuguggaucagggugagcc

SEQ ID NO: 3231154 - RNA, 19 nt, Artificial Sequence
  Description of Artificial Sequence: Synthetic oligonucleotide
ucaucuuuacagugugacc

SEQ ID NO: 3231155 - RNA, 19 nt, Artificial Sequence
  Description of Artificial Sequence: Synthetic oligonucleotide
uguuuguuuuggucagagg

SEQ ID NO: 3231156 - RNA, 19 nt, Artificial Sequence
  Description of Artificial Sequence: Synthetic oligonucleotide
acaaaggaugaggaacacc

SEQ ID NO: 3231157 - RNA, 19 nt, Artificial Sequence
  Description of Artificial Sequence: Synthetic oligonucleotide
uccuacuugucaacccacg

SEQ ID NO: 3231158 - RNA, 19 nt, Artificial Sequence
  Description of Artificial Sequence: Synthetic oligonucleotide
aggggcuguacucccaggc

SEQ ID NO: 3231159 - RNA, 19 nt, Artificial Sequence
  Description of Artificial Sequence: Synthetic oligonucleotide
aggaacaccccuccccacc

SEQ ID NO: 3231160 - RNA, 19 nt, Artificial Sequence
  Description of Artificial Sequence: Synthetic oligonucleotide
cucuccauauagcaaguag

SEQ ID NO: 3231161 - RNA, 19 nt, Artificial Sequence
  Description of Artificial Sequence: Synthetic oligonucleotide
caucuuuacagugugacca

SEQ ID NO: 3231162 - RNA, 19 nt, Artificial Sequence
  Description of Artificial Sequence: Synthetic oligonucleotide
uuguggcugauagucaggg

SEQ ID NO: 3231163 - RNA, 19 nt, Artificial Sequence
  Description of Artificial Sequence: Synthetic oligonucleotide
ugaggaacaccccucccca

SEQ ID NO: 3231164 - RNA, 19 nt, Artificial Sequence
  Description of Artificial Sequence: Synthetic oligonucleotide
acaguccuacuugucaacc

SEQ ID NO: 3231165 - RNA, 19 nt, Artificial Sequence
  Description of Artificial Sequence: Synthetic oligonucleotide
cuacuugucaacccacggc

SEQ ID NO: 3231166 - RNA, 19 nt, Artificial Sequence
  Description of Artificial Sequence: Synthetic oligonucleotide
cuugucaacccacggcugg

SEQ ID NO: 3231167 - RNA, 19 nt, Artificial Sequence
  Description of Artificial Sequence: Synthetic oligonucleotide
acggcugggcaucacaguc

SEQ ID NO: 3231168 - RNA, 19 nt, Artificial Sequence
  Description of Artificial Sequence: Synthetic oligonucleotide
cauccaaccaacuggcguc

SEQ ID NO: 3231169 - RNA, 19 nt, Artificial Sequence
  Description of Artificial Sequence: Synthetic oligonucleotide
cacagucaucuuuacagug

SEQ ID NO: 3231170 - RNA, 19 nt, Artificial Sequence
  Description of Artificial Sequence: Synthetic oligonucleotide
uggcacucuccauauagca

SEQ ID NO: 3231171 - RNA, 19 nt, Artificial Sequence
  Description of Artificial Sequence: Synthetic oligonucleotide
agucaggggcuguacuccc

SEQ ID NO: 3231172 - RNA, 19 nt, Artificial Sequence
  Description of Artificial Sequence: Synthetic oligonucleotide
agcuuggaaacaguccuac

SEQ ID NO: 3231173 - RNA, 19 nt, Artificial Sequence
  Description of Artificial Sequence: Synthetic oligonucleotide
uggaaacaguccuacuugu

SEQ ID NO: 3231174 - RNA, 19 nt, Artificial Sequence
  Description of Artificial Sequence: Synthetic oligonucleotide
gucacuguugcuugcuugc

SEQ ID NO: 3231175 - RNA, 19 nt, Artificial Sequence
  Description of Artificial Sequence: Synthetic oligonucleotide
gagcccacaaaggaugagg

SEQ ID NO: 3231176 - RNA, 19 nt, Artificial Sequence
  Description of Artificial Sequence: Synthetic oligonucleotide
aguccuacuugucaaccca

SEQ ID NO: 3231177 - RNA, 19 nt, Artificial Sequence
  Description of Artificial Sequence: Synthetic oligonucleotide
uuguguguguguuuguuuu

SEQ ID NO: 3231178 - RNA, 19 nt, Artificial Sequence
  Description of Artificial Sequence: Synthetic oligonucleotide
gucaucuuuacagugugac

SEQ ID NO: 3231179 - RNA, 19 nt, Artificial Sequence
  Description of Artificial Sequence: Synthetic oligonucleotide
gcacucuccauauagcaag

SEQ ID NO: 3231180 - RNA, 19 nt, Artificial Sequence
  Description of Artificial Sequence: Synthetic oligonucleotide
gugaccauccaaccaacug

SEQ ID NO: 3231181 - RNA, 19 nt, Artificial Sequence
  Description of Artificial Sequence: Synthetic oligonucleotide
guguguuuguuuuggucag

SEQ ID NO: 3231182 - RNA, 19 nt, Artificial Sequence
  Description of Artificial Sequence: Synthetic oligonucleotide
uuguuuuggucagaggccu

SEQ ID NO: 3231183 - RNA, 19 nt, Artificial Sequence
  Description of Artificial Sequence: Synthetic oligonucleotide
ucacagucaucuuuacagu

SEQ ID NO: 3231184 - RNA, 19 nt, Artificial Sequence
  Description of Artificial Sequence: Synthetic oligonucleotide
agggugagcccacaaagga

SEQ ID NO: 3231185 - RNA, 19 nt, Artificial Sequence
  Description of Artificial Sequence: Synthetic oligonucleotide
aacuugcuguggaucaggg

SEQ ID NO: 3231186 - RNA, 19 nt, Artificial Sequence
  Description of Artificial Sequence: Synthetic oligonucleotide
uguuggucuggcaucuccu

SEQ ID NO: 3231187 - RNA, 19 nt, Artificial Sequence
  Description of Artificial Sequence: Synthetic oligonucleotide
caaguagccuaagauggcc

SEQ ID NO: 3231188 - RNA, 19 nt, Artificial Sequence
  Description of Artificial Sequence: Synthetic oligonucleotide
uuacagugugaccauccaa

SEQ ID NO: 3231189 - RNA, 19 nt, Artificial Sequence
  Description of Artificial Sequence: Synthetic oligonucleotide
uguguguguguuuguuuug

SEQ ID NO: 3231190 - RNA, 19 nt, Artificial Sequence
  Description of Artificial Sequence: Synthetic oligonucleotide
uugcuguggaucaggguga

SEQ ID NO: 3231191 - RNA, 19 nt, Artificial Sequence
  Description of Artificial Sequence: Synthetic oligonucleotide
uuuggucagaggccuggug

SEQ ID NO: 3231192 - RNA, 19 nt, Artificial Sequence
  Description of Artificial Sequence: Synthetic oligonucleotide
gaacuugcuguggaucagg

SEQ ID NO: 3231193 - RNA, 19 nt, Artificial Sequence
  Description of Artificial Sequence: Synthetic oligonucleotide
caccacaagaccuccuggc

SEQ ID NO: 3231194 - RNA, 19 nt, Artificial Sequence
  Description of Artificial Sequence: Synthetic oligonucleotide
uggcugauagucaggggcu

SEQ ID NO: 3231195 - RNA, 19 nt, Artificial Sequence
  Description of Artificial Sequence: Synthetic oligonucleotide
gaccauccaaccaacuggc

SEQ ID NO: 3231196 - RNA, 19 nt, Artificial Sequence
  Description of Artificial Sequence: Synthetic oligonucleotide
cagggugagcccacaaagg

SEQ ID NO: 3231197 - RNA, 19 nt, Artificial Sequence
  Description of Artificial Sequence: Synthetic oligonucleotide
uuggucuggcaucuccuug

SEQ ID NO: 3231198 - RNA, 19 nt, Artificial Sequence
  Description of Artificial Sequence: Synthetic oligonucleotide
uguggcugauagucagggg

SEQ ID NO: 3231199 - RNA, 19 nt, Artificial Sequence
  Description of Artificial Sequence: Synthetic oligonucleotide
guguguguguuuguuuugg

SEQ ID NO: 3231200 - RNA, 19 nt, Artificial Sequence
  Description of Artificial Sequence: Synthetic oligonucleotide
cuuguggcugauagucagg

SEQ ID NO: 3231201 - RNA, 19 nt, Artificial Sequence
  Description of Artificial Sequence: Synthetic oligonucleotide
cuccuuguggcugauaguc

SEQ ID NO: 3231202 - RNA, 19 nt, Artificial Sequence
  Description of Artificial Sequence: Synthetic oligonucleotide
guuuuggucagaggccugg

SEQ ID NO: 3231203 - RNA, 19 nt, Artificial Sequence
  Description of Artificial Sequence: Synthetic oligonucleotide
ucaggggcuguacucccag

SEQ ID NO: 3231204 - RNA, 19 nt, Artificial Sequence
  Description of Artificial Sequence: Synthetic oligonucleotide
uguggaucagggugagccc

SEQ ID NO: 3231205 - RNA, 19 nt, Artificial Sequence
  Description of Artificial Sequence: Synthetic oligonucleotide
cagucaucuuuacagugug

SEQ ID NO: 3231206 - RNA, 19 nt, Artificial Sequence
  Description of Artificial Sequence: Synthetic oligonucleotide
ucccaggccagcuuggaaa

SEQ ID NO: 3231207 - RNA, 19 nt, Artificial Sequence
  Description of Artificial Sequence: Synthetic oligonucleotide
gaugaggaacaccccuccc

SEQ ID NO: 3231208 - RNA, 19 nt, Artificial Sequence
  Description of Artificial Sequence: Synthetic oligonucleotide
agaggccugguguuggucu

SEQ ID NO: 3231209 - RNA, 19 nt, Artificial Sequence
  Description of Artificial Sequence: Synthetic oligonucleotide
uggucuggcaucuccuugu

SEQ ID NO: 3231210 - RNA, 19 nt, Artificial Sequence
  Description of Artificial Sequence: Synthetic oligonucleotide
uugccucccaggugggugg

SEQ ID NO: 3231211 - RNA, 19 nt, Artificial Sequence
  Description of Artificial Sequence: Synthetic oligonucleotide
caacuggcgucacuguugc

SEQ ID NO: 3231212 - RNA, 19 nt, Artificial Sequence
  Description of Artificial Sequence: Synthetic oligonucleotide
uccauauagcaaguagccu

SEQ ID NO: 3231213 - RNA, 19 nt, Artificial Sequence
  Description of Artificial Sequence: Synthetic oligonucleotide
cauauagcaaguagccuaa

SEQ ID NO: 3231214 - RNA, 19 nt, Artificial Sequence
  Description of Artificial Sequence: Synthetic oligonucleotide
uagucaggggcuguacucc

SEQ ID NO: 3231215 - RNA, 19 nt, Artificial Sequence
  Description of Artificial Sequence: Synthetic oligonucleotide
guguuuguuuuggucagag

SEQ ID NO: 3231216 - RNA, 19 nt, Artificial Sequence
  Description of Artificial Sequence: Synthetic oligonucleotide
cuggcacucuccauauagc

SEQ ID NO: 3231217 - RNA, 19 nt, Artificial Sequence
  Description of Artificial Sequence: Synthetic oligonucleotide
aaagcauuaacuuuaaaac

SEQ ID NO: 3231218 - RNA, 19 nt, Artificial Sequence
  Description of Artificial Sequence: Synthetic oligonucleotide
aauuguaucugcuaaaugu

SEQ ID NO: 3231219 - RNA, 19 nt, Artificial Sequence
  Description of Artificial Sequence: Synthetic oligonucleotide
aacaaaauaugacaggcag

SEQ ID NO: 3231220 - RNA, 19 nt, Artificial Sequence
  Description of Artificial Sequence: Synthetic oligonucleotide
aauuaucaaacaauagucc

SEQ ID NO: 3231221 - RNA, 19 nt, Artificial Sequence
  Description of Artificial Sequence: Synthetic oligonucleotide
aaacuuuacauauauacaa

SEQ ID NO: 3231222 - RNA, 19 nt, Artificial Sequence
  Description of Artificial Sequence: Synthetic oligonucleotide
uuacacauaauuaucaaac

SEQ ID NO: 3231223 - RNA, 19 nt, Artificial Sequence
  Description of Artificial Sequence: Synthetic oligonucleotide
uaccguuucaccaauaccc

SEQ ID NO: 3231224 - RNA, 19 nt, Artificial Sequence
  Description of Artificial Sequence: Synthetic oligonucleotide
uuauagaggacacuuaaac

SEQ ID NO: 3231225 - RNA, 19 nt, Artificial Sequence
  Description of Artificial Sequence: Synthetic oligonucleotide
uaagguaugccauaggaug

SEQ ID NO: 3231226 - RNA, 19 nt, Artificial Sequence
  Description of Artificial Sequence: Synthetic oligonucleotide
uaacuuuaaaacaaguuuc

SEQ ID NO: 3231227 - RNA, 19 nt, Artificial Sequence
  Description of Artificial Sequence: Synthetic oligonucleotide
ugggauuuaaaauaugaug

SEQ ID NO: 3231228 - RNA, 19 nt, Artificial Sequence
  Description of Artificial Sequence: Synthetic oligonucleotide
aaucaauaguaacgggagc

SEQ ID NO: 3231229 - RNA, 19 nt, Artificial Sequence
  Description of Artificial Sequence: Synthetic oligonucleotide
aagcauuaacuuuaaaaca

SEQ ID NO: 3231230 - RNA, 19 nt, Artificial Sequence
  Description of Artificial Sequence: Synthetic oligonucleotide
aucaauaguaacgggagcc

SEQ ID NO: 3231231 - RNA, 19 nt, Artificial Sequence
  Description of Artificial Sequence: Synthetic oligonucleotide
auuccuuucguucugaaga

SEQ ID NO: 3231232 - RNA, 19 nt, Artificial Sequence
  Description of Artificial Sequence: Synthetic oligonucleotide
ucaucuaaaguucuucuca

SEQ ID NO: 3231233 - RNA, 19 nt, Artificial Sequence
  Description of Artificial Sequence: Synthetic oligonucleotide
ucaauaaaagugcuuucag

SEQ ID NO: 3231234 - RNA, 19 nt, Artificial Sequence
  Description of Artificial Sequence: Synthetic oligonucleotide
uauagaggacacuuaaacc

SEQ ID NO: 3231235 - RNA, 19 nt, Artificial Sequence
  Description of Artificial Sequence: Synthetic oligonucleotide
aauacuauuucuauaaauu

SEQ ID NO: 3231236 - RNA, 19 nt, Artificial Sequence
  Description of Artificial Sequence: Synthetic oligonucleotide
uuuaccaaaucaauaguaa

SEQ ID NO: 3231237 - RNA, 19 nt, Artificial Sequence
  Description of Artificial Sequence: Synthetic oligonucleotide
uucugaagaaaucacauuu

SEQ ID NO: 3231238 - RNA, 19 nt, Artificial Sequence
  Description of Artificial Sequence: Synthetic oligonucleotide
aaacaauaguccuuaauuu

SEQ ID NO: 3231239 - RNA, 19 nt, Artificial Sequence
  Description of Artificial Sequence: Synthetic oligonucleotide
aaauaugauggacaauaga

SEQ ID NO: 3231240 - RNA, 19 nt, Artificial Sequence
  Description of Artificial Sequence: Synthetic oligonucleotide
uuuugaaagggacuguacu

SEQ ID NO: 3231241 - RNA, 19 nt, Artificial Sequence
  Description of Artificial Sequence: Synthetic oligonucleotide
auuuucugcauugacuacc

SEQ ID NO: 3231242 - RNA, 19 nt, Artificial Sequence
  Description of Artificial Sequence: Synthetic oligonucleotide
uuacugggaguuuugaaag

SEQ ID NO: 3231243 - RNA, 19 nt, Artificial Sequence
  Description of Artificial Sequence: Synthetic oligonucleotide
uggacaauagaaauucaug

SEQ ID NO: 3231244 - RNA, 19 nt, Artificial Sequence
  Description of Artificial Sequence: Synthetic oligonucleotide
acuugcaacagacacagca

SEQ ID NO: 3231245 - RNA, 19 nt, Artificial Sequence
  Description of Artificial Sequence: Synthetic oligonucleotide
uuuucugcauugacuaccg

SEQ ID NO: 3231246 - RNA, 19 nt, Artificial Sequence
  Description of Artificial Sequence: Synthetic oligonucleotide
aagucuguguuguagaaaa

SEQ ID NO: 3231247 - RNA, 19 nt, Artificial Sequence
  Description of Artificial Sequence: Synthetic oligonucleotide
accaaaucaauaguaacgg

SEQ ID NO: 3231248 - RNA, 19 nt, Artificial Sequence
  Description of Artificial Sequence: Synthetic oligonucleotide
aaauaaguaaggcccagaa

SEQ ID NO: 3231249 - RNA, 19 nt, Artificial Sequence
  Description of Artificial Sequence: Synthetic oligonucleotide
uguuuuauguuuucucuug

SEQ ID NO: 3231250 - RNA, 19 nt, Artificial Sequence
  Description of Artificial Sequence: Synthetic oligonucleotide
aauaucuguugacgucucc

SEQ ID NO: 3231251 - RNA, 19 nt, Artificial Sequence
  Description of Artificial Sequence: Synthetic oligonucleotide
uuucagauacaccugugug

SEQ ID NO: 3231252 - RNA, 19 nt, Artificial Sequence
  Description of Artificial Sequence: Synthetic oligonucleotide
caaucagagacuuaaguuc

SEQ ID NO: 3231253 - RNA, 19 nt, Artificial Sequence
  Description of Artificial Sequence: Synthetic oligonucleotide
uauuuuccuucaaucagag

SEQ ID NO: 3231254 - RNA, 19 nt, Artificial Sequence
  Description of Artificial Sequence: Synthetic oligonucleotide
aaugcgaucuuucuccaga

SEQ ID NO: 3231255 - RNA, 19 nt, Artificial Sequence
  Description of Artificial Sequence: Synthetic oligonucleotide
ugaaaagccaugagaaugu

SEQ ID NO: 3231256 - RNA, 19 nt, Artificial Sequence
  Description of Artificial Sequence: Synthetic oligonucleotide
cucauccucaauaaaagug

SEQ ID NO: 3231257 - RNA, 19 nt, Artificial Sequence
  Description of Artificial Sequence: Synthetic oligonucleotide
auguaucuauuuaacaagc

SEQ ID NO: 3231258 - RNA, 19 nt, Artificial Sequence
  Description of Artificial Sequence: Synthetic oligonucleotide
cuuccauaaacaaaauaug

SEQ ID NO: 3231259 - RNA, 19 nt, Artificial Sequence
  Description of Artificial Sequence: Synthetic oligonucleotide
cauauauacaaaauuuaca

SEQ ID NO: 3231260 - RNA, 19 nt, Artificial Sequence
  Description of Artificial Sequence: Synthetic oligonucleotide
auuuacacugcacacacau

SEQ ID NO: 3231261 - RNA, 19 nt, Artificial Sequence
  Description of Artificial Sequence: Synthetic oligonucleotide
ugucgauugguuuugugca

SEQ ID NO: 3231262 - RNA, 19 nt, Artificial Sequence
  Description of Artificial Sequence: Synthetic oligonucleotide
guugauuacauuuugggcu

SEQ ID NO: 3231263 - RNA, 19 nt, Artificial Sequence
  Description of Artificial Sequence: Synthetic oligonucleotide
aaaaccacagaaucagaaa

SEQ ID NO: 3231264 - RNA, 19 nt, Artificial Sequence
  Description of Artificial Sequence: Synthetic oligonucleotide
uguaucugcuaaauguaca

SEQ ID NO: 3231265 - RNA, 19 nt, Artificial Sequence
  Description of Artificial Sequence: Synthetic oligonucleotide
gaggaaauuucccaauagc

SEQ ID NO: 3231266 - RNA, 19 nt, Artificial Sequence
  Description of Artificial Sequence: Synthetic oligonucleotide
gaucuauuuuccuucaauc

SEQ ID NO: 3231267 - RNA, 19 nt, Artificial Sequence
  Description of Artificial Sequence: Synthetic oligonucleotide
aaacuccgaagauucaucu

SEQ ID NO: 3231268 - RNA, 19 nt, Artificial Sequence
  Description of Artificial Sequence: Synthetic oligonucleotide
acaguauuaauauaauguu

SEQ ID NO: 3231269 - RNA, 19 nt, Artificial Sequence
  Description of Artificial Sequence: Synthetic oligonucleotide
uuaccaaaucaauaguaac

SEQ ID NO: 3231270 - RNA, 19 nt, Artificial Sequence
  Description of Artificial Sequence: Synthetic oligonucleotide
ucaaucagagacuuaaguu

SEQ ID NO: 3231271 - RNA, 19 nt, Artificial Sequence
  Description of Artificial Sequence: Synthetic oligonucleotide
aguuacuaaugcgucaucg

SEQ ID NO: 3231272 - RNA, 19 nt, Artificial Sequence
  Description of Artificial Sequence: Synthetic oligonucleotide
uacuaaugcgucaucguca

SEQ ID NO: 3231273 - RNA, 19 nt, Artificial Sequence
  Description of Artificial Sequence: Synthetic oligonucleotide
aaaauaugauggacaauag

SEQ ID NO: 3231274 - RNA, 19 nt, Artificial Sequence
  Description of Artificial Sequence: Synthetic oligonucleotide
aucaucuaaaguucuucuc

SEQ ID NO: 3231275 - RNA, 19 nt, Artificial Sequence
  Description of Artificial Sequence: Synthetic oligonucleotide
uuauugcauauauaacuca

SEQ ID NO: 3231276 - RNA, 19 nt, Artificial Sequence
  Description of Artificial Sequence: Synthetic oligonucleotide
uacacauaauuaucaaaca

SEQ ID NO: 3231277 - RNA, 19 nt, Artificial Sequence
  Description of Artificial Sequence: Synthetic oligonucleotide
agcaucguccuucuccugc

SEQ ID NO: 3231278 - RNA, 19 nt, Artificial Sequence
  Description of Artificial Sequence: Synthetic oligonucleotide
aguucuuucuccuuucaga

SEQ ID NO: 3231279 - RNA, 19 nt, Artificial Sequence
  Description of Artificial Sequence: Synthetic oligonucleotide
aguauuaauauaauguuuu

SEQ ID NO: 3231280 - RNA, 19 nt, Artificial Sequence
  Description of Artificial Sequence: Synthetic oligonucleotide
ugauccgccaucuuaccag

SEQ ID NO: 3231281 - RNA, 19 nt, Artificial Sequence
  Description of Artificial Sequence: Synthetic oligonucleotide
aaaacuccgaagauucauc

SEQ ID NO: 3231282 - RNA, 19 nt, Artificial Sequence
  Description of Artificial Sequence: Synthetic oligonucleotide
ugucuuuguguacuuuucc

SEQ ID NO: 3231283 - RNA, 19 nt, Artificial Sequence
  Description of Artificial Sequence: Synthetic oligonucleotide
aaugugguauaaacauuac

SEQ ID NO: 3231284 - RNA, 19 nt, Artificial Sequence
  Description of Artificial Sequence: Synthetic oligonucleotide
aguaacgggagccaucuca

SEQ ID NO: 3231285 - RNA, 19 nt, Artificial Sequence
  Description of Artificial Sequence: Synthetic oligonucleotide
uuuccuucaaucagagacu

SEQ ID NO: 3231286 - RNA, 19 nt, Artificial Sequence
  Description of Artificial Sequence: Synthetic oligonucleotide
uuuaaggacacaguauuaa

SEQ ID NO: 3231287 - RNA, 19 nt, Artificial Sequence
  Description of Artificial Sequence: Synthetic oligonucleotide
cuugacagaagaccaaaac

SEQ ID NO: 3231288 - RNA, 19 nt, Artificial Sequence
  Description of Artificial Sequence: Synthetic oligonucleotide
acagucuuggcagacaaag

SEQ ID NO: 3231289 - RNA, 19 nt, Artificial Sequence
  Description of Artificial Sequence: Synthetic oligonucleotide
ucacaaaccacugcuuggg

SEQ ID NO: 3231290 - RNA, 19 nt, Artificial Sequence
  Description of Artificial Sequence: Synthetic oligonucleotide
uuugaaagggacuguacua

SEQ ID NO: 3231291 - RNA, 19 nt, Artificial Sequence
  Description of Artificial Sequence: Synthetic oligonucleotide
auuacagaagaccaccaau

SEQ ID NO: 3231292 - RNA, 19 nt, Artificial Sequence
  Description of Artificial Sequence: Synthetic oligonucleotide
gacaaagaccaauguacgc

SEQ ID NO: 3231293 - RNA, 19 nt, Artificial Sequence
  Description of Artificial Sequence: Synthetic oligonucleotide
uagccauuuauuaauuuua

SEQ ID NO: 3231294 - RNA, 19 nt, Artificial Sequence
  Description of Artificial Sequence: Synthetic oligonucleotide
ucaaacaauaguccuuaau

SEQ ID NO: 3231295 - RNA, 19 nt, Artificial Sequence
  Description of Artificial Sequence: Synthetic oligonucleotide
uucuuucacauugugguca

SEQ ID NO: 3231296 - RNA, 19 nt, Artificial Sequence
  Description of Artificial Sequence: Synthetic oligonucleotide
ucaagauuuggugccauca

SEQ ID NO: 3231297 - RNA, 19 nt, Artificial Sequence
  Description of Artificial Sequence: Synthetic oligonucleotide
uuaaguucuuucacauugu

SEQ ID NO: 3231298 - RNA, 19 nt, Artificial Sequence
  Description of Artificial Sequence: Synthetic oligonucleotide
ucugaagaaaucacauuua

SEQ ID NO: 3231299 - RNA, 19 nt, Artificial Sequence
  Description of Artificial Sequence: Synthetic oligonucleotide
accacuggaggaaauuucc

SEQ ID NO: 3231300 - RNA, 19 nt, Artificial Sequence
  Description of Artificial Sequence: Synthetic oligonucleotide
cuugcaagaagcuuuacua

SEQ ID NO: 3231301 - RNA, 19 nt, Artificial Sequence
  Description of Artificial Sequence: Synthetic oligonucleotide
auagccauuuauuaauuuu

SEQ ID NO: 3231302 - RNA, 19 nt, Artificial Sequence
  Description of Artificial Sequence: Synthetic oligonucleotide
acaaagaccaauguacgca

SEQ ID NO: 3231303 - RNA, 19 nt, Artificial Sequence
  Description of Artificial Sequence: Synthetic oligonucleotide
agcauuaacuuuaaaacaa

SEQ ID NO: 3231304 - RNA, 19 nt, Artificial Sequence
  Description of Artificial Sequence: Synthetic oligonucleotide
cuggauucuuucacaaugc

SEQ ID NO: 3231305 - RNA, 19 nt, Artificial Sequence
  Description of Artificial Sequence: Synthetic oligonucleotide
ugcauugcugauucaaggu

SEQ ID NO: 3231306 - RNA, 19 nt, Artificial Sequence
  Description of Artificial Sequence: Synthetic oligonucleotide
ugggaguuuugaaagggac

SEQ ID NO: 3231307 - RNA, 19 nt, Artificial Sequence
  Description of Artificial Sequence: Synthetic oligonucleotide
gugcaauucuuucauggag

SEQ ID NO: 3231308 - RNA, 19 nt, Artificial Sequence
  Description of Artificial Sequence: Synthetic oligonucleotide
gaggcuuggcaucugauga

SEQ ID NO: 3231309 - RNA, 19 nt, Artificial Sequence
  Description of Artificial Sequence: Synthetic oligonucleotide
gacaauagaaauucaugua

SEQ ID NO: 3231310 - RNA, 19 nt, Artificial Sequence
  Description of Artificial Sequence: Synthetic oligonucleotide
guuuuauguuuucucuugc

SEQ ID NO: 3231311 - RNA, 19 nt, Artificial Sequence
  Description of Artificial Sequence: Synthetic oligonucleotide
agaaaagggaucccacaug

SEQ ID NO: 3231312 - RNA, 19 nt, Artificial Sequence
  Description of Artificial Sequence: Synthetic oligonucleotide
aucuauuuaacaagccauc

SEQ ID NO: 3231313 - RNA, 19 nt, Artificial Sequence
  Description of Artificial Sequence: Synthetic oligonucleotide
aaacaaaauaugacaggca

SEQ ID NO: 3231314 - RNA, 19 nt, Artificial Sequence
  Description of Artificial Sequence: Synthetic oligonucleotide
auaacucacauauguggga

SEQ ID NO: 3231315 - RNA, 19 nt, Artificial Sequence
  Description of Artificial Sequence: Synthetic oligonucleotide
uuaccaguuugcucucugg

SEQ ID NO: 3231316 - RNA, 19 nt, Artificial Sequence
  Description of Artificial Sequence: Synthetic oligonucleotide
acuugcaagaagcuuuacu

SEQ ID NO: 3231317 - RNA, 19 nt, Artificial Sequence
  Description of Artificial Sequence: Synthetic oligonucleotide
ugugucuggaucuugaucg

SEQ ID NO: 3231318 - RNA, 19 nt, Artificial Sequence
  Description of Artificial Sequence: Synthetic oligonucleotide
aauccuucguuuucuaucg

SEQ ID NO: 3231319 - RNA, 19 nt, Artificial Sequence
  Description of Artificial Sequence: Synthetic oligonucleotide
uuucacgagaccuagaucu

SEQ ID NO: 3231320 - RNA, 19 nt, Artificial Sequence
  Description of Artificial Sequence: Synthetic oligonucleotide
cuagcuaaaagcuuccugg

SEQ ID NO: 3231321 - RNA, 19 nt, Artificial Sequence
  Description of Artificial Sequence: Synthetic oligonucleotide
gagaccuagaucuugagug

SEQ ID NO: 3231322 - RNA, 19 nt, Artificial Sequence
  Description of Artificial Sequence: Synthetic oligonucleotide
uucugcuaaaucuucuugg

SEQ ID NO: 3231323 - RNA, 19 nt, Artificial Sequence
  Description of Artificial Sequence: Synthetic oligonucleotide
uuaggcuucugcuaaaucu

SEQ ID NO: 3231324 - RNA, 19 nt, Artificial Sequence
  Description of Artificial Sequence: Synthetic oligonucleotide
uugguuuucaauucucucc

SEQ ID NO: 3231325 - RNA, 19 nt, Artificial Sequence
  Description of Artificial Sequence: Synthetic oligonucleotide
aacguguucuaauccuucg

SEQ ID NO: 3231326 - RNA, 19 nt, Artificial Sequence
  Description of Artificial Sequence: Synthetic oligonucleotide
uggaucuugaucgggaacg

SEQ ID NO: 3231327 - RNA, 19 nt, Artificial Sequence
  Description of Artificial Sequence: Synthetic oligonucleotide
aucuugagugacuucugcc

SEQ ID NO: 3231328 - RNA, 19 nt, Artificial Sequence
  Description of Artificial Sequence: Synthetic oligonucleotide
augacuuccuuucuuugcg

SEQ ID NO: 3231329 - RNA, 19 nt, Artificial Sequence
  Description of Artificial Sequence: Synthetic oligonucleotide
aacgagacuucuuccguuc

SEQ ID NO: 3231330 - RNA, 19 nt, Artificial Sequence
  Description of Artificial Sequence: Synthetic oligonucleotide
uucgauggcgccuuucacg

SEQ ID NO: 3231331 - RNA, 19 nt, Artificial Sequence
  Description of Artificial Sequence: Synthetic oligonucleotide
aauucucuccugcuucuag

SEQ ID NO: 3231332 - RNA, 19 nt, Artificial Sequence
  Description of Artificial Sequence: Synthetic oligonucleotide
uggaacgagacuucuuccg

SEQ ID NO: 3231333 - RNA, 19 nt, Artificial Sequence
  Description of Artificial Sequence: Synthetic oligonucleotide
auugcugugcuucuuccuc

SEQ ID NO: 3231334 - RNA, 19 nt, Artificial Sequence
  Description of Artificial Sequence: Synthetic oligonucleotide
ugucucugcuucuggaucg

SEQ ID NO: 3231335 - RNA, 19 nt, Artificial Sequence
  Description of Artificial Sequence: Synthetic oligonucleotide
cuuucuuugcguuuguguc

SEQ ID NO: 3231336 - RNA, 19 nt, Artificial Sequence
  Description of Artificial Sequence: Synthetic oligonucleotide
cuagaucuugacuucuucc

SEQ ID NO: 3231337 - RNA, 19 nt, Artificial Sequence
  Description of Artificial Sequence: Synthetic oligonucleotide
agcuaaaagcuuccugggc

SEQ ID NO: 3231338 - RNA, 19 nt, Artificial Sequence
  Description of Artificial Sequence: Synthetic oligonucleotide
ugguuuucaauucucuccu

SEQ ID NO: 3231339 - RNA, 19 nt, Artificial Sequence
  Description of Artificial Sequence: Synthetic oligonucleotide
ugcuaaaucuucuugguuu

SEQ ID NO: 3231340 - RNA, 19 nt, Artificial Sequence
  Description of Artificial Sequence: Synthetic oligonucleotide
gaugacuuccuuucuuugc

SEQ ID NO: 3231341 - RNA, 19 nt, Artificial Sequence
  Description of Artificial Sequence: Synthetic oligonucleotide
ucuugagugacuucugccu

SEQ ID NO: 3231342 - RNA, 19 nt, Artificial Sequence
  Description of Artificial Sequence: Synthetic oligonucleotide
gcuaaaagcuuccugggcg

SEQ ID NO: 3231343 - RNA, 19 nt, Artificial Sequence
  Description of Artificial Sequence: Synthetic oligonucleotide
ucugcuucuggaucgagac

SEQ ID NO: 3231344 - RNA, 19 nt, Artificial Sequence
  Description of Artificial Sequence: Synthetic oligonucleotide
ccugcuucuacuucgaugg

SEQ ID NO: 3231345 - RNA, 19 nt, Artificial Sequence
  Description of Artificial Sequence: Synthetic oligonucleotide
uucaauucucuccugcuuc

SEQ ID NO: 3231346 - RNA, 19 nt, Artificial Sequence
  Description of Artificial Sequence: Synthetic oligonucleotide
uaauccuucguuuucuauc

SEQ ID NO: 3231347 - RNA, 19 nt, Artificial Sequence
  Description of Artificial Sequence: Synthetic oligonucleotide
uagcuaaaagcuuccuggg

SEQ ID NO: 3231348 - RNA, 19 nt, Artificial Sequence
  Description of Artificial Sequence: Synthetic oligonucleotide
gaucccgacuccuggaacg

SEQ ID NO: 3231349 - RNA, 19 nt, Artificial Sequence
  Description of Artificial Sequence: Synthetic oligonucleotide
uaucgcggcuucuagaucu

SEQ ID NO: 3231350 - RNA, 19 nt, Artificial Sequence
  Description of Artificial Sequence: Synthetic oligonucleotide
uuucgaucccgacuccugg

SEQ ID NO: 3231351 - RNA, 19 nt, Artificial Sequence
  Description of Artificial Sequence: Synthetic oligonucleotide
uagaucuugacuucuuccu

SEQ ID NO: 3231352 - RNA, 19 nt, Artificial Sequence
  Description of Artificial Sequence: Synthetic oligonucleotide
uagaucuugagugacuucu

SEQ ID NO: 3231353 - RNA, 19 nt, Artificial Sequence
  Description of Artificial Sequence: Synthetic oligonucleotide
uccuucguuuucuaucgcg

SEQ ID NO: 3231354 - RNA, 19 nt, Artificial Sequence
  Description of Artificial Sequence: Synthetic oligonucleotide
aaaagcuuccugggcgucc

SEQ ID NO: 3231355 - RNA, 19 nt, Artificial Sequence
  Description of Artificial Sequence: Synthetic oligonucleotide
ugcuucuuccucugaaggg

SEQ ID NO: 3231356 - RNA, 19 nt, Artificial Sequence
  Description of Artificial Sequence: Synthetic oligonucleotide
ucuaguucuaugccugugu

SEQ ID NO: 3231357 - RNA, 19 nt, Artificial Sequence
  Description of Artificial Sequence: Synthetic oligonucleotide
uuuucaauucucuccugcu

SEQ ID NO: 3231358 - RNA, 19 nt, Artificial Sequence
  Description of Artificial Sequence: Synthetic oligonucleotide
guuuucaauucucuccugc

SEQ ID NO: 3231359 - RNA, 19 nt, Artificial Sequence
  Description of Artificial Sequence: Synthetic oligonucleotide
ucuucuugguuuucaauuc

SEQ ID NO: 3231360 - RNA, 19 nt, Artificial Sequence
  Description of Artificial Sequence: Synthetic oligonucleotide
ucugcuaaaucuucuuggu

SEQ ID NO: 3231361 - RNA, 19 nt, Artificial Sequence
  Description of Artificial Sequence: Synthetic oligonucleotide
aguucuaugccugugucug

SEQ ID NO: 3231362 - RNA, 19 nt, Artificial Sequence
  Description of Artificial Sequence: Synthetic oligonucleotide
uaugccugugucuggaucu

SEQ ID NO: 3231363 - RNA, 19 nt, Artificial Sequence
  Description of Artificial Sequence: Synthetic oligonucleotide
ucuugguuuucaauucucu

SEQ ID NO: 3231364 - RNA, 19 nt, Artificial Sequence
  Description of Artificial Sequence: Synthetic oligonucleotide
uugagugacuucugccucg

SEQ ID NO: 3231365 - RNA, 19 nt, Artificial Sequence
  Description of Artificial Sequence: Synthetic oligonucleotide
ugugcuucuuccucugaag

SEQ ID NO: 3231366 - RNA, 19 nt, Artificial Sequence
  Description of Artificial Sequence: Synthetic oligonucleotide
aucuucuugguuuucaauu

SEQ ID NO: 3231367 - RNA, 19 nt, Artificial Sequence
  Description of Artificial Sequence: Synthetic oligonucleotide
guucccugcuucuacuucg

SEQ ID NO: 3231368 - RNA, 19 nt, Artificial Sequence
  Description of Artificial Sequence: Synthetic oligonucleotide
uuucuuugcguuugugucu

SEQ ID NO: 3231369 - RNA, 19 nt, Artificial Sequence
  Description of Artificial Sequence: Synthetic oligonucleotide
cuugguguccggcuuaggc

SEQ ID NO: 3231370 - RNA, 19 nt, Artificial Sequence
  Description of Artificial Sequence: Synthetic oligonucleotide
gaucuugagugacuucugc

SEQ ID NO: 3231371 - RNA, 19 nt, Artificial Sequence
  Description of Artificial Sequence: Synthetic oligonucleotide
uuucuaucgcggcuucuag

SEQ ID NO: 3231372 - RNA, 19 nt, Artificial Sequence
  Description of Artificial Sequence: Synthetic oligonucleotide
aaucuucuugguuuucaau

SEQ ID NO: 3231373 - RNA, 19 nt, Artificial Sequence
  Description of Artificial Sequence: Synthetic oligonucleotide
aaaucuucuugguuuucaa

SEQ ID NO: 3231374 - RNA, 19 nt, Artificial Sequence
  Description of Artificial Sequence: Synthetic oligonucleotide
ucuaucgcggcuucuagau

SEQ ID NO: 3231375 - RNA, 19 nt, Artificial Sequence
  Description of Artificial Sequence: Synthetic oligonucleotide
agugacuucugccucguga

SEQ ID NO: 3231376 - RNA, 19 nt, Artificial Sequence
  Description of Artificial Sequence: Synthetic oligonucleotide
uuccucugaagggaggugg

SEQ ID NO: 3231377 - RNA, 19 nt, Artificial Sequence
  Description of Artificial Sequence: Synthetic oligonucleotide
uaaaucuucuugguuuuca

SEQ ID NO: 3231378 - RNA, 19 nt, Artificial Sequence
  Description of Artificial Sequence: Synthetic oligonucleotide
agggagguggacuuggugu

SEQ ID NO: 3231379 - RNA, 19 nt, Artificial Sequence
  Description of Artificial Sequence: Synthetic oligonucleotide
uguucuaauccuucguuuu

SEQ ID NO: 3231380 - RNA, 19 nt, Artificial Sequence
  Description of Artificial Sequence: Synthetic oligonucleotide
cucgugaugacuuccuuuc

SEQ ID NO: 3231381 - RNA, 19 nt, Artificial Sequence
  Description of Artificial Sequence: Synthetic oligonucleotide
cuugacuucuuccugucuc

SEQ ID NO: 3231382 - RNA, 19 nt, Artificial Sequence
  Description of Artificial Sequence: Synthetic oligonucleotide
ucuagaucuugacuucuuc

SEQ ID NO: 3231383 - RNA, 19 nt, Artificial Sequence
  Description of Artificial Sequence: Synthetic oligonucleotide
uuuucgaucccgacuccug

SEQ ID NO: 3231384 - RNA, 19 nt, Artificial Sequence
  Description of Artificial Sequence: Synthetic oligonucleotide
ugcuucuacuucgauggcg

SEQ ID NO: 3231385 - RNA, 19 nt, Artificial Sequence
  Description of Artificial Sequence: Synthetic oligonucleotide
gugcuucuuccucugaagg

SEQ ID NO: 3231386 - RNA, 19 nt, Artificial Sequence
  Description of Artificial Sequence: Synthetic oligonucleotide
ugaagggagguggacuugg

SEQ ID NO: 3231387 - RNA, 19 nt, Artificial Sequence
  Description of Artificial Sequence: Synthetic oligonucleotide
agaucuugacuucuuccug

SEQ ID NO: 3231388 - RNA, 19 nt, Artificial Sequence
  Description of Artificial Sequence: Synthetic oligonucleotide
uucguuuucuaucgcggcu

SEQ ID NO: 3231389 - RNA, 19 nt, Artificial Sequence
  Description of Artificial Sequence: Synthetic oligonucleotide
cuugguuuucaauucucuc

SEQ ID NO: 3231390 - RNA, 19 nt, Artificial Sequence
  Description of Artificial Sequence: Synthetic oligonucleotide
ucgauggcgccuuucacga

SEQ ID NO: 3231391 - RNA, 19 nt, Artificial Sequence
  Description of Artificial Sequence: Synthetic oligonucleotide
ugcuucuaguucuaugccu

SEQ ID NO: 3231392 - RNA, 19 nt, Artificial Sequence
  Description of Artificial Sequence: Synthetic oligonucleotide
ugaugacuuccuuucuuug

SEQ ID NO: 3231393 - RNA, 19 nt, Artificial Sequence
  Description of Artificial Sequence: Synthetic oligonucleotide
acuucuuccugucucugcu

SEQ ID NO: 3231394 - RNA, 19 nt, Artificial Sequence
  Description of Artificial Sequence: Synthetic oligonucleotide
ccugcuucuaguucuaugc

SEQ ID NO: 3231395 - RNA, 19 nt, Artificial Sequence
  Description of Artificial Sequence: Synthetic oligonucleotide
cuucguuuucuaucgcggc

SEQ ID NO: 3231396 - RNA, 19 nt, Artificial Sequence
  Description of Artificial Sequence: Synthetic oligonucleotide
uugaucgggaacguguucu

SEQ ID NO: 3231397 - RNA, 19 nt, Artificial Sequence
  Description of Artificial Sequence: Synthetic oligonucleotide
acgagacuucuuccguucc

SEQ ID NO: 3231398 - RNA, 19 nt, Artificial Sequence
  Description of Artificial Sequence: Synthetic oligonucleotide
cuucugcuaaaucuucuug

SEQ ID NO: 3231399 - RNA, 19 nt, Artificial Sequence
  Description of Artificial Sequence: Synthetic oligonucleotide
ucaauucucuccugcuucu

SEQ ID NO: 3231400 - RNA, 19 nt, Artificial Sequence
  Description of Artificial Sequence: Synthetic oligonucleotide
aucuugacuucuuccuguc

SEQ ID NO: 3231401 - RNA, 19 nt, Artificial Sequence
  Description of Artificial Sequence: Synthetic oligonucleotide
uuucaauucucuccugcuu

SEQ ID NO: 3231402 - RNA, 19 nt, Artificial Sequence
  Description of Artificial Sequence: Synthetic oligonucleotide
uugguguccggcuuaggcu

SEQ ID NO: 3231403 - RNA, 19 nt, Artificial Sequence
  Description of Artificial Sequence: Synthetic oligonucleotide
uucuugguuuucaauucuc

SEQ ID NO: 3231404 - RNA, 19 nt, Artificial Sequence
  Description of Artificial Sequence: Synthetic oligonucleotide
aagggagguggacuuggug

SEQ ID NO: 3231405 - RNA, 19 nt, Artificial Sequence
  Description of Artificial Sequence: Synthetic oligonucleotide
uaggcuucugcuaaaucuu

SEQ ID NO: 3231406 - RNA, 19 nt, Artificial Sequence
  Description of Artificial Sequence: Synthetic oligonucleotide
uucuuccucugaagggagg

SEQ ID NO: 3231407 - RNA, 19 nt, Artificial Sequence
  Description of Artificial Sequence: Synthetic oligonucleotide
acuucugccucgugaugac

SEQ ID NO: 3231408 - RNA, 19 nt, Artificial Sequence
  Description of Artificial Sequence: Synthetic oligonucleotide
acuucuuccguucccugcu

SEQ ID NO: 3231409 - RNA, 19 nt, Artificial Sequence
  Description of Artificial Sequence: Synthetic oligonucleotide
gacuucuuccguucccugc

SEQ ID NO: 3231410 - RNA, 19 nt, Artificial Sequence
  Description of Artificial Sequence: Synthetic oligonucleotide
uucuaauccuucguuuucu

SEQ ID NO: 3231411 - RNA, 19 nt, Artificial Sequence
  Description of Artificial Sequence: Synthetic oligonucleotide
uugacuucuuccugucucu

SEQ ID NO: 3231412 - RNA, 19 nt, Artificial Sequence
  Description of Artificial Sequence: Synthetic oligonucleotide
ucugaagggagguggacuu

SEQ ID NO: 3231413 - RNA, 19 nt, Artificial Sequence
  Description of Artificial Sequence: Synthetic oligonucleotide
agaccuagaucuugaguga

SEQ ID NO: 3231414 - RNA, 19 nt, Artificial Sequence
  Description of Artificial Sequence: Synthetic oligonucleotide
ugcuucuggaucgagacuu

SEQ ID NO: 3231415 - RNA, 19 nt, Artificial Sequence
  Description of Artificial Sequence: Synthetic oligonucleotide
cuggaacgagacuucuucc

SEQ ID NO: 3231416 - RNA, 19 nt, Artificial Sequence
  Description of Artificial Sequence: Synthetic oligonucleotide
acuucgauggcgccuuuca

SEQ ID NO: 3231417 - RNA, 19 nt, Artificial Sequence
  Description of Artificial Sequence: Synthetic oligonucleotide
aauaccagccccuuuagcc

SEQ ID NO: 3231418 - RNA, 19 nt, Artificial Sequence
  Description of Artificial Sequence: Synthetic oligonucleotide
ucugguugauccuugcgcg

SEQ ID NO: 3231419 - RNA, 19 nt, Artificial Sequence
  Description of Artificial Sequence: Synthetic oligonucleotide
gagguaacuauccaagggc

SEQ ID NO: 3231420 - RNA, 19 nt, Artificial Sequence
  Description of Artificial Sequence: Synthetic oligonucleotide
uccagcuucgaguagcggg

SEQ ID NO: 3231421 - RNA, 19 nt, Artificial Sequence
  Description of Artificial Sequence: Synthetic oligonucleotide
accacugacaguccucugc

SEQ ID NO: 3231422 - RNA, 19 nt, Artificial Sequence
  Description of Artificial Sequence: Synthetic oligonucleotide
uuuagguguacuugcgcag

SEQ ID NO: 3231423 - RNA, 19 nt, Artificial Sequence
  Description of Artificial Sequence: Synthetic oligonucleotide
gucauuuccaggauguccg

SEQ ID NO: 3231424 - RNA, 19 nt, Artificial Sequence
  Description of Artificial Sequence: Synthetic oligonucleotide
aagcgcgccagacaggcuc

SEQ ID NO: 3231425 - RNA, 19 nt, Artificial Sequence
  Description of Artificial Sequence: Synthetic oligonucleotide
uuuagccuggcucaggcuc

SEQ ID NO: 3231426 - RNA, 19 nt, Artificial Sequence
  Description of Artificial Sequence: Synthetic oligonucleotide
cucgagguaacuauccaag

SEQ ID NO: 3231427 - RNA, 19 nt, Artificial Sequence
  Description of Artificial Sequence: Synthetic oligonucleotide
aguccucugccgcaggugc

SEQ ID NO: 3231428 - RNA, 19 nt, Artificial Sequence
  Description of Artificial Sequence: Synthetic oligonucleotide
uccaggacgcugcaggccg

SEQ ID NO: 3231429 - RNA, 19 nt, Artificial Sequence
  Description of Artificial Sequence: Synthetic oligonucleotide
agcaagggcaauaccagcc

SEQ ID NO: 3231430 - RNA, 19 nt, Artificial Sequence
  Description of Artificial Sequence: Synthetic oligonucleotide
uauccaagggcuccggcgc

SEQ ID NO: 3231431 - RNA, 19 nt, Artificial Sequence
  Description of Artificial Sequence: Synthetic oligonucleotide
aaggugggacaccacugac

SEQ ID NO: 3231432 - RNA, 19 nt, Artificial Sequence
  Description of Artificial Sequence: Synthetic oligonucleotide
acuugcgcagcuccgcugc

SEQ ID NO: 3231433 - RNA, 19 nt, Artificial Sequence
  Description of Artificial Sequence: Synthetic oligonucleotide
ucgagguaacuauccaagg

SEQ ID NO: 3231434 - RNA, 19 nt, Artificial Sequence
  Description of Artificial Sequence: Synthetic oligonucleotide
cuauccaagggcuccggcg

SEQ ID NO: 3231435 - RNA, 19 nt, Artificial Sequence
  Description of Artificial Sequence: Synthetic oligonucleotide
ucuguaacccucgagguaa

SEQ ID NO: 3231436 - RNA, 19 nt, Artificial Sequence
  Description of Artificial Sequence: Synthetic oligonucleotide
ugaaggugggacaccacug

SEQ ID NO: 3231437 - RNA, 19 nt, Artificial Sequence
  Description of Artificial Sequence: Synthetic oligonucleotide
ugggacaccacugacaguc

SEQ ID NO: 3231438 - RNA, 19 nt, Artificial Sequence
  Description of Artificial Sequence: Synthetic oligonucleotide
guguaggugucugugaagg

SEQ ID NO: 3231439 - RNA, 19 nt, Artificial Sequence
  Description of Artificial Sequence: Synthetic oligonucleotide
aguagcgggaagucuccgc

SEQ ID NO: 3231440 - RNA, 19 nt, Artificial Sequence
  Description of Artificial Sequence: Synthetic oligonucleotide
cucugguugauccuugcgc

SEQ ID NO: 3231441 - RNA, 19 nt, Artificial Sequence
  Description of Artificial Sequence: Synthetic oligonucleotide
ggcucuguaacccucgagg

SEQ ID NO: 3231442 - RNA, 19 nt, Artificial Sequence
  Description of Artificial Sequence: Synthetic oligonucleotide
guaacuauccaagggcucc

SEQ ID NO: 3231443 - RNA, 19 nt, Artificial Sequence
  Description of Artificial Sequence: Synthetic oligonucleotide
uccagcaguggcuuuaggu

SEQ ID NO: 3231444 - RNA, 19 nt, Artificial Sequence
  Description of Artificial Sequence: Synthetic oligonucleotide
uggcuuuagguguacuugc

SEQ ID NO: 3231445 - RNA, 19 nt, Artificial Sequence
  Description of Artificial Sequence: Synthetic oligonucleotide
guagcgggaagucuccgcg

SEQ ID NO: 3231446 - RNA, 19 nt, Artificial Sequence
  Description of Artificial Sequence: Synthetic oligonucleotide
agccccuuuagccuggcuc

SEQ ID NO: 3231447 - RNA, 19 nt, Artificial Sequence
  Description of Artificial Sequence: Synthetic oligonucleotide
agggagcuggagcaggggc

SEQ ID NO: 3231448 - RNA, 19 nt, Artificial Sequence
  Description of Artificial Sequence: Synthetic oligonucleotide
uccugcaggaagcgcacgg

SEQ ID NO: 3231449 - RNA, 19 nt, Artificial Sequence
  Description of Artificial Sequence: Synthetic oligonucleotide
gaagcgcacggucauuucc

SEQ ID NO: 3231450 - RNA, 19 nt, Artificial Sequence
  Description of Artificial Sequence: Synthetic oligonucleotide
ucgaguagcgggaagucuc

SEQ ID NO: 3231451 - RNA, 19 nt, Artificial Sequence
  Description of Artificial Sequence: Synthetic oligonucleotide
acuauccaagggcuccggc

SEQ ID NO: 3231452 - RNA, 19 nt, Artificial Sequence
  Description of Artificial Sequence: Synthetic oligonucleotide
cuuuagguguacuugcgca

SEQ ID NO: 3231453 - RNA, 19 nt, Artificial Sequence
  Description of Artificial Sequence: Synthetic oligonucleotide
agcgggaagucuccgcgcc

SEQ ID NO: 3231454 - RNA, 19 nt, Artificial Sequence
  Description of Artificial Sequence: Synthetic oligonucleotide
ggugggacaccacugacag

SEQ ID NO: 3231455 - RNA, 19 nt, Artificial Sequence
  Description of Artificial Sequence: Synthetic oligonucleotide
ucuccagcuucgaguagcg

SEQ ID NO: 3231456 - RNA, 19 nt, Artificial Sequence
  Description of Artificial Sequence: Synthetic oligonucleotide
uaccagggccgccagaggc

SEQ ID NO: 3231457 - RNA, 19 nt, Artificial Sequence
  Description of Artificial Sequence: Synthetic oligonucleotide
auuuccaggauguccgccu

SEQ ID NO: 3231458 - RNA, 19 nt, Artificial Sequence
  Description of Artificial Sequence: Synthetic oligonucleotide
uccgccuucuccagcuucg

SEQ ID NO: 3231459 - RNA, 19 nt, Artificial Sequence
  Description of Artificial Sequence: Synthetic oligonucleotide
ugcaggaagcgcacgguca

SEQ ID NO: 3231460 - RNA, 19 nt, Artificial Sequence
  Description of Artificial Sequence: Synthetic oligonucleotide
uaacccucgagguaacuau

SEQ ID NO: 3231461 - RNA, 19 nt, Artificial Sequence
  Description of Artificial Sequence: Synthetic oligonucleotide
auaccagccccuuuagccu

SEQ ID NO: 3231462 - RNA, 19 nt, Artificial Sequence
  Description of Artificial Sequence: Synthetic oligonucleotide
uucuccagcuucgaguagc

SEQ ID NO: 3231463 - RNA, 19 nt, Artificial Sequence
  Description of Artificial Sequence: Synthetic oligonucleotide
aggauguccgccuucucca

SEQ ID NO: 3231464 - RNA, 19 nt, Artificial Sequence
  Description of Artificial Sequence: Synthetic oligonucleotide
caggauguccgccuucucc

SEQ ID NO: 3231465 - RNA, 19 nt, Artificial Sequence
  Description of Artificial Sequence: Synthetic oligonucleotide
caggccggcagcaugcgcg

SEQ ID NO: 3231466 - RNA, 19 nt, Artificial Sequence
  Description of Artificial Sequence: Synthetic oligonucleotide
uccgcgcccagcaagggca

SEQ ID NO: 3231467 - RNA, 19 nt, Artificial Sequence
  Description of Artificial Sequence: Synthetic oligonucleotide
uaacuauccaagggcuccg

SEQ ID NO: 3231468 - RNA, 19 nt, Artificial Sequence
  Description of Artificial Sequence: Synthetic oligonucleotide
agcaggcgcacgcucacgg

SEQ ID NO: 3231469 - RNA, 19 nt, Artificial Sequence
  Description of Artificial Sequence: Synthetic oligonucleotide
guaggugucugugaaggug

SEQ ID NO: 3231470 - RNA, 19 nt, Artificial Sequence
  Description of Artificial Sequence: Synthetic oligonucleotide
uggaggaggcaccugcgga

SEQ ID NO: 3231471 - RNA, 19 nt, Artificial Sequence
  Description of Artificial Sequence: Synthetic oligonucleotide
ugucugugaaggugggaca

SEQ ID NO: 3231472 - RNA, 19 nt, Artificial Sequence
  Description of Artificial Sequence: Synthetic oligonucleotide
ugcuccagcaggcgcacgc

SEQ ID NO: 3231473 - RNA, 19 nt, Artificial Sequence
  Description of Artificial Sequence: Synthetic oligonucleotide
gaaggugggacaccacuga

SEQ ID NO: 3231474 - RNA, 19 nt, Artificial Sequence
  Description of Artificial Sequence: Synthetic oligonucleotide
cagacaggcucuguaaccc

SEQ ID NO: 3231475 - RNA, 19 nt, Artificial Sequence
  Description of Artificial Sequence: Synthetic oligonucleotide
gaggcaccugcggagaggg

SEQ ID NO: 3231476 - RNA, 19 nt, Artificial Sequence
  Description of Artificial Sequence: Synthetic oligonucleotide
gauccuugcgcgccggcgc

SEQ ID NO: 3231477 - RNA, 19 nt, Artificial Sequence
  Description of Artificial Sequence: Synthetic oligonucleotide
uuagccuggcucaggcucu

SEQ ID NO: 3231478 - RNA, 19 nt, Artificial Sequence
  Description of Artificial Sequence: Synthetic oligonucleotide
cuggcucaggcucugguug

SEQ ID NO: 3231479 - RNA, 19 nt, Artificial Sequence
  Description of Artificial Sequence: Synthetic oligonucleotide
gaagucuccgcgcccagca

SEQ ID NO: 3231480 - RNA, 19 nt, Artificial Sequence
  Description of Artificial Sequence: Synthetic oligonucleotide
guggcuuuagguguacuug

SEQ ID NO: 3231481 - RNA, 19 nt, Artificial Sequence
  Description of Artificial Sequence: Synthetic oligonucleotide
acccucgagguaacuaucc

SEQ ID NO: 3231482 - RNA, 19 nt, Artificial Sequence
  Description of Artificial Sequence: Synthetic oligonucleotide
aacuauccaagggcuccgg

SEQ ID NO: 3231483 - RNA, 19 nt, Artificial Sequence
  Description of Artificial Sequence: Synthetic oligonucleotide
ugcgcagcuccgcugcucc

SEQ ID NO: 3231484 - RNA, 19 nt, Artificial Sequence
  Description of Artificial Sequence: Synthetic oligonucleotide
aacccucgagguaacuauc

SEQ ID NO: 3231485 - RNA, 19 nt, Artificial Sequence
  Description of Artificial Sequence: Synthetic oligonucleotide
agucuccgcgcccagcaag

SEQ ID NO: 3231486 - RNA, 19 nt, Artificial Sequence
  Description of Artificial Sequence: Synthetic oligonucleotide
ugauccuugcgcgccggcg

SEQ ID NO: 3231487 - RNA, 19 nt, Artificial Sequence
  Description of Artificial Sequence: Synthetic oligonucleotide
ucauuuccaggauguccgc

SEQ ID NO: 3231488 - RNA, 19 nt, Artificial Sequence
  Description of Artificial Sequence: Synthetic oligonucleotide
caagggcaauaccagcccc

SEQ ID NO: 3231489 - RNA, 19 nt, Artificial Sequence
  Description of Artificial Sequence: Synthetic oligonucleotide
ggcuccaggacgcugcagg

SEQ ID NO: 3231490 - RNA, 19 nt, Artificial Sequence
  Description of Artificial Sequence: Synthetic oligonucleotide
aguggcuuuagguguacuu

SEQ ID NO: 3231491 - RNA, 19 nt, Artificial Sequence
  Description of Artificial Sequence: Synthetic oligonucleotide
agguaacuauccaagggcu

SEQ ID NO: 3231492 - RNA, 19 nt, Artificial Sequence
  Description of Artificial Sequence: Synthetic oligonucleotide
uccagcaggcgcacgcuca

SEQ ID NO: 3231493 - RNA, 19 nt, Artificial Sequence
  Description of Artificial Sequence: Synthetic oligonucleotide
ugguugauccuugcgcgcc

SEQ ID NO: 3231494 - RNA, 19 nt, Artificial Sequence
  Description of Artificial Sequence: Synthetic oligonucleotide
uguaggugucugugaaggu

SEQ ID NO: 3231495 - RNA, 19 nt, Artificial Sequence
  Description of Artificial Sequence: Synthetic oligonucleotide
uccaggagccuaccagggc

SEQ ID NO: 3231496 - RNA, 19 nt, Artificial Sequence
  Description of Artificial Sequence: Synthetic oligonucleotide
ggucauuuccaggaugucc

SEQ ID NO: 3231497 - RNA, 19 nt, Artificial Sequence
  Description of Artificial Sequence: Synthetic oligonucleotide
caauaccagccccuuuagc

SEQ ID NO: 3231498 - RNA, 19 nt, Artificial Sequence
  Description of Artificial Sequence: Synthetic oligonucleotide
agcaugcgcgccaagcgcg

SEQ ID NO: 3231499 - RNA, 19 nt, Artificial Sequence
  Description of Artificial Sequence: Synthetic oligonucleotide
uaccagccccuuuagccug

SEQ ID NO: 3231500 - RNA, 19 nt, Artificial Sequence
  Description of Artificial Sequence: Synthetic oligonucleotide
auguccgccuucuccagcu

SEQ ID NO: 3231501 - RNA, 19 nt, Artificial Sequence
  Description of Artificial Sequence: Synthetic oligonucleotide
cagcaagggcaauaccagc

SEQ ID NO: 3231502 - RNA, 19 nt, Artificial Sequence
  Description of Artificial Sequence: Synthetic oligonucleotide
gacgcugcaggccggcagc

SEQ ID NO: 3231503 - RNA, 19 nt, Artificial Sequence
  Description of Artificial Sequence: Synthetic oligonucleotide
gauguccgccuucuccagc

SEQ ID NO: 3231504 - RNA, 19 nt, Artificial Sequence
  Description of Artificial Sequence: Synthetic oligonucleotide
cacaggcugcuccugcagg

SEQ ID NO: 3231505 - RNA, 19 nt, Artificial Sequence
  Description of Artificial Sequence: Synthetic oligonucleotide
cugguugauccuugcgcgc

SEQ ID NO: 3231506 - RNA, 19 nt, Artificial Sequence
  Description of Artificial Sequence: Synthetic oligonucleotide
caggagccuaccagggccg

SEQ ID NO: 3231507 - RNA, 19 nt, Artificial Sequence
  Description of Artificial Sequence: Synthetic oligonucleotide
acggucauuuccaggaugu

SEQ ID NO: 3231508 - RNA, 19 nt, Artificial Sequence
  Description of Artificial Sequence: Synthetic oligonucleotide
aagcgcacggucauuucca

SEQ ID NO: 3231509 - RNA, 19 nt, Artificial Sequence
  Description of Artificial Sequence: Synthetic oligonucleotide
aagggcaauaccagccccu

SEQ ID NO: 3231510 - RNA, 19 nt, Artificial Sequence
  Description of Artificial Sequence: Synthetic oligonucleotide
agggcugccuggaggaggc

SEQ ID NO: 3231511 - RNA, 19 nt, Artificial Sequence
  Description of Artificial Sequence: Synthetic oligonucleotide
cgagguaacuauccaaggg

SEQ ID NO: 3231512 - RNA, 19 nt, Artificial Sequence
  Description of Artificial Sequence: Synthetic oligonucleotide
uucgaguagcgggaagucu

SEQ ID NO: 3231513 - RNA, 19 nt, Artificial Sequence
  Description of Artificial Sequence: Synthetic oligonucleotide
gcagcaugcgcgccaagcg

SEQ ID NO: 3231514 - RNA, 19 nt, Artificial Sequence
  Description of Artificial Sequence: Synthetic oligonucleotide
ccagcaagggcaauaccag

SEQ ID NO: 3231515 - RNA, 19 nt, Artificial Sequence
  Description of Artificial Sequence: Synthetic oligonucleotide
cuggaggaggcaccugcgg

SEQ ID NO: 3231516 - RNA, 19 nt, Artificial Sequence
  Description of Artificial Sequence: Synthetic oligonucleotide
ugugaaggugggacaccac

SEQ ID NO: 3231517 - RNA, 19 nt, Artificial Sequence
  Description of Artificial Sequence: Synthetic oligonucleotide
aaauauaacauucauaugg

SEQ ID NO: 3231518 - RNA, 19 nt, Artificial Sequence
  Description of Artificial Sequence: Synthetic oligonucleotide
aaaucagucagacugaggc

SEQ ID NO: 3231519 - RNA, 19 nt, Artificial Sequence
  Description of Artificial Sequence: Synthetic oligonucleotide
uuugacuucaacuauaaug

SEQ ID NO: 3231520 - RNA, 19 nt, Artificial Sequence
  Description of Artificial Sequence: Synthetic oligonucleotide
ucugauagcuaacugaugg

SEQ ID NO: 3231521 - RNA, 19 nt, Artificial Sequence
  Description of Artificial Sequence: Synthetic oligonucleotide
ucaaccuagagucugauag

SEQ ID NO: 3231522 - RNA, 19 nt, Artificial Sequence
  Description of Artificial Sequence: Synthetic oligonucleotide
ucuuaaaagcaauacacgg

SEQ ID NO: 3231523 - RNA, 19 nt, Artificial Sequence
  Description of Artificial Sequence: Synthetic oligonucleotide
acuuggaacagacaaaggc

SEQ ID NO: 3231524 - RNA, 19 nt, Artificial Sequence
  Description of Artificial Sequence: Synthetic oligonucleotide
ucuacaagcauaaucacac

SEQ ID NO: 3231525 - RNA, 19 nt, Artificial Sequence
  Description of Artificial Sequence: Synthetic oligonucleotide
aauaucacacaguacagcu

SEQ ID NO: 3231526 - RNA, 19 nt, Artificial Sequence
  Description of Artificial Sequence: Synthetic oligonucleotide
aguagcaacagguacaguc

SEQ ID NO: 3231527 - RNA, 19 nt, Artificial Sequence
  Description of Artificial Sequence: Synthetic oligonucleotide
aaguaauuaaaaugcuggg

SEQ ID NO: 3231528 - RNA, 19 nt, Artificial Sequence
  Description of Artificial Sequence: Synthetic oligonucleotide
aacagguacagucacagga

SEQ ID NO: 3231529 - RNA, 19 nt, Artificial Sequence
  Description of Artificial Sequence: Synthetic oligonucleotide
agcacuucacaguaaaccc

SEQ ID NO: 3231530 - RNA, 19 nt, Artificial Sequence
  Description of Artificial Sequence: Synthetic oligonucleotide
aaauuacugaccuagugaa

SEQ ID NO: 3231531 - RNA, 19 nt, Artificial Sequence
  Description of Artificial Sequence: Synthetic oligonucleotide
acuauaauguucucaauug

SEQ ID NO: 3231532 - RNA, 19 nt, Artificial Sequence
  Description of Artificial Sequence: Synthetic oligonucleotide
aauuuggccacauuuucug

SEQ ID NO: 3231533 - RNA, 19 nt, Artificial Sequence
  Description of Artificial Sequence: Synthetic oligonucleotide
aaaugcuggcuccaugagc

SEQ ID NO: 3231534 - RNA, 19 nt, Artificial Sequence
  Description of Artificial Sequence: Synthetic oligonucleotide
uauguuaaugggcuguucc

SEQ ID NO: 3231535 - RNA, 19 nt, Artificial Sequence
  Description of Artificial Sequence: Synthetic oligonucleotide
uuaauuugcaaguaauuaa

SEQ ID NO: 3231536 - RNA, 19 nt, Artificial Sequence
  Description of Artificial Sequence: Synthetic oligonucleotide
guuauuuacaagcuugacc

SEQ ID NO: 3231537 - RNA, 19 nt, Artificial Sequence
  Description of Artificial Sequence: Synthetic oligonucleotide
uaaaaugugcaucuucaug

SEQ ID NO: 3231538 - RNA, 19 nt, Artificial Sequence
  Description of Artificial Sequence: Synthetic oligonucleotide
auaucaucgguucacuuuc

SEQ ID NO: 3231539 - RNA, 19 nt, Artificial Sequence
  Description of Artificial Sequence: Synthetic oligonucleotide
uuuagauacuucauucuca

SEQ ID NO: 3231540 - RNA, 19 nt, Artificial Sequence
  Description of Artificial Sequence: Synthetic oligonucleotide
auuuauuagcuguacagca

SEQ ID NO: 3231541 - RNA, 19 nt, Artificial Sequence
  Description of Artificial Sequence: Synthetic oligonucleotide
uuuauuagcuguacagcag

SEQ ID NO: 3231542 - RNA, 19 nt, Artificial Sequence
  Description of Artificial Sequence: Synthetic oligonucleotide
uaauuugcaaguaauuaaa

SEQ ID NO: 3231543 - RNA, 19 nt, Artificial Sequence
  Description of Artificial Sequence: Synthetic oligonucleotide
uuacuaaaucaagagagag

SEQ ID NO: 3231544 - RNA, 19 nt, Artificial Sequence
  Description of Artificial Sequence: Synthetic oligonucleotide
ugauagauacaacauuuac

SEQ ID NO: 3231545 - RNA, 19 nt, Artificial Sequence
  Description of Artificial Sequence: Synthetic oligonucleotide
aaggguuggauccagcugu

SEQ ID NO: 3231546 - RNA, 19 nt, Artificial Sequence
  Description of Artificial Sequence: Synthetic oligonucleotide
cucuuaaaagcaauacacg

SEQ ID NO: 3231547 - RNA, 19 nt, Artificial Sequence
  Description of Artificial Sequence: Synthetic oligonucleotide
cuuuccuuuaaauagaaaa

SEQ ID NO: 3231548 - RNA, 19 nt, Artificial Sequence
  Description of Artificial Sequence: Synthetic oligonucleotide
aacacagccccaauagucc

SEQ ID NO: 3231549 - RNA, 19 nt, Artificial Sequence
  Description of Artificial Sequence: Synthetic oligonucleotide
uacaagcauaaucacacug

SEQ ID NO: 3231550 - RNA, 19 nt, Artificial Sequence
  Description of Artificial Sequence: Synthetic oligonucleotide
aaacacagccccaauaguc

SEQ ID NO: 3231551 - RNA, 19 nt, Artificial Sequence
  Description of Artificial Sequence: Synthetic oligonucleotide
acuuugccaagaaagaggc

SEQ ID NO: 3231552 - RNA, 19 nt, Artificial Sequence
  Description of Artificial Sequence: Synthetic oligonucleotide
aauauaacauucauauggu

SEQ ID NO: 3231553 - RNA, 19 nt, Artificial Sequence
  Description of Artificial Sequence: Synthetic oligonucleotide
uuugguucuagguuuguca

SEQ ID NO: 3231554 - RNA, 19 nt, Artificial Sequence
  Description of Artificial Sequence: Synthetic oligonucleotide
auagaaaaguuuacaagac

SEQ ID NO: 3231555 - RNA, 19 nt, Artificial Sequence
  Description of Artificial Sequence: Synthetic oligonucleotide
acaucaaacaacaaguucu

SEQ ID NO: 3231556 - RNA, 19 nt, Artificial Sequence
  Description of Artificial Sequence: Synthetic oligonucleotide
uuggaacagacaaaggcug

SEQ ID NO: 3231557 - RNA, 19 nt, Artificial Sequence
  Description of Artificial Sequence: Synthetic oligonucleotide
aagacuccuccacaauggc

SEQ ID NO: 3231558 - RNA, 19 nt, Artificial Sequence
  Description of Artificial Sequence: Synthetic oligonucleotide
auuuguucaagguucaaau

SEQ ID NO: 3231559 - RNA, 19 nt, Artificial Sequence
  Description of Artificial Sequence: Synthetic oligonucleotide
auuuacacaccacccaguc

SEQ ID NO: 3231560 - RNA, 19 nt, Artificial Sequence
  Description of Artificial Sequence: Synthetic oligonucleotide
gauuuauuagcuguacagc

SEQ ID NO: 3231561 - RNA, 19 nt, Artificial Sequence
  Description of Artificial Sequence: Synthetic oligonucleotide
cuaagaaaacuaguuaggc

SEQ ID NO: 3231562 - RNA, 19 nt, Artificial Sequence
  Description of Artificial Sequence: Synthetic oligonucleotide
gacaaugaaauuuggccac

SEQ ID NO: 3231563 - RNA, 19 nt, Artificial Sequence
  Description of Artificial Sequence: Synthetic oligonucleotide
gauagauacaacauuuaca

SEQ ID NO: 3231564 - RNA, 19 nt, Artificial Sequence
  Description of Artificial Sequence: Synthetic oligonucleotide
augaaauuuggccacauuu

SEQ ID NO: 3231565 - RNA, 19 nt, Artificial Sequence
  Description of Artificial Sequence: Synthetic oligonucleotide
aaucauaaaugagaguuau

SEQ ID NO: 3231566 - RNA, 19 nt, Artificial Sequence
  Description of Artificial Sequence: Synthetic oligonucleotide
ugaauggguucucaugugc

SEQ ID NO: 3231567 - RNA, 19 nt, Artificial Sequence
  Description of Artificial Sequence: Synthetic oligonucleotide
aucaacaugugacaauuca

SEQ ID NO: 3231568 - RNA, 19 nt, Artificial Sequence
  Description of Artificial Sequence: Synthetic oligonucleotide
aacuaguuaggcaucaaca

SEQ ID NO: 3231569 - RNA, 19 nt, Artificial Sequence
  Description of Artificial Sequence: Synthetic oligonucleotide
aguagauccucuccccagc

SEQ ID NO: 3231570 - RNA, 19 nt, Artificial Sequence
  Description of Artificial Sequence: Synthetic oligonucleotide
caacaugugacaauucaug

SEQ ID NO: 3231571 - RNA, 19 nt, Artificial Sequence
  Description of Artificial Sequence: Synthetic oligonucleotide
caagacuccuccacaaugg

SEQ ID NO: 3231572 - RNA, 19 nt, Artificial Sequence
  Description of Artificial Sequence: Synthetic oligonucleotide
uguucuuugguucuagguu

SEQ ID NO: 3231573 - RNA, 19 nt, Artificial Sequence
  Description of Artificial Sequence: Synthetic oligonucleotide
uucuacugaaguaguagca

SEQ ID NO: 3231574 - RNA, 19 nt, Artificial Sequence
  Description of Artificial Sequence: Synthetic oligonucleotide
acaagcauaaucacacugg

SEQ ID NO: 3231575 - RNA, 19 nt, Artificial Sequence
  Description of Artificial Sequence: Synthetic oligonucleotide
auuaugccguucccaaagc

SEQ ID NO: 3231576 - RNA, 19 nt, Artificial Sequence
  Description of Artificial Sequence: Synthetic oligonucleotide
ucaugugcaagaaucacuu

SEQ ID NO: 3231577 - RNA, 19 nt, Artificial Sequence
  Description of Artificial Sequence: Synthetic oligonucleotide
uuugguaaaaugguguaaa

SEQ ID NO: 3231578 - RNA, 19 nt, Artificial Sequence
  Description of Artificial Sequence: Synthetic oligonucleotide
gucgugauaacgcuugaag

SEQ ID NO: 3231579 - RNA, 19 nt, Artificial Sequence
  Description of Artificial Sequence: Synthetic oligonucleotide
uuagauacuucauucucau

SEQ ID NO: 3231580 - RNA, 19 nt, Artificial Sequence
  Description of Artificial Sequence: Synthetic oligonucleotide
auugucauccagaucuggc

SEQ ID NO: 3231581 - RNA, 19 nt, Artificial Sequence
  Description of Artificial Sequence: Synthetic oligonucleotide
ucuggagugguuuacuaaa

SEQ ID NO: 3231582 - RNA, 19 nt, Artificial Sequence
  Description of Artificial Sequence: Synthetic oligonucleotide
aaaucaagagagagggcuc

SEQ ID NO: 3231583 - RNA, 19 nt, Artificial Sequence
  Description of Artificial Sequence: Synthetic oligonucleotide
uuuuggcccagcuugccag

SEQ ID NO: 3231584 - RNA, 19 nt, Artificial Sequence
  Description of Artificial Sequence: Synthetic oligonucleotide
cuccguguaacguaguuug

SEQ ID NO: 3231585 - RNA, 19 nt, Artificial Sequence
  Description of Artificial Sequence: Synthetic oligonucleotide
acacauccuacaucuuugc

SEQ ID NO: 3231586 - RNA, 19 nt, Artificial Sequence
  Description of Artificial Sequence: Synthetic oligonucleotide
uccgcgcacgguuuaaucg

SEQ ID NO: 3231587 - RNA, 19 nt, Artificial Sequence
  Description of Artificial Sequence: Synthetic oligonucleotide
cagagcaaaggaaauguug

SEQ ID NO: 3231588 - RNA, 19 nt, Artificial Sequence
  Description of Artificial Sequence: Synthetic oligonucleotide
ucaacaugugacaauucau

SEQ ID NO: 3231589 - RNA, 19 nt, Artificial Sequence
  Description of Artificial Sequence: Synthetic oligonucleotide
agcaaagggagucagggaa

SEQ ID NO: 3231590 - RNA, 19 nt, Artificial Sequence
  Description of Artificial Sequence: Synthetic oligonucleotide
aauucaugugcaagaauca

SEQ ID NO: 3231591 - RNA, 19 nt, Artificial Sequence
  Description of Artificial Sequence: Synthetic oligonucleotide
auccguuaugauuuauuag

SEQ ID NO: 3231592 - RNA, 19 nt, Artificial Sequence
  Description of Artificial Sequence: Synthetic oligonucleotide
uggguguccaucacuagca

SEQ ID NO: 3231593 - RNA, 19 nt, Artificial Sequence
  Description of Artificial Sequence: Synthetic oligonucleotide
gguugguucuuccaggagg

SEQ ID NO: 3231594 - RNA, 19 nt, Artificial Sequence
  Description of Artificial Sequence: Synthetic oligonucleotide
aguggcaagcgucuucuuc

SEQ ID NO: 3231595 - RNA, 19 nt, Artificial Sequence
  Description of Artificial Sequence: Synthetic oligonucleotide
augagcuggaaaucacaac

SEQ ID NO: 3231596 - RNA, 19 nt, Artificial Sequence
  Description of Artificial Sequence: Synthetic oligonucleotide
aacaucauccuugaaguuu

SEQ ID NO: 3231597 - RNA, 19 nt, Artificial Sequence
  Description of Artificial Sequence: Synthetic oligonucleotide
gacagugucacagugggga

SEQ ID NO: 3231598 - RNA, 19 nt, Artificial Sequence
  Description of Artificial Sequence: Synthetic oligonucleotide
uguccucagcacuucacag

SEQ ID NO: 3231599 - RNA, 19 nt, Artificial Sequence
  Description of Artificial Sequence: Synthetic oligonucleotide
uaugagagcggauguuacc

SEQ ID NO: 3231600 - RNA, 19 nt, Artificial Sequence
  Description of Artificial Sequence: Synthetic oligonucleotide
ucaucgguucacuuucugc

SEQ ID NO: 3231601 - RNA, 19 nt, Artificial Sequence
  Description of Artificial Sequence: Synthetic oligonucleotide
uuuucgggcuaugacagug

SEQ ID NO: 3231602 - RNA, 19 nt, Artificial Sequence
  Description of Artificial Sequence: Synthetic oligonucleotide
auuaaaaugcuggguuuuc

SEQ ID NO: 3231603 - RNA, 19 nt, Artificial Sequence
  Description of Artificial Sequence: Synthetic oligonucleotide
uuaugccguucccaaagcc

SEQ ID NO: 3231604 - RNA, 19 nt, Artificial Sequence
  Description of Artificial Sequence: Synthetic oligonucleotide
ugcagggacaaaguugggg

SEQ ID NO: 3231605 - RNA, 19 nt, Artificial Sequence
  Description of Artificial Sequence: Synthetic oligonucleotide
uucuuuucaaccucuuaau

SEQ ID NO: 3231606 - RNA, 19 nt, Artificial Sequence
  Description of Artificial Sequence: Synthetic oligonucleotide
aaguuuucguucucaguau

SEQ ID NO: 3231607 - RNA, 19 nt, Artificial Sequence
  Description of Artificial Sequence: Synthetic oligonucleotide
caccugaaacccuucaggc

SEQ ID NO: 3231608 - RNA, 19 nt, Artificial Sequence
  Description of Artificial Sequence: Synthetic oligonucleotide
aaccgagcaugacaaauau

SEQ ID NO: 3231609 - RNA, 19 nt, Artificial Sequence
  Description of Artificial Sequence: Synthetic oligonucleotide
ugaaaucagucagacugag

SEQ ID NO: 3231610 - RNA, 19 nt, Artificial Sequence
  Description of Artificial Sequence: Synthetic oligonucleotide
acugaaguaguagcaacag

SEQ ID NO: 3231611 - RNA, 19 nt, Artificial Sequence
  Description of Artificial Sequence: Synthetic oligonucleotide
uagauccaaaguuuaaauu

SEQ ID NO: 3231612 - RNA, 19 nt, Artificial Sequence
  Description of Artificial Sequence: Synthetic oligonucleotide
ucuuuucaaccucuuaauu

SEQ ID NO: 3231613 - RNA, 19 nt, Artificial Sequence
  Description of Artificial Sequence: Synthetic oligonucleotide
cuucuuuucaaccucuuaa

SEQ ID NO: 3231614 - RNA, 19 nt, Artificial Sequence
  Description of Artificial Sequence: Synthetic oligonucleotide
aaugcugcuuucgcaagug

SEQ ID NO: 3231615 - RNA, 19 nt, Artificial Sequence
  Description of Artificial Sequence: Synthetic oligonucleotide
ucucaauugcaccuguauu

SEQ ID NO: 3231616 - RNA, 19 nt, Artificial Sequence
  Description of Artificial Sequence: Synthetic oligonucleotide
uauuuguucaagguucaaa

SEQ ID NO: 3231617 - RNA, 19 nt, Artificial Sequence
  Description of Artificial Sequence: Synthetic oligonucleotide
aauaaacccaaacaaagac

SEQ ID NO: 3231618 - RNA, 19 nt, Artificial Sequence
  Description of Artificial Sequence: Synthetic oligonucleotide
aaugccauaauaauaaacc

SEQ ID NO: 3231619 - RNA, 19 nt, Artificial Sequence
  Description of Artificial Sequence: Synthetic oligonucleotide
aaagacucagccuugcugc

SEQ ID NO: 3231620 - RNA, 19 nt, Artificial Sequence
  Description of Artificial Sequence: Synthetic oligonucleotide
gaaacugaaaacuaaaaug

SEQ ID NO: 3231621 - RNA, 19 nt, Artificial Sequence
  Description of Artificial Sequence: Synthetic oligonucleotide
aaacugaaaacuaaaaugg

SEQ ID NO: 3231622 - RNA, 19 nt, Artificial Sequence
  Description of Artificial Sequence: Synthetic oligonucleotide
uaaaaugggaagaaagggg

SEQ ID NO: 3231623 - RNA, 19 nt, Artificial Sequence
  Description of Artificial Sequence: Synthetic oligonucleotide
uaauaauaaacccaaacaa

SEQ ID NO: 3231624 - RNA, 19 nt, Artificial Sequence
  Description of Artificial Sequence: Synthetic oligonucleotide
auaauaauaaacccaaaca

SEQ ID NO: 3231625 - RNA, 19 nt, Artificial Sequence
  Description of Artificial Sequence: Synthetic oligonucleotide
aauauccaaauuccaaagg

SEQ ID NO: 3231626 - RNA, 19 nt, Artificial Sequence
  Description of Artificial Sequence: Synthetic oligonucleotide
uaauuuacaaagccggccg

SEQ ID NO: 3231627 - RNA, 19 nt, Artificial Sequence
  Description of Artificial Sequence: Synthetic oligonucleotide
aaaccaacgaaacugaaaa

SEQ ID NO: 3231628 - RNA, 19 nt, Artificial Sequence
  Description of Artificial Sequence: Synthetic oligonucleotide
uuccccaagacaaaguugg

SEQ ID NO: 3231629 - RNA, 19 nt, Artificial Sequence
  Description of Artificial Sequence: Synthetic oligonucleotide
aaguugguugcuuucuagc

SEQ ID NO: 3231630 - RNA, 19 nt, Artificial Sequence
  Description of Artificial Sequence: Synthetic oligonucleotide
augccauaauaauaaaccc

SEQ ID NO: 3231631 - RNA, 19 nt, Artificial Sequence
  Description of Artificial Sequence: Synthetic oligonucleotide
aacuaaaaugggaagaaag

SEQ ID NO: 3231632 - RNA, 19 nt, Artificial Sequence
  Description of Artificial Sequence: Synthetic oligonucleotide
auaauaaacccaaacaaag

SEQ ID NO: 3231633 - RNA, 19 nt, Artificial Sequence
  Description of Artificial Sequence: Synthetic oligonucleotide
cauaauaauaaacccaaac

SEQ ID NO: 3231634 - RNA, 19 nt, Artificial Sequence
  Description of Artificial Sequence: Synthetic oligonucleotide
uaaacccaaacaaagacuc

SEQ ID NO: 3231635 - RNA, 19 nt, Artificial Sequence
  Description of Artificial Sequence: Synthetic oligonucleotide
caagcuuucccucaaaacc

SEQ ID NO: 3231636 - RNA, 19 nt, Artificial Sequence
  Description of Artificial Sequence: Synthetic oligonucleotide
aaaugccauaauaauaaac

SEQ ID NO: 3231637 - RNA, 19 nt, Artificial Sequence
  Description of Artificial Sequence: Synthetic oligonucleotide
uuuucacuuacaaacaaaa

SEQ ID NO: 3231638 - RNA, 19 nt, Artificial Sequence
  Description of Artificial Sequence: Synthetic oligonucleotide
gaauauccaaauuccaaag

SEQ ID NO: 3231639 - RNA, 19 nt, Artificial Sequence
  Description of Artificial Sequence: Synthetic oligonucleotide
ugaaaacuaaaaugggaag

SEQ ID NO: 3231640 - RNA, 19 nt, Artificial Sequence
  Description of Artificial Sequence: Synthetic oligonucleotide
cuaaaaugggaagaaaggg

SEQ ID NO: 3231641 - RNA, 19 nt, Artificial Sequence
  Description of Artificial Sequence: Synthetic oligonucleotide
uaauaaacccaaacaaaga

SEQ ID NO: 3231642 - RNA, 19 nt, Artificial Sequence
  Description of Artificial Sequence: Synthetic oligonucleotide
aauaauaaacccaaacaaa

SEQ ID NO: 3231643 - RNA, 19 nt, Artificial Sequence
  Description of Artificial Sequence: Synthetic oligonucleotide
uguaguguggauauccaca

SEQ ID NO: 3231644 - RNA, 19 nt, Artificial Sequence
  Description of Artificial Sequence: Synthetic oligonucleotide
aauuuacaaagccggccgg

SEQ ID NO: 3231645 - RNA, 19 nt, Artificial Sequence
  Description of Artificial Sequence: Synthetic oligonucleotide
cucaaaaccaacgaaacug

SEQ ID NO: 3231646 - RNA, 19 nt, Artificial Sequence
  Description of Artificial Sequence: Synthetic oligonucleotide
acuaaaaugggaagaaagg

SEQ ID NO: 3231647 - RNA, 19 nt, Artificial Sequence
  Description of Artificial Sequence: Synthetic oligonucleotide
ugccauaauaauaaaccca

SEQ ID NO: 3231648 - RNA, 19 nt, Artificial Sequence
  Description of Artificial Sequence: Synthetic oligonucleotide
auauccaaauuccaaaggu

SEQ ID NO: 3231649 - RNA, 19 nt, Artificial Sequence
  Description of Artificial Sequence: Synthetic oligonucleotide
aaaguugguugcuuucuag

SEQ ID NO: 3231650 - RNA, 19 nt, Artificial Sequence
  Description of Artificial Sequence: Synthetic oligonucleotide
ugugguuuggccaggcggg

SEQ ID NO: 3231651 - RNA, 19 nt, Artificial Sequence
  Description of Artificial Sequence: Synthetic oligonucleotide
ucaaaaccaacgaaacuga

SEQ ID NO: 3231652 - RNA, 19 nt, Artificial Sequence
  Description of Artificial Sequence: Synthetic oligonucleotide
aacugaaaacuaaaauggg

SEQ ID NO: 3231653 - RNA, 19 nt, Artificial Sequence
  Description of Artificial Sequence: Synthetic oligonucleotide
aaccaacgaaacugaaaac

SEQ ID NO: 3231654 - RNA, 19 nt, Artificial Sequence
  Description of Artificial Sequence: Synthetic oligonucleotide
aaaacuaaaaugggaagaa

SEQ ID NO: 3231655 - RNA, 19 nt, Artificial Sequence
  Description of Artificial Sequence: Synthetic oligonucleotide
acaagcuuucccucaaaac

SEQ ID NO: 3231656 - RNA, 19 nt, Artificial Sequence
  Description of Artificial Sequence: Synthetic oligonucleotide
aguguggauauccacagcu

SEQ ID NO: 3231657 - RNA, 19 nt, Artificial Sequence
  Description of Artificial Sequence: Synthetic oligonucleotide
cuuucccucaaaaccaacg

SEQ ID NO: 3231658 - RNA, 19 nt, Artificial Sequence
  Description of Artificial Sequence: Synthetic oligonucleotide
aggcggguaauuuacaaag

SEQ ID NO: 3231659 - RNA, 19 nt, Artificial Sequence
  Description of Artificial Sequence: Synthetic oligonucleotide
uccaaauuccaaagguucc

SEQ ID NO: 3231660 - RNA, 19 nt, Artificial Sequence
  Description of Artificial Sequence: Synthetic oligonucleotide
aacccaaacaaagacucag

SEQ ID NO: 3231661 - RNA, 19 nt, Artificial Sequence
  Description of Artificial Sequence: Synthetic oligonucleotide
gaaaacuaaaaugggaaga

SEQ ID NO: 3231662 - RNA, 19 nt, Artificial Sequence
  Description of Artificial Sequence: Synthetic oligonucleotide
aacaaagacucagccuugc

SEQ ID NO: 3231663 - RNA, 19 nt, Artificial Sequence
  Description of Artificial Sequence: Synthetic oligonucleotide
uuucccucaaaaccaacga

SEQ ID NO: 3231664 - RNA, 19 nt, Artificial Sequence
  Description of Artificial Sequence: Synthetic oligonucleotide
uguggauauccacagcugu

SEQ ID NO: 3231665 - RNA, 19 nt, Artificial Sequence
  Description of Artificial Sequence: Synthetic oligonucleotide
auccaaauuccaaagguuc

SEQ ID NO: 3231666 - RNA, 19 nt, Artificial Sequence
  Description of Artificial Sequence: Synthetic oligonucleotide
guaguguggauauccacag

SEQ ID NO: 3231667 - RNA, 19 nt, Artificial Sequence
  Description of Artificial Sequence: Synthetic oligonucleotide
uuuaucuucgugugugugu

SEQ ID NO: 3231668 - RNA, 19 nt, Artificial Sequence
  Description of Artificial Sequence: Synthetic oligonucleotide
cugucucucccuuacaagc

SEQ ID NO: 3231669 - RNA, 19 nt, Artificial Sequence
  Description of Artificial Sequence: Synthetic oligonucleotide
ugcugcuacguucucagug

SEQ ID NO: 3231670 - RNA, 19 nt, Artificial Sequence
  Description of Artificial Sequence: Synthetic oligonucleotide
cugaaaacuaaaaugggaa

SEQ ID NO: 3231671 - RNA, 19 nt, Artificial Sequence
  Description of Artificial Sequence: Synthetic oligonucleotide
guaauuuacaaagccggcc

SEQ ID NO: 3231672 - RNA, 19 nt, Artificial Sequence
  Description of Artificial Sequence: Synthetic oligonucleotide
aauuccaaagguuccccaa

SEQ ID NO: 3231673 - RNA, 19 nt, Artificial Sequence
  Description of Artificial Sequence: Synthetic oligonucleotide
accaacgaaacugaaaacu

SEQ ID NO: 3231674 - RNA, 19 nt, Artificial Sequence
  Description of Artificial Sequence: Synthetic oligonucleotide
acagcugucucucccuuac

SEQ ID NO: 3231675 - RNA, 19 nt, Artificial Sequence
  Description of Artificial Sequence: Synthetic oligonucleotide
ucccucaaaaccaacgaaa

SEQ ID NO: 3231676 - RNA, 19 nt, Artificial Sequence
  Description of Artificial Sequence: Synthetic oligonucleotide
ggguaauuuacaaagccgg

SEQ ID NO: 3231677 - RNA, 19 nt, Artificial Sequence
  Description of Artificial Sequence: Synthetic oligonucleotide
aaaaugccauaauaauaaa

SEQ ID NO: 3231678 - RNA, 19 nt, Artificial Sequence
  Description of Artificial Sequence: Synthetic oligonucleotide
cuugcugcuacguucucag

SEQ ID NO: 3231679 - RNA, 19 nt, Artificial Sequence
  Description of Artificial Sequence: Synthetic oligonucleotide
aaauuccaaagguucccca

SEQ ID NO: 3231680 - RNA, 19 nt, Artificial Sequence
  Description of Artificial Sequence: Synthetic oligonucleotide
caaagguuccccaagacaa

SEQ ID NO: 3231681 - RNA, 19 nt, Artificial Sequence
  Description of Artificial Sequence: Synthetic oligonucleotide
uuuacaaagccggccggcg

SEQ ID NO: 3231682 - RNA, 19 nt, Artificial Sequence
  Description of Artificial Sequence: Synthetic oligonucleotide
gaccgaauauccaaauucc

SEQ ID NO: 3231683 - RNA, 19 nt, Artificial Sequence
  Description of Artificial Sequence: Synthetic oligonucleotide
uguguguguguguagugug

SEQ ID NO: 3231684 - RNA, 19 nt, Artificial Sequence
  Description of Artificial Sequence: Synthetic oligonucleotide
uuaucuucgugugugugug

SEQ ID NO: 3231685 - RNA, 19 nt, Artificial Sequence
  Description of Artificial Sequence: Synthetic oligonucleotide
ucccuuacaagcuuucccu

SEQ ID NO: 3231686 - RNA, 19 nt, Artificial Sequence
  Description of Artificial Sequence: Synthetic oligonucleotide
auuuacaaagccggccggc

SEQ ID NO: 3231687 - RNA, 19 nt, Artificial Sequence
  Description of Artificial Sequence: Synthetic oligonucleotide
uauccaaauuccaaagguu

SEQ ID NO: 3231688 - RNA, 19 nt, Artificial Sequence
  Description of Artificial Sequence: Synthetic oligonucleotide
auuccaaagguuccccaag

SEQ ID NO: 3231689 - RNA, 19 nt, Artificial Sequence
  Description of Artificial Sequence: Synthetic oligonucleotide
aguugguugcuuucuagcu

SEQ ID NO: 3231690 - RNA, 19 nt, Artificial Sequence
  Description of Artificial Sequence: Synthetic oligonucleotide
acugaaaacuaaaauggga

SEQ ID NO: 3231691 - RNA, 19 nt, Artificial Sequence
  Description of Artificial Sequence: Synthetic oligonucleotide
aagcuuucccucaaaacca

SEQ ID NO: 3231692 - RNA, 19 nt, Artificial Sequence
  Description of Artificial Sequence: Synthetic oligonucleotide
uguguaguguggauaucca

SEQ ID NO: 3231693 - RNA, 19 nt, Artificial Sequence
  Description of Artificial Sequence: Synthetic oligonucleotide
gugugguuuggccaggcgg

SEQ ID NO: 3231694 - RNA, 19 nt, Artificial Sequence
  Description of Artificial Sequence: Synthetic oligonucleotide
auauccacagcugucucuc

SEQ ID NO: 3231695 - RNA, 19 nt, Artificial Sequence
  Description of Artificial Sequence: Synthetic oligonucleotide
auccacagcugucucuccc

SEQ ID NO: 3231696 - RNA, 19 nt, Artificial Sequence
  Description of Artificial Sequence: Synthetic oligonucleotide
uucucagugugguuuggcc

SEQ ID NO: 3231697 - RNA, 19 nt, Artificial Sequence
  Description of Artificial Sequence: Synthetic oligonucleotide
ucucagugugguuuggcca

SEQ ID NO: 3231698 - RNA, 19 nt, Artificial Sequence
  Description of Artificial Sequence: Synthetic oligonucleotide
caaagacucagccuugcug

SEQ ID NO: 3231699 - RNA, 19 nt, Artificial Sequence
  Description of Artificial Sequence: Synthetic oligonucleotide
auaaacccaaacaaagacu

SEQ ID NO: 3231700 - RNA, 19 nt, Artificial Sequence
  Description of Artificial Sequence: Synthetic oligonucleotide
aaaaccaacgaaacugaaa

SEQ ID NO: 3231701 - RNA, 19 nt, Artificial Sequence
  Description of Artificial Sequence: Synthetic oligonucleotide
aacgaaacugaaaacuaaa

SEQ ID NO: 3231702 - RNA, 19 nt, Artificial Sequence
  Description of Artificial Sequence: Synthetic oligonucleotide
cucagugugguuuggccag

SEQ ID NO: 3231703 - RNA, 19 nt, Artificial Sequence
  Description of Artificial Sequence: Synthetic oligonucleotide
aagguuccccaagacaaag

SEQ ID NO: 3231704 - RNA, 19 nt, Artificial Sequence
  Description of Artificial Sequence: Synthetic oligonucleotide
ucuagcuuucuuuuauuuu

SEQ ID NO: 3231705 - RNA, 19 nt, Artificial Sequence
  Description of Artificial Sequence: Synthetic oligonucleotide
ggaccgaauauccaaauuc

SEQ ID NO: 3231706 - RNA, 19 nt, Artificial Sequence
  Description of Artificial Sequence: Synthetic oligonucleotide
ugcuacguucucagugugg

SEQ ID NO: 3231707 - RNA, 19 nt, Artificial Sequence
  Description of Artificial Sequence: Synthetic oligonucleotide
uacaagcuuucccucaaaa

SEQ ID NO: 3231708 - RNA, 19 nt, Artificial Sequence
  Description of Artificial Sequence: Synthetic oligonucleotide
uuccaaagguuccccaaga

SEQ ID NO: 3231709 - RNA, 19 nt, Artificial Sequence
  Description of Artificial Sequence: Synthetic oligonucleotide
ugucucucccuuacaagcu

SEQ ID NO: 3231710 - RNA, 19 nt, Artificial Sequence
  Description of Artificial Sequence: Synthetic oligonucleotide
cucccuuacaagcuuuccc

SEQ ID NO: 3231711 - RNA, 19 nt, Artificial Sequence
  Description of Artificial Sequence: Synthetic oligonucleotide
aaacuaaaaugggaagaaa

SEQ ID NO: 3231712 - RNA, 19 nt, Artificial Sequence
  Description of Artificial Sequence: Synthetic oligonucleotide
gacaaaguugguugcuuuc

SEQ ID NO: 3231713 - RNA, 19 nt, Artificial Sequence
  Description of Artificial Sequence: Synthetic oligonucleotide
uggauauccacagcugucu

SEQ ID NO: 3231714 - RNA, 19 nt, Artificial Sequence
  Description of Artificial Sequence: Synthetic oligonucleotide
guguguaguguggauaucc

SEQ ID NO: 3231715 - RNA, 19 nt, Artificial Sequence
  Description of Artificial Sequence: Synthetic oligonucleotide
uugguugcuuucuagcuuu

SEQ ID NO: 3231716 - RNA, 19 nt, Artificial Sequence
  Description of Artificial Sequence: Synthetic oligonucleotide
caaacaaagacucagccuu

SEQ ID NO: 3231717 - RNA, 19 nt, Artificial Sequence
  Description of Artificial Sequence: Synthetic oligonucleotide
aaagaaauagaguugaguc

SEQ ID NO: 3231718 - RNA, 19 nt, Artificial Sequence
  Description of Artificial Sequence: Synthetic oligonucleotide
aauuagaaggaucaaaguc

SEQ ID NO: 3231719 - RNA, 19 nt, Artificial Sequence
  Description of Artificial Sequence: Synthetic oligonucleotide
ugaaggacaaguuaaagag

SEQ ID NO: 3231720 - RNA, 19 nt, Artificial Sequence
  Description of Artificial Sequence: Synthetic oligonucleotide
aaaagcaaaagaaauagag

SEQ ID NO: 3231721 - RNA, 19 nt, Artificial Sequence
  Description of Artificial Sequence: Synthetic oligonucleotide
ucuaguacaaaguucauca

SEQ ID NO: 3231722 - RNA, 19 nt, Artificial Sequence
  Description of Artificial Sequence: Synthetic oligonucleotide
aaggaucaaagucaaauuc

SEQ ID NO: 3231723 - RNA, 19 nt, Artificial Sequence
  Description of Artificial Sequence: Synthetic oligonucleotide
agagcuguuugucagaacc

SEQ ID NO: 3231724 - RNA, 19 nt, Artificial Sequence
  Description of Artificial Sequence: Synthetic oligonucleotide
aaaccaauaauauucuucu

SEQ ID NO: 3231725 - RNA, 19 nt, Artificial Sequence
  Description of Artificial Sequence: Synthetic oligonucleotide
uaccagaaaacuaagaaca

SEQ ID NO: 3231726 - RNA, 19 nt, Artificial Sequence
  Description of Artificial Sequence: Synthetic oligonucleotide
agagaaugaauucuguuac

SEQ ID NO: 3231727 - RNA, 19 nt, Artificial Sequence
  Description of Artificial Sequence: Synthetic oligonucleotide
aauaauauucuucucuagu

SEQ ID NO: 3231728 - RNA, 19 nt, Artificial Sequence
  Description of Artificial Sequence: Synthetic oligonucleotide
aagcaaaagaaauagaguu

SEQ ID NO: 3231729 - RNA, 19 nt, Artificial Sequence
  Description of Artificial Sequence: Synthetic oligonucleotide
ucuguuaaacccaagagaa

SEQ ID NO: 3231730 - RNA, 19 nt, Artificial Sequence
  Description of Artificial Sequence: Synthetic oligonucleotide
aaaaccaauaauauucuuc

SEQ ID NO: 3231731 - RNA, 19 nt, Artificial Sequence
  Description of Artificial Sequence: Synthetic oligonucleotide
uaacagaggucuaugaagg

SEQ ID NO: 3231732 - RNA, 19 nt, Artificial Sequence
  Description of Artificial Sequence: Synthetic oligonucleotide
cagaaaacuaagaacaagg

SEQ ID NO: 3231733 - RNA, 19 nt, Artificial Sequence
  Description of Artificial Sequence: Synthetic oligonucleotide
gacaaaaccaauaauauuc

SEQ ID NO: 3231734 - RNA, 19 nt, Artificial Sequence
  Description of Artificial Sequence: Synthetic oligonucleotide
aggguugucuguuaaaccc

SEQ ID NO: 3231735 - RNA, 19 nt, Artificial Sequence
  Description of Artificial Sequence: Synthetic oligonucleotide
aaagucaaauuccccaagg

SEQ ID NO: 3231736 - RNA, 19 nt, Artificial Sequence
  Description of Artificial Sequence: Synthetic oligonucleotide
aaugaauucuguuaccaga

SEQ ID NO: 3231737 - RNA, 19 nt, Artificial Sequence
  Description of Artificial Sequence: Synthetic oligonucleotide
aaaacuaagaacaagggua

SEQ ID NO: 3231738 - RNA, 19 nt, Artificial Sequence
  Description of Artificial Sequence: Synthetic oligonucleotide
caacagaagaauaacagag

SEQ ID NO: 3231739 - RNA, 19 nt, Artificial Sequence
  Description of Artificial Sequence: Synthetic oligonucleotide
aagucaaauuccccaaggc

SEQ ID NO: 3231740 - RNA, 19 nt, Artificial Sequence
  Description of Artificial Sequence: Synthetic oligonucleotide
uucucuaguacaaaguuca

SEQ ID NO: 3231741 - RNA, 19 nt, Artificial Sequence
  Description of Artificial Sequence: Synthetic oligonucleotide
aaauagaguugagucaugc

SEQ ID NO: 3231742 - RNA, 19 nt, Artificial Sequence
  Description of Artificial Sequence: Synthetic oligonucleotide
uucaucagcauuuugggug

SEQ ID NO: 3231743 - RNA, 19 nt, Artificial Sequence
  Description of Artificial Sequence: Synthetic oligonucleotide
aauauucuucucuaguaca

SEQ ID NO: 3231744 - RNA, 19 nt, Artificial Sequence
  Description of Artificial Sequence: Synthetic oligonucleotide
agaagaauaacagaggucu

SEQ ID NO: 3231745 - RNA, 19 nt, Artificial Sequence
  Description of Artificial Sequence: Synthetic oligonucleotide
guucagcacaauuagaagg

SEQ ID NO: 3231746 - RNA, 19 nt, Artificial Sequence
  Description of Artificial Sequence: Synthetic oligonucleotide
aacaacagaagaauaacag

SEQ ID NO: 3231747 - RNA, 19 nt, Artificial Sequence
  Description of Artificial Sequence: Synthetic oligonucleotide
ucuaugaaggacaaguuaa

SEQ ID NO: 3231748 - RNA, 19 nt, Artificial Sequence
  Description of Artificial Sequence: Synthetic oligonucleotide
aauucuguuaccagagagc

SEQ ID NO: 3231749 - RNA, 19 nt, Artificial Sequence
  Description of Artificial Sequence: Synthetic oligonucleotide
agugaucauauacauuacc

SEQ ID NO: 3231750 - RNA, 19 nt, Artificial Sequence
  Description of Artificial Sequence: Synthetic oligonucleotide
caggacauaacauucagag

SEQ ID NO: 3231751 - RNA, 19 nt, Artificial Sequence
  Description of Artificial Sequence: Synthetic oligonucleotide
uacauuaccagaaaacuaa

SEQ ID NO: 3231752 - RNA, 19 nt, Artificial Sequence
  Description of Artificial Sequence: Synthetic oligonucleotide
auaacagaggucuaugaag

SEQ ID NO: 3231753 - RNA, 19 nt, Artificial Sequence
  Description of Artificial Sequence: Synthetic oligonucleotide
aaguucaucagcauuuugg

SEQ ID NO: 3231754 - RNA, 19 nt, Artificial Sequence
  Description of Artificial Sequence: Synthetic oligonucleotide
agaacaaggguauuuguag

SEQ ID NO: 3231755 - RNA, 19 nt, Artificial Sequence
  Description of Artificial Sequence: Synthetic oligonucleotide
uguaacaacagaagaauaa

SEQ ID NO: 3231756 - RNA, 19 nt, Artificial Sequence
  Description of Artificial Sequence: Synthetic oligonucleotide
aagaaauagaguugaguca

SEQ ID NO: 3231757 - RNA, 19 nt, Artificial Sequence
  Description of Artificial Sequence: Synthetic oligonucleotide
uguuaaacccaagagaaug

SEQ ID NO: 3231758 - RNA, 19 nt, Artificial Sequence
  Description of Artificial Sequence: Synthetic oligonucleotide
agaguugagucaugcaucc

SEQ ID NO: 3231759 - RNA, 19 nt, Artificial Sequence
  Description of Artificial Sequence: Synthetic oligonucleotide
ugaucauauacauuaccag

SEQ ID NO: 3231760 - RNA, 19 nt, Artificial Sequence
  Description of Artificial Sequence: Synthetic oligonucleotide
aaccauucuucucuaagag

SEQ ID NO: 3231761 - RNA, 19 nt, Artificial Sequence
  Description of Artificial Sequence: Synthetic oligonucleotide
auuaccagaaaacuaagaa

SEQ ID NO: 3231762 - RNA, 19 nt, Artificial Sequence
  Description of Artificial Sequence: Synthetic oligonucleotide
uauacauuaccagaaaacu

SEQ ID NO: 3231763 - RNA, 19 nt, Artificial Sequence
  Description of Artificial Sequence: Synthetic oligonucleotide
aguucaucagcauuuuggg

SEQ ID NO: 3231764 - RNA, 19 nt, Artificial Sequence
  Description of Artificial Sequence: Synthetic oligonucleotide
auauacauuaccagaaaac

SEQ ID NO: 3231765 - RNA, 19 nt, Artificial Sequence
  Description of Artificial Sequence: Synthetic oligonucleotide
ugucuguuaaacccaagag

SEQ ID NO: 3231766 - RNA, 19 nt, Artificial Sequence
  Description of Artificial Sequence: Synthetic oligonucleotide
gaauucuguuaccagagag

SEQ ID NO: 3231767 - RNA, 19 nt, Artificial Sequence
  Description of Artificial Sequence: Synthetic oligonucleotide
aagagaaugaauucuguua

SEQ ID NO: 3231768 - RNA, 19 nt, Artificial Sequence
  Description of Artificial Sequence: Synthetic oligonucleotide
aacccaagagaaugaauuc

SEQ ID NO: 3231769 - RNA, 19 nt, Artificial Sequence
  Description of Artificial Sequence: Synthetic oligonucleotide
accaauaauauucuucucu

SEQ ID NO: 3231770 - RNA, 19 nt, Artificial Sequence
  Description of Artificial Sequence: Synthetic oligonucleotide
aaaagaaauagaguugagu

SEQ ID NO: 3231771 - RNA, 19 nt, Artificial Sequence
  Description of Artificial Sequence: Synthetic oligonucleotide
aauaacagaggucuaugaa

SEQ ID NO: 3231772 - RNA, 19 nt, Artificial Sequence
  Description of Artificial Sequence: Synthetic oligonucleotide
uaauauucuucucuaguac

SEQ ID NO: 3231773 - RNA, 19 nt, Artificial Sequence
  Description of Artificial Sequence: Synthetic oligonucleotide
uuugucagaaccauucuuc

SEQ ID NO: 3231774 - RNA, 19 nt, Artificial Sequence
  Description of Artificial Sequence: Synthetic oligonucleotide
uuaccagaaaacuaagaac

SEQ ID NO: 3231775 - RNA, 19 nt, Artificial Sequence
  Description of Artificial Sequence: Synthetic oligonucleotide
uaacauucagagaugacaa

SEQ ID NO: 3231776 - RNA, 19 nt, Artificial Sequence
  Description of Artificial Sequence: Synthetic oligonucleotide
uuuggguguaacaacagaa

SEQ ID NO: 3231777 - RNA, 19 nt, Artificial Sequence
  Description of Artificial Sequence: Synthetic oligonucleotide
acaauuagaaggaucaaag

SEQ ID NO: 3231778 - RNA, 19 nt, Artificial Sequence
  Description of Artificial Sequence: Synthetic oligonucleotide
gagaguucagcacaauuag

SEQ ID NO: 3231779 - RNA, 19 nt, Artificial Sequence
  Description of Artificial Sequence: Synthetic oligonucleotide
uaguacaaaguucaucagc

SEQ ID NO: 3231780 - RNA, 19 nt, Artificial Sequence
  Description of Artificial Sequence: Synthetic oligonucleotide
uucagcacaauuagaagga

SEQ ID NO: 3231781 - RNA, 19 nt, Artificial Sequence
  Description of Artificial Sequence: Synthetic oligonucleotide
uaacaacagaagaauaaca

SEQ ID NO: 3231782 - RNA, 19 nt, Artificial Sequence
  Description of Artificial Sequence: Synthetic oligonucleotide
aucaaagucaaauucccca

SEQ ID NO: 3231783 - RNA, 19 nt, Artificial Sequence
  Description of Artificial Sequence: Synthetic oligonucleotide
acagaagaauaacagaggu

SEQ ID NO: 3231784 - RNA, 19 nt, Artificial Sequence
  Description of Artificial Sequence: Synthetic oligonucleotide
auuagaaggaucaaaguca

SEQ ID NO: 3231785 - RNA, 19 nt, Artificial Sequence
  Description of Artificial Sequence: Synthetic oligonucleotide
gaucauauacauuaccaga

SEQ ID NO: 3231786 - RNA, 19 nt, Artificial Sequence
  Description of Artificial Sequence: Synthetic oligonucleotide
aggaucaaagucaaauucc

SEQ ID NO: 3231787 - RNA, 19 nt, Artificial Sequence
  Description of Artificial Sequence: Synthetic oligonucleotide
ucuguuaccagagagcugu

SEQ ID NO: 3231788 - RNA, 19 nt, Artificial Sequence
  Description of Artificial Sequence: Synthetic oligonucleotide
aacagaagaauaacagagg

SEQ ID NO: 3231789 - RNA, 19 nt, Artificial Sequence
  Description of Artificial Sequence: Synthetic oligonucleotide
auaacauucagagaugaca

SEQ ID NO: 3231790 - RNA, 19 nt, Artificial Sequence
  Description of Artificial Sequence: Synthetic oligonucleotide
gaacaaggguauuuguagg

SEQ ID NO: 3231791 - RNA, 19 nt, Artificial Sequence
  Description of Artificial Sequence: Synthetic oligonucleotide
aaagcaaaagaaauagagu

SEQ ID NO: 3231792 - RNA, 19 nt, Artificial Sequence
  Description of Artificial Sequence: Synthetic oligonucleotide
aaggugagaguucagcaca

SEQ ID NO: 3231793 - RNA, 19 nt, Artificial Sequence
  Description of Artificial Sequence: Synthetic oligonucleotide
aaggacaaguuaaagagga

SEQ ID NO: 3231794 - RNA, 19 nt, Artificial Sequence
  Description of Artificial Sequence: Synthetic oligonucleotide
caugcauccugacaaaacc

SEQ ID NO: 3231795 - RNA, 19 nt, Artificial Sequence
  Description of Artificial Sequence: Synthetic oligonucleotide
cacauagcgaucauaggcc

SEQ ID NO: 3231796 - RNA, 19 nt, Artificial Sequence
  Description of Artificial Sequence: Synthetic oligonucleotide
auagaguugagucaugcau

SEQ ID NO: 3231797 - RNA, 19 nt, Artificial Sequence
  Description of Artificial Sequence: Synthetic oligonucleotide
uuggguguaacaacagaag

SEQ ID NO: 3231798 - RNA, 19 nt, Artificial Sequence
  Description of Artificial Sequence: Synthetic oligonucleotide
uauuuguaggucaggguug

SEQ ID NO: 3231799 - RNA, 19 nt, Artificial Sequence
  Description of Artificial Sequence: Synthetic oligonucleotide
aacaaggguauuuguaggu

SEQ ID NO: 3231800 - RNA, 19 nt, Artificial Sequence
  Description of Artificial Sequence: Synthetic oligonucleotide
ugagaguucagcacaauua

SEQ ID NO: 3231801 - RNA, 19 nt, Artificial Sequence
  Description of Artificial Sequence: Synthetic oligonucleotide
agaaaacuaagaacaaggg

SEQ ID NO: 3231802 - RNA, 19 nt, Artificial Sequence
  Description of Artificial Sequence: Synthetic oligonucleotide
augaaggacaaguuaaaga

SEQ ID NO: 3231803 - RNA, 19 nt, Artificial Sequence
  Description of Artificial Sequence: Synthetic oligonucleotide
uugucuguuaaacccaaga

SEQ ID NO: 3231804 - RNA, 19 nt, Artificial Sequence
  Description of Artificial Sequence: Synthetic oligonucleotide
auucuucucuaguacaaag

SEQ ID NO: 3231805 - RNA, 19 nt, Artificial Sequence
  Description of Artificial Sequence: Synthetic oligonucleotide
gaaugaauucuguuaccag

SEQ ID NO: 3231806 - RNA, 19 nt, Artificial Sequence
  Description of Artificial Sequence: Synthetic oligonucleotide
gucaaauuccccaaggcag

SEQ ID NO: 3231807 - RNA, 19 nt, Artificial Sequence
  Description of Artificial Sequence: Synthetic oligonucleotide
agaaccauucuucucuaag

SEQ ID NO: 3231808 - RNA, 19 nt, Artificial Sequence
  Description of Artificial Sequence: Synthetic oligonucleotide
acaacagaagaauaacaga

SEQ ID NO: 3231809 - RNA, 19 nt, Artificial Sequence
  Description of Artificial Sequence: Synthetic oligonucleotide
uuagaaggaucaaagucaa

SEQ ID NO: 3231810 - RNA, 19 nt, Artificial Sequence
  Description of Artificial Sequence: Synthetic oligonucleotide
uggguguaacaacagaaga

SEQ ID NO: 3231811 - RNA, 19 nt, Artificial Sequence
  Description of Artificial Sequence: Synthetic oligonucleotide
aauagaguugagucaugca

SEQ ID NO: 3231812 - RNA, 19 nt, Artificial Sequence
  Description of Artificial Sequence: Synthetic oligonucleotide
auaauauucuucucuagua

SEQ ID NO: 3231813 - RNA, 19 nt, Artificial Sequence
  Description of Artificial Sequence: Synthetic oligonucleotide
aaccaauaauauucuucuc

SEQ ID NO: 3231814 - RNA, 19 nt, Artificial Sequence
  Description of Artificial Sequence: Synthetic oligonucleotide
aguacaaaguucaucagca

SEQ ID NO: 3231815 - RNA, 19 nt, Artificial Sequence
  Description of Artificial Sequence: Synthetic oligonucleotide
ugaaggugagaguucagca

SEQ ID NO: 3231816 - RNA, 19 nt, Artificial Sequence
  Description of Artificial Sequence: Synthetic oligonucleotide
aaacccaagagaaugaauu

SEQ ID NO: 3231817 - RNA, 19 nt, Artificial Sequence
  Description of Artificial Sequence: Synthetic oligonucleotide
aaaagucccacucuuaucg

SEQ ID NO: 3231818 - RNA, 19 nt, Artificial Sequence
  Description of Artificial Sequence: Synthetic oligonucleotide
auuuguuucauuaaaaggg

SEQ ID NO: 3231819 - RNA, 19 nt, Artificial Sequence
  Description of Artificial Sequence: Synthetic oligonucleotide
uaaaucuuagcaaaagucc

SEQ ID NO: 3231820 - RNA, 19 nt, Artificial Sequence
  Description of Artificial Sequence: Synthetic oligonucleotide
uauuuguuucauuaaaagg

SEQ ID NO: 3231821 - RNA, 19 nt, Artificial Sequence
  Description of Artificial Sequence: Synthetic oligonucleotide
auugauguaaaucuuagca

SEQ ID NO: 3231822 - RNA, 19 nt, Artificial Sequence
  Description of Artificial Sequence: Synthetic oligonucleotide
auuaaaaggggauggagac

SEQ ID NO: 3231823 - RNA, 19 nt, Artificial Sequence
  Description of Artificial Sequence: Synthetic oligonucleotide
uuuguuucauuaaaagggg

SEQ ID NO: 3231824 - RNA, 19 nt, Artificial Sequence
  Description of Artificial Sequence: Synthetic oligonucleotide
aaaucuuagcaaaaguccc

SEQ ID NO: 3231825 - RNA, 19 nt, Artificial Sequence
  Description of Artificial Sequence: Synthetic oligonucleotide
cagugcauaaauaaggugg

SEQ ID NO: 3231826 - RNA, 19 nt, Artificial Sequence
  Description of Artificial Sequence: Synthetic oligonucleotide
auaccuuucaaucacagcu

SEQ ID NO: 3231827 - RNA, 19 nt, Artificial Sequence
  Description of Artificial Sequence: Synthetic oligonucleotide
uuuacugcagcucagugca

SEQ ID NO: 3231828 - RNA, 19 nt, Artificial Sequence
  Description of Artificial Sequence: Synthetic oligonucleotide
aacacauuacccaggaacc

SEQ ID NO: 3231829 - RNA, 19 nt, Artificial Sequence
  Description of Artificial Sequence: Synthetic oligonucleotide
aauuguugauuagaaauuc

SEQ ID NO: 3231830 - RNA, 19 nt, Artificial Sequence
  Description of Artificial Sequence: Synthetic oligonucleotide
auauuuguuucauuaaaag

SEQ ID NO: 3231831 - RNA, 19 nt, Artificial Sequence
  Description of Artificial Sequence: Synthetic oligonucleotide
uauuauauuuguuucauua

SEQ ID NO: 3231832 - RNA, 19 nt, Artificial Sequence
  Description of Artificial Sequence: Synthetic oligonucleotide
uguagaucuguacuuacag

SEQ ID NO: 3231833 - RNA, 19 nt, Artificial Sequence
  Description of Artificial Sequence: Synthetic oligonucleotide
uuccuuugcaacauaacag

SEQ ID NO: 3231834 - RNA, 19 nt, Artificial Sequence
  Description of Artificial Sequence: Synthetic oligonucleotide
uuagaaauuccuuugcaac

SEQ ID NO: 3231835 - RNA, 19 nt, Artificial Sequence
  Description of Artificial Sequence: Synthetic oligonucleotide
uuucauuaaaaggggaugg

SEQ ID NO: 3231836 - RNA, 19 nt, Artificial Sequence
  Description of Artificial Sequence: Synthetic oligonucleotide
gauggagacacggugaugg

SEQ ID NO: 3231837 - RNA, 19 nt, Artificial Sequence
  Description of Artificial Sequence: Synthetic oligonucleotide
auaacagccaacuucagau

SEQ ID NO: 3231838 - RNA, 19 nt, Artificial Sequence
  Description of Artificial Sequence: Synthetic oligonucleotide
aauaagguggacccuucuc

SEQ ID NO: 3231839 - RNA, 19 nt, Artificial Sequence
  Description of Artificial Sequence: Synthetic oligonucleotide
uacuccauaaaucuguuaa

SEQ ID NO: 3231840 - RNA, 19 nt, Artificial Sequence
  Description of Artificial Sequence: Synthetic oligonucleotide
uuauauuuguuucauuaaa

SEQ ID NO: 3231841 - RNA, 19 nt, Artificial Sequence
  Description of Artificial Sequence: Synthetic oligonucleotide
aguuguauugauguaaauc

SEQ ID NO: 3231842 - RNA, 19 nt, Artificial Sequence
  Description of Artificial Sequence: Synthetic oligonucleotide
uugauuagaaauuccuuug

SEQ ID NO: 3231843 - RNA, 19 nt, Artificial Sequence
  Description of Artificial Sequence: Synthetic oligonucleotide
uauauuuguuucauuaaaa

SEQ ID NO: 3231844 - RNA, 19 nt, Artificial Sequence
  Description of Artificial Sequence: Synthetic oligonucleotide
uguaaaucuuagcaaaagu

SEQ ID NO: 3231845 - RNA, 19 nt, Artificial Sequence
  Description of Artificial Sequence: Synthetic oligonucleotide
cuuucaaucacagcuagcc

SEQ ID NO: 3231846 - RNA, 19 nt, Artificial Sequence
  Description of Artificial Sequence: Synthetic oligonucleotide
cauaaaucuguuaaguguc

SEQ ID NO: 3231847 - RNA, 19 nt, Artificial Sequence
  Description of Artificial Sequence: Synthetic oligonucleotide
aacuccauaaccuguagau

SEQ ID NO: 3231848 - RNA, 19 nt, Artificial Sequence
  Description of Artificial Sequence: Synthetic oligonucleotide
ugauguaaaucuuagcaaa

SEQ ID NO: 3231849 - RNA, 19 nt, Artificial Sequence
  Description of Artificial Sequence: Synthetic oligonucleotide
uccuuaguuguauugaugu

SEQ ID NO: 3231850 - RNA, 19 nt, Artificial Sequence
  Description of Artificial Sequence: Synthetic oligonucleotide
aacauaacagccaacuuca

SEQ ID NO: 3231851 - RNA, 19 nt, Artificial Sequence
  Description of Artificial Sequence: Synthetic oligonucleotide
ugauuagaaauuccuuugc

SEQ ID NO: 3231852 - RNA, 19 nt, Artificial Sequence
  Description of Artificial Sequence: Synthetic oligonucleotide
auaaccuguagaucuguac

SEQ ID NO: 3231853 - RNA, 19 nt, Artificial Sequence
  Description of Artificial Sequence: Synthetic oligonucleotide
uagaucuguacuuacaguc

SEQ ID NO: 3231854 - RNA, 19 nt, Artificial Sequence
  Description of Artificial Sequence: Synthetic oligonucleotide
uuguugauuagaaauuccu

SEQ ID NO: 3231855 - RNA, 19 nt, Artificial Sequence
  Description of Artificial Sequence: Synthetic oligonucleotide
uuugcaacauaacagccaa

SEQ ID NO: 3231856 - RNA, 19 nt, Artificial Sequence
  Description of Artificial Sequence: Synthetic oligonucleotide
auuccuuugcaacauaaca

SEQ ID NO: 3231857 - RNA, 19 nt, Artificial Sequence
  Description of Artificial Sequence: Synthetic oligonucleotide
caacacauuacccaggaac

SEQ ID NO: 3231858 - RNA, 19 nt, Artificial Sequence
  Description of Artificial Sequence: Synthetic oligonucleotide
aaugccauugcacuccaga

SEQ ID NO: 3231859 - RNA, 19 nt, Artificial Sequence
  Description of Artificial Sequence: Synthetic oligonucleotide
uccuuugcaacauaacagc

SEQ ID NO: 3231860 - RNA, 19 nt, Artificial Sequence
  Description of Artificial Sequence: Synthetic oligonucleotide
aaagucccacucuuaucgc

SEQ ID NO: 3231861 - RNA, 19 nt, Artificial Sequence
  Description of Artificial Sequence: Synthetic oligonucleotide
guuguauugauguaaaucu

SEQ ID NO: 3231862 - RNA, 19 nt, Artificial Sequence
  Description of Artificial Sequence: Synthetic oligonucleotide
uaaccuguagaucuguacu

SEQ ID NO: 3231863 - RNA, 19 nt, Artificial Sequence
  Description of Artificial Sequence: Synthetic oligonucleotide
uguuaaguguccauggcuc

SEQ ID NO: 3231864 - RNA, 19 nt, Artificial Sequence
  Description of Artificial Sequence: Synthetic oligonucleotide
aacagccaacuucagaugu

SEQ ID NO: 3231865 - RNA, 19 nt, Artificial Sequence
  Description of Artificial Sequence: Synthetic oligonucleotide
uagaaauuccuuugcaaca

SEQ ID NO: 3231866 - RNA, 19 nt, Artificial Sequence
  Description of Artificial Sequence: Synthetic oligonucleotide
aucuguuaaguguccaugg

SEQ ID NO: 3231867 - RNA, 19 nt, Artificial Sequence
  Description of Artificial Sequence: Synthetic oligonucleotide
uccauaaaucuguuaagug

SEQ ID NO: 3231868 - RNA, 19 nt, Artificial Sequence
  Description of Artificial Sequence: Synthetic oligonucleotide
uguacuuacaguccucccu

SEQ ID NO: 3231869 - RNA, 19 nt, Artificial Sequence
  Description of Artificial Sequence: Synthetic oligonucleotide
uaugacccacacuagagca

SEQ ID NO: 3231870 - RNA, 19 nt, Artificial Sequence
  Description of Artificial Sequence: Synthetic oligonucleotide
uguauugauguaaaucuua

SEQ ID NO: 3231871 - RNA, 19 nt, Artificial Sequence
  Description of Artificial Sequence: Synthetic oligonucleotide
cuucuauuauauuuguuuc

SEQ ID NO: 3231872 - RNA, 19 nt, Artificial Sequence
  Description of Artificial Sequence: Synthetic oligonucleotide
ugcauaaauaagguggacc

SEQ ID NO: 3231873 - RNA, 19 nt, Artificial Sequence
  Description of Artificial Sequence: Synthetic oligonucleotide
uucuauuauauuuguuuca

SEQ ID NO: 3231874 - RNA, 19 nt, Artificial Sequence
  Description of Artificial Sequence: Synthetic oligonucleotide
uugauguaaaucuuagcaa

SEQ ID NO: 3231875 - RNA, 19 nt, Artificial Sequence
  Description of Artificial Sequence: Synthetic oligonucleotide
uaaaaggggauggagacac

SEQ ID NO: 3231876 - RNA, 19 nt, Artificial Sequence
  Description of Artificial Sequence: Synthetic oligonucleotide
uguuucauuaaaaggggau

SEQ ID NO: 3231877 - RNA, 19 nt, Artificial Sequence
  Description of Artificial Sequence: Synthetic oligonucleotide
uucaaucacagcuagccaa

SEQ ID NO: 3231878 - RNA, 19 nt, Artificial Sequence
  Description of Artificial Sequence: Synthetic oligonucleotide
caacauaacagccaacuuc

SEQ ID NO: 3231879 - RNA, 19 nt, Artificial Sequence
  Description of Artificial Sequence: Synthetic oligonucleotide
uggcauacuccauaaaucu

SEQ ID NO: 3231880 - RNA, 19 nt, Artificial Sequence
  Description of Artificial Sequence: Synthetic oligonucleotide
auuguugauuagaaauucc

SEQ ID NO: 3231881 - RNA, 19 nt, Artificial Sequence
  Description of Artificial Sequence: Synthetic oligonucleotide
aaaggggauggagacacgg

SEQ ID NO: 3231882 - RNA, 19 nt, Artificial Sequence
  Description of Artificial Sequence: Synthetic oligonucleotide
guaaaucuuagcaaaaguc

SEQ ID NO: 3231883 - RNA, 19 nt, Artificial Sequence
  Description of Artificial Sequence: Synthetic oligonucleotide
uuagcaaaagucccacucu

SEQ ID NO: 3231884 - RNA, 19 nt, Artificial Sequence
  Description of Artificial Sequence: Synthetic oligonucleotide
auuauauuuguuucauuaa

SEQ ID NO: 3231885 - RNA, 19 nt, Artificial Sequence
  Description of Artificial Sequence: Synthetic oligonucleotide
uuaguuguauugauguaaa

SEQ ID NO: 3231886 - RNA, 19 nt, Artificial Sequence
  Description of Artificial Sequence: Synthetic oligonucleotide
auuagaaauuccuuugcaa

SEQ ID NO: 3231887 - RNA, 19 nt, Artificial Sequence
  Description of Artificial Sequence: Synthetic oligonucleotide
agcaucuagugauuguggg

SEQ ID NO: 3231888 - RNA, 19 nt, Artificial Sequence
  Description of Artificial Sequence: Synthetic oligonucleotide
acucuuaucgcuucccaag

SEQ ID NO: 3231889 - RNA, 19 nt, Artificial Sequence
  Description of Artificial Sequence: Synthetic oligonucleotide
aauuccuuugcaacauaac

SEQ ID NO: 3231890 - RNA, 19 nt, Artificial Sequence
  Description of Artificial Sequence: Synthetic oligonucleotide
ucauuaaaaggggauggag

SEQ ID NO: 3231891 - RNA, 19 nt, Artificial Sequence
  Description of Artificial Sequence: Synthetic oligonucleotide
aaucuguuaaguguccaug

SEQ ID NO: 3231892 - RNA, 19 nt, Artificial Sequence
  Description of Artificial Sequence: Synthetic oligonucleotide
gcauaaauaagguggaccc

SEQ ID NO: 3231893 - RNA, 19 nt, Artificial Sequence
  Description of Artificial Sequence: Synthetic oligonucleotide
cuuuacugcagcucagugc

SEQ ID NO: 3231894 - RNA, 19 nt, Artificial Sequence
  Description of Artificial Sequence: Synthetic oligonucleotide
cuuagcaaaagucccacuc

SEQ ID NO: 3231895 - RNA, 19 nt, Artificial Sequence
  Description of Artificial Sequence: Synthetic oligonucleotide
uauugauguaaaucuuagc

SEQ ID NO: 3231896 - RNA, 19 nt, Artificial Sequence
  Description of Artificial Sequence: Synthetic oligonucleotide
ucugcaacuccauaaccug

SEQ ID NO: 3231897 - RNA, 19 nt, Artificial Sequence
  Description of Artificial Sequence: Synthetic oligonucleotide
aaucacagcuagccaauug

SEQ ID NO: 3231898 - RNA, 19 nt, Artificial Sequence
  Description of Artificial Sequence: Synthetic oligonucleotide
caucuagugauugugggcc

SEQ ID NO: 3231899 - RNA, 19 nt, Artificial Sequence
  Description of Artificial Sequence: Synthetic oligonucleotide
ugcaacauaacagccaacu

SEQ ID NO: 3231900 - RNA, 19 nt, Artificial Sequence
  Description of Artificial Sequence: Synthetic oligonucleotide
auaagguggacccuucucu

SEQ ID NO: 3231901 - RNA, 19 nt, Artificial Sequence
  Description of Artificial Sequence: Synthetic oligonucleotide
agcaaugccauugcacucc

SEQ ID NO: 3231902 - RNA, 19 nt, Artificial Sequence
  Description of Artificial Sequence: Synthetic oligonucleotide
ucuguuaaguguccauggc

SEQ ID NO: 3231903 - RNA, 19 nt, Artificial Sequence
  Description of Artificial Sequence: Synthetic oligonucleotide
uccuccaacacauuaccca

SEQ ID NO: 3231904 - RNA, 19 nt, Artificial Sequence
  Description of Artificial Sequence: Synthetic oligonucleotide
uucagauguugccacagcu

SEQ ID NO: 3231905 - RNA, 19 nt, Artificial Sequence
  Description of Artificial Sequence: Synthetic oligonucleotide
aagcaaugccauugcacuc

SEQ ID NO: 3231906 - RNA, 19 nt, Artificial Sequence
  Description of Artificial Sequence: Synthetic oligonucleotide
agaucuguacuuacagucc

SEQ ID NO: 3231907 - RNA, 19 nt, Artificial Sequence
  Description of Artificial Sequence: Synthetic oligonucleotide
acagcuagccaauuguuga

SEQ ID NO: 3231908 - RNA, 19 nt, Artificial Sequence
  Description of Artificial Sequence: Synthetic oligonucleotide
gauuagaaauuccuuugca

SEQ ID NO: 3231909 - RNA, 19 nt, Artificial Sequence
  Description of Artificial Sequence: Synthetic oligonucleotide
cacacuagagcaucuagug

SEQ ID NO: 3231910 - RNA, 19 nt, Artificial Sequence
  Description of Artificial Sequence: Synthetic oligonucleotide
auaaaucuguuaagugucc

SEQ ID NO: 3231911 - RNA, 19 nt, Artificial Sequence
  Description of Artificial Sequence: Synthetic oligonucleotide
uuacccaggaaccucugca

SEQ ID NO: 3231912 - RNA, 19 nt, Artificial Sequence
  Description of Artificial Sequence: Synthetic oligonucleotide
ucuauuauauuuguuucau

SEQ ID NO: 3231913 - RNA, 19 nt, Artificial Sequence
  Description of Artificial Sequence: Synthetic oligonucleotide
acaguccucccuaugaccc

SEQ ID NO: 3231914 - RNA, 19 nt, Artificial Sequence
  Description of Artificial Sequence: Synthetic oligonucleotide
ucagugcauaaauaaggug

SEQ ID NO: 3231915 - RNA, 19 nt, Artificial Sequence
  Description of Artificial Sequence: Synthetic oligonucleotide
ucuuccucuuccuuaguug

SEQ ID NO: 3231916 - RNA, 19 nt, Artificial Sequence
  Description of Artificial Sequence: Synthetic oligonucleotide
aucacagcuagccaauugu

SEQ ID NO: 3231917 - RNA, 19 nt, Artificial Sequence
  Description of Artificial Sequence: Synthetic oligonucleotide
aacucguaaagucugagcc

SEQ ID NO: 3231918 - RNA, 19 nt, Artificial Sequence
  Description of Artificial Sequence: Synthetic oligonucleotide
aauaccagcaaugagagag

SEQ ID NO: 3231919 - RNA, 19 nt, Artificial Sequence
  Description of Artificial Sequence: Synthetic oligonucleotide
aucucuuucaugcaaagcc

SEQ ID NO: 3231920 - RNA, 19 nt, Artificial Sequence
  Description of Artificial Sequence: Synthetic oligonucleotide
uaaccaauaaauuaaaacu

SEQ ID NO: 3231921 - RNA, 19 nt, Artificial Sequence
  Description of Artificial Sequence: Synthetic oligonucleotide
uuugaaucaaaauacauaa

SEQ ID NO: 3231922 - RNA, 19 nt, Artificial Sequence
  Description of Artificial Sequence: Synthetic oligonucleotide
uuaaccaauaaauuaaaac

SEQ ID NO: 3231923 - RNA, 19 nt, Artificial Sequence
  Description of Artificial Sequence: Synthetic oligonucleotide
ugugauuggaccaucaucu

SEQ ID NO: 3231924 - RNA, 19 nt, Artificial Sequence
  Description of Artificial Sequence: Synthetic oligonucleotide
aauaccaacgcuaacagca

SEQ ID NO: 3231925 - RNA, 19 nt, Artificial Sequence
  Description of Artificial Sequence: Synthetic oligonucleotide
gacgcaaugacugauaaag

SEQ ID NO: 3231926 - RNA, 19 nt, Artificial Sequence
  Description of Artificial Sequence: Synthetic oligonucleotide
ucacagauugccaacauca

SEQ ID NO: 3231927 - RNA, 19 nt, Artificial Sequence
  Description of Artificial Sequence: Synthetic oligonucleotide
acuaguuaggccuucaaug

SEQ ID NO: 3231928 - RNA, 19 nt, Artificial Sequence
  Description of Artificial Sequence: Synthetic oligonucleotide
uugcaaauuucucagaacu

SEQ ID NO: 3231929 - RNA, 19 nt, Artificial Sequence
  Description of Artificial Sequence: Synthetic oligonucleotide
ugacacaccucacagauug

SEQ ID NO: 3231930 - RNA, 19 nt, Artificial Sequence
  Description of Artificial Sequence: Synthetic oligonucleotide
aaccccauaaacauaugcc

SEQ ID NO: 3231931 - RNA, 19 nt, Artificial Sequence
  Description of Artificial Sequence: Synthetic oligonucleotide
agagaaauggguacaaccc

SEQ ID NO: 3231932 - RNA, 19 nt, Artificial Sequence
  Description of Artificial Sequence: Synthetic oligonucleotide
ucaauaauauguuagcaua

SEQ ID NO: 3231933 - RNA, 19 nt, Artificial Sequence
  Description of Artificial Sequence: Synthetic oligonucleotide
aucuucuucuuccggaucc

SEQ ID NO: 3231934 - RNA, 19 nt, Artificial Sequence
  Description of Artificial Sequence: Synthetic oligonucleotide
accagagaaucuuugaauc

SEQ ID NO: 3231935 - RNA, 19 nt, Artificial Sequence
  Description of Artificial Sequence: Synthetic oligonucleotide
aaaugugucaucaauaaua

SEQ ID NO: 3231936 - RNA, 19 nt, Artificial Sequence
  Description of Artificial Sequence: Synthetic oligonucleotide
uuugacacaccucacagau

SEQ ID NO: 3231937 - RNA, 19 nt, Artificial Sequence
  Description of Artificial Sequence: Synthetic oligonucleotide
uuccaaaagaugcaguuac

SEQ ID NO: 3231938 - RNA, 19 nt, Artificial Sequence
  Description of Artificial Sequence: Synthetic oligonucleotide
aaauuucucagaacuuccc

SEQ ID NO: 3231939 - RNA, 19 nt, Artificial Sequence
  Description of Artificial Sequence: Synthetic oligonucleotide
guaagcacuacaucguggg

SEQ ID NO: 3231940 - RNA, 19 nt, Artificial Sequence
  Description of Artificial Sequence: Synthetic oligonucleotide
aggaacugauuauggaacc

SEQ ID NO: 3231941 - RNA, 19 nt, Artificial Sequence
  Description of Artificial Sequence: Synthetic oligonucleotide
cuaacagcagcaaucacug

SEQ ID NO: 3231942 - RNA, 19 nt, Artificial Sequence
  Description of Artificial Sequence: Synthetic oligonucleotide
aauggguacaaccccauaa

SEQ ID NO: 3231943 - RNA, 19 nt, Artificial Sequence
  Description of Artificial Sequence: Synthetic oligonucleotide
auugcaaauuucucagaac

SEQ ID NO: 3231944 - RNA, 19 nt, Artificial Sequence
  Description of Artificial Sequence: Synthetic oligonucleotide
ugcacuucuaaccugcugu

SEQ ID NO: 3231945 - RNA, 19 nt, Artificial Sequence
  Description of Artificial Sequence: Synthetic oligonucleotide
uuguucacagcuuuggugu

SEQ ID NO: 3231946 - RNA, 19 nt, Artificial Sequence
  Description of Artificial Sequence: Synthetic oligonucleotide
uccacaaccaccuccacga

SEQ ID NO: 3231947 - RNA, 19 nt, Artificial Sequence
  Description of Artificial Sequence: Synthetic oligonucleotide
uaaugcaagucagagaucu

SEQ ID NO: 3231948 - RNA, 19 nt, Artificial Sequence
  Description of Artificial Sequence: Synthetic oligonucleotide
uacaauauacacacauaca

SEQ ID NO: 3231949 - RNA, 19 nt, Artificial Sequence
  Description of Artificial Sequence: Synthetic oligonucleotide
aauaauauguuagcauaca

SEQ ID NO: 3231950 - RNA, 19 nt, Artificial Sequence
  Description of Artificial Sequence: Synthetic oligonucleotide
agugacuugguuuggcuuc

SEQ ID NO: 3231951 - RNA, 19 nt, Artificial Sequence
  Description of Artificial Sequence: Synthetic oligonucleotide
acucguaaagucugagccc

SEQ ID NO: 3231952 - RNA, 19 nt, Artificial Sequence
  Description of Artificial Sequence: Synthetic oligonucleotide
agcauaaccgcagucaggg

SEQ ID NO: 3231953 - RNA, 19 nt, Artificial Sequence
  Description of Artificial Sequence: Synthetic oligonucleotide
auaaacauaugccagcaua

SEQ ID NO: 3231954 - RNA, 19 nt, Artificial Sequence
  Description of Artificial Sequence: Synthetic oligonucleotide
ucggcuugcacuucuaacc

SEQ ID NO: 3231955 - RNA, 19 nt, Artificial Sequence
  Description of Artificial Sequence: Synthetic oligonucleotide
caauaauauguuagcauac

SEQ ID NO: 3231956 - RNA, 19 nt, Artificial Sequence
  Description of Artificial Sequence: Synthetic oligonucleotide
agcauggacgugcagagag

SEQ ID NO: 3231957 - RNA, 19 nt, Artificial Sequence
  Description of Artificial Sequence: Synthetic oligonucleotide
acugaguccgucuguaggg

SEQ ID NO: 3231958 - RNA, 19 nt, Artificial Sequence
  Description of Artificial Sequence: Synthetic oligonucleotide
augacugauaaagucacuc

SEQ ID NO: 3231959 - RNA, 19 nt, Artificial Sequence
  Description of Artificial Sequence: Synthetic oligonucleotide
acuugguuuggcuucaaug

SEQ ID NO: 3231960 - RNA, 19 nt, Artificial Sequence
  Description of Artificial Sequence: Synthetic oligonucleotide
aaccaauaaauuaaaacua

SEQ ID NO: 3231961 - RNA, 19 nt, Artificial Sequence
  Description of Artificial Sequence: Synthetic oligonucleotide
caauaaauuaaaacuaaaa

SEQ ID NO: 3231962 - RNA, 19 nt, Artificial Sequence
  Description of Artificial Sequence: Synthetic oligonucleotide
aguuuaaccaauaaauuaa

SEQ ID NO: 3231963 - RNA, 19 nt, Artificial Sequence
  Description of Artificial Sequence: Synthetic oligonucleotide
gaucaaugugcccaacugc

SEQ ID NO: 3231964 - RNA, 19 nt, Artificial Sequence
  Description of Artificial Sequence: Synthetic oligonucleotide
uaaagucugagcccucugc

SEQ ID NO: 3231965 - RNA, 19 nt, Artificial Sequence
  Description of Artificial Sequence: Synthetic oligonucleotide
aaagucugagcccucugcu

SEQ ID NO: 3231966 - RNA, 19 nt, Artificial Sequence
  Description of Artificial Sequence: Synthetic oligonucleotide
cucauaucuacugugaauc

SEQ ID NO: 3231967 - RNA, 19 nt, Artificial Sequence
  Description of Artificial Sequence: Synthetic oligonucleotide
ugacugauaaagucacucc

SEQ ID NO: 3231968 - RNA, 19 nt, Artificial Sequence
  Description of Artificial Sequence: Synthetic oligonucleotide
aauguaagcacuacaucgu

SEQ ID NO: 3231969 - RNA, 19 nt, Artificial Sequence
  Description of Artificial Sequence: Synthetic oligonucleotide
cauaaauccccaucccucc

SEQ ID NO: 3231970 - RNA, 19 nt, Artificial Sequence
  Description of Artificial Sequence: Synthetic oligonucleotide
gacagagagaaauggguac

SEQ ID NO: 3231971 - RNA, 19 nt, Artificial Sequence
  Description of Artificial Sequence: Synthetic oligonucleotide
auaaauccccaucccuccc

SEQ ID NO: 3231972 - RNA, 19 nt, Artificial Sequence
  Description of Artificial Sequence: Synthetic oligonucleotide
gaacugauuauggaaccgg

SEQ ID NO: 3231973 - RNA, 19 nt, Artificial Sequence
  Description of Artificial Sequence: Synthetic oligonucleotide
uguuagcauacauacaaua

SEQ ID NO: 3231974 - RNA, 19 nt, Artificial Sequence
  Description of Artificial Sequence: Synthetic oligonucleotide
uuagcuuugggcagcuggc

SEQ ID NO: 3231975 - RNA, 19 nt, Artificial Sequence
  Description of Artificial Sequence: Synthetic oligonucleotide
ugugcugacuccacaacca

SEQ ID NO: 3231976 - RNA, 19 nt, Artificial Sequence
  Description of Artificial Sequence: Synthetic oligonucleotide
uuuccauuggcugugcuga

SEQ ID NO: 3231977 - RNA, 19 nt, Artificial Sequence
  Description of Artificial Sequence: Synthetic oligonucleotide
uccgaacucguaaagucug

SEQ ID NO: 3231978 - RNA, 19 nt, Artificial Sequence
  Description of Artificial Sequence: Synthetic oligonucleotide
aggggcauccucuucauug

SEQ ID NO: 3231979 - RNA, 19 nt, Artificial Sequence
  Description of Artificial Sequence: Synthetic oligonucleotide
aaagucacuccuccuguga

SEQ ID NO: 3231980 - RNA, 19 nt, Artificial Sequence
  Description of Artificial Sequence: Synthetic oligonucleotide
caggaauugcaauaccagc

SEQ ID NO: 3231981 - RNA, 19 nt, Artificial Sequence
  Description of Artificial Sequence: Synthetic oligonucleotide
ucuaggucacugcggaugc

SEQ ID NO: 3231982 - RNA, 19 nt, Artificial Sequence
  Description of Artificial Sequence: Synthetic oligonucleotide
accccauaaacauaugcca

SEQ ID NO: 3231983 - RNA, 19 nt, Artificial Sequence
  Description of Artificial Sequence: Synthetic oligonucleotide
ugucguguggguugaggcg

SEQ ID NO: 3231984 - RNA, 19 nt, Artificial Sequence
  Description of Artificial Sequence: Synthetic oligonucleotide
auaaagucacuccuccugu

SEQ ID NO: 3231985 - RNA, 19 nt, Artificial Sequence
  Description of Artificial Sequence: Synthetic oligonucleotide
cuuugaaucaaaauacaua

SEQ ID NO: 3231986 - RNA, 19 nt, Artificial Sequence
  Description of Artificial Sequence: Synthetic oligonucleotide
ggaaaauuuccuuuuggac

SEQ ID NO: 3231987 - RNA, 19 nt, Artificial Sequence
  Description of Artificial Sequence: Synthetic oligonucleotide
uguuucacuguaagggccu

SEQ ID NO: 3231988 - RNA, 19 nt, Artificial Sequence
  Description of Artificial Sequence: Synthetic oligonucleotide
ugucacuaauugcaccaag

SEQ ID NO: 3231989 - RNA, 19 nt, Artificial Sequence
  Description of Artificial Sequence: Synthetic oligonucleotide
gaacucguaaagucugagc

SEQ ID NO: 3231990 - RNA, 19 nt, Artificial Sequence
  Description of Artificial Sequence: Synthetic oligonucleotide
ugccauauuugcuugcagu

SEQ ID NO: 3231991 - RNA, 19 nt, Artificial Sequence
  Description of Artificial Sequence: Synthetic oligonucleotide
cagccauaggcaauaacag

SEQ ID NO: 3231992 - RNA, 19 nt, Artificial Sequence
  Description of Artificial Sequence: Synthetic oligonucleotide
ugaagugaugucuggcaca

SEQ ID NO: 3231993 - RNA, 19 nt, Artificial Sequence
  Description of Artificial Sequence: Synthetic oligonucleotide
ucuuguggguuguaggaac

SEQ ID NO: 3231994 - RNA, 19 nt, Artificial Sequence
  Description of Artificial Sequence: Synthetic oligonucleotide
aagcacuacaucgugggca

SEQ ID NO: 3231995 - RNA, 19 nt, Artificial Sequence
  Description of Artificial Sequence: Synthetic oligonucleotide
uuggaugccauauuugcuu

SEQ ID NO: 3231996 - RNA, 19 nt, Artificial Sequence
  Description of Artificial Sequence: Synthetic oligonucleotide
gguaaugcaagucagagau

SEQ ID NO: 3231997 - RNA, 19 nt, Artificial Sequence
  Description of Artificial Sequence: Synthetic oligonucleotide
guuguaggaacugauuaug

SEQ ID NO: 3231998 - RNA, 19 nt, Artificial Sequence
  Description of Artificial Sequence: Synthetic oligonucleotide
uccacgacagagagaaaug

SEQ ID NO: 3231999 - RNA, 19 nt, Artificial Sequence
  Description of Artificial Sequence: Synthetic oligonucleotide
ccugugauggccaaauucc

SEQ ID NO: 3232000 - RNA, 19 nt, Artificial Sequence
  Description of Artificial Sequence: Synthetic oligonucleotide
acagguuagcuuugggcag

SEQ ID NO: 3232001 - RNA, 19 nt, Artificial Sequence
  Description of Artificial Sequence: Synthetic oligonucleotide
acaacaagugugcuucuca

SEQ ID NO: 3232002 - RNA, 19 nt, Artificial Sequence
  Description of Artificial Sequence: Synthetic oligonucleotide
uuucccuugccgcuggaga

SEQ ID NO: 3232003 - RNA, 19 nt, Artificial Sequence
  Description of Artificial Sequence: Synthetic oligonucleotide
ugauuggaccaucaucuuc

SEQ ID NO: 3232004 - RNA, 19 nt, Artificial Sequence
  Description of Artificial Sequence: Synthetic oligonucleotide
acaaccaccuccacgacag

SEQ ID NO: 3232005 - RNA, 19 nt, Artificial Sequence
  Description of Artificial Sequence: Synthetic oligonucleotide
cacagguuagcuuugggca

SEQ ID NO: 3232006 - RNA, 19 nt, Artificial Sequence
  Description of Artificial Sequence: Synthetic oligonucleotide
uaaauccccaucccucccc

SEQ ID NO: 3232007 - RNA, 19 nt, Artificial Sequence
  Description of Artificial Sequence: Synthetic oligonucleotide
aggaauugcaauaccagca

SEQ ID NO: 3232008 - RNA, 19 nt, Artificial Sequence
  Description of Artificial Sequence: Synthetic oligonucleotide
caguuuaaccaauaaauua

SEQ ID NO: 3232009 - RNA, 19 nt, Artificial Sequence
  Description of Artificial Sequence: Synthetic oligonucleotide
agaucucuuucaugcaaag

SEQ ID NO: 3232010 - RNA, 19 nt, Artificial Sequence
  Description of Artificial Sequence: Synthetic oligonucleotide
aagucugagcccucugcug

SEQ ID NO: 3232011 - RNA, 19 nt, Artificial Sequence
  Description of Artificial Sequence: Synthetic oligonucleotide
gagaccugaagugugcuug

SEQ ID NO: 3232012 - RNA, 19 nt, Artificial Sequence
  Description of Artificial Sequence: Synthetic oligonucleotide
uugggcagcuggcacagcc

SEQ ID NO: 3232013 - RNA, 19 nt, Artificial Sequence
  Description of Artificial Sequence: Synthetic oligonucleotide
uacagcuuccaucauucau

SEQ ID NO: 3232014 - RNA, 19 nt, Artificial Sequence
  Description of Artificial Sequence: Synthetic oligonucleotide
ucuguagggcucccacugg

SEQ ID NO: 3232015 - RNA, 19 nt, Artificial Sequence
  Description of Artificial Sequence: Synthetic oligonucleotide
uacaucgugggcauggcuu

SEQ ID NO: 3232016 - RNA, 19 nt, Artificial Sequence
  Description of Artificial Sequence: Synthetic oligonucleotide
cugaagugugcuugguccg

SEQ ID NO: 3232017 - RNA, 19 nt, Artificial Sequence
  Description of Artificial Sequence: Synthetic oligonucleotide
ucauguauaaggaaugucg

SEQ ID NO: 3232018 - RNA, 19 nt, Artificial Sequence
  Description of Artificial Sequence: Synthetic oligonucleotide
aacaagaaugaaugaaugc

SEQ ID NO: 3232019 - RNA, 19 nt, Artificial Sequence
  Description of Artificial Sequence: Synthetic oligonucleotide
uuacuuaaaacccagguga

SEQ ID NO: 3232020 - RNA, 19 nt, Artificial Sequence
  Description of Artificial Sequence: Synthetic oligonucleotide
aucauuuuacuuaaaaccc

SEQ ID NO: 3232021 - RNA, 19 nt, Artificial Sequence
  Description of Artificial Sequence: Synthetic oligonucleotide
gauguugagagcaucaugg

SEQ ID NO: 3232022 - RNA, 19 nt, Artificial Sequence
  Description of Artificial Sequence: Synthetic oligonucleotide
aaaaugaccauggaucugg

SEQ ID NO: 3232023 - RNA, 19 nt, Artificial Sequence
  Description of Artificial Sequence: Synthetic oligonucleotide
ugaauuuuaaccuggaaua

SEQ ID NO: 3232024 - RNA, 19 nt, Artificial Sequence
  Description of Artificial Sequence: Synthetic oligonucleotide
aaugagcaguaacagcagc

SEQ ID NO: 3232025 - RNA, 19 nt, Artificial Sequence
  Description of Artificial Sequence: Synthetic oligonucleotide
acauucgcugauuaagucc

SEQ ID NO: 3232026 - RNA, 19 nt, Artificial Sequence
  Description of Artificial Sequence: Synthetic oligonucleotide
aauaaaacugagaaguugu

SEQ ID NO: 3232027 - RNA, 19 nt, Artificial Sequence
  Description of Artificial Sequence: Synthetic oligonucleotide
acugauguggcauggacgg

SEQ ID NO: 3232028 - RNA, 19 nt, Artificial Sequence
  Description of Artificial Sequence: Synthetic oligonucleotide
gaguugaagagcuugucgg

SEQ ID NO: 3232029 - RNA, 19 nt, Artificial Sequence
  Description of Artificial Sequence: Synthetic oligonucleotide
aaugcaagaagcgccuucc

SEQ ID NO: 3232030 - RNA, 19 nt, Artificial Sequence
  Description of Artificial Sequence: Synthetic oligonucleotide
uggucaaacauccauccag

SEQ ID NO: 3232031 - RNA, 19 nt, Artificial Sequence
  Description of Artificial Sequence: Synthetic oligonucleotide
cuaaugagcaguaacagca

SEQ ID NO: 3232032 - RNA, 19 nt, Artificial Sequence
  Description of Artificial Sequence: Synthetic oligonucleotide
cauguauaaggaaugucgg

SEQ ID NO: 3232033 - RNA, 19 nt, Artificial Sequence
  Description of Artificial Sequence: Synthetic oligonucleotide
uuggcaaacuuacucagcc

SEQ ID NO: 3232034 - RNA, 19 nt, Artificial Sequence
  Description of Artificial Sequence: Synthetic oligonucleotide
ugaucuguaggugauaggc

SEQ ID NO: 3232035 - RNA, 19 nt, Artificial Sequence
  Description of Artificial Sequence: Synthetic oligonucleotide
ugaaugaaugcaagagggg

SEQ ID NO: 3232036 - RNA, 19 nt, Artificial Sequence
  Description of Artificial Sequence: Synthetic oligonucleotide
gacaacuaacugaauaugg

SEQ ID NO: 3232037 - RNA, 19 nt, Artificial Sequence
  Description of Artificial Sequence: Synthetic oligonucleotide
uaauucaccacuugguaca

SEQ ID NO: 3232038 - RNA, 19 nt, Artificial Sequence
  Description of Artificial Sequence: Synthetic oligonucleotide
acaguuuuggcaaacuuac

SEQ ID NO: 3232039 - RNA, 19 nt, Artificial Sequence
  Description of Artificial Sequence: Synthetic oligonucleotide
aaaauguucucuccugagu

SEQ ID NO: 3232040 - RNA, 19 nt, Artificial Sequence
  Description of Artificial Sequence: Synthetic oligonucleotide
acaacuaacugaauauggc

SEQ ID NO: 3232041 - RNA, 19 nt, Artificial Sequence
  Description of Artificial Sequence: Synthetic oligonucleotide
acaagaaugaaugaaugca

SEQ ID NO: 3232042 - RNA, 19 nt, Artificial Sequence
  Description of Artificial Sequence: Synthetic oligonucleotide
uacugauguggcauggacg

SEQ ID NO: 3232043 - RNA, 19 nt, Artificial Sequence
  Description of Artificial Sequence: Synthetic oligonucleotide
cugauuaaguccuuaauca

SEQ ID NO: 3232044 - RNA, 19 nt, Artificial Sequence
  Description of Artificial Sequence: Synthetic oligonucleotide
ugcgacauugggaagaggu

SEQ ID NO: 3232045 - RNA, 19 nt, Artificial Sequence
  Description of Artificial Sequence: Synthetic oligonucleotide
uaauccauuuugaaugaca

SEQ ID NO: 3232046 - RNA, 19 nt, Artificial Sequence
  Description of Artificial Sequence: Synthetic oligonucleotide
gauaggaugacuccuggca

SEQ ID NO: 3232047 - RNA, 19 nt, Artificial Sequence
  Description of Artificial Sequence: Synthetic oligonucleotide
uuaccaaccagugaagggc

SEQ ID NO: 3232048 - RNA, 19 nt, Artificial Sequence
  Description of Artificial Sequence: Synthetic oligonucleotide
aucuguaacaugugcuuac

SEQ ID NO: 3232049 - RNA, 19 nt, Artificial Sequence
  Description of Artificial Sequence: Synthetic oligonucleotide
ugcucuaggagaacaguag

SEQ ID NO: 3232050 - RNA, 19 nt, Artificial Sequence
  Description of Artificial Sequence: Synthetic oligonucleotide
guugcccugagcuuggagg

SEQ ID NO: 3232051 - RNA, 19 nt, Artificial Sequence
  Description of Artificial Sequence: Synthetic oligonucleotide
ugggaaacagaaaauucac

SEQ ID NO: 3232052 - RNA, 19 nt, Artificial Sequence
  Description of Artificial Sequence: Synthetic oligonucleotide
acuccuggcagccuggacg

SEQ ID NO: 3232053 - RNA, 19 nt, Artificial Sequence
  Description of Artificial Sequence: Synthetic oligonucleotide
agaggcugcucccacgucc

SEQ ID NO: 3232054 - RNA, 19 nt, Artificial Sequence
  Description of Artificial Sequence: Synthetic oligonucleotide
cuuaccaaccagugaaggg

SEQ ID NO: 3232055 - RNA, 19 nt, Artificial Sequence
  Description of Artificial Sequence: Synthetic oligonucleotide
uucucagcuagacuguagc

SEQ ID NO: 3232056 - RNA, 19 nt, Artificial Sequence
  Description of Artificial Sequence: Synthetic oligonucleotide
uucacugggugauaggaug

SEQ ID NO: 3232057 - RNA, 19 nt, Artificial Sequence
  Description of Artificial Sequence: Synthetic oligonucleotide
aguuucuuuguacauauuu

SEQ ID NO: 3232058 - RNA, 19 nt, Artificial Sequence
  Description of Artificial Sequence: Synthetic oligonucleotide
aaggguacagcagggcugc

SEQ ID NO: 3232059 - RNA, 19 nt, Artificial Sequence
  Description of Artificial Sequence: Synthetic oligonucleotide
uagaaagcgugcuugguga

SEQ ID NO: 3232060 - RNA, 19 nt, Artificial Sequence
  Description of Artificial Sequence: Synthetic oligonucleotide
accucagcugcauggagcc

SEQ ID NO: 3232061 - RNA, 19 nt, Artificial Sequence
  Description of Artificial Sequence: Synthetic oligonucleotide
caguagaacaguaauucac

SEQ ID NO: 3232062 - RNA, 19 nt, Artificial Sequence
  Description of Artificial Sequence: Synthetic oligonucleotide
caacaagaaugaaugaaug

SEQ ID NO: 3232063 - RNA, 19 nt, Artificial Sequence
  Description of Artificial Sequence: Synthetic oligonucleotide
aggaauccuacuuagcaca

SEQ ID NO: 3232064 - RNA, 19 nt, Artificial Sequence
  Description of Artificial Sequence: Synthetic oligonucleotide
acuugguacaacuguugac

SEQ ID NO: 3232065 - RNA, 19 nt, Artificial Sequence
  Description of Artificial Sequence: Synthetic oligonucleotide
ucgcauguauagcacauug

SEQ ID NO: 3232066 - RNA, 19 nt, Artificial Sequence
  Description of Artificial Sequence: Synthetic oligonucleotide
uccagggaugcaaaggacc

SEQ ID NO: 3232067 - RNA, 19 nt, Artificial Sequence
  Description of Artificial Sequence: Synthetic oligonucleotide
ucgguaaauauuccauuug

SEQ ID NO: 3232068 - RNA, 19 nt, Artificial Sequence
  Description of Artificial Sequence: Synthetic oligonucleotide
gaaguugucagcugguguc

SEQ ID NO: 3232069 - RNA, 19 nt, Artificial Sequence
  Description of Artificial Sequence: Synthetic oligonucleotide
acuccucucgucaaguucc

SEQ ID NO: 3232070 - RNA, 19 nt, Artificial Sequence
  Description of Artificial Sequence: Synthetic oligonucleotide
caugguuacuccacugugg

SEQ ID NO: 3232071 - RNA, 19 nt, Artificial Sequence
  Description of Artificial Sequence: Synthetic oligonucleotide
ucuuuguacauauuuccau

SEQ ID NO: 3232072 - RNA, 19 nt, Artificial Sequence
  Description of Artificial Sequence: Synthetic oligonucleotide
uaaugagcaguaacagcag

SEQ ID NO: 3232073 - RNA, 19 nt, Artificial Sequence
  Description of Artificial Sequence: Synthetic oligonucleotide
uguugacaauaaaacugag

SEQ ID NO: 3232074 - RNA, 19 nt, Artificial Sequence
  Description of Artificial Sequence: Synthetic oligonucleotide
acagacgcgcuuugcaggc

SEQ ID NO: 3232075 - RNA, 19 nt, Artificial Sequence
  Description of Artificial Sequence: Synthetic oligonucleotide
gauuguauuaagcugucgu

SEQ ID NO: 3232076 - RNA, 19 nt, Artificial Sequence
  Description of Artificial Sequence: Synthetic oligonucleotide
aguagcucugcucacacau

SEQ ID NO: 3232077 - RNA, 19 nt, Artificial Sequence
  Description of Artificial Sequence: Synthetic oligonucleotide
auggagccagaucugugcc

SEQ ID NO: 3232078 - RNA, 19 nt, Artificial Sequence
  Description of Artificial Sequence: Synthetic oligonucleotide
acugcagauccauucacug

SEQ ID NO: 3232079 - RNA, 19 nt, Artificial Sequence
  Description of Artificial Sequence: Synthetic oligonucleotide
gucgaguucaccugcacug

SEQ ID NO: 3232080 - RNA, 19 nt, Artificial Sequence
  Description of Artificial Sequence: Synthetic oligonucleotide
cauggagccagaucugugc

SEQ ID NO: 3232081 - RNA, 19 nt, Artificial Sequence
  Description of Artificial Sequence: Synthetic oligonucleotide
ucugcucacacaugccccg

SEQ ID NO: 3232082 - RNA, 19 nt, Artificial Sequence
  Description of Artificial Sequence: Synthetic oligonucleotide
ucgaaguuuccucggagcu

SEQ ID NO: 3232083 - RNA, 19 nt, Artificial Sequence
  Description of Artificial Sequence: Synthetic oligonucleotide
aaagcgugcuuggugaucu

SEQ ID NO: 3232084 - RNA, 19 nt, Artificial Sequence
  Description of Artificial Sequence: Synthetic oligonucleotide
cauauauugguaaaauaua

SEQ ID NO: 3232085 - RNA, 19 nt, Artificial Sequence
  Description of Artificial Sequence: Synthetic oligonucleotide
uggcuauugucauucgcag

SEQ ID NO: 3232086 - RNA, 19 nt, Artificial Sequence
  Description of Artificial Sequence: Synthetic oligonucleotide
uuugcaggcugaugaggcg

SEQ ID NO: 3232087 - RNA, 19 nt, Artificial Sequence
  Description of Artificial Sequence: Synthetic oligonucleotide
cuguugacaauaaaacuga

SEQ ID NO: 3232088 - RNA, 19 nt, Artificial Sequence
  Description of Artificial Sequence: Synthetic oligonucleotide
ugcacugcaucccggagga

SEQ ID NO: 3232089 - RNA, 19 nt, Artificial Sequence
  Description of Artificial Sequence: Synthetic oligonucleotide
uguauagcacauugugcga

SEQ ID NO: 3232090 - RNA, 19 nt, Artificial Sequence
  Description of Artificial Sequence: Synthetic oligonucleotide
aacgacaguuuuggcaaac

SEQ ID NO: 3232091 - RNA, 19 nt, Artificial Sequence
  Description of Artificial Sequence: Synthetic oligonucleotide
ugauguggcauggacggag

SEQ ID NO: 3232092 - RNA, 19 nt, Artificial Sequence
  Description of Artificial Sequence: Synthetic oligonucleotide
ucugggccccggcagagcg

SEQ ID NO: 3232093 - RNA, 19 nt, Artificial Sequence
  Description of Artificial Sequence: Synthetic oligonucleotide
aguaaaucauagaccacag

SEQ ID NO: 3232094 - RNA, 19 nt, Artificial Sequence
  Description of Artificial Sequence: Synthetic oligonucleotide
gaugaucaggguuggcaug

SEQ ID NO: 3232095 - RNA, 19 nt, Artificial Sequence
  Description of Artificial Sequence: Synthetic oligonucleotide
augagcaguaacagcagcg

SEQ ID NO: 3232096 - RNA, 19 nt, Artificial Sequence
  Description of Artificial Sequence: Synthetic oligonucleotide
augaucaggguuggcaugg

SEQ ID NO: 3232097 - RNA, 19 nt, Artificial Sequence
  Description of Artificial Sequence: Synthetic oligonucleotide
uaaaauuuucuggguauuc

SEQ ID NO: 3232098 - RNA, 19 nt, Artificial Sequence
  Description of Artificial Sequence: Synthetic oligonucleotide
aauucacauuugguuuugg

SEQ ID NO: 3232099 - RNA, 19 nt, Artificial Sequence
  Description of Artificial Sequence: Synthetic oligonucleotide
agagcuagguagccuuugg

SEQ ID NO: 3232100 - RNA, 19 nt, Artificial Sequence
  Description of Artificial Sequence: Synthetic oligonucleotide
cuucauaccaccgccgggc

SEQ ID NO: 3232101 - RNA, 19 nt, Artificial Sequence
  Description of Artificial Sequence: Synthetic oligonucleotide
auaaaacugagaaguuguc

SEQ ID NO: 3232102 - RNA, 19 nt, Artificial Sequence
  Description of Artificial Sequence: Synthetic oligonucleotide
augguuacuccacuguggu

SEQ ID NO: 3232103 - RNA, 19 nt, Artificial Sequence
  Description of Artificial Sequence: Synthetic oligonucleotide
ucuggagauggcgagcugc

SEQ ID NO: 3232104 - RNA, 19 nt, Artificial Sequence
  Description of Artificial Sequence: Synthetic oligonucleotide
aaaugaccauggaucuggc

SEQ ID NO: 3232105 - RNA, 19 nt, Artificial Sequence
  Description of Artificial Sequence: Synthetic oligonucleotide
agcgucaguagcuugcaga

SEQ ID NO: 3232106 - RNA, 19 nt, Artificial Sequence
  Description of Artificial Sequence: Synthetic oligonucleotide
gcugauuaaguccuuaauc

SEQ ID NO: 3232107 - RNA, 19 nt, Artificial Sequence
  Description of Artificial Sequence: Synthetic oligonucleotide
gucaaacauccauccaggg

SEQ ID NO: 3232108 - RNA, 19 nt, Artificial Sequence
  Description of Artificial Sequence: Synthetic oligonucleotide
gaaguuucuuuguacauau

SEQ ID NO: 3232109 - RNA, 19 nt, Artificial Sequence
  Description of Artificial Sequence: Synthetic oligonucleotide
ugucgucugucagcgaugg

SEQ ID NO: 3232110 - RNA, 19 nt, Artificial Sequence
  Description of Artificial Sequence: Synthetic oligonucleotide
gugauaggaugacuccugg

SEQ ID NO: 3232111 - RNA, 19 nt, Artificial Sequence
  Description of Artificial Sequence: Synthetic oligonucleotide
uacauucgcugauuaaguc

SEQ ID NO: 3232112 - RNA, 19 nt, Artificial Sequence
  Description of Artificial Sequence: Synthetic oligonucleotide
aaugaccauggaucuggca

SEQ ID NO: 3232113 - RNA, 19 nt, Artificial Sequence
  Description of Artificial Sequence: Synthetic oligonucleotide
auaauccauuuugaaugac

SEQ ID NO: 3232114 - RNA, 19 nt, Artificial Sequence
  Description of Artificial Sequence: Synthetic oligonucleotide
auggauaaggcuucuucau

SEQ ID NO: 3232115 - RNA, 19 nt, Artificial Sequence
  Description of Artificial Sequence: Synthetic oligonucleotide
gacaacaggagagcgagga

SEQ ID NO: 3232116 - RNA, 19 nt, Artificial Sequence
  Description of Artificial Sequence: Synthetic oligonucleotide
gaaguuuccucggagcuca

SEQ ID NO: 3232117 - RNA, 19 nt, Artificial Sequence
  Description of Artificial Sequence: Synthetic oligonucleotide
aauauaacuaacuagguuc

SEQ ID NO: 3232118 - RNA, 19 nt, Artificial Sequence
  Description of Artificial Sequence: Synthetic oligonucleotide
aauguucuuauccaacugc

SEQ ID NO: 3232119 - RNA, 19 nt, Artificial Sequence
  Description of Artificial Sequence: Synthetic oligonucleotide
cagaauauaacuaacuagg

SEQ ID NO: 3232120 - RNA, 19 nt, Artificial Sequence
  Description of Artificial Sequence: Synthetic oligonucleotide
agguaaaauguucuuaucc

SEQ ID NO: 3232121 - RNA, 19 nt, Artificial Sequence
  Description of Artificial Sequence: Synthetic oligonucleotide
acauauggaacacaggaac

SEQ ID NO: 3232122 - RNA, 19 nt, Artificial Sequence
  Description of Artificial Sequence: Synthetic oligonucleotide
ucacauauggaacacagga

SEQ ID NO: 3232123 - RNA, 19 nt, Artificial Sequence
  Description of Artificial Sequence: Synthetic oligonucleotide
aauccuuuggauguucucc

SEQ ID NO: 3232124 - RNA, 19 nt, Artificial Sequence
  Description of Artificial Sequence: Synthetic oligonucleotide
aacuagguucuccagaauc

SEQ ID NO: 3232125 - RNA, 19 nt, Artificial Sequence
  Description of Artificial Sequence: Synthetic oligonucleotide
uuauccaacugcaaggucc

SEQ ID NO: 3232126 - RNA, 19 nt, Artificial Sequence
  Description of Artificial Sequence: Synthetic oligonucleotide
aggauucucaaacuuagac

SEQ ID NO: 3232127 - RNA, 19 nt, Artificial Sequence
  Description of Artificial Sequence: Synthetic oligonucleotide
aaaauguucuuauccaacu

SEQ ID NO: 3232128 - RNA, 19 nt, Artificial Sequence
  Description of Artificial Sequence: Synthetic oligonucleotide
uucuuauccaacugcaagg

SEQ ID NO: 3232129 - RNA, 19 nt, Artificial Sequence
  Description of Artificial Sequence: Synthetic oligonucleotide
aacugcaagguccacuugg

SEQ ID NO: 3232130 - RNA, 19 nt, Artificial Sequence
  Description of Artificial Sequence: Synthetic oligonucleotide
gaauucaggauucucaaac

SEQ ID NO: 3232131 - RNA, 19 nt, Artificial Sequence
  Description of Artificial Sequence: Synthetic oligonucleotide
ucaaacuuagaccuaguac

SEQ ID NO: 3232132 - RNA, 19 nt, Artificial Sequence
  Description of Artificial Sequence: Synthetic oligonucleotide
aggauuuucacuugggcag

SEQ ID NO: 3232133 - RNA, 19 nt, Artificial Sequence
  Description of Artificial Sequence: Synthetic oligonucleotide
ucaggauucucaaacuuag

SEQ ID NO: 3232134 - RNA, 19 nt, Artificial Sequence
  Description of Artificial Sequence: Synthetic oligonucleotide
caaacuuagaccuaguaca

SEQ ID NO: 3232135 - RNA, 19 nt, Artificial Sequence
  Description of Artificial Sequence: Synthetic oligonucleotide
ugucacauauggaacacag

SEQ ID NO: 3232136 - RNA, 19 nt, Artificial Sequence
  Description of Artificial Sequence: Synthetic oligonucleotide
acaggaaccugccaauucc

SEQ ID NO: 3232137 - RNA, 19 nt, Artificial Sequence
  Description of Artificial Sequence: Synthetic oligonucleotide
uuggguuucuccuaccugg

SEQ ID NO: 3232138 - RNA, 19 nt, Artificial Sequence
  Description of Artificial Sequence: Synthetic oligonucleotide
caugccauuagguaaaaug

SEQ ID NO: 3232139 - RNA, 19 nt, Artificial Sequence
  Description of Artificial Sequence: Synthetic oligonucleotide
ugaccgaagauccucauga

SEQ ID NO: 3232140 - RNA, 19 nt, Artificial Sequence
  Description of Artificial Sequence: Synthetic oligonucleotide
acuucuggcaccucugacc

SEQ ID NO: 3232141 - RNA, 19 nt, Artificial Sequence
  Description of Artificial Sequence: Synthetic oligonucleotide
auaacuaacuagguucucc

SEQ ID NO: 3232142 - RNA, 19 nt, Artificial Sequence
  Description of Artificial Sequence: Synthetic oligonucleotide
aauuccugucugcugguac

SEQ ID NO: 3232143 - RNA, 19 nt, Artificial Sequence
  Description of Artificial Sequence: Synthetic oligonucleotide
cuuuggauguucuccaugg

SEQ ID NO: 3232144 - RNA, 19 nt, Artificial Sequence
  Description of Artificial Sequence: Synthetic oligonucleotide
gauucucaaacuuagaccu

SEQ ID NO: 3232145 - RNA, 19 nt, Artificial Sequence
  Description of Artificial Sequence: Synthetic oligonucleotide
uaaaauguucuuauccaac

SEQ ID NO: 3232146 - RNA, 19 nt, Artificial Sequence
  Description of Artificial Sequence: Synthetic oligonucleotide
aaauguucuuauccaacug

SEQ ID NO: 3232147 - RNA, 19 nt, Artificial Sequence
  Description of Artificial Sequence: Synthetic oligonucleotide
acaggauuuucacuugggc

SEQ ID NO: 3232148 - RNA, 19 nt, Artificial Sequence
  Description of Artificial Sequence: Synthetic oligonucleotide
auuuccgcagaauauaacu

SEQ ID NO: 3232149 - RNA, 19 nt, Artificial Sequence
  Description of Artificial Sequence: Synthetic oligonucleotide
agaccuaguacacuucugg

SEQ ID NO: 3232150 - RNA, 19 nt, Artificial Sequence
  Description of Artificial Sequence: Synthetic oligonucleotide
uuagguaaaauguucuuau

SEQ ID NO: 3232151 - RNA, 19 nt, Artificial Sequence
  Description of Artificial Sequence: Synthetic oligonucleotide
ucuccauggagaauucagg

SEQ ID NO: 3232152 - RNA, 19 nt, Artificial Sequence
  Description of Artificial Sequence: Synthetic oligonucleotide
aauucaggauucucaaacu

SEQ ID NO: 3232153 - RNA, 19 nt, Artificial Sequence
  Description of Artificial Sequence: Synthetic oligonucleotide
uuuucacuugggcagaaac

SEQ ID NO: 3232154 - RNA, 19 nt, Artificial Sequence
  Description of Artificial Sequence: Synthetic oligonucleotide
uccagaauccuuuggaugu

SEQ ID NO: 3232155 - RNA, 19 nt, Artificial Sequence
  Description of Artificial Sequence: Synthetic oligonucleotide
aaacuuagaccuaguacac

SEQ ID NO: 3232156 - RNA, 19 nt, Artificial Sequence
  Description of Artificial Sequence: Synthetic oligonucleotide
uucuccauggagaauucag

SEQ ID NO: 3232157 - RNA, 19 nt, Artificial Sequence
  Description of Artificial Sequence: Synthetic oligonucleotide
guucuuauccaacugcaag

SEQ ID NO: 3232158 - RNA, 19 nt, Artificial Sequence
  Description of Artificial Sequence: Synthetic oligonucleotide
uuggauguucuccauggag

SEQ ID NO: 3232159 - RNA, 19 nt, Artificial Sequence
  Description of Artificial Sequence: Synthetic oligonucleotide
uuucacuugggcagaaacc

SEQ ID NO: 3232160 - RNA, 19 nt, Artificial Sequence
  Description of Artificial Sequence: Synthetic oligonucleotide
uucacuugggcagaaaccc

SEQ ID NO: 3232161 - RNA, 19 nt, Artificial Sequence
  Description of Artificial Sequence: Synthetic oligonucleotide
guaucugucacauauggaa

SEQ ID NO: 3232162 - RNA, 19 nt, Artificial Sequence
  Description of Artificial Sequence: Synthetic oligonucleotide
uggauguucuccauggaga

SEQ ID NO: 3232163 - RNA, 19 nt, Artificial Sequence
  Description of Artificial Sequence: Synthetic oligonucleotide
acuagguucuccagaaucc

SEQ ID NO: 3232164 - RNA, 19 nt, Artificial Sequence
  Description of Artificial Sequence: Synthetic oligonucleotide
caguaucugucacauaugg

SEQ ID NO: 3232165 - RNA, 19 nt, Artificial Sequence
  Description of Artificial Sequence: Synthetic oligonucleotide
cauauggaacacaggaacc

SEQ ID NO: 3232166 - RNA, 19 nt, Artificial Sequence
  Description of Artificial Sequence: Synthetic oligonucleotide
accgaagauccucaugagc

SEQ ID NO: 3232167 - RNA, 19 nt, Artificial Sequence
  Description of Artificial Sequence: Synthetic oligonucleotide
acugccuccaucccugggc

SEQ ID NO: 3232168 - RNA, 19 nt, Artificial Sequence
  Description of Artificial Sequence: Synthetic oligonucleotide
gcagaauauaacuaacuag

SEQ ID NO: 3232169 - RNA, 19 nt, Artificial Sequence
  Description of Artificial Sequence: Synthetic oligonucleotide
uucuccagaauccuuugga

SEQ ID NO: 3232170 - RNA, 19 nt, Artificial Sequence
  Description of Artificial Sequence: Synthetic oligonucleotide
uuagaccuaguacacuucu

SEQ ID NO: 3232171 - RNA, 19 nt, Artificial Sequence
  Description of Artificial Sequence: Synthetic oligonucleotide
auaguauuuccgcagaaua

SEQ ID NO: 3232172 - RNA, 19 nt, Artificial Sequence
  Description of Artificial Sequence: Synthetic oligonucleotide
uaucugucacauauggaac

SEQ ID NO: 3232173 - RNA, 19 nt, Artificial Sequence
  Description of Artificial Sequence: Synthetic oligonucleotide
uaacuaacuagguucucca

SEQ ID NO: 3232174 - RNA, 19 nt, Artificial Sequence
  Description of Artificial Sequence: Synthetic oligonucleotide
cuucuggcaccucugaccg

SEQ ID NO: 3232175 - RNA, 19 nt, Artificial Sequence
  Description of Artificial Sequence: Synthetic oligonucleotide
ugggcagaaacccaguauc

SEQ ID NO: 3232176 - RNA, 19 nt, Artificial Sequence
  Description of Artificial Sequence: Synthetic oligonucleotide
aacuaacuagguucuccag

SEQ ID NO: 3232177 - RNA, 19 nt, Artificial Sequence
  Description of Artificial Sequence: Synthetic oligonucleotide
ucuccuaccuggaucagcu

SEQ ID NO: 3232178 - RNA, 19 nt, Artificial Sequence
  Description of Artificial Sequence: Synthetic oligonucleotide
uucucaaacuuagaccuag

SEQ ID NO: 3232179 - RNA, 19 nt, Artificial Sequence
  Description of Artificial Sequence: Synthetic oligonucleotide
uuggcuuuggguuucuccu

SEQ ID NO: 3232180 - RNA, 19 nt, Artificial Sequence
  Description of Artificial Sequence: Synthetic oligonucleotide
ggauucucaaacuuagacc

SEQ ID NO: 3232181 - RNA, 19 nt, Artificial Sequence
  Description of Artificial Sequence: Synthetic oligonucleotide
acuaacuagguucuccaga

SEQ ID NO: 3232182 - RNA, 19 nt, Artificial Sequence
  Description of Artificial Sequence: Synthetic oligonucleotide
gguaaaauguucuuaucca

SEQ ID NO: 3232183 - RNA, 19 nt, Artificial Sequence
  Description of Artificial Sequence: Synthetic oligonucleotide
uaguauuuccgcagaauau

SEQ ID NO: 3232184 - RNA, 19 nt, Artificial Sequence
  Description of Artificial Sequence: Synthetic oligonucleotide
uguccauaguauuuccgca

SEQ ID NO: 3232185 - RNA, 19 nt, Artificial Sequence
  Description of Artificial Sequence: Synthetic oligonucleotide
uucaggauucucaaacuua

SEQ ID NO: 3232186 - RNA, 19 nt, Artificial Sequence
  Description of Artificial Sequence: Synthetic oligonucleotide
uauccaacugcaaggucca

SEQ ID NO: 3232187 - RNA, 19 nt, Artificial Sequence
  Description of Artificial Sequence: Synthetic oligonucleotide
uuuggguuucuccuaccug

SEQ ID NO: 3232188 - RNA, 19 nt, Artificial Sequence
  Description of Artificial Sequence: Synthetic oligonucleotide
uccauaguauuuccgcaga

SEQ ID NO: 3232189 - RNA, 19 nt, Artificial Sequence
  Description of Artificial Sequence: Synthetic oligonucleotide
cuuggcuuuggguuucucc

SEQ ID NO: 3232190 - RNA, 19 nt, Artificial Sequence
  Description of Artificial Sequence: Synthetic oligonucleotide
acuuagaccuaguacacuu

SEQ ID NO: 3232191 - RNA, 19 nt, Artificial Sequence
  Description of Artificial Sequence: Synthetic oligonucleotide
guuucuccuaccuggauca

SEQ ID NO: 3232192 - RNA, 19 nt, Artificial Sequence
  Description of Artificial Sequence: Synthetic oligonucleotide
aaacccaguaucugucaca

SEQ ID NO: 3232193 - RNA, 19 nt, Artificial Sequence
  Description of Artificial Sequence: Synthetic oligonucleotide
aucugucacauauggaaca

SEQ ID NO: 3232194 - RNA, 19 nt, Artificial Sequence
  Description of Artificial Sequence: Synthetic oligonucleotide
uuuccgcagaauauaacua

SEQ ID NO: 3232195 - RNA, 19 nt, Artificial Sequence
  Description of Artificial Sequence: Synthetic oligonucleotide
uccuaccuggaucagcucu

SEQ ID NO: 3232196 - RNA, 19 nt, Artificial Sequence
  Description of Artificial Sequence: Synthetic oligonucleotide
uggaacacaggaaccugcc

SEQ ID NO: 3232197 - RNA, 19 nt, Artificial Sequence
  Description of Artificial Sequence: Synthetic oligonucleotide
augccauuagguaaaaugu

SEQ ID NO: 3232198 - RNA, 19 nt, Artificial Sequence
  Description of Artificial Sequence: Synthetic oligonucleotide
uuccgcagaauauaacuaa

SEQ ID NO: 3232199 - RNA, 19 nt, Artificial Sequence
  Description of Artificial Sequence: Synthetic oligonucleotide
uauuuccgcagaauauaac

SEQ ID NO: 3232200 - RNA, 19 nt, Artificial Sequence
  Description of Artificial Sequence: Synthetic oligonucleotide
cauggagaauucaggauuc

SEQ ID NO: 3232201 - RNA, 19 nt, Artificial Sequence
  Description of Artificial Sequence: Synthetic oligonucleotide
ucuuauccaacugcaaggu

SEQ ID NO: 3232202 - RNA, 19 nt, Artificial Sequence
  Description of Artificial Sequence: Synthetic oligonucleotide
agauuucccaggcucccgg

SEQ ID NO: 3232203 - RNA, 19 nt, Artificial Sequence
  Description of Artificial Sequence: Synthetic oligonucleotide
gagaauucaggauucucaa

SEQ ID NO: 3232204 - RNA, 19 nt, Artificial Sequence
  Description of Artificial Sequence: Synthetic oligonucleotide
uccgcagaauauaacuaac

SEQ ID NO: 3232205 - RNA, 19 nt, Artificial Sequence
  Description of Artificial Sequence: Synthetic oligonucleotide
guccauaguauuuccgcag

SEQ ID NO: 3232206 - RNA, 19 nt, Artificial Sequence
  Description of Artificial Sequence: Synthetic oligonucleotide
gauccucaugagcaccugg

SEQ ID NO: 3232207 - RNA, 19 nt, Artificial Sequence
  Description of Artificial Sequence: Synthetic oligonucleotide
aacacaggaaccugccaau

SEQ ID NO: 3232208 - RNA, 19 nt, Artificial Sequence
  Description of Artificial Sequence: Synthetic oligonucleotide
auauaacuaacuagguucu

SEQ ID NO: 3232209 - RNA, 19 nt, Artificial Sequence
  Description of Artificial Sequence: Synthetic oligonucleotide
caccucugaccgaagaucc

SEQ ID NO: 3232210 - RNA, 19 nt, Artificial Sequence
  Description of Artificial Sequence: Synthetic oligonucleotide
accuaguacacuucuggca

SEQ ID NO: 3232211 - RNA, 19 nt, Artificial Sequence
  Description of Artificial Sequence: Synthetic oligonucleotide
guaaaauguucuuauccaa

SEQ ID NO: 3232212 - RNA, 19 nt, Artificial Sequence
  Description of Artificial Sequence: Synthetic oligonucleotide
auggaacacaggaaccugc

SEQ ID NO: 3232213 - RNA, 19 nt, Artificial Sequence
  Description of Artificial Sequence: Synthetic oligonucleotide
gaccuaguacacuucuggc

SEQ ID NO: 3232214 - RNA, 19 nt, Artificial Sequence
  Description of Artificial Sequence: Synthetic oligonucleotide
gaacacaggaaccugccaa

SEQ ID NO: 3232215 - RNA, 19 nt, Artificial Sequence
  Description of Artificial Sequence: Synthetic oligonucleotide
cugagauuucccaggcucc

SEQ ID NO: 3232216 - RNA, 19 nt, Artificial Sequence
  Description of Artificial Sequence: Synthetic oligonucleotide
auauggaacacaggaaccu

SEQ ID NO: 3232217 - RNA, 19 nt, Artificial Sequence
  Description of Artificial Sequence: Synthetic oligonucleotide
aaaugcaucauguuggaca

SEQ ID NO: 3232218 - RNA, 19 nt, Artificial Sequence
  Description of Artificial Sequence: Synthetic oligonucleotide
uuugagagagaucagcucc

SEQ ID NO: 3232219 - RNA, 19 nt, Artificial Sequence
  Description of Artificial Sequence: Synthetic oligonucleotide
aaugcaucauguuggacag

SEQ ID NO: 3232220 - RNA, 19 nt, Artificial Sequence
  Description of Artificial Sequence: Synthetic oligonucleotide
uccaaaaugcaucauguug

SEQ ID NO: 3232221 - RNA, 19 nt, Artificial Sequence
  Description of Artificial Sequence: Synthetic oligonucleotide
agagcuuucuucuugcggg

SEQ ID NO: 3232222 - RNA, 19 nt, Artificial Sequence
  Description of Artificial Sequence: Synthetic oligonucleotide
ucaaagugagccucgauca

SEQ ID NO: 3232223 - RNA, 19 nt, Artificial Sequence
  Description of Artificial Sequence: Synthetic oligonucleotide
gauccugucuuugagagag

SEQ ID NO: 3232224 - RNA, 19 nt, Artificial Sequence
  Description of Artificial Sequence: Synthetic oligonucleotide
aaaguccacucucucuccc

SEQ ID NO: 3232225 - RNA, 19 nt, Artificial Sequence
  Description of Artificial Sequence: Synthetic oligonucleotide
aaagugagccucgaucagc

SEQ ID NO: 3232226 - RNA, 19 nt, Artificial Sequence
  Description of Artificial Sequence: Synthetic oligonucleotide
auuucggaugcgcugcugc

SEQ ID NO: 3232227 - RNA, 19 nt, Artificial Sequence
  Description of Artificial Sequence: Synthetic oligonucleotide
ucuuugagagagaucagcu

SEQ ID NO: 3232228 - RNA, 19 nt, Artificial Sequence
  Description of Artificial Sequence: Synthetic oligonucleotide
ucaaaguccacucucucuc

SEQ ID NO: 3232229 - RNA, 19 nt, Artificial Sequence
  Description of Artificial Sequence: Synthetic oligonucleotide
ccaaaaugcaucauguugg

SEQ ID NO: 3232230 - RNA, 19 nt, Artificial Sequence
  Description of Artificial Sequence: Synthetic oligonucleotide
ucgauccugucuuugagag

SEQ ID NO: 3232231 - RNA, 19 nt, Artificial Sequence
  Description of Artificial Sequence: Synthetic oligonucleotide
guggaugucaucaaagucc

SEQ ID NO: 3232232 - RNA, 19 nt, Artificial Sequence
  Description of Artificial Sequence: Synthetic oligonucleotide
augucaucaaaguccacuc

SEQ ID NO: 3232233 - RNA, 19 nt, Artificial Sequence
  Description of Artificial Sequence: Synthetic oligonucleotide
uucaaguccuucuccaugc

SEQ ID NO: 3232234 - RNA, 19 nt, Artificial Sequence
  Description of Artificial Sequence: Synthetic oligonucleotide
ucugucuucuggauguacc

SEQ ID NO: 3232235 - RNA, 19 nt, Artificial Sequence
  Description of Artificial Sequence: Synthetic oligonucleotide
ucauccucagccuuccucc

SEQ ID NO: 3232236 - RNA, 19 nt, Artificial Sequence
  Description of Artificial Sequence: Synthetic oligonucleotide
gauguacccuccaaaaugc

SEQ ID NO: 3232237 - RNA, 19 nt, Artificial Sequence
  Description of Artificial Sequence: Synthetic oligonucleotide
ucuuccgguucucaaagug

SEQ ID NO: 3232238 - RNA, 19 nt, Artificial Sequence
  Description of Artificial Sequence: Synthetic oligonucleotide
agagaucagcuccuccucc

SEQ ID NO: 3232239 - RNA, 19 nt, Artificial Sequence
  Description of Artificial Sequence: Synthetic oligonucleotide
uggaugucaucaaagucca

SEQ ID NO: 3232240 - RNA, 19 nt, Artificial Sequence
  Description of Artificial Sequence: Synthetic oligonucleotide
cuucuugcgggccucaucc

SEQ ID NO: 3232241 - RNA, 19 nt, Artificial Sequence
  Description of Artificial Sequence: Synthetic oligonucleotide
uuccgguucucaaagugag

SEQ ID NO: 3232242 - RNA, 19 nt, Artificial Sequence
  Description of Artificial Sequence: Synthetic oligonucleotide
ugcaucauguuggacagag

SEQ ID NO: 3232243 - RNA, 19 nt, Artificial Sequence
  Description of Artificial Sequence: Synthetic oligonucleotide
cugucuuugagagagauca

SEQ ID NO: 3232244 - RNA, 19 nt, Artificial Sequence
  Description of Artificial Sequence: Synthetic oligonucleotide
ucauucaaguccuucucca

SEQ ID NO: 3232245 - RNA, 19 nt, Artificial Sequence
  Description of Artificial Sequence: Synthetic oligonucleotide
ugcgcugcugcucugcccg

SEQ ID NO: 3232246 - RNA, 19 nt, Artificial Sequence
  Description of Artificial Sequence: Synthetic oligonucleotide
uuucgauccugucuuugag

SEQ ID NO: 3232247 - RNA, 19 nt, Artificial Sequence
  Description of Artificial Sequence: Synthetic oligonucleotide
uguggaugucaucaaaguc

SEQ ID NO: 3232248 - RNA, 19 nt, Artificial Sequence
  Description of Artificial Sequence: Synthetic oligonucleotide
ucagccuuccuccuguucu

SEQ ID NO: 3232249 - RNA, 19 nt, Artificial Sequence
  Description of Artificial Sequence: Synthetic oligonucleotide
uuggacagagcuuucuucu

SEQ ID NO: 3232250 - RNA, 19 nt, Artificial Sequence
  Description of Artificial Sequence: Synthetic oligonucleotide
agagagaucagcuccuccu

SEQ ID NO: 3232251 - RNA, 19 nt, Artificial Sequence
  Description of Artificial Sequence: Synthetic oligonucleotide
aaaaugcaucauguuggac

SEQ ID NO: 3232252 - RNA, 19 nt, Artificial Sequence
  Description of Artificial Sequence: Synthetic oligonucleotide
ucaucaaaguccacucucu

SEQ ID NO: 3232253 - RNA, 19 nt, Artificial Sequence
  Description of Artificial Sequence: Synthetic oligonucleotide
cucaaagugagccucgauc

SEQ ID NO: 3232254 - RNA, 19 nt, Artificial Sequence
  Description of Artificial Sequence: Synthetic oligonucleotide
aagugagccucgaucagcg

SEQ ID NO: 3232255 - RNA, 19 nt, Artificial Sequence
  Description of Artificial Sequence: Synthetic oligonucleotide
ggauguacccuccaaaaug

SEQ ID NO: 3232256 - RNA, 19 nt, Artificial Sequence
  Description of Artificial Sequence: Synthetic oligonucleotide
auucaaguccuucuccaug

SEQ ID NO: 3232257 - RNA, 19 nt, Artificial Sequence
  Description of Artificial Sequence: Synthetic oligonucleotide
ugcagcucauucaaguccu

SEQ ID NO: 3232258 - RNA, 19 nt, Artificial Sequence
  Description of Artificial Sequence: Synthetic oligonucleotide
uuuucgauccugucuuuga

SEQ ID NO: 3232259 - RNA, 19 nt, Artificial Sequence
  Description of Artificial Sequence: Synthetic oligonucleotide
gacagagcuuucuucuugc

SEQ ID NO: 3232260 - RNA, 19 nt, Artificial Sequence
  Description of Artificial Sequence: Synthetic oligonucleotide
ucugucguuccuucucccg

SEQ ID NO: 3232261 - RNA, 19 nt, Artificial Sequence
  Description of Artificial Sequence: Synthetic oligonucleotide
ucuggauguacccuccaaa

SEQ ID NO: 3232262 - RNA, 19 nt, Artificial Sequence
  Description of Artificial Sequence: Synthetic oligonucleotide
cuucuuccgguucucaaag

SEQ ID NO: 3232263 - RNA, 19 nt, Artificial Sequence
  Description of Artificial Sequence: Synthetic oligonucleotide
cucauucaaguccuucucc

SEQ ID NO: 3232264 - RNA, 19 nt, Artificial Sequence
  Description of Artificial Sequence: Synthetic oligonucleotide
aucaaaguccacucucucu

SEQ ID NO: 3232265 - RNA, 19 nt, Artificial Sequence
  Description of Artificial Sequence: Synthetic oligonucleotide
ugagccucgaucagcgucu

SEQ ID NO: 3232266 - RNA, 19 nt, Artificial Sequence
  Description of Artificial Sequence: Synthetic oligonucleotide
ucuucuggauguacccucc

SEQ ID NO: 3232267 - RNA, 19 nt, Artificial Sequence
  Description of Artificial Sequence: Synthetic oligonucleotide
cugcagcucauucaagucc

SEQ ID NO: 3232268 - RNA, 19 nt, Artificial Sequence
  Description of Artificial Sequence: Synthetic oligonucleotide
ucuccuccuccucacgccg

SEQ ID NO: 3232269 - RNA, 19 nt, Artificial Sequence
  Description of Artificial Sequence: Synthetic oligonucleotide
uucuccaugcgcuuccugu

SEQ ID NO: 3232270 - RNA, 19 nt, Artificial Sequence
  Description of Artificial Sequence: Synthetic oligonucleotide
ucaaguccuucuccaugcg

SEQ ID NO: 3232271 - RNA, 19 nt, Artificial Sequence
  Description of Artificial Sequence: Synthetic oligonucleotide
ucauguuggacagagcuuu

SEQ ID NO: 3232272 - RNA, 19 nt, Artificial Sequence
  Description of Artificial Sequence: Synthetic oligonucleotide
agcucauucaaguccuucu

SEQ ID NO: 3232273 - RNA, 19 nt, Artificial Sequence
  Description of Artificial Sequence: Synthetic oligonucleotide
cugucuucuggauguaccc

SEQ ID NO: 3232274 - RNA, 19 nt, Artificial Sequence
  Description of Artificial Sequence: Synthetic oligonucleotide
ucuucagccaggcgguucu

SEQ ID NO: 3232275 - RNA, 19 nt, Artificial Sequence
  Description of Artificial Sequence: Synthetic oligonucleotide
uugagagagaucagcuccu

SEQ ID NO: 3232276 - RNA, 19 nt, Artificial Sequence
  Description of Artificial Sequence: Synthetic oligonucleotide
ucgaucagcgucugcagcu

SEQ ID NO: 3232277 - RNA, 19 nt, Artificial Sequence
  Description of Artificial Sequence: Synthetic oligonucleotide
aaguccuucuccaugcgcu

SEQ ID NO: 3232278 - RNA, 19 nt, Artificial Sequence
  Description of Artificial Sequence: Synthetic oligonucleotide
ugucaucaaaguccacucu

SEQ ID NO: 3232279 - RNA, 19 nt, Artificial Sequence
  Description of Artificial Sequence: Synthetic oligonucleotide
gucaucaaaguccacucuc

SEQ ID NO: 3232280 - RNA, 19 nt, Artificial Sequence
  Description of Artificial Sequence: Synthetic oligonucleotide
uccuccuccuccuucuucc

SEQ ID NO: 3232281 - RNA, 19 nt, Artificial Sequence
  Description of Artificial Sequence: Synthetic oligonucleotide
cuuugagagagaucagcuc

SEQ ID NO: 3232282 - RNA, 19 nt, Artificial Sequence
  Description of Artificial Sequence: Synthetic oligonucleotide
uguacccuccaaaaugcau

SEQ ID NO: 3232283 - RNA, 19 nt, Artificial Sequence
  Description of Artificial Sequence: Synthetic oligonucleotide
uccacucucucucccucgg

SEQ ID NO: 3232284 - RNA, 19 nt, Artificial Sequence
  Description of Artificial Sequence: Synthetic oligonucleotide
uucgauccugucuuugaga

SEQ ID NO: 3232285 - RNA, 19 nt, Artificial Sequence
  Description of Artificial Sequence: Synthetic oligonucleotide
cagagcuuucuucuugcgg

SEQ ID NO: 3232286 - RNA, 19 nt, Artificial Sequence
  Description of Artificial Sequence: Synthetic oligonucleotide
uacccuccaaaaugcauca

SEQ ID NO: 3232287 - RNA, 19 nt, Artificial Sequence
  Description of Artificial Sequence: Synthetic oligonucleotide
cucauuucggaugcgcugc

SEQ ID NO: 3232288 - RNA, 19 nt, Artificial Sequence
  Description of Artificial Sequence: Synthetic oligonucleotide
ugucuuugagagagaucag

SEQ ID NO: 3232289 - RNA, 19 nt, Artificial Sequence
  Description of Artificial Sequence: Synthetic oligonucleotide
uguucuccuccuccucacg

SEQ ID NO: 3232290 - RNA, 19 nt, Artificial Sequence
  Description of Artificial Sequence: Synthetic oligonucleotide
ccucucuucagccaggcgg

SEQ ID NO: 3232291 - RNA, 19 nt, Artificial Sequence
  Description of Artificial Sequence: Synthetic oligonucleotide
gucuuugagagagaucagc

SEQ ID NO: 3232292 - RNA, 19 nt, Artificial Sequence
  Description of Artificial Sequence: Synthetic oligonucleotide
ucugcagcucauucaaguc

SEQ ID NO: 3232293 - RNA, 19 nt, Artificial Sequence
  Description of Artificial Sequence: Synthetic oligonucleotide
gaugucaucaaaguccacu

SEQ ID NO: 3232294 - RNA, 19 nt, Artificial Sequence
  Description of Artificial Sequence: Synthetic oligonucleotide
cuuccuguggaugucauca

SEQ ID NO: 3232295 - RNA, 19 nt, Artificial Sequence
  Description of Artificial Sequence: Synthetic oligonucleotide
acagagcuuucuucuugcg

SEQ ID NO: 3232296 - RNA, 19 nt, Artificial Sequence
  Description of Artificial Sequence: Synthetic oligonucleotide
cuugcgcucugucuucugg

SEQ ID NO: 3232297 - RNA, 19 nt, Artificial Sequence
  Description of Artificial Sequence: Synthetic oligonucleotide
uggauguacccuccaaaau

SEQ ID NO: 3232298 - RNA, 19 nt, Artificial Sequence
  Description of Artificial Sequence: Synthetic oligonucleotide
caucauguuggacagagcu

SEQ ID NO: 3232299 - RNA, 19 nt, Artificial Sequence
  Description of Artificial Sequence: Synthetic oligonucleotide
ucuccaugcgcuuccugug

SEQ ID NO: 3232300 - RNA, 19 nt, Artificial Sequence
  Description of Artificial Sequence: Synthetic oligonucleotide
guuggacagagcuuucuuc

SEQ ID NO: 3232301 - RNA, 19 nt, Artificial Sequence
  Description of Artificial Sequence: Synthetic oligonucleotide
guucugucguuccuucucc

SEQ ID NO: 3232302 - RNA, 19 nt, Artificial Sequence
  Description of Artificial Sequence: Synthetic oligonucleotide
aguccacucucucucccuc

SEQ ID NO: 3232303 - RNA, 19 nt, Artificial Sequence
  Description of Artificial Sequence: Synthetic oligonucleotide
ucccgcucauuucggaugc

SEQ ID NO: 3232304 - RNA, 19 nt, Artificial Sequence
  Description of Artificial Sequence: Synthetic oligonucleotide
gaucagcuccuccuccucc

SEQ ID NO: 3232305 - RNA, 19 nt, Artificial Sequence
  Description of Artificial Sequence: Synthetic oligonucleotide
uccuucuccaugcgcuucc

SEQ ID NO: 3232306 - RNA, 19 nt, Artificial Sequence
  Description of Artificial Sequence: Synthetic oligonucleotide
caaaguccacucucucucc

SEQ ID NO: 3232307 - RNA, 19 nt, Artificial Sequence
  Description of Artificial Sequence: Synthetic oligonucleotide
gagagagaucagcuccucc

SEQ ID NO: 3232308 - RNA, 19 nt, Artificial Sequence
  Description of Artificial Sequence: Synthetic oligonucleotide
aaguccacucucucucccu

SEQ ID NO: 3232309 - RNA, 19 nt, Artificial Sequence
  Description of Artificial Sequence: Synthetic oligonucleotide
ucggaugcgcugcugcucu

SEQ ID NO: 3232310 - RNA, 19 nt, Artificial Sequence
  Description of Artificial Sequence: Synthetic oligonucleotide
acucuugcgcucugucuuc

SEQ ID NO: 3232311 - RNA, 19 nt, Artificial Sequence
  Description of Artificial Sequence: Synthetic oligonucleotide
uccuccuucuuccgguucu

SEQ ID NO: 3232312 - RNA, 19 nt, Artificial Sequence
  Description of Artificial Sequence: Synthetic oligonucleotide
uguuggacagagcuuucuu

SEQ ID NO: 3232313 - RNA, 19 nt, Artificial Sequence
  Description of Artificial Sequence: Synthetic oligonucleotide
cuuccuccuguucuccucc

SEQ ID NO: 3232314 - RNA, 19 nt, Artificial Sequence
  Description of Artificial Sequence: Synthetic oligonucleotide
uucuccuccuccucacgcc

SEQ ID NO: 3232315 - RNA, 19 nt, Artificial Sequence
  Description of Artificial Sequence: Synthetic oligonucleotide
uccucagccuuccuccugu

SEQ ID NO: 3232316 - RNA, 19 nt, Artificial Sequence
  Description of Artificial Sequence: Synthetic oligonucleotide
caaagugagccucgaucag

SEQ ID NO: 3232317 - RNA, 19 nt, Artificial Sequence
  Description of Artificial Sequence: Synthetic oligonucleotide
aaauaaaacacuuuguaga

SEQ ID NO: 3232318 - RNA, 19 nt, Artificial Sequence
  Description of Artificial Sequence: Synthetic oligonucleotide
aauacauacaguugauggc

SEQ ID NO: 3232319 - RNA, 19 nt, Artificial Sequence
  Description of Artificial Sequence: Synthetic oligonucleotide
guaauuuuaauacauacag

SEQ ID NO: 3232320 - RNA, 19 nt, Artificial Sequence
  Description of Artificial Sequence: Synthetic oligonucleotide
gauacaguaauuuuaauac

SEQ ID NO: 3232321 - RNA, 19 nt, Artificial Sequence
  Description of Artificial Sequence: Synthetic oligonucleotide
aauaucaaaauucagggau

SEQ ID NO: 3232322 - RNA, 19 nt, Artificial Sequence
  Description of Artificial Sequence: Synthetic oligonucleotide
guagauagaauauauaugc

SEQ ID NO: 3232323 - RNA, 19 nt, Artificial Sequence
  Description of Artificial Sequence: Synthetic oligonucleotide
caaauaucaaaauucaggg

SEQ ID NO: 3232324 - RNA, 19 nt, Artificial Sequence
  Description of Artificial Sequence: Synthetic oligonucleotide
uuuuaauacauacaguuga

SEQ ID NO: 3232325 - RNA, 19 nt, Artificial Sequence
  Description of Artificial Sequence: Synthetic oligonucleotide
aagaucauccuucaugcgc

SEQ ID NO: 3232326 - RNA, 19 nt, Artificial Sequence
  Description of Artificial Sequence: Synthetic oligonucleotide
acaagaucauccuucaugc

SEQ ID NO: 3232327 - RNA, 19 nt, Artificial Sequence
  Description of Artificial Sequence: Synthetic oligonucleotide
acuggcaucaacaacaucc

SEQ ID NO: 3232328 - RNA, 19 nt, Artificial Sequence
  Description of Artificial Sequence: Synthetic oligonucleotide
auaaagugcacccugguuc

SEQ ID NO: 3232329 - RNA, 19 nt, Artificial Sequence
  Description of Artificial Sequence: Synthetic oligonucleotide
ugucacagcaacaagacug

SEQ ID NO: 3232330 - RNA, 19 nt, Artificial Sequence
  Description of Artificial Sequence: Synthetic oligonucleotide
uuaaguguaggguaggucc

SEQ ID NO: 3232331 - RNA, 19 nt, Artificial Sequence
  Description of Artificial Sequence: Synthetic oligonucleotide
aaaauucagggauuaagug

SEQ ID NO: 3232332 - RNA, 19 nt, Artificial Sequence
  Description of Artificial Sequence: Synthetic oligonucleotide
gaacccaaaguuuaggagg

SEQ ID NO: 3232333 - RNA, 19 nt, Artificial Sequence
  Description of Artificial Sequence: Synthetic oligonucleotide
aaacauuuauuugauacag

SEQ ID NO: 3232334 - RNA, 19 nt, Artificial Sequence
  Description of Artificial Sequence: Synthetic oligonucleotide
aaauucagggauuaagugu

SEQ ID NO: 3232335 - RNA, 19 nt, Artificial Sequence
  Description of Artificial Sequence: Synthetic oligonucleotide
uuaaacaaaaccgaggaac

SEQ ID NO: 3232336 - RNA, 19 nt, Artificial Sequence
  Description of Artificial Sequence: Synthetic oligonucleotide
uguagauagaauauauaug

SEQ ID NO: 3232337 - RNA, 19 nt, Artificial Sequence
  Description of Artificial Sequence: Synthetic oligonucleotide
aggaacauaaagugcaccc

SEQ ID NO: 3232338 - RNA, 19 nt, Artificial Sequence
  Description of Artificial Sequence: Synthetic oligonucleotide
uugcaaauaaaacacuuug

SEQ ID NO: 3232339 - RNA, 19 nt, Artificial Sequence
  Description of Artificial Sequence: Synthetic oligonucleotide
ugugcaggaacauaaagug

SEQ ID NO: 3232340 - RNA, 19 nt, Artificial Sequence
  Description of Artificial Sequence: Synthetic oligonucleotide
aaaugucugcccuuggcac

SEQ ID NO: 3232341 - RNA, 19 nt, Artificial Sequence
  Description of Artificial Sequence: Synthetic oligonucleotide
uauaucuaugguuacaagu

SEQ ID NO: 3232342 - RNA, 19 nt, Artificial Sequence
  Description of Artificial Sequence: Synthetic oligonucleotide
aucaacaacauccaggaca

SEQ ID NO: 3232343 - RNA, 19 nt, Artificial Sequence
  Description of Artificial Sequence: Synthetic oligonucleotide
caaauaaaacacuuuguag

SEQ ID NO: 3232344 - RNA, 19 nt, Artificial Sequence
  Description of Artificial Sequence: Synthetic oligonucleotide
uaaacaaaaccgaggaacc

SEQ ID NO: 3232345 - RNA, 19 nt, Artificial Sequence
  Description of Artificial Sequence: Synthetic oligonucleotide
auacauacaguugauggcc

SEQ ID NO: 3232346 - RNA, 19 nt, Artificial Sequence
  Description of Artificial Sequence: Synthetic oligonucleotide
aacaacauccaggacacac

SEQ ID NO: 3232347 - RNA, 19 nt, Artificial Sequence
  Description of Artificial Sequence: Synthetic oligonucleotide
uuguagauagaauauauau

SEQ ID NO: 3232348 - RNA, 19 nt, Artificial Sequence
  Description of Artificial Sequence: Synthetic oligonucleotide
uuugauacaguaauuuuaa

SEQ ID NO: 3232349 - RNA, 19 nt, Artificial Sequence
  Description of Artificial Sequence: Synthetic oligonucleotide
aacaucuugcaaauaaaac

SEQ ID NO: 3232350 - RNA, 19 nt, Artificial Sequence
  Description of Artificial Sequence: Synthetic oligonucleotide
caucuugcaaauaaaacac

SEQ ID NO: 3232351 - RNA, 19 nt, Artificial Sequence
  Description of Artificial Sequence: Synthetic oligonucleotide
ugcauuaaacaaaaccgag

SEQ ID NO: 3232352 - RNA, 19 nt, Artificial Sequence
  Description of Artificial Sequence: Synthetic oligonucleotide
aacacagaaacaacucucc

SEQ ID NO: 3232353 - RNA, 19 nt, Artificial Sequence
  Description of Artificial Sequence: Synthetic oligonucleotide
aaaaccgaggaacccaaag

SEQ ID NO: 3232354 - RNA, 19 nt, Artificial Sequence
  Description of Artificial Sequence: Synthetic oligonucleotide
aaacacagaaacaacucuc

SEQ ID NO: 3232355 - RNA, 19 nt, Artificial Sequence
  Description of Artificial Sequence: Synthetic oligonucleotide
acaagugauagccagaaau

SEQ ID NO: 3232356 - RNA, 19 nt, Artificial Sequence
  Description of Artificial Sequence: Synthetic oligonucleotide
uacaguaauuuuaauacau

SEQ ID NO: 3232357 - RNA, 19 nt, Artificial Sequence
  Description of Artificial Sequence: Synthetic oligonucleotide
aaaguuuaggaggcgcugc

SEQ ID NO: 3232358 - RNA, 19 nt, Artificial Sequence
  Description of Artificial Sequence: Synthetic oligonucleotide
uguaaugagaacugcauua

SEQ ID NO: 3232359 - RNA, 19 nt, Artificial Sequence
  Description of Artificial Sequence: Synthetic oligonucleotide
aagacuggcaucaacaaca

SEQ ID NO: 3232360 - RNA, 19 nt, Artificial Sequence
  Description of Artificial Sequence: Synthetic oligonucleotide
ugauacaguaauuuuaaua

SEQ ID NO: 3232361 - RNA, 19 nt, Artificial Sequence
  Description of Artificial Sequence: Synthetic oligonucleotide
gcaaauaucaaaauucagg

SEQ ID NO: 3232362 - RNA, 19 nt, Artificial Sequence
  Description of Artificial Sequence: Synthetic oligonucleotide
aaugcacuuguguaaugag

SEQ ID NO: 3232363 - RNA, 19 nt, Artificial Sequence
  Description of Artificial Sequence: Synthetic oligonucleotide
aacccaaaguuuaggaggc

SEQ ID NO: 3232364 - RNA, 19 nt, Artificial Sequence
  Description of Artificial Sequence: Synthetic oligonucleotide
aaaaggcccguguuccacc

SEQ ID NO: 3232365 - RNA, 19 nt, Artificial Sequence
  Description of Artificial Sequence: Synthetic oligonucleotide
acaggaaggccccaaaauc

SEQ ID NO: 3232366 - RNA, 19 nt, Artificial Sequence
  Description of Artificial Sequence: Synthetic oligonucleotide
uguaguugagccuugcagu

SEQ ID NO: 3232367 - RNA, 19 nt, Artificial Sequence
  Description of Artificial Sequence: Synthetic oligonucleotide
acagaaacaacucuccccu

SEQ ID NO: 3232368 - RNA, 19 nt, Artificial Sequence
  Description of Artificial Sequence: Synthetic oligonucleotide
gacagaugaucacaaggcg

SEQ ID NO: 3232369 - RNA, 19 nt, Artificial Sequence
  Description of Artificial Sequence: Synthetic oligonucleotide
agauagaauauauaugcau

SEQ ID NO: 3232370 - RNA, 19 nt, Artificial Sequence
  Description of Artificial Sequence: Synthetic oligonucleotide
uuuagggcagggcagguug

SEQ ID NO: 3232371 - RNA, 19 nt, Artificial Sequence
  Description of Artificial Sequence: Synthetic oligonucleotide
cauuaaacaaaaccgagga

SEQ ID NO: 3232372 - RNA, 19 nt, Artificial Sequence
  Description of Artificial Sequence: Synthetic oligonucleotide
agaauauauaugcauguau

SEQ ID NO: 3232373 - RNA, 19 nt, Artificial Sequence
  Description of Artificial Sequence: Synthetic oligonucleotide
ugcacuuguguaaugagaa

SEQ ID NO: 3232374 - RNA, 19 nt, Artificial Sequence
  Description of Artificial Sequence: Synthetic oligonucleotide
auaucuaugguuacaagug

SEQ ID NO: 3232375 - RNA, 19 nt, Artificial Sequence
  Description of Artificial Sequence: Synthetic oligonucleotide
uguguaaugagaacugcau

SEQ ID NO: 3232376 - RNA, 19 nt, Artificial Sequence
  Description of Artificial Sequence: Synthetic oligonucleotide
uuuaauacauacaguugau

SEQ ID NO: 3232377 - RNA, 19 nt, Artificial Sequence
  Description of Artificial Sequence: Synthetic oligonucleotide
acacagaaacaacucuccc

SEQ ID NO: 3232378 - RNA, 19 nt, Artificial Sequence
  Description of Artificial Sequence: Synthetic oligonucleotide
uagauagaauauauaugca

SEQ ID NO: 3232379 - RNA, 19 nt, Artificial Sequence
  Description of Artificial Sequence: Synthetic oligonucleotide
aaaggcccguguuccaccc

SEQ ID NO: 3232380 - RNA, 19 nt, Artificial Sequence
  Description of Artificial Sequence: Synthetic oligonucleotide
cacaagaucauccuucaug

SEQ ID NO: 3232381 - RNA, 19 nt, Artificial Sequence
  Description of Artificial Sequence: Synthetic oligonucleotide
gacaggaaggacaggaagg

SEQ ID NO: 3232382 - RNA, 19 nt, Artificial Sequence
  Description of Artificial Sequence: Synthetic oligonucleotide
uaucuaugguuacaaguga

SEQ ID NO: 3232383 - RNA, 19 nt, Artificial Sequence
  Description of Artificial Sequence: Synthetic oligonucleotide
ucuugcaaauaaaacacuu

SEQ ID NO: 3232384 - RNA, 19 nt, Artificial Sequence
  Description of Artificial Sequence: Synthetic oligonucleotide
ugcagucucaggcacaaga

SEQ ID NO: 3232385 - RNA, 19 nt, Artificial Sequence
  Description of Artificial Sequence: Synthetic oligonucleotide
ugagaacugcauuaaacaa

SEQ ID NO: 3232386 - RNA, 19 nt, Artificial Sequence
  Description of Artificial Sequence: Synthetic oligonucleotide
acacuuuguagauagaaua

SEQ ID NO: 3232387 - RNA, 19 nt, Artificial Sequence
  Description of Artificial Sequence: Synthetic oligonucleotide
cuugucacagcaacaagac

SEQ ID NO: 3232388 - RNA, 19 nt, Artificial Sequence
  Description of Artificial Sequence: Synthetic oligonucleotide
aagcaaauaucaaaauuca

SEQ ID NO: 3232389 - RNA, 19 nt, Artificial Sequence
  Description of Artificial Sequence: Synthetic oligonucleotide
aaucugccugugcaggaac

SEQ ID NO: 3232390 - RNA, 19 nt, Artificial Sequence
  Description of Artificial Sequence: Synthetic oligonucleotide
ugaaaugucugcccuuggc

SEQ ID NO: 3232391 - RNA, 19 nt, Artificial Sequence
  Description of Artificial Sequence: Synthetic oligonucleotide
cacagaaacaacucucccc

SEQ ID NO: 3232392 - RNA, 19 nt, Artificial Sequence
  Description of Artificial Sequence: Synthetic oligonucleotide
agaaccaccauagggacag

SEQ ID NO: 3232393 - RNA, 19 nt, Artificial Sequence
  Description of Artificial Sequence: Synthetic oligonucleotide
uguuccacccaacagggaa

SEQ ID NO: 3232394 - RNA, 19 nt, Artificial Sequence
  Description of Artificial Sequence: Synthetic oligonucleotide
cuaugguuacaagugauag

SEQ ID NO: 3232395 - RNA, 19 nt, Artificial Sequence
  Description of Artificial Sequence: Synthetic oligonucleotide
aauucagggauuaagugua

SEQ ID NO: 3232396 - RNA, 19 nt, Artificial Sequence
  Description of Artificial Sequence: Synthetic oligonucleotide
guugcuacuugucacagca

SEQ ID NO: 3232397 - RNA, 19 nt, Artificial Sequence
  Description of Artificial Sequence: Synthetic oligonucleotide
uguauaucuaugguuacaa

SEQ ID NO: 3232398 - RNA, 19 nt, Artificial Sequence
  Description of Artificial Sequence: Synthetic oligonucleotide
guuugguccagucacgggc

SEQ ID NO: 3232399 - RNA, 19 nt, Artificial Sequence
  Description of Artificial Sequence: Synthetic oligonucleotide
aacaacucuccccucagaa

SEQ ID NO: 3232400 - RNA, 19 nt, Artificial Sequence
  Description of Artificial Sequence: Synthetic oligonucleotide
aguaauuuuaauacauaca

SEQ ID NO: 3232401 - RNA, 19 nt, Artificial Sequence
  Description of Artificial Sequence: Synthetic oligonucleotide
aaaugcacuuguguaauga

SEQ ID NO: 3232402 - RNA, 19 nt, Artificial Sequence
  Description of Artificial Sequence: Synthetic oligonucleotide
guaggguagguccuggccg

SEQ ID NO: 3232403 - RNA, 19 nt, Artificial Sequence
  Description of Artificial Sequence: Synthetic oligonucleotide
ucugcaugaaaugucugcc

SEQ ID NO: 3232404 - RNA, 19 nt, Artificial Sequence
  Description of Artificial Sequence: Synthetic oligonucleotide
ugcuacuugucacagcaac

SEQ ID NO: 3232405 - RNA, 19 nt, Artificial Sequence
  Description of Artificial Sequence: Synthetic oligonucleotide
uauuugauacaguaauuuu

SEQ ID NO: 3232406 - RNA, 19 nt, Artificial Sequence
  Description of Artificial Sequence: Synthetic oligonucleotide
ugcaugaaaugucugcccu

SEQ ID NO: 3232407 - RNA, 19 nt, Artificial Sequence
  Description of Artificial Sequence: Synthetic oligonucleotide
auuuuaauacauacaguug

SEQ ID NO: 3232408 - RNA, 19 nt, Artificial Sequence
  Description of Artificial Sequence: Synthetic oligonucleotide
auacaguaauuuuaauaca

SEQ ID NO: 3232409 - RNA, 19 nt, Artificial Sequence
  Description of Artificial Sequence: Synthetic oligonucleotide
caaaacaucuugcaaauaa

SEQ ID NO: 3232410 - RNA, 19 nt, Artificial Sequence
  Description of Artificial Sequence: Synthetic oligonucleotide
guguaguugagccuugcag

SEQ ID NO: 3232411 - RNA, 19 nt, Artificial Sequence
  Description of Artificial Sequence: Synthetic oligonucleotide
acagaugaucacaaggcgg

SEQ ID NO: 3232412 - RNA, 19 nt, Artificial Sequence
  Description of Artificial Sequence: Synthetic oligonucleotide
aaaaucugccugugcagga

SEQ ID NO: 3232413 - RNA, 19 nt, Artificial Sequence
  Description of Artificial Sequence: Synthetic oligonucleotide
aaaccaggucuccagggca

SEQ ID NO: 3232414 - RNA, 19 nt, Artificial Sequence
  Description of Artificial Sequence: Synthetic oligonucleotide
cucagaaccaccauaggga

SEQ ID NO: 3232415 - RNA, 19 nt, Artificial Sequence
  Description of Artificial Sequence: Synthetic oligonucleotide
gguuacaagugauagccag

SEQ ID NO: 3232416 - RNA, 19 nt, Artificial Sequence
  Description of Artificial Sequence: Synthetic oligonucleotide
ugcauguauaucuaugguu

SEQ ID NO: 3232417 - RNA, 19 nt, Artificial Sequence
  Description of Artificial Sequence: Synthetic oligonucleotide
aauguugugaauccaaggc

SEQ ID NO: 3232418 - RNA, 19 nt, Artificial Sequence
  Description of Artificial Sequence: Synthetic oligonucleotide
agaagaaugagccacaggc

SEQ ID NO: 3232419 - RNA, 19 nt, Artificial Sequence
  Description of Artificial Sequence: Synthetic oligonucleotide
aagauagcagcacagagcc

SEQ ID NO: 3232420 - RNA, 19 nt, Artificial Sequence
  Description of Artificial Sequence: Synthetic oligonucleotide
aacaaaagaaucuugccag

SEQ ID NO: 3232421 - RNA, 19 nt, Artificial Sequence
  Description of Artificial Sequence: Synthetic oligonucleotide
aagaaugagccacaggcuc

SEQ ID NO: 3232422 - RNA, 19 nt, Artificial Sequence
  Description of Artificial Sequence: Synthetic oligonucleotide
acaagggcaagauagcagc

SEQ ID NO: 3232423 - RNA, 19 nt, Artificial Sequence
  Description of Artificial Sequence: Synthetic oligonucleotide
agaaucuugccagugaugc

SEQ ID NO: 3232424 - RNA, 19 nt, Artificial Sequence
  Description of Artificial Sequence: Synthetic oligonucleotide
agagcaaucaucauggcac

SEQ ID NO: 3232425 - RNA, 19 nt, Artificial Sequence
  Description of Artificial Sequence: Synthetic oligonucleotide
agugauccccuccagaggc

SEQ ID NO: 3232426 - RNA, 19 nt, Artificial Sequence
  Description of Artificial Sequence: Synthetic oligonucleotide
aauccaaggcccgagaagg

SEQ ID NO: 3232427 - RNA, 19 nt, Artificial Sequence
  Description of Artificial Sequence: Synthetic oligonucleotide
gucuguagcaaauauaggc

SEQ ID NO: 3232428 - RNA, 19 nt, Artificial Sequence
  Description of Artificial Sequence: Synthetic oligonucleotide
gacagagcaaucaucaugg

SEQ ID NO: 3232429 - RNA, 19 nt, Artificial Sequence
  Description of Artificial Sequence: Synthetic oligonucleotide
uccaacaaaagaaucuugc

SEQ ID NO: 3232430 - RNA, 19 nt, Artificial Sequence
  Description of Artificial Sequence: Synthetic oligonucleotide
cugucuguagcaaauauag

SEQ ID NO: 3232431 - RNA, 19 nt, Artificial Sequence
  Description of Artificial Sequence: Synthetic oligonucleotide
auguugugaauccaaggcc

SEQ ID NO: 3232432 - RNA, 19 nt, Artificial Sequence
  Description of Artificial Sequence: Synthetic oligonucleotide
aaugaggccaaucacuccu

SEQ ID NO: 3232433 - RNA, 19 nt, Artificial Sequence
  Description of Artificial Sequence: Synthetic oligonucleotide
ucuguagcaaauauaggca

SEQ ID NO: 3232434 - RNA, 19 nt, Artificial Sequence
  Description of Artificial Sequence: Synthetic oligonucleotide
caguacaagggcaagauag

SEQ ID NO: 3232435 - RNA, 19 nt, Artificial Sequence
  Description of Artificial Sequence: Synthetic oligonucleotide
acacauucgagacagagca

SEQ ID NO: 3232436 - RNA, 19 nt, Artificial Sequence
  Description of Artificial Sequence: Synthetic oligonucleotide
acugacauaggguuugugg

SEQ ID NO: 3232437 - RNA, 19 nt, Artificial Sequence
  Description of Artificial Sequence: Synthetic oligonucleotide
uguugugaauccaaggccc

SEQ ID NO: 3232438 - RNA, 19 nt, Artificial Sequence
  Description of Artificial Sequence: Synthetic oligonucleotide
aaaaugaggccaaucacuc

SEQ ID NO: 3232439 - RNA, 19 nt, Artificial Sequence
  Description of Artificial Sequence: Synthetic oligonucleotide
cuagacacccaucauacgg

SEQ ID NO: 3232440 - RNA, 19 nt, Artificial Sequence
  Description of Artificial Sequence: Synthetic oligonucleotide
aaaugaggccaaucacucc

SEQ ID NO: 3232441 - RNA, 19 nt, Artificial Sequence
  Description of Artificial Sequence: Synthetic oligonucleotide
uccuucuucaaugaagugg

SEQ ID NO: 3232442 - RNA, 19 nt, Artificial Sequence
  Description of Artificial Sequence: Synthetic oligonucleotide
gaauguugugaauccaagg

SEQ ID NO: 3232443 - RNA, 19 nt, Artificial Sequence
  Description of Artificial Sequence: Synthetic oligonucleotide
acacccaucauacggggcc

SEQ ID NO: 3232444 - RNA, 19 nt, Artificial Sequence
  Description of Artificial Sequence: Synthetic oligonucleotide
aucaucauggcacaguaca

SEQ ID NO: 3232445 - RNA, 19 nt, Artificial Sequence
  Description of Artificial Sequence: Synthetic oligonucleotide
ucuuccuagacacccauca

SEQ ID NO: 3232446 - RNA, 19 nt, Artificial Sequence
  Description of Artificial Sequence: Synthetic oligonucleotide
aaaagaaucuugccaguga

SEQ ID NO: 3232447 - RNA, 19 nt, Artificial Sequence
  Description of Artificial Sequence: Synthetic oligonucleotide
ucagcguccaucuuccuag

SEQ ID NO: 3232448 - RNA, 19 nt, Artificial Sequence
  Description of Artificial Sequence: Synthetic oligonucleotide
ucuucaaugaagugggcac

SEQ ID NO: 3232449 - RNA, 19 nt, Artificial Sequence
  Description of Artificial Sequence: Synthetic oligonucleotide
ucagugauccccuccagag

SEQ ID NO: 3232450 - RNA, 19 nt, Artificial Sequence
  Description of Artificial Sequence: Synthetic oligonucleotide
aaagaaucuugccagugau

SEQ ID NO: 3232451 - RNA, 19 nt, Artificial Sequence
  Description of Artificial Sequence: Synthetic oligonucleotide
uguagucacacauucgaga

SEQ ID NO: 3232452 - RNA, 19 nt, Artificial Sequence
  Description of Artificial Sequence: Synthetic oligonucleotide
gauagcagcacagagccgc

SEQ ID NO: 3232453 - RNA, 19 nt, Artificial Sequence
  Description of Artificial Sequence: Synthetic oligonucleotide
uagacacccaucauacggg

SEQ ID NO: 3232454 - RNA, 19 nt, Artificial Sequence
  Description of Artificial Sequence: Synthetic oligonucleotide
caagauagcagcacagagc

SEQ ID NO: 3232455 - RNA, 19 nt, Artificial Sequence
  Description of Artificial Sequence: Synthetic oligonucleotide
aucauggcacaguacaagg

SEQ ID NO: 3232456 - RNA, 19 nt, Artificial Sequence
  Description of Artificial Sequence: Synthetic oligonucleotide
cugacauaggguuuguggc

SEQ ID NO: 3232457 - RNA, 19 nt, Artificial Sequence
  Description of Artificial Sequence: Synthetic oligonucleotide
aagcagugcagcuugccag

SEQ ID NO: 3232458 - RNA, 19 nt, Artificial Sequence
  Description of Artificial Sequence: Synthetic oligonucleotide
uugccagccagguagaaug

SEQ ID NO: 3232459 - RNA, 19 nt, Artificial Sequence
  Description of Artificial Sequence: Synthetic oligonucleotide
uccuagacacccaucauac

SEQ ID NO: 3232460 - RNA, 19 nt, Artificial Sequence
  Description of Artificial Sequence: Synthetic oligonucleotide
uccuccaacaaaagaaucu

SEQ ID NO: 3232461 - RNA, 19 nt, Artificial Sequence
  Description of Artificial Sequence: Synthetic oligonucleotide
uccuccuucuucaaugaag

SEQ ID NO: 3232462 - RNA, 19 nt, Artificial Sequence
  Description of Artificial Sequence: Synthetic oligonucleotide
ucauggcacaguacaaggg

SEQ ID NO: 3232463 - RNA, 19 nt, Artificial Sequence
  Description of Artificial Sequence: Synthetic oligonucleotide
uacaagggcaagauagcag

SEQ ID NO: 3232464 - RNA, 19 nt, Artificial Sequence
  Description of Artificial Sequence: Synthetic oligonucleotide
agagccgccagcucuuucc

SEQ ID NO: 3232465 - RNA, 19 nt, Artificial Sequence
  Description of Artificial Sequence: Synthetic oligonucleotide
agacagagcaaucaucaug

SEQ ID NO: 3232466 - RNA, 19 nt, Artificial Sequence
  Description of Artificial Sequence: Synthetic oligonucleotide
uguguuggccagaggaggg

SEQ ID NO: 3232467 - RNA, 19 nt, Artificial Sequence
  Description of Artificial Sequence: Synthetic oligonucleotide
uugccagugaugcuuguag

SEQ ID NO: 3232468 - RNA, 19 nt, Artificial Sequence
  Description of Artificial Sequence: Synthetic oligonucleotide
ucauacggggcccucagug

SEQ ID NO: 3232469 - RNA, 19 nt, Artificial Sequence
  Description of Artificial Sequence: Synthetic oligonucleotide
ugucuguagcaaauauagg

SEQ ID NO: 3232470 - RNA, 19 nt, Artificial Sequence
  Description of Artificial Sequence: Synthetic oligonucleotide
agguagaauguugugaauc

SEQ ID NO: 3232471 - RNA, 19 nt, Artificial Sequence
  Description of Artificial Sequence: Synthetic oligonucleotide
agucacacauucgagacag

SEQ ID NO: 3232472 - RNA, 19 nt, Artificial Sequence
  Description of Artificial Sequence: Synthetic oligonucleotide
cauggcacaguacaagggc

SEQ ID NO: 3232473 - RNA, 19 nt, Artificial Sequence
  Description of Artificial Sequence: Synthetic oligonucleotide
guagucacacauucgagac

SEQ ID NO: 3232474 - RNA, 19 nt, Artificial Sequence
  Description of Artificial Sequence: Synthetic oligonucleotide
ccuucuucaaugaaguggg

SEQ ID NO: 3232475 - RNA, 19 nt, Artificial Sequence
  Description of Artificial Sequence: Synthetic oligonucleotide
uguacugucggcugucggc

SEQ ID NO: 3232476 - RNA, 19 nt, Artificial Sequence
  Description of Artificial Sequence: Synthetic oligonucleotide
ugcuuguagucacacauuc

SEQ ID NO: 3232477 - RNA, 19 nt, Artificial Sequence
  Description of Artificial Sequence: Synthetic oligonucleotide
uagaauguugugaauccaa

SEQ ID NO: 3232478 - RNA, 19 nt, Artificial Sequence
  Description of Artificial Sequence: Synthetic oligonucleotide
gaagugggcacucggagac

SEQ ID NO: 3232479 - RNA, 19 nt, Artificial Sequence
  Description of Artificial Sequence: Synthetic oligonucleotide
ucacacauucgagacagag

SEQ ID NO: 3232480 - RNA, 19 nt, Artificial Sequence
  Description of Artificial Sequence: Synthetic oligonucleotide
uccaucuuccuagacaccc

SEQ ID NO: 3232481 - RNA, 19 nt, Artificial Sequence
  Description of Artificial Sequence: Synthetic oligonucleotide
cuuguagucacacauucga

SEQ ID NO: 3232482 - RNA, 19 nt, Artificial Sequence
  Description of Artificial Sequence: Synthetic oligonucleotide
uuguagucacacauucgag

SEQ ID NO: 3232483 - RNA, 19 nt, Artificial Sequence
  Description of Artificial Sequence: Synthetic oligonucleotide
uagaagaaugagccacagg

SEQ ID NO: 3232484 - RNA, 19 nt, Artificial Sequence
  Description of Artificial Sequence: Synthetic oligonucleotide
uccagaggcaagcugggug

SEQ ID NO: 3232485 - RNA, 19 nt, Artificial Sequence
  Description of Artificial Sequence: Synthetic oligonucleotide
aguacaagggcaagauagc

SEQ ID NO: 3232486 - RNA, 19 nt, Artificial Sequence
  Description of Artificial Sequence: Synthetic oligonucleotide
caacaaaagaaucuugcca

SEQ ID NO: 3232487 - RNA, 19 nt, Artificial Sequence
  Description of Artificial Sequence: Synthetic oligonucleotide
gguagaauguugugaaucc

SEQ ID NO: 3232488 - RNA, 19 nt, Artificial Sequence
  Description of Artificial Sequence: Synthetic oligonucleotide
gaauccaaggcccgagaag

SEQ ID NO: 3232489 - RNA, 19 nt, Artificial Sequence
  Description of Artificial Sequence: Synthetic oligonucleotide
agcagugcagcuugccagc

SEQ ID NO: 3232490 - RNA, 19 nt, Artificial Sequence
  Description of Artificial Sequence: Synthetic oligonucleotide
aagggcaagauagcagcac

SEQ ID NO: 3232491 - RNA, 19 nt, Artificial Sequence
  Description of Artificial Sequence: Synthetic oligonucleotide
cucggagacugacauaggg

SEQ ID NO: 3232492 - RNA, 19 nt, Artificial Sequence
  Description of Artificial Sequence: Synthetic oligonucleotide
aaucacuccuccaacaaaa

SEQ ID NO: 3232493 - RNA, 19 nt, Artificial Sequence
  Description of Artificial Sequence: Synthetic oligonucleotide
augaagugggcacucggag

SEQ ID NO: 3232494 - RNA, 19 nt, Artificial Sequence
  Description of Artificial Sequence: Synthetic oligonucleotide
uguagcaaauauaggcaaa

SEQ ID NO: 3232495 - RNA, 19 nt, Artificial Sequence
  Description of Artificial Sequence: Synthetic oligonucleotide
cagcuugccagccagguag

SEQ ID NO: 3232496 - RNA, 19 nt, Artificial Sequence
  Description of Artificial Sequence: Synthetic oligonucleotide
augagccacaggcucagcg

SEQ ID NO: 3232497 - RNA, 19 nt, Artificial Sequence
  Description of Artificial Sequence: Synthetic oligonucleotide
ugacauaggguuuguggca

SEQ ID NO: 3232498 - RNA, 19 nt, Artificial Sequence
  Description of Artificial Sequence: Synthetic oligonucleotide
cacucggagacugacauag

SEQ ID NO: 3232499 - RNA, 19 nt, Artificial Sequence
  Description of Artificial Sequence: Synthetic oligonucleotide
gaugcuuguagucacacau

SEQ ID NO: 3232500 - RNA, 19 nt, Artificial Sequence
  Description of Artificial Sequence: Synthetic oligonucleotide
aagcuggguguacugucgg

SEQ ID NO: 3232501 - RNA, 19 nt, Artificial Sequence
  Description of Artificial Sequence: Synthetic oligonucleotide
uucuucaaugaagugggca

SEQ ID NO: 3232502 - RNA, 19 nt, Artificial Sequence
  Description of Artificial Sequence: Synthetic oligonucleotide
aaucuugccagugaugcuu

SEQ ID NO: 3232503 - RNA, 19 nt, Artificial Sequence
  Description of Artificial Sequence: Synthetic oligonucleotide
agugcagcuugccagccag

SEQ ID NO: 3232504 - RNA, 19 nt, Artificial Sequence
  Description of Artificial Sequence: Synthetic oligonucleotide
aaucaucauggcacaguac

SEQ ID NO: 3232505 - RNA, 19 nt, Artificial Sequence
  Description of Artificial Sequence: Synthetic oligonucleotide
aggaggguaaugcugucug

SEQ ID NO: 3232506 - RNA, 19 nt, Artificial Sequence
  Description of Artificial Sequence: Synthetic oligonucleotide
ucacuccuccaacaaaaga

SEQ ID NO: 3232507 - RNA, 19 nt, Artificial Sequence
  Description of Artificial Sequence: Synthetic oligonucleotide
cacacauucgagacagagc

SEQ ID NO: 3232508 - RNA, 19 nt, Artificial Sequence
  Description of Artificial Sequence: Synthetic oligonucleotide
uaggguuuguggcacgcug

SEQ ID NO: 3232509 - RNA, 19 nt, Artificial Sequence
  Description of Artificial Sequence: Synthetic oligonucleotide
uuccuagacacccaucaua

SEQ ID NO: 3232510 - RNA, 19 nt, Artificial Sequence
  Description of Artificial Sequence: Synthetic oligonucleotide
cucuccuccuucuucaaug

SEQ ID NO: 3232511 - RNA, 19 nt, Artificial Sequence
  Description of Artificial Sequence: Synthetic oligonucleotide
ucggagacugacauagggu

SEQ ID NO: 3232512 - RNA, 19 nt, Artificial Sequence
  Description of Artificial Sequence: Synthetic oligonucleotide
caaugaagugggcacucgg

SEQ ID NO: 3232513 - RNA, 19 nt, Artificial Sequence
  Description of Artificial Sequence: Synthetic oligonucleotide
aggguaaugcugucuguag

SEQ ID NO: 3232514 - RNA, 19 nt, Artificial Sequence
  Description of Artificial Sequence: Synthetic oligonucleotide
ugaauccaaggcccgagaa

SEQ ID NO: 3232515 - RNA, 19 nt, Artificial Sequence
  Description of Artificial Sequence: Synthetic oligonucleotide
aaugcugucuguagcaaau

SEQ ID NO: 3232516 - RNA, 19 nt, Artificial Sequence
  Description of Artificial Sequence: Synthetic oligonucleotide
caagcuggguguacugucg

SEQ ID NO: 3232517 - RNA, 19 nt, Artificial Sequence
  Description of Artificial Sequence: Synthetic oligonucleotide
aauucauuccuucagaugg

SEQ ID NO: 3232518 - RNA, 19 nt, Artificial Sequence
  Description of Artificial Sequence: Synthetic oligonucleotide
aaugagaauacuuuuaaag

SEQ ID NO: 3232519 - RNA, 19 nt, Artificial Sequence
  Description of Artificial Sequence: Synthetic oligonucleotide
ucaucuuuaacuauaagag

SEQ ID NO: 3232520 - RNA, 19 nt, Artificial Sequence
  Description of Artificial Sequence: Synthetic oligonucleotide
aacuauaagaguuguaaac

SEQ ID NO: 3232521 - RNA, 19 nt, Artificial Sequence
  Description of Artificial Sequence: Synthetic oligonucleotide
acuacuuggaacaagaucc

SEQ ID NO: 3232522 - RNA, 19 nt, Artificial Sequence
  Description of Artificial Sequence: Synthetic oligonucleotide
augagaauacuuuuaaagc

SEQ ID NO: 3232523 - RNA, 19 nt, Artificial Sequence
  Description of Artificial Sequence: Synthetic oligonucleotide
ugauauuucaccaagugga

SEQ ID NO: 3232524 - RNA, 19 nt, Artificial Sequence
  Description of Artificial Sequence: Synthetic oligonucleotide
aaugauuccaauauacuac

SEQ ID NO: 3232525 - RNA, 19 nt, Artificial Sequence
  Description of Artificial Sequence: Synthetic oligonucleotide
aauacuuuuaaagcaggcc

SEQ ID NO: 3232526 - RNA, 19 nt, Artificial Sequence
  Description of Artificial Sequence: Synthetic oligonucleotide
gauacuuuauaguaacugg

SEQ ID NO: 3232527 - RNA, 19 nt, Artificial Sequence
  Description of Artificial Sequence: Synthetic oligonucleotide
ucaucagagacuaauagca

SEQ ID NO: 3232528 - RNA, 19 nt, Artificial Sequence
  Description of Artificial Sequence: Synthetic oligonucleotide
uagaaugaaaaguacuugg

SEQ ID NO: 3232529 - RNA, 19 nt, Artificial Sequence
  Description of Artificial Sequence: Synthetic oligonucleotide
aaugaaaaguacuugguaa

SEQ ID NO: 3232530 - RNA, 19 nt, Artificial Sequence
  Description of Artificial Sequence: Synthetic oligonucleotide
uucaucuuuaacuauaaga

SEQ ID NO: 3232531 - RNA, 19 nt, Artificial Sequence
  Description of Artificial Sequence: Synthetic oligonucleotide
agaguuguaaacuaagcag

SEQ ID NO: 3232532 - RNA, 19 nt, Artificial Sequence
  Description of Artificial Sequence: Synthetic oligonucleotide
aaaaguacuugguaaacca

SEQ ID NO: 3232533 - RNA, 19 nt, Artificial Sequence
  Description of Artificial Sequence: Synthetic oligonucleotide
ugaaaugauuccaauauac

SEQ ID NO: 3232534 - RNA, 19 nt, Artificial Sequence
  Description of Artificial Sequence: Synthetic oligonucleotide
aaauacaauggguaguuug

SEQ ID NO: 3232535 - RNA, 19 nt, Artificial Sequence
  Description of Artificial Sequence: Synthetic oligonucleotide
uuuuaauucauuccuucag

SEQ ID NO: 3232536 - RNA, 19 nt, Artificial Sequence
  Description of Artificial Sequence: Synthetic oligonucleotide
uuuguuuuagcuaucacau

SEQ ID NO: 3232537 - RNA, 19 nt, Artificial Sequence
  Description of Artificial Sequence: Synthetic oligonucleotide
aauguuaaugaccauacuu

SEQ ID NO: 3232538 - RNA, 19 nt, Artificial Sequence
  Description of Artificial Sequence: Synthetic oligonucleotide
auuccaauauacuacuugg

SEQ ID NO: 3232539 - RNA, 19 nt, Artificial Sequence
  Description of Artificial Sequence: Synthetic oligonucleotide
uuagcuaucacauguaagu

SEQ ID NO: 3232540 - RNA, 19 nt, Artificial Sequence
  Description of Artificial Sequence: Synthetic oligonucleotide
uguuuuagcuaucacaugu

SEQ ID NO: 3232541 - RNA, 19 nt, Artificial Sequence
  Description of Artificial Sequence: Synthetic oligonucleotide
ugagaauacuuuuaaagca

SEQ ID NO: 3232542 - RNA, 19 nt, Artificial Sequence
  Description of Artificial Sequence: Synthetic oligonucleotide
acaagucugauauuucacc

SEQ ID NO: 3232543 - RNA, 19 nt, Artificial Sequence
  Description of Artificial Sequence: Synthetic oligonucleotide
uaagaaccaguuuagaaug

SEQ ID NO: 3232544 - RNA, 19 nt, Artificial Sequence
  Description of Artificial Sequence: Synthetic oligonucleotide
aagaguuguaaacuaagca

SEQ ID NO: 3232545 - RNA, 19 nt, Artificial Sequence
  Description of Artificial Sequence: Synthetic oligonucleotide
auaguaacuggcuuguuuc

SEQ ID NO: 3232546 - RNA, 19 nt, Artificial Sequence
  Description of Artificial Sequence: Synthetic oligonucleotide
uauacuacuuggaacaaga

SEQ ID NO: 3232547 - RNA, 19 nt, Artificial Sequence
  Description of Artificial Sequence: Synthetic oligonucleotide
aaaaugagaauacuuuuaa

SEQ ID NO: 3232548 - RNA, 19 nt, Artificial Sequence
  Description of Artificial Sequence: Synthetic oligonucleotide
aauagcauuuuccaaggga

SEQ ID NO: 3232549 - RNA, 19 nt, Artificial Sequence
  Description of Artificial Sequence: Synthetic oligonucleotide
aauacaauggguaguuugg

SEQ ID NO: 3232550 - RNA, 19 nt, Artificial Sequence
  Description of Artificial Sequence: Synthetic oligonucleotide
uuuaaagcaggccauggca

SEQ ID NO: 3232551 - RNA, 19 nt, Artificial Sequence
  Description of Artificial Sequence: Synthetic oligonucleotide
ucacauguaagucacuacc

SEQ ID NO: 3232552 - RNA, 19 nt, Artificial Sequence
  Description of Artificial Sequence: Synthetic oligonucleotide
uuuagaaugaaaaguacuu

SEQ ID NO: 3232553 - RNA, 19 nt, Artificial Sequence
  Description of Artificial Sequence: Synthetic oligonucleotide
uggagugugacauuacagg

SEQ ID NO: 3232554 - RNA, 19 nt, Artificial Sequence
  Description of Artificial Sequence: Synthetic oligonucleotide
uuguaaacuaagcaggugu

SEQ ID NO: 3232555 - RNA, 19 nt, Artificial Sequence
  Description of Artificial Sequence: Synthetic oligonucleotide
uauuucaccaaguggagug

SEQ ID NO: 3232556 - RNA, 19 nt, Artificial Sequence
  Description of Artificial Sequence: Synthetic oligonucleotide
gaaacuggaauguuaauga

SEQ ID NO: 3232557 - RNA, 19 nt, Artificial Sequence
  Description of Artificial Sequence: Synthetic oligonucleotide
aaacuggaauguuaaugac

SEQ ID NO: 3232558 - RNA, 19 nt, Artificial Sequence
  Description of Artificial Sequence: Synthetic oligonucleotide
agugugacauuacaggcac

SEQ ID NO: 3232559 - RNA, 19 nt, Artificial Sequence
  Description of Artificial Sequence: Synthetic oligonucleotide
uuuaauucauuccuucaga

SEQ ID NO: 3232560 - RNA, 19 nt, Artificial Sequence
  Description of Artificial Sequence: Synthetic oligonucleotide
aacuggaauguuaaugacc

SEQ ID NO: 3232561 - RNA, 19 nt, Artificial Sequence
  Description of Artificial Sequence: Synthetic oligonucleotide
agaugguugaaaugauucc

SEQ ID NO: 3232562 - RNA, 19 nt, Artificial Sequence
  Description of Artificial Sequence: Synthetic oligonucleotide
auacuuuuaaagcaggcca

SEQ ID NO: 3232563 - RNA, 19 nt, Artificial Sequence
  Description of Artificial Sequence: Synthetic oligonucleotide
uggaacaagauccuaagaa

SEQ ID NO: 3232564 - RNA, 19 nt, Artificial Sequence
  Description of Artificial Sequence: Synthetic oligonucleotide
gaguuguaaacuaagcagg

SEQ ID NO: 3232565 - RNA, 19 nt, Artificial Sequence
  Description of Artificial Sequence: Synthetic oligonucleotide
agggauacuuuauaguaac

SEQ ID NO: 3232566 - RNA, 19 nt, Artificial Sequence
  Description of Artificial Sequence: Synthetic oligonucleotide
uuuagcuaucacauguaag

SEQ ID NO: 3232567 - RNA, 19 nt, Artificial Sequence
  Description of Artificial Sequence: Synthetic oligonucleotide
auacuuuauaguaacuggc

SEQ ID NO: 3232568 - RNA, 19 nt, Artificial Sequence
  Description of Artificial Sequence: Synthetic oligonucleotide
gauuccaauauacuacuug

SEQ ID NO: 3232569 - RNA, 19 nt, Artificial Sequence
  Description of Artificial Sequence: Synthetic oligonucleotide
cuaauagcauuuuccaagg

SEQ ID NO: 3232570 - RNA, 19 nt, Artificial Sequence
  Description of Artificial Sequence: Synthetic oligonucleotide
ucuuuaacuauaagaguug

SEQ ID NO: 3232571 - RNA, 19 nt, Artificial Sequence
  Description of Artificial Sequence: Synthetic oligonucleotide
gucacuaccagcuuguuac

SEQ ID NO: 3232572 - RNA, 19 nt, Artificial Sequence
  Description of Artificial Sequence: Synthetic oligonucleotide
uuaaagcaggccauggcag

SEQ ID NO: 3232573 - RNA, 19 nt, Artificial Sequence
  Description of Artificial Sequence: Synthetic oligonucleotide
ugaaacuggaauguuaaug

SEQ ID NO: 3232574 - RNA, 19 nt, Artificial Sequence
  Description of Artificial Sequence: Synthetic oligonucleotide
caauauacuacuuggaaca

SEQ ID NO: 3232575 - RNA, 19 nt, Artificial Sequence
  Description of Artificial Sequence: Synthetic oligonucleotide
uaagaguuguaaacuaagc

SEQ ID NO: 3232576 - RNA, 19 nt, Artificial Sequence
  Description of Artificial Sequence: Synthetic oligonucleotide
ucacaaugaaacuggaaug

SEQ ID NO: 3232577 - RNA, 19 nt, Artificial Sequence
  Description of Artificial Sequence: Synthetic oligonucleotide
gagacuaauagcauuuucc

SEQ ID NO: 3232578 - RNA, 19 nt, Artificial Sequence
  Description of Artificial Sequence: Synthetic oligonucleotide
uaaaccacuccugaugugg

SEQ ID NO: 3232579 - RNA, 19 nt, Artificial Sequence
  Description of Artificial Sequence: Synthetic oligonucleotide
cuuuauaguaacuggcuug

SEQ ID NO: 3232580 - RNA, 19 nt, Artificial Sequence
  Description of Artificial Sequence: Synthetic oligonucleotide
uguuaaugaccauacuuug

SEQ ID NO: 3232581 - RNA, 19 nt, Artificial Sequence
  Description of Artificial Sequence: Synthetic oligonucleotide
gaacaagauccuaagaacc

SEQ ID NO: 3232582 - RNA, 19 nt, Artificial Sequence
  Description of Artificial Sequence: Synthetic oligonucleotide
gagaauacuuuuaaagcag

SEQ ID NO: 3232583 - RNA, 19 nt, Artificial Sequence
  Description of Artificial Sequence: Synthetic oligonucleotide
uuaaugaccauacuuuguu

SEQ ID NO: 3232584 - RNA, 19 nt, Artificial Sequence
  Description of Artificial Sequence: Synthetic oligonucleotide
uccaauauacuacuuggaa

SEQ ID NO: 3232585 - RNA, 19 nt, Artificial Sequence
  Description of Artificial Sequence: Synthetic oligonucleotide
uauaagaguuguaaacuaa

SEQ ID NO: 3232586 - RNA, 19 nt, Artificial Sequence
  Description of Artificial Sequence: Synthetic oligonucleotide
gauccuaagaaccaguuua

SEQ ID NO: 3232587 - RNA, 19 nt, Artificial Sequence
  Description of Artificial Sequence: Synthetic oligonucleotide
uccaagggauacuuuauag

SEQ ID NO: 3232588 - RNA, 19 nt, Artificial Sequence
  Description of Artificial Sequence: Synthetic oligonucleotide
uuuuaaagcaggccauggc

SEQ ID NO: 3232589 - RNA, 19 nt, Artificial Sequence
  Description of Artificial Sequence: Synthetic oligonucleotide
accaguuuagaaugaaaag

SEQ ID NO: 3232590 - RNA, 19 nt, Artificial Sequence
  Description of Artificial Sequence: Synthetic oligonucleotide
aaugaccauacuuuguuuu

SEQ ID NO: 3232591 - RNA, 19 nt, Artificial Sequence
  Description of Artificial Sequence: Synthetic oligonucleotide
uacuuuauaguaacuggcu

SEQ ID NO: 3232592 - RNA, 19 nt, Artificial Sequence
  Description of Artificial Sequence: Synthetic oligonucleotide
uuagaaugaaaaguacuug

SEQ ID NO: 3232593 - RNA, 19 nt, Artificial Sequence
  Description of Artificial Sequence: Synthetic oligonucleotide
acaauggguaguuugguca

SEQ ID NO: 3232594 - RNA, 19 nt, Artificial Sequence
  Description of Artificial Sequence: Synthetic oligonucleotide
ugguaaaccacuccugaug

SEQ ID NO: 3232595 - RNA, 19 nt, Artificial Sequence
  Description of Artificial Sequence: Synthetic oligonucleotide
guggagaugacccagaaaa

SEQ ID NO: 3232596 - RNA, 19 nt, Artificial Sequence
  Description of Artificial Sequence: Synthetic oligonucleotide
agacuaauagcauuuucca

SEQ ID NO: 3232597 - RNA, 19 nt, Artificial Sequence
  Description of Artificial Sequence: Synthetic oligonucleotide
acuauaagaguuguaaacu

SEQ ID NO: 3232598 - RNA, 19 nt, Artificial Sequence
  Description of Artificial Sequence: Synthetic oligonucleotide
aaugaaacuggaauguuaa

SEQ ID NO: 3232599 - RNA, 19 nt, Artificial Sequence
  Description of Artificial Sequence: Synthetic oligonucleotide
agagccuugcuucuguggg

SEQ ID NO: 3232600 - RNA, 19 nt, Artificial Sequence
  Description of Artificial Sequence: Synthetic oligonucleotide
uaguuuggucaucagagac

SEQ ID NO: 3232601 - RNA, 19 nt, Artificial Sequence
  Description of Artificial Sequence: Synthetic oligonucleotide
ugacauuacaggcacuaga

SEQ ID NO: 3232602 - RNA, 19 nt, Artificial Sequence
  Description of Artificial Sequence: Synthetic oligonucleotide
cuuuguuuuagcuaucaca

SEQ ID NO: 3232603 - RNA, 19 nt, Artificial Sequence
  Description of Artificial Sequence: Synthetic oligonucleotide
auuuuaauucauuccuuca

SEQ ID NO: 3232604 - RNA, 19 nt, Artificial Sequence
  Description of Artificial Sequence: Synthetic oligonucleotide
uguuucaucuuuaacuaua

SEQ ID NO: 3232605 - RNA, 19 nt, Artificial Sequence
  Description of Artificial Sequence: Synthetic oligonucleotide
uacuugguaaaccacuccu

SEQ ID NO: 3232606 - RNA, 19 nt, Artificial Sequence
  Description of Artificial Sequence: Synthetic oligonucleotide
agucugauauuucaccaag

SEQ ID NO: 3232607 - RNA, 19 nt, Artificial Sequence
  Description of Artificial Sequence: Synthetic oligonucleotide
ggugauuuuaauucauucc

SEQ ID NO: 3232608 - RNA, 19 nt, Artificial Sequence
  Description of Artificial Sequence: Synthetic oligonucleotide
aguuuagaaugaaaaguac

SEQ ID NO: 3232609 - RNA, 19 nt, Artificial Sequence
  Description of Artificial Sequence: Synthetic oligonucleotide
agcauuuuccaagggauac

SEQ ID NO: 3232610 - RNA, 19 nt, Artificial Sequence
  Description of Artificial Sequence: Synthetic oligonucleotide
acuccugauguggagagcc

SEQ ID NO: 3232611 - RNA, 19 nt, Artificial Sequence
  Description of Artificial Sequence: Synthetic oligonucleotide
cuuguuaccugguugggug

SEQ ID NO: 3232612 - RNA, 19 nt, Artificial Sequence
  Description of Artificial Sequence: Synthetic oligonucleotide
auguggagagccuugcuuc

SEQ ID NO: 3232613 - RNA, 19 nt, Artificial Sequence
  Description of Artificial Sequence: Synthetic oligonucleotide
aaaugagaauacuuuuaaa

SEQ ID NO: 3232614 - RNA, 19 nt, Artificial Sequence
  Description of Artificial Sequence: Synthetic oligonucleotide
cagaugguugaaaugauuc

SEQ ID NO: 3232615 - RNA, 19 nt, Artificial Sequence
  Description of Artificial Sequence: Synthetic oligonucleotide
uuuuccaagggauacuuua

SEQ ID NO: 3232616 - RNA, 19 nt, Artificial Sequence
  Description of Artificial Sequence: Synthetic oligonucleotide
gaaaaguacuugguaaacc

SEQ ID NO: 3232617 - RNA, 19 nt, Artificial Sequence
  Description of Artificial Sequence: Synthetic oligonucleotide
aaacagaagaucuuggcgg

SEQ ID NO: 3232618 - RNA, 19 nt, Artificial Sequence
  Description of Artificial Sequence: Synthetic oligonucleotide
gaaacagaagaucuuggcg

SEQ ID NO: 3232619 - RNA, 19 nt, Artificial Sequence
  Description of Artificial Sequence: Synthetic oligonucleotide
aagauuuccucuuuggaga

SEQ ID NO: 3232620 - RNA, 19 nt, Artificial Sequence
  Description of Artificial Sequence: Synthetic oligonucleotide
gaagauuuccucuuuggag

SEQ ID NO: 3232621 - RNA, 19 nt, Artificial Sequence
  Description of Artificial Sequence: Synthetic oligonucleotide
agaaacagaagaucuuggc

SEQ ID NO: 3232622 - RNA, 19 nt, Artificial Sequence
  Description of Artificial Sequence: Synthetic oligonucleotide
aacuccuugggguagcggg

SEQ ID NO: 3232623 - RNA, 19 nt, Artificial Sequence
  Description of Artificial Sequence: Synthetic oligonucleotide
aagaucuuggcggagagag

SEQ ID NO: 3232624 - RNA, 19 nt, Artificial Sequence
  Description of Artificial Sequence: Synthetic oligonucleotide
uuggagaaacagaagaucu

SEQ ID NO: 3232625 - RNA, 19 nt, Artificial Sequence
  Description of Artificial Sequence: Synthetic oligonucleotide
aagauguggcugcaacucc

SEQ ID NO: 3232626 - RNA, 19 nt, Artificial Sequence
  Description of Artificial Sequence: Synthetic oligonucleotide
agccuuuggaaguaguagc

SEQ ID NO: 3232627 - RNA, 19 nt, Artificial Sequence
  Description of Artificial Sequence: Synthetic oligonucleotide
cuuuggaaguaguagcucg

SEQ ID NO: 3232628 - RNA, 19 nt, Artificial Sequence
  Description of Artificial Sequence: Synthetic oligonucleotide
auuuccucuuuggagaucc

SEQ ID NO: 3232629 - RNA, 19 nt, Artificial Sequence
  Description of Artificial Sequence: Synthetic oligonucleotide
ucuuuggagaucccgcugg

SEQ ID NO: 3232630 - RNA, 19 nt, Artificial Sequence
  Description of Artificial Sequence: Synthetic oligonucleotide
ucuugggacgccuugaucu

SEQ ID NO: 3232631 - RNA, 19 nt, Artificial Sequence
  Description of Artificial Sequence: Synthetic oligonucleotide
uuuggaaguaguagcucgg

SEQ ID NO: 3232632 - RNA, 19 nt, Artificial Sequence
  Description of Artificial Sequence: Synthetic oligonucleotide
gaaguaguagcucgggugc

SEQ ID NO: 3232633 - RNA, 19 nt, Artificial Sequence
  Description of Artificial Sequence: Synthetic oligonucleotide
uggucuuggagaaacagaa

SEQ ID NO: 3232634 - RNA, 19 nt, Artificial Sequence
  Description of Artificial Sequence: Synthetic oligonucleotide
ugaagauuuccucuuugga

SEQ ID NO: 3232635 - RNA, 19 nt, Artificial Sequence
  Description of Artificial Sequence: Synthetic oligonucleotide
uuucccuacaggcagcccc

SEQ ID NO: 3232636 - RNA, 19 nt, Artificial Sequence
  Description of Artificial Sequence: Synthetic oligonucleotide
agcaagauguggcugcaac

SEQ ID NO: 3232637 - RNA, 19 nt, Artificial Sequence
  Description of Artificial Sequence: Synthetic oligonucleotide
aguuucuucagggucugcc

SEQ ID NO: 3232638 - RNA, 19 nt, Artificial Sequence
  Description of Artificial Sequence: Synthetic oligonucleotide
uccuccaguuucuucaggg

SEQ ID NO: 3232639 - RNA, 19 nt, Artificial Sequence
  Description of Artificial Sequence: Synthetic oligonucleotide
uuggggaucugcuccagcg

SEQ ID NO: 3232640 - RNA, 19 nt, Artificial Sequence
  Description of Artificial Sequence: Synthetic oligonucleotide
uguggcugcaacuccuugg

SEQ ID NO: 3232641 - RNA, 19 nt, Artificial Sequence
  Description of Artificial Sequence: Synthetic oligonucleotide
aacagaagaucuuggcgga

SEQ ID NO: 3232642 - RNA, 19 nt, Artificial Sequence
  Description of Artificial Sequence: Synthetic oligonucleotide
gugaagauuuccucuuugg

SEQ ID NO: 3232643 - RNA, 19 nt, Artificial Sequence
  Description of Artificial Sequence: Synthetic oligonucleotide
uuggagaucccgcuggucu

SEQ ID NO: 3232644 - RNA, 19 nt, Artificial Sequence
  Description of Artificial Sequence: Synthetic oligonucleotide
gaucuuggcggagagaggc

SEQ ID NO: 3232645 - RNA, 19 nt, Artificial Sequence
  Description of Artificial Sequence: Synthetic oligonucleotide
gucuuggagaaacagaaga

SEQ ID NO: 3232646 - RNA, 19 nt, Artificial Sequence
  Description of Artificial Sequence: Synthetic oligonucleotide
ucuuggagaaacagaagau

SEQ ID NO: 3232647 - RNA, 19 nt, Artificial Sequence
  Description of Artificial Sequence: Synthetic oligonucleotide
uccaguuucuucagggucu

SEQ ID NO: 3232648 - RNA, 19 nt, Artificial Sequence
  Description of Artificial Sequence: Synthetic oligonucleotide
uuucuucagggucugcccc

SEQ ID NO: 3232649 - RNA, 19 nt, Artificial Sequence
  Description of Artificial Sequence: Synthetic oligonucleotide
gagaaacagaagaucuugg

SEQ ID NO: 3232650 - RNA, 19 nt, Artificial Sequence
  Description of Artificial Sequence: Synthetic oligonucleotide
cuugaucugcagcagcucc

SEQ ID NO: 3232651 - RNA, 19 nt, Artificial Sequence
  Description of Artificial Sequence: Synthetic oligonucleotide
cagcguauggcucagcaag

SEQ ID NO: 3232652 - RNA, 19 nt, Artificial Sequence
  Description of Artificial Sequence: Synthetic oligonucleotide
ugcuccuuuucuugggacg

SEQ ID NO: 3232653 - RNA, 19 nt, Artificial Sequence
  Description of Artificial Sequence: Synthetic oligonucleotide
uccucuuuggagaucccgc

SEQ ID NO: 3232654 - RNA, 19 nt, Artificial Sequence
  Description of Artificial Sequence: Synthetic oligonucleotide
ugcagcagcuccugggugg

SEQ ID NO: 3232655 - RNA, 19 nt, Artificial Sequence
  Description of Artificial Sequence: Synthetic oligonucleotide
uccccaacgagccacugca

SEQ ID NO: 3232656 - RNA, 19 nt, Artificial Sequence
  Description of Artificial Sequence: Synthetic oligonucleotide
ucacgugaagauuuccucu

SEQ ID NO: 3232657 - RNA, 19 nt, Artificial Sequence
  Description of Artificial Sequence: Synthetic oligonucleotide
cucagcaagauguggcugc

SEQ ID NO: 3232658 - RNA, 19 nt, Artificial Sequence
  Description of Artificial Sequence: Synthetic oligonucleotide
ugcagcugcuggauggacg

SEQ ID NO: 3232659 - RNA, 19 nt, Artificial Sequence
  Description of Artificial Sequence: Synthetic oligonucleotide
uaggcucuuggauagcggc

SEQ ID NO: 3232660 - RNA, 19 nt, Artificial Sequence
  Description of Artificial Sequence: Synthetic oligonucleotide
uggcucagcaagauguggc

SEQ ID NO: 3232661 - RNA, 19 nt, Artificial Sequence
  Description of Artificial Sequence: Synthetic oligonucleotide
gacgccuugaucugcagca

SEQ ID NO: 3232662 - RNA, 19 nt, Artificial Sequence
  Description of Artificial Sequence: Synthetic oligonucleotide
agaagaucuuggcggagag

SEQ ID NO: 3232663 - RNA, 19 nt, Artificial Sequence
  Description of Artificial Sequence: Synthetic oligonucleotide
uucacgugaagauuuccuc

SEQ ID NO: 3232664 - RNA, 19 nt, Artificial Sequence
  Description of Artificial Sequence: Synthetic oligonucleotide
ggaaguaguagcucgggug

SEQ ID NO: 3232665 - RNA, 19 nt, Artificial Sequence
  Description of Artificial Sequence: Synthetic oligonucleotide
gguggauggucccagaggc

SEQ ID NO: 3232666 - RNA, 19 nt, Artificial Sequence
  Description of Artificial Sequence: Synthetic oligonucleotide
aucugcagcagcuccuggg

SEQ ID NO: 3232667 - RNA, 19 nt, Artificial Sequence
  Description of Artificial Sequence: Synthetic oligonucleotide
agguccuccaguuucuuca

SEQ ID NO: 3232668 - RNA, 19 nt, Artificial Sequence
  Description of Artificial Sequence: Synthetic oligonucleotide
acgguaggcucuuggauag

SEQ ID NO: 3232669 - RNA, 19 nt, Artificial Sequence
  Description of Artificial Sequence: Synthetic oligonucleotide
uggucccagaggcagacug

SEQ ID NO: 3232670 - RNA, 19 nt, Artificial Sequence
  Description of Artificial Sequence: Synthetic oligonucleotide
cuuggagaaacagaagauc

SEQ ID NO: 3232671 - RNA, 19 nt, Artificial Sequence
  Description of Artificial Sequence: Synthetic oligonucleotide
aguagcucgggugcuuucc

SEQ ID NO: 3232672 - RNA, 19 nt, Artificial Sequence
  Description of Artificial Sequence: Synthetic oligonucleotide
uggauggucccagaggcag

SEQ ID NO: 3232673 - RNA, 19 nt, Artificial Sequence
  Description of Artificial Sequence: Synthetic oligonucleotide
ugugucaccagguccucca

SEQ ID NO: 3232674 - RNA, 19 nt, Artificial Sequence
  Description of Artificial Sequence: Synthetic oligonucleotide
uucugcuccuuuucuuggg

SEQ ID NO: 3232675 - RNA, 19 nt, Artificial Sequence
  Description of Artificial Sequence: Synthetic oligonucleotide
cuucugcuccuuuucuugg

SEQ ID NO: 3232676 - RNA, 19 nt, Artificial Sequence
  Description of Artificial Sequence: Synthetic oligonucleotide
guggcugcaacuccuuggg

SEQ ID NO: 3232677 - RNA, 19 nt, Artificial Sequence
  Description of Artificial Sequence: Synthetic oligonucleotide
uauggcucagcaagaugug

SEQ ID NO: 3232678 - RNA, 19 nt, Artificial Sequence
  Description of Artificial Sequence: Synthetic oligonucleotide
guuucuucagggucugccc

SEQ ID NO: 3232679 - RNA, 19 nt, Artificial Sequence
  Description of Artificial Sequence: Synthetic oligonucleotide
cauguccuccuucugcucc

SEQ ID NO: 3232680 - RNA, 19 nt, Artificial Sequence
  Description of Artificial Sequence: Synthetic oligonucleotide
gagaggcagccuuuggaag

SEQ ID NO: 3232681 - RNA, 19 nt, Artificial Sequence
  Description of Artificial Sequence: Synthetic oligonucleotide
gugcuuucccuacaggcag

SEQ ID NO: 3232682 - RNA, 19 nt, Artificial Sequence
  Description of Artificial Sequence: Synthetic oligonucleotide
uucagggucugccccaugu

SEQ ID NO: 3232683 - RNA, 19 nt, Artificial Sequence
  Description of Artificial Sequence: Synthetic oligonucleotide
uuggaaguaguagcucggg

SEQ ID NO: 3232684 - RNA, 19 nt, Artificial Sequence
  Description of Artificial Sequence: Synthetic oligonucleotide
agaggcagccuuuggaagu

SEQ ID NO: 3232685 - RNA, 19 nt, Artificial Sequence
  Description of Artificial Sequence: Synthetic oligonucleotide
ucugcagcagcuccugggu

SEQ ID NO: 3232686 - RNA, 19 nt, Artificial Sequence
  Description of Artificial Sequence: Synthetic oligonucleotide
aggcagacuggucuucacg

SEQ ID NO: 3232687 - RNA, 19 nt, Artificial Sequence
  Description of Artificial Sequence: Synthetic oligonucleotide
agagaggcagccuuuggaa

SEQ ID NO: 3232688 - RNA, 19 nt, Artificial Sequence
  Description of Artificial Sequence: Synthetic oligonucleotide
uuccucuuuggagaucccg

SEQ ID NO: 3232689 - RNA, 19 nt, Artificial Sequence
  Description of Artificial Sequence: Synthetic oligonucleotide
gaucccgcuggucuuggag

SEQ ID NO: 3232690 - RNA, 19 nt, Artificial Sequence
  Description of Artificial Sequence: Synthetic oligonucleotide
aacgagccacugcagcuug

SEQ ID NO: 3232691 - RNA, 19 nt, Artificial Sequence
  Description of Artificial Sequence: Synthetic oligonucleotide
auggacgguaggcucuugg

SEQ ID NO: 3232692 - RNA, 19 nt, Artificial Sequence
  Description of Artificial Sequence: Synthetic oligonucleotide
ucugcuccuuuucuuggga

SEQ ID NO: 3232693 - RNA, 19 nt, Artificial Sequence
  Description of Artificial Sequence: Synthetic oligonucleotide
agccacugcagcuugggga

SEQ ID NO: 3232694 - RNA, 19 nt, Artificial Sequence
  Description of Artificial Sequence: Synthetic oligonucleotide
ggagaaacagaagaucuug

SEQ ID NO: 3232695 - RNA, 19 nt, Artificial Sequence
  Description of Artificial Sequence: Synthetic oligonucleotide
caagauguggcugcaacuc

SEQ ID NO: 3232696 - RNA, 19 nt, Artificial Sequence
  Description of Artificial Sequence: Synthetic oligonucleotide
uugaucugcagcagcuccu

SEQ ID NO: 3232697 - RNA, 19 nt, Artificial Sequence
  Description of Artificial Sequence: Synthetic oligonucleotide
ugcagcuuggggaucugcu

SEQ ID NO: 3232698 - RNA, 19 nt, Artificial Sequence
  Description of Artificial Sequence: Synthetic oligonucleotide
uggguggauggucccagag

SEQ ID NO: 3232699 - RNA, 19 nt, Artificial Sequence
  Description of Artificial Sequence: Synthetic oligonucleotide
uggaaguaguagcucgggu

SEQ ID NO: 3232700 - RNA, 19 nt, Artificial Sequence
  Description of Artificial Sequence: Synthetic oligonucleotide
uuuucuugggacgccuuga

SEQ ID NO: 3232701 - RNA, 19 nt, Artificial Sequence
  Description of Artificial Sequence: Synthetic oligonucleotide
uggauggacgguaggcucu

SEQ ID NO: 3232702 - RNA, 19 nt, Artificial Sequence
  Description of Artificial Sequence: Synthetic oligonucleotide
gagagaggcagccuuugga

SEQ ID NO: 3232703 - RNA, 19 nt, Artificial Sequence
  Description of Artificial Sequence: Synthetic oligonucleotide
uggagaaacagaagaucuu

SEQ ID NO: 3232704 - RNA, 19 nt, Artificial Sequence
  Description of Artificial Sequence: Synthetic oligonucleotide
cagcuuggggaucugcucc

SEQ ID NO: 3232705 - RNA, 19 nt, Artificial Sequence
  Description of Artificial Sequence: Synthetic oligonucleotide
ucgggugcuuucccuacag

SEQ ID NO: 3232706 - RNA, 19 nt, Artificial Sequence
  Description of Artificial Sequence: Synthetic oligonucleotide
caccaguccccaacgagcc

SEQ ID NO: 3232707 - RNA, 19 nt, Artificial Sequence
  Description of Artificial Sequence: Synthetic oligonucleotide
ucuuggcggagagaggcag

SEQ ID NO: 3232708 - RNA, 19 nt, Artificial Sequence
  Description of Artificial Sequence: Synthetic oligonucleotide
ucuucacgugaagauuucc

SEQ ID NO: 3232709 - RNA, 19 nt, Artificial Sequence
  Description of Artificial Sequence: Synthetic oligonucleotide
ucuuggauagcggcuucag

SEQ ID NO: 3232710 - RNA, 19 nt, Artificial Sequence
  Description of Artificial Sequence: Synthetic oligonucleotide
ugcuccagcgacuguguca

SEQ ID NO: 3232711 - RNA, 19 nt, Artificial Sequence
  Description of Artificial Sequence: Synthetic oligonucleotide
cuuuucuugggacgccuug

SEQ ID NO: 3232712 - RNA, 19 nt, Artificial Sequence
  Description of Artificial Sequence: Synthetic oligonucleotide
ugcuggauggacgguaggc

SEQ ID NO: 3232713 - RNA, 19 nt, Artificial Sequence
  Description of Artificial Sequence: Synthetic oligonucleotide
guauggcucagcaagaugu

SEQ ID NO: 3232714 - RNA, 19 nt, Artificial Sequence
  Description of Artificial Sequence: Synthetic oligonucleotide
cuccaguuucuucaggguc

SEQ ID NO: 3232715 - RNA, 19 nt, Artificial Sequence
  Description of Artificial Sequence: Synthetic oligonucleotide
gggugcuuucccuacaggc

SEQ ID NO: 3232716 - RNA, 19 nt, Artificial Sequence
  Description of Artificial Sequence: Synthetic oligonucleotide
cagccuuuggaaguaguag

SEQ ID NO: 3232717 - RNA, 19 nt, Artificial Sequence
  Description of Artificial Sequence: Synthetic oligonucleotide
agagauuugccauugaugg

SEQ ID NO: 3232718 - RNA, 19 nt, Artificial Sequence
  Description of Artificial Sequence: Synthetic oligonucleotide
aagaugaugcugcagaguc

SEQ ID NO: 3232719 - RNA, 19 nt, Artificial Sequence
  Description of Artificial Sequence: Synthetic oligonucleotide
gauggaaagaaccucauug

SEQ ID NO: 3232720 - RNA, 19 nt, Artificial Sequence
  Description of Artificial Sequence: Synthetic oligonucleotide
uuuggaaacacucugugaa

SEQ ID NO: 3232721 - RNA, 19 nt, Artificial Sequence
  Description of Artificial Sequence: Synthetic oligonucleotide
accgugaucaccuuguuuc

SEQ ID NO: 3232722 - RNA, 19 nt, Artificial Sequence
  Description of Artificial Sequence: Synthetic oligonucleotide
auggaaagaaccucauugc

SEQ ID NO: 3232723 - RNA, 19 nt, Artificial Sequence
  Description of Artificial Sequence: Synthetic oligonucleotide
uugaauugugccuuccugg

SEQ ID NO: 3232724 - RNA, 19 nt, Artificial Sequence
  Description of Artificial Sequence: Synthetic oligonucleotide
ucuacugaaaugucacugg

SEQ ID NO: 3232725 - RNA, 19 nt, Artificial Sequence
  Description of Artificial Sequence: Synthetic oligonucleotide
auagauucuacugaaaugu

SEQ ID NO: 3232726 - RNA, 19 nt, Artificial Sequence
  Description of Artificial Sequence: Synthetic oligonucleotide
acugaaaugucacuggcug

SEQ ID NO: 3232727 - RNA, 19 nt, Artificial Sequence
  Description of Artificial Sequence: Synthetic oligonucleotide
agugucacugugcagacag

SEQ ID NO: 3232728 - RNA, 19 nt, Artificial Sequence
  Description of Artificial Sequence: Synthetic oligonucleotide
uuccuggugacaaucacag

SEQ ID NO: 3232729 - RNA, 19 nt, Artificial Sequence
  Description of Artificial Sequence: Synthetic oligonucleotide
uccacaguugcuuuccugg

SEQ ID NO: 3232730 - RNA, 19 nt, Artificial Sequence
  Description of Artificial Sequence: Synthetic oligonucleotide
ugaauugugccuuccuggg

SEQ ID NO: 3232731 - RNA, 19 nt, Artificial Sequence
  Description of Artificial Sequence: Synthetic oligonucleotide
uuugaauugugccuuccug

SEQ ID NO: 3232732 - RNA, 19 nt, Artificial Sequence
  Description of Artificial Sequence: Synthetic oligonucleotide
aguagaggaguucagguca

SEQ ID NO: 3232733 - RNA, 19 nt, Artificial Sequence
  Description of Artificial Sequence: Synthetic oligonucleotide
uuuuccucccuccaggcug

SEQ ID NO: 3232734 - RNA, 19 nt, Artificial Sequence
  Description of Artificial Sequence: Synthetic oligonucleotide
gauagcuagggcaucauug

SEQ ID NO: 3232735 - RNA, 19 nt, Artificial Sequence
  Description of Artificial Sequence: Synthetic oligonucleotide
ucaugaguggcauccacag

SEQ ID NO: 3232736 - RNA, 19 nt, Artificial Sequence
  Description of Artificial Sequence: Synthetic oligonucleotide
uggaaagaaccucauugcc

SEQ ID NO: 3232737 - RNA, 19 nt, Artificial Sequence
  Description of Artificial Sequence: Synthetic oligonucleotide
aauugugccuuccugggaa

SEQ ID NO: 3232738 - RNA, 19 nt, Artificial Sequence
  Description of Artificial Sequence: Synthetic oligonucleotide
cauagauucuacugaaaug

SEQ ID NO: 3232739 - RNA, 19 nt, Artificial Sequence
  Description of Artificial Sequence: Synthetic oligonucleotide
gauucuacugaaaugucac

SEQ ID NO: 3232740 - RNA, 19 nt, Artificial Sequence
  Description of Artificial Sequence: Synthetic oligonucleotide
ucacugugcagacaguggc

SEQ ID NO: 3232741 - RNA, 19 nt, Artificial Sequence
  Description of Artificial Sequence: Synthetic oligonucleotide
ugcagagucaguagaggag

SEQ ID NO: 3232742 - RNA, 19 nt, Artificial Sequence
  Description of Artificial Sequence: Synthetic oligonucleotide
gaugaugcugcagagucag

SEQ ID NO: 3232743 - RNA, 19 nt, Artificial Sequence
  Description of Artificial Sequence: Synthetic oligonucleotide
uucuacugaaaugucacug

SEQ ID NO: 3232744 - RNA, 19 nt, Artificial Sequence
  Description of Artificial Sequence: Synthetic oligonucleotide
agccaggccauuuggaaac

SEQ ID NO: 3232745 - RNA, 19 nt, Artificial Sequence
  Description of Artificial Sequence: Synthetic oligonucleotide
ucaguagaggaguucaggu

SEQ ID NO: 3232746 - RNA, 19 nt, Artificial Sequence
  Description of Artificial Sequence: Synthetic oligonucleotide
ugaagaugaugcugcagag

SEQ ID NO: 3232747 - RNA, 19 nt, Artificial Sequence
  Description of Artificial Sequence: Synthetic oligonucleotide
ugaaccgugaucaccuugu

SEQ ID NO: 3232748 - RNA, 19 nt, Artificial Sequence
  Description of Artificial Sequence: Synthetic oligonucleotide
cagacaguggccuccauag

SEQ ID NO: 3232749 - RNA, 19 nt, Artificial Sequence
  Description of Artificial Sequence: Synthetic oligonucleotide
gaugcugcagagucaguag

SEQ ID NO: 3232750 - RNA, 19 nt, Artificial Sequence
  Description of Artificial Sequence: Synthetic oligonucleotide
uccagugucacugugcaga

SEQ ID NO: 3232751 - RNA, 19 nt, Artificial Sequence
  Description of Artificial Sequence: Synthetic oligonucleotide
uuuccuggugacaaucaca

SEQ ID NO: 3232752 - RNA, 19 nt, Artificial Sequence
  Description of Artificial Sequence: Synthetic oligonucleotide
acaaucacagcuugccuug

SEQ ID NO: 3232753 - RNA, 19 nt, Artificial Sequence
  Description of Artificial Sequence: Synthetic oligonucleotide
uggcugcugaagaugaugc

SEQ ID NO: 3232754 - RNA, 19 nt, Artificial Sequence
  Description of Artificial Sequence: Synthetic oligonucleotide
ucuccagugucacugugca

SEQ ID NO: 3232755 - RNA, 19 nt, Artificial Sequence
  Description of Artificial Sequence: Synthetic oligonucleotide
ugaaaugucacuggcugcu

SEQ ID NO: 3232756 - RNA, 19 nt, Artificial Sequence
  Description of Artificial Sequence: Synthetic oligonucleotide
cugcugaagaugaugcugc

SEQ ID NO: 3232757 - RNA, 19 nt, Artificial Sequence
  Description of Artificial Sequence: Synthetic oligonucleotide
caugcagggagccuuuucc

SEQ ID NO: 3232758 - RNA, 19 nt, Artificial Sequence
  Description of Artificial Sequence: Synthetic oligonucleotide
augaguggcauccacaguu

SEQ ID NO: 3232759 - RNA, 19 nt, Artificial Sequence
  Description of Artificial Sequence: Synthetic oligonucleotide
aguucaggucaugaguggc

SEQ ID NO: 3232760 - RNA, 19 nt, Artificial Sequence
  Description of Artificial Sequence: Synthetic oligonucleotide
aaucacagcuugccuuggg

SEQ ID NO: 3232761 - RNA, 19 nt, Artificial Sequence
  Description of Artificial Sequence: Synthetic oligonucleotide
cuuggcggaggauagcuag

SEQ ID NO: 3232762 - RNA, 19 nt, Artificial Sequence
  Description of Artificial Sequence: Synthetic oligonucleotide
ugagagauuugccauugau

SEQ ID NO: 3232763 - RNA, 19 nt, Artificial Sequence
  Description of Artificial Sequence: Synthetic oligonucleotide
gagagauuugccauugaug

SEQ ID NO: 3232764 - RNA, 19 nt, Artificial Sequence
  Description of Artificial Sequence: Synthetic oligonucleotide
auagcuagggcaucauugu

SEQ ID NO: 3232765 - RNA, 19 nt, Artificial Sequence
  Description of Artificial Sequence: Synthetic oligonucleotide
uggaaacacucugugaacc

SEQ ID NO: 3232766 - RNA, 19 nt, Artificial Sequence
  Description of Artificial Sequence: Synthetic oligonucleotide
uuuugaauugugccuuccu

SEQ ID NO: 3232767 - RNA, 19 nt, Artificial Sequence
  Description of Artificial Sequence: Synthetic oligonucleotide
caucauuguggguagcccc

SEQ ID NO: 3232768 - RNA, 19 nt, Artificial Sequence
  Description of Artificial Sequence: Synthetic oligonucleotide
cauuuggaaacacucugug

SEQ ID NO: 3232769 - RNA, 19 nt, Artificial Sequence
  Description of Artificial Sequence: Synthetic oligonucleotide
uuugccauugauggaaaga

SEQ ID NO: 3232770 - RNA, 19 nt, Artificial Sequence
  Description of Artificial Sequence: Synthetic oligonucleotide
aggaguucaggucaugagu

SEQ ID NO: 3232771 - RNA, 19 nt, Artificial Sequence
  Description of Artificial Sequence: Synthetic oligonucleotide
agaggucuucuccaguguc

SEQ ID NO: 3232772 - RNA, 19 nt, Artificial Sequence
  Description of Artificial Sequence: Synthetic oligonucleotide
auugauggaaagaaccuca

SEQ ID NO: 3232773 - RNA, 19 nt, Artificial Sequence
  Description of Artificial Sequence: Synthetic oligonucleotide
acucugugaaccgugauca

SEQ ID NO: 3232774 - RNA, 19 nt, Artificial Sequence
  Description of Artificial Sequence: Synthetic oligonucleotide
cuacugaaaugucacuggc

SEQ ID NO: 3232775 - RNA, 19 nt, Artificial Sequence
  Description of Artificial Sequence: Synthetic oligonucleotide
ugcugcagagucaguagag

SEQ ID NO: 3232776 - RNA, 19 nt, Artificial Sequence
  Description of Artificial Sequence: Synthetic oligonucleotide
auuuggaaacacucuguga

SEQ ID NO: 3232777 - RNA, 19 nt, Artificial Sequence
  Description of Artificial Sequence: Synthetic oligonucleotide
acaguugcuuuccugguga

SEQ ID NO: 3232778 - RNA, 19 nt, Artificial Sequence
  Description of Artificial Sequence: Synthetic oligonucleotide
aaaugucacuggcugcuga

SEQ ID NO: 3232779 - RNA, 19 nt, Artificial Sequence
  Description of Artificial Sequence: Synthetic oligonucleotide
uuccugggaagccaggcca

SEQ ID NO: 3232780 - RNA, 19 nt, Artificial Sequence
  Description of Artificial Sequence: Synthetic oligonucleotide
gaggaguucaggucaugag

SEQ ID NO: 3232781 - RNA, 19 nt, Artificial Sequence
  Description of Artificial Sequence: Synthetic oligonucleotide
gaguucaggucaugagugg

SEQ ID NO: 3232782 - RNA, 19 nt, Artificial Sequence
  Description of Artificial Sequence: Synthetic oligonucleotide
ugucacuggcugcugaaga

SEQ ID NO: 3232783 - RNA, 19 nt, Artificial Sequence
  Description of Artificial Sequence: Synthetic oligonucleotide
uacugaaaugucacuggcu

SEQ ID NO: 3232784 - RNA, 19 nt, Artificial Sequence
  Description of Artificial Sequence: Synthetic oligonucleotide
ucugugaaccgugaucacc

SEQ ID NO: 3232785 - RNA, 19 nt, Artificial Sequence
  Description of Artificial Sequence: Synthetic oligonucleotide
gugaucaccuuguuucuag

SEQ ID NO: 3232786 - RNA, 19 nt, Artificial Sequence
  Description of Artificial Sequence: Synthetic oligonucleotide
agauuugccauugauggaa

SEQ ID NO: 3232787 - RNA, 19 nt, Artificial Sequence
  Description of Artificial Sequence: Synthetic oligonucleotide
uugccauugauggaaagaa

SEQ ID NO: 3232788 - RNA, 19 nt, Artificial Sequence
  Description of Artificial Sequence: Synthetic oligonucleotide
ugggucccgagcuuggcgg

SEQ ID NO: 3232789 - RNA, 19 nt, Artificial Sequence
  Description of Artificial Sequence: Synthetic oligonucleotide
cugaagaugaugcugcaga

SEQ ID NO: 3232790 - RNA, 19 nt, Artificial Sequence
  Description of Artificial Sequence: Synthetic oligonucleotide
gugacaaucacagcuugcc

SEQ ID NO: 3232791 - RNA, 19 nt, Artificial Sequence
  Description of Artificial Sequence: Synthetic oligonucleotide
cacagcuugccuugggucc

SEQ ID NO: 3232792 - RNA, 19 nt, Artificial Sequence
  Description of Artificial Sequence: Synthetic oligonucleotide
uucuccagugucacugugc

SEQ ID NO: 3232793 - RNA, 19 nt, Artificial Sequence
  Description of Artificial Sequence: Synthetic oligonucleotide
aaugucacuggcugcugaa

SEQ ID NO: 3232794 - RNA, 19 nt, Artificial Sequence
  Description of Artificial Sequence: Synthetic oligonucleotide
ugucacugugcagacagug

SEQ ID NO: 3232795 - RNA, 19 nt, Artificial Sequence
  Description of Artificial Sequence: Synthetic oligonucleotide
agcuagggcaucauugugg

SEQ ID NO: 3232796 - RNA, 19 nt, Artificial Sequence
  Description of Artificial Sequence: Synthetic oligonucleotide
caggucaugaguggcaucc

SEQ ID NO: 3232797 - RNA, 19 nt, Artificial Sequence
  Description of Artificial Sequence: Synthetic oligonucleotide
uagggcaucauugugggua

SEQ ID NO: 3232798 - RNA, 19 nt, Artificial Sequence
  Description of Artificial Sequence: Synthetic oligonucleotide
uugccuugggucccgagcu

SEQ ID NO: 3232799 - RNA, 19 nt, Artificial Sequence
  Description of Artificial Sequence: Synthetic oligonucleotide
uggugacaaucacagcuug

SEQ ID NO: 3232800 - RNA, 19 nt, Artificial Sequence
  Description of Artificial Sequence: Synthetic oligonucleotide
ugaguggcauccacaguug

SEQ ID NO: 3232801 - RNA, 19 nt, Artificial Sequence
  Description of Artificial Sequence: Synthetic oligonucleotide
uuggaaacacucugugaac

SEQ ID NO: 3232802 - RNA, 19 nt, Artificial Sequence
  Description of Artificial Sequence: Synthetic oligonucleotide
aggccauuuggaaacacuc

SEQ ID NO: 3232803 - RNA, 19 nt, Artificial Sequence
  Description of Artificial Sequence: Synthetic oligonucleotide
ugaagcccagcccugcaga

SEQ ID NO: 3232804 - RNA, 19 nt, Artificial Sequence
  Description of Artificial Sequence: Synthetic oligonucleotide
cugaaaugucacuggcugc

SEQ ID NO: 3232805 - RNA, 19 nt, Artificial Sequence
  Description of Artificial Sequence: Synthetic oligonucleotide
ggaaacacucugugaaccg

SEQ ID NO: 3232806 - RNA, 19 nt, Artificial Sequence
  Description of Artificial Sequence: Synthetic oligonucleotide
gucaguagaggaguucagg

SEQ ID NO: 3232807 - RNA, 19 nt, Artificial Sequence
  Description of Artificial Sequence: Synthetic oligonucleotide
ugacaaucacagcuugccu

SEQ ID NO: 3232808 - RNA, 19 nt, Artificial Sequence
  Description of Artificial Sequence: Synthetic oligonucleotide
uugggucccgagcuuggcg

SEQ ID NO: 3232809 - RNA, 19 nt, Artificial Sequence
  Description of Artificial Sequence: Synthetic oligonucleotide
uagauucuacugaaauguc

SEQ ID NO: 3232810 - RNA, 19 nt, Artificial Sequence
  Description of Artificial Sequence: Synthetic oligonucleotide
gccauugauggaaagaacc

SEQ ID NO: 3232811 - RNA, 19 nt, Artificial Sequence
  Description of Artificial Sequence: Synthetic oligonucleotide
aagccaggccauuuggaaa

SEQ ID NO: 3232812 - RNA, 19 nt, Artificial Sequence
  Description of Artificial Sequence: Synthetic oligonucleotide
gucuucuccagugucacug

SEQ ID NO: 3232813 - RNA, 19 nt, Artificial Sequence
  Description of Artificial Sequence: Synthetic oligonucleotide
uuggcggaggauagcuagg

SEQ ID NO: 3232814 - RNA, 19 nt, Artificial Sequence
  Description of Artificial Sequence: Synthetic oligonucleotide
auuugccauugauggaaag

SEQ ID NO: 3232815 - RNA, 19 nt, Artificial Sequence
  Description of Artificial Sequence: Synthetic oligonucleotide
cuugccuugggucccgagc

SEQ ID NO: 3232816 - RNA, 19 nt, Artificial Sequence
  Description of Artificial Sequence: Synthetic oligonucleotide
agauucuacugaaauguca

SEQ ID NO: 3232817 - RNA, 19 nt, Artificial Sequence
  Description of Artificial Sequence: Synthetic oligonucleotide
uugaaaauguccuugauga

SEQ ID NO: 3232818 - RNA, 19 nt, Artificial Sequence
  Description of Artificial Sequence: Synthetic oligonucleotide
ugagcaaucaccuucugcg

SEQ ID NO: 3232819 - RNA, 19 nt, Artificial Sequence
  Description of Artificial Sequence: Synthetic oligonucleotide
ucuuuuggaauuuugauac

SEQ ID NO: 3232820 - RNA, 19 nt, Artificial Sequence
  Description of Artificial Sequence: Synthetic oligonucleotide
acuuucuucacacugguac

SEQ ID NO: 3232821 - RNA, 19 nt, Artificial Sequence
  Description of Artificial Sequence: Synthetic oligonucleotide
uacaaaacagugaggaugg

SEQ ID NO: 3232822 - RNA, 19 nt, Artificial Sequence
  Description of Artificial Sequence: Synthetic oligonucleotide
caucauaugacuuaagaug

SEQ ID NO: 3232823 - RNA, 19 nt, Artificial Sequence
  Description of Artificial Sequence: Synthetic oligonucleotide
uucauaaaggacuucaucu

SEQ ID NO: 3232824 - RNA, 19 nt, Artificial Sequence
  Description of Artificial Sequence: Synthetic oligonucleotide
acugguacaaaacagugag

SEQ ID NO: 3232825 - RNA, 19 nt, Artificial Sequence
  Description of Artificial Sequence: Synthetic oligonucleotide
aucauaugacuuaagaugc

SEQ ID NO: 3232826 - RNA, 19 nt, Artificial Sequence
  Description of Artificial Sequence: Synthetic oligonucleotide
ugaugaauauuccaggaug

SEQ ID NO: 3232827 - RNA, 19 nt, Artificial Sequence
  Description of Artificial Sequence: Synthetic oligonucleotide
cucaauuucaucuugcaug

SEQ ID NO: 3232828 - RNA, 19 nt, Artificial Sequence
  Description of Artificial Sequence: Synthetic oligonucleotide
uuugaaaauguccuugaug

SEQ ID NO: 3232829 - RNA, 19 nt, Artificial Sequence
  Description of Artificial Sequence: Synthetic oligonucleotide
aaagccaagguguagggcu

SEQ ID NO: 3232830 - RNA, 19 nt, Artificial Sequence
  Description of Artificial Sequence: Synthetic oligonucleotide
cuucaugucaugcucaucc

SEQ ID NO: 3232831 - RNA, 19 nt, Artificial Sequence
  Description of Artificial Sequence: Synthetic oligonucleotide
ucgagcaucucccucagcg

SEQ ID NO: 3232832 - RNA, 19 nt, Artificial Sequence
  Description of Artificial Sequence: Synthetic oligonucleotide
uuuaauuguaccauuugau

SEQ ID NO: 3232833 - RNA, 19 nt, Artificial Sequence
  Description of Artificial Sequence: Synthetic oligonucleotide
ucaauuucaucuugcaugc

SEQ ID NO: 3232834 - RNA, 19 nt, Artificial Sequence
  Description of Artificial Sequence: Synthetic oligonucleotide
ucuuugaaagccaaagcca

SEQ ID NO: 3232835 - RNA, 19 nt, Artificial Sequence
  Description of Artificial Sequence: Synthetic oligonucleotide
aauuuugauacugacugug

SEQ ID NO: 3232836 - RNA, 19 nt, Artificial Sequence
  Description of Artificial Sequence: Synthetic oligonucleotide
cucuuugaaagccaaagcc

SEQ ID NO: 3232837 - RNA, 19 nt, Artificial Sequence
  Description of Artificial Sequence: Synthetic oligonucleotide
acugugagcaaucaccuuc

SEQ ID NO: 3232838 - RNA, 19 nt, Artificial Sequence
  Description of Artificial Sequence: Synthetic oligonucleotide
uaugacuuaagaugcuggg

SEQ ID NO: 3232839 - RNA, 19 nt, Artificial Sequence
  Description of Artificial Sequence: Synthetic oligonucleotide
aaauccgcauacuuucuuc

SEQ ID NO: 3232840 - RNA, 19 nt, Artificial Sequence
  Description of Artificial Sequence: Synthetic oligonucleotide
augugauugcucuggaacc

SEQ ID NO: 3232841 - RNA, 19 nt, Artificial Sequence
  Description of Artificial Sequence: Synthetic oligonucleotide
uuuugauacugacugugag

SEQ ID NO: 3232842 - RNA, 19 nt, Artificial Sequence
  Description of Artificial Sequence: Synthetic oligonucleotide
aaguaaagagaucucuuca

SEQ ID NO: 3232843 - RNA, 19 nt, Artificial Sequence
  Description of Artificial Sequence: Synthetic oligonucleotide
uuuugggaaguaaagagau

SEQ ID NO: 3232844 - RNA, 19 nt, Artificial Sequence
  Description of Artificial Sequence: Synthetic oligonucleotide
ucuuugucaaacccaaggc

SEQ ID NO: 3232845 - RNA, 19 nt, Artificial Sequence
  Description of Artificial Sequence: Synthetic oligonucleotide
ugggcagucuucauaaagg

SEQ ID NO: 3232846 - RNA, 19 nt, Artificial Sequence
  Description of Artificial Sequence: Synthetic oligonucleotide
cugacugugagcaaucacc

SEQ ID NO: 3232847 - RNA, 19 nt, Artificial Sequence
  Description of Artificial Sequence: Synthetic oligonucleotide
uucacacugguacaaaaca

SEQ ID NO: 3232848 - RNA, 19 nt, Artificial Sequence
  Description of Artificial Sequence: Synthetic oligonucleotide
uuugauacugacugugagc

SEQ ID NO: 3232849 - RNA, 19 nt, Artificial Sequence
  Description of Artificial Sequence: Synthetic oligonucleotide
ugguacaaaacagugagga

SEQ ID NO: 3232850 - RNA, 19 nt, Artificial Sequence
  Description of Artificial Sequence: Synthetic oligonucleotide
guaaagagaucucuucagg

SEQ ID NO: 3232851 - RNA, 19 nt, Artificial Sequence
  Description of Artificial Sequence: Synthetic oligonucleotide
uucaucuaccuucauguca

SEQ ID NO: 3232852 - RNA, 19 nt, Artificial Sequence
  Description of Artificial Sequence: Synthetic oligonucleotide
uuugccuuguuugaaaaug

SEQ ID NO: 3232853 - RNA, 19 nt, Artificial Sequence
  Description of Artificial Sequence: Synthetic oligonucleotide
gauguuuugggaaguaaag

SEQ ID NO: 3232854 - RNA, 19 nt, Artificial Sequence
  Description of Artificial Sequence: Synthetic oligonucleotide
ucacacugguacaaaacag

SEQ ID NO: 3232855 - RNA, 19 nt, Artificial Sequence
  Description of Artificial Sequence: Synthetic oligonucleotide
ucuggaaccgguaccgagg

SEQ ID NO: 3232856 - RNA, 19 nt, Artificial Sequence
  Description of Artificial Sequence: Synthetic oligonucleotide
aauucuuuuggaauuuuga

SEQ ID NO: 3232857 - RNA, 19 nt, Artificial Sequence
  Description of Artificial Sequence: Synthetic oligonucleotide
cuuugucaaacccaaggcc

SEQ ID NO: 3232858 - RNA, 19 nt, Artificial Sequence
  Description of Artificial Sequence: Synthetic oligonucleotide
guacaaaacagugaggaug

SEQ ID NO: 3232859 - RNA, 19 nt, Artificial Sequence
  Description of Artificial Sequence: Synthetic oligonucleotide
ucaucauaugacuuaagau

SEQ ID NO: 3232860 - RNA, 19 nt, Artificial Sequence
  Description of Artificial Sequence: Synthetic oligonucleotide
caugugauugcucuggaac

SEQ ID NO: 3232861 - RNA, 19 nt, Artificial Sequence
  Description of Artificial Sequence: Synthetic oligonucleotide
aaacccaaggccuggcaag

SEQ ID NO: 3232862 - RNA, 19 nt, Artificial Sequence
  Description of Artificial Sequence: Synthetic oligonucleotide
gaaguaaagagaucucuuc

SEQ ID NO: 3232863 - RNA, 19 nt, Artificial Sequence
  Description of Artificial Sequence: Synthetic oligonucleotide
aauauuccaggauguuuug

SEQ ID NO: 3232864 - RNA, 19 nt, Artificial Sequence
  Description of Artificial Sequence: Synthetic oligonucleotide
uuaauuguaccauuugauu

SEQ ID NO: 3232865 - RNA, 19 nt, Artificial Sequence
  Description of Artificial Sequence: Synthetic oligonucleotide
ugcuaaucucaccaugucc

SEQ ID NO: 3232866 - RNA, 19 nt, Artificial Sequence
  Description of Artificial Sequence: Synthetic oligonucleotide
ucauaguagcccuugcccc

SEQ ID NO: 3232867 - RNA, 19 nt, Artificial Sequence
  Description of Artificial Sequence: Synthetic oligonucleotide
uugaugaucucuucugucu

SEQ ID NO: 3232868 - RNA, 19 nt, Artificial Sequence
  Description of Artificial Sequence: Synthetic oligonucleotide
uguuugaaaauguccuuga

SEQ ID NO: 3232869 - RNA, 19 nt, Artificial Sequence
  Description of Artificial Sequence: Synthetic oligonucleotide
ugcucuuugaaagccaaag

SEQ ID NO: 3232870 - RNA, 19 nt, Artificial Sequence
  Description of Artificial Sequence: Synthetic oligonucleotide
cuucaaguaggugucauag

SEQ ID NO: 3232871 - RNA, 19 nt, Artificial Sequence
  Description of Artificial Sequence: Synthetic oligonucleotide
uuugaaagccaaagccaag

SEQ ID NO: 3232872 - RNA, 19 nt, Artificial Sequence
  Description of Artificial Sequence: Synthetic oligonucleotide
uggauaaggccuccucucg

SEQ ID NO: 3232873 - RNA, 19 nt, Artificial Sequence
  Description of Artificial Sequence: Synthetic oligonucleotide
aauccgcauacuuucuuca

SEQ ID NO: 3232874 - RNA, 19 nt, Artificial Sequence
  Description of Artificial Sequence: Synthetic oligonucleotide
gaaaauguccuugaugauc

SEQ ID NO: 3232875 - RNA, 19 nt, Artificial Sequence
  Description of Artificial Sequence: Synthetic oligonucleotide
auggaaauucuuuuggaau

SEQ ID NO: 3232876 - RNA, 19 nt, Artificial Sequence
  Description of Artificial Sequence: Synthetic oligonucleotide
uaaaggacuucaucuaccu

SEQ ID NO: 3232877 - RNA, 19 nt, Artificial Sequence
  Description of Artificial Sequence: Synthetic oligonucleotide
auggcugucaucauaugac

SEQ ID NO: 3232878 - RNA, 19 nt, Artificial Sequence
  Description of Artificial Sequence: Synthetic oligonucleotide
accauguccaugugauugc

SEQ ID NO: 3232879 - RNA, 19 nt, Artificial Sequence
  Description of Artificial Sequence: Synthetic oligonucleotide
auucuuuuggaauuuugau

SEQ ID NO: 3232880 - RNA, 19 nt, Artificial Sequence
  Description of Artificial Sequence: Synthetic oligonucleotide
ugaugcuaaucucaccaug

SEQ ID NO: 3232881 - RNA, 19 nt, Artificial Sequence
  Description of Artificial Sequence: Synthetic oligonucleotide
augcucauccacugggacc

SEQ ID NO: 3232882 - RNA, 19 nt, Artificial Sequence
  Description of Artificial Sequence: Synthetic oligonucleotide
ugugauugcucuggaaccg

SEQ ID NO: 3232883 - RNA, 19 nt, Artificial Sequence
  Description of Artificial Sequence: Synthetic oligonucleotide
agaucucuucaggugaugc

SEQ ID NO: 3232884 - RNA, 19 nt, Artificial Sequence
  Description of Artificial Sequence: Synthetic oligonucleotide
augacuuaagaugcugggc

SEQ ID NO: 3232885 - RNA, 19 nt, Artificial Sequence
  Description of Artificial Sequence: Synthetic oligonucleotide
cauaaaggacuucaucuac

SEQ ID NO: 3232886 - RNA, 19 nt, Artificial Sequence
  Description of Artificial Sequence: Synthetic oligonucleotide
uccaggauguuuugggaag

SEQ ID NO: 3232887 - RNA, 19 nt, Artificial Sequence
  Description of Artificial Sequence: Synthetic oligonucleotide
gucaugcucauccacuggg

SEQ ID NO: 3232888 - RNA, 19 nt, Artificial Sequence
  Description of Artificial Sequence: Synthetic oligonucleotide
uccaccaguggauaaggcc

SEQ ID NO: 3232889 - RNA, 19 nt, Artificial Sequence
  Description of Artificial Sequence: Synthetic oligonucleotide
ugacugugagcaaucaccu

SEQ ID NO: 3232890 - RNA, 19 nt, Artificial Sequence
  Description of Artificial Sequence: Synthetic oligonucleotide
gauggaaauucuuuuggaa

SEQ ID NO: 3232891 - RNA, 19 nt, Artificial Sequence
  Description of Artificial Sequence: Synthetic oligonucleotide
ucauaaaggacuucaucua

SEQ ID NO: 3232892 - RNA, 19 nt, Artificial Sequence
  Description of Artificial Sequence: Synthetic oligonucleotide
aaauucuuuuggaauuuug

SEQ ID NO: 3232893 - RNA, 19 nt, Artificial Sequence
  Description of Artificial Sequence: Synthetic oligonucleotide
auguccaugugauugcucu

SEQ ID NO: 3232894 - RNA, 19 nt, Artificial Sequence
  Description of Artificial Sequence: Synthetic oligonucleotide
caaguaggugucauaguag

SEQ ID NO: 3232895 - RNA, 19 nt, Artificial Sequence
  Description of Artificial Sequence: Synthetic oligonucleotide
auaugacuuaagaugcugg

SEQ ID NO: 3232896 - RNA, 19 nt, Artificial Sequence
  Description of Artificial Sequence: Synthetic oligonucleotide
ucuucugucucaauuucau

SEQ ID NO: 3232897 - RNA, 19 nt, Artificial Sequence
  Description of Artificial Sequence: Synthetic oligonucleotide
cauaguagcccuugccccg

SEQ ID NO: 3232898 - RNA, 19 nt, Artificial Sequence
  Description of Artificial Sequence: Synthetic oligonucleotide
gauaaggccuccucucgag

SEQ ID NO: 3232899 - RNA, 19 nt, Artificial Sequence
  Description of Artificial Sequence: Synthetic oligonucleotide
gucaucauaugacuuaaga

SEQ ID NO: 3232900 - RNA, 19 nt, Artificial Sequence
  Description of Artificial Sequence: Synthetic oligonucleotide
aagguguagggcuucacuu

SEQ ID NO: 3232901 - RNA, 19 nt, Artificial Sequence
  Description of Artificial Sequence: Synthetic oligonucleotide
acugacugugagcaaucac

SEQ ID NO: 3232902 - RNA, 19 nt, Artificial Sequence
  Description of Artificial Sequence: Synthetic oligonucleotide
ugccaucuuugucaaaccc

SEQ ID NO: 3232903 - RNA, 19 nt, Artificial Sequence
  Description of Artificial Sequence: Synthetic oligonucleotide
gacuuaagaugcugggcag

SEQ ID NO: 3232904 - RNA, 19 nt, Artificial Sequence
  Description of Artificial Sequence: Synthetic oligonucleotide
cuucauaaaggacuucauc

SEQ ID NO: 3232905 - RNA, 19 nt, Artificial Sequence
  Description of Artificial Sequence: Synthetic oligonucleotide
agauggaaauucuuuugga

SEQ ID NO: 3232906 - RNA, 19 nt, Artificial Sequence
  Description of Artificial Sequence: Synthetic oligonucleotide
ugucaugcucauccacugg

SEQ ID NO: 3232907 - RNA, 19 nt, Artificial Sequence
  Description of Artificial Sequence: Synthetic oligonucleotide
cuucacacugguacaaaac

SEQ ID NO: 3232908 - RNA, 19 nt, Artificial Sequence
  Description of Artificial Sequence: Synthetic oligonucleotide
uggugcugcacacagcgcu

SEQ ID NO: 3232909 - RNA, 19 nt, Artificial Sequence
  Description of Artificial Sequence: Synthetic oligonucleotide
gaugaagcagauuuugccu

SEQ ID NO: 3232910 - RNA, 19 nt, Artificial Sequence
  Description of Artificial Sequence: Synthetic oligonucleotide
ucucaauuucaucuugcau

SEQ ID NO: 3232911 - RNA, 19 nt, Artificial Sequence
  Description of Artificial Sequence: Synthetic oligonucleotide
aucuaccuucaugucaugc

SEQ ID NO: 3232912 - RNA, 19 nt, Artificial Sequence
  Description of Artificial Sequence: Synthetic oligonucleotide
agguguagggcuucacuuc

SEQ ID NO: 3232913 - RNA, 19 nt, Artificial Sequence
  Description of Artificial Sequence: Synthetic oligonucleotide
ggugaugcuaaucucacca

SEQ ID NO: 3232914 - RNA, 19 nt, Artificial Sequence
  Description of Artificial Sequence: Synthetic oligonucleotide
uugccuuguuugaaaaugu

SEQ ID NO: 3232915 - RNA, 19 nt, Artificial Sequence
  Description of Artificial Sequence: Synthetic oligonucleotide
uuccuggugcugcacacag

SEQ ID NO: 3232916 - RNA, 19 nt, Artificial Sequence
  Description of Artificial Sequence: Synthetic oligonucleotide
uugucaaacccaaggccug

SEQ ID NO: 3232917 - RNA, 19 nt, Artificial Sequence
  Description of Artificial Sequence: Synthetic oligonucleotide
ucuaccaccagcaaccggg

SEQ ID NO: 3232918 - RNA, 19 nt, Artificial Sequence
  Description of Artificial Sequence: Synthetic oligonucleotide
aacaacuucggcauggcgc

SEQ ID NO: 3232919 - RNA, 19 nt, Artificial Sequence
  Description of Artificial Sequence: Synthetic oligonucleotide
gauucuggcaacaacuucg

SEQ ID NO: 3232920 - RNA, 19 nt, Artificial Sequence
  Description of Artificial Sequence: Synthetic oligonucleotide
aagcaggugagccuggguc

SEQ ID NO: 3232921 - RNA, 19 nt, Artificial Sequence
  Description of Artificial Sequence: Synthetic oligonucleotide
gauguauugaccaggccgg

SEQ ID NO: 3232922 - RNA, 19 nt, Artificial Sequence
  Description of Artificial Sequence: Synthetic oligonucleotide
ggauguauugaccaggccg

SEQ ID NO: 3232923 - RNA, 19 nt, Artificial Sequence
  Description of Artificial Sequence: Synthetic oligonucleotide
ucuggcaacaacuucggca

SEQ ID NO: 3232924 - RNA, 19 nt, Artificial Sequence
  Description of Artificial Sequence: Synthetic oligonucleotide
ugagccuggguccacagag

SEQ ID NO: 3232925 - RNA, 19 nt, Artificial Sequence
  Description of Artificial Sequence: Synthetic oligonucleotide
ucaggaucuaccaccagca

SEQ ID NO: 3232926 - RNA, 19 nt, Artificial Sequence
  Description of Artificial Sequence: Synthetic oligonucleotide
aggaucuaccaccagcaac

SEQ ID NO: 3232927 - RNA, 19 nt, Artificial Sequence
  Description of Artificial Sequence: Synthetic oligonucleotide
ugcccauucaccucaauga

SEQ ID NO: 3232928 - RNA, 19 nt, Artificial Sequence
  Description of Artificial Sequence: Synthetic oligonucleotide
agugggaagcaggugagcc

SEQ ID NO: 3232929 - RNA, 19 nt, Artificial Sequence
  Description of Artificial Sequence: Synthetic oligonucleotide
agccccuccacauucugcc

SEQ ID NO: 3232930 - RNA, 19 nt, Artificial Sequence
  Description of Artificial Sequence: Synthetic oligonucleotide
agagcggauguauugacca

SEQ ID NO: 3232931 - RNA, 19 nt, Artificial Sequence
  Description of Artificial Sequence: Synthetic oligonucleotide
agcaggugagccugggucc

SEQ ID NO: 3232932 - RNA, 19 nt, Artificial Sequence
  Description of Artificial Sequence: Synthetic oligonucleotide
uucggcauggcgcagcccc

SEQ ID NO: 3232933 - RNA, 19 nt, Artificial Sequence
  Description of Artificial Sequence: Synthetic oligonucleotide
aaugagccgguccugggca

SEQ ID NO: 3232934 - RNA, 19 nt, Artificial Sequence
  Description of Artificial Sequence: Synthetic oligonucleotide
auucaccucaaugagccgg

SEQ ID NO: 3232935 - RNA, 19 nt, Artificial Sequence
  Description of Artificial Sequence: Synthetic oligonucleotide
cucaggaucuaccaccagc

SEQ ID NO: 3232936 - RNA, 19 nt, Artificial Sequence
  Description of Artificial Sequence: Synthetic oligonucleotide
acagagcggauguauugac

SEQ ID NO: 3232937 - RNA, 19 nt, Artificial Sequence
  Description of Artificial Sequence: Synthetic oligonucleotide
acaacuucggcauggcgca

SEQ ID NO: 3232938 - RNA, 19 nt, Artificial Sequence
  Description of Artificial Sequence: Synthetic oligonucleotide
ccauucaccucaaugagcc

SEQ ID NO: 3232939 - RNA, 19 nt, Artificial Sequence
  Description of Artificial Sequence: Synthetic oligonucleotide
acauucugcccauucaccu

SEQ ID NO: 3232940 - RNA, 19 nt, Artificial Sequence
  Description of Artificial Sequence: Synthetic oligonucleotide
cuugauucuggcaacaacu

SEQ ID NO: 3232941 - RNA, 19 nt, Artificial Sequence
  Description of Artificial Sequence: Synthetic oligonucleotide
uccacauucugcccauuca

SEQ ID NO: 3232942 - RNA, 19 nt, Artificial Sequence
  Description of Artificial Sequence: Synthetic oligonucleotide
ggaucuaccaccagcaacc

SEQ ID NO: 3232943 - RNA, 19 nt, Artificial Sequence
  Description of Artificial Sequence: Synthetic oligonucleotide
aacuucggcauggcgcagc

SEQ ID NO: 3232944 - RNA, 19 nt, Artificial Sequence
  Description of Artificial Sequence: Synthetic oligonucleotide
accucaaugagccgguccu

SEQ ID NO: 3232945 - RNA, 19 nt, Artificial Sequence
  Description of Artificial Sequence: Synthetic oligonucleotide
ucaaugagccgguccuggg

SEQ ID NO: 3232946 - RNA, 19 nt, Artificial Sequence
  Description of Artificial Sequence: Synthetic oligonucleotide
cacauucugcccauucacc

SEQ ID NO: 3232947 - RNA, 19 nt, Artificial Sequence
  Description of Artificial Sequence: Synthetic oligonucleotide
ugauucuggcaacaacuuc

SEQ ID NO: 3232948 - RNA, 19 nt, Artificial Sequence
  Description of Artificial Sequence: Synthetic oligonucleotide
agccuggguccacagagcg

SEQ ID NO: 3232949 - RNA, 19 nt, Artificial Sequence
  Description of Artificial Sequence: Synthetic oligonucleotide
auucugcccauucaccuca

SEQ ID NO: 3232950 - RNA, 19 nt, Artificial Sequence
  Description of Artificial Sequence: Synthetic oligonucleotide
uugauucuggcaacaacuu

SEQ ID NO: 3232951 - RNA, 19 nt, Artificial Sequence
  Description of Artificial Sequence: Synthetic oligonucleotide
guauugaccaggccgggac

SEQ ID NO: 3232952 - RNA, 19 nt, Artificial Sequence
  Description of Artificial Sequence: Synthetic oligonucleotide
acuucggcauggcgcagcc

SEQ ID NO: 3232953 - RNA, 19 nt, Artificial Sequence
  Description of Artificial Sequence: Synthetic oligonucleotide
aaccgggccucauccuccc

SEQ ID NO: 3232954 - RNA, 19 nt, Artificial Sequence
  Description of Artificial Sequence: Synthetic oligonucleotide
uccgucucaggaucuacca

SEQ ID NO: 3232955 - RNA, 19 nt, Artificial Sequence
  Description of Artificial Sequence: Synthetic oligonucleotide
agcggauguauugaccagg

SEQ ID NO: 3232956 - RNA, 19 nt, Artificial Sequence
  Description of Artificial Sequence: Synthetic oligonucleotide
ucccgugccuugauucugg

SEQ ID NO: 3232957 - RNA, 19 nt, Artificial Sequence
  Description of Artificial Sequence: Synthetic oligonucleotide
ugggaagcaggugagccug

SEQ ID NO: 3232958 - RNA, 19 nt, Artificial Sequence
  Description of Artificial Sequence: Synthetic oligonucleotide
accaccagcaaccgggccu

SEQ ID NO: 3232959 - RNA, 19 nt, Artificial Sequence
  Description of Artificial Sequence: Synthetic oligonucleotide
uucaccucaaugagccggu

SEQ ID NO: 3232960 - RNA, 19 nt, Artificial Sequence
  Description of Artificial Sequence: Synthetic oligonucleotide
cagagugggaagcagguga

SEQ ID NO: 3232961 - RNA, 19 nt, Artificial Sequence
  Description of Artificial Sequence: Synthetic oligonucleotide
auucuggcaacaacuucgg

SEQ ID NO: 3232962 - RNA, 19 nt, Artificial Sequence
  Description of Artificial Sequence: Synthetic oligonucleotide
uauugaccaggccgggacu

SEQ ID NO: 3232963 - RNA, 19 nt, Artificial Sequence
  Description of Artificial Sequence: Synthetic oligonucleotide
cagagcggauguauugacc

SEQ ID NO: 3232964 - RNA, 19 nt, Artificial Sequence
  Description of Artificial Sequence: Synthetic oligonucleotide
cugcccauucaccucaaug

SEQ ID NO: 3232965 - RNA, 19 nt, Artificial Sequence
  Description of Artificial Sequence: Synthetic oligonucleotide
cucaaugagccgguccugg

SEQ ID NO: 3232966 - RNA, 19 nt, Artificial Sequence
  Description of Artificial Sequence: Synthetic oligonucleotide
auccgucucaggaucuacc

SEQ ID NO: 3232967 - RNA, 19 nt, Artificial Sequence
  Description of Artificial Sequence: Synthetic oligonucleotide
caaugagccgguccugggc

SEQ ID NO: 3232968 - RNA, 19 nt, Artificial Sequence
  Description of Artificial Sequence: Synthetic oligonucleotide
caacaacuucggcauggcg

SEQ ID NO: 3232969 - RNA, 19 nt, Artificial Sequence
  Description of Artificial Sequence: Synthetic oligonucleotide
uccucccgugccuugauuc

SEQ ID NO: 3232970 - RNA, 19 nt, Artificial Sequence
  Description of Artificial Sequence: Synthetic oligonucleotide
gaucuaccaccagcaaccg

SEQ ID NO: 3232971 - RNA, 19 nt, Artificial Sequence
  Description of Artificial Sequence: Synthetic oligonucleotide
aucuaccaccagcaaccgg

SEQ ID NO: 3232972 - RNA, 19 nt, Artificial Sequence
  Description of Artificial Sequence: Synthetic oligonucleotide
gagcggauguauugaccag

SEQ ID NO: 3232973 - RNA, 19 nt, Artificial Sequence
  Description of Artificial Sequence: Synthetic oligonucleotide
cagcaaccgggccucaucc

SEQ ID NO: 3232974 - RNA, 19 nt, Artificial Sequence
  Description of Artificial Sequence: Synthetic oligonucleotide
cauucugcccauucaccuc

SEQ ID NO: 3232975 - RNA, 19 nt, Artificial Sequence
  Description of Artificial Sequence: Synthetic oligonucleotide
ggcaacaacuucggcaugg

SEQ ID NO: 3232976 - RNA, 19 nt, Artificial Sequence
  Description of Artificial Sequence: Synthetic oligonucleotide
cauucaccucaaugagccg

SEQ ID NO: 3232977 - RNA, 19 nt, Artificial Sequence
  Description of Artificial Sequence: Synthetic oligonucleotide
uguauugaccaggccggga

SEQ ID NO: 3232978 - RNA, 19 nt, Artificial Sequence
  Description of Artificial Sequence: Synthetic oligonucleotide
ucucaggaucuaccaccag

SEQ ID NO: 3232979 - RNA, 19 nt, Artificial Sequence
  Description of Artificial Sequence: Synthetic oligonucleotide
uucuggcaacaacuucggc

SEQ ID NO: 3232980 - RNA, 19 nt, Artificial Sequence
  Description of Artificial Sequence: Synthetic oligonucleotide
caccucaaugagccggucc

SEQ ID NO: 3232981 - RNA, 19 nt, Artificial Sequence
  Description of Artificial Sequence: Synthetic oligonucleotide
uccacagagcggauguauu

SEQ ID NO: 3232982 - RNA, 19 nt, Artificial Sequence
  Description of Artificial Sequence: Synthetic oligonucleotide
agagugggaagcaggugag

SEQ ID NO: 3232983 - RNA, 19 nt, Artificial Sequence
  Description of Artificial Sequence: Synthetic oligonucleotide
caaccgggccucauccucc

SEQ ID NO: 3232984 - RNA, 19 nt, Artificial Sequence
  Description of Artificial Sequence: Synthetic oligonucleotide
cuaccaccagcaaccgggc

SEQ ID NO: 3232985 - RNA, 19 nt, Artificial Sequence
  Description of Artificial Sequence: Synthetic oligonucleotide
augagccgguccugggcac

SEQ ID NO: 3232986 - RNA, 19 nt, Artificial Sequence
  Description of Artificial Sequence: Synthetic oligonucleotide
cgucucaggaucuaccacc

SEQ ID NO: 3232987 - RNA, 19 nt, Artificial Sequence
  Description of Artificial Sequence: Synthetic oligonucleotide
gcccauucaccucaaugag

SEQ ID NO: 3232988 - RNA, 19 nt, Artificial Sequence
  Description of Artificial Sequence: Synthetic oligonucleotide
auguauugaccaggccggg

SEQ ID NO: 3232989 - RNA, 19 nt, Artificial Sequence
  Description of Artificial Sequence: Synthetic oligonucleotide
cuggcaacaacuucggcau

SEQ ID NO: 3232990 - RNA, 19 nt, Artificial Sequence
  Description of Artificial Sequence: Synthetic oligonucleotide
cuccacauucugcccauuc

SEQ ID NO: 3232991 - RNA, 19 nt, Artificial Sequence
  Description of Artificial Sequence: Synthetic oligonucleotide
gggcacggaggccagagug

SEQ ID NO: 3232992 - RNA, 19 nt, Artificial Sequence
  Description of Artificial Sequence: Synthetic oligonucleotide
cccauucaccucaaugagc

SEQ ID NO: 3232993 - RNA, 19 nt, Artificial Sequence
  Description of Artificial Sequence: Synthetic oligonucleotide
uaccaccagcaaccgggcc

SEQ ID NO: 3232994 - RNA, 19 nt, Artificial Sequence
  Description of Artificial Sequence: Synthetic oligonucleotide
ugccuugauucuggcaaca

SEQ ID NO: 3232995 - RNA, 19 nt, Artificial Sequence
  Description of Artificial Sequence: Synthetic oligonucleotide
ugagccgguccugggcacg

SEQ ID NO: 3232996 - RNA, 19 nt, Artificial Sequence
  Description of Artificial Sequence: Synthetic oligonucleotide
ccacauucugcccauucac

SEQ ID NO: 3232997 - RNA, 19 nt, Artificial Sequence
  Description of Artificial Sequence: Synthetic oligonucleotide
accaggccgggacuuguca

SEQ ID NO: 3232998 - RNA, 19 nt, Artificial Sequence
  Description of Artificial Sequence: Synthetic oligonucleotide
uggcaacaacuucggcaug

SEQ ID NO: 3232999 - RNA, 19 nt, Artificial Sequence
  Description of Artificial Sequence: Synthetic oligonucleotide
ucauccucccgugccuuga

SEQ ID NO: 3233000 - RNA, 19 nt, Artificial Sequence
  Description of Artificial Sequence: Synthetic oligonucleotide
cagccccuccacauucugc

SEQ ID NO: 3233001 - RNA, 19 nt, Artificial Sequence
  Description of Artificial Sequence: Synthetic oligonucleotide
ccuugauucuggcaacaac

SEQ ID NO: 3233002 - RNA, 19 nt, Artificial Sequence
  Description of Artificial Sequence: Synthetic oligonucleotide
acggaggccagagugggaa

SEQ ID NO: 3233003 - RNA, 19 nt, Artificial Sequence
  Description of Artificial Sequence: Synthetic oligonucleotide
gugccuugauucuggcaac

SEQ ID NO: 3233004 - RNA, 19 nt, Artificial Sequence
  Description of Artificial Sequence: Synthetic oligonucleotide
ccacagagcggauguauug

SEQ ID NO: 3233005 - RNA, 19 nt, Artificial Sequence
  Description of Artificial Sequence: Synthetic oligonucleotide
cacagagcggauguauuga

SEQ ID NO: 3233006 - RNA, 19 nt, Artificial Sequence
  Description of Artificial Sequence: Synthetic oligonucleotide
cauggcgcagccccuccac

SEQ ID NO: 3233007 - RNA, 19 nt, Artificial Sequence
  Description of Artificial Sequence: Synthetic oligonucleotide
uggguccacagagcggaug

SEQ ID NO: 3233008 - RNA, 19 nt, Artificial Sequence
  Description of Artificial Sequence: Synthetic oligonucleotide
gucucaggaucuaccacca

SEQ ID NO: 3233009 - RNA, 19 nt, Artificial Sequence
  Description of Artificial Sequence: Synthetic oligonucleotide
agcaaccgggccucauccu

SEQ ID NO: 3233010 - RNA, 19 nt, Artificial Sequence
  Description of Artificial Sequence: Synthetic oligonucleotide
gagugggaagcaggugagc

SEQ ID NO: 3233011 - RNA, 19 nt, Artificial Sequence
  Description of Artificial Sequence: Synthetic oligonucleotide
cugggcacggaggccagag

SEQ ID NO: 3233012 - RNA, 19 nt, Artificial Sequence
  Description of Artificial Sequence: Synthetic oligonucleotide
ggccagagugggaagcagg

SEQ ID NO: 3233013 - RNA, 19 nt, Artificial Sequence
  Description of Artificial Sequence: Synthetic oligonucleotide
ggcacggaggccagagugg

SEQ ID NO: 3233014 - RNA, 19 nt, Artificial Sequence
  Description of Artificial Sequence: Synthetic oligonucleotide
auugaccaggccgggacuu

SEQ ID NO: 3233015 - RNA, 19 nt, Artificial Sequence
  Description of Artificial Sequence: Synthetic oligonucleotide
uccugggcacggaggccag

SEQ ID NO: 3233016 - RNA, 19 nt, Artificial Sequence
  Description of Artificial Sequence: Synthetic oligonucleotide
ggccucauccucccgugcc

SEQ ID NO: 3233017 - RNA, 19 nt, Artificial Sequence
  Description of Artificial Sequence: Synthetic oligonucleotide
aaaguguccaccuaggagg

SEQ ID NO: 3233018 - RNA, 19 nt, Artificial Sequence
  Description of Artificial Sequence: Synthetic oligonucleotide
aaaugauuggcacaaaugu

SEQ ID NO: 3233019 - RNA, 19 nt, Artificial Sequence
  Description of Artificial Sequence: Synthetic oligonucleotide
uauagaguaucccagauac

SEQ ID NO: 3233020 - RNA, 19 nt, Artificial Sequence
  Description of Artificial Sequence: Synthetic oligonucleotide
uuaaaugauccccagauga

SEQ ID NO: 3233021 - RNA, 19 nt, Artificial Sequence
  Description of Artificial Sequence: Synthetic oligonucleotide
aguuguguugaucacaggc

SEQ ID NO: 3233022 - RNA, 19 nt, Artificial Sequence
  Description of Artificial Sequence: Synthetic oligonucleotide
aaacugugaaagcaguugc

SEQ ID NO: 3233023 - RNA, 19 nt, Artificial Sequence
  Description of Artificial Sequence: Synthetic oligonucleotide
aaguaauucaggauggugc

SEQ ID NO: 3233024 - RNA, 19 nt, Artificial Sequence
  Description of Artificial Sequence: Synthetic oligonucleotide
aagguauuaaaugaucccc

SEQ ID NO: 3233025 - RNA, 19 nt, Artificial Sequence
  Description of Artificial Sequence: Synthetic oligonucleotide
caaauguagaucuauagag

SEQ ID NO: 3233026 - RNA, 19 nt, Artificial Sequence
  Description of Artificial Sequence: Synthetic oligonucleotide
uccaaaguaauucaggaug

SEQ ID NO: 3233027 - RNA, 19 nt, Artificial Sequence
  Description of Artificial Sequence: Synthetic oligonucleotide
uuaagguauuaaaugaucc

SEQ ID NO: 3233028 - RNA, 19 nt, Artificial Sequence
  Description of Artificial Sequence: Synthetic oligonucleotide
uauuaaaugauccccagau

SEQ ID NO: 3233029 - RNA, 19 nt, Artificial Sequence
  Description of Artificial Sequence: Synthetic oligonucleotide
ucuguauccaucccaaucc

SEQ ID NO: 3233030 - RNA, 19 nt, Artificial Sequence
  Description of Artificial Sequence: Synthetic oligonucleotide
aaaccgaugcuuuugauaa

SEQ ID NO: 3233031 - RNA, 19 nt, Artificial Sequence
  Description of Artificial Sequence: Synthetic oligonucleotide
cuuuuggugaacaaaacug

SEQ ID NO: 3233032 - RNA, 19 nt, Artificial Sequence
  Description of Artificial Sequence: Synthetic oligonucleotide
gauacuucuguauccaucc

SEQ ID NO: 3233033 - RNA, 19 nt, Artificial Sequence
  Description of Artificial Sequence: Synthetic oligonucleotide
uaaaugauuggcacaaaug

SEQ ID NO: 3233034 - RNA, 19 nt, Artificial Sequence
  Description of Artificial Sequence: Synthetic oligonucleotide
agaaauucacuuuugguga

SEQ ID NO: 3233035 - RNA, 19 nt, Artificial Sequence
  Description of Artificial Sequence: Synthetic oligonucleotide
cagaaauucacuuuuggug

SEQ ID NO: 3233036 - RNA, 19 nt, Artificial Sequence
  Description of Artificial Sequence: Synthetic oligonucleotide
uucagaaauucacuuuugg

SEQ ID NO: 3233037 - RNA, 19 nt, Artificial Sequence
  Description of Artificial Sequence: Synthetic oligonucleotide
aauguagaucuauagagua

SEQ ID NO: 3233038 - RNA, 19 nt, Artificial Sequence
  Description of Artificial Sequence: Synthetic oligonucleotide
gugaacaaaacugugaaag

SEQ ID NO: 3233039 - RNA, 19 nt, Artificial Sequence
  Description of Artificial Sequence: Synthetic oligonucleotide
aagcaguugcuacugagag

SEQ ID NO: 3233040 - RNA, 19 nt, Artificial Sequence
  Description of Artificial Sequence: Synthetic oligonucleotide
aaaacugugaaagcaguug

SEQ ID NO: 3233041 - RNA, 19 nt, Artificial Sequence
  Description of Artificial Sequence: Synthetic oligonucleotide
ggucccaagacauaaaccg

SEQ ID NO: 3233042 - RNA, 19 nt, Artificial Sequence
  Description of Artificial Sequence: Synthetic oligonucleotide
uaagguauuaaaugauccc

SEQ ID NO: 3233043 - RNA, 19 nt, Artificial Sequence
  Description of Artificial Sequence: Synthetic oligonucleotide
uuuuggugaacaaaacugu

SEQ ID NO: 3233044 - RNA, 19 nt, Artificial Sequence
  Description of Artificial Sequence: Synthetic oligonucleotide
aucaguguguuguccaugc

SEQ ID NO: 3233045 - RNA, 19 nt, Artificial Sequence
  Description of Artificial Sequence: Synthetic oligonucleotide
gaaaguguccaccuaggag

SEQ ID NO: 3233046 - RNA, 19 nt, Artificial Sequence
  Description of Artificial Sequence: Synthetic oligonucleotide
aguggugcguaguagaaag

SEQ ID NO: 3233047 - RNA, 19 nt, Artificial Sequence
  Description of Artificial Sequence: Synthetic oligonucleotide
agaucuauagaguauccca

SEQ ID NO: 3233048 - RNA, 19 nt, Artificial Sequence
  Description of Artificial Sequence: Synthetic oligonucleotide
uauucagaaauucacuuuu

SEQ ID NO: 3233049 - RNA, 19 nt, Artificial Sequence
  Description of Artificial Sequence: Synthetic oligonucleotide
aaaugauccccagaugagg

SEQ ID NO: 3233050 - RNA, 19 nt, Artificial Sequence
  Description of Artificial Sequence: Synthetic oligonucleotide
acaaauguagaucuauaga

SEQ ID NO: 3233051 - RNA, 19 nt, Artificial Sequence
  Description of Artificial Sequence: Synthetic oligonucleotide
aacaaaacugugaaagcag

SEQ ID NO: 3233052 - RNA, 19 nt, Artificial Sequence
  Description of Artificial Sequence: Synthetic oligonucleotide
uuggcacaaauguagaucu

SEQ ID NO: 3233053 - RNA, 19 nt, Artificial Sequence
  Description of Artificial Sequence: Synthetic oligonucleotide
aaugauccccagaugaggg

SEQ ID NO: 3233054 - RNA, 19 nt, Artificial Sequence
  Description of Artificial Sequence: Synthetic oligonucleotide
uaaaugauccccagaugag

SEQ ID NO: 3233055 - RNA, 19 nt, Artificial Sequence
  Description of Artificial Sequence: Synthetic oligonucleotide
ucuccaguuguguugauca

SEQ ID NO: 3233056 - RNA, 19 nt, Artificial Sequence
  Description of Artificial Sequence: Synthetic oligonucleotide
ucacuuuuggugaacaaaa

SEQ ID NO: 3233057 - RNA, 19 nt, Artificial Sequence
  Description of Artificial Sequence: Synthetic oligonucleotide
uagaguaucccagauacca

SEQ ID NO: 3233058 - RNA, 19 nt, Artificial Sequence
  Description of Artificial Sequence: Synthetic oligonucleotide
uuuggugaacaaaacugug

SEQ ID NO: 3233059 - RNA, 19 nt, Artificial Sequence
  Description of Artificial Sequence: Synthetic oligonucleotide
ucugucaucaguguguugu

SEQ ID NO: 3233060 - RNA, 19 nt, Artificial Sequence
  Description of Artificial Sequence: Synthetic oligonucleotide
cacaaauguagaucuauag

SEQ ID NO: 3233061 - RNA, 19 nt, Artificial Sequence
  Description of Artificial Sequence: Synthetic oligonucleotide
ugaacaaaacugugaaagc

SEQ ID NO: 3233062 - RNA, 19 nt, Artificial Sequence
  Description of Artificial Sequence: Synthetic oligonucleotide
aguguguuguccaugcugc

SEQ ID NO: 3233063 - RNA, 19 nt, Artificial Sequence
  Description of Artificial Sequence: Synthetic oligonucleotide
ucccaauccagccaaaccu

SEQ ID NO: 3233064 - RNA, 19 nt, Artificial Sequence
  Description of Artificial Sequence: Synthetic oligonucleotide
guagaaaguguccaccuag

SEQ ID NO: 3233065 - RNA, 19 nt, Artificial Sequence
  Description of Artificial Sequence: Synthetic oligonucleotide
ucagaaauucacuuuuggu

SEQ ID NO: 3233066 - RNA, 19 nt, Artificial Sequence
  Description of Artificial Sequence: Synthetic oligonucleotide
ucaggauggugcuugauac

SEQ ID NO: 3233067 - RNA, 19 nt, Artificial Sequence
  Description of Artificial Sequence: Synthetic oligonucleotide
aauccagccaaaccuugag

SEQ ID NO: 3233068 - RNA, 19 nt, Artificial Sequence
  Description of Artificial Sequence: Synthetic oligonucleotide
aaaguaauucaggauggug

SEQ ID NO: 3233069 - RNA, 19 nt, Artificial Sequence
  Description of Artificial Sequence: Synthetic oligonucleotide
uagaaaguguccaccuagg

SEQ ID NO: 3233070 - RNA, 19 nt, Artificial Sequence
  Description of Artificial Sequence: Synthetic oligonucleotide
acuuuuggugaacaaaacu

SEQ ID NO: 3233071 - RNA, 19 nt, Artificial Sequence
  Description of Artificial Sequence: Synthetic oligonucleotide
auuggcacaaauguagauc

SEQ ID NO: 3233072 - RNA, 19 nt, Artificial Sequence
  Description of Artificial Sequence: Synthetic oligonucleotide
augauuggcacaaauguag

SEQ ID NO: 3233073 - RNA, 19 nt, Artificial Sequence
  Description of Artificial Sequence: Synthetic oligonucleotide
agggcaacagcccacagug

SEQ ID NO: 3233074 - RNA, 19 nt, Artificial Sequence
  Description of Artificial Sequence: Synthetic oligonucleotide
ugcugcauggguuauucag

SEQ ID NO: 3233075 - RNA, 19 nt, Artificial Sequence
  Description of Artificial Sequence: Synthetic oligonucleotide
gaaagcaguugcuacugag

SEQ ID NO: 3233076 - RNA, 19 nt, Artificial Sequence
  Description of Artificial Sequence: Synthetic oligonucleotide
uuggugaacaaaacuguga

SEQ ID NO: 3233077 - RNA, 19 nt, Artificial Sequence
  Description of Artificial Sequence: Synthetic oligonucleotide
ucccagauaccacugcagg

SEQ ID NO: 3233078 - RNA, 19 nt, Artificial Sequence
  Description of Artificial Sequence: Synthetic oligonucleotide
uggugaacaaaacugugaa

SEQ ID NO: 3233079 - RNA, 19 nt, Artificial Sequence
  Description of Artificial Sequence: Synthetic oligonucleotide
aguaauucaggauggugcu

SEQ ID NO: 3233080 - RNA, 19 nt, Artificial Sequence
  Description of Artificial Sequence: Synthetic oligonucleotide
aaauguagaucuauagagu

SEQ ID NO: 3233081 - RNA, 19 nt, Artificial Sequence
  Description of Artificial Sequence: Synthetic oligonucleotide
gaucuauagaguaucccag

SEQ ID NO: 3233082 - RNA, 19 nt, Artificial Sequence
  Description of Artificial Sequence: Synthetic oligonucleotide
aucccaauccagccaaacc

SEQ ID NO: 3233083 - RNA, 19 nt, Artificial Sequence
  Description of Artificial Sequence: Synthetic oligonucleotide
uccagccaaaccuugagcu

SEQ ID NO: 3233084 - RNA, 19 nt, Artificial Sequence
  Description of Artificial Sequence: Synthetic oligonucleotide
uggguuauucagaaauuca

SEQ ID NO: 3233085 - RNA, 19 nt, Artificial Sequence
  Description of Artificial Sequence: Synthetic oligonucleotide
uguagaucuauagaguauc

SEQ ID NO: 3233086 - RNA, 19 nt, Artificial Sequence
  Description of Artificial Sequence: Synthetic oligonucleotide
gauguaaaugauuggcaca

SEQ ID NO: 3233087 - RNA, 19 nt, Artificial Sequence
  Description of Artificial Sequence: Synthetic oligonucleotide
cuacugagagcccagcucc

SEQ ID NO: 3233088 - RNA, 19 nt, Artificial Sequence
  Description of Artificial Sequence: Synthetic oligonucleotide
ugugaaagcaguugcuacu

SEQ ID NO: 3233089 - RNA, 19 nt, Artificial Sequence
  Description of Artificial Sequence: Synthetic oligonucleotide
aaaccuugagcuugcccag

SEQ ID NO: 3233090 - RNA, 19 nt, Artificial Sequence
  Description of Artificial Sequence: Synthetic oligonucleotide
caaaccuugagcuugccca

SEQ ID NO: 3233091 - RNA, 19 nt, Artificial Sequence
  Description of Artificial Sequence: Synthetic oligonucleotide
auuaaaugauccccagaug

SEQ ID NO: 3233092 - RNA, 19 nt, Artificial Sequence
  Description of Artificial Sequence: Synthetic oligonucleotide
agggucccaagacauaaac

SEQ ID NO: 3233093 - RNA, 19 nt, Artificial Sequence
  Description of Artificial Sequence: Synthetic oligonucleotide
aggaggaaacggcacaggg

SEQ ID NO: 3233094 - RNA, 19 nt, Artificial Sequence
  Description of Artificial Sequence: Synthetic oligonucleotide
uaauucaggauggugcuug

SEQ ID NO: 3233095 - RNA, 19 nt, Artificial Sequence
  Description of Artificial Sequence: Synthetic oligonucleotide
uucuguauccaucccaauc

SEQ ID NO: 3233096 - RNA, 19 nt, Artificial Sequence
  Description of Artificial Sequence: Synthetic oligonucleotide
gaacaaaacugugaaagca

SEQ ID NO: 3233097 - RNA, 19 nt, Artificial Sequence
  Description of Artificial Sequence: Synthetic oligonucleotide
aagacauaaaccgaugcuu

SEQ ID NO: 3233098 - RNA, 19 nt, Artificial Sequence
  Description of Artificial Sequence: Synthetic oligonucleotide
accacugcagggcaacagc

SEQ ID NO: 3233099 - RNA, 19 nt, Artificial Sequence
  Description of Artificial Sequence: Synthetic oligonucleotide
uauccaucccaauccagcc

SEQ ID NO: 3233100 - RNA, 19 nt, Artificial Sequence
  Description of Artificial Sequence: Synthetic oligonucleotide
ucuauagaguaucccagau

SEQ ID NO: 3233101 - RNA, 19 nt, Artificial Sequence
  Description of Artificial Sequence: Synthetic oligonucleotide
aaauucacuuuuggugaac

SEQ ID NO: 3233102 - RNA, 19 nt, Artificial Sequence
  Description of Artificial Sequence: Synthetic oligonucleotide
uccaccuaggaggaaacgg

SEQ ID NO: 3233103 - RNA, 19 nt, Artificial Sequence
  Description of Artificial Sequence: Synthetic oligonucleotide
uugaucacaggcucuguca

SEQ ID NO: 3233104 - RNA, 19 nt, Artificial Sequence
  Description of Artificial Sequence: Synthetic oligonucleotide
caguuaagguauuaaauga

SEQ ID NO: 3233105 - RNA, 19 nt, Artificial Sequence
  Description of Artificial Sequence: Synthetic oligonucleotide
auggguuauucagaaauuc

SEQ ID NO: 3233106 - RNA, 19 nt, Artificial Sequence
  Description of Artificial Sequence: Synthetic oligonucleotide
uacuucuguauccauccca

SEQ ID NO: 3233107 - RNA, 19 nt, Artificial Sequence
  Description of Artificial Sequence: Synthetic oligonucleotide
uuauucagaaauucacuuu

SEQ ID NO: 3233108 - RNA, 19 nt, Artificial Sequence
  Description of Artificial Sequence: Synthetic oligonucleotide
ugauacuucuguauccauc

SEQ ID NO: 3233109 - RNA, 19 nt, Artificial Sequence
  Description of Artificial Sequence: Synthetic oligonucleotide
uguuguccaugcugcaugg

SEQ ID NO: 3233110 - RNA, 19 nt, Artificial Sequence
  Description of Artificial Sequence: Synthetic oligonucleotide
agcaguugcuacugagagc

SEQ ID NO: 3233111 - RNA, 19 nt, Artificial Sequence
  Description of Artificial Sequence: Synthetic oligonucleotide
ugcuugauacuucuguauc

SEQ ID NO: 3233112 - RNA, 19 nt, Artificial Sequence
  Description of Artificial Sequence: Synthetic oligonucleotide
ugcguaguagaaagugucc

SEQ ID NO: 3233113 - RNA, 19 nt, Artificial Sequence
  Description of Artificial Sequence: Synthetic oligonucleotide
ugauuggcacaaauguaga

SEQ ID NO: 3233114 - RNA, 19 nt, Artificial Sequence
  Description of Artificial Sequence: Synthetic oligonucleotide
uggugcuugauacuucugu

SEQ ID NO: 3233115 - RNA, 19 nt, Artificial Sequence
  Description of Artificial Sequence: Synthetic oligonucleotide
aauucacuuuuggugaaca

SEQ ID NO: 3233116 - RNA, 19 nt, Artificial Sequence
  Description of Artificial Sequence: Synthetic oligonucleotide
ugagagcccagcuccaaag

SEQ ID NO: 3233117 - RNA, 19 nt, Artificial Sequence
  Description of Artificial Sequence: Synthetic oligonucleotide
acaaauacagcucagcaac

SEQ ID NO: 3233118 - RNA, 19 nt, Artificial Sequence
  Description of Artificial Sequence: Synthetic oligonucleotide
uaagcuucggcaaugacag

SEQ ID NO: 3233119 - RNA, 19 nt, Artificial Sequence
  Description of Artificial Sequence: Synthetic oligonucleotide
uuuagaguaagcuucggca

SEQ ID NO: 3233120 - RNA, 19 nt, Artificial Sequence
  Description of Artificial Sequence: Synthetic oligonucleotide
agcucagcaacuuugcggc

SEQ ID NO: 3233121 - RNA, 19 nt, Artificial Sequence
  Description of Artificial Sequence: Synthetic oligonucleotide
agaguuuagaguaagcuuc

SEQ ID NO: 3233122 - RNA, 19 nt, Artificial Sequence
  Description of Artificial Sequence: Synthetic oligonucleotide
aacuuugcggcucaggacu

SEQ ID NO: 3233123 - RNA, 19 nt, Artificial Sequence
  Description of Artificial Sequence: Synthetic oligonucleotide
aacagcugggcacagagcu

SEQ ID NO: 3233124 - RNA, 19 nt, Artificial Sequence
  Description of Artificial Sequence: Synthetic oligonucleotide
uucuugacagaguuuagag

SEQ ID NO: 3233125 - RNA, 19 nt, Artificial Sequence
  Description of Artificial Sequence: Synthetic oligonucleotide
aagucauguauccagacuu

SEQ ID NO: 3233126 - RNA, 19 nt, Artificial Sequence
  Description of Artificial Sequence: Synthetic oligonucleotide
aaugccaucucccuccuga

SEQ ID NO: 3233127 - RNA, 19 nt, Artificial Sequence
  Description of Artificial Sequence: Synthetic oligonucleotide
uccaggguccugaagaccg

SEQ ID NO: 3233128 - RNA, 19 nt, Artificial Sequence
  Description of Artificial Sequence: Synthetic oligonucleotide
cugauugccucucacaagg

SEQ ID NO: 3233129 - RNA, 19 nt, Artificial Sequence
  Description of Artificial Sequence: Synthetic oligonucleotide
ugggcagacaaauacagcu

SEQ ID NO: 3233130 - RNA, 19 nt, Artificial Sequence
  Description of Artificial Sequence: Synthetic oligonucleotide
cugaagaccguguuuaggc

SEQ ID NO: 3233131 - RNA, 19 nt, Artificial Sequence
  Description of Artificial Sequence: Synthetic oligonucleotide
uccaaugccaucucccucc

SEQ ID NO: 3233132 - RNA, 19 nt, Artificial Sequence
  Description of Artificial Sequence: Synthetic oligonucleotide
aagcagaccaccaugcaag

SEQ ID NO: 3233133 - RNA, 19 nt, Artificial Sequence
  Description of Artificial Sequence: Synthetic oligonucleotide
cuugacagaguuuagagua

SEQ ID NO: 3233134 - RNA, 19 nt, Artificial Sequence
  Description of Artificial Sequence: Synthetic oligonucleotide
agacaaauacagcucagca

SEQ ID NO: 3233135 - RNA, 19 nt, Artificial Sequence
  Description of Artificial Sequence: Synthetic oligonucleotide
auugccucucacaaggccc

SEQ ID NO: 3233136 - RNA, 19 nt, Artificial Sequence
  Description of Artificial Sequence: Synthetic oligonucleotide
augcaagucauguauccag

SEQ ID NO: 3233137 - RNA, 19 nt, Artificial Sequence
  Description of Artificial Sequence: Synthetic oligonucleotide
uaugcagcccuccuccggg

SEQ ID NO: 3233138 - RNA, 19 nt, Artificial Sequence
  Description of Artificial Sequence: Synthetic oligonucleotide
ucuggaguucuugacagag

SEQ ID NO: 3233139 - RNA, 19 nt, Artificial Sequence
  Description of Artificial Sequence: Synthetic oligonucleotide
ugcuaugcagcccuccucc

SEQ ID NO: 3233140 - RNA, 19 nt, Artificial Sequence
  Description of Artificial Sequence: Synthetic oligonucleotide
uuagaguaagcuucggcaa

SEQ ID NO: 3233141 - RNA, 19 nt, Artificial Sequence
  Description of Artificial Sequence: Synthetic oligonucleotide
uuccugggcagacaaauac

SEQ ID NO: 3233142 - RNA, 19 nt, Artificial Sequence
  Description of Artificial Sequence: Synthetic oligonucleotide
augacaguggccuugcuau

SEQ ID NO: 3233143 - RNA, 19 nt, Artificial Sequence
  Description of Artificial Sequence: Synthetic oligonucleotide
accguguuuaggcaugggg

SEQ ID NO: 3233144 - RNA, 19 nt, Artificial Sequence
  Description of Artificial Sequence: Synthetic oligonucleotide
ucggcaaugacaguggccu

SEQ ID NO: 3233145 - RNA, 19 nt, Artificial Sequence
  Description of Artificial Sequence: Synthetic oligonucleotide
uguauccagacuucccugc

SEQ ID NO: 3233146 - RNA, 19 nt, Artificial Sequence
  Description of Artificial Sequence: Synthetic oligonucleotide
ucauguauccagacuuccc

SEQ ID NO: 3233147 - RNA, 19 nt, Artificial Sequence
  Description of Artificial Sequence: Synthetic oligonucleotide
ucuugacagaguuuagagu

SEQ ID NO: 3233148 - RNA, 19 nt, Artificial Sequence
  Description of Artificial Sequence: Synthetic oligonucleotide
guuuagaguaagcuucggc

SEQ ID NO: 3233149 - RNA, 19 nt, Artificial Sequence
  Description of Artificial Sequence: Synthetic oligonucleotide
acagaguuuagaguaagcu

SEQ ID NO: 3233150 - RNA, 19 nt, Artificial Sequence
  Description of Artificial Sequence: Synthetic oligonucleotide
ucucacaaggcccggggcc

SEQ ID NO: 3233151 - RNA, 19 nt, Artificial Sequence
  Description of Artificial Sequence: Synthetic oligonucleotide
uccugauugccucucacaa

SEQ ID NO: 3233152 - RNA, 19 nt, Artificial Sequence
  Description of Artificial Sequence: Synthetic oligonucleotide
aaugacaguggccuugcua

SEQ ID NO: 3233153 - RNA, 19 nt, Artificial Sequence
  Description of Artificial Sequence: Synthetic oligonucleotide
uggaguucuugacagaguu

SEQ ID NO: 3233154 - RNA, 19 nt, Artificial Sequence
  Description of Artificial Sequence: Synthetic oligonucleotide
cagcucagcaacuuugcgg

SEQ ID NO: 3233155 - RNA, 19 nt, Artificial Sequence
  Description of Artificial Sequence: Synthetic oligonucleotide
auguccucugacuccaggg

SEQ ID NO: 3233156 - RNA, 19 nt, Artificial Sequence
  Description of Artificial Sequence: Synthetic oligonucleotide
gacuccaggguccugaaga

SEQ ID NO: 3233157 - RNA, 19 nt, Artificial Sequence
  Description of Artificial Sequence: Synthetic oligonucleotide
cagacuucccugcacaggc

SEQ ID NO: 3233158 - RNA, 19 nt, Artificial Sequence
  Description of Artificial Sequence: Synthetic oligonucleotide
aauacagcucagcaacuuu

SEQ ID NO: 3233159 - RNA, 19 nt, Artificial Sequence
  Description of Artificial Sequence: Synthetic oligonucleotide
uugccucucacaaggcccg

SEQ ID NO: 3233160 - RNA, 19 nt, Artificial Sequence
  Description of Artificial Sequence: Synthetic oligonucleotide
gaguuuagaguaagcuucg

SEQ ID NO: 3233161 - RNA, 19 nt, Artificial Sequence
  Description of Artificial Sequence: Synthetic oligonucleotide
gauugccucucacaaggcc

SEQ ID NO: 3233162 - RNA, 19 nt, Artificial Sequence
  Description of Artificial Sequence: Synthetic oligonucleotide
ugggaagcagaccaccaug

SEQ ID NO: 3233163 - RNA, 19 nt, Artificial Sequence
  Description of Artificial Sequence: Synthetic oligonucleotide
gacaaauacagcucagcaa

SEQ ID NO: 3233164 - RNA, 19 nt, Artificial Sequence
  Description of Artificial Sequence: Synthetic oligonucleotide
caggacuucguccaaugcc

SEQ ID NO: 3233165 - RNA, 19 nt, Artificial Sequence
  Description of Artificial Sequence: Synthetic oligonucleotide
ucguccaaugccaucuccc

SEQ ID NO: 3233166 - RNA, 19 nt, Artificial Sequence
  Description of Artificial Sequence: Synthetic oligonucleotide
uacagcucagcaacuuugc

SEQ ID NO: 3233167 - RNA, 19 nt, Artificial Sequence
  Description of Artificial Sequence: Synthetic oligonucleotide
uccucuggaguucuugaca

SEQ ID NO: 3233168 - RNA, 19 nt, Artificial Sequence
  Description of Artificial Sequence: Synthetic oligonucleotide
ugcaagucauguauccaga

SEQ ID NO: 3233169 - RNA, 19 nt, Artificial Sequence
  Description of Artificial Sequence: Synthetic oligonucleotide
aguaagcuucggcaaugac

SEQ ID NO: 3233170 - RNA, 19 nt, Artificial Sequence
  Description of Artificial Sequence: Synthetic oligonucleotide
uccucugacuccagggucc

SEQ ID NO: 3233171 - RNA, 19 nt, Artificial Sequence
  Description of Artificial Sequence: Synthetic oligonucleotide
gauguccucugacuccagg

SEQ ID NO: 3233172 - RNA, 19 nt, Artificial Sequence
  Description of Artificial Sequence: Synthetic oligonucleotide
ugaagaccguguuuaggca

SEQ ID NO: 3233173 - RNA, 19 nt, Artificial Sequence
  Description of Artificial Sequence: Synthetic oligonucleotide
acuccaggguccugaagac

SEQ ID NO: 3233174 - RNA, 19 nt, Artificial Sequence
  Description of Artificial Sequence: Synthetic oligonucleotide
acagcucagcaacuuugcg

SEQ ID NO: 3233175 - RNA, 19 nt, Artificial Sequence
  Description of Artificial Sequence: Synthetic oligonucleotide
guaagcuucggcaaugaca

SEQ ID NO: 3233176 - RNA, 19 nt, Artificial Sequence
  Description of Artificial Sequence: Synthetic oligonucleotide
ugacagaguuuagaguaag

SEQ ID NO: 3233177 - RNA, 19 nt, Artificial Sequence
  Description of Artificial Sequence: Synthetic oligonucleotide
acaggcacguguccaacag

SEQ ID NO: 3233178 - RNA, 19 nt, Artificial Sequence
  Description of Artificial Sequence: Synthetic oligonucleotide
ucaggacuucguccaaugc

SEQ ID NO: 3233179 - RNA, 19 nt, Artificial Sequence
  Description of Artificial Sequence: Synthetic oligonucleotide
aguggccuugcuaugcagc

SEQ ID NO: 3233180 - RNA, 19 nt, Artificial Sequence
  Description of Artificial Sequence: Synthetic oligonucleotide
acuucguccaaugccaucu

SEQ ID NO: 3233181 - RNA, 19 nt, Artificial Sequence
  Description of Artificial Sequence: Synthetic oligonucleotide
uucggcaaugacaguggcc

SEQ ID NO: 3233182 - RNA, 19 nt, Artificial Sequence
  Description of Artificial Sequence: Synthetic oligonucleotide
uguccucugacuccagggu

SEQ ID NO: 3233183 - RNA, 19 nt, Artificial Sequence
  Description of Artificial Sequence: Synthetic oligonucleotide
uccugggcagacaaauaca

SEQ ID NO: 3233184 - RNA, 19 nt, Artificial Sequence
  Description of Artificial Sequence: Synthetic oligonucleotide
agcuucggcaaugacagug

SEQ ID NO: 3233185 - RNA, 19 nt, Artificial Sequence
  Description of Artificial Sequence: Synthetic oligonucleotide
acagagcugcuccggggcc

SEQ ID NO: 3233186 - RNA, 19 nt, Artificial Sequence
  Description of Artificial Sequence: Synthetic oligonucleotide
ugggauguccucugacucc

SEQ ID NO: 3233187 - RNA, 19 nt, Artificial Sequence
  Description of Artificial Sequence: Synthetic oligonucleotide
uugacagaguuuagaguaa

SEQ ID NO: 3233188 - RNA, 19 nt, Artificial Sequence
  Description of Artificial Sequence: Synthetic oligonucleotide
ucagcaacuuugcggcuca

SEQ ID NO: 3233189 - RNA, 19 nt, Artificial Sequence
  Description of Artificial Sequence: Synthetic oligonucleotide
uagaguaagcuucggcaau

SEQ ID NO: 3233190 - RNA, 19 nt, Artificial Sequence
  Description of Artificial Sequence: Synthetic oligonucleotide
auguauccagacuucccug

SEQ ID NO: 3233191 - RNA, 19 nt, Artificial Sequence
  Description of Artificial Sequence: Synthetic oligonucleotide
cagaccaccaugcaaguca

SEQ ID NO: 3233192 - RNA, 19 nt, Artificial Sequence
  Description of Artificial Sequence: Synthetic oligonucleotide
accaccaugcaagucaugu

SEQ ID NO: 3233193 - RNA, 19 nt, Artificial Sequence
  Description of Artificial Sequence: Synthetic oligonucleotide
gaguucuugacagaguuua

SEQ ID NO: 3233194 - RNA, 19 nt, Artificial Sequence
  Description of Artificial Sequence: Synthetic oligonucleotide
uucguccaaugccaucucc

SEQ ID NO: 3233195 - RNA, 19 nt, Artificial Sequence
  Description of Artificial Sequence: Synthetic oligonucleotide
ucuugacacuccucuggag

SEQ ID NO: 3233196 - RNA, 19 nt, Artificial Sequence
  Description of Artificial Sequence: Synthetic oligonucleotide
uuugcggcucaggacuucg

SEQ ID NO: 3233197 - RNA, 19 nt, Artificial Sequence
  Description of Artificial Sequence: Synthetic oligonucleotide
gaagcagaccaccaugcaa

SEQ ID NO: 3233198 - RNA, 19 nt, Artificial Sequence
  Description of Artificial Sequence: Synthetic oligonucleotide
cugggcacagagcugcucc

SEQ ID NO: 3233199 - RNA, 19 nt, Artificial Sequence
  Description of Artificial Sequence: Synthetic oligonucleotide
cacguguccaacagcuggg

SEQ ID NO: 3233200 - RNA, 19 nt, Artificial Sequence
  Description of Artificial Sequence: Synthetic oligonucleotide
guguccaacagcugggcac

SEQ ID NO: 3233201 - RNA, 19 nt, Artificial Sequence
  Description of Artificial Sequence: Synthetic oligonucleotide
aaauacagcucagcaacuu

SEQ ID NO: 3233202 - RNA, 19 nt, Artificial Sequence
  Description of Artificial Sequence: Synthetic oligonucleotide
ucugacuccaggguccuga

SEQ ID NO: 3233203 - RNA, 19 nt, Artificial Sequence
  Description of Artificial Sequence: Synthetic oligonucleotide
cagacaaauacagcucagc

SEQ ID NO: 3233204 - RNA, 19 nt, Artificial Sequence
  Description of Artificial Sequence: Synthetic oligonucleotide
auacagcucagcaacuuug

SEQ ID NO: 3233205 - RNA, 19 nt, Artificial Sequence
  Description of Artificial Sequence: Synthetic oligonucleotide
gcacguguccaacagcugg

SEQ ID NO: 3233206 - RNA, 19 nt, Artificial Sequence
  Description of Artificial Sequence: Synthetic oligonucleotide
ugauugccucucacaaggc

SEQ ID NO: 3233207 - RNA, 19 nt, Artificial Sequence
  Description of Artificial Sequence: Synthetic oligonucleotide
uccagacuucccugcacag

SEQ ID NO: 3233208 - RNA, 19 nt, Artificial Sequence
  Description of Artificial Sequence: Synthetic oligonucleotide
uccuccgggaggcaggccu

SEQ ID NO: 3233209 - RNA, 19 nt, Artificial Sequence
  Description of Artificial Sequence: Synthetic oligonucleotide
uauccagacuucccugcac

SEQ ID NO: 3233210 - RNA, 19 nt, Artificial Sequence
  Description of Artificial Sequence: Synthetic oligonucleotide
gacaguggccuugcuaugc

SEQ ID NO: 3233211 - RNA, 19 nt, Artificial Sequence
  Description of Artificial Sequence: Synthetic oligonucleotide
agucauguauccagacuuc

SEQ ID NO: 3233212 - RNA, 19 nt, Artificial Sequence
  Description of Artificial Sequence: Synthetic oligonucleotide
aagaccguguuuaggcaug

SEQ ID NO: 3233213 - RNA, 19 nt, Artificial Sequence
  Description of Artificial Sequence: Synthetic oligonucleotide
auccagacuucccugcaca

SEQ ID NO: 3233214 - RNA, 19 nt, Artificial Sequence
  Description of Artificial Sequence: Synthetic oligonucleotide
gacagaguuuagaguaagc

SEQ ID NO: 3233215 - RNA, 19 nt, Artificial Sequence
  Description of Artificial Sequence: Synthetic oligonucleotide
uguccaacagcugggcaca

SEQ ID NO: 3233216 - RNA, 19 nt, Artificial Sequence
  Description of Artificial Sequence: Synthetic oligonucleotide
aggacuucguccaaugcca

SEQ ID NO: 3233217 - RNA, 19 nt, Artificial Sequence
  Description of Artificial Sequence: Synthetic oligonucleotide
aaccacagccuccagaccc

SEQ ID NO: 3233218 - RNA, 19 nt, Artificial Sequence
  Description of Artificial Sequence: Synthetic oligonucleotide
ugcuacagcauccagagcu

SEQ ID NO: 3233219 - RNA, 19 nt, Artificial Sequence
  Description of Artificial Sequence: Synthetic oligonucleotide
uuuggugucuggcacuugg

SEQ ID NO: 3233220 - RNA, 19 nt, Artificial Sequence
  Description of Artificial Sequence: Synthetic oligonucleotide
acugcuacagcauccagag

SEQ ID NO: 3233221 - RNA, 19 nt, Artificial Sequence
  Description of Artificial Sequence: Synthetic oligonucleotide
uuggaggacacuuuggugu

SEQ ID NO: 3233222 - RNA, 19 nt, Artificial Sequence
  Description of Artificial Sequence: Synthetic oligonucleotide
uccagagcugugacgaugg

SEQ ID NO: 3233223 - RNA, 19 nt, Artificial Sequence
  Description of Artificial Sequence: Synthetic oligonucleotide
acagcagccaccugcugcc

SEQ ID NO: 3233224 - RNA, 19 nt, Artificial Sequence
  Description of Artificial Sequence: Synthetic oligonucleotide
ucaggcagcagccaccacc

SEQ ID NO: 3233225 - RNA, 19 nt, Artificial Sequence
  Description of Artificial Sequence: Synthetic oligonucleotide
ugcagcagccuccagagcu

SEQ ID NO: 3233226 - RNA, 19 nt, Artificial Sequence
  Description of Artificial Sequence: Synthetic oligonucleotide
gacgaagagaucugcgggg

SEQ ID NO: 3233227 - RNA, 19 nt, Artificial Sequence
  Description of Artificial Sequence: Synthetic oligonucleotide
cagagcuggaaccacagcc

SEQ ID NO: 3233228 - RNA, 19 nt, Artificial Sequence
  Description of Artificial Sequence: Synthetic oligonucleotide
uuccacagcagccaccugc

SEQ ID NO: 3233229 - RNA, 19 nt, Artificial Sequence
  Description of Artificial Sequence: Synthetic oligonucleotide
acacuuuggugucuggcac

SEQ ID NO: 3233230 - RNA, 19 nt, Artificial Sequence
  Description of Artificial Sequence: Synthetic oligonucleotide
ugggagggcacuuuggugu

SEQ ID NO: 3233231 - RNA, 19 nt, Artificial Sequence
  Description of Artificial Sequence: Synthetic oligonucleotide
uuuggaggacacuuuggug

SEQ ID NO: 3233232 - RNA, 19 nt, Artificial Sequence
  Description of Artificial Sequence: Synthetic oligonucleotide
ugcagcacgaugacacagg

SEQ ID NO: 3233233 - RNA, 19 nt, Artificial Sequence
  Description of Artificial Sequence: Synthetic oligonucleotide
gugucuggcacuugggagg

SEQ ID NO: 3233234 - RNA, 19 nt, Artificial Sequence
  Description of Artificial Sequence: Synthetic oligonucleotide
ugggagggcacuugggagg

SEQ ID NO: 3233235 - RNA, 19 nt, Artificial Sequence
  Description of Artificial Sequence: Synthetic oligonucleotide
agccuccagagcuggaacc

SEQ ID NO: 3233236 - RNA, 19 nt, Artificial Sequence
  Description of Artificial Sequence: Synthetic oligonucleotide
uccagagcuggaaccacag

SEQ ID NO: 3233237 - RNA, 19 nt, Artificial Sequence
  Description of Artificial Sequence: Synthetic oligonucleotide
uugggagggcacuugggag

SEQ ID NO: 3233238 - RNA, 19 nt, Artificial Sequence
  Description of Artificial Sequence: Synthetic oligonucleotide
agagcugugacgauggcga

SEQ ID NO: 3233239 - RNA, 19 nt, Artificial Sequence
  Description of Artificial Sequence: Synthetic oligonucleotide
gacacuuuggugucuggca

SEQ ID NO: 3233240 - RNA, 19 nt, Artificial Sequence
  Description of Artificial Sequence: Synthetic oligonucleotide
ugugacgauggcgacgaag

SEQ ID NO: 3233241 - RNA, 19 nt, Artificial Sequence
  Description of Artificial Sequence: Synthetic oligonucleotide
acagccuccagaccccagg

SEQ ID NO: 3233242 - RNA, 19 nt, Artificial Sequence
  Description of Artificial Sequence: Synthetic oligonucleotide
uuggugucuggcacuuggg

SEQ ID NO: 3233243 - RNA, 19 nt, Artificial Sequence
  Description of Artificial Sequence: Synthetic oligonucleotide
ggaaccacagccuccagac

SEQ ID NO: 3233244 - RNA, 19 nt, Artificial Sequence
  Description of Artificial Sequence: Synthetic oligonucleotide
agcauccagagcugugacg

SEQ ID NO: 3233245 - RNA, 19 nt, Artificial Sequence
  Description of Artificial Sequence: Synthetic oligonucleotide
cagagcuggaaccacagca

SEQ ID NO: 3233246 - RNA, 19 nt, Artificial Sequence
  Description of Artificial Sequence: Synthetic oligonucleotide
acugcugcuggcucuguug

SEQ ID NO: 3233247 - RNA, 19 nt, Artificial Sequence
  Description of Artificial Sequence: Synthetic oligonucleotide
cacagcagccaccugcugc

SEQ ID NO: 3233248 - RNA, 19 nt, Artificial Sequence
  Description of Artificial Sequence: Synthetic oligonucleotide
uggaaccacagccuccaga

SEQ ID NO: 3233249 - RNA, 19 nt, Artificial Sequence
  Description of Artificial Sequence: Synthetic oligonucleotide
gauggcgacgaagagaucu

SEQ ID NO: 3233250 - RNA, 19 nt, Artificial Sequence
  Description of Artificial Sequence: Synthetic oligonucleotide
uggugucuggcacuuggga

SEQ ID NO: 3233251 - RNA, 19 nt, Artificial Sequence
  Description of Artificial Sequence: Synthetic oligonucleotide
caggcagcagccaccaccc

SEQ ID NO: 3233252 - RNA, 19 nt, Artificial Sequence
  Description of Artificial Sequence: Synthetic oligonucleotide
ugguggcucaggcagcagc

SEQ ID NO: 3233253 - RNA, 19 nt, Artificial Sequence
  Description of Artificial Sequence: Synthetic oligonucleotide
agcuggaaccacagcagcc

SEQ ID NO: 3233254 - RNA, 19 nt, Artificial Sequence
  Description of Artificial Sequence: Synthetic oligonucleotide
ugucuggcacuugggaggg

SEQ ID NO: 3233255 - RNA, 19 nt, Artificial Sequence
  Description of Artificial Sequence: Synthetic oligonucleotide
cacuuuggaggacacuuug

SEQ ID NO: 3233256 - RNA, 19 nt, Artificial Sequence
  Description of Artificial Sequence: Synthetic oligonucleotide
gaccccaggcugcagcacg

SEQ ID NO: 3233257 - RNA, 19 nt, Artificial Sequence
  Description of Artificial Sequence: Synthetic oligonucleotide
cacugcuuccacagcagcc

SEQ ID NO: 3233258 - RNA, 19 nt, Artificial Sequence
  Description of Artificial Sequence: Synthetic oligonucleotide
ugacgauggcgacgaagag

SEQ ID NO: 3233259 - RNA, 19 nt, Artificial Sequence
  Description of Artificial Sequence: Synthetic oligonucleotide
ggugucuggcacuugggag

SEQ ID NO: 3233260 - RNA, 19 nt, Artificial Sequence
  Description of Artificial Sequence: Synthetic oligonucleotide
agagcuggaaccacagcag

SEQ ID NO: 3233261 - RNA, 19 nt, Artificial Sequence
  Description of Artificial Sequence: Synthetic oligonucleotide
uacagcauccagagcugug

SEQ ID NO: 3233262 - RNA, 19 nt, Artificial Sequence
  Description of Artificial Sequence: Synthetic oligonucleotide
uugggagggcacuuuggug

SEQ ID NO: 3233263 - RNA, 19 nt, Artificial Sequence
  Description of Artificial Sequence: Synthetic oligonucleotide
gagcuggaaccacagcagc

SEQ ID NO: 3233264 - RNA, 19 nt, Artificial Sequence
  Description of Artificial Sequence: Synthetic oligonucleotide
uccacagcagccaccugcu

SEQ ID NO: 3233265 - RNA, 19 nt, Artificial Sequence
  Description of Artificial Sequence: Synthetic oligonucleotide
acgauggcgacgaagagau

SEQ ID NO: 3233266 - RNA, 19 nt, Artificial Sequence
  Description of Artificial Sequence: Synthetic oligonucleotide
acuuuggaggacacuuugg

SEQ ID NO: 3233267 - RNA, 19 nt, Artificial Sequence
  Description of Artificial Sequence: Synthetic oligonucleotide
cugcugcuggcucuguugg

SEQ ID NO: 3233268 - RNA, 19 nt, Artificial Sequence
  Description of Artificial Sequence: Synthetic oligonucleotide
gcgacgaagagaucugcgg

SEQ ID NO: 3233269 - RNA, 19 nt, Artificial Sequence
  Description of Artificial Sequence: Synthetic oligonucleotide
acugcuuccacagcagcca

SEQ ID NO: 3233270 - RNA, 19 nt, Artificial Sequence
  Description of Artificial Sequence: Synthetic oligonucleotide
ugccaccacugcuacagca

SEQ ID NO: 3233271 - RNA, 19 nt, Artificial Sequence
  Description of Artificial Sequence: Synthetic oligonucleotide
gcugcagcagccuccagag

SEQ ID NO: 3233272 - RNA, 19 nt, Artificial Sequence
  Description of Artificial Sequence: Synthetic oligonucleotide
ccugugguggcucaggcag

SEQ ID NO: 3233273 - RNA, 19 nt, Artificial Sequence
  Description of Artificial Sequence: Synthetic oligonucleotide
agcugcagcagccuccaga

SEQ ID NO: 3233274 - RNA, 19 nt, Artificial Sequence
  Description of Artificial Sequence: Synthetic oligonucleotide
ucuggcacuugggagggca

SEQ ID NO: 3233275 - RNA, 19 nt, Artificial Sequence
  Description of Artificial Sequence: Synthetic oligonucleotide
gugacgauggcgacgaaga

SEQ ID NO: 3233276 - RNA, 19 nt, Artificial Sequence
  Description of Artificial Sequence: Synthetic oligonucleotide
cagagcugcagcagccucc

SEQ ID NO: 3233277 - RNA, 19 nt, Artificial Sequence
  Description of Artificial Sequence: Synthetic oligonucleotide
cagagcugugacgauggcg

SEQ ID NO: 3233278 - RNA, 19 nt, Artificial Sequence
  Description of Artificial Sequence: Synthetic oligonucleotide
caccacugcuacagcaucc

SEQ ID NO: 3233279 - RNA, 19 nt, Artificial Sequence
  Description of Artificial Sequence: Synthetic oligonucleotide
cacuugggagggcacuugg

SEQ ID NO: 3233280 - RNA, 19 nt, Artificial Sequence
  Description of Artificial Sequence: Synthetic oligonucleotide
uggaggacacuuugguguc

SEQ ID NO: 3233281 - RNA, 19 nt, Artificial Sequence
  Description of Artificial Sequence: Synthetic oligonucleotide
acagcauccagagcuguga

SEQ ID NO: 3233282 - RNA, 19 nt, Artificial Sequence
  Description of Artificial Sequence: Synthetic oligonucleotide
gacgauggcgacgaagaga

SEQ ID NO: 3233283 - RNA, 19 nt, Artificial Sequence
  Description of Artificial Sequence: Synthetic oligonucleotide
gcugccaccacugcuacag

SEQ ID NO: 3233284 - RNA, 19 nt, Artificial Sequence
  Description of Artificial Sequence: Synthetic oligonucleotide
cuugggagggcacuuggga

SEQ ID NO: 3233285 - RNA, 19 nt, Artificial Sequence
  Description of Artificial Sequence: Synthetic oligonucleotide
agagcuggaaccacagccu

SEQ ID NO: 3233286 - RNA, 19 nt, Artificial Sequence
  Description of Artificial Sequence: Synthetic oligonucleotide
agcuggaaccacagccucc

SEQ ID NO: 3233287 - RNA, 19 nt, Artificial Sequence
  Description of Artificial Sequence: Synthetic oligonucleotide
ugcuggcucuguuggcagg

SEQ ID NO: 3233288 - RNA, 19 nt, Artificial Sequence
  Description of Artificial Sequence: Synthetic oligonucleotide
gcagcacgaugacacaggg

SEQ ID NO: 3233289 - RNA, 19 nt, Artificial Sequence
  Description of Artificial Sequence: Synthetic oligonucleotide
cacugcuacagcauccaga

SEQ ID NO: 3233290 - RNA, 19 nt, Artificial Sequence
  Description of Artificial Sequence: Synthetic oligonucleotide
ugcuuccacagcagccacc

SEQ ID NO: 3233291 - RNA, 19 nt, Artificial Sequence
  Description of Artificial Sequence: Synthetic oligonucleotide
gaaccacagccuccagacc

SEQ ID NO: 3233292 - RNA, 19 nt, Artificial Sequence
  Description of Artificial Sequence: Synthetic oligonucleotide
acuugggagggcacuuugg

SEQ ID NO: 3233293 - RNA, 19 nt, Artificial Sequence
  Description of Artificial Sequence: Synthetic oligonucleotide
ugugguggcucaggcagca

SEQ ID NO: 3233294 - RNA, 19 nt, Artificial Sequence
  Description of Artificial Sequence: Synthetic oligonucleotide
cuggaaccacagcagcccc

SEQ ID NO: 3233295 - RNA, 19 nt, Artificial Sequence
  Description of Artificial Sequence: Synthetic oligonucleotide
agcugugacgauggcgacg

SEQ ID NO: 3233296 - RNA, 19 nt, Artificial Sequence
  Description of Artificial Sequence: Synthetic oligonucleotide
agcagccaccugcugccac

SEQ ID NO: 3233297 - RNA, 19 nt, Artificial Sequence
  Description of Artificial Sequence: Synthetic oligonucleotide
accacagccuccagacccc

SEQ ID NO: 3233298 - RNA, 19 nt, Artificial Sequence
  Description of Artificial Sequence: Synthetic oligonucleotide
gaggacacuuuggugucug

SEQ ID NO: 3233299 - RNA, 19 nt, Artificial Sequence
  Description of Artificial Sequence: Synthetic oligonucleotide
gacacuuuggaggacacuu

SEQ ID NO: 3233300 - RNA, 19 nt, Artificial Sequence
  Description of Artificial Sequence: Synthetic oligonucleotide
cagcacgaugacacagggg

SEQ ID NO: 3233301 - RNA, 19 nt, Artificial Sequence
  Description of Artificial Sequence: Synthetic oligonucleotide
aggacacuuuggugucugg

SEQ ID NO: 3233302 - RNA, 19 nt, Artificial Sequence
  Description of Artificial Sequence: Synthetic oligonucleotide
ggcugcagcacgaugacac

SEQ ID NO: 3233303 - RNA, 19 nt, Artificial Sequence
  Description of Artificial Sequence: Synthetic oligonucleotide
uggcucuguuggcaggaca

SEQ ID NO: 3233304 - RNA, 19 nt, Artificial Sequence
  Description of Artificial Sequence: Synthetic oligonucleotide
cuuuggaggacacuuuggu

SEQ ID NO: 3233305 - RNA, 19 nt, Artificial Sequence
  Description of Artificial Sequence: Synthetic oligonucleotide
gagcuggaaccacagccuc

SEQ ID NO: 3233306 - RNA, 19 nt, Artificial Sequence
  Description of Artificial Sequence: Synthetic oligonucleotide
uggcucaggcagcagccac

SEQ ID NO: 3233307 - RNA, 19 nt, Artificial Sequence
  Description of Artificial Sequence: Synthetic oligonucleotide
auccagagcugugacgaug

SEQ ID NO: 3233308 - RNA, 19 nt, Artificial Sequence
  Description of Artificial Sequence: Synthetic oligonucleotide
cugcagcacgaugacacag

SEQ ID NO: 3233309 - RNA, 19 nt, Artificial Sequence
  Description of Artificial Sequence: Synthetic oligonucleotide
acuugggagggcacuuggg

SEQ ID NO: 3233310 - RNA, 19 nt, Artificial Sequence
  Description of Artificial Sequence: Synthetic oligonucleotide
gcauccagagcugugacga

SEQ ID NO: 3233311 - RNA, 19 nt, Artificial Sequence
  Description of Artificial Sequence: Synthetic oligonucleotide
accugcugccaccacugcu

SEQ ID NO: 3233312 - RNA, 19 nt, Artificial Sequence
  Description of Artificial Sequence: Synthetic oligonucleotide
ggcacuuuggugucuggca

SEQ ID NO: 3233313 - RNA, 19 nt, Artificial Sequence
  Description of Artificial Sequence: Synthetic oligonucleotide
cacuugggagggcacuuug

SEQ ID NO: 3233314 - RNA, 19 nt, Artificial Sequence
  Description of Artificial Sequence: Synthetic oligonucleotide
gcuggaaccacagcagccc

SEQ ID NO: 3233315 - RNA, 19 nt, Artificial Sequence
  Description of Artificial Sequence: Synthetic oligonucleotide
cgacgaagagaucugcggg

SEQ ID NO: 3233316 - RNA, 19 nt, Artificial Sequence
  Description of Artificial Sequence: Synthetic oligonucleotide
accacugcuacagcaucca

SEQ ID NO: 3233317 - RNA, 19 nt, Artificial Sequence
  Description of Artificial Sequence: Synthetic oligonucleotide
uuugaaauaaccuuaaccc

SEQ ID NO: 3233318 - RNA, 19 nt, Artificial Sequence
  Description of Artificial Sequence: Synthetic oligonucleotide
aucaauuucugacaaaacc

SEQ ID NO: 3233319 - RNA, 19 nt, Artificial Sequence
  Description of Artificial Sequence: Synthetic oligonucleotide
uuuugaaauaaccuuaacc

SEQ ID NO: 3233320 - RNA, 19 nt, Artificial Sequence
  Description of Artificial Sequence: Synthetic oligonucleotide
aaaucaaacaccugagccg

SEQ ID NO: 3233321 - RNA, 19 nt, Artificial Sequence
  Description of Artificial Sequence: Synthetic oligonucleotide
ugagcaacuguuuaaagcg

SEQ ID NO: 3233322 - RNA, 19 nt, Artificial Sequence
  Description of Artificial Sequence: Synthetic oligonucleotide
aacauuuugguacuggcuc

SEQ ID NO: 3233323 - RNA, 19 nt, Artificial Sequence
  Description of Artificial Sequence: Synthetic oligonucleotide
uaaaucaaacaccugagcc

SEQ ID NO: 3233324 - RNA, 19 nt, Artificial Sequence
  Description of Artificial Sequence: Synthetic oligonucleotide
ucaauuucugacaaaaccc

SEQ ID NO: 3233325 - RNA, 19 nt, Artificial Sequence
  Description of Artificial Sequence: Synthetic oligonucleotide
auaaccuuaacccuaagug

SEQ ID NO: 3233326 - RNA, 19 nt, Artificial Sequence
  Description of Artificial Sequence: Synthetic oligonucleotide
uuuaaagcgacgaaggaac

SEQ ID NO: 3233327 - RNA, 19 nt, Artificial Sequence
  Description of Artificial Sequence: Synthetic oligonucleotide
uucauuaaaucaaacaccu

SEQ ID NO: 3233328 - RNA, 19 nt, Artificial Sequence
  Description of Artificial Sequence: Synthetic oligonucleotide
cauucauuaaaucaaacac

SEQ ID NO: 3233329 - RNA, 19 nt, Artificial Sequence
  Description of Artificial Sequence: Synthetic oligonucleotide
ucaaacuuuugaaauaacc

SEQ ID NO: 3233330 - RNA, 19 nt, Artificial Sequence
  Description of Artificial Sequence: Synthetic oligonucleotide
uagaaucugaggaagcugg

SEQ ID NO: 3233331 - RNA, 19 nt, Artificial Sequence
  Description of Artificial Sequence: Synthetic oligonucleotide
auucauuaaaucaaacacc

SEQ ID NO: 3233332 - RNA, 19 nt, Artificial Sequence
  Description of Artificial Sequence: Synthetic oligonucleotide
aaacccagccuacacuucc

SEQ ID NO: 3233333 - RNA, 19 nt, Artificial Sequence
  Description of Artificial Sequence: Synthetic oligonucleotide
aaucaaacaccugagccgg

SEQ ID NO: 3233334 - RNA, 19 nt, Artificial Sequence
  Description of Artificial Sequence: Synthetic oligonucleotide
ucauacgucauuauacuca

SEQ ID NO: 3233335 - RNA, 19 nt, Artificial Sequence
  Description of Artificial Sequence: Synthetic oligonucleotide
aaacuuuugaaauaaccuu

SEQ ID NO: 3233336 - RNA, 19 nt, Artificial Sequence
  Description of Artificial Sequence: Synthetic oligonucleotide
uuucugacaaaacccagcc

SEQ ID NO: 3233337 - RNA, 19 nt, Artificial Sequence
  Description of Artificial Sequence: Synthetic oligonucleotide
aauaaccuuaacccuaagu

SEQ ID NO: 3233338 - RNA, 19 nt, Artificial Sequence
  Description of Artificial Sequence: Synthetic oligonucleotide
uacgucauuauacucaccu

SEQ ID NO: 3233339 - RNA, 19 nt, Artificial Sequence
  Description of Artificial Sequence: Synthetic oligonucleotide
caguuuaucaauuucugac

SEQ ID NO: 3233340 - RNA, 19 nt, Artificial Sequence
  Description of Artificial Sequence: Synthetic oligonucleotide
aaucugaggaagcugggug

SEQ ID NO: 3233341 - RNA, 19 nt, Artificial Sequence
  Description of Artificial Sequence: Synthetic oligonucleotide
uuaaaucaaacaccugagc

SEQ ID NO: 3233342 - RNA, 19 nt, Artificial Sequence
  Description of Artificial Sequence: Synthetic oligonucleotide
uccacagacaagaauccgg

SEQ ID NO: 3233343 - RNA, 19 nt, Artificial Sequence
  Description of Artificial Sequence: Synthetic oligonucleotide
ucugacaaaacccagccua

SEQ ID NO: 3233344 - RNA, 19 nt, Artificial Sequence
  Description of Artificial Sequence: Synthetic oligonucleotide
uugagcaacuguuuaaagc

SEQ ID NO: 3233345 - RNA, 19 nt, Artificial Sequence
  Description of Artificial Sequence: Synthetic oligonucleotide
cuguuuaaagcgacgaagg

SEQ ID NO: 3233346 - RNA, 19 nt, Artificial Sequence
  Description of Artificial Sequence: Synthetic oligonucleotide
aagaacucgagcaagguca

SEQ ID NO: 3233347 - RNA, 19 nt, Artificial Sequence
  Description of Artificial Sequence: Synthetic oligonucleotide
cauuaaaucaaacaccuga

SEQ ID NO: 3233348 - RNA, 19 nt, Artificial Sequence
  Description of Artificial Sequence: Synthetic oligonucleotide
cuguccaacauuuugguac

SEQ ID NO: 3233349 - RNA, 19 nt, Artificial Sequence
  Description of Artificial Sequence: Synthetic oligonucleotide
gaaguugucaaacuuuuga

SEQ ID NO: 3233350 - RNA, 19 nt, Artificial Sequence
  Description of Artificial Sequence: Synthetic oligonucleotide
aguucaguuuaucaauuuc

SEQ ID NO: 3233351 - RNA, 19 nt, Artificial Sequence
  Description of Artificial Sequence: Synthetic oligonucleotide
ugaaauaaccuuaacccua

SEQ ID NO: 3233352 - RNA, 19 nt, Artificial Sequence
  Description of Artificial Sequence: Synthetic oligonucleotide
acagacaagaauccggaag

SEQ ID NO: 3233353 - RNA, 19 nt, Artificial Sequence
  Description of Artificial Sequence: Synthetic oligonucleotide
gacgaaggaacuuuacucc

SEQ ID NO: 3233354 - RNA, 19 nt, Artificial Sequence
  Description of Artificial Sequence: Synthetic oligonucleotide
uucaguuuaucaauuucug

SEQ ID NO: 3233355 - RNA, 19 nt, Artificial Sequence
  Description of Artificial Sequence: Synthetic oligonucleotide
ucgagcaaggucauugccg

SEQ ID NO: 3233356 - RNA, 19 nt, Artificial Sequence
  Description of Artificial Sequence: Synthetic oligonucleotide
aauccggaaguugucaaac

SEQ ID NO: 3233357 - RNA, 19 nt, Artificial Sequence
  Description of Artificial Sequence: Synthetic oligonucleotide
cuuuucuagaaucugagga

SEQ ID NO: 3233358 - RNA, 19 nt, Artificial Sequence
  Description of Artificial Sequence: Synthetic oligonucleotide
uuaucaauuucugacaaaa

SEQ ID NO: 3233359 - RNA, 19 nt, Artificial Sequence
  Description of Artificial Sequence: Synthetic oligonucleotide
uuugguacuggcucguucc

SEQ ID NO: 3233360 - RNA, 19 nt, Artificial Sequence
  Description of Artificial Sequence: Synthetic oligonucleotide
uucaaguucaguuuaucaa

SEQ ID NO: 3233361 - RNA, 19 nt, Artificial Sequence
  Description of Artificial Sequence: Synthetic oligonucleotide
uccuccacagacaagaauc

SEQ ID NO: 3233362 - RNA, 19 nt, Artificial Sequence
  Description of Artificial Sequence: Synthetic oligonucleotide
uugaaauaaccuuaacccu

SEQ ID NO: 3233363 - RNA, 19 nt, Artificial Sequence
  Description of Artificial Sequence: Synthetic oligonucleotide
uaaccuuaacccuaaguga

SEQ ID NO: 3233364 - RNA, 19 nt, Artificial Sequence
  Description of Artificial Sequence: Synthetic oligonucleotide
uuaacccuaagugaggccc

SEQ ID NO: 3233365 - RNA, 19 nt, Artificial Sequence
  Description of Artificial Sequence: Synthetic oligonucleotide
aaccuuaacccuaagugag

SEQ ID NO: 3233366 - RNA, 19 nt, Artificial Sequence
  Description of Artificial Sequence: Synthetic oligonucleotide
acgaaggaacuuuacuccc

SEQ ID NO: 3233367 - RNA, 19 nt, Artificial Sequence
  Description of Artificial Sequence: Synthetic oligonucleotide
aguuuaucaauuucugaca

SEQ ID NO: 3233368 - RNA, 19 nt, Artificial Sequence
  Description of Artificial Sequence: Synthetic oligonucleotide
uguuuguucaaguucaguu

SEQ ID NO: 3233369 - RNA, 19 nt, Artificial Sequence
  Description of Artificial Sequence: Synthetic oligonucleotide
uuuucuagaaucugaggaa

SEQ ID NO: 3233370 - RNA, 19 nt, Artificial Sequence
  Description of Artificial Sequence: Synthetic oligonucleotide
ucaaguucaguuuaucaau

SEQ ID NO: 3233371 - RNA, 19 nt, Artificial Sequence
  Description of Artificial Sequence: Synthetic oligonucleotide
acuuccaucuccuccacag

SEQ ID NO: 3233372 - RNA, 19 nt, Artificial Sequence
  Description of Artificial Sequence: Synthetic oligonucleotide
acuguuuaaagcgacgaag

SEQ ID NO: 3233373 - RNA, 19 nt, Artificial Sequence
  Description of Artificial Sequence: Synthetic oligonucleotide
uuuguucaaguucaguuua

SEQ ID NO: 3233374 - RNA, 19 nt, Artificial Sequence
  Description of Artificial Sequence: Synthetic oligonucleotide
aaguugucaaacuuuugaa

SEQ ID NO: 3233375 - RNA, 19 nt, Artificial Sequence
  Description of Artificial Sequence: Synthetic oligonucleotide
uuucuagaaucugaggaag

SEQ ID NO: 3233376 - RNA, 19 nt, Artificial Sequence
  Description of Artificial Sequence: Synthetic oligonucleotide
auuaaaucaaacaccugag

SEQ ID NO: 3233377 - RNA, 19 nt, Artificial Sequence
  Description of Artificial Sequence: Synthetic oligonucleotide
auuucugacaaaacccagc

SEQ ID NO: 3233378 - RNA, 19 nt, Artificial Sequence
  Description of Artificial Sequence: Synthetic oligonucleotide
ucauuauacucaccugucc

SEQ ID NO: 3233379 - RNA, 19 nt, Artificial Sequence
  Description of Artificial Sequence: Synthetic oligonucleotide
acauuuugguacuggcucg

SEQ ID NO: 3233380 - RNA, 19 nt, Artificial Sequence
  Description of Artificial Sequence: Synthetic oligonucleotide
uguuuaaagcgacgaagga

SEQ ID NO: 3233381 - RNA, 19 nt, Artificial Sequence
  Description of Artificial Sequence: Synthetic oligonucleotide
aauaccccaaccuggcacu

SEQ ID NO: 3233382 - RNA, 19 nt, Artificial Sequence
  Description of Artificial Sequence: Synthetic oligonucleotide
aacucgagcaaggucauug

SEQ ID NO: 3233383 - RNA, 19 nt, Artificial Sequence
  Description of Artificial Sequence: Synthetic oligonucleotide
ucaguuuaucaauuucuga

SEQ ID NO: 3233384 - RNA, 19 nt, Artificial Sequence
  Description of Artificial Sequence: Synthetic oligonucleotide
ucaccuguccaacauuuug

SEQ ID NO: 3233385 - RNA, 19 nt, Artificial Sequence
  Description of Artificial Sequence: Synthetic oligonucleotide
uacacuuccaucuccucca

SEQ ID NO: 3233386 - RNA, 19 nt, Artificial Sequence
  Description of Artificial Sequence: Synthetic oligonucleotide
agcaaggucauugccgucc

SEQ ID NO: 3233387 - RNA, 19 nt, Artificial Sequence
  Description of Artificial Sequence: Synthetic oligonucleotide
ugucaaacuuuugaaauaa

SEQ ID NO: 3233388 - RNA, 19 nt, Artificial Sequence
  Description of Artificial Sequence: Synthetic oligonucleotide
aauuucugacaaaacccag

SEQ ID NO: 3233389 - RNA, 19 nt, Artificial Sequence
  Description of Artificial Sequence: Synthetic oligonucleotide
gaggcaauaccccaaccug

SEQ ID NO: 3233390 - RNA, 19 nt, Artificial Sequence
  Description of Artificial Sequence: Synthetic oligonucleotide
aacuuuugaaauaaccuua

SEQ ID NO: 3233391 - RNA, 19 nt, Artificial Sequence
  Description of Artificial Sequence: Synthetic oligonucleotide
gugucaucgucauaggagc

SEQ ID NO: 3233392 - RNA, 19 nt, Artificial Sequence
  Description of Artificial Sequence: Synthetic oligonucleotide
cugggugucaucgucauag

SEQ ID NO: 3233393 - RNA, 19 nt, Artificial Sequence
  Description of Artificial Sequence: Synthetic oligonucleotide
cauacgucauuauacucac

SEQ ID NO: 3233394 - RNA, 19 nt, Artificial Sequence
  Description of Artificial Sequence: Synthetic oligonucleotide
uucuagaaucugaggaagc

SEQ ID NO: 3233395 - RNA, 19 nt, Artificial Sequence
  Description of Artificial Sequence: Synthetic oligonucleotide
aaacaccugagccggguug

SEQ ID NO: 3233396 - RNA, 19 nt, Artificial Sequence
  Description of Artificial Sequence: Synthetic oligonucleotide
aaggaacuuuacucccugg

SEQ ID NO: 3233397 - RNA, 19 nt, Artificial Sequence
  Description of Artificial Sequence: Synthetic oligonucleotide
uaucaauuucugacaaaac

SEQ ID NO: 3233398 - RNA, 19 nt, Artificial Sequence
  Description of Artificial Sequence: Synthetic oligonucleotide
agaggcaauaccccaaccu

SEQ ID NO: 3233399 - RNA, 19 nt, Artificial Sequence
  Description of Artificial Sequence: Synthetic oligonucleotide
aguugucaaacuuuugaaa

SEQ ID NO: 3233400 - RNA, 19 nt, Artificial Sequence
  Description of Artificial Sequence: Synthetic oligonucleotide
aacuuuacucccugguuau

SEQ ID NO: 3233401 - RNA, 19 nt, Artificial Sequence
  Description of Artificial Sequence: Synthetic oligonucleotide
caccuguccaacauuuugg

SEQ ID NO: 3233402 - RNA, 19 nt, Artificial Sequence
  Description of Artificial Sequence: Synthetic oligonucleotide
caaacuuuugaaauaaccu

SEQ ID NO: 3233403 - RNA, 19 nt, Artificial Sequence
  Description of Artificial Sequence: Synthetic oligonucleotide
ucauuaaaucaaacaccug

SEQ ID NO: 3233404 - RNA, 19 nt, Artificial Sequence
  Description of Artificial Sequence: Synthetic oligonucleotide
ugguuaucuccacuuuuag

SEQ ID NO: 3233405 - RNA, 19 nt, Artificial Sequence
  Description of Artificial Sequence: Synthetic oligonucleotide
acucgagcaaggucauugc

SEQ ID NO: 3233406 - RNA, 19 nt, Artificial Sequence
  Description of Artificial Sequence: Synthetic oligonucleotide
uccauucauuaaaucaaac

SEQ ID NO: 3233407 - RNA, 19 nt, Artificial Sequence
  Description of Artificial Sequence: Synthetic oligonucleotide
caauuucugacaaaaccca

SEQ ID NO: 3233408 - RNA, 19 nt, Artificial Sequence
  Description of Artificial Sequence: Synthetic oligonucleotide
uuccaucuccuccacagac

SEQ ID NO: 3233409 - RNA, 19 nt, Artificial Sequence
  Description of Artificial Sequence: Synthetic oligonucleotide
ucuagaaucugaggaagcu

SEQ ID NO: 3233410 - RNA, 19 nt, Artificial Sequence
  Description of Artificial Sequence: Synthetic oligonucleotide
cuacacuuccaucuccucc

SEQ ID NO: 3233411 - RNA, 19 nt, Artificial Sequence
  Description of Artificial Sequence: Synthetic oligonucleotide
ucauaggagcuccccagcc

SEQ ID NO: 3233412 - RNA, 19 nt, Artificial Sequence
  Description of Artificial Sequence: Synthetic oligonucleotide
uccaacauuuugguacugg

SEQ ID NO: 3233413 - RNA, 19 nt, Artificial Sequence
  Description of Artificial Sequence: Synthetic oligonucleotide
uccagcuuuucuagaaucu

SEQ ID NO: 3233414 - RNA, 19 nt, Artificial Sequence
  Description of Artificial Sequence: Synthetic oligonucleotide
gaaggaacuuuacucccug

SEQ ID NO: 3233415 - RNA, 19 nt, Artificial Sequence
  Description of Artificial Sequence: Synthetic oligonucleotide
gucauugccguccccagag

SEQ ID NO: 3233416 - RNA, 19 nt, Artificial Sequence
  Description of Artificial Sequence: Synthetic oligonucleotide
gacaaaacccagccuacac

SEQ ID NO: 3233417 - RNA, 19 nt, Artificial Sequence
  Description of Artificial Sequence: Synthetic oligonucleotide
aacagcuaaacacagcucc

SEQ ID NO: 3233418 - RNA, 19 nt, Artificial Sequence
  Description of Artificial Sequence: Synthetic oligonucleotide
aauacuacaaggaagacaa

SEQ ID NO: 3233419 - RNA, 19 nt, Artificial Sequence
  Description of Artificial Sequence: Synthetic oligonucleotide
auaacaguccaucagguag

SEQ ID NO: 3233420 - RNA, 19 nt, Artificial Sequence
  Description of Artificial Sequence: Synthetic oligonucleotide
ugucaaaugagcaauacua

SEQ ID NO: 3233421 - RNA, 19 nt, Artificial Sequence
  Description of Artificial Sequence: Synthetic oligonucleotide
aucucaacuagucagaugu

SEQ ID NO: 3233422 - RNA, 19 nt, Artificial Sequence
  Description of Artificial Sequence: Synthetic oligonucleotide
aaaugagcaauacuacaag

SEQ ID NO: 3233423 - RNA, 19 nt, Artificial Sequence
  Description of Artificial Sequence: Synthetic oligonucleotide
aagacaaccucaaaggagg

SEQ ID NO: 3233424 - RNA, 19 nt, Artificial Sequence
  Description of Artificial Sequence: Synthetic oligonucleotide
uaaauaacggcucuugggu

SEQ ID NO: 3233425 - RNA, 19 nt, Artificial Sequence
  Description of Artificial Sequence: Synthetic oligonucleotide
auaguuuacuuucaggucu

SEQ ID NO: 3233426 - RNA, 19 nt, Artificial Sequence
  Description of Artificial Sequence: Synthetic oligonucleotide
guaaauaacggcucuuggg

SEQ ID NO: 3233427 - RNA, 19 nt, Artificial Sequence
  Description of Artificial Sequence: Synthetic oligonucleotide
aguaggguuacacugagga

SEQ ID NO: 3233428 - RNA, 19 nt, Artificial Sequence
  Description of Artificial Sequence: Synthetic oligonucleotide
caaaagaacugcuuagucc

SEQ ID NO: 3233429 - RNA, 19 nt, Artificial Sequence
  Description of Artificial Sequence: Synthetic oligonucleotide
acagagagagugcucaccc

SEQ ID NO: 3233430 - RNA, 19 nt, Artificial Sequence
  Description of Artificial Sequence: Synthetic oligonucleotide
uacacugaggauaacaguc

SEQ ID NO: 3233431 - RNA, 19 nt, Artificial Sequence
  Description of Artificial Sequence: Synthetic oligonucleotide
ucucuagacuccaugaccc

SEQ ID NO: 3233432 - RNA, 19 nt, Artificial Sequence
  Description of Artificial Sequence: Synthetic oligonucleotide
agcuaucucaacuagucag

SEQ ID NO: 3233433 - RNA, 19 nt, Artificial Sequence
  Description of Artificial Sequence: Synthetic oligonucleotide
aauaacggcucuuggguug

SEQ ID NO: 3233434 - RNA, 19 nt, Artificial Sequence
  Description of Artificial Sequence: Synthetic oligonucleotide
cagucuaguacuuuagggg

SEQ ID NO: 3233435 - RNA, 19 nt, Artificial Sequence
  Description of Artificial Sequence: Synthetic oligonucleotide
aagggguuccagcagacag

SEQ ID NO: 3233436 - RNA, 19 nt, Artificial Sequence
  Description of Artificial Sequence: Synthetic oligonucleotide
ugcuauguagccauggaac

SEQ ID NO: 3233437 - RNA, 19 nt, Artificial Sequence
  Description of Artificial Sequence: Synthetic oligonucleotide
ucaaaugagcaauacuaca

SEQ ID NO: 3233438 - RNA, 19 nt, Artificial Sequence
  Description of Artificial Sequence: Synthetic oligonucleotide
uaacaguccaucagguagg

SEQ ID NO: 3233439 - RNA, 19 nt, Artificial Sequence
  Description of Artificial Sequence: Synthetic oligonucleotide
uucucuagacuccaugacc

SEQ ID NO: 3233440 - RNA, 19 nt, Artificial Sequence
  Description of Artificial Sequence: Synthetic oligonucleotide
aaaggaggcuccguagucc

SEQ ID NO: 3233441 - RNA, 19 nt, Artificial Sequence
  Description of Artificial Sequence: Synthetic oligonucleotide
ugacugguugcccugaagc

SEQ ID NO: 3233442 - RNA, 19 nt, Artificial Sequence
  Description of Artificial Sequence: Synthetic oligonucleotide
ugagcaauacuacaaggaa

SEQ ID NO: 3233443 - RNA, 19 nt, Artificial Sequence
  Description of Artificial Sequence: Synthetic oligonucleotide
gaugcacucucugagagag

SEQ ID NO: 3233444 - RNA, 19 nt, Artificial Sequence
  Description of Artificial Sequence: Synthetic oligonucleotide
ugaaagaugccacaagcua

SEQ ID NO: 3233445 - RNA, 19 nt, Artificial Sequence
  Description of Artificial Sequence: Synthetic oligonucleotide
ucaacuagucagaugucug

SEQ ID NO: 3233446 - RNA, 19 nt, Artificial Sequence
  Description of Artificial Sequence: Synthetic oligonucleotide
agucuaguacuuuaggggu

SEQ ID NO: 3233447 - RNA, 19 nt, Artificial Sequence
  Description of Artificial Sequence: Synthetic oligonucleotide
cauggaaccacagaacugc

SEQ ID NO: 3233448 - RNA, 19 nt, Artificial Sequence
  Description of Artificial Sequence: Synthetic oligonucleotide
acauggugggguucuaggc

SEQ ID NO: 3233449 - RNA, 19 nt, Artificial Sequence
  Description of Artificial Sequence: Synthetic oligonucleotide
cagugaaaggcucuguucc

SEQ ID NO: 3233450 - RNA, 19 nt, Artificial Sequence
  Description of Artificial Sequence: Synthetic oligonucleotide
uucguguugagccaucccu

SEQ ID NO: 3233451 - RNA, 19 nt, Artificial Sequence
  Description of Artificial Sequence: Synthetic oligonucleotide
agagugcucaccccauucc

SEQ ID NO: 3233452 - RNA, 19 nt, Artificial Sequence
  Description of Artificial Sequence: Synthetic oligonucleotide
ucccuguucuccaaaguag

SEQ ID NO: 3233453 - RNA, 19 nt, Artificial Sequence
  Description of Artificial Sequence: Synthetic oligonucleotide
gagugggcagagcagacgg

SEQ ID NO: 3233454 - RNA, 19 nt, Artificial Sequence
  Description of Artificial Sequence: Synthetic oligonucleotide
acaaccucaaaggaggcuc

SEQ ID NO: 3233455 - RNA, 19 nt, Artificial Sequence
  Description of Artificial Sequence: Synthetic oligonucleotide
ucucugagagaguaguggc

SEQ ID NO: 3233456 - RNA, 19 nt, Artificial Sequence
  Description of Artificial Sequence: Synthetic oligonucleotide
agacacaugucucugggcu

SEQ ID NO: 3233457 - RNA, 19 nt, Artificial Sequence
  Description of Artificial Sequence: Synthetic oligonucleotide
cucgaggaugacauggugg

SEQ ID NO: 3233458 - RNA, 19 nt, Artificial Sequence
  Description of Artificial Sequence: Synthetic oligonucleotide
aacauggcagugucuguag

SEQ ID NO: 3233459 - RNA, 19 nt, Artificial Sequence
  Description of Artificial Sequence: Synthetic oligonucleotide
caaagauccgaaagugagg

SEQ ID NO: 3233460 - RNA, 19 nt, Artificial Sequence
  Description of Artificial Sequence: Synthetic oligonucleotide
ugacgcaguaaauaacggc

SEQ ID NO: 3233461 - RNA, 19 nt, Artificial Sequence
  Description of Artificial Sequence: Synthetic oligonucleotide
acuagucagaugucuggac

SEQ ID NO: 3233462 - RNA, 19 nt, Artificial Sequence
  Description of Artificial Sequence: Synthetic oligonucleotide
gacauggugggguucuagg

SEQ ID NO: 3233463 - RNA, 19 nt, Artificial Sequence
  Description of Artificial Sequence: Synthetic oligonucleotide
agcaauacuacaaggaaga

SEQ ID NO: 3233464 - RNA, 19 nt, Artificial Sequence
  Description of Artificial Sequence: Synthetic oligonucleotide
aguagacacaugucucugg

SEQ ID NO: 3233465 - RNA, 19 nt, Artificial Sequence
  Description of Artificial Sequence: Synthetic oligonucleotide
caacuagucagaugucugg

SEQ ID NO: 3233466 - RNA, 19 nt, Artificial Sequence
  Description of Artificial Sequence: Synthetic oligonucleotide
gagcaauacuacaaggaag

SEQ ID NO: 3233467 - RNA, 19 nt, Artificial Sequence
  Description of Artificial Sequence: Synthetic oligonucleotide
cauaguuuacuuucagguc

SEQ ID NO: 3233468 - RNA, 19 nt, Artificial Sequence
  Description of Artificial Sequence: Synthetic oligonucleotide
auugggaugggcacaggcc

SEQ ID NO: 3233469 - RNA, 19 nt, Artificial Sequence
  Description of Artificial Sequence: Synthetic oligonucleotide
gauugggaugggcacaggc

SEQ ID NO: 3233470 - RNA, 19 nt, Artificial Sequence
  Description of Artificial Sequence: Synthetic oligonucleotide
ucagaugucuggacagugc

SEQ ID NO: 3233471 - RNA, 19 nt, Artificial Sequence
  Description of Artificial Sequence: Synthetic oligonucleotide
cauggugggguucuaggcg

SEQ ID NO: 3233472 - RNA, 19 nt, Artificial Sequence
  Description of Artificial Sequence: Synthetic oligonucleotide
ucagguaggcaaagauccg

SEQ ID NO: 3233473 - RNA, 19 nt, Artificial Sequence
  Description of Artificial Sequence: Synthetic oligonucleotide
agacagggcacucagcugu

SEQ ID NO: 3233474 - RNA, 19 nt, Artificial Sequence
  Description of Artificial Sequence: Synthetic oligonucleotide
ugugaagggguuccagcag

SEQ ID NO: 3233475 - RNA, 19 nt, Artificial Sequence
  Description of Artificial Sequence: Synthetic oligonucleotide
ucaaaggaggcuccguagu

SEQ ID NO: 3233476 - RNA, 19 nt, Artificial Sequence
  Description of Artificial Sequence: Synthetic oligonucleotide
guccuugagacagagcugg

SEQ ID NO: 3233477 - RNA, 19 nt, Artificial Sequence
  Description of Artificial Sequence: Synthetic oligonucleotide
uccuugugcuggaacagag

SEQ ID NO: 3233478 - RNA, 19 nt, Artificial Sequence
  Description of Artificial Sequence: Synthetic oligonucleotide
aacaguccaucagguaggc

SEQ ID NO: 3233479 - RNA, 19 nt, Artificial Sequence
  Description of Artificial Sequence: Synthetic oligonucleotide
caaaugagcaauacuacaa

SEQ ID NO: 3233480 - RNA, 19 nt, Artificial Sequence
  Description of Artificial Sequence: Synthetic oligonucleotide
uccguaguccccauuccag

SEQ ID NO: 3233481 - RNA, 19 nt, Artificial Sequence
  Description of Artificial Sequence: Synthetic oligonucleotide
aaagugaggguugcggaug

SEQ ID NO: 3233482 - RNA, 19 nt, Artificial Sequence
  Description of Artificial Sequence: Synthetic oligonucleotide
uucaggucucagcucuucg

SEQ ID NO: 3233483 - RNA, 19 nt, Artificial Sequence
  Description of Artificial Sequence: Synthetic oligonucleotide
cuguaggcaagucagugac

SEQ ID NO: 3233484 - RNA, 19 nt, Artificial Sequence
  Description of Artificial Sequence: Synthetic oligonucleotide
uaggguuacacugaggaua

SEQ ID NO: 3233485 - RNA, 19 nt, Artificial Sequence
  Description of Artificial Sequence: Synthetic oligonucleotide
agcccuuuggcacaacuug

SEQ ID NO: 3233486 - RNA, 19 nt, Artificial Sequence
  Description of Artificial Sequence: Synthetic oligonucleotide
uguugagccaucccuguuc

SEQ ID NO: 3233487 - RNA, 19 nt, Artificial Sequence
  Description of Artificial Sequence: Synthetic oligonucleotide
cucucugagagaguagugg

SEQ ID NO: 3233488 - RNA, 19 nt, Artificial Sequence
  Description of Artificial Sequence: Synthetic oligonucleotide
uuacacugaggauaacagu

SEQ ID NO: 3233489 - RNA, 19 nt, Artificial Sequence
  Description of Artificial Sequence: Synthetic oligonucleotide
aaauaacggcucuuggguu

SEQ ID NO: 3233490 - RNA, 19 nt, Artificial Sequence
  Description of Artificial Sequence: Synthetic oligonucleotide
aaaggcucuguuccuugug

SEQ ID NO: 3233491 - RNA, 19 nt, Artificial Sequence
  Description of Artificial Sequence: Synthetic oligonucleotide
uacuuuagggguguggaac

SEQ ID NO: 3233492 - RNA, 19 nt, Artificial Sequence
  Description of Artificial Sequence: Synthetic oligonucleotide
cacagaacugcuucucuag

SEQ ID NO: 3233493 - RNA, 19 nt, Artificial Sequence
  Description of Artificial Sequence: Synthetic oligonucleotide
ugagcaguaggguuacacu

SEQ ID NO: 3233494 - RNA, 19 nt, Artificial Sequence
  Description of Artificial Sequence: Synthetic oligonucleotide
aguacuuuaggggugugga

SEQ ID NO: 3233495 - RNA, 19 nt, Artificial Sequence
  Description of Artificial Sequence: Synthetic oligonucleotide
agagagagugcucacccca

SEQ ID NO: 3233496 - RNA, 19 nt, Artificial Sequence
  Description of Artificial Sequence: Synthetic oligonucleotide
caagucagugacugguugc

SEQ ID NO: 3233497 - RNA, 19 nt, Artificial Sequence
  Description of Artificial Sequence: Synthetic oligonucleotide
ggagaagaugagcaguagg

SEQ ID NO: 3233498 - RNA, 19 nt, Artificial Sequence
  Description of Artificial Sequence: Synthetic oligonucleotide
ggcacaacuugcuauguag

SEQ ID NO: 3233499 - RNA, 19 nt, Artificial Sequence
  Description of Artificial Sequence: Synthetic oligonucleotide
uccaaaguagacacauguc

SEQ ID NO: 3233500 - RNA, 19 nt, Artificial Sequence
  Description of Artificial Sequence: Synthetic oligonucleotide
guugugaagggguuccagc

SEQ ID NO: 3233501 - RNA, 19 nt, Artificial Sequence
  Description of Artificial Sequence: Synthetic oligonucleotide
guccaaaagauggagaaga

SEQ ID NO: 3233502 - RNA, 19 nt, Artificial Sequence
  Description of Artificial Sequence: Synthetic oligonucleotide
uugcuauguagccauggaa

SEQ ID NO: 3233503 - RNA, 19 nt, Artificial Sequence
  Description of Artificial Sequence: Synthetic oligonucleotide
acacaugaacagcuaaaca

SEQ ID NO: 3233504 - RNA, 19 nt, Artificial Sequence
  Description of Artificial Sequence: Synthetic oligonucleotide
uguagccauggaaccacag

SEQ ID NO: 3233505 - RNA, 19 nt, Artificial Sequence
  Description of Artificial Sequence: Synthetic oligonucleotide
cuaaacacagcuccaguga

SEQ ID NO: 3233506 - RNA, 19 nt, Artificial Sequence
  Description of Artificial Sequence: Synthetic oligonucleotide
ucguguugagccaucccug

SEQ ID NO: 3233507 - RNA, 19 nt, Artificial Sequence
  Description of Artificial Sequence: Synthetic oligonucleotide
gcaaagauccgaaagugag

SEQ ID NO: 3233508 - RNA, 19 nt, Artificial Sequence
  Description of Artificial Sequence: Synthetic oligonucleotide
cucaaaggaggcuccguag

SEQ ID NO: 3233509 - RNA, 19 nt, Artificial Sequence
  Description of Artificial Sequence: Synthetic oligonucleotide
aaguagacacaugucucug

SEQ ID NO: 3233510 - RNA, 19 nt, Artificial Sequence
  Description of Artificial Sequence: Synthetic oligonucleotide
augagcaauacuacaagga

SEQ ID NO: 3233511 - RNA, 19 nt, Artificial Sequence
  Description of Artificial Sequence: Synthetic oligonucleotide
aggcucugugccaaggucc

SEQ ID NO: 3233512 - RNA, 19 nt, Artificial Sequence
  Description of Artificial Sequence: Synthetic oligonucleotide
aacuagucagaugucugga

SEQ ID NO: 3233513 - RNA, 19 nt, Artificial Sequence
  Description of Artificial Sequence: Synthetic oligonucleotide
uugagacagagcugguggc

SEQ ID NO: 3233514 - RNA, 19 nt, Artificial Sequence
  Description of Artificial Sequence: Synthetic oligonucleotide
uaucucaacuagucagaug

SEQ ID NO: 3233515 - RNA, 19 nt, Artificial Sequence
  Description of Artificial Sequence: Synthetic oligonucleotide
gucaaaugagcaauacuac

SEQ ID NO: 3233516 - RNA, 19 nt, Artificial Sequence
  Description of Artificial Sequence: Synthetic oligonucleotide
uaguacuuuaggggugugg

SEQ ID NO: 3233517 - RNA, 19 nt, Artificial Sequence
  Description of Artificial Sequence: Synthetic oligonucleotide
aauuuucuggaguuccugg

SEQ ID NO: 3233518 - RNA, 19 nt, Artificial Sequence
  Description of Artificial Sequence: Synthetic oligonucleotide
augagcagcaauuuucugg

SEQ ID NO: 3233519 - RNA, 19 nt, Artificial Sequence
  Description of Artificial Sequence: Synthetic oligonucleotide
uagagaaaggguuuguuca

SEQ ID NO: 3233520 - RNA, 19 nt, Artificial Sequence
  Description of Artificial Sequence: Synthetic oligonucleotide
agcaauuuucuggaguucc

SEQ ID NO: 3233521 - RNA, 19 nt, Artificial Sequence
  Description of Artificial Sequence: Synthetic oligonucleotide
ugagcagcaauuuucugga

SEQ ID NO: 3233522 - RNA, 19 nt, Artificial Sequence
  Description of Artificial Sequence: Synthetic oligonucleotide
agagaaaggguuuguucac

SEQ ID NO: 3233523 - RNA, 19 nt, Artificial Sequence
  Description of Artificial Sequence: Synthetic oligonucleotide
agaaaggguuuguucaccg

SEQ ID NO: 3233524 - RNA, 19 nt, Artificial Sequence
  Description of Artificial Sequence: Synthetic oligonucleotide
ucuuuguucaccgaagccu

SEQ ID NO: 3233525 - RNA, 19 nt, Artificial Sequence
  Description of Artificial Sequence: Synthetic oligonucleotide
aacugagaucuagagaaag

SEQ ID NO: 3233526 - RNA, 19 nt, Artificial Sequence
  Description of Artificial Sequence: Synthetic oligonucleotide
ucgaacgagccccugaccc

SEQ ID NO: 3233527 - RNA, 19 nt, Artificial Sequence
  Description of Artificial Sequence: Synthetic oligonucleotide
uccugggcgaugcagaggc

SEQ ID NO: 3233528 - RNA, 19 nt, Artificial Sequence
  Description of Artificial Sequence: Synthetic oligonucleotide
uucucuuuguucaccgaag

SEQ ID NO: 3233529 - RNA, 19 nt, Artificial Sequence
  Description of Artificial Sequence: Synthetic oligonucleotide
uuauggaugcacagguagc

SEQ ID NO: 3233530 - RNA, 19 nt, Artificial Sequence
  Description of Artificial Sequence: Synthetic oligonucleotide
agaugagggagucaggccu

SEQ ID NO: 3233531 - RNA, 19 nt, Artificial Sequence
  Description of Artificial Sequence: Synthetic oligonucleotide
ugagaucuagagaaagggu

SEQ ID NO: 3233532 - RNA, 19 nt, Artificial Sequence
  Description of Artificial Sequence: Synthetic oligonucleotide
ucucuuuguucaccgaagc

SEQ ID NO: 3233533 - RNA, 19 nt, Artificial Sequence
  Description of Artificial Sequence: Synthetic oligonucleotide
aaggguguggcgucagcgg

SEQ ID NO: 3233534 - RNA, 19 nt, Artificial Sequence
  Description of Artificial Sequence: Synthetic oligonucleotide
acggcguacuaucaccugc

SEQ ID NO: 3233535 - RNA, 19 nt, Artificial Sequence
  Description of Artificial Sequence: Synthetic oligonucleotide
accgaagccuugcaguccc

SEQ ID NO: 3233536 - RNA, 19 nt, Artificial Sequence
  Description of Artificial Sequence: Synthetic oligonucleotide
agcaucuggggacccagcc

SEQ ID NO: 3233537 - RNA, 19 nt, Artificial Sequence
  Description of Artificial Sequence: Synthetic oligonucleotide
agcaucuuagcggagcugg

SEQ ID NO: 3233538 - RNA, 19 nt, Artificial Sequence
  Description of Artificial Sequence: Synthetic oligonucleotide
uucaccgaagccuugcagu

SEQ ID NO: 3233539 - RNA, 19 nt, Artificial Sequence
  Description of Artificial Sequence: Synthetic oligonucleotide
gguuuguucaccgacgagg

SEQ ID NO: 3233540 - RNA, 19 nt, Artificial Sequence
  Description of Artificial Sequence: Synthetic oligonucleotide
auugcaaggguguggcguc

SEQ ID NO: 3233541 - RNA, 19 nt, Artificial Sequence
  Description of Artificial Sequence: Synthetic oligonucleotide
cuggauguccaaucgcugg

SEQ ID NO: 3233542 - RNA, 19 nt, Artificial Sequence
  Description of Artificial Sequence: Synthetic oligonucleotide
accacggacaccgacgggc

SEQ ID NO: 3233543 - RNA, 19 nt, Artificial Sequence
  Description of Artificial Sequence: Synthetic oligonucleotide
ugugaugcucacaccucgg

SEQ ID NO: 3233544 - RNA, 19 nt, Artificial Sequence
  Description of Artificial Sequence: Synthetic oligonucleotide
uugcguuccaccacggaca

SEQ ID NO: 3233545 - RNA, 19 nt, Artificial Sequence
  Description of Artificial Sequence: Synthetic oligonucleotide
uccauacacaguuauggau

SEQ ID NO: 3233546 - RNA, 19 nt, Artificial Sequence
  Description of Artificial Sequence: Synthetic oligonucleotide
acaaccacuggaugacgcg

SEQ ID NO: 3233547 - RNA, 19 nt, Artificial Sequence
  Description of Artificial Sequence: Synthetic oligonucleotide
ucuucccugacgccucugg

SEQ ID NO: 3233548 - RNA, 19 nt, Artificial Sequence
  Description of Artificial Sequence: Synthetic oligonucleotide
uacacaguuauggaugcac

SEQ ID NO: 3233549 - RNA, 19 nt, Artificial Sequence
  Description of Artificial Sequence: Synthetic oligonucleotide
uauggaugcacagguagcu

SEQ ID NO: 3233550 - RNA, 19 nt, Artificial Sequence
  Description of Artificial Sequence: Synthetic oligonucleotide
uucuccgacaguggcagcg

SEQ ID NO: 3233551 - RNA, 19 nt, Artificial Sequence
  Description of Artificial Sequence: Synthetic oligonucleotide
uggaugcacagguagcuga

SEQ ID NO: 3233552 - RNA, 19 nt, Artificial Sequence
  Description of Artificial Sequence: Synthetic oligonucleotide
gacgaggcaagcucuccgg

SEQ ID NO: 3233553 - RNA, 19 nt, Artificial Sequence
  Description of Artificial Sequence: Synthetic oligonucleotide
agcagcaauuuucuggagu

SEQ ID NO: 3233554 - RNA, 19 nt, Artificial Sequence
  Description of Artificial Sequence: Synthetic oligonucleotide
cguacuaucaccugcugcg

SEQ ID NO: 3233555 - RNA, 19 nt, Artificial Sequence
  Description of Artificial Sequence: Synthetic oligonucleotide
ugcagucccgcuucuggcg

SEQ ID NO: 3233556 - RNA, 19 nt, Artificial Sequence
  Description of Artificial Sequence: Synthetic oligonucleotide
cugugaugcucacaccucg

SEQ ID NO: 3233557 - RNA, 19 nt, Artificial Sequence
  Description of Artificial Sequence: Synthetic oligonucleotide
uguucaccgacgaggcaag

SEQ ID NO: 3233558 - RNA, 19 nt, Artificial Sequence
  Description of Artificial Sequence: Synthetic oligonucleotide
guugcguuccaccacggac

SEQ ID NO: 3233559 - RNA, 19 nt, Artificial Sequence
  Description of Artificial Sequence: Synthetic oligonucleotide
cucauugcaaggguguggc

SEQ ID NO: 3233560 - RNA, 19 nt, Artificial Sequence
  Description of Artificial Sequence: Synthetic oligonucleotide
acuaucaccugcugcgucu

SEQ ID NO: 3233561 - RNA, 19 nt, Artificial Sequence
  Description of Artificial Sequence: Synthetic oligonucleotide
gucgcuggauguccaaucg

SEQ ID NO: 3233562 - RNA, 19 nt, Artificial Sequence
  Description of Artificial Sequence: Synthetic oligonucleotide
accugcugcgucuugacgu

SEQ ID NO: 3233563 - RNA, 19 nt, Artificial Sequence
  Description of Artificial Sequence: Synthetic oligonucleotide
uugaagaagcgcuccuucu

SEQ ID NO: 3233564 - RNA, 19 nt, Artificial Sequence
  Description of Artificial Sequence: Synthetic oligonucleotide
cugacggcguacuaucacc

SEQ ID NO: 3233565 - RNA, 19 nt, Artificial Sequence
  Description of Artificial Sequence: Synthetic oligonucleotide
gggaaacugagaucuagag

SEQ ID NO: 3233566 - RNA, 19 nt, Artificial Sequence
  Description of Artificial Sequence: Synthetic oligonucleotide
gaucuagagaaaggguuug

SEQ ID NO: 3233567 - RNA, 19 nt, Artificial Sequence
  Description of Artificial Sequence: Synthetic oligonucleotide
uuguucaccgacgaggcaa

SEQ ID NO: 3233568 - RNA, 19 nt, Artificial Sequence
  Description of Artificial Sequence: Synthetic oligonucleotide
cucuuuguucaccgaagcc

SEQ ID NO: 3233569 - RNA, 19 nt, Artificial Sequence
  Description of Artificial Sequence: Synthetic oligonucleotide
guuuguucaccgacgaggc

SEQ ID NO: 3233570 - RNA, 19 nt, Artificial Sequence
  Description of Artificial Sequence: Synthetic oligonucleotide
ucaccgacgaggcaagcuc

SEQ ID NO: 3233571 - RNA, 19 nt, Artificial Sequence
  Description of Artificial Sequence: Synthetic oligonucleotide
gaggcgucgaacgagcccc

SEQ ID NO: 3233572 - RNA, 19 nt, Artificial Sequence
  Description of Artificial Sequence: Synthetic oligonucleotide
aucuuagcggagcugggca

SEQ ID NO: 3233573 - RNA, 19 nt, Artificial Sequence
  Description of Artificial Sequence: Synthetic oligonucleotide
uggauguccaaucgcuggu

SEQ ID NO: 3233574 - RNA, 19 nt, Artificial Sequence
  Description of Artificial Sequence: Synthetic oligonucleotide
cuuggcguucucuuuguuc

SEQ ID NO: 3233575 - RNA, 19 nt, Artificial Sequence
  Description of Artificial Sequence: Synthetic oligonucleotide
ugacggcguacuaucaccu

SEQ ID NO: 3233576 - RNA, 19 nt, Artificial Sequence
  Description of Artificial Sequence: Synthetic oligonucleotide
guaggucccgggcugcucg

SEQ ID NO: 3233577 - RNA, 19 nt, Artificial Sequence
  Description of Artificial Sequence: Synthetic oligonucleotide
uggagggcgaagacaggag

SEQ ID NO: 3233578 - RNA, 19 nt, Artificial Sequence
  Description of Artificial Sequence: Synthetic oligonucleotide
gaugcucacaccucggacu

SEQ ID NO: 3233579 - RNA, 19 nt, Artificial Sequence
  Description of Artificial Sequence: Synthetic oligonucleotide
uaguugaagaagcgcuccu

SEQ ID NO: 3233580 - RNA, 19 nt, Artificial Sequence
  Description of Artificial Sequence: Synthetic oligonucleotide
uccgggagccgucuccagg

SEQ ID NO: 3233581 - RNA, 19 nt, Artificial Sequence
  Description of Artificial Sequence: Synthetic oligonucleotide
gagaaaggguuuguucacc

SEQ ID NO: 3233582 - RNA, 19 nt, Artificial Sequence
  Description of Artificial Sequence: Synthetic oligonucleotide
ucucucuucccugacgccu

SEQ ID NO: 3233583 - RNA, 19 nt, Artificial Sequence
  Description of Artificial Sequence: Synthetic oligonucleotide
uguucaccgaagccuugca

SEQ ID NO: 3233584 - RNA, 19 nt, Artificial Sequence
  Description of Artificial Sequence: Synthetic oligonucleotide
caaggguguggcgucagcg

SEQ ID NO: 3233585 - RNA, 19 nt, Artificial Sequence
  Description of Artificial Sequence: Synthetic oligonucleotide
aggguuuguucaccgacga

SEQ ID NO: 3233586 - RNA, 19 nt, Artificial Sequence
  Description of Artificial Sequence: Synthetic oligonucleotide
ucauugcaaggguguggcg

SEQ ID NO: 3233587 - RNA, 19 nt, Artificial Sequence
  Description of Artificial Sequence: Synthetic oligonucleotide
ugggcgaugcagaggcucc

SEQ ID NO: 3233588 - RNA, 19 nt, Artificial Sequence
  Description of Artificial Sequence: Synthetic oligonucleotide
uuuguucaccgacgaggca

SEQ ID NO: 3233589 - RNA, 19 nt, Artificial Sequence
  Description of Artificial Sequence: Synthetic oligonucleotide
cacagguagcugaugagca

SEQ ID NO: 3233590 - RNA, 19 nt, Artificial Sequence
  Description of Artificial Sequence: Synthetic oligonucleotide
guucaccgaagccuugcag

SEQ ID NO: 3233591 - RNA, 19 nt, Artificial Sequence
  Description of Artificial Sequence: Synthetic oligonucleotide
ggaaacugagaucuagaga

SEQ ID NO: 3233592 - RNA, 19 nt, Artificial Sequence
  Description of Artificial Sequence: Synthetic oligonucleotide
ugggaguucguccccucga

SEQ ID NO: 3233593 - RNA, 19 nt, Artificial Sequence
  Description of Artificial Sequence: Synthetic oligonucleotide
uugcagucccgcuucuggc

SEQ ID NO: 3233594 - RNA, 19 nt, Artificial Sequence
  Description of Artificial Sequence: Synthetic oligonucleotide
acgaggcaagcucuccggg

SEQ ID NO: 3233595 - RNA, 19 nt, Artificial Sequence
  Description of Artificial Sequence: Synthetic oligonucleotide
ucgcuggauguccaaucgc

SEQ ID NO: 3233596 - RNA, 19 nt, Artificial Sequence
  Description of Artificial Sequence: Synthetic oligonucleotide
uuguucaccgaagccuugc

SEQ ID NO: 3233597 - RNA, 19 nt, Artificial Sequence
  Description of Artificial Sequence: Synthetic oligonucleotide
ucgccugccgcuaccccgg

SEQ ID NO: 3233598 - RNA, 19 nt, Artificial Sequence
  Description of Artificial Sequence: Synthetic oligonucleotide
agcugggcaggucagcgcu

SEQ ID NO: 3233599 - RNA, 19 nt, Artificial Sequence
  Description of Artificial Sequence: Synthetic oligonucleotide
ucuagagaaaggguuuguu

SEQ ID NO: 3233600 - RNA, 19 nt, Artificial Sequence
  Description of Artificial Sequence: Synthetic oligonucleotide
gaaaggguuuguucaccga

SEQ ID NO: 3233601 - RNA, 19 nt, Artificial Sequence
  Description of Artificial Sequence: Synthetic oligonucleotide
gucgccugccgcuaccccg

SEQ ID NO: 3233602 - RNA, 19 nt, Artificial Sequence
  Description of Artificial Sequence: Synthetic oligonucleotide
uguggucccgccugcucag

SEQ ID NO: 3233603 - RNA, 19 nt, Artificial Sequence
  Description of Artificial Sequence: Synthetic oligonucleotide
agcggagcugggcagguca

SEQ ID NO: 3233604 - RNA, 19 nt, Artificial Sequence
  Description of Artificial Sequence: Synthetic oligonucleotide
aagccuugcagucccgcuu

SEQ ID NO: 3233605 - RNA, 19 nt, Artificial Sequence
  Description of Artificial Sequence: Synthetic oligonucleotide
aggaagaggcgucgaacga

SEQ ID NO: 3233606 - RNA, 19 nt, Artificial Sequence
  Description of Artificial Sequence: Synthetic oligonucleotide
auacaaccacuggaugacg

SEQ ID NO: 3233607 - RNA, 19 nt, Artificial Sequence
  Description of Artificial Sequence: Synthetic oligonucleotide
uacuaucaccugcugcguc

SEQ ID NO: 3233608 - RNA, 19 nt, Artificial Sequence
  Description of Artificial Sequence: Synthetic oligonucleotide
acccagcccagccugcggg

SEQ ID NO: 3233609 - RNA, 19 nt, Artificial Sequence
  Description of Artificial Sequence: Synthetic oligonucleotide
gagaucuagagaaaggguu

SEQ ID NO: 3233610 - RNA, 19 nt, Artificial Sequence
  Description of Artificial Sequence: Synthetic oligonucleotide
ugcguuccaccacggacac

SEQ ID NO: 3233611 - RNA, 19 nt, Artificial Sequence
  Description of Artificial Sequence: Synthetic oligonucleotide
acaccucggacucgcgcgg

SEQ ID NO: 3233612 - RNA, 19 nt, Artificial Sequence
  Description of Artificial Sequence: Synthetic oligonucleotide
agaucuagagaaaggguuu

SEQ ID NO: 3233613 - RNA, 19 nt, Artificial Sequence
  Description of Artificial Sequence: Synthetic oligonucleotide
cagccauacaaccacugga

SEQ ID NO: 3233614 - RNA, 19 nt, Artificial Sequence
  Description of Artificial Sequence: Synthetic oligonucleotide
caucuggggacccagccca

SEQ ID NO: 3233615 - RNA, 19 nt, Artificial Sequence
  Description of Artificial Sequence: Synthetic oligonucleotide
aagcgcuccuucuccgaca

SEQ ID NO: 3233616 - RNA, 19 nt, Artificial Sequence
  Description of Artificial Sequence: Synthetic oligonucleotide
aucgcugguguccccggag

SEQ ID NO: 3233617 - RNA, 19 nt, Artificial Sequence
  Description of Artificial Sequence: Synthetic oligonucleotide
auuauguucacuaagaagg

SEQ ID NO: 3233618 - RNA, 19 nt, Artificial Sequence
  Description of Artificial Sequence: Synthetic oligonucleotide
uaauuuuacaucaccaugg

SEQ ID NO: 3233619 - RNA, 19 nt, Artificial Sequence
  Description of Artificial Sequence: Synthetic oligonucleotide
uuuuacaucaccauggucu

SEQ ID NO: 3233620 - RNA, 19 nt, Artificial Sequence
  Description of Artificial Sequence: Synthetic oligonucleotide
uuaguaacuauuuucaugc

SEQ ID NO: 3233621 - RNA, 19 nt, Artificial Sequence
  Description of Artificial Sequence: Synthetic oligonucleotide
uguaauauaaaauuugggu

SEQ ID NO: 3233622 - RNA, 19 nt, Artificial Sequence
  Description of Artificial Sequence: Synthetic oligonucleotide
aaauaucuugaagugaucc

SEQ ID NO: 3233623 - RNA, 19 nt, Artificial Sequence
  Description of Artificial Sequence: Synthetic oligonucleotide
cuaaagaugagauagguac

SEQ ID NO: 3233624 - RNA, 19 nt, Artificial Sequence
  Description of Artificial Sequence: Synthetic oligonucleotide
ucuaaacacaccaaaacag

SEQ ID NO: 3233625 - RNA, 19 nt, Artificial Sequence
  Description of Artificial Sequence: Synthetic oligonucleotide
uuugcaauucagauaaugg

SEQ ID NO: 3233626 - RNA, 19 nt, Artificial Sequence
  Description of Artificial Sequence: Synthetic oligonucleotide
aauuauguucacuaagaag

SEQ ID NO: 3233627 - RNA, 19 nt, Artificial Sequence
  Description of Artificial Sequence: Synthetic oligonucleotide
ugauauaaccaccacacag

SEQ ID NO: 3233628 - RNA, 19 nt, Artificial Sequence
  Description of Artificial Sequence: Synthetic oligonucleotide
uauccuaauguacagauca

SEQ ID NO: 3233629 - RNA, 19 nt, Artificial Sequence
  Description of Artificial Sequence: Synthetic oligonucleotide
agaaacauuacaccacucc

SEQ ID NO: 3233630 - RNA, 19 nt, Artificial Sequence
  Description of Artificial Sequence: Synthetic oligonucleotide
acaacuguuccauagucgc

SEQ ID NO: 3233631 - RNA, 19 nt, Artificial Sequence
  Description of Artificial Sequence: Synthetic oligonucleotide
guaauauaaaauuuggguc

SEQ ID NO: 3233632 - RNA, 19 nt, Artificial Sequence
  Description of Artificial Sequence: Synthetic oligonucleotide
gauaacauguacuuuauaa

SEQ ID NO: 3233633 - RNA, 19 nt, Artificial Sequence
  Description of Artificial Sequence: Synthetic oligonucleotide
auaacauguacuuuauaag

SEQ ID NO: 3233634 - RNA, 19 nt, Artificial Sequence
  Description of Artificial Sequence: Synthetic oligonucleotide
uacuuuauaagccugcuaa

SEQ ID NO: 3233635 - RNA, 19 nt, Artificial Sequence
  Description of Artificial Sequence: Synthetic oligonucleotide
uguauuugcaccauccaca

SEQ ID NO: 3233636 - RNA, 19 nt, Artificial Sequence
  Description of Artificial Sequence: Synthetic oligonucleotide
uuucucuuugcaaugguag

SEQ ID NO: 3233637 - RNA, 19 nt, Artificial Sequence
  Description of Artificial Sequence: Synthetic oligonucleotide
cuuuguuaaaugaaacugc

SEQ ID NO: 3233638 - RNA, 19 nt, Artificial Sequence
  Description of Artificial Sequence: Synthetic oligonucleotide
uccaauguaauauaaaauu

SEQ ID NO: 3233639 - RNA, 19 nt, Artificial Sequence
  Description of Artificial Sequence: Synthetic oligonucleotide
aaacccacaacaauuaaag

SEQ ID NO: 3233640 - RNA, 19 nt, Artificial Sequence
  Description of Artificial Sequence: Synthetic oligonucleotide
gaagauuaauuucuugugc

SEQ ID NO: 3233641 - RNA, 19 nt, Artificial Sequence
  Description of Artificial Sequence: Synthetic oligonucleotide
agguauauuauacugcuug

SEQ ID NO: 3233642 - RNA, 19 nt, Artificial Sequence
  Description of Artificial Sequence: Synthetic oligonucleotide
uuuaucuauacuaugccau

SEQ ID NO: 3233643 - RNA, 19 nt, Artificial Sequence
  Description of Artificial Sequence: Synthetic oligonucleotide
cucaaacugaacuacuugg

SEQ ID NO: 3233644 - RNA, 19 nt, Artificial Sequence
  Description of Artificial Sequence: Synthetic oligonucleotide
aaauuaauuucugaagcug

SEQ ID NO: 3233645 - RNA, 19 nt, Artificial Sequence
  Description of Artificial Sequence: Synthetic oligonucleotide
auuccaauuucacuuaaag

SEQ ID NO: 3233646 - RNA, 19 nt, Artificial Sequence
  Description of Artificial Sequence: Synthetic oligonucleotide
ucacuaaccucucugaaga

SEQ ID NO: 3233647 - RNA, 19 nt, Artificial Sequence
  Description of Artificial Sequence: Synthetic oligonucleotide
ucauuugauauaaaaccca

SEQ ID NO: 3233648 - RNA, 19 nt, Artificial Sequence
  Description of Artificial Sequence: Synthetic oligonucleotide
guaaaagacauaauauggg

SEQ ID NO: 3233649 - RNA, 19 nt, Artificial Sequence
  Description of Artificial Sequence: Synthetic oligonucleotide
aggacuauucgucucauag

SEQ ID NO: 3233650 - RNA, 19 nt, Artificial Sequence
  Description of Artificial Sequence: Synthetic oligonucleotide
aaaucccaucaccauuucc

SEQ ID NO: 3233651 - RNA, 19 nt, Artificial Sequence
  Description of Artificial Sequence: Synthetic oligonucleotide
uugcaauucagauaauggc

SEQ ID NO: 3233652 - RNA, 19 nt, Artificial Sequence
  Description of Artificial Sequence: Synthetic oligonucleotide
aacccacaacaauuaaagc

SEQ ID NO: 3233653 - RNA, 19 nt, Artificial Sequence
  Description of Artificial Sequence: Synthetic oligonucleotide
caauagaacacaucaauuc

SEQ ID NO: 3233654 - RNA, 19 nt, Artificial Sequence
  Description of Artificial Sequence: Synthetic oligonucleotide
aacacgcugucuugaaggc

SEQ ID NO: 3233655 - RNA, 19 nt, Artificial Sequence
  Description of Artificial Sequence: Synthetic oligonucleotide
accuauguaugugaaaacc

SEQ ID NO: 3233656 - RNA, 19 nt, Artificial Sequence
  Description of Artificial Sequence: Synthetic oligonucleotide
ucuuacuugacuuuaguuu

SEQ ID NO: 3233657 - RNA, 19 nt, Artificial Sequence
  Description of Artificial Sequence: Synthetic oligonucleotide
gaugauaacauguacuuua

SEQ ID NO: 3233658 - RNA, 19 nt, Artificial Sequence
  Description of Artificial Sequence: Synthetic oligonucleotide
uuugucuaaacacaccaaa

SEQ ID NO: 3233659 - RNA, 19 nt, Artificial Sequence
  Description of Artificial Sequence: Synthetic oligonucleotide
aacauaugguagucacacc

SEQ ID NO: 3233660 - RNA, 19 nt, Artificial Sequence
  Description of Artificial Sequence: Synthetic oligonucleotide
uaaagcaagucauacugca

SEQ ID NO: 3233661 - RNA, 19 nt, Artificial Sequence
  Description of Artificial Sequence: Synthetic oligonucleotide
cuaauuuuacaucaccaug

SEQ ID NO: 3233662 - RNA, 19 nt, Artificial Sequence
  Description of Artificial Sequence: Synthetic oligonucleotide
aaaacuuuuggggugggug

SEQ ID NO: 3233663 - RNA, 19 nt, Artificial Sequence
  Description of Artificial Sequence: Synthetic oligonucleotide
acauaugguagucacaccu

SEQ ID NO: 3233664 - RNA, 19 nt, Artificial Sequence
  Description of Artificial Sequence: Synthetic oligonucleotide
aaauuauguucacuaagaa

SEQ ID NO: 3233665 - RNA, 19 nt, Artificial Sequence
  Description of Artificial Sequence: Synthetic oligonucleotide
auaacuucuuaucaaauua

SEQ ID NO: 3233666 - RNA, 19 nt, Artificial Sequence
  Description of Artificial Sequence: Synthetic oligonucleotide
uaggcuauuugcaauucag

SEQ ID NO: 3233667 - RNA, 19 nt, Artificial Sequence
  Description of Artificial Sequence: Synthetic oligonucleotide
uuuguaucaggguguaucc

SEQ ID NO: 3233668 - RNA, 19 nt, Artificial Sequence
  Description of Artificial Sequence: Synthetic oligonucleotide
uuccuuugcuaaaaguuag

SEQ ID NO: 3233669 - RNA, 19 nt, Artificial Sequence
  Description of Artificial Sequence: Synthetic oligonucleotide
aauuacuuugcagguuccc

SEQ ID NO: 3233670 - RNA, 19 nt, Artificial Sequence
  Description of Artificial Sequence: Synthetic oligonucleotide
aagauaaucaugugaguua

SEQ ID NO: 3233671 - RNA, 19 nt, Artificial Sequence
  Description of Artificial Sequence: Synthetic oligonucleotide
ugcagccacaccaaaauca

SEQ ID NO: 3233672 - RNA, 19 nt, Artificial Sequence
  Description of Artificial Sequence: Synthetic oligonucleotide
acagguauauuauacugcu

SEQ ID NO: 3233673 - RNA, 19 nt, Artificial Sequence
  Description of Artificial Sequence: Synthetic oligonucleotide
aacacgcucccaucaaaac

SEQ ID NO: 3233674 - RNA, 19 nt, Artificial Sequence
  Description of Artificial Sequence: Synthetic oligonucleotide
auuuaucuauacuaugcca

SEQ ID NO: 3233675 - RNA, 19 nt, Artificial Sequence
  Description of Artificial Sequence: Synthetic oligonucleotide
ugagucaggagccuuucag

SEQ ID NO: 3233676 - RNA, 19 nt, Artificial Sequence
  Description of Artificial Sequence: Synthetic oligonucleotide
uccgauuugaagcuuuuac

SEQ ID NO: 3233677 - RNA, 19 nt, Artificial Sequence
  Description of Artificial Sequence: Synthetic oligonucleotide
acauaaguaaaagacauaa

SEQ ID NO: 3233678 - RNA, 19 nt, Artificial Sequence
  Description of Artificial Sequence: Synthetic oligonucleotide
aaaaccccaagauuacaca

SEQ ID NO: 3233679 - RNA, 19 nt, Artificial Sequence
  Description of Artificial Sequence: Synthetic oligonucleotide
uuagagguugaccugccug

SEQ ID NO: 3233680 - RNA, 19 nt, Artificial Sequence
  Description of Artificial Sequence: Synthetic oligonucleotide
auuacuuugcagguucccc

SEQ ID NO: 3233681 - RNA, 19 nt, Artificial Sequence
  Description of Artificial Sequence: Synthetic oligonucleotide
acuagcuguuuccagcuac

SEQ ID NO: 3233682 - RNA, 19 nt, Artificial Sequence
  Description of Artificial Sequence: Synthetic oligonucleotide
ucucaaacugaacuacuug

SEQ ID NO: 3233683 - RNA, 19 nt, Artificial Sequence
  Description of Artificial Sequence: Synthetic oligonucleotide
uaaagaugagauagguaca

SEQ ID NO: 3233684 - RNA, 19 nt, Artificial Sequence
  Description of Artificial Sequence: Synthetic oligonucleotide
ugaccauuuuguuuugucc

SEQ ID NO: 3233685 - RNA, 19 nt, Artificial Sequence
  Description of Artificial Sequence: Synthetic oligonucleotide
uaagauucaauguguaaau

SEQ ID NO: 3233686 - RNA, 19 nt, Artificial Sequence
  Description of Artificial Sequence: Synthetic oligonucleotide
aaaacauucaagggacuug

SEQ ID NO: 3233687 - RNA, 19 nt, Artificial Sequence
  Description of Artificial Sequence: Synthetic oligonucleotide
caaauuauguucacuaaga

SEQ ID NO: 3233688 - RNA, 19 nt, Artificial Sequence
  Description of Artificial Sequence: Synthetic oligonucleotide
uaagaaggaauaaggccug

SEQ ID NO: 3233689 - RNA, 19 nt, Artificial Sequence
  Description of Artificial Sequence: Synthetic oligonucleotide
uugcuaaaaguuagaaaca

SEQ ID NO: 3233690 - RNA, 19 nt, Artificial Sequence
  Description of Artificial Sequence: Synthetic oligonucleotide
uauaaccaccacacagugg

SEQ ID NO: 3233691 - RNA, 19 nt, Artificial Sequence
  Description of Artificial Sequence: Synthetic oligonucleotide
uuccuucugauaaugacau

SEQ ID NO: 3233692 - RNA, 19 nt, Artificial Sequence
  Description of Artificial Sequence: Synthetic oligonucleotide
uaugacgaaugauugcaug

SEQ ID NO: 3233693 - RNA, 19 nt, Artificial Sequence
  Description of Artificial Sequence: Synthetic oligonucleotide
aaggguuucuaacuaugca

SEQ ID NO: 3233694 - RNA, 19 nt, Artificial Sequence
  Description of Artificial Sequence: Synthetic oligonucleotide
auauaaccaccacacagug

SEQ ID NO: 3233695 - RNA, 19 nt, Artificial Sequence
  Description of Artificial Sequence: Synthetic oligonucleotide
ugaacaccuauguauguga

SEQ ID NO: 3233696 - RNA, 19 nt, Artificial Sequence
  Description of Artificial Sequence: Synthetic oligonucleotide
uuauuuccucauuggaaag

SEQ ID NO: 3233697 - RNA, 19 nt, Artificial Sequence
  Description of Artificial Sequence: Synthetic oligonucleotide
uugauuuucaaagggcagc

SEQ ID NO: 3233698 - RNA, 19 nt, Artificial Sequence
  Description of Artificial Sequence: Synthetic oligonucleotide
aaauuacuuugcagguucc

SEQ ID NO: 3233699 - RNA, 19 nt, Artificial Sequence
  Description of Artificial Sequence: Synthetic oligonucleotide
cuaagaaggaauaaggccu

SEQ ID NO: 3233700 - RNA, 19 nt, Artificial Sequence
  Description of Artificial Sequence: Synthetic oligonucleotide
aacccuacucacaaugaac

SEQ ID NO: 3233701 - RNA, 19 nt, Artificial Sequence
  Description of Artificial Sequence: Synthetic oligonucleotide
ugugccuuugcugauagcu

SEQ ID NO: 3233702 - RNA, 19 nt, Artificial Sequence
  Description of Artificial Sequence: Synthetic oligonucleotide
auaugguagucacaccuag

SEQ ID NO: 3233703 - RNA, 19 nt, Artificial Sequence
  Description of Artificial Sequence: Synthetic oligonucleotide
aauuucugaagcuguccgu

SEQ ID NO: 3233704 - RNA, 19 nt, Artificial Sequence
  Description of Artificial Sequence: Synthetic oligonucleotide
gauaaauaucuugaaguga

SEQ ID NO: 3233705 - RNA, 19 nt, Artificial Sequence
  Description of Artificial Sequence: Synthetic oligonucleotide
acaaaauguucacacauua

SEQ ID NO: 3233706 - RNA, 19 nt, Artificial Sequence
  Description of Artificial Sequence: Synthetic oligonucleotide
auucuauccuaauguacag

SEQ ID NO: 3233707 - RNA, 19 nt, Artificial Sequence
  Description of Artificial Sequence: Synthetic oligonucleotide
uguauaugggcagcuaacc

SEQ ID NO: 3233708 - RNA, 19 nt, Artificial Sequence
  Description of Artificial Sequence: Synthetic oligonucleotide
uucccuuaaaacacucuug

SEQ ID NO: 3233709 - RNA, 19 nt, Artificial Sequence
  Description of Artificial Sequence: Synthetic oligonucleotide
ugaugguagucccauuuca

SEQ ID NO: 3233710 - RNA, 19 nt, Artificial Sequence
  Description of Artificial Sequence: Synthetic oligonucleotide
uuaacccuacucacaauga

SEQ ID NO: 3233711 - RNA, 19 nt, Artificial Sequence
  Description of Artificial Sequence: Synthetic oligonucleotide
ugagauauaugaagauuaa

SEQ ID NO: 3233712 - RNA, 19 nt, Artificial Sequence
  Description of Artificial Sequence: Synthetic oligonucleotide
cuuauuuccucauuggaaa

SEQ ID NO: 3233713 - RNA, 19 nt, Artificial Sequence
  Description of Artificial Sequence: Synthetic oligonucleotide
ugcugauagcuacacaaac

SEQ ID NO: 3233714 - RNA, 19 nt, Artificial Sequence
  Description of Artificial Sequence: Synthetic oligonucleotide
augaccauuuuguuuuguc

SEQ ID NO: 3233715 - RNA, 19 nt, Artificial Sequence
  Description of Artificial Sequence: Synthetic oligonucleotide
agguacaugguuuuccugu

SEQ ID NO: 3233716 - RNA, 19 nt, Artificial Sequence
  Description of Artificial Sequence: Synthetic oligonucleotide
ugcugaaccccuaaacaca

SEQ ID NO: 3233717 - RNA, 19 nt, Artificial Sequence
  Description of Artificial Sequence: Synthetic oligonucleotide
aacugacuagcuuacaggc

SEQ ID NO: 3233718 - RNA, 19 nt, Artificial Sequence
  Description of Artificial Sequence: Synthetic oligonucleotide
aaaacaaagcgguagacca

SEQ ID NO: 3233719 - RNA, 19 nt, Artificial Sequence
  Description of Artificial Sequence: Synthetic oligonucleotide
aaagccgaaggccaggugc

SEQ ID NO: 3233720 - RNA, 19 nt, Artificial Sequence
  Description of Artificial Sequence: Synthetic oligonucleotide
aaagcgguagaccaucugc

SEQ ID NO: 3233721 - RNA, 19 nt, Artificial Sequence
  Description of Artificial Sequence: Synthetic oligonucleotide
ugggcaucaaaacaaagcg

SEQ ID NO: 3233722 - RNA, 19 nt, Artificial Sequence
  Description of Artificial Sequence: Synthetic oligonucleotide
aaaacugacuagcuuacag

SEQ ID NO: 3233723 - RNA, 19 nt, Artificial Sequence
  Description of Artificial Sequence: Synthetic oligonucleotide
aaacugacuagcuuacagg

SEQ ID NO: 3233724 - RNA, 19 nt, Artificial Sequence
  Description of Artificial Sequence: Synthetic oligonucleotide
acuggcguagcccaaagcc

SEQ ID NO: 3233725 - RNA, 19 nt, Artificial Sequence
  Description of Artificial Sequence: Synthetic oligonucleotide
uuaccaacggcacugaugu

SEQ ID NO: 3233726 - RNA, 19 nt, Artificial Sequence
  Description of Artificial Sequence: Synthetic oligonucleotide
gaaggauuucagcacaugg

SEQ ID NO: 3233727 - RNA, 19 nt, Artificial Sequence
  Description of Artificial Sequence: Synthetic oligonucleotide
aaagcaggucauuaccaac

SEQ ID NO: 3233728 - RNA, 19 nt, Artificial Sequence
  Description of Artificial Sequence: Synthetic oligonucleotide
agaugcaaaacugacuagc

SEQ ID NO: 3233729 - RNA, 19 nt, Artificial Sequence
  Description of Artificial Sequence: Synthetic oligonucleotide
uugggcaucaaaacaaagc

SEQ ID NO: 3233730 - RNA, 19 nt, Artificial Sequence
  Description of Artificial Sequence: Synthetic oligonucleotide
acugaugucguguccacac

SEQ ID NO: 3233731 - RNA, 19 nt, Artificial Sequence
  Description of Artificial Sequence: Synthetic oligonucleotide
aagcaucuccaccugugcc

SEQ ID NO: 3233732 - RNA, 19 nt, Artificial Sequence
  Description of Artificial Sequence: Synthetic oligonucleotide
cugacuagcuuacaggccg

SEQ ID NO: 3233733 - RNA, 19 nt, Artificial Sequence
  Description of Artificial Sequence: Synthetic oligonucleotide
aaggccaggugcuggaaac

SEQ ID NO: 3233734 - RNA, 19 nt, Artificial Sequence
  Description of Artificial Sequence: Synthetic oligonucleotide
ugcaaaacugacuagcuua

SEQ ID NO: 3233735 - RNA, 19 nt, Artificial Sequence
  Description of Artificial Sequence: Synthetic oligonucleotide
uuacaggccggaaagugag

SEQ ID NO: 3233736 - RNA, 19 nt, Artificial Sequence
  Description of Artificial Sequence: Synthetic oligonucleotide
acuccuuuuccucuccagc

SEQ ID NO: 3233737 - RNA, 19 nt, Artificial Sequence
  Description of Artificial Sequence: Synthetic oligonucleotide
aggauuucagcacauggug

SEQ ID NO: 3233738 - RNA, 19 nt, Artificial Sequence
  Description of Artificial Sequence: Synthetic oligonucleotide
aagcaggucauuaccaacg

SEQ ID NO: 3233739 - RNA, 19 nt, Artificial Sequence
  Description of Artificial Sequence: Synthetic oligonucleotide
aacaaagcgguagaccauc

SEQ ID NO: 3233740 - RNA, 19 nt, Artificial Sequence
  Description of Artificial Sequence: Synthetic oligonucleotide
uagcuuacaggccggaaag

SEQ ID NO: 3233741 - RNA, 19 nt, Artificial Sequence
  Description of Artificial Sequence: Synthetic oligonucleotide
accuugaaggauuucagca

SEQ ID NO: 3233742 - RNA, 19 nt, Artificial Sequence
  Description of Artificial Sequence: Synthetic oligonucleotide
ugaacaucuggguuucgag

SEQ ID NO: 3233743 - RNA, 19 nt, Artificial Sequence
  Description of Artificial Sequence: Synthetic oligonucleotide
gauuucagcacauggugca

SEQ ID NO: 3233744 - RNA, 19 nt, Artificial Sequence
  Description of Artificial Sequence: Synthetic oligonucleotide
caucaaaacaaagcgguag

SEQ ID NO: 3233745 - RNA, 19 nt, Artificial Sequence
  Description of Artificial Sequence: Synthetic oligonucleotide
gaacaucuggguuucgagc

SEQ ID NO: 3233746 - RNA, 19 nt, Artificial Sequence
  Description of Artificial Sequence: Synthetic oligonucleotide
aggagaagcaucuccaccu

SEQ ID NO: 3233747 - RNA, 19 nt, Artificial Sequence
  Description of Artificial Sequence: Synthetic oligonucleotide
accaacggcacugaugucg

SEQ ID NO: 3233748 - RNA, 19 nt, Artificial Sequence
  Description of Artificial Sequence: Synthetic oligonucleotide
aucaaaacaaagcgguaga

SEQ ID NO: 3233749 - RNA, 19 nt, Artificial Sequence
  Description of Artificial Sequence: Synthetic oligonucleotide
cuagaugcaaaacugacua

SEQ ID NO: 3233750 - RNA, 19 nt, Artificial Sequence
  Description of Artificial Sequence: Synthetic oligonucleotide
caaaacaaagcgguagacc

SEQ ID NO: 3233751 - RNA, 19 nt, Artificial Sequence
  Description of Artificial Sequence: Synthetic oligonucleotide
ugcagcaggagaagcaucu

SEQ ID NO: 3233752 - RNA, 19 nt, Artificial Sequence
  Description of Artificial Sequence: Synthetic oligonucleotide
uuccucuccagccagcgcu

SEQ ID NO: 3233753 - RNA, 19 nt, Artificial Sequence
  Description of Artificial Sequence: Synthetic oligonucleotide
cgugucuccaccuugaagg

SEQ ID NO: 3233754 - RNA, 19 nt, Artificial Sequence
  Description of Artificial Sequence: Synthetic oligonucleotide
aacuccuuuuccucuccag

SEQ ID NO: 3233755 - RNA, 19 nt, Artificial Sequence
  Description of Artificial Sequence: Synthetic oligonucleotide
agaccaucugcacauccuc

SEQ ID NO: 3233756 - RNA, 19 nt, Artificial Sequence
  Description of Artificial Sequence: Synthetic oligonucleotide
aaggauuucagcacauggu

SEQ ID NO: 3233757 - RNA, 19 nt, Artificial Sequence
  Description of Artificial Sequence: Synthetic oligonucleotide
ugcuggaaacuccuuuucc

SEQ ID NO: 3233758 - RNA, 19 nt, Artificial Sequence
  Description of Artificial Sequence: Synthetic oligonucleotide
cuccuuuuccucuccagcc

SEQ ID NO: 3233759 - RNA, 19 nt, Artificial Sequence
  Description of Artificial Sequence: Synthetic oligonucleotide
uggaguugggcaucaaaac

SEQ ID NO: 3233760 - RNA, 19 nt, Artificial Sequence
  Description of Artificial Sequence: Synthetic oligonucleotide
uccaccuugaaggauuuca

SEQ ID NO: 3233761 - RNA, 19 nt, Artificial Sequence
  Description of Artificial Sequence: Synthetic oligonucleotide
gucauuaccaacggcacug

SEQ ID NO: 3233762 - RNA, 19 nt, Artificial Sequence
  Description of Artificial Sequence: Synthetic oligonucleotide
caggucauuaccaacggca

SEQ ID NO: 3233763 - RNA, 19 nt, Artificial Sequence
  Description of Artificial Sequence: Synthetic oligonucleotide
uccaccugugccaagcgcu

SEQ ID NO: 3233764 - RNA, 19 nt, Artificial Sequence
  Description of Artificial Sequence: Synthetic oligonucleotide
uuuuccucuccagccagcg

SEQ ID NO: 3233765 - RNA, 19 nt, Artificial Sequence
  Description of Artificial Sequence: Synthetic oligonucleotide
ugccugcugaacaucuggg

SEQ ID NO: 3233766 - RNA, 19 nt, Artificial Sequence
  Description of Artificial Sequence: Synthetic oligonucleotide
gacccuagaugcaaaacug

SEQ ID NO: 3233767 - RNA, 19 nt, Artificial Sequence
  Description of Artificial Sequence: Synthetic oligonucleotide
agcaggucauuaccaacgg

SEQ ID NO: 3233768 - RNA, 19 nt, Artificial Sequence
  Description of Artificial Sequence: Synthetic oligonucleotide
uagaugcaaaacugacuag

SEQ ID NO: 3233769 - RNA, 19 nt, Artificial Sequence
  Description of Artificial Sequence: Synthetic oligonucleotide
cagcacauggugcagcagg

SEQ ID NO: 3233770 - RNA, 19 nt, Artificial Sequence
  Description of Artificial Sequence: Synthetic oligonucleotide
uggaaacuccuuuuccucu

SEQ ID NO: 3233771 - RNA, 19 nt, Artificial Sequence
  Description of Artificial Sequence: Synthetic oligonucleotide
cuggcguagcccaaagccg

SEQ ID NO: 3233772 - RNA, 19 nt, Artificial Sequence
  Description of Artificial Sequence: Synthetic oligonucleotide
ucaaaacaaagcgguagac

SEQ ID NO: 3233773 - RNA, 19 nt, Artificial Sequence
  Description of Artificial Sequence: Synthetic oligonucleotide
ugugccaagcgcuucccca

SEQ ID NO: 3233774 - RNA, 19 nt, Artificial Sequence
  Description of Artificial Sequence: Synthetic oligonucleotide
gaagcaucuccaccugugc

SEQ ID NO: 3233775 - RNA, 19 nt, Artificial Sequence
  Description of Artificial Sequence: Synthetic oligonucleotide
acugacuagcuuacaggcc

SEQ ID NO: 3233776 - RNA, 19 nt, Artificial Sequence
  Description of Artificial Sequence: Synthetic oligonucleotide
accugugccaagcgcuucc

SEQ ID NO: 3233777 - RNA, 19 nt, Artificial Sequence
  Description of Artificial Sequence: Synthetic oligonucleotide
agcgguagaccaucugcac

SEQ ID NO: 3233778 - RNA, 19 nt, Artificial Sequence
  Description of Artificial Sequence: Synthetic oligonucleotide
ugacuagcuuacaggccgg

SEQ ID NO: 3233779 - RNA, 19 nt, Artificial Sequence
  Description of Artificial Sequence: Synthetic oligonucleotide
aucuccaccugugccaagc

SEQ ID NO: 3233780 - RNA, 19 nt, Artificial Sequence
  Description of Artificial Sequence: Synthetic oligonucleotide
uagaccaucugcacauccu

SEQ ID NO: 3233781 - RNA, 19 nt, Artificial Sequence
  Description of Artificial Sequence: Synthetic oligonucleotide
cuugaaggauuucagcaca

SEQ ID NO: 3233782 - RNA, 19 nt, Artificial Sequence
  Description of Artificial Sequence: Synthetic oligonucleotide
gaaacuccuuuuccucucc

SEQ ID NO: 3233783 - RNA, 19 nt, Artificial Sequence
  Description of Artificial Sequence: Synthetic oligonucleotide
uccuuuuccucuccagcca

SEQ ID NO: 3233784 - RNA, 19 nt, Artificial Sequence
  Description of Artificial Sequence: Synthetic oligonucleotide
auuaccaacggcacugaug

SEQ ID NO: 3233785 - RNA, 19 nt, Artificial Sequence
  Description of Artificial Sequence: Synthetic oligonucleotide
agcaucuccaccugugcca

SEQ ID NO: 3233786 - RNA, 19 nt, Artificial Sequence
  Description of Artificial Sequence: Synthetic oligonucleotide
uggcguagcccaaagccga

SEQ ID NO: 3233787 - RNA, 19 nt, Artificial Sequence
  Description of Artificial Sequence: Synthetic oligonucleotide
ucgugucuccaccuugaag

SEQ ID NO: 3233788 - RNA, 19 nt, Artificial Sequence
  Description of Artificial Sequence: Synthetic oligonucleotide
ucucgugucuccaccuuga

SEQ ID NO: 3233789 - RNA, 19 nt, Artificial Sequence
  Description of Artificial Sequence: Synthetic oligonucleotide
uucagcacauggugcagca

SEQ ID NO: 3233790 - RNA, 19 nt, Artificial Sequence
  Description of Artificial Sequence: Synthetic oligonucleotide
gugccugcugaacaucugg

SEQ ID NO: 3233791 - RNA, 19 nt, Artificial Sequence
  Description of Artificial Sequence: Synthetic oligonucleotide
caccuugaaggauuucagc

SEQ ID NO: 3233792 - RNA, 19 nt, Artificial Sequence
  Description of Artificial Sequence: Synthetic oligonucleotide
guagaccaucugcacaucc

SEQ ID NO: 3233793 - RNA, 19 nt, Artificial Sequence
  Description of Artificial Sequence: Synthetic oligonucleotide
uagcccaaagccgaaggcc

SEQ ID NO: 3233794 - RNA, 19 nt, Artificial Sequence
  Description of Artificial Sequence: Synthetic oligonucleotide
aacggcacugaugucgugu

SEQ ID NO: 3233795 - RNA, 19 nt, Artificial Sequence
  Description of Artificial Sequence: Synthetic oligonucleotide
auccucuugcucucguguc

SEQ ID NO: 3233796 - RNA, 19 nt, Artificial Sequence
  Description of Artificial Sequence: Synthetic oligonucleotide
cuggaaacuccuuuuccuc

SEQ ID NO: 3233797 - RNA, 19 nt, Artificial Sequence
  Description of Artificial Sequence: Synthetic oligonucleotide
aggucauuaccaacggcac

SEQ ID NO: 3233798 - RNA, 19 nt, Artificial Sequence
  Description of Artificial Sequence: Synthetic oligonucleotide
aggccggaaagugaggagg

SEQ ID NO: 3233799 - RNA, 19 nt, Artificial Sequence
  Description of Artificial Sequence: Synthetic oligonucleotide
ucuccaccugugccaagcg

SEQ ID NO: 3233800 - RNA, 19 nt, Artificial Sequence
  Description of Artificial Sequence: Synthetic oligonucleotide
caucugcacauccucuugc

SEQ ID NO: 3233801 - RNA, 19 nt, Artificial Sequence
  Description of Artificial Sequence: Synthetic oligonucleotide
caggagaagcaucuccacc

SEQ ID NO: 3233802 - RNA, 19 nt, Artificial Sequence
  Description of Artificial Sequence: Synthetic oligonucleotide
gaguugggcaucaaaacaa

SEQ ID NO: 3233803 - RNA, 19 nt, Artificial Sequence
  Description of Artificial Sequence: Synthetic oligonucleotide
auggugcagcaggagaagc

SEQ ID NO: 3233804 - RNA, 19 nt, Artificial Sequence
  Description of Artificial Sequence: Synthetic oligonucleotide
aaacuccuuuuccucucca

SEQ ID NO: 3233805 - RNA, 19 nt, Artificial Sequence
  Description of Artificial Sequence: Synthetic oligonucleotide
ucuccagccagcgcugggg

SEQ ID NO: 3233806 - RNA, 19 nt, Artificial Sequence
  Description of Artificial Sequence: Synthetic oligonucleotide
cagcaggagaagcaucucc

SEQ ID NO: 3233807 - RNA, 19 nt, Artificial Sequence
  Description of Artificial Sequence: Synthetic oligonucleotide
cuuacaggccggaaaguga

SEQ ID NO: 3233808 - RNA, 19 nt, Artificial Sequence
  Description of Artificial Sequence: Synthetic oligonucleotide
uuucagcacauggugcagc

SEQ ID NO: 3233809 - RNA, 19 nt, Artificial Sequence
  Description of Artificial Sequence: Synthetic oligonucleotide
acggcacugaugucguguc

SEQ ID NO: 3233810 - RNA, 19 nt, Artificial Sequence
  Description of Artificial Sequence: Synthetic oligonucleotide
cuggaguugggcaucaaaa

SEQ ID NO: 3233811 - RNA, 19 nt, Artificial Sequence
  Description of Artificial Sequence: Synthetic oligonucleotide
uugaaggauuucagcacau

SEQ ID NO: 3233812 - RNA, 19 nt, Artificial Sequence
  Description of Artificial Sequence: Synthetic oligonucleotide
aagcgguagaccaucugca

SEQ ID NO: 3233813 - RNA, 19 nt, Artificial Sequence
  Description of Artificial Sequence: Synthetic oligonucleotide
ugaaggauuucagcacaug

SEQ ID NO: 3233814 - RNA, 19 nt, Artificial Sequence
  Description of Artificial Sequence: Synthetic oligonucleotide
uacaggccggaaagugagg

SEQ ID NO: 3233815 - RNA, 19 nt, Artificial Sequence
  Description of Artificial Sequence: Synthetic oligonucleotide
ggaguugggcaucaaaaca

SEQ ID NO: 3233816 - RNA, 19 nt, Artificial Sequence
  Description of Artificial Sequence: Synthetic oligonucleotide
uccucuugcucucgugucu

SEQ ID NO: 3233817 - RNA, 19 nt, Artificial Sequence
  Description of Artificial Sequence: Synthetic oligonucleotide
uuuacaauaaacuucagga

SEQ ID NO: 3233818 - RNA, 19 nt, Artificial Sequence
  Description of Artificial Sequence: Synthetic oligonucleotide
uguuagauaaacaugaaga

SEQ ID NO: 3233819 - RNA, 19 nt, Artificial Sequence
  Description of Artificial Sequence: Synthetic oligonucleotide
uuuaaauagaucauaauaa

SEQ ID NO: 3233820 - RNA, 19 nt, Artificial Sequence
  Description of Artificial Sequence: Synthetic oligonucleotide
aaaguuaaaagaacuaggc

SEQ ID NO: 3233821 - RNA, 19 nt, Artificial Sequence
  Description of Artificial Sequence: Synthetic oligonucleotide
uacauuuugacauauuuag

SEQ ID NO: 3233822 - RNA, 19 nt, Artificial Sequence
  Description of Artificial Sequence: Synthetic oligonucleotide
aauagaucauaauaaaacu

SEQ ID NO: 3233823 - RNA, 19 nt, Artificial Sequence
  Description of Artificial Sequence: Synthetic oligonucleotide
aauggauugauccaucaag

SEQ ID NO: 3233824 - RNA, 19 nt, Artificial Sequence
  Description of Artificial Sequence: Synthetic oligonucleotide
uuaggauuuauaaauagga

SEQ ID NO: 3233825 - RNA, 19 nt, Artificial Sequence
  Description of Artificial Sequence: Synthetic oligonucleotide
uugacugauaaaaggaugg

SEQ ID NO: 3233826 - RNA, 19 nt, Artificial Sequence
  Description of Artificial Sequence: Synthetic oligonucleotide
uuauccguagccaugauug

SEQ ID NO: 3233827 - RNA, 19 nt, Artificial Sequence
  Description of Artificial Sequence: Synthetic oligonucleotide
ucuaaauuucuuuuggcag

SEQ ID NO: 3233828 - RNA, 19 nt, Artificial Sequence
  Description of Artificial Sequence: Synthetic oligonucleotide
aggauuuauaaauaggaag

SEQ ID NO: 3233829 - RNA, 19 nt, Artificial Sequence
  Description of Artificial Sequence: Synthetic oligonucleotide
ugaauaagaaaguuugugc

SEQ ID NO: 3233830 - RNA, 19 nt, Artificial Sequence
  Description of Artificial Sequence: Synthetic oligonucleotide
uagucaagaaaucggagcg

SEQ ID NO: 3233831 - RNA, 19 nt, Artificial Sequence
  Description of Artificial Sequence: Synthetic oligonucleotide
ugaguauccauucuucucc

SEQ ID NO: 3233832 - RNA, 19 nt, Artificial Sequence
  Description of Artificial Sequence: Synthetic oligonucleotide
uccuccaucacuuacauuc

SEQ ID NO: 3233833 - RNA, 19 nt, Artificial Sequence
  Description of Artificial Sequence: Synthetic oligonucleotide
uuuauaagagagucaauca

SEQ ID NO: 3233834 - RNA, 19 nt, Artificial Sequence
  Description of Artificial Sequence: Synthetic oligonucleotide
gauaaacaugaagagacgg

SEQ ID NO: 3233835 - RNA, 19 nt, Artificial Sequence
  Description of Artificial Sequence: Synthetic oligonucleotide
uguaggaagaacuccagug

SEQ ID NO: 3233836 - RNA, 19 nt, Artificial Sequence
  Description of Artificial Sequence: Synthetic oligonucleotide
ucaggaauaaguauauuaa

SEQ ID NO: 3233837 - RNA, 19 nt, Artificial Sequence
  Description of Artificial Sequence: Synthetic oligonucleotide
guuaauagcuauuagaaua

SEQ ID NO: 3233838 - RNA, 19 nt, Artificial Sequence
  Description of Artificial Sequence: Synthetic oligonucleotide
gagguaaaugaauggaggg

SEQ ID NO: 3233839 - RNA, 19 nt, Artificial Sequence
  Description of Artificial Sequence: Synthetic oligonucleotide
acauaaaucaucaaagucu

SEQ ID NO: 3233840 - RNA, 19 nt, Artificial Sequence
  Description of Artificial Sequence: Synthetic oligonucleotide
uacauaaaucaucaaaguc

SEQ ID NO: 3233841 - RNA, 19 nt, Artificial Sequence
  Description of Artificial Sequence: Synthetic oligonucleotide
uaauaaaacuuucuaaauu

SEQ ID NO: 3233842 - RNA, 19 nt, Artificial Sequence
  Description of Artificial Sequence: Synthetic oligonucleotide
agguaagcuacauaaauca

SEQ ID NO: 3233843 - RNA, 19 nt, Artificial Sequence
  Description of Artificial Sequence: Synthetic oligonucleotide
uuuccaucauccuucggcg

SEQ ID NO: 3233844 - RNA, 19 nt, Artificial Sequence
  Description of Artificial Sequence: Synthetic oligonucleotide
cuuuccaucauccuucggc

SEQ ID NO: 3233845 - RNA, 19 nt, Artificial Sequence
  Description of Artificial Sequence: Synthetic oligonucleotide
agagugagaagcuugguca

SEQ ID NO: 3233846 - RNA, 19 nt, Artificial Sequence
  Description of Artificial Sequence: Synthetic oligonucleotide
auugucccaggauauauuc

SEQ ID NO: 3233847 - RNA, 19 nt, Artificial Sequence
  Description of Artificial Sequence: Synthetic oligonucleotide
auauaugugggguucaagu

SEQ ID NO: 3233848 - RNA, 19 nt, Artificial Sequence
  Description of Artificial Sequence: Synthetic oligonucleotide
uacauguucaggacuaggc

SEQ ID NO: 3233849 - RNA, 19 nt, Artificial Sequence
  Description of Artificial Sequence: Synthetic oligonucleotide
uuugcgcugaagcauagca

SEQ ID NO: 3233850 - RNA, 19 nt, Artificial Sequence
  Description of Artificial Sequence: Synthetic oligonucleotide
ucuauaacacucaugcaau

SEQ ID NO: 3233851 - RNA, 19 nt, Artificial Sequence
  Description of Artificial Sequence: Synthetic oligonucleotide
uggagguaaaugaauggag

SEQ ID NO: 3233852 - RNA, 19 nt, Artificial Sequence
  Description of Artificial Sequence: Synthetic oligonucleotide
guaggaagaacuccagugg

SEQ ID NO: 3233853 - RNA, 19 nt, Artificial Sequence
  Description of Artificial Sequence: Synthetic oligonucleotide
uggguuaauagcuauuaga

SEQ ID NO: 3233854 - RNA, 19 nt, Artificial Sequence
  Description of Artificial Sequence: Synthetic oligonucleotide
aauaagaaaguuugugcuu

SEQ ID NO: 3233855 - RNA, 19 nt, Artificial Sequence
  Description of Artificial Sequence: Synthetic oligonucleotide
uaagcuacaucugccaccg

SEQ ID NO: 3233856 - RNA, 19 nt, Artificial Sequence
  Description of Artificial Sequence: Synthetic oligonucleotide
gauucuuugagagauugac

SEQ ID NO: 3233857 - RNA, 19 nt, Artificial Sequence
  Description of Artificial Sequence: Synthetic oligonucleotide
uuuuggauauacagagaag

SEQ ID NO: 3233858 - RNA, 19 nt, Artificial Sequence
  Description of Artificial Sequence: Synthetic oligonucleotide
caaaccaucuucuuaggac

SEQ ID NO: 3233859 - RNA, 19 nt, Artificial Sequence
  Description of Artificial Sequence: Synthetic oligonucleotide
acaucauucguugaacugg

SEQ ID NO: 3233860 - RNA, 19 nt, Artificial Sequence
  Description of Artificial Sequence: Synthetic oligonucleotide
uggauauacagagaagaag

SEQ ID NO: 3233861 - RNA, 19 nt, Artificial Sequence
  Description of Artificial Sequence: Synthetic oligonucleotide
gauauugucuuucggugug

SEQ ID NO: 3233862 - RNA, 19 nt, Artificial Sequence
  Description of Artificial Sequence: Synthetic oligonucleotide
uucaaguaguucuugauuu

SEQ ID NO: 3233863 - RNA, 19 nt, Artificial Sequence
  Description of Artificial Sequence: Synthetic oligonucleotide
uuucguaacuugcuugaag

SEQ ID NO: 3233864 - RNA, 19 nt, Artificial Sequence
  Description of Artificial Sequence: Synthetic oligonucleotide
ucuuuuguggcaagaguug

SEQ ID NO: 3233865 - RNA, 19 nt, Artificial Sequence
  Description of Artificial Sequence: Synthetic oligonucleotide
auuuuccaaagccauccgg

SEQ ID NO: 3233866 - RNA, 19 nt, Artificial Sequence
  Description of Artificial Sequence: Synthetic oligonucleotide
aacuaggcauacuauacau

SEQ ID NO: 3233867 - RNA, 19 nt, Artificial Sequence
  Description of Artificial Sequence: Synthetic oligonucleotide
gaauaagaaaguuugugcu

SEQ ID NO: 3233868 - RNA, 19 nt, Artificial Sequence
  Description of Artificial Sequence: Synthetic oligonucleotide
agaucuguggccauaagag

SEQ ID NO: 3233869 - RNA, 19 nt, Artificial Sequence
  Description of Artificial Sequence: Synthetic oligonucleotide
cauagcgucgucuuccucc

SEQ ID NO: 3233870 - RNA, 19 nt, Artificial Sequence
  Description of Artificial Sequence: Synthetic oligonucleotide
agggacuaucuuuuguggc

SEQ ID NO: 3233871 - RNA, 19 nt, Artificial Sequence
  Description of Artificial Sequence: Synthetic oligonucleotide
augaauaagaaaguuugug

SEQ ID NO: 3233872 - RNA, 19 nt, Artificial Sequence
  Description of Artificial Sequence: Synthetic oligonucleotide
ucuuucuguaauucgauua

SEQ ID NO: 3233873 - RNA, 19 nt, Artificial Sequence
  Description of Artificial Sequence: Synthetic oligonucleotide
ugaaauugucccaggauau

SEQ ID NO: 3233874 - RNA, 19 nt, Artificial Sequence
  Description of Artificial Sequence: Synthetic oligonucleotide
gagacuuggaauaaaucug

SEQ ID NO: 3233875 - RNA, 19 nt, Artificial Sequence
  Description of Artificial Sequence: Synthetic oligonucleotide
auuacauggucacauggga

SEQ ID NO: 3233876 - RNA, 19 nt, Artificial Sequence
  Description of Artificial Sequence: Synthetic oligonucleotide
ucuggcaaccucucguugg

SEQ ID NO: 3233877 - RNA, 19 nt, Artificial Sequence
  Description of Artificial Sequence: Synthetic oligonucleotide
aaacuucaggaauaaguau

SEQ ID NO: 3233878 - RNA, 19 nt, Artificial Sequence
  Description of Artificial Sequence: Synthetic oligonucleotide
ucugacugagggcaguaag

SEQ ID NO: 3233879 - RNA, 19 nt, Artificial Sequence
  Description of Artificial Sequence: Synthetic oligonucleotide
aaaguguucucuuucugua

SEQ ID NO: 3233880 - RNA, 19 nt, Artificial Sequence
  Description of Artificial Sequence: Synthetic oligonucleotide
ucgauuauuagagaguuua

SEQ ID NO: 3233881 - RNA, 19 nt, Artificial Sequence
  Description of Artificial Sequence: Synthetic oligonucleotide
uaggauuuauaaauaggaa

SEQ ID NO: 3233882 - RNA, 19 nt, Artificial Sequence
  Description of Artificial Sequence: Synthetic oligonucleotide
uuagagaguuuacaggcaa

SEQ ID NO: 3233883 - RNA, 19 nt, Artificial Sequence
  Description of Artificial Sequence: Synthetic oligonucleotide
uauccauucuucuccacca

SEQ ID NO: 3233884 - RNA, 19 nt, Artificial Sequence
  Description of Artificial Sequence: Synthetic oligonucleotide
aaucggagcgcguccgcgc

SEQ ID NO: 3233885 - RNA, 19 nt, Artificial Sequence
  Description of Artificial Sequence: Synthetic oligonucleotide
acuagcaaauccuuucuga

SEQ ID NO: 3233886 - RNA, 19 nt, Artificial Sequence
  Description of Artificial Sequence: Synthetic oligonucleotide
aggaauaaguauauuaaca

SEQ ID NO: 3233887 - RNA, 19 nt, Artificial Sequence
  Description of Artificial Sequence: Synthetic oligonucleotide
caacuggugguuaucauac

SEQ ID NO: 3233888 - RNA, 19 nt, Artificial Sequence
  Description of Artificial Sequence: Synthetic oligonucleotide
uccacugugauauugucuu

SEQ ID NO: 3233889 - RNA, 19 nt, Artificial Sequence
  Description of Artificial Sequence: Synthetic oligonucleotide
gagggacuaucuuuugugg

SEQ ID NO: 3233890 - RNA, 19 nt, Artificial Sequence
  Description of Artificial Sequence: Synthetic oligonucleotide
aauuucuuuuggcagcuuu

SEQ ID NO: 3233891 - RNA, 19 nt, Artificial Sequence
  Description of Artificial Sequence: Synthetic oligonucleotide
guaugugaguacuuguagc

SEQ ID NO: 3233892 - RNA, 19 nt, Artificial Sequence
  Description of Artificial Sequence: Synthetic oligonucleotide
uuggcagcuuucuauaaca

SEQ ID NO: 3233893 - RNA, 19 nt, Artificial Sequence
  Description of Artificial Sequence: Synthetic oligonucleotide
uaucuuuuguggcaagagu

SEQ ID NO: 3233894 - RNA, 19 nt, Artificial Sequence
  Description of Artificial Sequence: Synthetic oligonucleotide
gaaauuuugaauggguuaa

SEQ ID NO: 3233895 - RNA, 19 nt, Artificial Sequence
  Description of Artificial Sequence: Synthetic oligonucleotide
ucuuucggugugaagaaaa

SEQ ID NO: 3233896 - RNA, 19 nt, Artificial Sequence
  Description of Artificial Sequence: Synthetic oligonucleotide
ucuauucuuugucuugacu

SEQ ID NO: 3233897 - RNA, 19 nt, Artificial Sequence
  Description of Artificial Sequence: Synthetic oligonucleotide
ugaaggcucagacuuggca

SEQ ID NO: 3233898 - RNA, 19 nt, Artificial Sequence
  Description of Artificial Sequence: Synthetic oligonucleotide
caggaauaaguauauuaac

SEQ ID NO: 3233899 - RNA, 19 nt, Artificial Sequence
  Description of Artificial Sequence: Synthetic oligonucleotide
uugucccaggauauauucg

SEQ ID NO: 3233900 - RNA, 19 nt, Artificial Sequence
  Description of Artificial Sequence: Synthetic oligonucleotide
ucugaaauugucccaggau

SEQ ID NO: 3233901 - RNA, 19 nt, Artificial Sequence
  Description of Artificial Sequence: Synthetic oligonucleotide
aauaaaucugaaaucgcuu

SEQ ID NO: 3233902 - RNA, 19 nt, Artificial Sequence
  Description of Artificial Sequence: Synthetic oligonucleotide
uaugaugggugccuauucu

SEQ ID NO: 3233903 - RNA, 19 nt, Artificial Sequence
  Description of Artificial Sequence: Synthetic oligonucleotide
ugagaagcuuggucaaggg

SEQ ID NO: 3233904 - RNA, 19 nt, Artificial Sequence
  Description of Artificial Sequence: Synthetic oligonucleotide
ggaauaaguauauuaacaa

SEQ ID NO: 3233905 - RNA, 19 nt, Artificial Sequence
  Description of Artificial Sequence: Synthetic oligonucleotide
uuggauugaguauccauuc

SEQ ID NO: 3233906 - RNA, 19 nt, Artificial Sequence
  Description of Artificial Sequence: Synthetic oligonucleotide
ugauuggaggcuaccauaa

SEQ ID NO: 3233907 - RNA, 19 nt, Artificial Sequence
  Description of Artificial Sequence: Synthetic oligonucleotide
uuggauauacagagaagaa

SEQ ID NO: 3233908 - RNA, 19 nt, Artificial Sequence
  Description of Artificial Sequence: Synthetic oligonucleotide
auugaguauccauucuucu

SEQ ID NO: 3233909 - RNA, 19 nt, Artificial Sequence
  Description of Artificial Sequence: Synthetic oligonucleotide
uuucacacucuuuaguuuu

SEQ ID NO: 3233910 - RNA, 19 nt, Artificial Sequence
  Description of Artificial Sequence: Synthetic oligonucleotide
ucuuugguuucugagguga

SEQ ID NO: 3233911 - RNA, 19 nt, Artificial Sequence
  Description of Artificial Sequence: Synthetic oligonucleotide
aucacaauacacugauucu

SEQ ID NO: 3233912 - RNA, 19 nt, Artificial Sequence
  Description of Artificial Sequence: Synthetic oligonucleotide
ucucuuuuagugacugcug

SEQ ID NO: 3233913 - RNA, 19 nt, Artificial Sequence
  Description of Artificial Sequence: Synthetic oligonucleotide
aaucuguucuacuccacua

SEQ ID NO: 3233914 - RNA, 19 nt, Artificial Sequence
  Description of Artificial Sequence: Synthetic oligonucleotide
ggugaagucuauuuauaag

SEQ ID NO: 3233915 - RNA, 19 nt, Artificial Sequence
  Description of Artificial Sequence: Synthetic oligonucleotide
ugugaguacuuguagcgaa

SEQ ID NO: 3233916 - RNA, 19 nt, Artificial Sequence
  Description of Artificial Sequence: Synthetic oligonucleotide
gacuaggcaaaccaucuuc

SEQ ID NO: 3233917 - RNA, 19 nt, Artificial Sequence
  Description of Artificial Sequence: Synthetic oligonucleotide
auucuugucaccuuguagc

SEQ ID NO: 3233918 - RNA, 19 nt, Artificial Sequence
  Description of Artificial Sequence: Synthetic oligonucleotide
aaugaacagcugcagaccg

SEQ ID NO: 3233919 - RNA, 19 nt, Artificial Sequence
  Description of Artificial Sequence: Synthetic oligonucleotide
ugugacaaaggugaaaacg

SEQ ID NO: 3233920 - RNA, 19 nt, Artificial Sequence
  Description of Artificial Sequence: Synthetic oligonucleotide
uuaaugaacagcugcagac

SEQ ID NO: 3233921 - RNA, 19 nt, Artificial Sequence
  Description of Artificial Sequence: Synthetic oligonucleotide
aucucugcauuucugagac

SEQ ID NO: 3233922 - RNA, 19 nt, Artificial Sequence
  Description of Artificial Sequence: Synthetic oligonucleotide
aacggcagacaccagaaag

SEQ ID NO: 3233923 - RNA, 19 nt, Artificial Sequence
  Description of Artificial Sequence: Synthetic oligonucleotide
ugagacuccauucuuguca

SEQ ID NO: 3233924 - RNA, 19 nt, Artificial Sequence
  Description of Artificial Sequence: Synthetic oligonucleotide
aacagcugcagaccgaaag

SEQ ID NO: 3233925 - RNA, 19 nt, Artificial Sequence
  Description of Artificial Sequence: Synthetic oligonucleotide
uguagcuggccacagaccc

SEQ ID NO: 3233926 - RNA, 19 nt, Artificial Sequence
  Description of Artificial Sequence: Synthetic oligonucleotide
agaaaguuccacuggacag

SEQ ID NO: 3233927 - RNA, 19 nt, Artificial Sequence
  Description of Artificial Sequence: Synthetic oligonucleotide
uccaggaagagccagagau

SEQ ID NO: 3233928 - RNA, 19 nt, Artificial Sequence
  Description of Artificial Sequence: Synthetic oligonucleotide
gaaauuuccgcuuaaugaa

SEQ ID NO: 3233929 - RNA, 19 nt, Artificial Sequence
  Description of Artificial Sequence: Synthetic oligonucleotide
cuugucaccuuguagcugg

SEQ ID NO: 3233930 - RNA, 19 nt, Artificial Sequence
  Description of Artificial Sequence: Synthetic oligonucleotide
aggguauggaaauuuccgc

SEQ ID NO: 3233931 - RNA, 19 nt, Artificial Sequence
  Description of Artificial Sequence: Synthetic oligonucleotide
aaaacgcccuucaugaagg

SEQ ID NO: 3233932 - RNA, 19 nt, Artificial Sequence
  Description of Artificial Sequence: Synthetic oligonucleotide
gaaaacgcccuucaugaag

SEQ ID NO: 3233933 - RNA, 19 nt, Artificial Sequence
  Description of Artificial Sequence: Synthetic oligonucleotide
uggaaauuuccgcuuaaug

SEQ ID NO: 3233934 - RNA, 19 nt, Artificial Sequence
  Description of Artificial Sequence: Synthetic oligonucleotide
aaauuuccgcuuaaugaac

SEQ ID NO: 3233935 - RNA, 19 nt, Artificial Sequence
  Description of Artificial Sequence: Synthetic oligonucleotide
aagagccagagaucucugc

SEQ ID NO: 3233936 - RNA, 19 nt, Artificial Sequence
  Description of Artificial Sequence: Synthetic oligonucleotide
uuccgcuuaaugaacagcu

SEQ ID NO: 3233937 - RNA, 19 nt, Artificial Sequence
  Description of Artificial Sequence: Synthetic oligonucleotide
caggguauggaaauuuccg

SEQ ID NO: 3233938 - RNA, 19 nt, Artificial Sequence
  Description of Artificial Sequence: Synthetic oligonucleotide
auccacucgggacaggccc

SEQ ID NO: 3233939 - RNA, 19 nt, Artificial Sequence
  Description of Artificial Sequence: Synthetic oligonucleotide
ugugcucaugucuuugggg

SEQ ID NO: 3233940 - RNA, 19 nt, Artificial Sequence
  Description of Artificial Sequence: Synthetic oligonucleotide
aaaggugaaaacgcccuuc

SEQ ID NO: 3233941 - RNA, 19 nt, Artificial Sequence
  Description of Artificial Sequence: Synthetic oligonucleotide
auuucugagacuccauucu

SEQ ID NO: 3233942 - RNA, 19 nt, Artificial Sequence
  Description of Artificial Sequence: Synthetic oligonucleotide
ugacaaaggugaaaacgcc

SEQ ID NO: 3233943 - RNA, 19 nt, Artificial Sequence
  Description of Artificial Sequence: Synthetic oligonucleotide
acuggcacacggcauauuc

SEQ ID NO: 3233944 - RNA, 19 nt, Artificial Sequence
  Description of Artificial Sequence: Synthetic oligonucleotide
ggaaauuuccgcuuaauga

SEQ ID NO: 3233945 - RNA, 19 nt, Artificial Sequence
  Description of Artificial Sequence: Synthetic oligonucleotide
gaaaguuccacuggacagg

SEQ ID NO: 3233946 - RNA, 19 nt, Artificial Sequence
  Description of Artificial Sequence: Synthetic oligonucleotide
gugaaaacgcccuucauga

SEQ ID NO: 3233947 - RNA, 19 nt, Artificial Sequence
  Description of Artificial Sequence: Synthetic oligonucleotide
aaaguuccacuggacaggg

SEQ ID NO: 3233948 - RNA, 19 nt, Artificial Sequence
  Description of Artificial Sequence: Synthetic oligonucleotide
ucaugaaggcguucgacug

SEQ ID NO: 3233949 - RNA, 19 nt, Artificial Sequence
  Description of Artificial Sequence: Synthetic oligonucleotide
gcucuucuagucuugaugg

SEQ ID NO: 3233950 - RNA, 19 nt, Artificial Sequence
  Description of Artificial Sequence: Synthetic oligonucleotide
gugacaaaggugaaaacgc

SEQ ID NO: 3233951 - RNA, 19 nt, Artificial Sequence
  Description of Artificial Sequence: Synthetic oligonucleotide
uucaugaaggcguucgacu

SEQ ID NO: 3233952 - RNA, 19 nt, Artificial Sequence
  Description of Artificial Sequence: Synthetic oligonucleotide
cccaaauucaccaugguug

SEQ ID NO: 3233953 - RNA, 19 nt, Artificial Sequence
  Description of Artificial Sequence: Synthetic oligonucleotide
cuuguagcuggccacagac

SEQ ID NO: 3233954 - RNA, 19 nt, Artificial Sequence
  Description of Artificial Sequence: Synthetic oligonucleotide
uuucccugucuccaggaag

SEQ ID NO: 3233955 - RNA, 19 nt, Artificial Sequence
  Description of Artificial Sequence: Synthetic oligonucleotide
uacaacggcagacaccaga

SEQ ID NO: 3233956 - RNA, 19 nt, Artificial Sequence
  Description of Artificial Sequence: Synthetic oligonucleotide
aaggugaaaacgcccuuca

SEQ ID NO: 3233957 - RNA, 19 nt, Artificial Sequence
  Description of Artificial Sequence: Synthetic oligonucleotide
agcucuucuagucuugaug

SEQ ID NO: 3233958 - RNA, 19 nt, Artificial Sequence
  Description of Artificial Sequence: Synthetic oligonucleotide
acaccagaaaguuccacug

SEQ ID NO: 3233959 - RNA, 19 nt, Artificial Sequence
  Description of Artificial Sequence: Synthetic oligonucleotide
ucugugcucaugucuuugg

SEQ ID NO: 3233960 - RNA, 19 nt, Artificial Sequence
  Description of Artificial Sequence: Synthetic oligonucleotide
ucuuuggggaguuucccug

SEQ ID NO: 3233961 - RNA, 19 nt, Artificial Sequence
  Description of Artificial Sequence: Synthetic oligonucleotide
uucugagacuccauucuug

SEQ ID NO: 3233962 - RNA, 19 nt, Artificial Sequence
  Description of Artificial Sequence: Synthetic oligonucleotide
acggcauauuccucgaguc

SEQ ID NO: 3233963 - RNA, 19 nt, Artificial Sequence
  Description of Artificial Sequence: Synthetic oligonucleotide
aaacgcccuucaugaaggc

SEQ ID NO: 3233964 - RNA, 19 nt, Artificial Sequence
  Description of Artificial Sequence: Synthetic oligonucleotide
acaggguauggaaauuucc

SEQ ID NO: 3233965 - RNA, 19 nt, Artificial Sequence
  Description of Artificial Sequence: Synthetic oligonucleotide
agaucucugcauuucugag

SEQ ID NO: 3233966 - RNA, 19 nt, Artificial Sequence
  Description of Artificial Sequence: Synthetic oligonucleotide
ucugagacuccauucuugu

SEQ ID NO: 3233967 - RNA, 19 nt, Artificial Sequence
  Description of Artificial Sequence: Synthetic oligonucleotide
uaaugaacagcugcagacc

SEQ ID NO: 3233968 - RNA, 19 nt, Artificial Sequence
  Description of Artificial Sequence: Synthetic oligonucleotide
ugauggucugugcucaugu

SEQ ID NO: 3233969 - RNA, 19 nt, Artificial Sequence
  Description of Artificial Sequence: Synthetic oligonucleotide
gacaaaggugaaaacgccc

SEQ ID NO: 3233970 - RNA, 19 nt, Artificial Sequence
  Description of Artificial Sequence: Synthetic oligonucleotide
uauuccucgagucccgggu

SEQ ID NO: 3233971 - RNA, 19 nt, Artificial Sequence
  Description of Artificial Sequence: Synthetic oligonucleotide
uucccugucuccaggaaga

SEQ ID NO: 3233972 - RNA, 19 nt, Artificial Sequence
  Description of Artificial Sequence: Synthetic oligonucleotide
ccugucuccaggaagagcc

SEQ ID NO: 3233973 - RNA, 19 nt, Artificial Sequence
  Description of Artificial Sequence: Synthetic oligonucleotide
cauucuugucaccuuguag

SEQ ID NO: 3233974 - RNA, 19 nt, Artificial Sequence
  Description of Artificial Sequence: Synthetic oligonucleotide
aaggcguucgacuggcaca

SEQ ID NO: 3233975 - RNA, 19 nt, Artificial Sequence
  Description of Artificial Sequence: Synthetic oligonucleotide
cauuucugagacuccauuc

SEQ ID NO: 3233976 - RNA, 19 nt, Artificial Sequence
  Description of Artificial Sequence: Synthetic oligonucleotide
aauuuccgcuuaaugaaca

SEQ ID NO: 3233977 - RNA, 19 nt, Artificial Sequence
  Description of Artificial Sequence: Synthetic oligonucleotide
cacugcgucauccacucgg

SEQ ID NO: 3233978 - RNA, 19 nt, Artificial Sequence
  Description of Artificial Sequence: Synthetic oligonucleotide
ggugaaaacgcccuucaug

SEQ ID NO: 3233979 - RNA, 19 nt, Artificial Sequence
  Description of Artificial Sequence: Synthetic oligonucleotide
auuuccgcuuaaugaacag

SEQ ID NO: 3233980 - RNA, 19 nt, Artificial Sequence
  Description of Artificial Sequence: Synthetic oligonucleotide
agucuugauggucugugcu

SEQ ID NO: 3233981 - RNA, 19 nt, Artificial Sequence
  Description of Artificial Sequence: Synthetic oligonucleotide
gcagacaccagaaaguucc

SEQ ID NO: 3233982 - RNA, 19 nt, Artificial Sequence
  Description of Artificial Sequence: Synthetic oligonucleotide
accagaaaguuccacugga

SEQ ID NO: 3233983 - RNA, 19 nt, Artificial Sequence
  Description of Artificial Sequence: Synthetic oligonucleotide
gacaggcccaaauucacca

SEQ ID NO: 3233984 - RNA, 19 nt, Artificial Sequence
  Description of Artificial Sequence: Synthetic oligonucleotide
agagccagagaucucugca

SEQ ID NO: 3233985 - RNA, 19 nt, Artificial Sequence
  Description of Artificial Sequence: Synthetic oligonucleotide
gagaucucugcauuucuga

SEQ ID NO: 3233986 - RNA, 19 nt, Artificial Sequence
  Description of Artificial Sequence: Synthetic oligonucleotide
agccagagcucuucuaguc

SEQ ID NO: 3233987 - RNA, 19 nt, Artificial Sequence
  Description of Artificial Sequence: Synthetic oligonucleotide
ucuugauggucugugcuca

SEQ ID NO: 3233988 - RNA, 19 nt, Artificial Sequence
  Description of Artificial Sequence: Synthetic oligonucleotide
uucuugucaccuuguagcu

SEQ ID NO: 3233989 - RNA, 19 nt, Artificial Sequence
  Description of Artificial Sequence: Synthetic oligonucleotide
augaaggcguucgacuggc

SEQ ID NO: 3233990 - RNA, 19 nt, Artificial Sequence
  Description of Artificial Sequence: Synthetic oligonucleotide
ucugcauuucugagacucc

SEQ ID NO: 3233991 - RNA, 19 nt, Artificial Sequence
  Description of Artificial Sequence: Synthetic oligonucleotide
aguuccacuggacagggua

SEQ ID NO: 3233992 - RNA, 19 nt, Artificial Sequence
  Description of Artificial Sequence: Synthetic oligonucleotide
auggucugugcucaugucu

SEQ ID NO: 3233993 - RNA, 19 nt, Artificial Sequence
  Description of Artificial Sequence: Synthetic oligonucleotide
gagacuccauucuugucac

SEQ ID NO: 3233994 - RNA, 19 nt, Artificial Sequence
  Description of Artificial Sequence: Synthetic oligonucleotide
gaucucugcauuucugaga

SEQ ID NO: 3233995 - RNA, 19 nt, Artificial Sequence
  Description of Artificial Sequence: Synthetic oligonucleotide
ggccacagacccuacaacg

SEQ ID NO: 3233996 - RNA, 19 nt, Artificial Sequence
  Description of Artificial Sequence: Synthetic oligonucleotide
cucugcauuucugagacuc

SEQ ID NO: 3233997 - RNA, 19 nt, Artificial Sequence
  Description of Artificial Sequence: Synthetic oligonucleotide
caugaaggcguucgacugg

SEQ ID NO: 3233998 - RNA, 19 nt, Artificial Sequence
  Description of Artificial Sequence: Synthetic oligonucleotide
aaagucgcaccagugccug

SEQ ID NO: 3233999 - RNA, 19 nt, Artificial Sequence
  Description of Artificial Sequence: Synthetic oligonucleotide
agacccuacaacggcagac

SEQ ID NO: 3234000 - RNA, 19 nt, Artificial Sequence
  Description of Artificial Sequence: Synthetic oligonucleotide
cuuaaugaacagcugcaga

SEQ ID NO: 3234001 - RNA, 19 nt, Artificial Sequence
  Description of Artificial Sequence: Synthetic oligonucleotide
uggcacacggcauauuccu

SEQ ID NO: 3234002 - RNA, 19 nt, Artificial Sequence
  Description of Artificial Sequence: Synthetic oligonucleotide
ugcgucauccacucgggac

SEQ ID NO: 3234003 - RNA, 19 nt, Artificial Sequence
  Description of Artificial Sequence: Synthetic oligonucleotide
accagugccugugacaaag

SEQ ID NO: 3234004 - RNA, 19 nt, Artificial Sequence
  Description of Artificial Sequence: Synthetic oligonucleotide
uauggaaauuuccgcuuaa

SEQ ID NO: 3234005 - RNA, 19 nt, Artificial Sequence
  Description of Artificial Sequence: Synthetic oligonucleotide
ccaaauucaccaugguugg

SEQ ID NO: 3234006 - RNA, 19 nt, Artificial Sequence
  Description of Artificial Sequence: Synthetic oligonucleotide
ucuucuagucuugaugguc

SEQ ID NO: 3234007 - RNA, 19 nt, Artificial Sequence
  Description of Artificial Sequence: Synthetic oligonucleotide
gugccugugacaaagguga

SEQ ID NO: 3234008 - RNA, 19 nt, Artificial Sequence
  Description of Artificial Sequence: Synthetic oligonucleotide
acagcugcagaccgaaagu

SEQ ID NO: 3234009 - RNA, 19 nt, Artificial Sequence
  Description of Artificial Sequence: Synthetic oligonucleotide
uuuccgcuuaaugaacagc

SEQ ID NO: 3234010 - RNA, 19 nt, Artificial Sequence
  Description of Artificial Sequence: Synthetic oligonucleotide
acaaaggugaaaacgcccu

SEQ ID NO: 3234011 - RNA, 19 nt, Artificial Sequence
  Description of Artificial Sequence: Synthetic oligonucleotide
ucgggacaggcccaaauuc

SEQ ID NO: 3234012 - RNA, 19 nt, Artificial Sequence
  Description of Artificial Sequence: Synthetic oligonucleotide
augucuuuggggaguuucc

SEQ ID NO: 3234013 - RNA, 19 nt, Artificial Sequence
  Description of Artificial Sequence: Synthetic oligonucleotide
aacgcccuucaugaaggcg

SEQ ID NO: 3234014 - RNA, 19 nt, Artificial Sequence
  Description of Artificial Sequence: Synthetic oligonucleotide
agucccgggugcuuggcgg

SEQ ID NO: 3234015 - RNA, 19 nt, Artificial Sequence
  Description of Artificial Sequence: Synthetic oligonucleotide
gaguuucccugucuccagg

SEQ ID NO: 3234016 - RNA, 19 nt, Artificial Sequence
  Description of Artificial Sequence: Synthetic oligonucleotide
acccuacaacggcagacac

SEQ ID NO: 3234017 - RNA, 19 nt, Artificial Sequence
  Description of Artificial Sequence: Synthetic oligonucleotide
uuuuaaaauauuuaaaacu

SEQ ID NO: 3234018 - RNA, 19 nt, Artificial Sequence
  Description of Artificial Sequence: Synthetic oligonucleotide
aaggaaaaugcacuuagcc

SEQ ID NO: 3234019 - RNA, 19 nt, Artificial Sequence
  Description of Artificial Sequence: Synthetic oligonucleotide
aucauugccaguucgaacc

SEQ ID NO: 3234020 - RNA, 19 nt, Artificial Sequence
  Description of Artificial Sequence: Synthetic oligonucleotide
aguuaucuuuucuacaucc

SEQ ID NO: 3234021 - RNA, 19 nt, Artificial Sequence
  Description of Artificial Sequence: Synthetic oligonucleotide
uauuccuucauccaaaugu

SEQ ID NO: 3234022 - RNA, 19 nt, Artificial Sequence
  Description of Artificial Sequence: Synthetic oligonucleotide
ucaacuuucccuuugacug

SEQ ID NO: 3234023 - RNA, 19 nt, Artificial Sequence
  Description of Artificial Sequence: Synthetic oligonucleotide
aauauuuaaaacuuccuua

SEQ ID NO: 3234024 - RNA, 19 nt, Artificial Sequence
  Description of Artificial Sequence: Synthetic oligonucleotide
uaaaacuuccuuaacacca

SEQ ID NO: 3234025 - RNA, 19 nt, Artificial Sequence
  Description of Artificial Sequence: Synthetic oligonucleotide
uugcacaccacauugaggg

SEQ ID NO: 3234026 - RNA, 19 nt, Artificial Sequence
  Description of Artificial Sequence: Synthetic oligonucleotide
cuuaacaccauguucaccc

SEQ ID NO: 3234027 - RNA, 19 nt, Artificial Sequence
  Description of Artificial Sequence: Synthetic oligonucleotide
aggaaaaugcacuuagccc

SEQ ID NO: 3234028 - RNA, 19 nt, Artificial Sequence
  Description of Artificial Sequence: Synthetic oligonucleotide
auuguugucaacuauaguu

SEQ ID NO: 3234029 - RNA, 19 nt, Artificial Sequence
  Description of Artificial Sequence: Synthetic oligonucleotide
cuuauaaucuggaaaacug

SEQ ID NO: 3234030 - RNA, 19 nt, Artificial Sequence
  Description of Artificial Sequence: Synthetic oligonucleotide
uuccuuaacaccauguuca

SEQ ID NO: 3234031 - RNA, 19 nt, Artificial Sequence
  Description of Artificial Sequence: Synthetic oligonucleotide
ucaacuauaguuauccagu

SEQ ID NO: 3234032 - RNA, 19 nt, Artificial Sequence
  Description of Artificial Sequence: Synthetic oligonucleotide
agaugguauuccuucaucc

SEQ ID NO: 3234033 - RNA, 19 nt, Artificial Sequence
  Description of Artificial Sequence: Synthetic oligonucleotide
aagaagaacagcauugcac

SEQ ID NO: 3234034 - RNA, 19 nt, Artificial Sequence
  Description of Artificial Sequence: Synthetic oligonucleotide
uaaucuggaaaacugaauc

SEQ ID NO: 3234035 - RNA, 19 nt, Artificial Sequence
  Description of Artificial Sequence: Synthetic oligonucleotide
acuauaguuauccaguaga

SEQ ID NO: 3234036 - RNA, 19 nt, Artificial Sequence
  Description of Artificial Sequence: Synthetic oligonucleotide
uaauuguugucaacuauag

SEQ ID NO: 3234037 - RNA, 19 nt, Artificial Sequence
  Description of Artificial Sequence: Synthetic oligonucleotide
uaggauagagccuaagaag

SEQ ID NO: 3234038 - RNA, 19 nt, Artificial Sequence
  Description of Artificial Sequence: Synthetic oligonucleotide
ucauccaaaugucacaaug

SEQ ID NO: 3234039 - RNA, 19 nt, Artificial Sequence
  Description of Artificial Sequence: Synthetic oligonucleotide
aaaugauuggccucccaag

SEQ ID NO: 3234040 - RNA, 19 nt, Artificial Sequence
  Description of Artificial Sequence: Synthetic oligonucleotide
aaccccaccguccauguac

SEQ ID NO: 3234041 - RNA, 19 nt, Artificial Sequence
  Description of Artificial Sequence: Synthetic oligonucleotide
uuauaaucuggaaaacuga

SEQ ID NO: 3234042 - RNA, 19 nt, Artificial Sequence
  Description of Artificial Sequence: Synthetic oligonucleotide
aaucuggaaaacugaauca

SEQ ID NO: 3234043 - RNA, 19 nt, Artificial Sequence
  Description of Artificial Sequence: Synthetic oligonucleotide
uccaguagaacauuagaug

SEQ ID NO: 3234044 - RNA, 19 nt, Artificial Sequence
  Description of Artificial Sequence: Synthetic oligonucleotide
ugaucucagcaacugaccg

SEQ ID NO: 3234045 - RNA, 19 nt, Artificial Sequence
  Description of Artificial Sequence: Synthetic oligonucleotide
ggaaaaugcacuuagcccc

SEQ ID NO: 3234046 - RNA, 19 nt, Artificial Sequence
  Description of Artificial Sequence: Synthetic oligonucleotide
uuccuuauaaucuggaaaa

SEQ ID NO: 3234047 - RNA, 19 nt, Artificial Sequence
  Description of Artificial Sequence: Synthetic oligonucleotide
ucuggaaaacugaaucagg

SEQ ID NO: 3234048 - RNA, 19 nt, Artificial Sequence
  Description of Artificial Sequence: Synthetic oligonucleotide
agaagaacagcauugcaca

SEQ ID NO: 3234049 - RNA, 19 nt, Artificial Sequence
  Description of Artificial Sequence: Synthetic oligonucleotide
uuaaaacuuccuuaacacc

SEQ ID NO: 3234050 - RNA, 19 nt, Artificial Sequence
  Description of Artificial Sequence: Synthetic oligonucleotide
ucuucuuuuaaaauauuua

SEQ ID NO: 3234051 - RNA, 19 nt, Artificial Sequence
  Description of Artificial Sequence: Synthetic oligonucleotide
auauuuaaaacuuccuuaa

SEQ ID NO: 3234052 - RNA, 19 nt, Artificial Sequence
  Description of Artificial Sequence: Synthetic oligonucleotide
aaacuacucaauaggauag

SEQ ID NO: 3234053 - RNA, 19 nt, Artificial Sequence
  Description of Artificial Sequence: Synthetic oligonucleotide
gaccauagaaguuuggaac

SEQ ID NO: 3234054 - RNA, 19 nt, Artificial Sequence
  Description of Artificial Sequence: Synthetic oligonucleotide
uuaauuguugucaacuaua

SEQ ID NO: 3234055 - RNA, 19 nt, Artificial Sequence
  Description of Artificial Sequence: Synthetic oligonucleotide
aacagcauugcacaccaca

SEQ ID NO: 3234056 - RNA, 19 nt, Artificial Sequence
  Description of Artificial Sequence: Synthetic oligonucleotide
aacuauaguuauccaguag

SEQ ID NO: 3234057 - RNA, 19 nt, Artificial Sequence
  Description of Artificial Sequence: Synthetic oligonucleotide
cauccaaaugucacaaugg

SEQ ID NO: 3234058 - RNA, 19 nt, Artificial Sequence
  Description of Artificial Sequence: Synthetic oligonucleotide
ucaguaguuccuuauaauc

SEQ ID NO: 3234059 - RNA, 19 nt, Artificial Sequence
  Description of Artificial Sequence: Synthetic oligonucleotide
agaaguuuggaacucuucu

SEQ ID NO: 3234060 - RNA, 19 nt, Artificial Sequence
  Description of Artificial Sequence: Synthetic oligonucleotide
aguaguuccuuauaaucug

SEQ ID NO: 3234061 - RNA, 19 nt, Artificial Sequence
  Description of Artificial Sequence: Synthetic oligonucleotide
accauguucacccuugcag

SEQ ID NO: 3234062 - RNA, 19 nt, Artificial Sequence
  Description of Artificial Sequence: Synthetic oligonucleotide
gucaacuauaguuauccag

SEQ ID NO: 3234063 - RNA, 19 nt, Artificial Sequence
  Description of Artificial Sequence: Synthetic oligonucleotide
auaggauagagccuaagaa

SEQ ID NO: 3234064 - RNA, 19 nt, Artificial Sequence
  Description of Artificial Sequence: Synthetic oligonucleotide
aauuaauuguugucaacua

SEQ ID NO: 3234065 - RNA, 19 nt, Artificial Sequence
  Description of Artificial Sequence: Synthetic oligonucleotide
uuauccaguagaacauuag

SEQ ID NO: 3234066 - RNA, 19 nt, Artificial Sequence
  Description of Artificial Sequence: Synthetic oligonucleotide
agcauugcacaccacauug

SEQ ID NO: 3234067 - RNA, 19 nt, Artificial Sequence
  Description of Artificial Sequence: Synthetic oligonucleotide
uauccaguagaacauuaga

SEQ ID NO: 3234068 - RNA, 19 nt, Artificial Sequence
  Description of Artificial Sequence: Synthetic oligonucleotide
aaccucgucaagcugccuc

SEQ ID NO: 3234069 - RNA, 19 nt, Artificial Sequence
  Description of Artificial Sequence: Synthetic oligonucleotide
cauuagaugguauuccuuc

SEQ ID NO: 3234070 - RNA, 19 nt, Artificial Sequence
  Description of Artificial Sequence: Synthetic oligonucleotide
cuucuuuuaaaauauuuaa

SEQ ID NO: 3234071 - RNA, 19 nt, Artificial Sequence
  Description of Artificial Sequence: Synthetic oligonucleotide
gaucgaagcaggaaccucg

SEQ ID NO: 3234072 - RNA, 19 nt, Artificial Sequence
  Description of Artificial Sequence: Synthetic oligonucleotide
aacacaucauugccaguuc

SEQ ID NO: 3234073 - RNA, 19 nt, Artificial Sequence
  Description of Artificial Sequence: Synthetic oligonucleotide
aucucagcaacugaccggc

SEQ ID NO: 3234074 - RNA, 19 nt, Artificial Sequence
  Description of Artificial Sequence: Synthetic oligonucleotide
agucaauuaauuguuguca

SEQ ID NO: 3234075 - RNA, 19 nt, Artificial Sequence
  Description of Artificial Sequence: Synthetic oligonucleotide
cugaccggcaaccugaaag

SEQ ID NO: 3234076 - RNA, 19 nt, Artificial Sequence
  Description of Artificial Sequence: Synthetic oligonucleotide
ugaccggcaaccugaaagg

SEQ ID NO: 3234077 - RNA, 19 nt, Artificial Sequence
  Description of Artificial Sequence: Synthetic oligonucleotide
uuguugucaacuauaguua

SEQ ID NO: 3234078 - RNA, 19 nt, Artificial Sequence
  Description of Artificial Sequence: Synthetic oligonucleotide
auuaauuguugucaacuau

SEQ ID NO: 3234079 - RNA, 19 nt, Artificial Sequence
  Description of Artificial Sequence: Synthetic oligonucleotide
uucaacuuucccuuugacu

SEQ ID NO: 3234080 - RNA, 19 nt, Artificial Sequence
  Description of Artificial Sequence: Synthetic oligonucleotide
aaguuuggaacucuucuuu

SEQ ID NO: 3234081 - RNA, 19 nt, Artificial Sequence
  Description of Artificial Sequence: Synthetic oligonucleotide
ucaaacuacucaauaggau

SEQ ID NO: 3234082 - RNA, 19 nt, Artificial Sequence
  Description of Artificial Sequence: Synthetic oligonucleotide
gaggauacagggcucaaac

SEQ ID NO: 3234083 - RNA, 19 nt, Artificial Sequence
  Description of Artificial Sequence: Synthetic oligonucleotide
aauuguugucaacuauagu

SEQ ID NO: 3234084 - RNA, 19 nt, Artificial Sequence
  Description of Artificial Sequence: Synthetic oligonucleotide
gaucucagcaacugaccgg

SEQ ID NO: 3234085 - RNA, 19 nt, Artificial Sequence
  Description of Artificial Sequence: Synthetic oligonucleotide
agccccaagggccagugcc

SEQ ID NO: 3234086 - RNA, 19 nt, Artificial Sequence
  Description of Artificial Sequence: Synthetic oligonucleotide
accauagaaguuuggaacu

SEQ ID NO: 3234087 - RNA, 19 nt, Artificial Sequence
  Description of Artificial Sequence: Synthetic oligonucleotide
gaacauuagaugguauucc

SEQ ID NO: 3234088 - RNA, 19 nt, Artificial Sequence
  Description of Artificial Sequence: Synthetic oligonucleotide
aucaggucuggacugaucu

SEQ ID NO: 3234089 - RNA, 19 nt, Artificial Sequence
  Description of Artificial Sequence: Synthetic oligonucleotide
agaacagcauugcacacca

SEQ ID NO: 3234090 - RNA, 19 nt, Artificial Sequence
  Description of Artificial Sequence: Synthetic oligonucleotide
ucucaguaguuccuuauaa

SEQ ID NO: 3234091 - RNA, 19 nt, Artificial Sequence
  Description of Artificial Sequence: Synthetic oligonucleotide
agagccuaagaagaacagc

SEQ ID NO: 3234092 - RNA, 19 nt, Artificial Sequence
  Description of Artificial Sequence: Synthetic oligonucleotide
aauggcgguaguuaucuuu

SEQ ID NO: 3234093 - RNA, 19 nt, Artificial Sequence
  Description of Artificial Sequence: Synthetic oligonucleotide
uccuucauccaaaugucac

SEQ ID NO: 3234094 - RNA, 19 nt, Artificial Sequence
  Description of Artificial Sequence: Synthetic oligonucleotide
agagcaucgaucgaagcag

SEQ ID NO: 3234095 - RNA, 19 nt, Artificial Sequence
  Description of Artificial Sequence: Synthetic oligonucleotide
agcaggaaccucgucaagc

SEQ ID NO: 3234096 - RNA, 19 nt, Artificial Sequence
  Description of Artificial Sequence: Synthetic oligonucleotide
gaacucuucuuuuaaaaua

SEQ ID NO: 3234097 - RNA, 19 nt, Artificial Sequence
  Description of Artificial Sequence: Synthetic oligonucleotide
aggaaccucgucaagcugc

SEQ ID NO: 3234098 - RNA, 19 nt, Artificial Sequence
  Description of Artificial Sequence: Synthetic oligonucleotide
accugaaaggaccauagaa

SEQ ID NO: 3234099 - RNA, 19 nt, Artificial Sequence
  Description of Artificial Sequence: Synthetic oligonucleotide
uggaacucuucuuuuaaaa

SEQ ID NO: 3234100 - RNA, 19 nt, Artificial Sequence
  Description of Artificial Sequence: Synthetic oligonucleotide
cuaagaagaacagcauugc

SEQ ID NO: 3234101 - RNA, 19 nt, Artificial Sequence
  Description of Artificial Sequence: Synthetic oligonucleotide
uguacacuucaacuuuccc

SEQ ID NO: 3234102 - RNA, 19 nt, Artificial Sequence
  Description of Artificial Sequence: Synthetic oligonucleotide
uagagccuaagaagaacag

SEQ ID NO: 3234103 - RNA, 19 nt, Artificial Sequence
  Description of Artificial Sequence: Synthetic oligonucleotide
aucuggaaaacugaaucag

SEQ ID NO: 3234104 - RNA, 19 nt, Artificial Sequence
  Description of Artificial Sequence: Synthetic oligonucleotide
acacaucauugccaguucg

SEQ ID NO: 3234105 - RNA, 19 nt, Artificial Sequence
  Description of Artificial Sequence: Synthetic oligonucleotide
caaccugaaaggaccauag

SEQ ID NO: 3234106 - RNA, 19 nt, Artificial Sequence
  Description of Artificial Sequence: Synthetic oligonucleotide
gagccuaagaagaacagca

SEQ ID NO: 3234107 - RNA, 19 nt, Artificial Sequence
  Description of Artificial Sequence: Synthetic oligonucleotide
aggcagucucaguaguucc

SEQ ID NO: 3234108 - RNA, 19 nt, Artificial Sequence
  Description of Artificial Sequence: Synthetic oligonucleotide
aucgaucgaagcaggaacc

SEQ ID NO: 3234109 - RNA, 19 nt, Artificial Sequence
  Description of Artificial Sequence: Synthetic oligonucleotide
caucgaucgaagcaggaac

SEQ ID NO: 3234110 - RNA, 19 nt, Artificial Sequence
  Description of Artificial Sequence: Synthetic oligonucleotide
uccauguacacuucaacuu

SEQ ID NO: 3234111 - RNA, 19 nt, Artificial Sequence
  Description of Artificial Sequence: Synthetic oligonucleotide
accucgucaagcugccucc

SEQ ID NO: 3234112 - RNA, 19 nt, Artificial Sequence
  Description of Artificial Sequence: Synthetic oligonucleotide
guuccuuauaaucuggaaa

SEQ ID NO: 3234113 - RNA, 19 nt, Artificial Sequence
  Description of Artificial Sequence: Synthetic oligonucleotide
gaugguauuccuucaucca

SEQ ID NO: 3234114 - RNA, 19 nt, Artificial Sequence
  Description of Artificial Sequence: Synthetic oligonucleotide
uauaguuauccaguagaac

SEQ ID NO: 3234115 - RNA, 19 nt, Artificial Sequence
  Description of Artificial Sequence: Synthetic oligonucleotide
ccuaagaagaacagcauug

SEQ ID NO: 3234116 - RNA, 19 nt, Artificial Sequence
  Description of Artificial Sequence: Synthetic oligonucleotide
ccugaaaggaccauagaag

SEQ ID NO: 3234117 - RNA, 19 nt, Artificial Sequence
  Description of Artificial Sequence: Synthetic oligonucleotide
auaaacaucccucuccucc

SEQ ID NO: 3234118 - RNA, 19 nt, Artificial Sequence
  Description of Artificial Sequence: Synthetic oligonucleotide
agagauucgagcaacaagc

SEQ ID NO: 3234119 - RNA, 19 nt, Artificial Sequence
  Description of Artificial Sequence: Synthetic oligonucleotide
agaguuggcggucaaaagc

SEQ ID NO: 3234120 - RNA, 19 nt, Artificial Sequence
  Description of Artificial Sequence: Synthetic oligonucleotide
ugacauguagcacaaaggc

SEQ ID NO: 3234121 - RNA, 19 nt, Artificial Sequence
  Description of Artificial Sequence: Synthetic oligonucleotide
uaaguuauaaacaucccuc

SEQ ID NO: 3234122 - RNA, 19 nt, Artificial Sequence
  Description of Artificial Sequence: Synthetic oligonucleotide
aggcaaugcaacuucaggc

SEQ ID NO: 3234123 - RNA, 19 nt, Artificial Sequence
  Description of Artificial Sequence: Synthetic oligonucleotide
ugcaacuucaggcagaggu

SEQ ID NO: 3234124 - RNA, 19 nt, Artificial Sequence
  Description of Artificial Sequence: Synthetic oligonucleotide
auugacaucagugacaugu

SEQ ID NO: 3234125 - RNA, 19 nt, Artificial Sequence
  Description of Artificial Sequence: Synthetic oligonucleotide
auaggugacccauugguac

SEQ ID NO: 3234126 - RNA, 19 nt, Artificial Sequence
  Description of Artificial Sequence: Synthetic oligonucleotide
aaaguggcccucuccaccc

SEQ ID NO: 3234127 - RNA, 19 nt, Artificial Sequence
  Description of Artificial Sequence: Synthetic oligonucleotide
uaacccguaaguuauaaac

SEQ ID NO: 3234128 - RNA, 19 nt, Artificial Sequence
  Description of Artificial Sequence: Synthetic oligonucleotide
guuauaaacaucccucucc

SEQ ID NO: 3234129 - RNA, 19 nt, Artificial Sequence
  Description of Artificial Sequence: Synthetic oligonucleotide
agugacauguagcacaaag

SEQ ID NO: 3234130 - RNA, 19 nt, Artificial Sequence
  Description of Artificial Sequence: Synthetic oligonucleotide
acaaaggcagcuucggccc

SEQ ID NO: 3234131 - RNA, 19 nt, Artificial Sequence
  Description of Artificial Sequence: Synthetic oligonucleotide
acacacaccagguagauga

SEQ ID NO: 3234132 - RNA, 19 nt, Artificial Sequence
  Description of Artificial Sequence: Synthetic oligonucleotide
aaguuauaaacaucccucu

SEQ ID NO: 3234133 - RNA, 19 nt, Artificial Sequence
  Description of Artificial Sequence: Synthetic oligonucleotide
uuauaaacaucccucuccu

SEQ ID NO: 3234134 - RNA, 19 nt, Artificial Sequence
  Description of Artificial Sequence: Synthetic oligonucleotide
aacuauaggugacccauug

SEQ ID NO: 3234135 - RNA, 19 nt, Artificial Sequence
  Description of Artificial Sequence: Synthetic oligonucleotide
acauguagcacaaaggcag

SEQ ID NO: 3234136 - RNA, 19 nt, Artificial Sequence
  Description of Artificial Sequence: Synthetic oligonucleotide
guagaugacacugucuugg

SEQ ID NO: 3234137 - RNA, 19 nt, Artificial Sequence
  Description of Artificial Sequence: Synthetic oligonucleotide
aauggagaaccagugagug

SEQ ID NO: 3234138 - RNA, 19 nt, Artificial Sequence
  Description of Artificial Sequence: Synthetic oligonucleotide
gaaccagugagugugagug

SEQ ID NO: 3234139 - RNA, 19 nt, Artificial Sequence
  Description of Artificial Sequence: Synthetic oligonucleotide
ucugacacagagauucgag

SEQ ID NO: 3234140 - RNA, 19 nt, Artificial Sequence
  Description of Artificial Sequence: Synthetic oligonucleotide
aucagugacauguagcaca

SEQ ID NO: 3234141 - RNA, 19 nt, Artificial Sequence
  Description of Artificial Sequence: Synthetic oligonucleotide
uugucauugacaucaguga

SEQ ID NO: 3234142 - RNA, 19 nt, Artificial Sequence
  Description of Artificial Sequence: Synthetic oligonucleotide
aguuauaaacaucccucuc

SEQ ID NO: 3234143 - RNA, 19 nt, Artificial Sequence
  Description of Artificial Sequence: Synthetic oligonucleotide
acaucagugacauguagca

SEQ ID NO: 3234144 - RNA, 19 nt, Artificial Sequence
  Description of Artificial Sequence: Synthetic oligonucleotide
acuuagggcaaaguggccc

SEQ ID NO: 3234145 - RNA, 19 nt, Artificial Sequence
  Description of Artificial Sequence: Synthetic oligonucleotide
uccagggauacauugacgu

SEQ ID NO: 3234146 - RNA, 19 nt, Artificial Sequence
  Description of Artificial Sequence: Synthetic oligonucleotide
ugacacagagauucgagca

SEQ ID NO: 3234147 - RNA, 19 nt, Artificial Sequence
  Description of Artificial Sequence: Synthetic oligonucleotide
auugucauugacaucagug

SEQ ID NO: 3234148 - RNA, 19 nt, Artificial Sequence
  Description of Artificial Sequence: Synthetic oligonucleotide
ugucauugacaucagugac

SEQ ID NO: 3234149 - RNA, 19 nt, Artificial Sequence
  Description of Artificial Sequence: Synthetic oligonucleotide
uacauugacgugagcaaag

SEQ ID NO: 3234150 - RNA, 19 nt, Artificial Sequence
  Description of Artificial Sequence: Synthetic oligonucleotide
uggagaaccagugagugug

SEQ ID NO: 3234151 - RNA, 19 nt, Artificial Sequence
  Description of Artificial Sequence: Synthetic oligonucleotide
aaagcaggcgcauugucau

SEQ ID NO: 3234152 - RNA, 19 nt, Artificial Sequence
  Description of Artificial Sequence: Synthetic oligonucleotide
cacaaaggcagcuucggcc

SEQ ID NO: 3234153 - RNA, 19 nt, Artificial Sequence
  Description of Artificial Sequence: Synthetic oligonucleotide
uucaggucgguagaguugg

SEQ ID NO: 3234154 - RNA, 19 nt, Artificial Sequence
  Description of Artificial Sequence: Synthetic oligonucleotide
aaagucaccaucgucugga

SEQ ID NO: 3234155 - RNA, 19 nt, Artificial Sequence
  Description of Artificial Sequence: Synthetic oligonucleotide
gguacuuagggcaaagugg

SEQ ID NO: 3234156 - RNA, 19 nt, Artificial Sequence
  Description of Artificial Sequence: Synthetic oligonucleotide
caggcagagguucaggucg

SEQ ID NO: 3234157 - RNA, 19 nt, Artificial Sequence
  Description of Artificial Sequence: Synthetic oligonucleotide
cugucuuggguacuuaggg

SEQ ID NO: 3234158 - RNA, 19 nt, Artificial Sequence
  Description of Artificial Sequence: Synthetic oligonucleotide
uugacgugagcaaagucac

SEQ ID NO: 3234159 - RNA, 19 nt, Artificial Sequence
  Description of Artificial Sequence: Synthetic oligonucleotide
auugguaccuuggucaggg

SEQ ID NO: 3234160 - RNA, 19 nt, Artificial Sequence
  Description of Artificial Sequence: Synthetic oligonucleotide
ucgagcaacaagcugucca

SEQ ID NO: 3234161 - RNA, 19 nt, Artificial Sequence
  Description of Artificial Sequence: Synthetic oligonucleotide
auugacgugagcaaaguca

SEQ ID NO: 3234162 - RNA, 19 nt, Artificial Sequence
  Description of Artificial Sequence: Synthetic oligonucleotide
aaugcaacuucaggcagag

SEQ ID NO: 3234163 - RNA, 19 nt, Artificial Sequence
  Description of Artificial Sequence: Synthetic oligonucleotide
ugacccauugguaccuugg

SEQ ID NO: 3234164 - RNA, 19 nt, Artificial Sequence
  Description of Artificial Sequence: Synthetic oligonucleotide
uuggcggucaaaagcaggc

SEQ ID NO: 3234165 - RNA, 19 nt, Artificial Sequence
  Description of Artificial Sequence: Synthetic oligonucleotide
agugugagugccaggagcc

SEQ ID NO: 3234166 - RNA, 19 nt, Artificial Sequence
  Description of Artificial Sequence: Synthetic oligonucleotide
gucuggaucugacacagag

SEQ ID NO: 3234167 - RNA, 19 nt, Artificial Sequence
  Description of Artificial Sequence: Synthetic oligonucleotide
ccguaaguuauaaacaucc

SEQ ID NO: 3234168 - RNA, 19 nt, Artificial Sequence
  Description of Artificial Sequence: Synthetic oligonucleotide
acccguaccacgaagcugc

SEQ ID NO: 3234169 - RNA, 19 nt, Artificial Sequence
  Description of Artificial Sequence: Synthetic oligonucleotide
augacacugucuuggguac

SEQ ID NO: 3234170 - RNA, 19 nt, Artificial Sequence
  Description of Artificial Sequence: Synthetic oligonucleotide
aaccagugagugugagugc

SEQ ID NO: 3234171 - RNA, 19 nt, Artificial Sequence
  Description of Artificial Sequence: Synthetic oligonucleotide
agcaacaagcuguccaggg

SEQ ID NO: 3234172 - RNA, 19 nt, Artificial Sequence
  Description of Artificial Sequence: Synthetic oligonucleotide
agcaaagucaccaucgucu

SEQ ID NO: 3234173 - RNA, 19 nt, Artificial Sequence
  Description of Artificial Sequence: Synthetic oligonucleotide
uaaacaucccucuccuccc

SEQ ID NO: 3234174 - RNA, 19 nt, Artificial Sequence
  Description of Artificial Sequence: Synthetic oligonucleotide
ugacaucagugacauguag

SEQ ID NO: 3234175 - RNA, 19 nt, Artificial Sequence
  Description of Artificial Sequence: Synthetic oligonucleotide
acuauaggugacccauugg

SEQ ID NO: 3234176 - RNA, 19 nt, Artificial Sequence
  Description of Artificial Sequence: Synthetic oligonucleotide
gugagcaaagucaccaucg

SEQ ID NO: 3234177 - RNA, 19 nt, Artificial Sequence
  Description of Artificial Sequence: Synthetic oligonucleotide
gauacauugacgugagcaa

SEQ ID NO: 3234178 - RNA, 19 nt, Artificial Sequence
  Description of Artificial Sequence: Synthetic oligonucleotide
guacuuagggcaaaguggc

SEQ ID NO: 3234179 - RNA, 19 nt, Artificial Sequence
  Description of Artificial Sequence: Synthetic oligonucleotide
agugccaggagccaaacua

SEQ ID NO: 3234180 - RNA, 19 nt, Artificial Sequence
  Description of Artificial Sequence: Synthetic oligonucleotide
agccacacacaccagguag

SEQ ID NO: 3234181 - RNA, 19 nt, Artificial Sequence
  Description of Artificial Sequence: Synthetic oligonucleotide
accagugagugugagugcc

SEQ ID NO: 3234182 - RNA, 19 nt, Artificial Sequence
  Description of Artificial Sequence: Synthetic oligonucleotide
gaugacacugucuugggua

SEQ ID NO: 3234183 - RNA, 19 nt, Artificial Sequence
  Description of Artificial Sequence: Synthetic oligonucleotide
ugggcagucacccguacca

SEQ ID NO: 3234184 - RNA, 19 nt, Artificial Sequence
  Description of Artificial Sequence: Synthetic oligonucleotide
gucaaaagcaggcgcauug

SEQ ID NO: 3234185 - RNA, 19 nt, Artificial Sequence
  Description of Artificial Sequence: Synthetic oligonucleotide
aggucgguagaguuggcgg

SEQ ID NO: 3234186 - RNA, 19 nt, Artificial Sequence
  Description of Artificial Sequence: Synthetic oligonucleotide
gacaucagugacauguagc

SEQ ID NO: 3234187 - RNA, 19 nt, Artificial Sequence
  Description of Artificial Sequence: Synthetic oligonucleotide
gagugugagugccaggagc

SEQ ID NO: 3234188 - RNA, 19 nt, Artificial Sequence
  Description of Artificial Sequence: Synthetic oligonucleotide
uagcacaaaggcagcuucg

SEQ ID NO: 3234189 - RNA, 19 nt, Artificial Sequence
  Description of Artificial Sequence: Synthetic oligonucleotide
ggaucugacacagagauuc

SEQ ID NO: 3234190 - RNA, 19 nt, Artificial Sequence
  Description of Artificial Sequence: Synthetic oligonucleotide
aaaagcaggcgcauuguca

SEQ ID NO: 3234191 - RNA, 19 nt, Artificial Sequence
  Description of Artificial Sequence: Synthetic oligonucleotide
cugacacagagauucgagc

SEQ ID NO: 3234192 - RNA, 19 nt, Artificial Sequence
  Description of Artificial Sequence: Synthetic oligonucleotide
agguagaugacacugucuu

SEQ ID NO: 3234193 - RNA, 19 nt, Artificial Sequence
  Description of Artificial Sequence: Synthetic oligonucleotide
gugacauguagcacaaagg

SEQ ID NO: 3234194 - RNA, 19 nt, Artificial Sequence
  Description of Artificial Sequence: Synthetic oligonucleotide
ugucuuggguacuuagggc

SEQ ID NO: 3234195 - RNA, 19 nt, Artificial Sequence
  Description of Artificial Sequence: Synthetic oligonucleotide
gaagcugccaggcaaugca

SEQ ID NO: 3234196 - RNA, 19 nt, Artificial Sequence
  Description of Artificial Sequence: Synthetic oligonucleotide
ucauugacaucagugacau

SEQ ID NO: 3234197 - RNA, 19 nt, Artificial Sequence
  Description of Artificial Sequence: Synthetic oligonucleotide
caucgucuggaucugacac

SEQ ID NO: 3234198 - RNA, 19 nt, Artificial Sequence
  Description of Artificial Sequence: Synthetic oligonucleotide
cagagguucaggucgguag

SEQ ID NO: 3234199 - RNA, 19 nt, Artificial Sequence
  Description of Artificial Sequence: Synthetic oligonucleotide
aacccguaaguuauaaaca

SEQ ID NO: 3234200 - RNA, 19 nt, Artificial Sequence
  Description of Artificial Sequence: Synthetic oligonucleotide
cacaccagguagaugacac

SEQ ID NO: 3234201 - RNA, 19 nt, Artificial Sequence
  Description of Artificial Sequence: Synthetic oligonucleotide
gauucgagcaacaagcugu

SEQ ID NO: 3234202 - RNA, 19 nt, Artificial Sequence
  Description of Artificial Sequence: Synthetic oligonucleotide
uagaugacacugucuuggg

SEQ ID NO: 3234203 - RNA, 19 nt, Artificial Sequence
  Description of Artificial Sequence: Synthetic oligonucleotide
caggcaaugcaacuucagg

SEQ ID NO: 3234204 - RNA, 19 nt, Artificial Sequence
  Description of Artificial Sequence: Synthetic oligonucleotide
cagagauucgagcaacaag

SEQ ID NO: 3234205 - RNA, 19 nt, Artificial Sequence
  Description of Artificial Sequence: Synthetic oligonucleotide
guaaguuauaaacaucccu

SEQ ID NO: 3234206 - RNA, 19 nt, Artificial Sequence
  Description of Artificial Sequence: Synthetic oligonucleotide
uauaggugacccauuggua

SEQ ID NO: 3234207 - RNA, 19 nt, Artificial Sequence
  Description of Artificial Sequence: Synthetic oligonucleotide
agauucgagcaacaagcug

SEQ ID NO: 3234208 - RNA, 19 nt, Artificial Sequence
  Description of Artificial Sequence: Synthetic oligonucleotide
ucgucuggaucugacacag

SEQ ID NO: 3234209 - RNA, 19 nt, Artificial Sequence
  Description of Artificial Sequence: Synthetic oligonucleotide
ucuggaucugacacagaga

SEQ ID NO: 3234210 - RNA, 19 nt, Artificial Sequence
  Description of Artificial Sequence: Synthetic oligonucleotide
gucuuggguacuuagggca

SEQ ID NO: 3234211 - RNA, 19 nt, Artificial Sequence
  Description of Artificial Sequence: Synthetic oligonucleotide
acccguaaguuauaaacau

SEQ ID NO: 3234212 - RNA, 19 nt, Artificial Sequence
  Description of Artificial Sequence: Synthetic oligonucleotide
uagaguuggcggucaaaag

SEQ ID NO: 3234213 - RNA, 19 nt, Artificial Sequence
  Description of Artificial Sequence: Synthetic oligonucleotide
gaguccguggcuguaaccc

SEQ ID NO: 3234214 - RNA, 19 nt, Artificial Sequence
  Description of Artificial Sequence: Synthetic oligonucleotide
ucagugacauguagcacaa

SEQ ID NO: 3234215 - RNA, 19 nt, Artificial Sequence
  Description of Artificial Sequence: Synthetic oligonucleotide
acacagagauucgagcaac

SEQ ID NO: 3234216 - RNA, 19 nt, Artificial Sequence
  Description of Artificial Sequence: Synthetic oligonucleotide
ugagcaaagucaccaucgu

SEQ ID NO: 3234217 - RNA, 19 nt, Artificial Sequence
  Description of Artificial Sequence: Synthetic oligonucleotide
uauaguuucgccaagugca

SEQ ID NO: 3234218 - RNA, 19 nt, Artificial Sequence
  Description of Artificial Sequence: Synthetic oligonucleotide
acaccuuugauucauacuc

SEQ ID NO: 3234219 - RNA, 19 nt, Artificial Sequence
  Description of Artificial Sequence: Synthetic oligonucleotide
aaaacucacuuuucuacuc

SEQ ID NO: 3234220 - RNA, 19 nt, Artificial Sequence
  Description of Artificial Sequence: Synthetic oligonucleotide
aagacuuguagucaugaug

SEQ ID NO: 3234221 - RNA, 19 nt, Artificial Sequence
  Description of Artificial Sequence: Synthetic oligonucleotide
aaagaaauguuccccuauc

SEQ ID NO: 3234222 - RNA, 19 nt, Artificial Sequence
  Description of Artificial Sequence: Synthetic oligonucleotide
aaucugucuccuucuaucg

SEQ ID NO: 3234223 - RNA, 19 nt, Artificial Sequence
  Description of Artificial Sequence: Synthetic oligonucleotide
agacuuguagucaugaugg

SEQ ID NO: 3234224 - RNA, 19 nt, Artificial Sequence
  Description of Artificial Sequence: Synthetic oligonucleotide
guauacuuuauuuccuugg

SEQ ID NO: 3234225 - RNA, 19 nt, Artificial Sequence
  Description of Artificial Sequence: Synthetic oligonucleotide
uuauaguuucgccaagugc

SEQ ID NO: 3234226 - RNA, 19 nt, Artificial Sequence
  Description of Artificial Sequence: Synthetic oligonucleotide
acuuuauuuccuugggugg

SEQ ID NO: 3234227 - RNA, 19 nt, Artificial Sequence
  Description of Artificial Sequence: Synthetic oligonucleotide
ugcacaucaucaaugaagu

SEQ ID NO: 3234228 - RNA, 19 nt, Artificial Sequence
  Description of Artificial Sequence: Synthetic oligonucleotide
ugggaaacaccuuugauuc

SEQ ID NO: 3234229 - RNA, 19 nt, Artificial Sequence
  Description of Artificial Sequence: Synthetic oligonucleotide
aauggcugaaauuucuuaa

SEQ ID NO: 3234230 - RNA, 19 nt, Artificial Sequence
  Description of Artificial Sequence: Synthetic oligonucleotide
uccccuaucaccacagagg

SEQ ID NO: 3234231 - RNA, 19 nt, Artificial Sequence
  Description of Artificial Sequence: Synthetic oligonucleotide
ugauucauacucaacucca

SEQ ID NO: 3234232 - RNA, 19 nt, Artificial Sequence
  Description of Artificial Sequence: Synthetic oligonucleotide
ugagagaccgucacuaccc

SEQ ID NO: 3234233 - RNA, 19 nt, Artificial Sequence
  Description of Artificial Sequence: Synthetic oligonucleotide
agaaucaguccaucaagac

SEQ ID NO: 3234234 - RNA, 19 nt, Artificial Sequence
  Description of Artificial Sequence: Synthetic oligonucleotide
ugggugguaagcaauauuc

SEQ ID NO: 3234235 - RNA, 19 nt, Artificial Sequence
  Description of Artificial Sequence: Synthetic oligonucleotide
caaguagcuagcuugaguc

SEQ ID NO: 3234236 - RNA, 19 nt, Artificial Sequence
  Description of Artificial Sequence: Synthetic oligonucleotide
aaucaguccaucaagacuu

SEQ ID NO: 3234237 - RNA, 19 nt, Artificial Sequence
  Description of Artificial Sequence: Synthetic oligonucleotide
ucccuuuccaagcaguucc

SEQ ID NO: 3234238 - RNA, 19 nt, Artificial Sequence
  Description of Artificial Sequence: Synthetic oligonucleotide
uacuugggguagaugaugg

SEQ ID NO: 3234239 - RNA, 19 nt, Artificial Sequence
  Description of Artificial Sequence: Synthetic oligonucleotide
uuuagagguaucuccaggu

SEQ ID NO: 3234240 - RNA, 19 nt, Artificial Sequence
  Description of Artificial Sequence: Synthetic oligonucleotide
uucgccaagugcaauuggg

SEQ ID NO: 3234241 - RNA, 19 nt, Artificial Sequence
  Description of Artificial Sequence: Synthetic oligonucleotide
aagaaauguuccccuauca

SEQ ID NO: 3234242 - RNA, 19 nt, Artificial Sequence
  Description of Artificial Sequence: Synthetic oligonucleotide
agucauacuugacugagga

SEQ ID NO: 3234243 - RNA, 19 nt, Artificial Sequence
  Description of Artificial Sequence: Synthetic oligonucleotide
uucgccaaaggacagggga

SEQ ID NO: 3234244 - RNA, 19 nt, Artificial Sequence
  Description of Artificial Sequence: Synthetic oligonucleotide
uccaucaagacuuguaguc

SEQ ID NO: 3234245 - RNA, 19 nt, Artificial Sequence
  Description of Artificial Sequence: Synthetic oligonucleotide
aaugccguuccucucaaaa

SEQ ID NO: 3234246 - RNA, 19 nt, Artificial Sequence
  Description of Artificial Sequence: Synthetic oligonucleotide
uaugacgcuaucagagucc

SEQ ID NO: 3234247 - RNA, 19 nt, Artificial Sequence
  Description of Artificial Sequence: Synthetic oligonucleotide
ucgagcuccacacuggaca

SEQ ID NO: 3234248 - RNA, 19 nt, Artificial Sequence
  Description of Artificial Sequence: Synthetic oligonucleotide
acucaacuccaccauaguc

SEQ ID NO: 3234249 - RNA, 19 nt, Artificial Sequence
  Description of Artificial Sequence: Synthetic oligonucleotide
agacguggugaacagacag

SEQ ID NO: 3234250 - RNA, 19 nt, Artificial Sequence
  Description of Artificial Sequence: Synthetic oligonucleotide
agcgggucaaacucgacuc

SEQ ID NO: 3234251 - RNA, 19 nt, Artificial Sequence
  Description of Artificial Sequence: Synthetic oligonucleotide
auggucuugggguacuugg

SEQ ID NO: 3234252 - RNA, 19 nt, Artificial Sequence
  Description of Artificial Sequence: Synthetic oligonucleotide
guuuagagguaucuccagg

SEQ ID NO: 3234253 - RNA, 19 nt, Artificial Sequence
  Description of Artificial Sequence: Synthetic oligonucleotide
uuaugacgcuaucagaguc

SEQ ID NO: 3234254 - RNA, 19 nt, Artificial Sequence
  Description of Artificial Sequence: Synthetic oligonucleotide
ugaacagcuggcccaaccc

SEQ ID NO: 3234255 - RNA, 19 nt, Artificial Sequence
  Description of Artificial Sequence: Synthetic oligonucleotide
guggugaacagacagcagc

SEQ ID NO: 3234256 - RNA, 19 nt, Artificial Sequence
  Description of Artificial Sequence: Synthetic oligonucleotide
acagacguggugaacagac

SEQ ID NO: 3234257 - RNA, 19 nt, Artificial Sequence
  Description of Artificial Sequence: Synthetic oligonucleotide
auucaucuuagcuuaucug

SEQ ID NO: 3234258 - RNA, 19 nt, Artificial Sequence
  Description of Artificial Sequence: Synthetic oligonucleotide
uggugaacagacagcagcc

SEQ ID NO: 3234259 - RNA, 19 nt, Artificial Sequence
  Description of Artificial Sequence: Synthetic oligonucleotide
gaaauuucuuaaaacucac

SEQ ID NO: 3234260 - RNA, 19 nt, Artificial Sequence
  Description of Artificial Sequence: Synthetic oligonucleotide
cuggguucgggauugcugg

SEQ ID NO: 3234261 - RNA, 19 nt, Artificial Sequence
  Description of Artificial Sequence: Synthetic oligonucleotide
uccuucccaguuaugacgc

SEQ ID NO: 3234262 - RNA, 19 nt, Artificial Sequence
  Description of Artificial Sequence: Synthetic oligonucleotide
ucaacuccaccauagucac

SEQ ID NO: 3234263 - RNA, 19 nt, Artificial Sequence
  Description of Artificial Sequence: Synthetic oligonucleotide
ucaugauggugcaagucac

SEQ ID NO: 3234264 - RNA, 19 nt, Artificial Sequence
  Description of Artificial Sequence: Synthetic oligonucleotide
gaugguggugcugaggaag

SEQ ID NO: 3234265 - RNA, 19 nt, Artificial Sequence
  Description of Artificial Sequence: Synthetic oligonucleotide
cucaacuccaccauaguca

SEQ ID NO: 3234266 - RNA, 19 nt, Artificial Sequence
  Description of Artificial Sequence: Synthetic oligonucleotide
uucuucguguccacgagcu

SEQ ID NO: 3234267 - RNA, 19 nt, Artificial Sequence
  Description of Artificial Sequence: Synthetic oligonucleotide
ucaucugagagaccgucac

SEQ ID NO: 3234268 - RNA, 19 nt, Artificial Sequence
  Description of Artificial Sequence: Synthetic oligonucleotide
guccuucccaguuaugacg

SEQ ID NO: 3234269 - RNA, 19 nt, Artificial Sequence
  Description of Artificial Sequence: Synthetic oligonucleotide
uuccccuaucaccacagag

SEQ ID NO: 3234270 - RNA, 19 nt, Artificial Sequence
  Description of Artificial Sequence: Synthetic oligonucleotide
auggagggcaagcuuuccc

SEQ ID NO: 3234271 - RNA, 19 nt, Artificial Sequence
  Description of Artificial Sequence: Synthetic oligonucleotide
cuggaagugcaccucagcc

SEQ ID NO: 3234272 - RNA, 19 nt, Artificial Sequence
  Description of Artificial Sequence: Synthetic oligonucleotide
ugaacagacagcagccaga

SEQ ID NO: 3234273 - RNA, 19 nt, Artificial Sequence
  Description of Artificial Sequence: Synthetic oligonucleotide
uccaccauagucacuucug

SEQ ID NO: 3234274 - RNA, 19 nt, Artificial Sequence
  Description of Artificial Sequence: Synthetic oligonucleotide
uuuuaaaaugccguuccuc

SEQ ID NO: 3234275 - RNA, 19 nt, Artificial Sequence
  Description of Artificial Sequence: Synthetic oligonucleotide
uguaggagugcgagagagg

SEQ ID NO: 3234276 - RNA, 19 nt, Artificial Sequence
  Description of Artificial Sequence: Synthetic oligonucleotide
uuacccagcuuguccaggg

SEQ ID NO: 3234277 - RNA, 19 nt, Artificial Sequence
  Description of Artificial Sequence: Synthetic oligonucleotide
aagaaucaguccaucaaga

SEQ ID NO: 3234278 - RNA, 19 nt, Artificial Sequence
  Description of Artificial Sequence: Synthetic oligonucleotide
agcauucuuuuaaaaugcc

SEQ ID NO: 3234279 - RNA, 19 nt, Artificial Sequence
  Description of Artificial Sequence: Synthetic oligonucleotide
agagucauacuugacugag

SEQ ID NO: 3234280 - RNA, 19 nt, Artificial Sequence
  Description of Artificial Sequence: Synthetic oligonucleotide
ucuggcugcaggaagccac

SEQ ID NO: 3234281 - RNA, 19 nt, Artificial Sequence
  Description of Artificial Sequence: Synthetic oligonucleotide
uagagguaucuccagguaa

SEQ ID NO: 3234282 - RNA, 19 nt, Artificial Sequence
  Description of Artificial Sequence: Synthetic oligonucleotide
aucaccacagaggcaaggc

SEQ ID NO: 3234283 - RNA, 19 nt, Artificial Sequence
  Description of Artificial Sequence: Synthetic oligonucleotide
gagagggccgcacacgcgg

SEQ ID NO: 3234284 - RNA, 19 nt, Artificial Sequence
  Description of Artificial Sequence: Synthetic oligonucleotide
cuacccaggaacucuguag

SEQ ID NO: 3234285 - RNA, 19 nt, Artificial Sequence
  Description of Artificial Sequence: Synthetic oligonucleotide
gaguccuaagaaucagucc

SEQ ID NO: 3234286 - RNA, 19 nt, Artificial Sequence
  Description of Artificial Sequence: Synthetic oligonucleotide
ucaaugaagugacgcucag

SEQ ID NO: 3234287 - RNA, 19 nt, Artificial Sequence
  Description of Artificial Sequence: Synthetic oligonucleotide
cuagcuugagucagcauuc

SEQ ID NO: 3234288 - RNA, 19 nt, Artificial Sequence
  Description of Artificial Sequence: Synthetic oligonucleotide
gucaugauggugcaaguca

SEQ ID NO: 3234289 - RNA, 19 nt, Artificial Sequence
  Description of Artificial Sequence: Synthetic oligonucleotide
gagaccgucacuacccagg

SEQ ID NO: 3234290 - RNA, 19 nt, Artificial Sequence
  Description of Artificial Sequence: Synthetic oligonucleotide
ucacauccgaaucugucuc

SEQ ID NO: 3234291 - RNA, 19 nt, Artificial Sequence
  Description of Artificial Sequence: Synthetic oligonucleotide
caucugcacaucaucaaug

SEQ ID NO: 3234292 - RNA, 19 nt, Artificial Sequence
  Description of Artificial Sequence: Synthetic oligonucleotide
ucugcguauacaguggcac

SEQ ID NO: 3234293 - RNA, 19 nt, Artificial Sequence
  Description of Artificial Sequence: Synthetic oligonucleotide
gugacugucuggcugcagg

SEQ ID NO: 3234294 - RNA, 19 nt, Artificial Sequence
  Description of Artificial Sequence: Synthetic oligonucleotide
uacuccagagacuuuccca

SEQ ID NO: 3234295 - RNA, 19 nt, Artificial Sequence
  Description of Artificial Sequence: Synthetic oligonucleotide
aguagcuagcuugagucag

SEQ ID NO: 3234296 - RNA, 19 nt, Artificial Sequence
  Description of Artificial Sequence: Synthetic oligonucleotide
aucgcagcugcucuucggg

SEQ ID NO: 3234297 - RNA, 19 nt, Artificial Sequence
  Description of Artificial Sequence: Synthetic oligonucleotide
uggucuugggguacuuggg

SEQ ID NO: 3234298 - RNA, 19 nt, Artificial Sequence
  Description of Artificial Sequence: Synthetic oligonucleotide
ucuacuccagagacuuucc

SEQ ID NO: 3234299 - RNA, 19 nt, Artificial Sequence
  Description of Artificial Sequence: Synthetic oligonucleotide
uaaacccaguccuucccag

SEQ ID NO: 3234300 - RNA, 19 nt, Artificial Sequence
  Description of Artificial Sequence: Synthetic oligonucleotide
aaauuucuuaaaacucacu

SEQ ID NO: 3234301 - RNA, 19 nt, Artificial Sequence
  Description of Artificial Sequence: Synthetic oligonucleotide
uggagggcaagcuuucccc

SEQ ID NO: 3234302 - RNA, 19 nt, Artificial Sequence
  Description of Artificial Sequence: Synthetic oligonucleotide
ugaugugcaagagcaaugu

SEQ ID NO: 3234303 - RNA, 19 nt, Artificial Sequence
  Description of Artificial Sequence: Synthetic oligonucleotide
agguaagacuccucugggg

SEQ ID NO: 3234304 - RNA, 19 nt, Artificial Sequence
  Description of Artificial Sequence: Synthetic oligonucleotide
ugucacucccuacugaauu

SEQ ID NO: 3234305 - RNA, 19 nt, Artificial Sequence
  Description of Artificial Sequence: Synthetic oligonucleotide
gaacagacagcagccagag

SEQ ID NO: 3234306 - RNA, 19 nt, Artificial Sequence
  Description of Artificial Sequence: Synthetic oligonucleotide
caauuggggauacagguga

SEQ ID NO: 3234307 - RNA, 19 nt, Artificial Sequence
  Description of Artificial Sequence: Synthetic oligonucleotide
auguuacccagcuugucca

SEQ ID NO: 3234308 - RNA, 19 nt, Artificial Sequence
  Description of Artificial Sequence: Synthetic oligonucleotide
agcagccagagacuggguc

SEQ ID NO: 3234309 - RNA, 19 nt, Artificial Sequence
  Description of Artificial Sequence: Synthetic oligonucleotide
uggaagugcaccucagccu

SEQ ID NO: 3234310 - RNA, 19 nt, Artificial Sequence
  Description of Artificial Sequence: Synthetic oligonucleotide
uaauccagagugguggugu

SEQ ID NO: 3234311 - RNA, 19 nt, Artificial Sequence
  Description of Artificial Sequence: Synthetic oligonucleotide
gaaucaguccaucaagacu

SEQ ID NO: 3234312 - RNA, 19 nt, Artificial Sequence
  Description of Artificial Sequence: Synthetic oligonucleotide
gguguagauggucuugggg

SEQ ID NO: 3234313 - RNA, 19 nt, Artificial Sequence
  Description of Artificial Sequence: Synthetic oligonucleotide
guauacaguggcacaaaag

SEQ ID NO: 3234314 - RNA, 19 nt, Artificial Sequence
  Description of Artificial Sequence: Synthetic oligonucleotide
aauuggggauacaggugac

SEQ ID NO: 3234315 - RNA, 19 nt, Artificial Sequence
  Description of Artificial Sequence: Synthetic oligonucleotide
ccaagcaguuccaacaugc

SEQ ID NO: 3234316 - RNA, 19 nt, Artificial Sequence
  Description of Artificial Sequence: Synthetic oligonucleotide
uuaucugggugguaagcaa

SEQ ID NO: 3234317 - RNA, 19 nt, Artificial Sequence
  Description of Artificial Sequence: Synthetic oligonucleotide
aaaauccucaccgagggcc

SEQ ID NO: 3234318 - RNA, 19 nt, Artificial Sequence
  Description of Artificial Sequence: Synthetic oligonucleotide
caugagaaaauccucaccg

SEQ ID NO: 3234319 - RNA, 19 nt, Artificial Sequence
  Description of Artificial Sequence: Synthetic oligonucleotide
agaaaauccucaccgaggg

SEQ ID NO: 3234320 - RNA, 19 nt, Artificial Sequence
  Description of Artificial Sequence: Synthetic oligonucleotide
ugugacuucuuuaugcugc

SEQ ID NO: 3234321 - RNA, 19 nt, Artificial Sequence
  Description of Artificial Sequence: Synthetic oligonucleotide
ugagaaaauccucaccgag

SEQ ID NO: 3234322 - RNA, 19 nt, Artificial Sequence
  Description of Artificial Sequence: Synthetic oligonucleotide
agaggaagaagcucugggc

SEQ ID NO: 3234323 - RNA, 19 nt, Artificial Sequence
  Description of Artificial Sequence: Synthetic oligonucleotide
aaaguccaugagaaaaucc

SEQ ID NO: 3234324 - RNA, 19 nt, Artificial Sequence
  Description of Artificial Sequence: Synthetic oligonucleotide
aaucagacugcgcaaacca

SEQ ID NO: 3234325 - RNA, 19 nt, Artificial Sequence
  Description of Artificial Sequence: Synthetic oligonucleotide
acagguguagggcacuugc

SEQ ID NO: 3234326 - RNA, 19 nt, Artificial Sequence
  Description of Artificial Sequence: Synthetic oligonucleotide
ucugcagcuggccagagga

SEQ ID NO: 3234327 - RNA, 19 nt, Artificial Sequence
  Description of Artificial Sequence: Synthetic oligonucleotide
gaggaagaagcucugggcc

SEQ ID NO: 3234328 - RNA, 19 nt, Artificial Sequence
  Description of Artificial Sequence: Synthetic oligonucleotide
ugaggcaaaguccaugaga

SEQ ID NO: 3234329 - RNA, 19 nt, Artificial Sequence
  Description of Artificial Sequence: Synthetic oligonucleotide
ugcaaaccaggcuuggccg

SEQ ID NO: 3234330 - RNA, 19 nt, Artificial Sequence
  Description of Artificial Sequence: Synthetic oligonucleotide
ugcugcuuugacaacuccg

SEQ ID NO: 3234331 - RNA, 19 nt, Artificial Sequence
  Description of Artificial Sequence: Synthetic oligonucleotide
aggaagaagcucugggccc

SEQ ID NO: 3234332 - RNA, 19 nt, Artificial Sequence
  Description of Artificial Sequence: Synthetic oligonucleotide
cugugugacuucuuuaugc

SEQ ID NO: 3234333 - RNA, 19 nt, Artificial Sequence
  Description of Artificial Sequence: Synthetic oligonucleotide
aacuccgucugaaucagac

SEQ ID NO: 3234334 - RNA, 19 nt, Artificial Sequence
  Description of Artificial Sequence: Synthetic oligonucleotide
cuuuaugcugcuuugacaa

SEQ ID NO: 3234335 - RNA, 19 nt, Artificial Sequence
  Description of Artificial Sequence: Synthetic oligonucleotide
aaguccaugagaaaauccu

SEQ ID NO: 3234336 - RNA, 19 nt, Artificial Sequence
  Description of Artificial Sequence: Synthetic oligonucleotide
gagaaaauccucaccgagg

SEQ ID NO: 3234337 - RNA, 19 nt, Artificial Sequence
  Description of Artificial Sequence: Synthetic oligonucleotide
ucagacugcgcaaaccagc

SEQ ID NO: 3234338 - RNA, 19 nt, Artificial Sequence
  Description of Artificial Sequence: Synthetic oligonucleotide
agcauucaccuuuuggauc

SEQ ID NO: 3234339 - RNA, 19 nt, Artificial Sequence
  Description of Artificial Sequence: Synthetic oligonucleotide
ucugaggcaaaguccauga

SEQ ID NO: 3234340 - RNA, 19 nt, Artificial Sequence
  Description of Artificial Sequence: Synthetic oligonucleotide
uuggaucuggguuagcugu

SEQ ID NO: 3234341 - RNA, 19 nt, Artificial Sequence
  Description of Artificial Sequence: Synthetic oligonucleotide
ucuuuaugcugcuuugaca

SEQ ID NO: 3234342 - RNA, 19 nt, Artificial Sequence
  Description of Artificial Sequence: Synthetic oligonucleotide
uucaccuuuuggaucuggg

SEQ ID NO: 3234343 - RNA, 19 nt, Artificial Sequence
  Description of Artificial Sequence: Synthetic oligonucleotide
uccuguuuccucuccagag

SEQ ID NO: 3234344 - RNA, 19 nt, Artificial Sequence
  Description of Artificial Sequence: Synthetic oligonucleotide
agguguagggcacuugcac

SEQ ID NO: 3234345 - RNA, 19 nt, Artificial Sequence
  Description of Artificial Sequence: Synthetic oligonucleotide
uucuuuaugcugcuuugac

SEQ ID NO: 3234346 - RNA, 19 nt, Artificial Sequence
  Description of Artificial Sequence: Synthetic oligonucleotide
accagcauucaccuuuugg

SEQ ID NO: 3234347 - RNA, 19 nt, Artificial Sequence
  Description of Artificial Sequence: Synthetic oligonucleotide
gaagcucugggccccaggg

SEQ ID NO: 3234348 - RNA, 19 nt, Artificial Sequence
  Description of Artificial Sequence: Synthetic oligonucleotide
uggggagucagccucugag

SEQ ID NO: 3234349 - RNA, 19 nt, Artificial Sequence
  Description of Artificial Sequence: Synthetic oligonucleotide
ugugugacuucuuuaugcu

SEQ ID NO: 3234350 - RNA, 19 nt, Artificial Sequence
  Description of Artificial Sequence: Synthetic oligonucleotide
uccagagccugcaucaucu

SEQ ID NO: 3234351 - RNA, 19 nt, Artificial Sequence
  Description of Artificial Sequence: Synthetic oligonucleotide
ugcuuugacaacuccgucu

SEQ ID NO: 3234352 - RNA, 19 nt, Artificial Sequence
  Description of Artificial Sequence: Synthetic oligonucleotide
cuccgucugaaucagacug

SEQ ID NO: 3234353 - RNA, 19 nt, Artificial Sequence
  Description of Artificial Sequence: Synthetic oligonucleotide
gucugaaucagacugcgca

SEQ ID NO: 3234354 - RNA, 19 nt, Artificial Sequence
  Description of Artificial Sequence: Synthetic oligonucleotide
uuuggaucuggguuagcug

SEQ ID NO: 3234355 - RNA, 19 nt, Artificial Sequence
  Description of Artificial Sequence: Synthetic oligonucleotide
gacaacuccgucugaauca

SEQ ID NO: 3234356 - RNA, 19 nt, Artificial Sequence
  Description of Artificial Sequence: Synthetic oligonucleotide
auggguagggccccucugc

SEQ ID NO: 3234357 - RNA, 19 nt, Artificial Sequence
  Description of Artificial Sequence: Synthetic oligonucleotide
uggucugcaaaccaggcuu

SEQ ID NO: 3234358 - RNA, 19 nt, Artificial Sequence
  Description of Artificial Sequence: Synthetic oligonucleotide
aaauccucaccgagggccc

SEQ ID NO: 3234359 - RNA, 19 nt, Artificial Sequence
  Description of Artificial Sequence: Synthetic oligonucleotide
ugcuccagcagcuccaggc

SEQ ID NO: 3234360 - RNA, 19 nt, Artificial Sequence
  Description of Artificial Sequence: Synthetic oligonucleotide
ugacaacuccgucugaauc

SEQ ID NO: 3234361 - RNA, 19 nt, Artificial Sequence
  Description of Artificial Sequence: Synthetic oligonucleotide
uuuuggaucuggguuagcu

SEQ ID NO: 3234362 - RNA, 19 nt, Artificial Sequence
  Description of Artificial Sequence: Synthetic oligonucleotide
ucuggguuagcugugggga

SEQ ID NO: 3234363 - RNA, 19 nt, Artificial Sequence
  Description of Artificial Sequence: Synthetic oligonucleotide
acuucuuuaugcugcuuug

SEQ ID NO: 3234364 - RNA, 19 nt, Artificial Sequence
  Description of Artificial Sequence: Synthetic oligonucleotide
cagaggaagaagcucuggg

SEQ ID NO: 3234365 - RNA, 19 nt, Artificial Sequence
  Description of Artificial Sequence: Synthetic oligonucleotide
agcaggacagguguagggc

SEQ ID NO: 3234366 - RNA, 19 nt, Artificial Sequence
  Description of Artificial Sequence: Synthetic oligonucleotide
agagcauccuguuuccucu

SEQ ID NO: 3234367 - RNA, 19 nt, Artificial Sequence
  Description of Artificial Sequence: Synthetic oligonucleotide
aucaucugcagcuggccag

SEQ ID NO: 3234368 - RNA, 19 nt, Artificial Sequence
  Description of Artificial Sequence: Synthetic oligonucleotide
uuaugcugcuuugacaacu

SEQ ID NO: 3234369 - RNA, 19 nt, Artificial Sequence
  Description of Artificial Sequence: Synthetic oligonucleotide
agagccaccucucccuugg

SEQ ID NO: 3234370 - RNA, 19 nt, Artificial Sequence
  Description of Artificial Sequence: Synthetic oligonucleotide
uuggccgugcuccagcagc

SEQ ID NO: 3234371 - RNA, 19 nt, Artificial Sequence
  Description of Artificial Sequence: Synthetic oligonucleotide
ugagguggucugcaaacca

SEQ ID NO: 3234372 - RNA, 19 nt, Artificial Sequence
  Description of Artificial Sequence: Synthetic oligonucleotide
cuguuuccucuccagagcc

SEQ ID NO: 3234373 - RNA, 19 nt, Artificial Sequence
  Description of Artificial Sequence: Synthetic oligonucleotide
uccaugagaaaauccucac

SEQ ID NO: 3234374 - RNA, 19 nt, Artificial Sequence
  Description of Artificial Sequence: Synthetic oligonucleotide
cugcaaaccaggcuuggcc

SEQ ID NO: 3234375 - RNA, 19 nt, Artificial Sequence
  Description of Artificial Sequence: Synthetic oligonucleotide
agcucugggccccaggguc

SEQ ID NO: 3234376 - RNA, 19 nt, Artificial Sequence
  Description of Artificial Sequence: Synthetic oligonucleotide
aucuggguuagcugugggg

SEQ ID NO: 3234377 - RNA, 19 nt, Artificial Sequence
  Description of Artificial Sequence: Synthetic oligonucleotide
gaggcaaaguccaugagaa

SEQ ID NO: 3234378 - RNA, 19 nt, Artificial Sequence
  Description of Artificial Sequence: Synthetic oligonucleotide
uuagcuguggggagucagc

SEQ ID NO: 3234379 - RNA, 19 nt, Artificial Sequence
  Description of Artificial Sequence: Synthetic oligonucleotide
ugaaucagacugcgcaaac

SEQ ID NO: 3234380 - RNA, 19 nt, Artificial Sequence
  Description of Artificial Sequence: Synthetic oligonucleotide
ugcaucaucugcagcuggc

SEQ ID NO: 3234381 - RNA, 19 nt, Artificial Sequence
  Description of Artificial Sequence: Synthetic oligonucleotide
ucugaaucagacugcgcaa

SEQ ID NO: 3234382 - RNA, 19 nt, Artificial Sequence
  Description of Artificial Sequence: Synthetic oligonucleotide
ugacagagccaccucuccc

SEQ ID NO: 3234383 - RNA, 19 nt, Artificial Sequence
  Description of Artificial Sequence: Synthetic oligonucleotide
agcauccuguuuccucucc

SEQ ID NO: 3234384 - RNA, 19 nt, Artificial Sequence
  Description of Artificial Sequence: Synthetic oligonucleotide
uuugacaacuccgucugaa

SEQ ID NO: 3234385 - RNA, 19 nt, Artificial Sequence
  Description of Artificial Sequence: Synthetic oligonucleotide
ugcgcaaaccagcauucac

SEQ ID NO: 3234386 - RNA, 19 nt, Artificial Sequence
  Description of Artificial Sequence: Synthetic oligonucleotide
augagaaaauccucaccga

SEQ ID NO: 3234387 - RNA, 19 nt, Artificial Sequence
  Description of Artificial Sequence: Synthetic oligonucleotide
gaaucagacugcgcaaacc

SEQ ID NO: 3234388 - RNA, 19 nt, Artificial Sequence
  Description of Artificial Sequence: Synthetic oligonucleotide
agcagcuccaggcccugcc

SEQ ID NO: 3234389 - RNA, 19 nt, Artificial Sequence
  Description of Artificial Sequence: Synthetic oligonucleotide
uccgucugaaucagacugc

SEQ ID NO: 3234390 - RNA, 19 nt, Artificial Sequence
  Description of Artificial Sequence: Synthetic oligonucleotide
ugcugggccucccugaggu

SEQ ID NO: 3234391 - RNA, 19 nt, Artificial Sequence
  Description of Artificial Sequence: Synthetic oligonucleotide
ucucccuuggacuguguga

SEQ ID NO: 3234392 - RNA, 19 nt, Artificial Sequence
  Description of Artificial Sequence: Synthetic oligonucleotide
ucaccuuuuggaucugggu

SEQ ID NO: 3234393 - RNA, 19 nt, Artificial Sequence
  Description of Artificial Sequence: Synthetic oligonucleotide
aguccaugagaaaauccuc

SEQ ID NO: 3234394 - RNA, 19 nt, Artificial Sequence
  Description of Artificial Sequence: Synthetic oligonucleotide
uccaggcccugccacagag

SEQ ID NO: 3234395 - RNA, 19 nt, Artificial Sequence
  Description of Artificial Sequence: Synthetic oligonucleotide
agccucugaggcaaagucc

SEQ ID NO: 3234396 - RNA, 19 nt, Artificial Sequence
  Description of Artificial Sequence: Synthetic oligonucleotide
uaugcugcuuugacaacuc

SEQ ID NO: 3234397 - RNA, 19 nt, Artificial Sequence
  Description of Artificial Sequence: Synthetic oligonucleotide
acugugugacuucuuuaug

SEQ ID NO: 3234398 - RNA, 19 nt, Artificial Sequence
  Description of Artificial Sequence: Synthetic oligonucleotide
augcugcuuugacaacucc

SEQ ID NO: 3234399 - RNA, 19 nt, Artificial Sequence
  Description of Artificial Sequence: Synthetic oligonucleotide
gaucuggguuagcuguggg

SEQ ID NO: 3234400 - RNA, 19 nt, Artificial Sequence
  Description of Artificial Sequence: Synthetic oligonucleotide
aaaccaggcuuggccgugc

SEQ ID NO: 3234401 - RNA, 19 nt, Artificial Sequence
  Description of Artificial Sequence: Synthetic oligonucleotide
gaaaauccucaccgagggc

SEQ ID NO: 3234402 - RNA, 19 nt, Artificial Sequence
  Description of Artificial Sequence: Synthetic oligonucleotide
accuuuuggaucuggguua

SEQ ID NO: 3234403 - RNA, 19 nt, Artificial Sequence
  Description of Artificial Sequence: Synthetic oligonucleotide
gcuuugacaacuccgucug

SEQ ID NO: 3234404 - RNA, 19 nt, Artificial Sequence
  Description of Artificial Sequence: Synthetic oligonucleotide
uuuaugcugcuuugacaac

SEQ ID NO: 3234405 - RNA, 19 nt, Artificial Sequence
  Description of Artificial Sequence: Synthetic oligonucleotide
uggacugugugacuucuuu

SEQ ID NO: 3234406 - RNA, 19 nt, Artificial Sequence
  Description of Artificial Sequence: Synthetic oligonucleotide
ugcagcuggccagaggaag

SEQ ID NO: 3234407 - RNA, 19 nt, Artificial Sequence
  Description of Artificial Sequence: Synthetic oligonucleotide
cacagagcauccuguuucc

SEQ ID NO: 3234408 - RNA, 19 nt, Artificial Sequence
  Description of Artificial Sequence: Synthetic oligonucleotide
acugcgcaaaccagcauuc

SEQ ID NO: 3234409 - RNA, 19 nt, Artificial Sequence
  Description of Artificial Sequence: Synthetic oligonucleotide
aauccucaccgagggcccc

SEQ ID NO: 3234410 - RNA, 19 nt, Artificial Sequence
  Description of Artificial Sequence: Synthetic oligonucleotide
gagguggucugcaaaccag

SEQ ID NO: 3234411 - RNA, 19 nt, Artificial Sequence
  Description of Artificial Sequence: Synthetic oligonucleotide
cagcaggacagguguaggg

SEQ ID NO: 3234412 - RNA, 19 nt, Artificial Sequence
  Description of Artificial Sequence: Synthetic oligonucleotide
uggaucuggguuagcugug

SEQ ID NO: 3234413 - RNA, 19 nt, Artificial Sequence
  Description of Artificial Sequence: Synthetic oligonucleotide
acaacuccgucugaaucag

SEQ ID NO: 3234414 - RNA, 19 nt, Artificial Sequence
  Description of Artificial Sequence: Synthetic oligonucleotide
cauccuguuuccucuccag

SEQ ID NO: 3234415 - RNA, 19 nt, Artificial Sequence
  Description of Artificial Sequence: Synthetic oligonucleotide
caaaguccaugagaaaauc

SEQ ID NO: 3234416 - RNA, 19 nt, Artificial Sequence
  Description of Artificial Sequence: Synthetic oligonucleotide
cucccuuggacugugugac

SEQ ID NO: 3234417 - RNA, 19 nt, Artificial Sequence
  Description of Artificial Sequence: Synthetic oligonucleotide
aaauguauaaaacauaugg

SEQ ID NO: 3234418 - RNA, 19 nt, Artificial Sequence
  Description of Artificial Sequence: Synthetic oligonucleotide
aauaauacacauuaguacc

SEQ ID NO: 3234419 - RNA, 19 nt, Artificial Sequence
  Description of Artificial Sequence: Synthetic oligonucleotide
aaauaauacacauuaguac

SEQ ID NO: 3234420 - RNA, 19 nt, Artificial Sequence
  Description of Artificial Sequence: Synthetic oligonucleotide
aaaagaaaauaugagaacc

SEQ ID NO: 3234421 - RNA, 19 nt, Artificial Sequence
  Description of Artificial Sequence: Synthetic oligonucleotide
aauaugagaaccuggaaac

SEQ ID NO: 3234422 - RNA, 19 nt, Artificial Sequence
  Description of Artificial Sequence: Synthetic oligonucleotide
uuuucuaauaauaaaaugu

SEQ ID NO: 3234423 - RNA, 19 nt, Artificial Sequence
  Description of Artificial Sequence: Synthetic oligonucleotide
aagacagcaccucugaugc

SEQ ID NO: 3234424 - RNA, 19 nt, Artificial Sequence
  Description of Artificial Sequence: Synthetic oligonucleotide
aaauuaugcagcuaacagg

SEQ ID NO: 3234425 - RNA, 19 nt, Artificial Sequence
  Description of Artificial Sequence: Synthetic oligonucleotide
aauauauucaaagaaaaga

SEQ ID NO: 3234426 - RNA, 19 nt, Artificial Sequence
  Description of Artificial Sequence: Synthetic oligonucleotide
ucuaauaauaaaaugugca

SEQ ID NO: 3234427 - RNA, 19 nt, Artificial Sequence
  Description of Artificial Sequence: Synthetic oligonucleotide
aaaauaaacagccaaggaa

SEQ ID NO: 3234428 - RNA, 19 nt, Artificial Sequence
  Description of Artificial Sequence: Synthetic oligonucleotide
uagaaaauaauacacauua

SEQ ID NO: 3234429 - RNA, 19 nt, Artificial Sequence
  Description of Artificial Sequence: Synthetic oligonucleotide
aagaaaagaaaauaugaga

SEQ ID NO: 3234430 - RNA, 19 nt, Artificial Sequence
  Description of Artificial Sequence: Synthetic oligonucleotide
uuucuaauaauaaaaugug

SEQ ID NO: 3234431 - RNA, 19 nt, Artificial Sequence
  Description of Artificial Sequence: Synthetic oligonucleotide
uuacaaauguccuagaaga

SEQ ID NO: 3234432 - RNA, 19 nt, Artificial Sequence
  Description of Artificial Sequence: Synthetic oligonucleotide
aaaauacaaacugaagucg

SEQ ID NO: 3234433 - RNA, 19 nt, Artificial Sequence
  Description of Artificial Sequence: Synthetic oligonucleotide
aagaaaagggcauugauaa

SEQ ID NO: 3234434 - RNA, 19 nt, Artificial Sequence
  Description of Artificial Sequence: Synthetic oligonucleotide
uaaaauguauaaaacauau

SEQ ID NO: 3234435 - RNA, 19 nt, Artificial Sequence
  Description of Artificial Sequence: Synthetic oligonucleotide
cuuuuagaaaauaauacac

SEQ ID NO: 3234436 - RNA, 19 nt, Artificial Sequence
  Description of Artificial Sequence: Synthetic oligonucleotide
aauaaaauguauaaaacau

SEQ ID NO: 3234437 - RNA, 19 nt, Artificial Sequence
  Description of Artificial Sequence: Synthetic oligonucleotide
ucaaagaaaagaaaauaug

SEQ ID NO: 3234438 - RNA, 19 nt, Artificial Sequence
  Description of Artificial Sequence: Synthetic oligonucleotide
aauaaaaugugcaauauau

SEQ ID NO: 3234439 - RNA, 19 nt, Artificial Sequence
  Description of Artificial Sequence: Synthetic oligonucleotide
uuuaaaagaugucagaaua

SEQ ID NO: 3234440 - RNA, 19 nt, Artificial Sequence
  Description of Artificial Sequence: Synthetic oligonucleotide
aagaugucagaauaaaaug

SEQ ID NO: 3234441 - RNA, 19 nt, Artificial Sequence
  Description of Artificial Sequence: Synthetic oligonucleotide
gaaauuaugcagcuaacag

SEQ ID NO: 3234442 - RNA, 19 nt, Artificial Sequence
  Description of Artificial Sequence: Synthetic oligonucleotide
uaaaaugugcaauauauuc

SEQ ID NO: 3234443 - RNA, 19 nt, Artificial Sequence
  Description of Artificial Sequence: Synthetic oligonucleotide
aauaauaaaaugugcaaua

SEQ ID NO: 3234444 - RNA, 19 nt, Artificial Sequence
  Description of Artificial Sequence: Synthetic oligonucleotide
gaauaaaauguauaaaaca

SEQ ID NO: 3234445 - RNA, 19 nt, Artificial Sequence
  Description of Artificial Sequence: Synthetic oligonucleotide
aaagaaaagaaaauaugag

SEQ ID NO: 3234446 - RNA, 19 nt, Artificial Sequence
  Description of Artificial Sequence: Synthetic oligonucleotide
uuuuagaaaauaauacaca

SEQ ID NO: 3234447 - RNA, 19 nt, Artificial Sequence
  Description of Artificial Sequence: Synthetic oligonucleotide
aaauaugagaaccuggaaa

SEQ ID NO: 3234448 - RNA, 19 nt, Artificial Sequence
  Description of Artificial Sequence: Synthetic oligonucleotide
ucuuuuagaaaauaauaca

SEQ ID NO: 3234449 - RNA, 19 nt, Artificial Sequence
  Description of Artificial Sequence: Synthetic oligonucleotide
aauacacauuaguaccucc

SEQ ID NO: 3234450 - RNA, 19 nt, Artificial Sequence
  Description of Artificial Sequence: Synthetic oligonucleotide
auaaaugcaaaugugugcg

SEQ ID NO: 3234451 - RNA, 19 nt, Artificial Sequence
  Description of Artificial Sequence: Synthetic oligonucleotide
aaaggaacaucucggagag

SEQ ID NO: 3234452 - RNA, 19 nt, Artificial Sequence
  Description of Artificial Sequence: Synthetic oligonucleotide
uuugaagauggccacacag

SEQ ID NO: 3234453 - RNA, 19 nt, Artificial Sequence
  Description of Artificial Sequence: Synthetic oligonucleotide
aaagggcauugauaaaugc

SEQ ID NO: 3234454 - RNA, 19 nt, Artificial Sequence
  Description of Artificial Sequence: Synthetic oligonucleotide
uuuagaaaauaauacacau

SEQ ID NO: 3234455 - RNA, 19 nt, Artificial Sequence
  Description of Artificial Sequence: Synthetic oligonucleotide
ugauaaaugcaaaugugug

SEQ ID NO: 3234456 - RNA, 19 nt, Artificial Sequence
  Description of Artificial Sequence: Synthetic oligonucleotide
uucaaagaaaagaaaauau

SEQ ID NO: 3234457 - RNA, 19 nt, Artificial Sequence
  Description of Artificial Sequence: Synthetic oligonucleotide
cuagaagaaauuaugcagc

SEQ ID NO: 3234458 - RNA, 19 nt, Artificial Sequence
  Description of Artificial Sequence: Synthetic oligonucleotide
gagccuagaggauagaagg

SEQ ID NO: 3234459 - RNA, 19 nt, Artificial Sequence
  Description of Artificial Sequence: Synthetic oligonucleotide
auuaguaccuccugggugg

SEQ ID NO: 3234460 - RNA, 19 nt, Artificial Sequence
  Description of Artificial Sequence: Synthetic oligonucleotide
aauuaugcagcuaacagga

SEQ ID NO: 3234461 - RNA, 19 nt, Artificial Sequence
  Description of Artificial Sequence: Synthetic oligonucleotide
uguauaaaacauauggaaa

SEQ ID NO: 3234462 - RNA, 19 nt, Artificial Sequence
  Description of Artificial Sequence: Synthetic oligonucleotide
agaauaaaauguauaaaac

SEQ ID NO: 3234463 - RNA, 19 nt, Artificial Sequence
  Description of Artificial Sequence: Synthetic oligonucleotide
cucuuuuagaaaauaauac

SEQ ID NO: 3234464 - RNA, 19 nt, Artificial Sequence
  Description of Artificial Sequence: Synthetic oligonucleotide
gauaaaugcaaaugugugc

SEQ ID NO: 3234465 - RNA, 19 nt, Artificial Sequence
  Description of Artificial Sequence: Synthetic oligonucleotide
aagauggccacacagacaa

SEQ ID NO: 3234466 - RNA, 19 nt, Artificial Sequence
  Description of Artificial Sequence: Synthetic oligonucleotide
uugauaaaugcaaaugugu

SEQ ID NO: 3234467 - RNA, 19 nt, Artificial Sequence
  Description of Artificial Sequence: Synthetic oligonucleotide
uucuaauaauaaaaugugc

SEQ ID NO: 3234468 - RNA, 19 nt, Artificial Sequence
  Description of Artificial Sequence: Synthetic oligonucleotide
uaugcagcuaacaggaaag

SEQ ID NO: 3234469 - RNA, 19 nt, Artificial Sequence
  Description of Artificial Sequence: Synthetic oligonucleotide
caaagaaaagaaaauauga

SEQ ID NO: 3234470 - RNA, 19 nt, Artificial Sequence
  Description of Artificial Sequence: Synthetic oligonucleotide
aaaugugcaauauauucaa

SEQ ID NO: 3234471 - RNA, 19 nt, Artificial Sequence
  Description of Artificial Sequence: Synthetic oligonucleotide
aaagaugucagaauaaaau

SEQ ID NO: 3234472 - RNA, 19 nt, Artificial Sequence
  Description of Artificial Sequence: Synthetic oligonucleotide
aaauaaacagccaaggaaa

SEQ ID NO: 3234473 - RNA, 19 nt, Artificial Sequence
  Description of Artificial Sequence: Synthetic oligonucleotide
auguauaaaacauauggaa

SEQ ID NO: 3234474 - RNA, 19 nt, Artificial Sequence
  Description of Artificial Sequence: Synthetic oligonucleotide
ugcaauauauucaaagaaa

SEQ ID NO: 3234475 - RNA, 19 nt, Artificial Sequence
  Description of Artificial Sequence: Synthetic oligonucleotide
uauauguugugucuguuac

SEQ ID NO: 3234476 - RNA, 19 nt, Artificial Sequence
  Description of Artificial Sequence: Synthetic oligonucleotide
ucuguuacaaauguccuag

SEQ ID NO: 3234477 - RNA, 19 nt, Artificial Sequence
  Description of Artificial Sequence: Synthetic oligonucleotide
aaaauaauacacauuagua

SEQ ID NO: 3234478 - RNA, 19 nt, Artificial Sequence
  Description of Artificial Sequence: Synthetic oligonucleotide
uauauucaaagaaaagaaa

SEQ ID NO: 3234479 - RNA, 19 nt, Artificial Sequence
  Description of Artificial Sequence: Synthetic oligonucleotide
uauucaaagaaaagaaaau

SEQ ID NO: 3234480 - RNA, 19 nt, Artificial Sequence
  Description of Artificial Sequence: Synthetic oligonucleotide
ugugcaauauauucaaaga

SEQ ID NO: 3234481 - RNA, 19 nt, Artificial Sequence
  Description of Artificial Sequence: Synthetic oligonucleotide
gaaaagaaaauaugagaac

SEQ ID NO: 3234482 - RNA, 19 nt, Artificial Sequence
  Description of Artificial Sequence: Synthetic oligonucleotide
uguccuagaagaaauuaug

SEQ ID NO: 3234483 - RNA, 19 nt, Artificial Sequence
  Description of Artificial Sequence: Synthetic oligonucleotide
augugcaauauauucaaag

SEQ ID NO: 3234484 - RNA, 19 nt, Artificial Sequence
  Description of Artificial Sequence: Synthetic oligonucleotide
gaagaaauuaugcagcuaa

SEQ ID NO: 3234485 - RNA, 19 nt, Artificial Sequence
  Description of Artificial Sequence: Synthetic oligonucleotide
aauguauaaaacauaugga

SEQ ID NO: 3234486 - RNA, 19 nt, Artificial Sequence
  Description of Artificial Sequence: Synthetic oligonucleotide
guuacaaauguccuagaag

SEQ ID NO: 3234487 - RNA, 19 nt, Artificial Sequence
  Description of Artificial Sequence: Synthetic oligonucleotide
agaaaagaaaauaugagaa

SEQ ID NO: 3234488 - RNA, 19 nt, Artificial Sequence
  Description of Artificial Sequence: Synthetic oligonucleotide
aaaaugugcaauauauuca

SEQ ID NO: 3234489 - RNA, 19 nt, Artificial Sequence
  Description of Artificial Sequence: Synthetic oligonucleotide
gaaaauaauacacauuagu

SEQ ID NO: 3234490 - RNA, 19 nt, Artificial Sequence
  Description of Artificial Sequence: Synthetic oligonucleotide
caauauauucaaagaaaag

SEQ ID NO: 3234491 - RNA, 19 nt, Artificial Sequence
  Description of Artificial Sequence: Synthetic oligonucleotide
uuaaaagaugucagaauaa

SEQ ID NO: 3234492 - RNA, 19 nt, Artificial Sequence
  Description of Artificial Sequence: Synthetic oligonucleotide
guauaaaacauauggaaaa

SEQ ID NO: 3234493 - RNA, 19 nt, Artificial Sequence
  Description of Artificial Sequence: Synthetic oligonucleotide
cagaauaaaauguauaaaa

SEQ ID NO: 3234494 - RNA, 19 nt, Artificial Sequence
  Description of Artificial Sequence: Synthetic oligonucleotide
auacaaacugaagucgucc

SEQ ID NO: 3234495 - RNA, 19 nt, Artificial Sequence
  Description of Artificial Sequence: Synthetic oligonucleotide
aagaaaauaugagaaccug

SEQ ID NO: 3234496 - RNA, 19 nt, Artificial Sequence
  Description of Artificial Sequence: Synthetic oligonucleotide
uuuaaagaaaagggcauug

SEQ ID NO: 3234497 - RNA, 19 nt, Artificial Sequence
  Description of Artificial Sequence: Synthetic oligonucleotide
uguugugucuguuacaaau

SEQ ID NO: 3234498 - RNA, 19 nt, Artificial Sequence
  Description of Artificial Sequence: Synthetic oligonucleotide
gagagcagagccuagagga

SEQ ID NO: 3234499 - RNA, 19 nt, Artificial Sequence
  Description of Artificial Sequence: Synthetic oligonucleotide
ugaagauggccacacagac

SEQ ID NO: 3234500 - RNA, 19 nt, Artificial Sequence
  Description of Artificial Sequence: Synthetic oligonucleotide
uccuagaagaaauuaugca

SEQ ID NO: 3234501 - RNA, 19 nt, Artificial Sequence
  Description of Artificial Sequence: Synthetic oligonucleotide
aaaugcaaaugugugcguc

SEQ ID NO: 3234502 - RNA, 19 nt, Artificial Sequence
  Description of Artificial Sequence: Synthetic oligonucleotide
aaccacuuaccucuuuuag

SEQ ID NO: 3234503 - RNA, 19 nt, Artificial Sequence
  Description of Artificial Sequence: Synthetic oligonucleotide
aaagaaaauaugagaaccu

SEQ ID NO: 3234504 - RNA, 19 nt, Artificial Sequence
  Description of Artificial Sequence: Synthetic oligonucleotide
uaauaauaaaaugugcaau

SEQ ID NO: 3234505 - RNA, 19 nt, Artificial Sequence
  Description of Artificial Sequence: Synthetic oligonucleotide
uuuuaaaagaugucagaau

SEQ ID NO: 3234506 - RNA, 19 nt, Artificial Sequence
  Description of Artificial Sequence: Synthetic oligonucleotide
auauauucaaagaaaagaa

SEQ ID NO: 3234507 - RNA, 19 nt, Artificial Sequence
  Description of Artificial Sequence: Synthetic oligonucleotide
auauucaaagaaaagaaaa

SEQ ID NO: 3234508 - RNA, 19 nt, Artificial Sequence
  Description of Artificial Sequence: Synthetic oligonucleotide
gaagacagcaccucugaug

SEQ ID NO: 3234509 - RNA, 19 nt, Artificial Sequence
  Description of Artificial Sequence: Synthetic oligonucleotide
gaaaauaugagaaccugga

SEQ ID NO: 3234510 - RNA, 19 nt, Artificial Sequence
  Description of Artificial Sequence: Synthetic oligonucleotide
aaugcaaaugugugcgucu

SEQ ID NO: 3234511 - RNA, 19 nt, Artificial Sequence
  Description of Artificial Sequence: Synthetic oligonucleotide
gaggauagaagggaaaccc

SEQ ID NO: 3234512 - RNA, 19 nt, Artificial Sequence
  Description of Artificial Sequence: Synthetic oligonucleotide
agaaaauaugagaaccugg

SEQ ID NO: 3234513 - RNA, 19 nt, Artificial Sequence
  Description of Artificial Sequence: Synthetic oligonucleotide
uaaagaaaagggcauugau

SEQ ID NO: 3234514 - RNA, 19 nt, Artificial Sequence
  Description of Artificial Sequence: Synthetic oligonucleotide
aaaauaugagaaccuggaa

SEQ ID NO: 3234515 - RNA, 19 nt, Artificial Sequence
  Description of Artificial Sequence: Synthetic oligonucleotide
cacauuaguaccuccuggg

SEQ ID NO: 3234516 - RNA, 19 nt, Artificial Sequence
  Description of Artificial Sequence: Synthetic oligonucleotide
aauacaaacugaagucguc

SEQ ID NO: 3234517 - RNA, 19 nt, Artificial Sequence
  Description of Artificial Sequence: Synthetic oligonucleotide
aauauccucaauuuucugg

SEQ ID NO: 3234518 - RNA, 19 nt, Artificial Sequence
  Description of Artificial Sequence: Synthetic oligonucleotide
auuuucuuaagcuuuucac

SEQ ID NO: 3234519 - RNA, 19 nt, Artificial Sequence
  Description of Artificial Sequence: Synthetic oligonucleotide
auauccucaauuuucuggc

SEQ ID NO: 3234520 - RNA, 19 nt, Artificial Sequence
  Description of Artificial Sequence: Synthetic oligonucleotide
aacucucugccuuagguac

SEQ ID NO: 3234521 - RNA, 19 nt, Artificial Sequence
  Description of Artificial Sequence: Synthetic oligonucleotide
uuggaauccagaaacaagc

SEQ ID NO: 3234522 - RNA, 19 nt, Artificial Sequence
  Description of Artificial Sequence: Synthetic oligonucleotide
uuuucuuaagcuuuucacc

SEQ ID NO: 3234523 - RNA, 19 nt, Artificial Sequence
  Description of Artificial Sequence: Synthetic oligonucleotide
uuuucaccaaucuucagcc

SEQ ID NO: 3234524 - RNA, 19 nt, Artificial Sequence
  Description of Artificial Sequence: Synthetic oligonucleotide
uuucuuaagcuuuucacca

SEQ ID NO: 3234525 - RNA, 19 nt, Artificial Sequence
  Description of Artificial Sequence: Synthetic oligonucleotide
ugauuguccccacacaccg

SEQ ID NO: 3234526 - RNA, 19 nt, Artificial Sequence
  Description of Artificial Sequence: Synthetic oligonucleotide
aagcuuuucaccaaucuuc

SEQ ID NO: 3234527 - RNA, 19 nt, Artificial Sequence
  Description of Artificial Sequence: Synthetic oligonucleotide
uuuggaauccagaaacaag

SEQ ID NO: 3234528 - RNA, 19 nt, Artificial Sequence
  Description of Artificial Sequence: Synthetic oligonucleotide
ugucaaaagacucuguguc

SEQ ID NO: 3234529 - RNA, 19 nt, Artificial Sequence
  Description of Artificial Sequence: Synthetic oligonucleotide
uccuucaucaaauuuauau

SEQ ID NO: 3234530 - RNA, 19 nt, Artificial Sequence
  Description of Artificial Sequence: Synthetic oligonucleotide
aauuuucuggccaauuuuc

SEQ ID NO: 3234531 - RNA, 19 nt, Artificial Sequence
  Description of Artificial Sequence: Synthetic oligonucleotide
uuagguacaauuuucugaa

SEQ ID NO: 3234532 - RNA, 19 nt, Artificial Sequence
  Description of Artificial Sequence: Synthetic oligonucleotide
aauuuucuuaagcuuuuca

SEQ ID NO: 3234533 - RNA, 19 nt, Artificial Sequence
  Description of Artificial Sequence: Synthetic oligonucleotide
aaucugggaaccuuucuug

SEQ ID NO: 3234534 - RNA, 19 nt, Artificial Sequence
  Description of Artificial Sequence: Synthetic oligonucleotide
cuuuucaccaaucuucagc

SEQ ID NO: 3234535 - RNA, 19 nt, Artificial Sequence
  Description of Artificial Sequence: Synthetic oligonucleotide
gaugucaaaagacucugug

SEQ ID NO: 3234536 - RNA, 19 nt, Artificial Sequence
  Description of Artificial Sequence: Synthetic oligonucleotide
aaagacucuguguccuggc

SEQ ID NO: 3234537 - RNA, 19 nt, Artificial Sequence
  Description of Artificial Sequence: Synthetic oligonucleotide
uccagaaacaagccaaggc

SEQ ID NO: 3234538 - RNA, 19 nt, Artificial Sequence
  Description of Artificial Sequence: Synthetic oligonucleotide
aaaauauccucaauuuucu

SEQ ID NO: 3234539 - RNA, 19 nt, Artificial Sequence
  Description of Artificial Sequence: Synthetic oligonucleotide
uuaagcuuuucaccaaucu

SEQ ID NO: 3234540 - RNA, 19 nt, Artificial Sequence
  Description of Artificial Sequence: Synthetic oligonucleotide
ugaaguuacauugcuccgg

SEQ ID NO: 3234541 - RNA, 19 nt, Artificial Sequence
  Description of Artificial Sequence: Synthetic oligonucleotide
ugucccaggcccuugacag

SEQ ID NO: 3234542 - RNA, 19 nt, Artificial Sequence
  Description of Artificial Sequence: Synthetic oligonucleotide
uucaccaaucuucagccca

SEQ ID NO: 3234543 - RNA, 19 nt, Artificial Sequence
  Description of Artificial Sequence: Synthetic oligonucleotide
aguccagcaaucugggaac

SEQ ID NO: 3234544 - RNA, 19 nt, Artificial Sequence
  Description of Artificial Sequence: Synthetic oligonucleotide
cuucacuaccccauggucc

SEQ ID NO: 3234545 - RNA, 19 nt, Artificial Sequence
  Description of Artificial Sequence: Synthetic oligonucleotide
aaacaagccaaggcaggcc

SEQ ID NO: 3234546 - RNA, 19 nt, Artificial Sequence
  Description of Artificial Sequence: Synthetic oligonucleotide
cuuagguacaauuuucuga

SEQ ID NO: 3234547 - RNA, 19 nt, Artificial Sequence
  Description of Artificial Sequence: Synthetic oligonucleotide
gaggaguccagcaaucugg

SEQ ID NO: 3234548 - RNA, 19 nt, Artificial Sequence
  Description of Artificial Sequence: Synthetic oligonucleotide
aaaagacucuguguccugg

SEQ ID NO: 3234549 - RNA, 19 nt, Artificial Sequence
  Description of Artificial Sequence: Synthetic oligonucleotide
aaauauccucaauuuucug

SEQ ID NO: 3234550 - RNA, 19 nt, Artificial Sequence
  Description of Artificial Sequence: Synthetic oligonucleotide
ugacagucgaugucaaaag

SEQ ID NO: 3234551 - RNA, 19 nt, Artificial Sequence
  Description of Artificial Sequence: Synthetic oligonucleotide
uuuccuucaucaaauuuau

SEQ ID NO: 3234552 - RNA, 19 nt, Artificial Sequence
  Description of Artificial Sequence: Synthetic oligonucleotide
aacaagccaaggcaggccu

SEQ ID NO: 3234553 - RNA, 19 nt, Artificial Sequence
  Description of Artificial Sequence: Synthetic oligonucleotide
cagaaacaagccaaggcag

SEQ ID NO: 3234554 - RNA, 19 nt, Artificial Sequence
  Description of Artificial Sequence: Synthetic oligonucleotide
uucacuaccccaugguccc

SEQ ID NO: 3234555 - RNA, 19 nt, Artificial Sequence
  Description of Artificial Sequence: Synthetic oligonucleotide
ccugaaguuacauugcucc

SEQ ID NO: 3234556 - RNA, 19 nt, Artificial Sequence
  Description of Artificial Sequence: Synthetic oligonucleotide
acagucgaugucaaaagac

SEQ ID NO: 3234557 - RNA, 19 nt, Artificial Sequence
  Description of Artificial Sequence: Synthetic oligonucleotide
uggaauccagaaacaagcc

SEQ ID NO: 3234558 - RNA, 19 nt, Artificial Sequence
  Description of Artificial Sequence: Synthetic oligonucleotide
uggccaauuuucuuaagcu

SEQ ID NO: 3234559 - RNA, 19 nt, Artificial Sequence
  Description of Artificial Sequence: Synthetic oligonucleotide
aaccuuucuugacuggcug

SEQ ID NO: 3234560 - RNA, 19 nt, Artificial Sequence
  Description of Artificial Sequence: Synthetic oligonucleotide
uucaucaaauuuauauuuu

SEQ ID NO: 3234561 - RNA, 19 nt, Artificial Sequence
  Description of Artificial Sequence: Synthetic oligonucleotide
ucaauuuucuggccaauuu

SEQ ID NO: 3234562 - RNA, 19 nt, Artificial Sequence
  Description of Artificial Sequence: Synthetic oligonucleotide
uuuggaggaguccagcaau

SEQ ID NO: 3234563 - RNA, 19 nt, Artificial Sequence
  Description of Artificial Sequence: Synthetic oligonucleotide
ucaaaagacucuguguccu

SEQ ID NO: 3234564 - RNA, 19 nt, Artificial Sequence
  Description of Artificial Sequence: Synthetic oligonucleotide
uugacagucgaugucaaaa

SEQ ID NO: 3234565 - RNA, 19 nt, Artificial Sequence
  Description of Artificial Sequence: Synthetic oligonucleotide
ucugccuuagguacaauuu

SEQ ID NO: 3234566 - RNA, 19 nt, Artificial Sequence
  Description of Artificial Sequence: Synthetic oligonucleotide
augucaaaagacucugugu

SEQ ID NO: 3234567 - RNA, 19 nt, Artificial Sequence
  Description of Artificial Sequence: Synthetic oligonucleotide
ggucccugaaguuacauug

SEQ ID NO: 3234568 - RNA, 19 nt, Artificial Sequence
  Description of Artificial Sequence: Synthetic oligonucleotide
agguacaauuuucugaaaa

SEQ ID NO: 3234569 - RNA, 19 nt, Artificial Sequence
  Description of Artificial Sequence: Synthetic oligonucleotide
gaauccagaaacaagccaa

SEQ ID NO: 3234570 - RNA, 19 nt, Artificial Sequence
  Description of Artificial Sequence: Synthetic oligonucleotide
acuggcugggguugugucc

SEQ ID NO: 3234571 - RNA, 19 nt, Artificial Sequence
  Description of Artificial Sequence: Synthetic oligonucleotide
cuggccaauuuucuuaagc

SEQ ID NO: 3234572 - RNA, 19 nt, Artificial Sequence
  Description of Artificial Sequence: Synthetic oligonucleotide
uaagcuuuucaccaaucuu

SEQ ID NO: 3234573 - RNA, 19 nt, Artificial Sequence
  Description of Artificial Sequence: Synthetic oligonucleotide
uuucuggccaauuuucuua

SEQ ID NO: 3234574 - RNA, 19 nt, Artificial Sequence
  Description of Artificial Sequence: Synthetic oligonucleotide
gacucuguguccuggcucc

SEQ ID NO: 3234575 - RNA, 19 nt, Artificial Sequence
  Description of Artificial Sequence: Synthetic oligonucleotide
uuuuggaauccagaaacaa

SEQ ID NO: 3234576 - RNA, 19 nt, Artificial Sequence
  Description of Artificial Sequence: Synthetic oligonucleotide
uuucuugacuggcuggggu

SEQ ID NO: 3234577 - RNA, 19 nt, Artificial Sequence
  Description of Artificial Sequence: Synthetic oligonucleotide
gucaaaagacucugugucc

SEQ ID NO: 3234578 - RNA, 19 nt, Artificial Sequence
  Description of Artificial Sequence: Synthetic oligonucleotide
cugaaguuacauugcuccg

SEQ ID NO: 3234579 - RNA, 19 nt, Artificial Sequence
  Description of Artificial Sequence: Synthetic oligonucleotide
uuuuggaggaguccagcaa

SEQ ID NO: 3234580 - RNA, 19 nt, Artificial Sequence
  Description of Artificial Sequence: Synthetic oligonucleotide
aauccagaaacaagccaag

SEQ ID NO: 3234581 - RNA, 19 nt, Artificial Sequence
  Description of Artificial Sequence: Synthetic oligonucleotide
ucuuaagcuuuucaccaau

SEQ ID NO: 3234582 - RNA, 19 nt, Artificial Sequence
  Description of Artificial Sequence: Synthetic oligonucleotide
ucgaugucaaaagacucug

SEQ ID NO: 3234583 - RNA, 19 nt, Artificial Sequence
  Description of Artificial Sequence: Synthetic oligonucleotide
agucgaugucaaaagacuc

SEQ ID NO: 3234584 - RNA, 19 nt, Artificial Sequence
  Description of Artificial Sequence: Synthetic oligonucleotide
gaaacaagccaaggcaggc

SEQ ID NO: 3234585 - RNA, 19 nt, Artificial Sequence
  Description of Artificial Sequence: Synthetic oligonucleotide
gaguccagcaaucugggaa

SEQ ID NO: 3234586 - RNA, 19 nt, Artificial Sequence
  Description of Artificial Sequence: Synthetic oligonucleotide
ugggaaccuuucuugacug

SEQ ID NO: 3234587 - RNA, 19 nt, Artificial Sequence
  Description of Artificial Sequence: Synthetic oligonucleotide
ucuguguccuggcuccggg

SEQ ID NO: 3234588 - RNA, 19 nt, Artificial Sequence
  Description of Artificial Sequence: Synthetic oligonucleotide
agacucuguguccuggcuc

SEQ ID NO: 3234589 - RNA, 19 nt, Artificial Sequence
  Description of Artificial Sequence: Synthetic oligonucleotide
agaaacaagccaaggcagg

SEQ ID NO: 3234590 - RNA, 19 nt, Artificial Sequence
  Description of Artificial Sequence: Synthetic oligonucleotide
ugccuuagguacaauuuuc

SEQ ID NO: 3234591 - RNA, 19 nt, Artificial Sequence
  Description of Artificial Sequence: Synthetic oligonucleotide
auuguccccacacaccgcu

SEQ ID NO: 3234592 - RNA, 19 nt, Artificial Sequence
  Description of Artificial Sequence: Synthetic oligonucleotide
uaccccauggucccugaag

SEQ ID NO: 3234593 - RNA, 19 nt, Artificial Sequence
  Description of Artificial Sequence: Synthetic oligonucleotide
accuuucuugacuggcugg

SEQ ID NO: 3234594 - RNA, 19 nt, Artificial Sequence
  Description of Artificial Sequence: Synthetic oligonucleotide
uguguccuggcuccgggug

SEQ ID NO: 3234595 - RNA, 19 nt, Artificial Sequence
  Description of Artificial Sequence: Synthetic oligonucleotide
aagacucuguguccuggcu

SEQ ID NO: 3234596 - RNA, 19 nt, Artificial Sequence
  Description of Artificial Sequence: Synthetic oligonucleotide
uauccucaauuuucuggcc

SEQ ID NO: 3234597 - RNA, 19 nt, Artificial Sequence
  Description of Artificial Sequence: Synthetic oligonucleotide
auccucaauuuucuggcca

SEQ ID NO: 3234598 - RNA, 19 nt, Artificial Sequence
  Description of Artificial Sequence: Synthetic oligonucleotide
cuuaagcuuuucaccaauc

SEQ ID NO: 3234599 - RNA, 19 nt, Artificial Sequence
  Description of Artificial Sequence: Synthetic oligonucleotide
gacagucgaugucaaaaga

SEQ ID NO: 3234600 - RNA, 19 nt, Artificial Sequence
  Description of Artificial Sequence: Synthetic oligonucleotide
ggugauuguccccacacac

SEQ ID NO: 3234601 - RNA, 19 nt, Artificial Sequence
  Description of Artificial Sequence: Synthetic oligonucleotide
ucccugaaguuacauugcu

SEQ ID NO: 3234602 - RNA, 19 nt, Artificial Sequence
  Description of Artificial Sequence: Synthetic oligonucleotide
ucugggaaccuuucuugac

SEQ ID NO: 3234603 - RNA, 19 nt, Artificial Sequence
  Description of Artificial Sequence: Synthetic oligonucleotide
uuuucuggccaauuuucuu

SEQ ID NO: 3234604 - RNA, 19 nt, Artificial Sequence
  Description of Artificial Sequence: Synthetic oligonucleotide
ucaccaaucuucagcccac

SEQ ID NO: 3234605 - RNA, 19 nt, Artificial Sequence
  Description of Artificial Sequence: Synthetic oligonucleotide
cuucaucaaauuuauauuu

SEQ ID NO: 3234606 - RNA, 19 nt, Artificial Sequence
  Description of Artificial Sequence: Synthetic oligonucleotide
uaacucucugccuuaggua

SEQ ID NO: 3234607 - RNA, 19 nt, Artificial Sequence
  Description of Artificial Sequence: Synthetic oligonucleotide
uuucaccaaucuucagccc

SEQ ID NO: 3234608 - RNA, 19 nt, Artificial Sequence
  Description of Artificial Sequence: Synthetic oligonucleotide
uucuggccaauuuucuuaa

SEQ ID NO: 3234609 - RNA, 19 nt, Artificial Sequence
  Description of Artificial Sequence: Synthetic oligonucleotide
uucuuaagcuuuucaccaa

SEQ ID NO: 3234610 - RNA, 19 nt, Artificial Sequence
  Description of Artificial Sequence: Synthetic oligonucleotide
uccucaauuuucuggccaa

SEQ ID NO: 3234611 - RNA, 19 nt, Artificial Sequence
  Description of Artificial Sequence: Synthetic oligonucleotide
accccauggucccugaagu

SEQ ID NO: 3234612 - RNA, 19 nt, Artificial Sequence
  Description of Artificial Sequence: Synthetic oligonucleotide
gggguugugucccaggccc

SEQ ID NO: 3234613 - RNA, 19 nt, Artificial Sequence
  Description of Artificial Sequence: Synthetic oligonucleotide
aucugggaaccuuucuuga

SEQ ID NO: 3234614 - RNA, 19 nt, Artificial Sequence
  Description of Artificial Sequence: Synthetic oligonucleotide
auccagaaacaagccaagg

SEQ ID NO: 3234615 - RNA, 19 nt, Artificial Sequence
  Description of Artificial Sequence: Synthetic oligonucleotide
caaggcaggccuaacucuc

SEQ ID NO: 3234616 - RNA, 19 nt, Artificial Sequence
  Description of Artificial Sequence: Synthetic oligonucleotide
ucuugacuggcugggguug

SEQ ID NO: 3234617 - RNA, 19 nt, Artificial Sequence
  Description of Artificial Sequence: Synthetic oligonucleotide
agaauugcuggucaacucc

SEQ ID NO: 3234618 - RNA, 19 nt, Artificial Sequence
  Description of Artificial Sequence: Synthetic oligonucleotide
aagacggcgacacagaacu

SEQ ID NO: 3234619 - RNA, 19 nt, Artificial Sequence
  Description of Artificial Sequence: Synthetic oligonucleotide
cuuguuuucggacaaacuc

SEQ ID NO: 3234620 - RNA, 19 nt, Artificial Sequence
  Description of Artificial Sequence: Synthetic oligonucleotide
cuugugauagucuucuaag

SEQ ID NO: 3234621 - RNA, 19 nt, Artificial Sequence
  Description of Artificial Sequence: Synthetic oligonucleotide
uuugaagacggcgacacag

SEQ ID NO: 3234622 - RNA, 19 nt, Artificial Sequence
  Description of Artificial Sequence: Synthetic oligonucleotide
aagaauugcuggucaacuc

SEQ ID NO: 3234623 - RNA, 19 nt, Artificial Sequence
  Description of Artificial Sequence: Synthetic oligonucleotide
auagucuucuaagaauugc

SEQ ID NO: 3234624 - RNA, 19 nt, Artificial Sequence
  Description of Artificial Sequence: Synthetic oligonucleotide
ugugauagucuucuaagaa

SEQ ID NO: 3234625 - RNA, 19 nt, Artificial Sequence
  Description of Artificial Sequence: Synthetic oligonucleotide
aacuggaugacuuccgggu

SEQ ID NO: 3234626 - RNA, 19 nt, Artificial Sequence
  Description of Artificial Sequence: Synthetic oligonucleotide
gucuucuaagaauugcugg

SEQ ID NO: 3234627 - RNA, 19 nt, Artificial Sequence
  Description of Artificial Sequence: Synthetic oligonucleotide
uuugaucaucuugugauag

SEQ ID NO: 3234628 - RNA, 19 nt, Artificial Sequence
  Description of Artificial Sequence: Synthetic oligonucleotide
ucuucuaagaauugcuggu

SEQ ID NO: 3234629 - RNA, 19 nt, Artificial Sequence
  Description of Artificial Sequence: Synthetic oligonucleotide
ugauagucuucuaagaauu

SEQ ID NO: 3234630 - RNA, 19 nt, Artificial Sequence
  Description of Artificial Sequence: Synthetic oligonucleotide
aacggagccuccuuugauc

SEQ ID NO: 3234631 - RNA, 19 nt, Artificial Sequence
  Description of Artificial Sequence: Synthetic oligonucleotide
aguaguacuggcuggcauc

SEQ ID NO: 3234632 - RNA, 19 nt, Artificial Sequence
  Description of Artificial Sequence: Synthetic oligonucleotide
agcauuugaagacggcgac

SEQ ID NO: 3234633 - RNA, 19 nt, Artificial Sequence
  Description of Artificial Sequence: Synthetic oligonucleotide
cuggcuggcauccucaacg

SEQ ID NO: 3234634 - RNA, 19 nt, Artificial Sequence
  Description of Artificial Sequence: Synthetic oligonucleotide
acagaacuggaugacuucc

SEQ ID NO: 3234635 - RNA, 19 nt, Artificial Sequence
  Description of Artificial Sequence: Synthetic oligonucleotide
uucuaagaauugcugguca

SEQ ID NO: 3234636 - RNA, 19 nt, Artificial Sequence
  Description of Artificial Sequence: Synthetic oligonucleotide
uagucuucuaagaauugcu

SEQ ID NO: 3234637 - RNA, 19 nt, Artificial Sequence
  Description of Artificial Sequence: Synthetic oligonucleotide
ucuugugauagucuucuaa

SEQ ID NO: 3234638 - RNA, 19 nt, Artificial Sequence
  Description of Artificial Sequence: Synthetic oligonucleotide
gucacaguaguacuggcug

SEQ ID NO: 3234639 - RNA, 19 nt, Artificial Sequence
  Description of Artificial Sequence: Synthetic oligonucleotide
agaacuggaugacuuccgg

SEQ ID NO: 3234640 - RNA, 19 nt, Artificial Sequence
  Description of Artificial Sequence: Synthetic oligonucleotide
ugacuuccgggucaggcag

SEQ ID NO: 3234641 - RNA, 19 nt, Artificial Sequence
  Description of Artificial Sequence: Synthetic oligonucleotide
gaacuggaugacuuccggg

SEQ ID NO: 3234642 - RNA, 19 nt, Artificial Sequence
  Description of Artificial Sequence: Synthetic oligonucleotide
uaagaauugcuggucaacu

SEQ ID NO: 3234643 - RNA, 19 nt, Artificial Sequence
  Description of Artificial Sequence: Synthetic oligonucleotide
gaauugcuggucaacuccg

SEQ ID NO: 3234644 - RNA, 19 nt, Artificial Sequence
  Description of Artificial Sequence: Synthetic oligonucleotide
uugugauagucuucuaaga

SEQ ID NO: 3234645 - RNA, 19 nt, Artificial Sequence
  Description of Artificial Sequence: Synthetic oligonucleotide
cuugucacaguaguacugg

SEQ ID NO: 3234646 - RNA, 19 nt, Artificial Sequence
  Description of Artificial Sequence: Synthetic oligonucleotide
ugugcuggcuuguuuucgg

SEQ ID NO: 3234647 - RNA, 19 nt, Artificial Sequence
  Description of Artificial Sequence: Synthetic oligonucleotide
ucacaguaguacuggcugg

SEQ ID NO: 3234648 - RNA, 19 nt, Artificial Sequence
  Description of Artificial Sequence: Synthetic oligonucleotide
ucaggcagcuuugugcugg

SEQ ID NO: 3234649 - RNA, 19 nt, Artificial Sequence
  Description of Artificial Sequence: Synthetic oligonucleotide
uccuuugaucaucuuguga

SEQ ID NO: 3234650 - RNA, 19 nt, Artificial Sequence
  Description of Artificial Sequence: Synthetic oligonucleotide
aguacuggcuggcauccuc

SEQ ID NO: 3234651 - RNA, 19 nt, Artificial Sequence
  Description of Artificial Sequence: Synthetic oligonucleotide
ugucacaguaguacuggcu

SEQ ID NO: 3234652 - RNA, 19 nt, Artificial Sequence
  Description of Artificial Sequence: Synthetic oligonucleotide
cauuugaagacggcgacac

SEQ ID NO: 3234653 - RNA, 19 nt, Artificial Sequence
  Description of Artificial Sequence: Synthetic oligonucleotide
gacggcgacacagaacugg

SEQ ID NO: 3234654 - RNA, 19 nt, Artificial Sequence
  Description of Artificial Sequence: Synthetic oligonucleotide
gaugacuuccgggucaggc

SEQ ID NO: 3234655 - RNA, 19 nt, Artificial Sequence
  Description of Artificial Sequence: Synthetic oligonucleotide
aucaucuugugauagucuu

SEQ ID NO: 3234656 - RNA, 19 nt, Artificial Sequence
  Description of Artificial Sequence: Synthetic oligonucleotide
ugaucaucuugugauaguc

SEQ ID NO: 3234657 - RNA, 19 nt, Artificial Sequence
  Description of Artificial Sequence: Synthetic oligonucleotide
auugcuggucaacuccguc

SEQ ID NO: 3234658 - RNA, 19 nt, Artificial Sequence
  Description of Artificial Sequence: Synthetic oligonucleotide
gucaacuccgucuggggag

SEQ ID NO: 3234659 - RNA, 19 nt, Artificial Sequence
  Description of Artificial Sequence: Synthetic oligonucleotide
acuggaugacuuccggguc

SEQ ID NO: 3234660 - RNA, 19 nt, Artificial Sequence
  Description of Artificial Sequence: Synthetic oligonucleotide
ugcuggucaacuccgucug

SEQ ID NO: 3234661 - RNA, 19 nt, Artificial Sequence
  Description of Artificial Sequence: Synthetic oligonucleotide
ucuaagaauugcuggucaa

SEQ ID NO: 3234662 - RNA, 19 nt, Artificial Sequence
  Description of Artificial Sequence: Synthetic oligonucleotide
gauagucuucuaagaauug

SEQ ID NO: 3234663 - RNA, 19 nt, Artificial Sequence
  Description of Artificial Sequence: Synthetic oligonucleotide
ggagcauuugaagacggcg

SEQ ID NO: 3234664 - RNA, 19 nt, Artificial Sequence
  Description of Artificial Sequence: Synthetic oligonucleotide
uugaagacggcgacacaga

SEQ ID NO: 3234665 - RNA, 19 nt, Artificial Sequence
  Description of Artificial Sequence: Synthetic oligonucleotide
cagaacuggaugacuuccg

SEQ ID NO: 3234666 - RNA, 19 nt, Artificial Sequence
  Description of Artificial Sequence: Synthetic oligonucleotide
uugcuggucaacuccgucu

SEQ ID NO: 3234667 - RNA, 19 nt, Artificial Sequence
  Description of Artificial Sequence: Synthetic oligonucleotide
ugaagacggcgacacagaa

SEQ ID NO: 3234668 - RNA, 19 nt, Artificial Sequence
  Description of Artificial Sequence: Synthetic oligonucleotide
ucaucuugugauagucuuc

SEQ ID NO: 3234669 - RNA, 19 nt, Artificial Sequence
  Description of Artificial Sequence: Synthetic oligonucleotide
ucaacggagccuccuuuga

SEQ ID NO: 3234670 - RNA, 19 nt, Artificial Sequence
  Description of Artificial Sequence: Synthetic oligonucleotide
uggucaacuccgucugggg

SEQ ID NO: 3234671 - RNA, 19 nt, Artificial Sequence
  Description of Artificial Sequence: Synthetic oligonucleotide
cuggcauccucaacggagc

SEQ ID NO: 3234672 - RNA, 19 nt, Artificial Sequence
  Description of Artificial Sequence: Synthetic oligonucleotide
cuaagaauugcuggucaac

SEQ ID NO: 3234673 - RNA, 19 nt, Artificial Sequence
  Description of Artificial Sequence: Synthetic oligonucleotide
uugaucaucuugugauagu

SEQ ID NO: 3234674 - RNA, 19 nt, Artificial Sequence
  Description of Artificial Sequence: Synthetic oligonucleotide
caccuugucacaguaguac

SEQ ID NO: 3234675 - RNA, 19 nt, Artificial Sequence
  Description of Artificial Sequence: Synthetic oligonucleotide
agucuucuaagaauugcug

SEQ ID NO: 3234676 - RNA, 19 nt, Artificial Sequence
  Description of Artificial Sequence: Synthetic oligonucleotide
uggcuggcauccucaacgg

SEQ ID NO: 3234677 - RNA, 19 nt, Artificial Sequence
  Description of Artificial Sequence: Synthetic oligonucleotide
accuugucacaguaguacu

SEQ ID NO: 3234678 - RNA, 19 nt, Artificial Sequence
  Description of Artificial Sequence: Synthetic oligonucleotide
uugugcuggcuuguuuucg

SEQ ID NO: 3234679 - RNA, 19 nt, Artificial Sequence
  Description of Artificial Sequence: Synthetic oligonucleotide
augacuuccgggucaggca

SEQ ID NO: 3234680 - RNA, 19 nt, Artificial Sequence
  Description of Artificial Sequence: Synthetic oligonucleotide
uugucacaguaguacuggc

SEQ ID NO: 3234681 - RNA, 19 nt, Artificial Sequence
  Description of Artificial Sequence: Synthetic oligonucleotide
gagccgggagcauuugaag

SEQ ID NO: 3234682 - RNA, 19 nt, Artificial Sequence
  Description of Artificial Sequence: Synthetic oligonucleotide
acggagccuccuuugauca

SEQ ID NO: 3234683 - RNA, 19 nt, Artificial Sequence
  Description of Artificial Sequence: Synthetic oligonucleotide
uuugugcuggcuuguuuuc

SEQ ID NO: 3234684 - RNA, 19 nt, Artificial Sequence
  Description of Artificial Sequence: Synthetic oligonucleotide
guaguacuggcuggcaucc

SEQ ID NO: 3234685 - RNA, 19 nt, Artificial Sequence
  Description of Artificial Sequence: Synthetic oligonucleotide
ggcgacacagaacuggaug

SEQ ID NO: 3234686 - RNA, 19 nt, Artificial Sequence
  Description of Artificial Sequence: Synthetic oligonucleotide
agccgggagcauuugaaga

SEQ ID NO: 3234687 - RNA, 19 nt, Artificial Sequence
  Description of Artificial Sequence: Synthetic oligonucleotide
cuucuaagaauugcugguc

SEQ ID NO: 3234688 - RNA, 19 nt, Artificial Sequence
  Description of Artificial Sequence: Synthetic oligonucleotide
gagcauuugaagacggcga

SEQ ID NO: 3234689 - RNA, 19 nt, Artificial Sequence
  Description of Artificial Sequence: Synthetic oligonucleotide
gggucaggcagcuuugugc

SEQ ID NO: 3234690 - RNA, 19 nt, Artificial Sequence
  Description of Artificial Sequence: Synthetic oligonucleotide
ucuggggagcaggagccgg

SEQ ID NO: 3234691 - RNA, 19 nt, Artificial Sequence
  Description of Artificial Sequence: Synthetic oligonucleotide
cucaacggagccuccuuug

SEQ ID NO: 3234692 - RNA, 19 nt, Artificial Sequence
  Description of Artificial Sequence: Synthetic oligonucleotide
uuccgggucaggcagcuuu

SEQ ID NO: 3234693 - RNA, 19 nt, Artificial Sequence
  Description of Artificial Sequence: Synthetic oligonucleotide
acuggcuggcauccucaac

SEQ ID NO: 3234694 - RNA, 19 nt, Artificial Sequence
  Description of Artificial Sequence: Synthetic oligonucleotide
cuggucaacuccgucuggg

SEQ ID NO: 3234695 - RNA, 19 nt, Artificial Sequence
  Description of Artificial Sequence: Synthetic oligonucleotide
cacaguaguacuggcuggc

SEQ ID NO: 3234696 - RNA, 19 nt, Artificial Sequence
  Description of Artificial Sequence: Synthetic oligonucleotide
cacagaacuggaugacuuc

SEQ ID NO: 3234697 - RNA, 19 nt, Artificial Sequence
  Description of Artificial Sequence: Synthetic oligonucleotide
gugauagucuucuaagaau

SEQ ID NO: 3234698 - RNA, 19 nt, Artificial Sequence
  Description of Artificial Sequence: Synthetic oligonucleotide
ugcuggcuuguuuucggac

SEQ ID NO: 3234699 - RNA, 19 nt, Artificial Sequence
  Description of Artificial Sequence: Synthetic oligonucleotide
ucaacuccgucuggggagc

SEQ ID NO: 3234700 - RNA, 19 nt, Artificial Sequence
  Description of Artificial Sequence: Synthetic oligonucleotide
ucaccuugucacaguagua

SEQ ID NO: 3234701 - RNA, 19 nt, Artificial Sequence
  Description of Artificial Sequence: Synthetic oligonucleotide
uggcauccucaacggagcc

SEQ ID NO: 3234702 - RNA, 19 nt, Artificial Sequence
  Description of Artificial Sequence: Synthetic oligonucleotide
gcuggcauccucaacggag

SEQ ID NO: 3234703 - RNA, 19 nt, Artificial Sequence
  Description of Artificial Sequence: Synthetic oligonucleotide
gaagacggcgacacagaac

SEQ ID NO: 3234704 - RNA, 19 nt, Artificial Sequence
  Description of Artificial Sequence: Synthetic oligonucleotide
uggaugacuuccgggucag

SEQ ID NO: 3234705 - RNA, 19 nt, Artificial Sequence
  Description of Artificial Sequence: Synthetic oligonucleotide
gcagcuuugugcuggcuug

SEQ ID NO: 3234706 - RNA, 19 nt, Artificial Sequence
  Description of Artificial Sequence: Synthetic oligonucleotide
auuugaagacggcgacaca

SEQ ID NO: 3234707 - RNA, 19 nt, Artificial Sequence
  Description of Artificial Sequence: Synthetic oligonucleotide
gccuccuuugaucaucuug

SEQ ID NO: 3234708 - RNA, 19 nt, Artificial Sequence
  Description of Artificial Sequence: Synthetic oligonucleotide
acuccgucuggggagcagg

SEQ ID NO: 3234709 - RNA, 19 nt, Artificial Sequence
  Description of Artificial Sequence: Synthetic oligonucleotide
cuccuuugaucaucuugug

SEQ ID NO: 3234710 - RNA, 19 nt, Artificial Sequence
  Description of Artificial Sequence: Synthetic oligonucleotide
aauugcuggucaacuccgu

SEQ ID NO: 3234711 - RNA, 19 nt, Artificial Sequence
  Description of Artificial Sequence: Synthetic oligonucleotide
uccgggucaggcagcuuug

SEQ ID NO: 3234712 - RNA, 19 nt, Artificial Sequence
  Description of Artificial Sequence: Synthetic oligonucleotide
acacagaacuggaugacuu

SEQ ID NO: 3234713 - RNA, 19 nt, Artificial Sequence
  Description of Artificial Sequence: Synthetic oligonucleotide
gcgacacagaacuggauga

SEQ ID NO: 3234714 - RNA, 19 nt, Artificial Sequence
  Description of Artificial Sequence: Synthetic oligonucleotide
cuggggagcaggagccggg

SEQ ID NO: 3234715 - RNA, 19 nt, Artificial Sequence
  Description of Artificial Sequence: Synthetic oligonucleotide
cuuugaucaucuugugaua

SEQ ID NO: 3234716 - RNA, 19 nt, Artificial Sequence
  Description of Artificial Sequence: Synthetic oligonucleotide
cuggaugacuuccggguca

SEQ ID NO: 3234717 - RNA, 19 nt, Artificial Sequence
  Description of Artificial Sequence: Synthetic oligonucleotide
aaaauaauuaaauaauuug

SEQ ID NO: 3234718 - RNA, 19 nt, Artificial Sequence
  Description of Artificial Sequence: Synthetic oligonucleotide
aaauaauuaaauaauuugg

SEQ ID NO: 3234719 - RNA, 19 nt, Artificial Sequence
  Description of Artificial Sequence: Synthetic oligonucleotide
aauuaaauaauuuggagaa

SEQ ID NO: 3234720 - RNA, 19 nt, Artificial Sequence
  Description of Artificial Sequence: Synthetic oligonucleotide
auuuacuugcaauauaugc

SEQ ID NO: 3234721 - RNA, 19 nt, Artificial Sequence
  Description of Artificial Sequence: Synthetic oligonucleotide
aacuaaaagaauuugaaau

SEQ ID NO: 3234722 - RNA, 19 nt, Artificial Sequence
  Description of Artificial Sequence: Synthetic oligonucleotide
aaagaauuugaaauguucc

SEQ ID NO: 3234723 - RNA, 19 nt, Artificial Sequence
  Description of Artificial Sequence: Synthetic oligonucleotide
uuugcaaagacaaaugagc

SEQ ID NO: 3234724 - RNA, 19 nt, Artificial Sequence
  Description of Artificial Sequence: Synthetic oligonucleotide
aaauuuauuucauugauuu

SEQ ID NO: 3234725 - RNA, 19 nt, Artificial Sequence
  Description of Artificial Sequence: Synthetic oligonucleotide
aagacaaaugagcacacac

SEQ ID NO: 3234726 - RNA, 19 nt, Artificial Sequence
  Description of Artificial Sequence: Synthetic oligonucleotide
uaauuaaauaauuuggaga

SEQ ID NO: 3234727 - RNA, 19 nt, Artificial Sequence
  Description of Artificial Sequence: Synthetic oligonucleotide
ugcaauauaugcaagggag

SEQ ID NO: 3234728 - RNA, 19 nt, Artificial Sequence
  Description of Artificial Sequence: Synthetic oligonucleotide
auaauuaaauaauuuggag

SEQ ID NO: 3234729 - RNA, 19 nt, Artificial Sequence
  Description of Artificial Sequence: Synthetic oligonucleotide
aacauauaaacacaaaaua

SEQ ID NO: 3234730 - RNA, 19 nt, Artificial Sequence
  Description of Artificial Sequence: Synthetic oligonucleotide
uuuacuugcaauauaugca

SEQ ID NO: 3234731 - RNA, 19 nt, Artificial Sequence
  Description of Artificial Sequence: Synthetic oligonucleotide
uccacuguaacauauaaac

SEQ ID NO: 3234732 - RNA, 19 nt, Artificial Sequence
  Description of Artificial Sequence: Synthetic oligonucleotide
ugaaagaccuaacuaaaag

SEQ ID NO: 3234733 - RNA, 19 nt, Artificial Sequence
  Description of Artificial Sequence: Synthetic oligonucleotide
aaaagaauuugaaauguuc

SEQ ID NO: 3234734 - RNA, 19 nt, Artificial Sequence
  Description of Artificial Sequence: Synthetic oligonucleotide
aauaauuaaauaauuugga

SEQ ID NO: 3234735 - RNA, 19 nt, Artificial Sequence
  Description of Artificial Sequence: Synthetic oligonucleotide
acuaaaagaauuugaaaug

SEQ ID NO: 3234736 - RNA, 19 nt, Artificial Sequence
  Description of Artificial Sequence: Synthetic oligonucleotide
ucuauaacuaggaacaauc

SEQ ID NO: 3234737 - RNA, 19 nt, Artificial Sequence
  Description of Artificial Sequence: Synthetic oligonucleotide
uauaacuaggaacaaucag

SEQ ID NO: 3234738 - RNA, 19 nt, Artificial Sequence
  Description of Artificial Sequence: Synthetic oligonucleotide
aauuugcaaagacaaauga

SEQ ID NO: 3234739 - RNA, 19 nt, Artificial Sequence
  Description of Artificial Sequence: Synthetic oligonucleotide
ugagaagcaggacagaccc

SEQ ID NO: 3234740 - RNA, 19 nt, Artificial Sequence
  Description of Artificial Sequence: Synthetic oligonucleotide
ugagguaucacucaagcaa

SEQ ID NO: 3234741 - RNA, 19 nt, Artificial Sequence
  Description of Artificial Sequence: Synthetic oligonucleotide
uuaacugaaaauuuauuuc

SEQ ID NO: 3234742 - RNA, 19 nt, Artificial Sequence
  Description of Artificial Sequence: Synthetic oligonucleotide
aaaauuugcaaagacaaau

SEQ ID NO: 3234743 - RNA, 19 nt, Artificial Sequence
  Description of Artificial Sequence: Synthetic oligonucleotide
auaaacacaaaauaauuaa

SEQ ID NO: 3234744 - RNA, 19 nt, Artificial Sequence
  Description of Artificial Sequence: Synthetic oligonucleotide
uaacuaggaacaaucagag

SEQ ID NO: 3234745 - RNA, 19 nt, Artificial Sequence
  Description of Artificial Sequence: Synthetic oligonucleotide
uaacugaaaauuuauuuca

SEQ ID NO: 3234746 - RNA, 19 nt, Artificial Sequence
  Description of Artificial Sequence: Synthetic oligonucleotide
aauguauauuccuacuaug

SEQ ID NO: 3234747 - RNA, 19 nt, Artificial Sequence
  Description of Artificial Sequence: Synthetic oligonucleotide
cugaaaauuuauuucauug

SEQ ID NO: 3234748 - RNA, 19 nt, Artificial Sequence
  Description of Artificial Sequence: Synthetic oligonucleotide
acacaaaauaauuaaauaa

SEQ ID NO: 3234749 - RNA, 19 nt, Artificial Sequence
  Description of Artificial Sequence: Synthetic oligonucleotide
aaugagcacacacagaaau

SEQ ID NO: 3234750 - RNA, 19 nt, Artificial Sequence
  Description of Artificial Sequence: Synthetic oligonucleotide
uaacauauaaacacaaaau

SEQ ID NO: 3234751 - RNA, 19 nt, Artificial Sequence
  Description of Artificial Sequence: Synthetic oligonucleotide
uauaaacacaaaauaauua

SEQ ID NO: 3234752 - RNA, 19 nt, Artificial Sequence
  Description of Artificial Sequence: Synthetic oligonucleotide
gacaaaugagcacacacag

SEQ ID NO: 3234753 - RNA, 19 nt, Artificial Sequence
  Description of Artificial Sequence: Synthetic oligonucleotide
cacuguaacauauaaacac

SEQ ID NO: 3234754 - RNA, 19 nt, Artificial Sequence
  Description of Artificial Sequence: Synthetic oligonucleotide
ugaaaauuuauuucauuga

SEQ ID NO: 3234755 - RNA, 19 nt, Artificial Sequence
  Description of Artificial Sequence: Synthetic oligonucleotide
acuaggaacaaucagaguu

SEQ ID NO: 3234756 - RNA, 19 nt, Artificial Sequence
  Description of Artificial Sequence: Synthetic oligonucleotide
uuuagugaaagaccuaacu

SEQ ID NO: 3234757 - RNA, 19 nt, Artificial Sequence
  Description of Artificial Sequence: Synthetic oligonucleotide
aagaauuugaaauguuccu

SEQ ID NO: 3234758 - RNA, 19 nt, Artificial Sequence
  Description of Artificial Sequence: Synthetic oligonucleotide
aacacaaaauaauuaaaua

SEQ ID NO: 3234759 - RNA, 19 nt, Artificial Sequence
  Description of Artificial Sequence: Synthetic oligonucleotide
aaauguauauuccuacuau

SEQ ID NO: 3234760 - RNA, 19 nt, Artificial Sequence
  Description of Artificial Sequence: Synthetic oligonucleotide
uagaugagaagcaggacag

SEQ ID NO: 3234761 - RNA, 19 nt, Artificial Sequence
  Description of Artificial Sequence: Synthetic oligonucleotide
auagaugagaagcaggaca

SEQ ID NO: 3234762 - RNA, 19 nt, Artificial Sequence
  Description of Artificial Sequence: Synthetic oligonucleotide
uuaaauaauuuggagaaaa

SEQ ID NO: 3234763 - RNA, 19 nt, Artificial Sequence
  Description of Artificial Sequence: Synthetic oligonucleotide
uguacuugagguaucacuc

SEQ ID NO: 3234764 - RNA, 19 nt, Artificial Sequence
  Description of Artificial Sequence: Synthetic oligonucleotide
uauauuccuacuaugguua

SEQ ID NO: 3234765 - RNA, 19 nt, Artificial Sequence
  Description of Artificial Sequence: Synthetic oligonucleotide
acuugcaauauaugcaagg

SEQ ID NO: 3234766 - RNA, 19 nt, Artificial Sequence
  Description of Artificial Sequence: Synthetic oligonucleotide
uaaacacaaaauaauuaaa

SEQ ID NO: 3234767 - RNA, 19 nt, Artificial Sequence
  Description of Artificial Sequence: Synthetic oligonucleotide
ggauacaacauuuacuugc

SEQ ID NO: 3234768 - RNA, 19 nt, Artificial Sequence
  Description of Artificial Sequence: Synthetic oligonucleotide
aaacacaaaauaauuaaau

SEQ ID NO: 3234769 - RNA, 19 nt, Artificial Sequence
  Description of Artificial Sequence: Synthetic oligonucleotide
gaaagaccuaacuaaaaga

SEQ ID NO: 3234770 - RNA, 19 nt, Artificial Sequence
  Description of Artificial Sequence: Synthetic oligonucleotide
uugcaaagacaaaugagca

SEQ ID NO: 3234771 - RNA, 19 nt, Artificial Sequence
  Description of Artificial Sequence: Synthetic oligonucleotide
uuagugaaagaccuaacua

SEQ ID NO: 3234772 - RNA, 19 nt, Artificial Sequence
  Description of Artificial Sequence: Synthetic oligonucleotide
cacacagaaauguauauuc

SEQ ID NO: 3234773 - RNA, 19 nt, Artificial Sequence
  Description of Artificial Sequence: Synthetic oligonucleotide
uagugaaagaccuaacuaa

SEQ ID NO: 3234774 - RNA, 19 nt, Artificial Sequence
  Description of Artificial Sequence: Synthetic oligonucleotide
aaagaccuaacuaaaagaa

SEQ ID NO: 3234775 - RNA, 19 nt, Artificial Sequence
  Description of Artificial Sequence: Synthetic oligonucleotide
ugggauacaacauuuacuu

SEQ ID NO: 3234776 - RNA, 19 nt, Artificial Sequence
  Description of Artificial Sequence: Synthetic oligonucleotide
uguauauuccuacuauggu

SEQ ID NO: 3234777 - RNA, 19 nt, Artificial Sequence
  Description of Artificial Sequence: Synthetic oligonucleotide
acccucuauaacuaggaac

SEQ ID NO: 3234778 - RNA, 19 nt, Artificial Sequence
  Description of Artificial Sequence: Synthetic oligonucleotide
guaacauauaaacacaaaa

SEQ ID NO: 3234779 - RNA, 19 nt, Artificial Sequence
  Description of Artificial Sequence: Synthetic oligonucleotide
uuacuugcaauauaugcaa

SEQ ID NO: 3234780 - RNA, 19 nt, Artificial Sequence
  Description of Artificial Sequence: Synthetic oligonucleotide
aaauuugcaaagacaaaug

SEQ ID NO: 3234781 - RNA, 19 nt, Artificial Sequence
  Description of Artificial Sequence: Synthetic oligonucleotide
gcaaguauagaugagaagc

SEQ ID NO: 3234782 - RNA, 19 nt, Artificial Sequence
  Description of Artificial Sequence: Synthetic oligonucleotide
cuugagguaucacucaagc

SEQ ID NO: 3234783 - RNA, 19 nt, Artificial Sequence
  Description of Artificial Sequence: Synthetic oligonucleotide
uaacuaaaagaauuugaaa

SEQ ID NO: 3234784 - RNA, 19 nt, Artificial Sequence
  Description of Artificial Sequence: Synthetic oligonucleotide
auguauauuccuacuaugg

SEQ ID NO: 3234785 - RNA, 19 nt, Artificial Sequence
  Description of Artificial Sequence: Synthetic oligonucleotide
auaacuaggaacaaucaga

SEQ ID NO: 3234786 - RNA, 19 nt, Artificial Sequence
  Description of Artificial Sequence: Synthetic oligonucleotide
cuugcaauauaugcaaggg

SEQ ID NO: 3234787 - RNA, 19 nt, Artificial Sequence
  Description of Artificial Sequence: Synthetic oligonucleotide
ucugggauacaacauuuac

SEQ ID NO: 3234788 - RNA, 19 nt, Artificial Sequence
  Description of Artificial Sequence: Synthetic oligonucleotide
auuccuacuaugguuaguc

SEQ ID NO: 3234789 - RNA, 19 nt, Artificial Sequence
  Description of Artificial Sequence: Synthetic oligonucleotide
uaucacucaagcaaguaua

SEQ ID NO: 3234790 - RNA, 19 nt, Artificial Sequence
  Description of Artificial Sequence: Synthetic oligonucleotide
cuaacuaaaagaauuugaa

SEQ ID NO: 3234791 - RNA, 19 nt, Artificial Sequence
  Description of Artificial Sequence: Synthetic oligonucleotide
aaguauagaugagaagcag

SEQ ID NO: 3234792 - RNA, 19 nt, Artificial Sequence
  Description of Artificial Sequence: Synthetic oligonucleotide
acaacauuuacuugcaaua

SEQ ID NO: 3234793 - RNA, 19 nt, Artificial Sequence
  Description of Artificial Sequence: Synthetic oligonucleotide
acauauaaacacaaaauaa

SEQ ID NO: 3234794 - RNA, 19 nt, Artificial Sequence
  Description of Artificial Sequence: Synthetic oligonucleotide
acuaugguuagucugggau

SEQ ID NO: 3234795 - RNA, 19 nt, Artificial Sequence
  Description of Artificial Sequence: Synthetic oligonucleotide
guuagucugggauacaaca

SEQ ID NO: 3234796 - RNA, 19 nt, Artificial Sequence
  Description of Artificial Sequence: Synthetic oligonucleotide
aguauagaugagaagcagg

SEQ ID NO: 3234797 - RNA, 19 nt, Artificial Sequence
  Description of Artificial Sequence: Synthetic oligonucleotide
cuaggaacaaucagaguug

SEQ ID NO: 3234798 - RNA, 19 nt, Artificial Sequence
  Description of Artificial Sequence: Synthetic oligonucleotide
agaaauguauauuccuacu

SEQ ID NO: 3234799 - RNA, 19 nt, Artificial Sequence
  Description of Artificial Sequence: Synthetic oligonucleotide
uacaacauuuacuugcaau

SEQ ID NO: 3234800 - RNA, 19 nt, Artificial Sequence
  Description of Artificial Sequence: Synthetic oligonucleotide
uguaacauauaaacacaaa

SEQ ID NO: 3234801 - RNA, 19 nt, Artificial Sequence
  Description of Artificial Sequence: Synthetic oligonucleotide
cagaaauguauauuccuac

SEQ ID NO: 3234802 - RNA, 19 nt, Artificial Sequence
  Description of Artificial Sequence: Synthetic oligonucleotide
caaaugagcacacacagaa

SEQ ID NO: 3234803 - RNA, 19 nt, Artificial Sequence
  Description of Artificial Sequence: Synthetic oligonucleotide
gaauuugaaauguuccuaa

SEQ ID NO: 3234804 - RNA, 19 nt, Artificial Sequence
  Description of Artificial Sequence: Synthetic oligonucleotide
auuugcaaagacaaaugag

SEQ ID NO: 3234805 - RNA, 19 nt, Artificial Sequence
  Description of Artificial Sequence: Synthetic oligonucleotide
uccuacuaugguuagucug

SEQ ID NO: 3234806 - RNA, 19 nt, Artificial Sequence
  Description of Artificial Sequence: Synthetic oligonucleotide
uugcaauauaugcaaggga

SEQ ID NO: 3234807 - RNA, 19 nt, Artificial Sequence
  Description of Artificial Sequence: Synthetic oligonucleotide
aaaaggaccuacuguacuu

SEQ ID NO: 3234808 - RNA, 19 nt, Artificial Sequence
  Description of Artificial Sequence: Synthetic oligonucleotide
aauuugaaauguuccuaaa

SEQ ID NO: 3234809 - RNA, 19 nt, Artificial Sequence
  Description of Artificial Sequence: Synthetic oligonucleotide
auuugaaauguuccuaaaa

SEQ ID NO: 3234810 - RNA, 19 nt, Artificial Sequence
  Description of Artificial Sequence: Synthetic oligonucleotide
ucaagcaaguauagaugag

SEQ ID NO: 3234811 - RNA, 19 nt, Artificial Sequence
  Description of Artificial Sequence: Synthetic oligonucleotide
augcaagggagcuuuagug

SEQ ID NO: 3234812 - RNA, 19 nt, Artificial Sequence
  Description of Artificial Sequence: Synthetic oligonucleotide
acacagaaauguauauucc

SEQ ID NO: 3234813 - RNA, 19 nt, Artificial Sequence
  Description of Artificial Sequence: Synthetic oligonucleotide
ugagcacacacagaaaugu

SEQ ID NO: 3234814 - RNA, 19 nt, Artificial Sequence
  Description of Artificial Sequence: Synthetic oligonucleotide
gaaaauuuauuucauugau

SEQ ID NO: 3234815 - RNA, 19 nt, Artificial Sequence
  Description of Artificial Sequence: Synthetic oligonucleotide
aauuuauuucauugauuuu

SEQ ID NO: 3234816 - RNA, 19 nt, Artificial Sequence
  Description of Artificial Sequence: Synthetic oligonucleotide
uuuguccacuguaacauau

SEQ ID NO: 3234817 - RNA, 19 nt, Artificial Sequence
  Description of Artificial Sequence: Synthetic oligonucleotide
uuauaagacaccuuggccc

SEQ ID NO: 3234818 - RNA, 19 nt, Artificial Sequence
  Description of Artificial Sequence: Synthetic oligonucleotide
uuauuuaacuccuuuauaa

SEQ ID NO: 3234819 - RNA, 19 nt, Artificial Sequence
  Description of Artificial Sequence: Synthetic oligonucleotide
guuacucagaaucagggcg

SEQ ID NO: 3234820 - RNA, 19 nt, Artificial Sequence
  Description of Artificial Sequence: Synthetic oligonucleotide
uuuaacuccuuuauaagac

SEQ ID NO: 3234821 - RNA, 19 nt, Artificial Sequence
  Description of Artificial Sequence: Synthetic oligonucleotide
uccuuuauaagacaccuug

SEQ ID NO: 3234822 - RNA, 19 nt, Artificial Sequence
  Description of Artificial Sequence: Synthetic oligonucleotide
uuuauaagacaccuuggcc

SEQ ID NO: 3234823 - RNA, 19 nt, Artificial Sequence
  Description of Artificial Sequence: Synthetic oligonucleotide
ucaucuuccaggaaguugc

SEQ ID NO: 3234824 - RNA, 19 nt, Artificial Sequence
  Description of Artificial Sequence: Synthetic oligonucleotide
ucagcguuuauuuaacucc

SEQ ID NO: 3234825 - RNA, 19 nt, Artificial Sequence
  Description of Artificial Sequence: Synthetic oligonucleotide
uauuuaacuccuuuauaag

SEQ ID NO: 3234826 - RNA, 19 nt, Artificial Sequence
  Description of Artificial Sequence: Synthetic oligonucleotide
cuuuauaagacaccuuggc

SEQ ID NO: 3234827 - RNA, 19 nt, Artificial Sequence
  Description of Artificial Sequence: Synthetic oligonucleotide
auuuaacuccuuuauaaga

SEQ ID NO: 3234828 - RNA, 19 nt, Artificial Sequence
  Description of Artificial Sequence: Synthetic oligonucleotide
aaccucacucuccugugcc

SEQ ID NO: 3234829 - RNA, 19 nt, Artificial Sequence
  Description of Artificial Sequence: Synthetic oligonucleotide
ugcccuguuacucagaauc

SEQ ID NO: 3234830 - RNA, 19 nt, Artificial Sequence
  Description of Artificial Sequence: Synthetic oligonucleotide
uguuaggugggucaggccu

SEQ ID NO: 3234831 - RNA, 19 nt, Artificial Sequence
  Description of Artificial Sequence: Synthetic oligonucleotide
cuguuacucagaaucaggg

SEQ ID NO: 3234832 - RNA, 19 nt, Artificial Sequence
  Description of Artificial Sequence: Synthetic oligonucleotide
aacugugccagcugccggc

SEQ ID NO: 3234833 - RNA, 19 nt, Artificial Sequence
  Description of Artificial Sequence: Synthetic oligonucleotide
augcacucgguguacacgc

SEQ ID NO: 3234834 - RNA, 19 nt, Artificial Sequence
  Description of Artificial Sequence: Synthetic oligonucleotide
uuuauuuaacuccuuuaua

SEQ ID NO: 3234835 - RNA, 19 nt, Artificial Sequence
  Description of Artificial Sequence: Synthetic oligonucleotide
aaucagggcgucaucuucc

SEQ ID NO: 3234836 - RNA, 19 nt, Artificial Sequence
  Description of Artificial Sequence: Synthetic oligonucleotide
ucuuccaggaaguugccca

SEQ ID NO: 3234837 - RNA, 19 nt, Artificial Sequence
  Description of Artificial Sequence: Synthetic oligonucleotide
gaaguugcccaacugugcc

SEQ ID NO: 3234838 - RNA, 19 nt, Artificial Sequence
  Description of Artificial Sequence: Synthetic oligonucleotide
aacuccuuuauaagacacc

SEQ ID NO: 3234839 - RNA, 19 nt, Artificial Sequence
  Description of Artificial Sequence: Synthetic oligonucleotide
uauaagacaccuuggcccu

SEQ ID NO: 3234840 - RNA, 19 nt, Artificial Sequence
  Description of Artificial Sequence: Synthetic oligonucleotide
uuaacuccuuuauaagaca

SEQ ID NO: 3234841 - RNA, 19 nt, Artificial Sequence
  Description of Artificial Sequence: Synthetic oligonucleotide
uaacuccuuuauaagacac

SEQ ID NO: 3234842 - RNA, 19 nt, Artificial Sequence
  Description of Artificial Sequence: Synthetic oligonucleotide
uguacacgccgcaacaggc

SEQ ID NO: 3234843 - RNA, 19 nt, Artificial Sequence
  Description of Artificial Sequence: Synthetic oligonucleotide
aagucucagccuccggggc

SEQ ID NO: 3234844 - RNA, 19 nt, Artificial Sequence
  Description of Artificial Sequence: Synthetic oligonucleotide
uguuacucagaaucagggc

SEQ ID NO: 3234845 - RNA, 19 nt, Artificial Sequence
  Description of Artificial Sequence: Synthetic oligonucleotide
uuacucagaaucagggcgu

SEQ ID NO: 3234846 - RNA, 19 nt, Artificial Sequence
  Description of Artificial Sequence: Synthetic oligonucleotide
gaaguugguggugcgaugc

SEQ ID NO: 3234847 - RNA, 19 nt, Artificial Sequence
  Description of Artificial Sequence: Synthetic oligonucleotide
agcagcaggugcugguugc

SEQ ID NO: 3234848 - RNA, 19 nt, Artificial Sequence
  Description of Artificial Sequence: Synthetic oligonucleotide
cagggcgucaucuuccagg

SEQ ID NO: 3234849 - RNA, 19 nt, Artificial Sequence
  Description of Artificial Sequence: Synthetic oligonucleotide
acuccuuuauaagacaccu

SEQ ID NO: 3234850 - RNA, 19 nt, Artificial Sequence
  Description of Artificial Sequence: Synthetic oligonucleotide
caagucucagccuccgggg

SEQ ID NO: 3234851 - RNA, 19 nt, Artificial Sequence
  Description of Artificial Sequence: Synthetic oligonucleotide
gaugcacucgguguacacg

SEQ ID NO: 3234852 - RNA, 19 nt, Artificial Sequence
  Description of Artificial Sequence: Synthetic oligonucleotide
gacaccuuggcccugccca

SEQ ID NO: 3234853 - RNA, 19 nt, Artificial Sequence
  Description of Artificial Sequence: Synthetic oligonucleotide
cucagcguuuauuuaacuc

SEQ ID NO: 3234854 - RNA, 19 nt, Artificial Sequence
  Description of Artificial Sequence: Synthetic oligonucleotide
guuuauuuaacuccuuuau

SEQ ID NO: 3234855 - RNA, 19 nt, Artificial Sequence
  Description of Artificial Sequence: Synthetic oligonucleotide
ggcgucaucuuccaggaag

SEQ ID NO: 3234856 - RNA, 19 nt, Artificial Sequence
  Description of Artificial Sequence: Synthetic oligonucleotide
ugugcccuguuacucagaa

SEQ ID NO: 3234857 - RNA, 19 nt, Artificial Sequence
  Description of Artificial Sequence: Synthetic oligonucleotide
gguggugcgaugcacucgg

SEQ ID NO: 3234858 - RNA, 19 nt, Artificial Sequence
  Description of Artificial Sequence: Synthetic oligonucleotide
gaaucagggcgucaucuuc

SEQ ID NO: 3234859 - RNA, 19 nt, Artificial Sequence
  Description of Artificial Sequence: Synthetic oligonucleotide
guguacacgccgcaacagg

SEQ ID NO: 3234860 - RNA, 19 nt, Artificial Sequence
  Description of Artificial Sequence: Synthetic oligonucleotide
aggugggucaggccugggc

SEQ ID NO: 3234861 - RNA, 19 nt, Artificial Sequence
  Description of Artificial Sequence: Synthetic oligonucleotide
aagacaccuuggcccugcc

SEQ ID NO: 3234862 - RNA, 19 nt, Artificial Sequence
  Description of Artificial Sequence: Synthetic oligonucleotide
accucacucuccugugccc

SEQ ID NO: 3234863 - RNA, 19 nt, Artificial Sequence
  Description of Artificial Sequence: Synthetic oligonucleotide
ugccggcggaugaaguugg

SEQ ID NO: 3234864 - RNA, 19 nt, Artificial Sequence
  Description of Artificial Sequence: Synthetic oligonucleotide
aaguugcccaacugugcca

SEQ ID NO: 3234865 - RNA, 19 nt, Artificial Sequence
  Description of Artificial Sequence: Synthetic oligonucleotide
ccuuuauaagacaccuugg

SEQ ID NO: 3234866 - RNA, 19 nt, Artificial Sequence
  Description of Artificial Sequence: Synthetic oligonucleotide
uccaggaaguugcccaacu

SEQ ID NO: 3234867 - RNA, 19 nt, Artificial Sequence
  Description of Artificial Sequence: Synthetic oligonucleotide
aguugguggugcgaugcac

SEQ ID NO: 3234868 - RNA, 19 nt, Artificial Sequence
  Description of Artificial Sequence: Synthetic oligonucleotide
aggaaguugcccaacugug

SEQ ID NO: 3234869 - RNA, 19 nt, Artificial Sequence
  Description of Artificial Sequence: Synthetic oligonucleotide
ugaaguugguggugcgaug

SEQ ID NO: 3234870 - RNA, 19 nt, Artificial Sequence
  Description of Artificial Sequence: Synthetic oligonucleotide
aucuuccaggaaguugccc

SEQ ID NO: 3234871 - RNA, 19 nt, Artificial Sequence
  Description of Artificial Sequence: Synthetic oligonucleotide
ccuguuacucagaaucagg

SEQ ID NO: 3234872 - RNA, 19 nt, Artificial Sequence
  Description of Artificial Sequence: Synthetic oligonucleotide
aguugcccaacugugccag

SEQ ID NO: 3234873 - RNA, 19 nt, Artificial Sequence
  Description of Artificial Sequence: Synthetic oligonucleotide
agacaccuuggcccugccc

SEQ ID NO: 3234874 - RNA, 19 nt, Artificial Sequence
  Description of Artificial Sequence: Synthetic oligonucleotide
ucgguguacacgccgcaac

SEQ ID NO: 3234875 - RNA, 19 nt, Artificial Sequence
  Description of Artificial Sequence: Synthetic oligonucleotide
aacaggcucagcagcaggu

SEQ ID NO: 3234876 - RNA, 19 nt, Artificial Sequence
  Description of Artificial Sequence: Synthetic oligonucleotide
uggugcgaugcacucggug

SEQ ID NO: 3234877 - RNA, 19 nt, Artificial Sequence
  Description of Artificial Sequence: Synthetic oligonucleotide
gucaucuuccaggaaguug

SEQ ID NO: 3234878 - RNA, 19 nt, Artificial Sequence
  Description of Artificial Sequence: Synthetic oligonucleotide
cucuccugugcccuguuac

SEQ ID NO: 3234879 - RNA, 19 nt, Artificial Sequence
  Description of Artificial Sequence: Synthetic oligonucleotide
accuuggcccugcccaccc

SEQ ID NO: 3234880 - RNA, 19 nt, Artificial Sequence
  Description of Artificial Sequence: Synthetic oligonucleotide
uccugugcccuguuacuca

SEQ ID NO: 3234881 - RNA, 19 nt, Artificial Sequence
  Description of Artificial Sequence: Synthetic oligonucleotide
aaguugguggugcgaugca

SEQ ID NO: 3234882 - RNA, 19 nt, Artificial Sequence
  Description of Artificial Sequence: Synthetic oligonucleotide
ucuccugugcccuguuacu

SEQ ID NO: 3234883 - RNA, 19 nt, Artificial Sequence
  Description of Artificial Sequence: Synthetic oligonucleotide
caacaggcucagcagcagg

SEQ ID NO: 3234884 - RNA, 19 nt, Artificial Sequence
  Description of Artificial Sequence: Synthetic oligonucleotide
agggcgucaucuuccagga

SEQ ID NO: 3234885 - RNA, 19 nt, Artificial Sequence
  Description of Artificial Sequence: Synthetic oligonucleotide
ugugccagcugccggcgga

SEQ ID NO: 3234886 - RNA, 19 nt, Artificial Sequence
  Description of Artificial Sequence: Synthetic oligonucleotide
uuaggugggucaggccugg

SEQ ID NO: 3234887 - RNA, 19 nt, Artificial Sequence
  Description of Artificial Sequence: Synthetic oligonucleotide
uacacgccgcaacaggcuc

SEQ ID NO: 3234888 - RNA, 19 nt, Artificial Sequence
  Description of Artificial Sequence: Synthetic oligonucleotide
acaccuuggcccugcccac

SEQ ID NO: 3234889 - RNA, 19 nt, Artificial Sequence
  Description of Artificial Sequence: Synthetic oligonucleotide
uaagacaccuuggcccugc

SEQ ID NO: 3234890 - RNA, 19 nt, Artificial Sequence
  Description of Artificial Sequence: Synthetic oligonucleotide
ucagaaucagggcgucauc

SEQ ID NO: 3234891 - RNA, 19 nt, Artificial Sequence
  Description of Artificial Sequence: Synthetic oligonucleotide
uccggggcaaccucacucu

SEQ ID NO: 3234892 - RNA, 19 nt, Artificial Sequence
  Description of Artificial Sequence: Synthetic oligonucleotide
ccaagucucagccuccggg

SEQ ID NO: 3234893 - RNA, 19 nt, Artificial Sequence
  Description of Artificial Sequence: Synthetic oligonucleotide
caggcucagcagcaggugc

SEQ ID NO: 3234894 - RNA, 19 nt, Artificial Sequence
  Description of Artificial Sequence: Synthetic oligonucleotide
cacucgguguacacgccgc

SEQ ID NO: 3234895 - RNA, 19 nt, Artificial Sequence
  Description of Artificial Sequence: Synthetic oligonucleotide
caacugugccagcugccgg

SEQ ID NO: 3234896 - RNA, 19 nt, Artificial Sequence
  Description of Artificial Sequence: Synthetic oligonucleotide
augaaguugguggugcgau

SEQ ID NO: 3234897 - RNA, 19 nt, Artificial Sequence
  Description of Artificial Sequence: Synthetic oligonucleotide
gucaggccugggcucagcg

SEQ ID NO: 3234898 - RNA, 19 nt, Artificial Sequence
  Description of Artificial Sequence: Synthetic oligonucleotide
caccccaagucucagccuc

SEQ ID NO: 3234899 - RNA, 19 nt, Artificial Sequence
  Description of Artificial Sequence: Synthetic oligonucleotide
gaugaaguugguggugcga

SEQ ID NO: 3234900 - RNA, 19 nt, Artificial Sequence
  Description of Artificial Sequence: Synthetic oligonucleotide
caucuuccaggaaguugcc

SEQ ID NO: 3234901 - RNA, 19 nt, Artificial Sequence
  Description of Artificial Sequence: Synthetic oligonucleotide
agaaucagggcgucaucuu

SEQ ID NO: 3234902 - RNA, 19 nt, Artificial Sequence
  Description of Artificial Sequence: Synthetic oligonucleotide
ggaugaaguugguggugcg

SEQ ID NO: 3234903 - RNA, 19 nt, Artificial Sequence
  Description of Artificial Sequence: Synthetic oligonucleotide
agcaggugcugguugcgcu

SEQ ID NO: 3234904 - RNA, 19 nt, Artificial Sequence
  Description of Artificial Sequence: Synthetic oligonucleotide
caaccucacucuccugugc

SEQ ID NO: 3234905 - RNA, 19 nt, Artificial Sequence
  Description of Artificial Sequence: Synthetic oligonucleotide
uugguggugcgaugcacuc

SEQ ID NO: 3234906 - RNA, 19 nt, Artificial Sequence
  Description of Artificial Sequence: Synthetic oligonucleotide
ugcacucgguguacacgcc

SEQ ID NO: 3234907 - RNA, 19 nt, Artificial Sequence
  Description of Artificial Sequence: Synthetic oligonucleotide
ugguggugcgaugcacucg

SEQ ID NO: 3234908 - RNA, 19 nt, Artificial Sequence
  Description of Artificial Sequence: Synthetic oligonucleotide
agucucagccuccggggca

SEQ ID NO: 3234909 - RNA, 19 nt, Artificial Sequence
  Description of Artificial Sequence: Synthetic oligonucleotide
ugcccaacugugccagcug

SEQ ID NO: 3234910 - RNA, 19 nt, Artificial Sequence
  Description of Artificial Sequence: Synthetic oligonucleotide
guuaggugggucaggccug

SEQ ID NO: 3234911 - RNA, 19 nt, Artificial Sequence
  Description of Artificial Sequence: Synthetic oligonucleotide
ucagggcgucaucuuccag

SEQ ID NO: 3234912 - RNA, 19 nt, Artificial Sequence
  Description of Artificial Sequence: Synthetic oligonucleotide
cuccggggcaaccucacuc

SEQ ID NO: 3234913 - RNA, 19 nt, Artificial Sequence
  Description of Artificial Sequence: Synthetic oligonucleotide
cggcggaugaaguuggugg

SEQ ID NO: 3234914 - RNA, 19 nt, Artificial Sequence
  Description of Artificial Sequence: Synthetic oligonucleotide
aucagggcgucaucuucca

SEQ ID NO: 3234915 - RNA, 19 nt, Artificial Sequence
  Description of Artificial Sequence: Synthetic oligonucleotide
ggaaguugcccaacugugc

SEQ ID NO: 3234916 - RNA, 19 nt, Artificial Sequence
  Description of Artificial Sequence: Synthetic oligonucleotide
uugcccaacugugccagcu

SEQ ID NO: 3234917 - RNA, 19 nt, Artificial Sequence
  Description of Artificial Sequence: Synthetic oligonucleotide
uucacugugaccuuugugg

SEQ ID NO: 3234918 - RNA, 19 nt, Artificial Sequence
  Description of Artificial Sequence: Synthetic oligonucleotide
uguagauugaauauucagc

SEQ ID NO: 3234919 - RNA, 19 nt, Artificial Sequence
  Description of Artificial Sequence: Synthetic oligonucleotide
agaucuauuauuuuaucag

SEQ ID NO: 3234920 - RNA, 19 nt, Artificial Sequence
  Description of Artificial Sequence: Synthetic oligonucleotide
ucaaguaucacucucccca

SEQ ID NO: 3234921 - RNA, 19 nt, Artificial Sequence
  Description of Artificial Sequence: Synthetic oligonucleotide
gauguuugcacaauuaucc

SEQ ID NO: 3234922 - RNA, 19 nt, Artificial Sequence
  Description of Artificial Sequence: Synthetic oligonucleotide
acauguauuucauuguucg

SEQ ID NO: 3234923 - RNA, 19 nt, Artificial Sequence
  Description of Artificial Sequence: Synthetic oligonucleotide
uucagaauauucaaauucc

SEQ ID NO: 3234924 - RNA, 19 nt, Artificial Sequence
  Description of Artificial Sequence: Synthetic oligonucleotide
ugaauauucagcagaaaca

SEQ ID NO: 3234925 - RNA, 19 nt, Artificial Sequence
  Description of Artificial Sequence: Synthetic oligonucleotide
ucuuuguugaacgugaaag

SEQ ID NO: 3234926 - RNA, 19 nt, Artificial Sequence
  Description of Artificial Sequence: Synthetic oligonucleotide
ucucccugaaacuucaugg

SEQ ID NO: 3234927 - RNA, 19 nt, Artificial Sequence
  Description of Artificial Sequence: Synthetic oligonucleotide
ugcacaauuauccugguaa

SEQ ID NO: 3234928 - RNA, 19 nt, Artificial Sequence
  Description of Artificial Sequence: Synthetic oligonucleotide
auauucagcagaaacauuc

SEQ ID NO: 3234929 - RNA, 19 nt, Artificial Sequence
  Description of Artificial Sequence: Synthetic oligonucleotide
uuucauuguucgcagacag

SEQ ID NO: 3234930 - RNA, 19 nt, Artificial Sequence
  Description of Artificial Sequence: Synthetic oligonucleotide
ucauuguucgcagacaggg

SEQ ID NO: 3234931 - RNA, 19 nt, Artificial Sequence
  Description of Artificial Sequence: Synthetic oligonucleotide
aacuucauggcauuugaca

SEQ ID NO: 3234932 - RNA, 19 nt, Artificial Sequence
  Description of Artificial Sequence: Synthetic oligonucleotide
guagauugaauauucagca

SEQ ID NO: 3234933 - RNA, 19 nt, Artificial Sequence
  Description of Artificial Sequence: Synthetic oligonucleotide
aagaccuggagacaucauc

SEQ ID NO: 3234934 - RNA, 19 nt, Artificial Sequence
  Description of Artificial Sequence: Synthetic oligonucleotide
uuauuuuaucaguaauucc

SEQ ID NO: 3234935 - RNA, 19 nt, Artificial Sequence
  Description of Artificial Sequence: Synthetic oligonucleotide
agaaacauucuucagaaua

SEQ ID NO: 3234936 - RNA, 19 nt, Artificial Sequence
  Description of Artificial Sequence: Synthetic oligonucleotide
aucaucucuuuguugaacg

SEQ ID NO: 3234937 - RNA, 19 nt, Artificial Sequence
  Description of Artificial Sequence: Synthetic oligonucleotide
uccaucacguuuacuaacg

SEQ ID NO: 3234938 - RNA, 19 nt, Artificial Sequence
  Description of Artificial Sequence: Synthetic oligonucleotide
uguauuucauuguucgcag

SEQ ID NO: 3234939 - RNA, 19 nt, Artificial Sequence
  Description of Artificial Sequence: Synthetic oligonucleotide
uugaacgugaaagugaugu

SEQ ID NO: 3234940 - RNA, 19 nt, Artificial Sequence
  Description of Artificial Sequence: Synthetic oligonucleotide
ucacaggcuauguagauug

SEQ ID NO: 3234941 - RNA, 19 nt, Artificial Sequence
  Description of Artificial Sequence: Synthetic oligonucleotide
uuuaucaguaauuccuuga

SEQ ID NO: 3234942 - RNA, 19 nt, Artificial Sequence
  Description of Artificial Sequence: Synthetic oligonucleotide
ucagaugugcacuuggucu

SEQ ID NO: 3234943 - RNA, 19 nt, Artificial Sequence
  Description of Artificial Sequence: Synthetic oligonucleotide
caauucacugcaaaugugc

SEQ ID NO: 3234944 - RNA, 19 nt, Artificial Sequence
  Description of Artificial Sequence: Synthetic oligonucleotide
acaauuauccugguaauag

SEQ ID NO: 3234945 - RNA, 19 nt, Artificial Sequence
  Description of Artificial Sequence: Synthetic oligonucleotide
ucaaauuccucaauucacu

SEQ ID NO: 3234946 - RNA, 19 nt, Artificial Sequence
  Description of Artificial Sequence: Synthetic oligonucleotide
auguagauugaauauucag

SEQ ID NO: 3234947 - RNA, 19 nt, Artificial Sequence
  Description of Artificial Sequence: Synthetic oligonucleotide
uugacaguauuucugauuu

SEQ ID NO: 3234948 - RNA, 19 nt, Artificial Sequence
  Description of Artificial Sequence: Synthetic oligonucleotide
uauuucauuguucgcagac

SEQ ID NO: 3234949 - RNA, 19 nt, Artificial Sequence
  Description of Artificial Sequence: Synthetic oligonucleotide
aacgagaucuauuauuuua

SEQ ID NO: 3234950 - RNA, 19 nt, Artificial Sequence
  Description of Artificial Sequence: Synthetic oligonucleotide
guuugcacaauuauccugg

SEQ ID NO: 3234951 - RNA, 19 nt, Artificial Sequence
  Description of Artificial Sequence: Synthetic oligonucleotide
augucuuccgcagaaaugg

SEQ ID NO: 3234952 - RNA, 19 nt, Artificial Sequence
  Description of Artificial Sequence: Synthetic oligonucleotide
auaggagucagaugugcac

SEQ ID NO: 3234953 - RNA, 19 nt, Artificial Sequence
  Description of Artificial Sequence: Synthetic oligonucleotide
acguuuacuaacgagaucu

SEQ ID NO: 3234954 - RNA, 19 nt, Artificial Sequence
  Description of Artificial Sequence: Synthetic oligonucleotide
ucuauuauuuuaucaguaa

SEQ ID NO: 3234955 - RNA, 19 nt, Artificial Sequence
  Description of Artificial Sequence: Synthetic oligonucleotide
agguguuacagucaucauc

SEQ ID NO: 3234956 - RNA, 19 nt, Artificial Sequence
  Description of Artificial Sequence: Synthetic oligonucleotide
cuauguagauugaauauuc

SEQ ID NO: 3234957 - RNA, 19 nt, Artificial Sequence
  Description of Artificial Sequence: Synthetic oligonucleotide
gguaauaggagucagaugu

SEQ ID NO: 3234958 - RNA, 19 nt, Artificial Sequence
  Description of Artificial Sequence: Synthetic oligonucleotide
caauaagugagcuguuucc

SEQ ID NO: 3234959 - RNA, 19 nt, Artificial Sequence
  Description of Artificial Sequence: Synthetic oligonucleotide
aaggucuagggccacacca

SEQ ID NO: 3234960 - RNA, 19 nt, Artificial Sequence
  Description of Artificial Sequence: Synthetic oligonucleotide
ucuaggaccggaauacagc

SEQ ID NO: 3234961 - RNA, 19 nt, Artificial Sequence
  Description of Artificial Sequence: Synthetic oligonucleotide
uucacugcaaaugugcuca

SEQ ID NO: 3234962 - RNA, 19 nt, Artificial Sequence
  Description of Artificial Sequence: Synthetic oligonucleotide
uuuacuaacgagaucuauu

SEQ ID NO: 3234963 - RNA, 19 nt, Artificial Sequence
  Description of Artificial Sequence: Synthetic oligonucleotide
ugagcuguuuccaucacgu

SEQ ID NO: 3234964 - RNA, 19 nt, Artificial Sequence
  Description of Artificial Sequence: Synthetic oligonucleotide
uguggagccggcaaggucu

SEQ ID NO: 3234965 - RNA, 19 nt, Artificial Sequence
  Description of Artificial Sequence: Synthetic oligonucleotide
uuacuaacgagaucuauua

SEQ ID NO: 3234966 - RNA, 19 nt, Artificial Sequence
  Description of Artificial Sequence: Synthetic oligonucleotide
aauuauccugguaauagga

SEQ ID NO: 3234967 - RNA, 19 nt, Artificial Sequence
  Description of Artificial Sequence: Synthetic oligonucleotide
ugcaaaugugcucaguggu

SEQ ID NO: 3234968 - RNA, 19 nt, Artificial Sequence
  Description of Artificial Sequence: Synthetic oligonucleotide
aauauucaaauuccucaau

SEQ ID NO: 3234969 - RNA, 19 nt, Artificial Sequence
  Description of Artificial Sequence: Synthetic oligonucleotide
aauggccacauguauuuca

SEQ ID NO: 3234970 - RNA, 19 nt, Artificial Sequence
  Description of Artificial Sequence: Synthetic oligonucleotide
gauaggguucccaucaucc

SEQ ID NO: 3234971 - RNA, 19 nt, Artificial Sequence
  Description of Artificial Sequence: Synthetic oligonucleotide
gagaucuauuauuuuauca

SEQ ID NO: 3234972 - RNA, 19 nt, Artificial Sequence
  Description of Artificial Sequence: Synthetic oligonucleotide
uucagcagaaacauucuuc

SEQ ID NO: 3234973 - RNA, 19 nt, Artificial Sequence
  Description of Artificial Sequence: Synthetic oligonucleotide
aguaucacucuccccauag

SEQ ID NO: 3234974 - RNA, 19 nt, Artificial Sequence
  Description of Artificial Sequence: Synthetic oligonucleotide
caguaauuccuugauaggg

SEQ ID NO: 3234975 - RNA, 19 nt, Artificial Sequence
  Description of Artificial Sequence: Synthetic oligonucleotide
acugugaccuuuguggagc

SEQ ID NO: 3234976 - RNA, 19 nt, Artificial Sequence
  Description of Artificial Sequence: Synthetic oligonucleotide
uguuugcacaauuauccug

SEQ ID NO: 3234977 - RNA, 19 nt, Artificial Sequence
  Description of Artificial Sequence: Synthetic oligonucleotide
acugcaaaugugcucagug

SEQ ID NO: 3234978 - RNA, 19 nt, Artificial Sequence
  Description of Artificial Sequence: Synthetic oligonucleotide
uacagcucugcccacuggg

SEQ ID NO: 3234979 - RNA, 19 nt, Artificial Sequence
  Description of Artificial Sequence: Synthetic oligonucleotide
uuuuaucaguaauuccuug

SEQ ID NO: 3234980 - RNA, 19 nt, Artificial Sequence
  Description of Artificial Sequence: Synthetic oligonucleotide
uuauccugguaauaggagu

SEQ ID NO: 3234981 - RNA, 19 nt, Artificial Sequence
  Description of Artificial Sequence: Synthetic oligonucleotide
uauguagauugaauauuca

SEQ ID NO: 3234982 - RNA, 19 nt, Artificial Sequence
  Description of Artificial Sequence: Synthetic oligonucleotide
aauaagugagcuguuucca

SEQ ID NO: 3234983 - RNA, 19 nt, Artificial Sequence
  Description of Artificial Sequence: Synthetic oligonucleotide
caauuauccugguaauagg

SEQ ID NO: 3234984 - RNA, 19 nt, Artificial Sequence
  Description of Artificial Sequence: Synthetic oligonucleotide
auaggguucccaucauccc

SEQ ID NO: 3234985 - RNA, 19 nt, Artificial Sequence
  Description of Artificial Sequence: Synthetic oligonucleotide
ucaauucacugcaaaugug

SEQ ID NO: 3234986 - RNA, 19 nt, Artificial Sequence
  Description of Artificial Sequence: Synthetic oligonucleotide
ucuuccgcagaaauggcca

SEQ ID NO: 3234987 - RNA, 19 nt, Artificial Sequence
  Description of Artificial Sequence: Synthetic oligonucleotide
uuaucaguaauuccuugau

SEQ ID NO: 3234988 - RNA, 19 nt, Artificial Sequence
  Description of Artificial Sequence: Synthetic oligonucleotide
aagugagcuguuuccauca

SEQ ID NO: 3234989 - RNA, 19 nt, Artificial Sequence
  Description of Artificial Sequence: Synthetic oligonucleotide
  modified_base (19)..(19): a, c, u, g, unknown or other
gaaccaggaaaucuguucn

SEQ ID NO: 3234990 - RNA, 19 nt, Artificial Sequence
  Description of Artificial Sequence: Synthetic oligonucleotide
acagucaucaucccacuug

SEQ ID NO: 3234991 - RNA, 19 nt, Artificial Sequence
  Description of Artificial Sequence: Synthetic oligonucleotide
uuucauaggacgccucuga

SEQ ID NO: 3234992 - RNA, 19 nt, Artificial Sequence
  Description of Artificial Sequence: Synthetic oligonucleotide
aaagcacuggucaucuagg

SEQ ID NO: 3234993 - RNA, 19 nt, Artificial Sequence
  Description of Artificial Sequence: Synthetic oligonucleotide
gaauauucaaauuccucaa

SEQ ID NO: 3234994 - RNA, 19 nt, Artificial Sequence
  Description of Artificial Sequence: Synthetic oligonucleotide
uauccugguaauaggaguc

SEQ ID NO: 3234995 - RNA, 19 nt, Artificial Sequence
  Description of Artificial Sequence: Synthetic oligonucleotide
acuaacgagaucuauuauu

SEQ ID NO: 3234996 - RNA, 19 nt, Artificial Sequence
  Description of Artificial Sequence: Synthetic oligonucleotide
caaagcacuggucaucuag

SEQ ID NO: 3234997 - RNA, 19 nt, Artificial Sequence
  Description of Artificial Sequence: Synthetic oligonucleotide
aauacagcucugcccacug

SEQ ID NO: 3234998 - RNA, 19 nt, Artificial Sequence
  Description of Artificial Sequence: Synthetic oligonucleotide
aucaaguaucacucucccc

SEQ ID NO: 3234999 - RNA, 19 nt, Artificial Sequence
  Description of Artificial Sequence: Synthetic oligonucleotide
ugaugcaagaucucccuga

SEQ ID NO: 3235000 - RNA, 19 nt, Artificial Sequence
  Description of Artificial Sequence: Synthetic oligonucleotide
ucaucuaggaccggaauac

SEQ ID NO: 3235001 - RNA, 19 nt, Artificial Sequence
  Description of Artificial Sequence: Synthetic oligonucleotide
ucuagggccacaccagacc

SEQ ID NO: 3235002 - RNA, 19 nt, Artificial Sequence
  Description of Artificial Sequence: Synthetic oligonucleotide
ugcacuuggucuucacugg

SEQ ID NO: 3235003 - RNA, 19 nt, Artificial Sequence
  Description of Artificial Sequence: Synthetic oligonucleotide
uauucagcagaaacauucu

SEQ ID NO: 3235004 - RNA, 19 nt, Artificial Sequence
  Description of Artificial Sequence: Synthetic oligonucleotide
gaaacuucauggcauuuga

SEQ ID NO: 3235005 - RNA, 19 nt, Artificial Sequence
  Description of Artificial Sequence: Synthetic oligonucleotide
aacgugaaagugauguuug

SEQ ID NO: 3235006 - RNA, 19 nt, Artificial Sequence
  Description of Artificial Sequence: Synthetic oligonucleotide
  modified_base (18)..(18): a, c, u, g, unknown or other
aaccaggaaaucuguucng

SEQ ID NO: 3235007 - RNA, 19 nt, Artificial Sequence
  Description of Artificial Sequence: Synthetic oligonucleotide
uucauuguucgcagacagg

SEQ ID NO: 3235008 - RNA, 19 nt, Artificial Sequence
  Description of Artificial Sequence: Synthetic oligonucleotide
gucaucaucccacuuggcc

SEQ ID NO: 3235009 - RNA, 19 nt, Artificial Sequence
  Description of Artificial Sequence: Synthetic oligonucleotide
auucacugcaaaugugcuc

SEQ ID NO: 3235010 - RNA, 19 nt, Artificial Sequence
  Description of Artificial Sequence: Synthetic oligonucleotide
auguauuucauuguucgca

SEQ ID NO: 3235011 - RNA, 19 nt, Artificial Sequence
  Description of Artificial Sequence: Synthetic oligonucleotide
uagugaugcaagaucuccc

SEQ ID NO: 3235012 - RNA, 19 nt, Artificial Sequence
  Description of Artificial Sequence: Synthetic oligonucleotide
gagucagaugugcacuugg

SEQ ID NO: 3235013 - RNA, 19 nt, Artificial Sequence
  Description of Artificial Sequence: Synthetic oligonucleotide
  modified_base (14)..(14): a, c, u, g, unknown or other
aggaaaucuguucnguuuu

SEQ ID NO: 3235014 - RNA, 19 nt, Artificial Sequence
  Description of Artificial Sequence: Synthetic oligonucleotide
cuugauaggguucccauca

SEQ ID NO: 3235015 - RNA, 19 nt, Artificial Sequence
  Description of Artificial Sequence: Synthetic oligonucleotide
aggcucacaggcuauguag

SEQ ID NO: 3235016 - RNA, 19 nt, Artificial Sequence
  Description of Artificial Sequence: Synthetic oligonucleotide
cagaauauucaaauuccuc

SEQ ID NO: 3235017 - RNA, 19 nt, Artificial Sequence
  Description of Artificial Sequence: Synthetic oligonucleotide
acaggaaacacucaguugc

SEQ ID NO: 3235018 - RNA, 19 nt, Artificial Sequence
  Description of Artificial Sequence: Synthetic oligonucleotide
agaaaaucugugcagagcg

SEQ ID NO: 3235019 - RNA, 19 nt, Artificial Sequence
  Description of Artificial Sequence: Synthetic oligonucleotide
aaaaguuucaagucuucuc

SEQ ID NO: 3235020 - RNA, 19 nt, Artificial Sequence
  Description of Artificial Sequence: Synthetic oligonucleotide
gcaguuaaaagcuugaucg

SEQ ID NO: 3235021 - RNA, 19 nt, Artificial Sequence
  Description of Artificial Sequence: Synthetic oligonucleotide
aaaagcuugaucggcagcc

SEQ ID NO: 3235022 - RNA, 19 nt, Artificial Sequence
  Description of Artificial Sequence: Synthetic oligonucleotide
aaaguuucaagucuucuca

SEQ ID NO: 3235023 - RNA, 19 nt, Artificial Sequence
  Description of Artificial Sequence: Synthetic oligonucleotide
auuucauagagaugggagc

SEQ ID NO: 3235024 - RNA, 19 nt, Artificial Sequence
  Description of Artificial Sequence: Synthetic oligonucleotide
aagucuucucauuucauag

SEQ ID NO: 3235025 - RNA, 19 nt, Artificial Sequence
  Description of Artificial Sequence: Synthetic oligonucleotide
aagaagagcagcuuacaag

SEQ ID NO: 3235026 - RNA, 19 nt, Artificial Sequence
  Description of Artificial Sequence: Synthetic oligonucleotide
ucucaguuaucucuaacgg

SEQ ID NO: 3235027 - RNA, 19 nt, Artificial Sequence
  Description of Artificial Sequence: Synthetic oligonucleotide
uucucaguuaucucuaacg

SEQ ID NO: 3235028 - RNA, 19 nt, Artificial Sequence
  Description of Artificial Sequence: Synthetic oligonucleotide
ucaguuaucucuaacgggu

SEQ ID NO: 3235029 - RNA, 19 nt, Artificial Sequence
  Description of Artificial Sequence: Synthetic oligonucleotide
uccuguauagcucaucucc

SEQ ID NO: 3235030 - RNA, 19 nt, Artificial Sequence
  Description of Artificial Sequence: Synthetic oligonucleotide
uuucauagaacugcggugg

SEQ ID NO: 3235031 - RNA, 19 nt, Artificial Sequence
  Description of Artificial Sequence: Synthetic oligonucleotide
aucugaagaaaaucugugc

SEQ ID NO: 3235032 - RNA, 19 nt, Artificial Sequence
  Description of Artificial Sequence: Synthetic oligonucleotide
ucugucaguagacauuggg

SEQ ID NO: 3235033 - RNA, 19 nt, Artificial Sequence
  Description of Artificial Sequence: Synthetic oligonucleotide
aagaaaaucugugcagagc

SEQ ID NO: 3235034 - RNA, 19 nt, Artificial Sequence
  Description of Artificial Sequence: Synthetic oligonucleotide
uagacauuggguuuucuag

SEQ ID NO: 3235035 - RNA, 19 nt, Artificial Sequence
  Description of Artificial Sequence: Synthetic oligonucleotide
agaagagcagcuuacaagu

SEQ ID NO: 3235036 - RNA, 19 nt, Artificial Sequence
  Description of Artificial Sequence: Synthetic oligonucleotide
acucaguugccucugacgg

SEQ ID NO: 3235037 - RNA, 19 nt, Artificial Sequence
  Description of Artificial Sequence: Synthetic oligonucleotide
ugacaggagagacacgugg

SEQ ID NO: 3235038 - RNA, 19 nt, Artificial Sequence
  Description of Artificial Sequence: Synthetic oligonucleotide
gauuucauagagaugggag

SEQ ID NO: 3235039 - RNA, 19 nt, Artificial Sequence
  Description of Artificial Sequence: Synthetic oligonucleotide
agacacguggauuucauag

SEQ ID NO: 3235040 - RNA, 19 nt, Artificial Sequence
  Description of Artificial Sequence: Synthetic oligonucleotide
aguuaaaagcuugaucggc

SEQ ID NO: 3235041 - RNA, 19 nt, Artificial Sequence
  Description of Artificial Sequence: Synthetic oligonucleotide
ucucauuucauagaacugc

SEQ ID NO: 3235042 - RNA, 19 nt, Artificial Sequence
  Description of Artificial Sequence: Synthetic oligonucleotide
aaaugugagucuuuccugu

SEQ ID NO: 3235043 - RNA, 19 nt, Artificial Sequence
  Description of Artificial Sequence: Synthetic oligonucleotide
agcaguuaaaagcuugauc

SEQ ID NO: 3235044 - RNA, 19 nt, Artificial Sequence
  Description of Artificial Sequence: Synthetic oligonucleotide
uuccucaccacauagcucu

SEQ ID NO: 3235045 - RNA, 19 nt, Artificial Sequence
  Description of Artificial Sequence: Synthetic oligonucleotide
ucucuaacggguaaucuga

SEQ ID NO: 3235046 - RNA, 19 nt, Artificial Sequence
  Description of Artificial Sequence: Synthetic oligonucleotide
aaaagcaugauggugccgu

SEQ ID NO: 3235047 - RNA, 19 nt, Artificial Sequence
  Description of Artificial Sequence: Synthetic oligonucleotide
uccuucaagauuucuuccg

SEQ ID NO: 3235048 - RNA, 19 nt, Artificial Sequence
  Description of Artificial Sequence: Synthetic oligonucleotide
aacuacucugcccuccuuc

SEQ ID NO: 3235049 - RNA, 19 nt, Artificial Sequence
  Description of Artificial Sequence: Synthetic oligonucleotide
uuuucuaggaaaugugagu

SEQ ID NO: 3235050 - RNA, 19 nt, Artificial Sequence
  Description of Artificial Sequence: Synthetic oligonucleotide
agucaaaaguuucaagucu

SEQ ID NO: 3235051 - RNA, 19 nt, Artificial Sequence
  Description of Artificial Sequence: Synthetic oligonucleotide
uuuccuguauagcucaucu

SEQ ID NO: 3235052 - RNA, 19 nt, Artificial Sequence
  Description of Artificial Sequence: Synthetic oligonucleotide
agacauuggguuuucuagg

SEQ ID NO: 3235053 - RNA, 19 nt, Artificial Sequence
  Description of Artificial Sequence: Synthetic oligonucleotide
cuuacaagugggcagucgg

SEQ ID NO: 3235054 - RNA, 19 nt, Artificial Sequence
  Description of Artificial Sequence: Synthetic oligonucleotide
ccuggcaaaagcaugaugg

SEQ ID NO: 3235055 - RNA, 19 nt, Artificial Sequence
  Description of Artificial Sequence: Synthetic oligonucleotide
ucuuccgucuuucugucag

SEQ ID NO: 3235056 - RNA, 19 nt, Artificial Sequence
  Description of Artificial Sequence: Synthetic oligonucleotide
ucuuccucaccacauagcu

SEQ ID NO: 3235057 - RNA, 19 nt, Artificial Sequence
  Description of Artificial Sequence: Synthetic oligonucleotide
uuaaaagcuugaucggcag

SEQ ID NO: 3235058 - RNA, 19 nt, Artificial Sequence
  Description of Artificial Sequence: Synthetic oligonucleotide
auuucauagaacugcggug

SEQ ID NO: 3235059 - RNA, 19 nt, Artificial Sequence
  Description of Artificial Sequence: Synthetic oligonucleotide
auuucuugggacaggaaac

SEQ ID NO: 3235060 - RNA, 19 nt, Artificial Sequence
  Description of Artificial Sequence: Synthetic oligonucleotide
ugggacaggaaacacucag

SEQ ID NO: 3235061 - RNA, 19 nt, Artificial Sequence
  Description of Artificial Sequence: Synthetic oligonucleotide
aggaaggcggugucgaagc

SEQ ID NO: 3235062 - RNA, 19 nt, Artificial Sequence
  Description of Artificial Sequence: Synthetic oligonucleotide
uuucugucaguagacauug

SEQ ID NO: 3235063 - RNA, 19 nt, Artificial Sequence
  Description of Artificial Sequence: Synthetic oligonucleotide
aagauuucuuccgucuuuc

SEQ ID NO: 3235064 - RNA, 19 nt, Artificial Sequence
  Description of Artificial Sequence: Synthetic oligonucleotide
cucaguuaucucuaacggg

SEQ ID NO: 3235065 - RNA, 19 nt, Artificial Sequence
  Description of Artificial Sequence: Synthetic oligonucleotide
ucauuucauagaacugcgg

SEQ ID NO: 3235066 - RNA, 19 nt, Artificial Sequence
  Description of Artificial Sequence: Synthetic oligonucleotide
cugaagaaaaucugugcag

SEQ ID NO: 3235067 - RNA, 19 nt, Artificial Sequence
  Description of Artificial Sequence: Synthetic oligonucleotide
ugaagaaaaucugugcaga

SEQ ID NO: 3235068 - RNA, 19 nt, Artificial Sequence
  Description of Artificial Sequence: Synthetic oligonucleotide
gagucaaaaguuucaaguc

SEQ ID NO: 3235069 - RNA, 19 nt, Artificial Sequence
  Description of Artificial Sequence: Synthetic oligonucleotide
uacucgguuaacuacucug

SEQ ID NO: 3235070 - RNA, 19 nt, Artificial Sequence
  Description of Artificial Sequence: Synthetic oligonucleotide
uucaagauuucuuccgucu

SEQ ID NO: 3235071 - RNA, 19 nt, Artificial Sequence
  Description of Artificial Sequence: Synthetic oligonucleotide
uuacccucugacaggagag

SEQ ID NO: 3235072 - RNA, 19 nt, Artificial Sequence
  Description of Artificial Sequence: Synthetic oligonucleotide
aggaaaugugagucuuucc

SEQ ID NO: 3235073 - RNA, 19 nt, Artificial Sequence
  Description of Artificial Sequence: Synthetic oligonucleotide
aaaaucugugcagagcgga

SEQ ID NO: 3235074 - RNA, 19 nt, Artificial Sequence
  Description of Artificial Sequence: Synthetic oligonucleotide
uuacaagugggcagucggg

SEQ ID NO: 3235075 - RNA, 19 nt, Artificial Sequence
  Description of Artificial Sequence: Synthetic oligonucleotide
aucucuaacggguaaucug

SEQ ID NO: 3235076 - RNA, 19 nt, Artificial Sequence
  Description of Artificial Sequence: Synthetic oligonucleotide
cuuguagcccaccaccucg

SEQ ID NO: 3235077 - RNA, 19 nt, Artificial Sequence
  Description of Artificial Sequence: Synthetic oligonucleotide
ucaguugccucugacgggg

SEQ ID NO: 3235078 - RNA, 19 nt, Artificial Sequence
  Description of Artificial Sequence: Synthetic oligonucleotide
acacguggauuucauagag

SEQ ID NO: 3235079 - RNA, 19 nt, Artificial Sequence
  Description of Artificial Sequence: Synthetic oligonucleotide
uugaucggcagccacuucu

SEQ ID NO: 3235080 - RNA, 19 nt, Artificial Sequence
  Description of Artificial Sequence: Synthetic oligonucleotide
ugucaguagacauuggguu

SEQ ID NO: 3235081 - RNA, 19 nt, Artificial Sequence
  Description of Artificial Sequence: Synthetic oligonucleotide
ucagcaguuaaaagcuuga

SEQ ID NO: 3235082 - RNA, 19 nt, Artificial Sequence
  Description of Artificial Sequence: Synthetic oligonucleotide
gggacaaccacuuguagcc

SEQ ID NO: 3235083 - RNA, 19 nt, Artificial Sequence
  Description of Artificial Sequence: Synthetic oligonucleotide
cuaacggguaaucugaaga

SEQ ID NO: 3235084 - RNA, 19 nt, Artificial Sequence
  Description of Artificial Sequence: Synthetic oligonucleotide
cauagaacugcgguggugc

SEQ ID NO: 3235085 - RNA, 19 nt, Artificial Sequence
  Description of Artificial Sequence: Synthetic oligonucleotide
caguuaaaagcuugaucgg

SEQ ID NO: 3235086 - RNA, 19 nt, Artificial Sequence
  Description of Artificial Sequence: Synthetic oligonucleotide
acguggauuucauagagau

SEQ ID NO: 3235087 - RNA, 19 nt, Artificial Sequence
  Description of Artificial Sequence: Synthetic oligonucleotide
aggguacacgugcuuaccc

SEQ ID NO: 3235088 - RNA, 19 nt, Artificial Sequence
  Description of Artificial Sequence: Synthetic oligonucleotide
aaggcggugucgaagcggc

SEQ ID NO: 3235089 - RNA, 19 nt, Artificial Sequence
  Description of Artificial Sequence: Synthetic oligonucleotide
uauagcucaucuccuggca

SEQ ID NO: 3235090 - RNA, 19 nt, Artificial Sequence
  Description of Artificial Sequence: Synthetic oligonucleotide
uaaaagcuugaucggcagc

SEQ ID NO: 3235091 - RNA, 19 nt, Artificial Sequence
  Description of Artificial Sequence: Synthetic oligonucleotide
acucgguuaacuacucugc

SEQ ID NO: 3235092 - RNA, 19 nt, Artificial Sequence
  Description of Artificial Sequence: Synthetic oligonucleotide
ucgguuaacuacucugccc

SEQ ID NO: 3235093 - RNA, 19 nt, Artificial Sequence
  Description of Artificial Sequence: Synthetic oligonucleotide
auagaacugcgguggugcc

SEQ ID NO: 3235094 - RNA, 19 nt, Artificial Sequence
  Description of Artificial Sequence: Synthetic oligonucleotide
ucuaacggguaaucugaag

SEQ ID NO: 3235095 - RNA, 19 nt, Artificial Sequence
  Description of Artificial Sequence: Synthetic oligonucleotide
ucuuucugucaguagacau

SEQ ID NO: 3235096 - RNA, 19 nt, Artificial Sequence
  Description of Artificial Sequence: Synthetic oligonucleotide
uggguuuucuaggaaaugu

SEQ ID NO: 3235097 - RNA, 19 nt, Artificial Sequence
  Description of Artificial Sequence: Synthetic oligonucleotide
gacaggaaacacucaguug

SEQ ID NO: 3235098 - RNA, 19 nt, Artificial Sequence
  Description of Artificial Sequence: Synthetic oligonucleotide
ucacuacucgguuaacuac

SEQ ID NO: 3235099 - RNA, 19 nt, Artificial Sequence
  Description of Artificial Sequence: Synthetic oligonucleotide
uaacggguaaucugaagaa

SEQ ID NO: 3235100 - RNA, 19 nt, Artificial Sequence
  Description of Artificial Sequence: Synthetic oligonucleotide
ucaaaaguuucaagucuuc

SEQ ID NO: 3235101 - RNA, 19 nt, Artificial Sequence
  Description of Artificial Sequence: Synthetic oligonucleotide
uacucugcccuccuucaag

SEQ ID NO: 3235102 - RNA, 19 nt, Artificial Sequence
  Description of Artificial Sequence: Synthetic oligonucleotide
uagcucuuaggguacacgu

SEQ ID NO: 3235103 - RNA, 19 nt, Artificial Sequence
  Description of Artificial Sequence: Synthetic oligonucleotide
ucugacggggacaaccacu

SEQ ID NO: 3235104 - RNA, 19 nt, Artificial Sequence
  Description of Artificial Sequence: Synthetic oligonucleotide
uagagaugggagcugugga

SEQ ID NO: 3235105 - RNA, 19 nt, Artificial Sequence
  Description of Artificial Sequence: Synthetic oligonucleotide
gccgucagcaguuaaaagc

SEQ ID NO: 3235106 - RNA, 19 nt, Artificial Sequence
  Description of Artificial Sequence: Synthetic oligonucleotide
gaaaaucugugcagagcgg

SEQ ID NO: 3235107 - RNA, 19 nt, Artificial Sequence
  Description of Artificial Sequence: Synthetic oligonucleotide
agagcagcuuacaaguggg

SEQ ID NO: 3235108 - RNA, 19 nt, Artificial Sequence
  Description of Artificial Sequence: Synthetic oligonucleotide
accacuuguagcccaccac

SEQ ID NO: 3235109 - RNA, 19 nt, Artificial Sequence
  Description of Artificial Sequence: Synthetic oligonucleotide
agcuguggaucacuacucg

SEQ ID NO: 3235110 - RNA, 19 nt, Artificial Sequence
  Description of Artificial Sequence: Synthetic oligonucleotide
gacauuggguuuucuagga

SEQ ID NO: 3235111 - RNA, 19 nt, Artificial Sequence
  Description of Artificial Sequence: Synthetic oligonucleotide
cacucaguugccucugacg

SEQ ID NO: 3235112 - RNA, 19 nt, Artificial Sequence
  Description of Artificial Sequence: Synthetic oligonucleotide
ucuucucauuucauagaac

SEQ ID NO: 3235113 - RNA, 19 nt, Artificial Sequence
  Description of Artificial Sequence: Synthetic oligonucleotide
uuaacuacucugcccuccu

SEQ ID NO: 3235114 - RNA, 19 nt, Artificial Sequence
  Description of Artificial Sequence: Synthetic oligonucleotide
uuucuugggacaggaaaca

SEQ ID NO: 3235115 - RNA, 19 nt, Artificial Sequence
  Description of Artificial Sequence: Synthetic oligonucleotide
aucugugcagagcggagag

SEQ ID NO: 3235116 - RNA, 19 nt, Artificial Sequence
  Description of Artificial Sequence: Synthetic oligonucleotide
uuaggguacacgugcuuac

SEQ ID NO: 3235117 - RNA, 19 nt, Artificial Sequence
  Description of Artificial Sequence: Synthetic oligonucleotide
aagauuuccacucagagaa

SEQ ID NO: 3235118 - RNA, 19 nt, Artificial Sequence
  Description of Artificial Sequence: Synthetic oligonucleotide
ugaugguugacgucgaagg

SEQ ID NO: 3235119 - RNA, 19 nt, Artificial Sequence
  Description of Artificial Sequence: Synthetic oligonucleotide
gagaaguucucguucagcg

SEQ ID NO: 3235120 - RNA, 19 nt, Artificial Sequence
  Description of Artificial Sequence: Synthetic oligonucleotide
auaagauuuccacucagag

SEQ ID NO: 3235121 - RNA, 19 nt, Artificial Sequence
  Description of Artificial Sequence: Synthetic oligonucleotide
guaacuaugaugguugacg

SEQ ID NO: 3235122 - RNA, 19 nt, Artificial Sequence
  Description of Artificial Sequence: Synthetic oligonucleotide
ugcggcuauagucagaugc

SEQ ID NO: 3235123 - RNA, 19 nt, Artificial Sequence
  Description of Artificial Sequence: Synthetic oligonucleotide
gaagaggauguccauacag

SEQ ID NO: 3235124 - RNA, 19 nt, Artificial Sequence
  Description of Artificial Sequence: Synthetic oligonucleotide
gagagcaagauuugggcgg

SEQ ID NO: 3235125 - RNA, 19 nt, Artificial Sequence
  Description of Artificial Sequence: Synthetic oligonucleotide
cauuggauaagucuccagg

SEQ ID NO: 3235126 - RNA, 19 nt, Artificial Sequence
  Description of Artificial Sequence: Synthetic oligonucleotide
uucacugcggcuauaguca

SEQ ID NO: 3235127 - RNA, 19 nt, Artificial Sequence
  Description of Artificial Sequence: Synthetic oligonucleotide
auguugaugaggcuuaucu

SEQ ID NO: 3235128 - RNA, 19 nt, Artificial Sequence
  Description of Artificial Sequence: Synthetic oligonucleotide
ucguaggagaucuuggaag

SEQ ID NO: 3235129 - RNA, 19 nt, Artificial Sequence
  Description of Artificial Sequence: Synthetic oligonucleotide
ucgaagaugaagccccugg

SEQ ID NO: 3235130 - RNA, 19 nt, Artificial Sequence
  Description of Artificial Sequence: Synthetic oligonucleotide
gaaguucucguucagcgug

SEQ ID NO: 3235131 - RNA, 19 nt, Artificial Sequence
  Description of Artificial Sequence: Synthetic oligonucleotide
acacuaucgauucucgguc

SEQ ID NO: 3235132 - RNA, 19 nt, Artificial Sequence
  Description of Artificial Sequence: Synthetic oligonucleotide
uaauacuugacucgcccgc

SEQ ID NO: 3235133 - RNA, 19 nt, Artificial Sequence
  Description of Artificial Sequence: Synthetic oligonucleotide
aguacugccaggagcaucc

SEQ ID NO: 3235134 - RNA, 19 nt, Artificial Sequence
  Description of Artificial Sequence: Synthetic oligonucleotide
augucgaagaugaagcccc

SEQ ID NO: 3235135 - RNA, 19 nt, Artificial Sequence
  Description of Artificial Sequence: Synthetic oligonucleotide
uaggcaaugagcagcaggu

SEQ ID NO: 3235136 - RNA, 19 nt, Artificial Sequence
  Description of Artificial Sequence: Synthetic oligonucleotide
uucucguucagcguguagg

SEQ ID NO: 3235137 - RNA, 19 nt, Artificial Sequence
  Description of Artificial Sequence: Synthetic oligonucleotide
acugaggugacaaacgggg

SEQ ID NO: 3235138 - RNA, 19 nt, Artificial Sequence
  Description of Artificial Sequence: Synthetic oligonucleotide
acaaacggggacauaauac

SEQ ID NO: 3235139 - RNA, 19 nt, Artificial Sequence
  Description of Artificial Sequence: Synthetic oligonucleotide
uaagauuuccacucagaga

SEQ ID NO: 3235140 - RNA, 19 nt, Artificial Sequence
  Description of Artificial Sequence: Synthetic oligonucleotide
aacuaugaugguugacguc

SEQ ID NO: 3235141 - RNA, 19 nt, Artificial Sequence
  Description of Artificial Sequence: Synthetic oligonucleotide
gacauaauacuugacucgc

SEQ ID NO: 3235142 - RNA, 19 nt, Artificial Sequence
  Description of Artificial Sequence: Synthetic oligonucleotide
guuaaaaccaagcucccca

SEQ ID NO: 3235143 - RNA, 19 nt, Artificial Sequence
  Description of Artificial Sequence: Synthetic oligonucleotide
gguaggagcagccagcccg

SEQ ID NO: 3235144 - RNA, 19 nt, Artificial Sequence
  Description of Artificial Sequence: Synthetic oligonucleotide
aaccaagcuccccacacug

SEQ ID NO: 3235145 - RNA, 19 nt, Artificial Sequence
  Description of Artificial Sequence: Synthetic oligonucleotide
acuaucgauucucgguccc

SEQ ID NO: 3235146 - RNA, 19 nt, Artificial Sequence
  Description of Artificial Sequence: Synthetic oligonucleotide
ggacauaauacuugacucg

SEQ ID NO: 3235147 - RNA, 19 nt, Artificial Sequence
  Description of Artificial Sequence: Synthetic oligonucleotide
uauagucagaugcucgcac

SEQ ID NO: 3235148 - RNA, 19 nt, Artificial Sequence
  Description of Artificial Sequence: Synthetic oligonucleotide
aucuuggaaggguuggccg

SEQ ID NO: 3235149 - RNA, 19 nt, Artificial Sequence
  Description of Artificial Sequence: Synthetic oligonucleotide
uaacuaugaugguugacgu

SEQ ID NO: 3235150 - RNA, 19 nt, Artificial Sequence
  Description of Artificial Sequence: Synthetic oligonucleotide
uccccgagcacccucuugg

SEQ ID NO: 3235151 - RNA, 19 nt, Artificial Sequence
  Description of Artificial Sequence: Synthetic oligonucleotide
ugaggugacaaacggggac

SEQ ID NO: 3235152 - RNA, 19 nt, Artificial Sequence
  Description of Artificial Sequence: Synthetic oligonucleotide
aguuaaaaccaagcucccc

SEQ ID NO: 3235153 - RNA, 19 nt, Artificial Sequence
  Description of Artificial Sequence: Synthetic oligonucleotide
aauaagauuuccacucaga

SEQ ID NO: 3235154 - RNA, 19 nt, Artificial Sequence
  Description of Artificial Sequence: Synthetic oligonucleotide
uugagagcauccaucuccc

SEQ ID NO: 3235155 - RNA, 19 nt, Artificial Sequence
  Description of Artificial Sequence: Synthetic oligonucleotide
gauuuccacucagagaagc

SEQ ID NO: 3235156 - RNA, 19 nt, Artificial Sequence
  Description of Artificial Sequence: Synthetic oligonucleotide
auuugggcggccgagcccc

SEQ ID NO: 3235157 - RNA, 19 nt, Artificial Sequence
  Description of Artificial Sequence: Synthetic oligonucleotide
aagauuugggcggccgagc

SEQ ID NO: 3235158 - RNA, 19 nt, Artificial Sequence
  Description of Artificial Sequence: Synthetic oligonucleotide
ucagcguguaggcaaugag

SEQ ID NO: 3235159 - RNA, 19 nt, Artificial Sequence
  Description of Artificial Sequence: Synthetic oligonucleotide
ucuuggugaaggcgaagag

SEQ ID NO: 3235160 - RNA, 19 nt, Artificial Sequence
  Description of Artificial Sequence: Synthetic oligonucleotide
guccauacaguggauacgg

SEQ ID NO: 3235161 - RNA, 19 nt, Artificial Sequence
  Description of Artificial Sequence: Synthetic oligonucleotide
aggcucacacuaucgauuc

SEQ ID NO: 3235162 - RNA, 19 nt, Artificial Sequence
  Description of Artificial Sequence: Synthetic oligonucleotide
uuaaaaccaagcuccccac

SEQ ID NO: 3235163 - RNA, 19 nt, Artificial Sequence
  Description of Artificial Sequence: Synthetic oligonucleotide
ucgaaggccugcuugguca

SEQ ID NO: 3235164 - RNA, 19 nt, Artificial Sequence
  Description of Artificial Sequence: Synthetic oligonucleotide
ugaucaggccccaccagcc

SEQ ID NO: 3235165 - RNA, 19 nt, Artificial Sequence
  Description of Artificial Sequence: Synthetic oligonucleotide
gucacgaugucgaagauga

SEQ ID NO: 3235166 - RNA, 19 nt, Artificial Sequence
  Description of Artificial Sequence: Synthetic oligonucleotide
gaugguugacgucgaaggc

SEQ ID NO: 3235167 - RNA, 19 nt, Artificial Sequence
  Description of Artificial Sequence: Synthetic oligonucleotide
agagaagcgucaccaggac

SEQ ID NO: 3235168 - RNA, 19 nt, Artificial Sequence
  Description of Artificial Sequence: Synthetic oligonucleotide
ucuuggaaggguuggccgc

SEQ ID NO: 3235169 - RNA, 19 nt, Artificial Sequence
  Description of Artificial Sequence: Synthetic oligonucleotide
uugaugaggcuuaucuggu

SEQ ID NO: 3235170 - RNA, 19 nt, Artificial Sequence
  Description of Artificial Sequence: Synthetic oligonucleotide
cucacacuaucgauucucg

SEQ ID NO: 3235171 - RNA, 19 nt, Artificial Sequence
  Description of Artificial Sequence: Synthetic oligonucleotide
ugguugacgucgaaggccu

SEQ ID NO: 3235172 - RNA, 19 nt, Artificial Sequence
  Description of Artificial Sequence: Synthetic oligonucleotide
cugguacuuguucaggggc

SEQ ID NO: 3235173 - RNA, 19 nt, Artificial Sequence
  Description of Artificial Sequence: Synthetic oligonucleotide
gacucaauggggacauugg

SEQ ID NO: 3235174 - RNA, 19 nt, Artificial Sequence
  Description of Artificial Sequence: Synthetic oligonucleotide
aauggggacauuggauaag

SEQ ID NO: 3235175 - RNA, 19 nt, Artificial Sequence
  Description of Artificial Sequence: Synthetic oligonucleotide
agccuugagagcaaagcac

SEQ ID NO: 3235176 - RNA, 19 nt, Artificial Sequence
  Description of Artificial Sequence: Synthetic oligonucleotide
gggagguuaucacuggugg

SEQ ID NO: 3235177 - RNA, 19 nt, Artificial Sequence
  Description of Artificial Sequence: Synthetic oligonucleotide
uugggcuuggcgaugcgca

SEQ ID NO: 3235178 - RNA, 19 nt, Artificial Sequence
  Description of Artificial Sequence: Synthetic oligonucleotide
uagucagaugcucgcacug

SEQ ID NO: 3235179 - RNA, 19 nt, Artificial Sequence
  Description of Artificial Sequence: Synthetic oligonucleotide
aaaccaagcuccccacacu

SEQ ID NO: 3235180 - RNA, 19 nt, Artificial Sequence
  Description of Artificial Sequence: Synthetic oligonucleotide
agagcaagauuugggcggc

SEQ ID NO: 3235181 - RNA, 19 nt, Artificial Sequence
  Description of Artificial Sequence: Synthetic oligonucleotide
cagcguguaggcaaugagc

SEQ ID NO: 3235182 - RNA, 19 nt, Artificial Sequence
  Description of Artificial Sequence: Synthetic oligonucleotide
aagcuccccacacuggacu

SEQ ID NO: 3235183 - RNA, 19 nt, Artificial Sequence
  Description of Artificial Sequence: Synthetic oligonucleotide
ucuccggaaggcccgcugg

SEQ ID NO: 3235184 - RNA, 19 nt, Artificial Sequence
  Description of Artificial Sequence: Synthetic oligonucleotide
gauaagucuccaggggcgg

SEQ ID NO: 3235185 - RNA, 19 nt, Artificial Sequence
  Description of Artificial Sequence: Synthetic oligonucleotide
gggacauaauacuugacuc

SEQ ID NO: 3235186 - RNA, 19 nt, Artificial Sequence
  Description of Artificial Sequence: Synthetic oligonucleotide
acugggagguuaucacugg

SEQ ID NO: 3235187 - RNA, 19 nt, Artificial Sequence
  Description of Artificial Sequence: Synthetic oligonucleotide
augaccguggcugacaccu

SEQ ID NO: 3235188 - RNA, 19 nt, Artificial Sequence
  Description of Artificial Sequence: Synthetic oligonucleotide
uggugcgagugccagggag

SEQ ID NO: 3235189 - RNA, 19 nt, Artificial Sequence
  Description of Artificial Sequence: Synthetic oligonucleotide
gacacugucguaggagggg

SEQ ID NO: 3235190 - RNA, 19 nt, Artificial Sequence
  Description of Artificial Sequence: Synthetic oligonucleotide
acauuccugccuaugcagc

SEQ ID NO: 3235191 - RNA, 19 nt, Artificial Sequence
  Description of Artificial Sequence: Synthetic oligonucleotide
aagggaacugaggugacaa

SEQ ID NO: 3235192 - RNA, 19 nt, Artificial Sequence
  Description of Artificial Sequence: Synthetic oligonucleotide
ucguucagcguguaggcaa

SEQ ID NO: 3235193 - RNA, 19 nt, Artificial Sequence
  Description of Artificial Sequence: Synthetic oligonucleotide
gucagaugcucgcacuggg

SEQ ID NO: 3235194 - RNA, 19 nt, Artificial Sequence
  Description of Artificial Sequence: Synthetic oligonucleotide
gacugauguggccuaugag

SEQ ID NO: 3235195 - RNA, 19 nt, Artificial Sequence
  Description of Artificial Sequence: Synthetic oligonucleotide
acucaauggggacauugga

SEQ ID NO: 3235196 - RNA, 19 nt, Artificial Sequence
  Description of Artificial Sequence: Synthetic oligonucleotide
uccacucagagaagcguca

SEQ ID NO: 3235197 - RNA, 19 nt, Artificial Sequence
  Description of Artificial Sequence: Synthetic oligonucleotide
gaucuuggaaggguuggcc

SEQ ID NO: 3235198 - RNA, 19 nt, Artificial Sequence
  Description of Artificial Sequence: Synthetic oligonucleotide
ugagguaacuaugaugguu

SEQ ID NO: 3235199 - RNA, 19 nt, Artificial Sequence
  Description of Artificial Sequence: Synthetic oligonucleotide
uugacucgcccgcagugcc

SEQ ID NO: 3235200 - RNA, 19 nt, Artificial Sequence
  Description of Artificial Sequence: Synthetic oligonucleotide
uuccacucagagaagcguc

SEQ ID NO: 3235201 - RNA, 19 nt, Artificial Sequence
  Description of Artificial Sequence: Synthetic oligonucleotide
aauacuugacucgcccgca

SEQ ID NO: 3235202 - RNA, 19 nt, Artificial Sequence
  Description of Artificial Sequence: Synthetic oligonucleotide
uuuccacucagagaagcgu

SEQ ID NO: 3235203 - RNA, 19 nt, Artificial Sequence
  Description of Artificial Sequence: Synthetic oligonucleotide
ucgugcuuccggcggaggg

SEQ ID NO: 3235204 - RNA, 19 nt, Artificial Sequence
  Description of Artificial Sequence: Synthetic oligonucleotide
ucggucccuaucuggagag

SEQ ID NO: 3235205 - RNA, 19 nt, Artificial Sequence
  Description of Artificial Sequence: Synthetic oligonucleotide
ucaccaggacaguuaaaac

SEQ ID NO: 3235206 - RNA, 19 nt, Artificial Sequence
  Description of Artificial Sequence: Synthetic oligonucleotide
acauuggauaagucuccag

SEQ ID NO: 3235207 - RNA, 19 nt, Artificial Sequence
  Description of Artificial Sequence: Synthetic oligonucleotide
gacacacaucucuccaagc

SEQ ID NO: 3235208 - RNA, 19 nt, Artificial Sequence
  Description of Artificial Sequence: Synthetic oligonucleotide
gguagguaggagcagccag

SEQ ID NO: 3235209 - RNA, 19 nt, Artificial Sequence
  Description of Artificial Sequence: Synthetic oligonucleotide
uggugaugggcucguagga

SEQ ID NO: 3235210 - RNA, 19 nt, Artificial Sequence
  Description of Artificial Sequence: Synthetic oligonucleotide
cugaucaggccccaccagc

SEQ ID NO: 3235211 - RNA, 19 nt, Artificial Sequence
  Description of Artificial Sequence: Synthetic oligonucleotide
cagaugcucgcacugggag

SEQ ID NO: 3235212 - RNA, 19 nt, Artificial Sequence
  Description of Artificial Sequence: Synthetic oligonucleotide
auuuccacucagagaagcg

SEQ ID NO: 3235213 - RNA, 19 nt, Artificial Sequence
  Description of Artificial Sequence: Synthetic oligonucleotide
caggacaguuaaaaccaag

SEQ ID NO: 3235214 - RNA, 19 nt, Artificial Sequence
  Description of Artificial Sequence: Synthetic oligonucleotide
agggaagucugcaaggucu

SEQ ID NO: 3235215 - RNA, 19 nt, Artificial Sequence
  Description of Artificial Sequence: Synthetic oligonucleotide
ucccuaucuggagagggag

SEQ ID NO: 3235216 - RNA, 19 nt, Artificial Sequence
  Description of Artificial Sequence: Synthetic oligonucleotide
gacguggaggagauagagg

SEQ ID NO: 3235217 - RNA, 19 nt, Artificial Sequence
  Description of Artificial Sequence: Synthetic oligonucleotide
acugauuacauucaaaggg

SEQ ID NO: 3235218 - RNA, 19 nt, Artificial Sequence
  Description of Artificial Sequence: Synthetic oligonucleotide
auugguuacauucauaggg

SEQ ID NO: 3235219 - RNA, 19 nt, Artificial Sequence
  Description of Artificial Sequence: Synthetic oligonucleotide
uucuauaucuucuagaacu

SEQ ID NO: 3235220 - RNA, 19 nt, Artificial Sequence
  Description of Artificial Sequence: Synthetic oligonucleotide
ucuucuagaacuuugacaa

SEQ ID NO: 3235221 - RNA, 19 nt, Artificial Sequence
  Description of Artificial Sequence: Synthetic oligonucleotide
aauauuauggucuucccaa

SEQ ID NO: 3235222 - RNA, 19 nt, Artificial Sequence
  Description of Artificial Sequence: Synthetic oligonucleotide
uaaccuauggcaaugaggu

SEQ ID NO: 3235223 - RNA, 19 nt, Artificial Sequence
  Description of Artificial Sequence: Synthetic oligonucleotide
uuuauugauuggcagauga

SEQ ID NO: 3235224 - RNA, 19 nt, Artificial Sequence
  Description of Artificial Sequence: Synthetic oligonucleotide
uaugaauucuuucaugaug

SEQ ID NO: 3235225 - RNA, 19 nt, Artificial Sequence
  Description of Artificial Sequence: Synthetic oligonucleotide
acauugguuacauucauag

SEQ ID NO: 3235226 - RNA, 19 nt, Artificial Sequence
  Description of Artificial Sequence: Synthetic oligonucleotide
augaauucuuucaugaugc

SEQ ID NO: 3235227 - RNA, 19 nt, Artificial Sequence
  Description of Artificial Sequence: Synthetic oligonucleotide
aucacaucuuuguagagac

SEQ ID NO: 3235228 - RNA, 19 nt, Artificial Sequence
  Description of Artificial Sequence: Synthetic oligonucleotide
uucuucaauauuauggucu

SEQ ID NO: 3235229 - RNA, 19 nt, Artificial Sequence
  Description of Artificial Sequence: Synthetic oligonucleotide
acacugauuacauucaaag

SEQ ID NO: 3235230 - RNA, 19 nt, Artificial Sequence
  Description of Artificial Sequence: Synthetic oligonucleotide
uuuguagagacuuuucuga

SEQ ID NO: 3235231 - RNA, 19 nt, Artificial Sequence
  Description of Artificial Sequence: Synthetic oligonucleotide
auucauaggguuucucucc

SEQ ID NO: 3235232 - RNA, 19 nt, Artificial Sequence
  Description of Artificial Sequence: Synthetic oligonucleotide
auguucuucaauauuaugg

SEQ ID NO: 3235233 - RNA, 19 nt, Artificial Sequence
  Description of Artificial Sequence: Synthetic oligonucleotide
uaucacauugguuacauuc

SEQ ID NO: 3235234 - RNA, 19 nt, Artificial Sequence
  Description of Artificial Sequence: Synthetic oligonucleotide
aguaugaauucuuucauga

SEQ ID NO: 3235235 - RNA, 19 nt, Artificial Sequence
  Description of Artificial Sequence: Synthetic oligonucleotide
uauaucuucuagaacuuug

SEQ ID NO: 3235236 - RNA, 19 nt, Artificial Sequence
  Description of Artificial Sequence: Synthetic oligonucleotide
cauucaaaggguuuucucc

SEQ ID NO: 3235237 - RNA, 19 nt, Artificial Sequence
  Description of Artificial Sequence: Synthetic oligonucleotide
uguguucuuuuauugauug

SEQ ID NO: 3235238 - RNA, 19 nt, Artificial Sequence
  Description of Artificial Sequence: Synthetic oligonucleotide
aaucuagcaaagcccacuc

SEQ ID NO: 3235239 - RNA, 19 nt, Artificial Sequence
  Description of Artificial Sequence: Synthetic oligonucleotide
gauaugcacaucaucauag

SEQ ID NO: 3235240 - RNA, 19 nt, Artificial Sequence
  Description of Artificial Sequence: Synthetic oligonucleotide
uguucuuuuauugauuggc

SEQ ID NO: 3235241 - RNA, 19 nt, Artificial Sequence
  Description of Artificial Sequence: Synthetic oligonucleotide
aacuuugacaauguucuuc

SEQ ID NO: 3235242 - RNA, 19 nt, Artificial Sequence
  Description of Artificial Sequence: Synthetic oligonucleotide
uccaguaugaauucuuuca

SEQ ID NO: 3235243 - RNA, 19 nt, Artificial Sequence
  Description of Artificial Sequence: Synthetic oligonucleotide
gaaguugauaugcacauca

SEQ ID NO: 3235244 - RNA, 19 nt, Artificial Sequence
  Description of Artificial Sequence: Synthetic oligonucleotide
uucaauauuauggucuucc

SEQ ID NO: 3235245 - RNA, 19 nt, Artificial Sequence
  Description of Artificial Sequence: Synthetic oligonucleotide
uguucuucaauauuauggu

SEQ ID NO: 3235246 - RNA, 19 nt, Artificial Sequence
  Description of Artificial Sequence: Synthetic oligonucleotide
agaacuuugacaauguucu

SEQ ID NO: 3235247 - RNA, 19 nt, Artificial Sequence
  Description of Artificial Sequence: Synthetic oligonucleotide
ugcacaucaucauagguca

SEQ ID NO: 3235248 - RNA, 19 nt, Artificial Sequence
  Description of Artificial Sequence: Synthetic oligonucleotide
aguauguguucuuuuauug

SEQ ID NO: 3235249 - RNA, 19 nt, Artificial Sequence
  Description of Artificial Sequence: Synthetic oligonucleotide
aauguucuucaauauuaug

SEQ ID NO: 3235250 - RNA, 19 nt, Artificial Sequence
  Description of Artificial Sequence: Synthetic oligonucleotide
uucugagugaaguugauau

SEQ ID NO: 3235251 - RNA, 19 nt, Artificial Sequence
  Description of Artificial Sequence: Synthetic oligonucleotide
ucuuuuauugauuggcaga

SEQ ID NO: 3235252 - RNA, 19 nt, Artificial Sequence
  Description of Artificial Sequence: Synthetic oligonucleotide
uuucucuccaguaugaauu

SEQ ID NO: 3235253 - RNA, 19 nt, Artificial Sequence
  Description of Artificial Sequence: Synthetic oligonucleotide
uucuuuuauugauuggcag

SEQ ID NO: 3235254 - RNA, 19 nt, Artificial Sequence
  Description of Artificial Sequence: Synthetic oligonucleotide
uugacaauguucuucaaua

SEQ ID NO: 3235255 - RNA, 19 nt, Artificial Sequence
  Description of Artificial Sequence: Synthetic oligonucleotide
aaggguuuucuccagugug

SEQ ID NO: 3235256 - RNA, 19 nt, Artificial Sequence
  Description of Artificial Sequence: Synthetic oligonucleotide
uagaacuuugacaauguuc

SEQ ID NO: 3235257 - RNA, 19 nt, Artificial Sequence
  Description of Artificial Sequence: Synthetic oligonucleotide
ucuuuguagagacuuuucu

SEQ ID NO: 3235258 - RNA, 19 nt, Artificial Sequence
  Description of Artificial Sequence: Synthetic oligonucleotide
ugugcaaaggcuuuaccac

SEQ ID NO: 3235259 - RNA, 19 nt, Artificial Sequence
  Description of Artificial Sequence: Synthetic oligonucleotide
aguugauaugcacaucauc

SEQ ID NO: 3235260 - RNA, 19 nt, Artificial Sequence
  Description of Artificial Sequence: Synthetic oligonucleotide
guugauaugcacaucauca

SEQ ID NO: 3235261 - RNA, 19 nt, Artificial Sequence
  Description of Artificial Sequence: Synthetic oligonucleotide
uuuaccacacugauuacau

SEQ ID NO: 3235262 - RNA, 19 nt, Artificial Sequence
  Description of Artificial Sequence: Synthetic oligonucleotide
ucuuucugagugaaguuga

SEQ ID NO: 3235263 - RNA, 19 nt, Artificial Sequence
  Description of Artificial Sequence: Synthetic oligonucleotide
acuuugacaauguucuuca

SEQ ID NO: 3235264 - RNA, 19 nt, Artificial Sequence
  Description of Artificial Sequence: Synthetic oligonucleotide
cuuuguagagacuuuucug

SEQ ID NO: 3235265 - RNA, 19 nt, Artificial Sequence
  Description of Artificial Sequence: Synthetic oligonucleotide
uucuagaacuuugacaaug

SEQ ID NO: 3235266 - RNA, 19 nt, Artificial Sequence
  Description of Artificial Sequence: Synthetic oligonucleotide
aauucuuucaugaugccuu

SEQ ID NO: 3235267 - RNA, 19 nt, Artificial Sequence
  Description of Artificial Sequence: Synthetic oligonucleotide
cugagugaaguugauaugc

SEQ ID NO: 3235268 - RNA, 19 nt, Artificial Sequence
  Description of Artificial Sequence: Synthetic oligonucleotide
accuauggcaaugagguuc

SEQ ID NO: 3235269 - RNA, 19 nt, Artificial Sequence
  Description of Artificial Sequence: Synthetic oligonucleotide
uugguuacauucauagggu

SEQ ID NO: 3235270 - RNA, 19 nt, Artificial Sequence
  Description of Artificial Sequence: Synthetic oligonucleotide
uucaugaugccuucuauau

SEQ ID NO: 3235271 - RNA, 19 nt, Artificial Sequence
  Description of Artificial Sequence: Synthetic oligonucleotide
uaccacacugauuacauuc

SEQ ID NO: 3235272 - RNA, 19 nt, Artificial Sequence
  Description of Artificial Sequence: Synthetic oligonucleotide
aaugagguuccuguagguc

SEQ ID NO: 3235273 - RNA, 19 nt, Artificial Sequence
  Description of Artificial Sequence: Synthetic oligonucleotide
aucuucuagaacuuugaca

SEQ ID NO: 3235274 - RNA, 19 nt, Artificial Sequence
  Description of Artificial Sequence: Synthetic oligonucleotide
uauguguucuuuuauugau

SEQ ID NO: 3235275 - RNA, 19 nt, Artificial Sequence
  Description of Artificial Sequence: Synthetic oligonucleotide
uauugauuggcagaugacu

SEQ ID NO: 3235276 - RNA, 19 nt, Artificial Sequence
  Description of Artificial Sequence: Synthetic oligonucleotide
cacugauuacauucaaagg

SEQ ID NO: 3235277 - RNA, 19 nt, Artificial Sequence
  Description of Artificial Sequence: Synthetic oligonucleotide
auauuauggucuucccaac

SEQ ID NO: 3235278 - RNA, 19 nt, Artificial Sequence
  Description of Artificial Sequence: Synthetic oligonucleotide
ucuagaacuuugacaaugu

SEQ ID NO: 3235279 - RNA, 19 nt, Artificial Sequence
  Description of Artificial Sequence: Synthetic oligonucleotide
auuauggucuucccaacug

SEQ ID NO: 3235280 - RNA, 19 nt, Artificial Sequence
  Description of Artificial Sequence: Synthetic oligonucleotide
uuugacaauguucuucaau

SEQ ID NO: 3235281 - RNA, 19 nt, Artificial Sequence
  Description of Artificial Sequence: Synthetic oligonucleotide
acauucaaaggguuuucuc

SEQ ID NO: 3235282 - RNA, 19 nt, Artificial Sequence
  Description of Artificial Sequence: Synthetic oligonucleotide
auucaaaggguuuucucca

SEQ ID NO: 3235283 - RNA, 19 nt, Artificial Sequence
  Description of Artificial Sequence: Synthetic oligonucleotide
guaaccuauggcaaugagg

SEQ ID NO: 3235284 - RNA, 19 nt, Artificial Sequence
  Description of Artificial Sequence: Synthetic oligonucleotide
aaagcccacucuuucugag

SEQ ID NO: 3235285 - RNA, 19 nt, Artificial Sequence
  Description of Artificial Sequence: Synthetic oligonucleotide
uaugcacaucaucauaggu

SEQ ID NO: 3235286 - RNA, 19 nt, Artificial Sequence
  Description of Artificial Sequence: Synthetic oligonucleotide
aaggcuuuaccacacugau

SEQ ID NO: 3235287 - RNA, 19 nt, Artificial Sequence
  Description of Artificial Sequence: Synthetic oligonucleotide
uuguagagacuuuucugag

SEQ ID NO: 3235288 - RNA, 19 nt, Artificial Sequence
  Description of Artificial Sequence: Synthetic oligonucleotide
auaugcacaucaucauagg

SEQ ID NO: 3235289 - RNA, 19 nt, Artificial Sequence
  Description of Artificial Sequence: Synthetic oligonucleotide
uccagcaucacaucuuugu

SEQ ID NO: 3235290 - RNA, 19 nt, Artificial Sequence
  Description of Artificial Sequence: Synthetic oligonucleotide
agcaucacaucuuuguaga

SEQ ID NO: 3235291 - RNA, 19 nt, Artificial Sequence
  Description of Artificial Sequence: Synthetic oligonucleotide
agugugcaaaggcuuuacc

SEQ ID NO: 3235292 - RNA, 19 nt, Artificial Sequence
  Description of Artificial Sequence: Synthetic oligonucleotide
auggcaaugagguuccugu

SEQ ID NO: 3235293 - RNA, 19 nt, Artificial Sequence
  Description of Artificial Sequence: Synthetic oligonucleotide
ucaauauuauggucuuccc

SEQ ID NO: 3235294 - RNA, 19 nt, Artificial Sequence
  Description of Artificial Sequence: Synthetic oligonucleotide
acauucauaggguuucucu

SEQ ID NO: 3235295 - RNA, 19 nt, Artificial Sequence
  Description of Artificial Sequence: Synthetic oligonucleotide
uuucucuccaguauguguu

SEQ ID NO: 3235296 - RNA, 19 nt, Artificial Sequence
  Description of Artificial Sequence: Synthetic oligonucleotide
uguaaccuauggcaaugag

SEQ ID NO: 3235297 - RNA, 19 nt, Artificial Sequence
  Description of Artificial Sequence: Synthetic oligonucleotide
uauuauggucuucccaacu

SEQ ID NO: 3235298 - RNA, 19 nt, Artificial Sequence
  Description of Artificial Sequence: Synthetic oligonucleotide
aaaucuagcaaagcccacu

SEQ ID NO: 3235299 - RNA, 19 nt, Artificial Sequence
  Description of Artificial Sequence: Synthetic oligonucleotide
augagguuccuguaggucu

SEQ ID NO: 3235300 - RNA, 19 nt, Artificial Sequence
  Description of Artificial Sequence: Synthetic oligonucleotide
augcacaucaucauagguc

SEQ ID NO: 3235301 - RNA, 19 nt, Artificial Sequence
  Description of Artificial Sequence: Synthetic oligonucleotide
aggauuucucuccaguaug

SEQ ID NO: 3235302 - RNA, 19 nt, Artificial Sequence
  Description of Artificial Sequence: Synthetic oligonucleotide
ucuagcaaagcccacucuu

SEQ ID NO: 3235303 - RNA, 19 nt, Artificial Sequence
  Description of Artificial Sequence: Synthetic oligonucleotide
uaggucuccagcaucacau

SEQ ID NO: 3235304 - RNA, 19 nt, Artificial Sequence
  Description of Artificial Sequence: Synthetic oligonucleotide
aaaggguuuucuccagugu

SEQ ID NO: 3235305 - RNA, 19 nt, Artificial Sequence
  Description of Artificial Sequence: Synthetic oligonucleotide
uugauuggcagaugacugc

SEQ ID NO: 3235306 - RNA, 19 nt, Artificial Sequence
  Description of Artificial Sequence: Synthetic oligonucleotide
uuauugauuggcagaugac

SEQ ID NO: 3235307 - RNA, 19 nt, Artificial Sequence
  Description of Artificial Sequence: Synthetic oligonucleotide
auuucucuccaguaugugu

SEQ ID NO: 3235308 - RNA, 19 nt, Artificial Sequence
  Description of Artificial Sequence: Synthetic oligonucleotide
uaucuucuagaacuuugac

SEQ ID NO: 3235309 - RNA, 19 nt, Artificial Sequence
  Description of Artificial Sequence: Synthetic oligonucleotide
ugagugaaguugauaugca

SEQ ID NO: 3235310 - RNA, 19 nt, Artificial Sequence
  Description of Artificial Sequence: Synthetic oligonucleotide
auugauuggcagaugacug

SEQ ID NO: 3235311 - RNA, 19 nt, Artificial Sequence
  Description of Artificial Sequence: Synthetic oligonucleotide
uguagagacuuuucugaga

SEQ ID NO: 3235312 - RNA, 19 nt, Artificial Sequence
  Description of Artificial Sequence: Synthetic oligonucleotide
aaaaucuagcaaagcccac

SEQ ID NO: 3235313 - RNA, 19 nt, Artificial Sequence
  Description of Artificial Sequence: Synthetic oligonucleotide
uuauggucuucccaacugu

SEQ ID NO: 3235314 - RNA, 19 nt, Artificial Sequence
  Description of Artificial Sequence: Synthetic oligonucleotide
cauugguuacauucauagg

SEQ ID NO: 3235315 - RNA, 19 nt, Artificial Sequence
  Description of Artificial Sequence: Synthetic oligonucleotide
ugauaugcacaucaucaua

SEQ ID NO: 3235316 - RNA, 19 nt, Artificial Sequence
  Description of Artificial Sequence: Synthetic oligonucleotide
ucugagugaaguugauaug

SEQ ID NO: 3235317 - RNA, 19 nt, Artificial Sequence
  Description of Artificial Sequence: Synthetic oligonucleotide
aacauaagaaggcugauag

SEQ ID NO: 3235318 - RNA, 19 nt, Artificial Sequence
  Description of Artificial Sequence: Synthetic oligonucleotide
auugcguugaauuaacagc

SEQ ID NO: 3235319 - RNA, 19 nt, Artificial Sequence
  Description of Artificial Sequence: Synthetic oligonucleotide
uugaauuaagugaacaggg

SEQ ID NO: 3235320 - RNA, 19 nt, Artificial Sequence
  Description of Artificial Sequence: Synthetic oligonucleotide
agaacuggaaaucugaguc

SEQ ID NO: 3235321 - RNA, 19 nt, Artificial Sequence
  Description of Artificial Sequence: Synthetic oligonucleotide
aacgaucugguuuucaugg

SEQ ID NO: 3235322 - RNA, 19 nt, Artificial Sequence
  Description of Artificial Sequence: Synthetic oligonucleotide
ucuacuaagggauaguccc

SEQ ID NO: 3235323 - RNA, 19 nt, Artificial Sequence
  Description of Artificial Sequence: Synthetic oligonucleotide
uguugauagaaacauaaga

SEQ ID NO: 3235324 - RNA, 19 nt, Artificial Sequence
  Description of Artificial Sequence: Synthetic oligonucleotide
aaaggcuuccuccaggcac

SEQ ID NO: 3235325 - RNA, 19 nt, Artificial Sequence
  Description of Artificial Sequence: Synthetic oligonucleotide
uacucuauuacacuggucu

SEQ ID NO: 3235326 - RNA, 19 nt, Artificial Sequence
  Description of Artificial Sequence: Synthetic oligonucleotide
aaguguauaauccucuuca

SEQ ID NO: 3235327 - RNA, 19 nt, Artificial Sequence
  Description of Artificial Sequence: Synthetic oligonucleotide
ggaaaaguagauuugaaag

SEQ ID NO: 3235328 - RNA, 19 nt, Artificial Sequence
  Description of Artificial Sequence: Synthetic oligonucleotide
uguauuguaacugaagaug

SEQ ID NO: 3235329 - RNA, 19 nt, Artificial Sequence
  Description of Artificial Sequence: Synthetic oligonucleotide
aacgugaacuuguauuccc

SEQ ID NO: 3235330 - RNA, 19 nt, Artificial Sequence
  Description of Artificial Sequence: Synthetic oligonucleotide
aaugauguuguccauugca

SEQ ID NO: 3235331 - RNA, 19 nt, Artificial Sequence
  Description of Artificial Sequence: Synthetic oligonucleotide
guugauguuacauacaauc

SEQ ID NO: 3235332 - RNA, 19 nt, Artificial Sequence
  Description of Artificial Sequence: Synthetic oligonucleotide
aagaccaggaucccucucc

SEQ ID NO: 3235333 - RNA, 19 nt, Artificial Sequence
  Description of Artificial Sequence: Synthetic oligonucleotide
uccuugaucaauaaucuca

SEQ ID NO: 3235334 - RNA, 19 nt, Artificial Sequence
  Description of Artificial Sequence: Synthetic oligonucleotide
aauuaagugaacagggguc

SEQ ID NO: 3235335 - RNA, 19 nt, Artificial Sequence
  Description of Artificial Sequence: Synthetic oligonucleotide
aauuaugcaugcuugaauu

SEQ ID NO: 3235336 - RNA, 19 nt, Artificial Sequence
  Description of Artificial Sequence: Synthetic oligonucleotide
uuaacaaacgugaacuugu

SEQ ID NO: 3235337 - RNA, 19 nt, Artificial Sequence
  Description of Artificial Sequence: Synthetic oligonucleotide
ucuacagaggacaccaccg

SEQ ID NO: 3235338 - RNA, 19 nt, Artificial Sequence
  Description of Artificial Sequence: Synthetic oligonucleotide
aauaucagaaaguguauaa

SEQ ID NO: 3235339 - RNA, 19 nt, Artificial Sequence
  Description of Artificial Sequence: Synthetic oligonucleotide
ugaauuaagugaacagggg

SEQ ID NO: 3235340 - RNA, 19 nt, Artificial Sequence
  Description of Artificial Sequence: Synthetic oligonucleotide
aaaguguauaauccucuuc

SEQ ID NO: 3235341 - RNA, 19 nt, Artificial Sequence
  Description of Artificial Sequence: Synthetic oligonucleotide
acauuuaacaaacgugaac

SEQ ID NO: 3235342 - RNA, 19 nt, Artificial Sequence
  Description of Artificial Sequence: Synthetic oligonucleotide
uuugauguggccaaccgac

SEQ ID NO: 3235343 - RNA, 19 nt, Artificial Sequence
  Description of Artificial Sequence: Synthetic oligonucleotide
uaaguguucccuaagucug

SEQ ID NO: 3235344 - RNA, 19 nt, Artificial Sequence
  Description of Artificial Sequence: Synthetic oligonucleotide
auaaagaaacaguucuuuc

SEQ ID NO: 3235345 - RNA, 19 nt, Artificial Sequence
  Description of Artificial Sequence: Synthetic oligonucleotide
uugauuacugagaucucgg

SEQ ID NO: 3235346 - RNA, 19 nt, Artificial Sequence
  Description of Artificial Sequence: Synthetic oligonucleotide
uugcguugaauuaacagca

SEQ ID NO: 3235347 - RNA, 19 nt, Artificial Sequence
  Description of Artificial Sequence: Synthetic oligonucleotide
agccacuugguucuguucc

SEQ ID NO: 3235348 - RNA, 19 nt, Artificial Sequence
  Description of Artificial Sequence: Synthetic oligonucleotide
aagguaaaauaauuuaauu

SEQ ID NO: 3235349 - RNA, 19 nt, Artificial Sequence
  Description of Artificial Sequence: Synthetic oligonucleotide
uucauuguugauagaaaca

SEQ ID NO: 3235350 - RNA, 19 nt, Artificial Sequence
  Description of Artificial Sequence: Synthetic oligonucleotide
aaaugcaggauuugugugu

SEQ ID NO: 3235351 - RNA, 19 nt, Artificial Sequence
  Description of Artificial Sequence: Synthetic oligonucleotide
acuaaguguucccuaaguc

SEQ ID NO: 3235352 - RNA, 19 nt, Artificial Sequence
  Description of Artificial Sequence: Synthetic oligonucleotide
uaagcucaccugcugaggg

SEQ ID NO: 3235353 - RNA, 19 nt, Artificial Sequence
  Description of Artificial Sequence: Synthetic oligonucleotide
aaucuuuucuauuguauuu

SEQ ID NO: 3235354 - RNA, 19 nt, Artificial Sequence
  Description of Artificial Sequence: Synthetic oligonucleotide
ucugaguccauuaguaacu

SEQ ID NO: 3235355 - RNA, 19 nt, Artificial Sequence
  Description of Artificial Sequence: Synthetic oligonucleotide
acuagaucaugguugaugu

SEQ ID NO: 3235356 - RNA, 19 nt, Artificial Sequence
  Description of Artificial Sequence: Synthetic oligonucleotide
uuuaacaaacgugaacuug

SEQ ID NO: 3235357 - RNA, 19 nt, Artificial Sequence
  Description of Artificial Sequence: Synthetic oligonucleotide
uauucccuuaauagaagag

SEQ ID NO: 3235358 - RNA, 19 nt, Artificial Sequence
  Description of Artificial Sequence: Synthetic oligonucleotide
caaguuggaagccacuugg

SEQ ID NO: 3235359 - RNA, 19 nt, Artificial Sequence
  Description of Artificial Sequence: Synthetic oligonucleotide
aggaccagauaucagcugg

SEQ ID NO: 3235360 - RNA, 19 nt, Artificial Sequence
  Description of Artificial Sequence: Synthetic oligonucleotide
uucaugcagaggcugagag

SEQ ID NO: 3235361 - RNA, 19 nt, Artificial Sequence
  Description of Artificial Sequence: Synthetic oligonucleotide
gaaugcaucaugcugggca

SEQ ID NO: 3235362 - RNA, 19 nt, Artificial Sequence
  Description of Artificial Sequence: Synthetic oligonucleotide
uacaauccuguuuauacac

SEQ ID NO: 3235363 - RNA, 19 nt, Artificial Sequence
  Description of Artificial Sequence: Synthetic oligonucleotide
auuaccagaacuggaaauc

SEQ ID NO: 3235364 - RNA, 19 nt, Artificial Sequence
  Description of Artificial Sequence: Synthetic oligonucleotide
agaugacuggaguucaaac

SEQ ID NO: 3235365 - RNA, 19 nt, Artificial Sequence
  Description of Artificial Sequence: Synthetic oligonucleotide
agaacuuggagcaugaccu

SEQ ID NO: 3235366 - RNA, 19 nt, Artificial Sequence
  Description of Artificial Sequence: Synthetic oligonucleotide
ugucauguguacuuggcca

SEQ ID NO: 3235367 - RNA, 19 nt, Artificial Sequence
  Description of Artificial Sequence: Synthetic oligonucleotide
auucccuuaauagaagagg

SEQ ID NO: 3235368 - RNA, 19 nt, Artificial Sequence
  Description of Artificial Sequence: Synthetic oligonucleotide
uaagcucucugucuguucc

SEQ ID NO: 3235369 - RNA, 19 nt, Artificial Sequence
  Description of Artificial Sequence: Synthetic oligonucleotide
uuugguuggcucuauuacc

SEQ ID NO: 3235370 - RNA, 19 nt, Artificial Sequence
  Description of Artificial Sequence: Synthetic oligonucleotide
uaauucccgaauaaagaga

SEQ ID NO: 3235371 - RNA, 19 nt, Artificial Sequence
  Description of Artificial Sequence: Synthetic oligonucleotide
ugaccuaaauuaugcaugc

SEQ ID NO: 3235372 - RNA, 19 nt, Artificial Sequence
  Description of Artificial Sequence: Synthetic oligonucleotide
aacauacugacggugaaga

SEQ ID NO: 3235373 - RNA, 19 nt, Artificial Sequence
  Description of Artificial Sequence: Synthetic oligonucleotide
cauugcguugaauuaacag

SEQ ID NO: 3235374 - RNA, 19 nt, Artificial Sequence
  Description of Artificial Sequence: Synthetic oligonucleotide
agguccuugaucaauaauc

SEQ ID NO: 3235375 - RNA, 19 nt, Artificial Sequence
  Description of Artificial Sequence: Synthetic oligonucleotide
uggguuaauuccugcaagg

SEQ ID NO: 3235376 - RNA, 19 nt, Artificial Sequence
  Description of Artificial Sequence: Synthetic oligonucleotide
uucccgaauaaagagauga

SEQ ID NO: 3235377 - RNA, 19 nt, Artificial Sequence
  Description of Artificial Sequence: Synthetic oligonucleotide
uaaaugcaggauuugugug

SEQ ID NO: 3235378 - RNA, 19 nt, Artificial Sequence
  Description of Artificial Sequence: Synthetic oligonucleotide
uggauuuguauuguaacug

SEQ ID NO: 3235379 - RNA, 19 nt, Artificial Sequence
  Description of Artificial Sequence: Synthetic oligonucleotide
aacuaaguguucccuaagu

SEQ ID NO: 3235380 - RNA, 19 nt, Artificial Sequence
  Description of Artificial Sequence: Synthetic oligonucleotide
uccauugaaguuucaaacu

SEQ ID NO: 3235381 - RNA, 19 nt, Artificial Sequence
  Description of Artificial Sequence: Synthetic oligonucleotide
ucauuguugauagaaacau

SEQ ID NO: 3235382 - RNA, 19 nt, Artificial Sequence
  Description of Artificial Sequence: Synthetic oligonucleotide
uuauucccuuaauagaaga

SEQ ID NO: 3235383 - RNA, 19 nt, Artificial Sequence
  Description of Artificial Sequence: Synthetic oligonucleotide
uuuccuugauggcuauucg

SEQ ID NO: 3235384 - RNA, 19 nt, Artificial Sequence
  Description of Artificial Sequence: Synthetic oligonucleotide
uucccaauaaacuguucag

SEQ ID NO: 3235385 - RNA, 19 nt, Artificial Sequence
  Description of Artificial Sequence: Synthetic oligonucleotide
aagauccuuuccccaagac

SEQ ID NO: 3235386 - RNA, 19 nt, Artificial Sequence
  Description of Artificial Sequence: Synthetic oligonucleotide
uugguuggcucuauuacca

SEQ ID NO: 3235387 - RNA, 19 nt, Artificial Sequence
  Description of Artificial Sequence: Synthetic oligonucleotide
uucacagccugaauccagg

SEQ ID NO: 3235388 - RNA, 19 nt, Artificial Sequence
  Description of Artificial Sequence: Synthetic oligonucleotide
uugucuucugugcugggag

SEQ ID NO: 3235389 - RNA, 19 nt, Artificial Sequence
  Description of Artificial Sequence: Synthetic oligonucleotide
ggaugaaucuuaaacaucc

SEQ ID NO: 3235390 - RNA, 19 nt, Artificial Sequence
  Description of Artificial Sequence: Synthetic oligonucleotide
auuuccuugauggcuauuc

SEQ ID NO: 3235391 - RNA, 19 nt, Artificial Sequence
  Description of Artificial Sequence: Synthetic oligonucleotide
cuaucaagcaaaacuagca

SEQ ID NO: 3235392 - RNA, 19 nt, Artificial Sequence
  Description of Artificial Sequence: Synthetic oligonucleotide
uccacuauagguguucacc

SEQ ID NO: 3235393 - RNA, 19 nt, Artificial Sequence
  Description of Artificial Sequence: Synthetic oligonucleotide
aacuaucaagcaaaacuag

SEQ ID NO: 3235394 - RNA, 19 nt, Artificial Sequence
  Description of Artificial Sequence: Synthetic oligonucleotide
uaacugaagaugauguaau

SEQ ID NO: 3235395 - RNA, 19 nt, Artificial Sequence
  Description of Artificial Sequence: Synthetic oligonucleotide
ugaagaacugaccuacauc

SEQ ID NO: 3235396 - RNA, 19 nt, Artificial Sequence
  Description of Artificial Sequence: Synthetic oligonucleotide
uagccguagaagauucugg

SEQ ID NO: 3235397 - RNA, 19 nt, Artificial Sequence
  Description of Artificial Sequence: Synthetic oligonucleotide
cuaccuugaacauggcugc

SEQ ID NO: 3235398 - RNA, 19 nt, Artificial Sequence
  Description of Artificial Sequence: Synthetic oligonucleotide
cuuauucccuuaauagaag

SEQ ID NO: 3235399 - RNA, 19 nt, Artificial Sequence
  Description of Artificial Sequence: Synthetic oligonucleotide
ucguacuugauuacugaga

SEQ ID NO: 3235400 - RNA, 19 nt, Artificial Sequence
  Description of Artificial Sequence: Synthetic oligonucleotide
gaugcuugagauauuugug

SEQ ID NO: 3235401 - RNA, 19 nt, Artificial Sequence
  Description of Artificial Sequence: Synthetic oligonucleotide
ugaccuacaucccaguaau

SEQ ID NO: 3235402 - RNA, 19 nt, Artificial Sequence
  Description of Artificial Sequence: Synthetic oligonucleotide
ugauaucucucucugggau

SEQ ID NO: 3235403 - RNA, 19 nt, Artificial Sequence
  Description of Artificial Sequence: Synthetic oligonucleotide
augauguaauucuugaguu

SEQ ID NO: 3235404 - RNA, 19 nt, Artificial Sequence
  Description of Artificial Sequence: Synthetic oligonucleotide
cuugucuaccccuucaguc

SEQ ID NO: 3235405 - RNA, 19 nt, Artificial Sequence
  Description of Artificial Sequence: Synthetic oligonucleotide
uagggcuauuucuucaugc

SEQ ID NO: 3235406 - RNA, 19 nt, Artificial Sequence
  Description of Artificial Sequence: Synthetic oligonucleotide
aagcaggucuacuaaggga

SEQ ID NO: 3235407 - RNA, 19 nt, Artificial Sequence
  Description of Artificial Sequence: Synthetic oligonucleotide
aaacaguucuuucccuuca

SEQ ID NO: 3235408 - RNA, 19 nt, Artificial Sequence
  Description of Artificial Sequence: Synthetic oligonucleotide
aauggcaacugcagccugc

SEQ ID NO: 3235409 - RNA, 19 nt, Artificial Sequence
  Description of Artificial Sequence: Synthetic oligonucleotide
uugaaguuucaaacuguug

SEQ ID NO: 3235410 - RNA, 19 nt, Artificial Sequence
  Description of Artificial Sequence: Synthetic oligonucleotide
ugaugcuugggcaccuggg

SEQ ID NO: 3235411 - RNA, 19 nt, Artificial Sequence
  Description of Artificial Sequence: Synthetic oligonucleotide
aggagcaacucuucugaac

SEQ ID NO: 3235412 - RNA, 19 nt, Artificial Sequence
  Description of Artificial Sequence: Synthetic oligonucleotide
cagaacuuggagcaugacc

SEQ ID NO: 3235413 - RNA, 19 nt, Artificial Sequence
  Description of Artificial Sequence: Synthetic oligonucleotide
uuaucuguuugauguggcc

SEQ ID NO: 3235414 - RNA, 19 nt, Artificial Sequence
  Description of Artificial Sequence: Synthetic oligonucleotide
uagaagaggguguaaaauu

SEQ ID NO: 3235415 - RNA, 19 nt, Artificial Sequence
  Description of Artificial Sequence: Synthetic oligonucleotide
acaggagcaacucuucuga

SEQ ID NO: 3235416 - RNA, 19 nt, Artificial Sequence
  Description of Artificial Sequence: Synthetic oligonucleotide
augaccuaaauuaugcaug

SEQ ID NO: 3235417 - RNA, 19 nt, Artificial Sequence
  Description of Artificial Sequence: Synthetic oligonucleotide
uaaacuuccaaaaugaagg

SEQ ID NO: 3235418 - RNA, 19 nt, Artificial Sequence
  Description of Artificial Sequence: Synthetic oligonucleotide
ugaauuauaauuuauauuu

SEQ ID NO: 3235419 - RNA, 19 nt, Artificial Sequence
  Description of Artificial Sequence: Synthetic oligonucleotide
auaauuuauauuuugcuuc

SEQ ID NO: 3235420 - RNA, 19 nt, Artificial Sequence
  Description of Artificial Sequence: Synthetic oligonucleotide
aaagaauaaaacuugaauu

SEQ ID NO: 3235421 - RNA, 19 nt, Artificial Sequence
  Description of Artificial Sequence: Synthetic oligonucleotide
uacaguagcauaaacaaag

SEQ ID NO: 3235422 - RNA, 19 nt, Artificial Sequence
  Description of Artificial Sequence: Synthetic oligonucleotide
aauuccauacauuccagac

SEQ ID NO: 3235423 - RNA, 19 nt, Artificial Sequence
  Description of Artificial Sequence: Synthetic oligonucleotide
aauuauaauuuauauuuug

SEQ ID NO: 3235424 - RNA, 19 nt, Artificial Sequence
  Description of Artificial Sequence: Synthetic oligonucleotide
agcuguggaaauuugaucc

SEQ ID NO: 3235425 - RNA, 19 nt, Artificial Sequence
  Description of Artificial Sequence: Synthetic oligonucleotide
gauaacacaauaaacauac

SEQ ID NO: 3235426 - RNA, 19 nt, Artificial Sequence
  Description of Artificial Sequence: Synthetic oligonucleotide
uaauaaacuuccaaaauga

SEQ ID NO: 3235427 - RNA, 19 nt, Artificial Sequence
  Description of Artificial Sequence: Synthetic oligonucleotide
aacacaauaaacauacuuc

SEQ ID NO: 3235428 - RNA, 19 nt, Artificial Sequence
  Description of Artificial Sequence: Synthetic oligonucleotide
uaaaacuugaauuauaauu

SEQ ID NO: 3235429 - RNA, 19 nt, Artificial Sequence
  Description of Artificial Sequence: Synthetic oligonucleotide
ucuaauuccauacauucca

SEQ ID NO: 3235430 - RNA, 19 nt, Artificial Sequence
  Description of Artificial Sequence: Synthetic oligonucleotide
aagaauaaaacuugaauua

SEQ ID NO: 3235431 - RNA, 19 nt, Artificial Sequence
  Description of Artificial Sequence: Synthetic oligonucleotide
uuuacaguagcauaaacaa

SEQ ID NO: 3235432 - RNA, 19 nt, Artificial Sequence
  Description of Artificial Sequence: Synthetic oligonucleotide
auaaacauacuucagucag

SEQ ID NO: 3235433 - RNA, 19 nt, Artificial Sequence
  Description of Artificial Sequence: Synthetic oligonucleotide
uuuuacaguagcauaaaca

SEQ ID NO: 3235434 - RNA, 19 nt, Artificial Sequence
  Description of Artificial Sequence: Synthetic oligonucleotide
auuauaauuuauauuuugc

SEQ ID NO: 3235435 - RNA, 19 nt, Artificial Sequence
  Description of Artificial Sequence: Synthetic oligonucleotide
uuucuugugaggauaaacc

SEQ ID NO: 3235436 - RNA, 19 nt, Artificial Sequence
  Description of Artificial Sequence: Synthetic oligonucleotide
gacuaaaacuccuuuaaag

SEQ ID NO: 3235437 - RNA, 19 nt, Artificial Sequence
  Description of Artificial Sequence: Synthetic oligonucleotide
uuuguaauaaacuuccaaa

SEQ ID NO: 3235438 - RNA, 19 nt, Artificial Sequence
  Description of Artificial Sequence: Synthetic oligonucleotide
uuauaauuuauauuuugcu

SEQ ID NO: 3235439 - RNA, 19 nt, Artificial Sequence
  Description of Artificial Sequence: Synthetic oligonucleotide
uuuauugauaacacaauaa

SEQ ID NO: 3235440 - RNA, 19 nt, Artificial Sequence
  Description of Artificial Sequence: Synthetic oligonucleotide
guaauaaacuuccaaaaug

SEQ ID NO: 3235441 - RNA, 19 nt, Artificial Sequence
  Description of Artificial Sequence: Synthetic oligonucleotide
uuauugauaacacaauaaa

SEQ ID NO: 3235442 - RNA, 19 nt, Artificial Sequence
  Description of Artificial Sequence: Synthetic oligonucleotide
auugauaacacaauaaaca

SEQ ID NO: 3235443 - RNA, 19 nt, Artificial Sequence
  Description of Artificial Sequence: Synthetic oligonucleotide
uuuauauuuugcuucacgu

SEQ ID NO: 3235444 - RNA, 19 nt, Artificial Sequence
  Description of Artificial Sequence: Synthetic oligonucleotide
aaacaaaguuuauugauaa

SEQ ID NO: 3235445 - RNA, 19 nt, Artificial Sequence
  Description of Artificial Sequence: Synthetic oligonucleotide
uuaaagaucuuccuugcca

SEQ ID NO: 3235446 - RNA, 19 nt, Artificial Sequence
  Description of Artificial Sequence: Synthetic oligonucleotide
uauugauaacacaauaaac

SEQ ID NO: 3235447 - RNA, 19 nt, Artificial Sequence
  Description of Artificial Sequence: Synthetic oligonucleotide
uuuucaagcucaaagaaua

SEQ ID NO: 3235448 - RNA, 19 nt, Artificial Sequence
  Description of Artificial Sequence: Synthetic oligonucleotide
aaguucagcgacuaaaacu

SEQ ID NO: 3235449 - RNA, 19 nt, Artificial Sequence
  Description of Artificial Sequence: Synthetic oligonucleotide
uauauuuugcuucacguau

SEQ ID NO: 3235450 - RNA, 19 nt, Artificial Sequence
  Description of Artificial Sequence: Synthetic oligonucleotide
aauaaacauacuucaguca

SEQ ID NO: 3235451 - RNA, 19 nt, Artificial Sequence
  Description of Artificial Sequence: Synthetic oligonucleotide
aaacuuccaaaaugaaggg

SEQ ID NO: 3235452 - RNA, 19 nt, Artificial Sequence
  Description of Artificial Sequence: Synthetic oligonucleotide
aacacccagaaguucagcg

SEQ ID NO: 3235453 - RNA, 19 nt, Artificial Sequence
  Description of Artificial Sequence: Synthetic oligonucleotide
auuuauauuuugcuucacg

SEQ ID NO: 3235454 - RNA, 19 nt, Artificial Sequence
  Description of Artificial Sequence: Synthetic oligonucleotide
aaaacuugaauuauaauuu

SEQ ID NO: 3235455 - RNA, 19 nt, Artificial Sequence
  Description of Artificial Sequence: Synthetic oligonucleotide
ugaucuuucucucuaauuc

SEQ ID NO: 3235456 - RNA, 19 nt, Artificial Sequence
  Description of Artificial Sequence: Synthetic oligonucleotide
aagcucaaagaauaaaacu

SEQ ID NO: 3235457 - RNA, 19 nt, Artificial Sequence
  Description of Artificial Sequence: Synthetic oligonucleotide
acuaaaacuccuuuaaaga

SEQ ID NO: 3235458 - RNA, 19 nt, Artificial Sequence
  Description of Artificial Sequence: Synthetic oligonucleotide
ucacguauuacaaacucca

SEQ ID NO: 3235459 - RNA, 19 nt, Artificial Sequence
  Description of Artificial Sequence: Synthetic oligonucleotide
aaaguuuauugauaacaca

SEQ ID NO: 3235460 - RNA, 19 nt, Artificial Sequence
  Description of Artificial Sequence: Synthetic oligonucleotide
aacaaaguuuauugauaac

SEQ ID NO: 3235461 - RNA, 19 nt, Artificial Sequence
  Description of Artificial Sequence: Synthetic oligonucleotide
aaaaugaagggaaaugucu

SEQ ID NO: 3235462 - RNA, 19 nt, Artificial Sequence
  Description of Artificial Sequence: Synthetic oligonucleotide
uuuugcuucacguauuaca

SEQ ID NO: 3235463 - RNA, 19 nt, Artificial Sequence
  Description of Artificial Sequence: Synthetic oligonucleotide
acaaacuccauccauguca

SEQ ID NO: 3235464 - RNA, 19 nt, Artificial Sequence
  Description of Artificial Sequence: Synthetic oligonucleotide
uauaauuuauauuuugcuu

SEQ ID NO: 3235465 - RNA, 19 nt, Artificial Sequence
  Description of Artificial Sequence: Synthetic oligonucleotide
auaaacaaaguuuauugau

SEQ ID NO: 3235466 - RNA, 19 nt, Artificial Sequence
  Description of Artificial Sequence: Synthetic oligonucleotide
acaauaaacauacuucagu

SEQ ID NO: 3235467 - RNA, 19 nt, Artificial Sequence
  Description of Artificial Sequence: Synthetic oligonucleotide
aauaaaacuugaauuauaa

SEQ ID NO: 3235468 - RNA, 19 nt, Artificial Sequence
  Description of Artificial Sequence: Synthetic oligonucleotide
ucaagcucaaagaauaaaa

SEQ ID NO: 3235469 - RNA, 19 nt, Artificial Sequence
  Description of Artificial Sequence: Synthetic oligonucleotide
aguucagcgacuaaaacuc

SEQ ID NO: 3235470 - RNA, 19 nt, Artificial Sequence
  Description of Artificial Sequence: Synthetic oligonucleotide
uguaauaaacuuccaaaau

SEQ ID NO: 3235471 - RNA, 19 nt, Artificial Sequence
  Description of Artificial Sequence: Synthetic oligonucleotide
ugaggauaaaccuuaauuu

SEQ ID NO: 3235472 - RNA, 19 nt, Artificial Sequence
  Description of Artificial Sequence: Synthetic oligonucleotide
aagggaaaugucuugcuca

SEQ ID NO: 3235473 - RNA, 19 nt, Artificial Sequence
  Description of Artificial Sequence: Synthetic oligonucleotide
ucucuaauuccauacauuc

SEQ ID NO: 3235474 - RNA, 19 nt, Artificial Sequence
  Description of Artificial Sequence: Synthetic oligonucleotide
uaaagaucuuccuugccag

SEQ ID NO: 3235475 - RNA, 19 nt, Artificial Sequence
  Description of Artificial Sequence: Synthetic oligonucleotide
acacaauaaacauacuuca

SEQ ID NO: 3235476 - RNA, 19 nt, Artificial Sequence
  Description of Artificial Sequence: Synthetic oligonucleotide
acaaaguuuauugauaaca

SEQ ID NO: 3235477 - RNA, 19 nt, Artificial Sequence
  Description of Artificial Sequence: Synthetic oligonucleotide
aaugaagggaaaugucuug

SEQ ID NO: 3235478 - RNA, 19 nt, Artificial Sequence
  Description of Artificial Sequence: Synthetic oligonucleotide
caauaaacauacuucaguc

SEQ ID NO: 3235479 - RNA, 19 nt, Artificial Sequence
  Description of Artificial Sequence: Synthetic oligonucleotide
uugauaacacaauaaacau

SEQ ID NO: 3235480 - RNA, 19 nt, Artificial Sequence
  Description of Artificial Sequence: Synthetic oligonucleotide
aaguuuauugauaacacaa

SEQ ID NO: 3235481 - RNA, 19 nt, Artificial Sequence
  Description of Artificial Sequence: Synthetic oligonucleotide
uaauuuauauuuugcuuca

SEQ ID NO: 3235482 - RNA, 19 nt, Artificial Sequence
  Description of Artificial Sequence: Synthetic oligonucleotide
uggaaauuugauccugggg

SEQ ID NO: 3235483 - RNA, 19 nt, Artificial Sequence
  Description of Artificial Sequence: Synthetic oligonucleotide
aaagaucuuccuugccagc

SEQ ID NO: 3235484 - RNA, 19 nt, Artificial Sequence
  Description of Artificial Sequence: Synthetic oligonucleotide
caaaguuuauugauaacac

SEQ ID NO: 3235485 - RNA, 19 nt, Artificial Sequence
  Description of Artificial Sequence: Synthetic oligonucleotide
uuguaauaaacuuccaaaa

SEQ ID NO: 3235486 - RNA, 19 nt, Artificial Sequence
  Description of Artificial Sequence: Synthetic oligonucleotide
aaaacuccuuuaaagaucu

SEQ ID NO: 3235487 - RNA, 19 nt, Artificial Sequence
  Description of Artificial Sequence: Synthetic oligonucleotide
aacuccuuuaaagaucuuc

SEQ ID NO: 3235488 - RNA, 19 nt, Artificial Sequence
  Description of Artificial Sequence: Synthetic oligonucleotide
uaaaacuccuuuaaagauc

SEQ ID NO: 3235489 - RNA, 19 nt, Artificial Sequence
  Description of Artificial Sequence: Synthetic oligonucleotide
uaacacaauaaacauacuu

SEQ ID NO: 3235490 - RNA, 19 nt, Artificial Sequence
  Description of Artificial Sequence: Synthetic oligonucleotide
uuugcuucacguauuacaa

SEQ ID NO: 3235491 - RNA, 19 nt, Artificial Sequence
  Description of Artificial Sequence: Synthetic oligonucleotide
uaaacaaaguuuauugaua

SEQ ID NO: 3235492 - RNA, 19 nt, Artificial Sequence
  Description of Artificial Sequence: Synthetic oligonucleotide
uuuucaguggauuuguaau

SEQ ID NO: 3235493 - RNA, 19 nt, Artificial Sequence
  Description of Artificial Sequence: Synthetic oligonucleotide
uuugccugaaaucuuggcu

SEQ ID NO: 3235494 - RNA, 19 nt, Artificial Sequence
  Description of Artificial Sequence: Synthetic oligonucleotide
acuccuuuaaagaucuucc

SEQ ID NO: 3235495 - RNA, 19 nt, Artificial Sequence
  Description of Artificial Sequence: Synthetic oligonucleotide
uguggaaauuugauccugg

SEQ ID NO: 3235496 - RNA, 19 nt, Artificial Sequence
  Description of Artificial Sequence: Synthetic oligonucleotide
uggauuuguaauaaacuuc

SEQ ID NO: 3235497 - RNA, 19 nt, Artificial Sequence
  Description of Artificial Sequence: Synthetic oligonucleotide
gcauaaacaaaguuuauug

SEQ ID NO: 3235498 - RNA, 19 nt, Artificial Sequence
  Description of Artificial Sequence: Synthetic oligonucleotide
acguauuacaaacuccauc

SEQ ID NO: 3235499 - RNA, 19 nt, Artificial Sequence
  Description of Artificial Sequence: Synthetic oligonucleotide
gaucuuucucucuaauucc

SEQ ID NO: 3235500 - RNA, 19 nt, Artificial Sequence
  Description of Artificial Sequence: Synthetic oligonucleotide
uucaucuuuugaaacaaaa

SEQ ID NO: 3235501 - RNA, 19 nt, Artificial Sequence
  Description of Artificial Sequence: Synthetic oligonucleotide
uuucucucuaauuccauac

SEQ ID NO: 3235502 - RNA, 19 nt, Artificial Sequence
  Description of Artificial Sequence: Synthetic oligonucleotide
uucacguauuacaaacucc

SEQ ID NO: 3235503 - RNA, 19 nt, Artificial Sequence
  Description of Artificial Sequence: Synthetic oligonucleotide
auacauuccagacuuuuca

SEQ ID NO: 3235504 - RNA, 19 nt, Artificial Sequence
  Description of Artificial Sequence: Synthetic oligonucleotide
cuuuaaagaucuuccuugc

SEQ ID NO: 3235505 - RNA, 19 nt, Artificial Sequence
  Description of Artificial Sequence: Synthetic oligonucleotide
uugaauuauaauuuauauu

SEQ ID NO: 3235506 - RNA, 19 nt, Artificial Sequence
  Description of Artificial Sequence: Synthetic oligonucleotide
uugccugaaaucuuggcug

SEQ ID NO: 3235507 - RNA, 19 nt, Artificial Sequence
  Description of Artificial Sequence: Synthetic oligonucleotide
auaaacuuccaaaaugaag

SEQ ID NO: 3235508 - RNA, 19 nt, Artificial Sequence
  Description of Artificial Sequence: Synthetic oligonucleotide
acauacuucagucagcuuu

SEQ ID NO: 3235509 - RNA, 19 nt, Artificial Sequence
  Description of Artificial Sequence: Synthetic oligonucleotide
cuugccagcgguuccaugg

SEQ ID NO: 3235510 - RNA, 19 nt, Artificial Sequence
  Description of Artificial Sequence: Synthetic oligonucleotide
aaacauacuucagucagcu

SEQ ID NO: 3235511 - RNA, 19 nt, Artificial Sequence
  Description of Artificial Sequence: Synthetic oligonucleotide
ugcuucacguauuacaaac

SEQ ID NO: 3235512 - RNA, 19 nt, Artificial Sequence
  Description of Artificial Sequence: Synthetic oligonucleotide
aagaucuuccuugccagcg

SEQ ID NO: 3235513 - RNA, 19 nt, Artificial Sequence
  Description of Artificial Sequence: Synthetic oligonucleotide
uuccauacauuccagacuu

SEQ ID NO: 3235514 - RNA, 19 nt, Artificial Sequence
  Description of Artificial Sequence: Synthetic oligonucleotide
uuuaaagaucuuccuugcc

SEQ ID NO: 3235515 - RNA, 19 nt, Artificial Sequence
  Description of Artificial Sequence: Synthetic oligonucleotide
auuuguaauaaacuuccaa

SEQ ID NO: 3235516 - RNA, 19 nt, Artificial Sequence
  Description of Artificial Sequence: Synthetic oligonucleotide
caagcucaaagaauaaaac

SEQ ID NO: 3235517 - RNA, 19 nt, Artificial Sequence
  Description of Artificial Sequence: Synthetic oligonucleotide
gaugauauuaccuauucuc

SEQ ID NO: 3235518 - RNA, 19 nt, Artificial Sequence
  Description of Artificial Sequence: Synthetic oligonucleotide
uuaguuuugaaauuaauuu

SEQ ID NO: 3235519 - RNA, 19 nt, Artificial Sequence
  Description of Artificial Sequence: Synthetic oligonucleotide
auuaccuauucucugcacc

SEQ ID NO: 3235520 - RNA, 19 nt, Artificial Sequence
  Description of Artificial Sequence: Synthetic oligonucleotide
auuaguguagggcauggac

SEQ ID NO: 3235521 - RNA, 19 nt, Artificial Sequence
  Description of Artificial Sequence: Synthetic oligonucleotide
uuugaaauuaauuucuuuu

SEQ ID NO: 3235522 - RNA, 19 nt, Artificial Sequence
  Description of Artificial Sequence: Synthetic oligonucleotide
uuuaguuuugaaauuaauu

SEQ ID NO: 3235523 - RNA, 19 nt, Artificial Sequence
  Description of Artificial Sequence: Synthetic oligonucleotide
gauauuaccuauucucugc

SEQ ID NO: 3235524 - RNA, 19 nt, Artificial Sequence
  Description of Artificial Sequence: Synthetic oligonucleotide
ucaguuguuacuucccugg

SEQ ID NO: 3235525 - RNA, 19 nt, Artificial Sequence
  Description of Artificial Sequence: Synthetic oligonucleotide
cacucugucaaucucagcc

SEQ ID NO: 3235526 - RNA, 19 nt, Artificial Sequence
  Description of Artificial Sequence: Synthetic oligonucleotide
ugaaugacagcauuagugu

SEQ ID NO: 3235527 - RNA, 19 nt, Artificial Sequence
  Description of Artificial Sequence: Synthetic oligonucleotide
uaguuuugaaauuaauuuc

SEQ ID NO: 3235528 - RNA, 19 nt, Artificial Sequence
  Description of Artificial Sequence: Synthetic oligonucleotide
ugcaccucaugaaugacag

SEQ ID NO: 3235529 - RNA, 19 nt, Artificial Sequence
  Description of Artificial Sequence: Synthetic oligonucleotide
aaugacagcauuaguguag

SEQ ID NO: 3235530 - RNA, 19 nt, Artificial Sequence
  Description of Artificial Sequence: Synthetic oligonucleotide
acagcauuaguguagggca

SEQ ID NO: 3235531 - RNA, 19 nt, Artificial Sequence
  Description of Artificial Sequence: Synthetic oligonucleotide
uauucucugcaccucauga

SEQ ID NO: 3235532 - RNA, 19 nt, Artificial Sequence
  Description of Artificial Sequence: Synthetic oligonucleotide
uuaguguagggcauggacu

SEQ ID NO: 3235533 - RNA, 19 nt, Artificial Sequence
  Description of Artificial Sequence: Synthetic oligonucleotide
ugauauuaccuauucucug

SEQ ID NO: 3235534 - RNA, 19 nt, Artificial Sequence
  Description of Artificial Sequence: Synthetic oligonucleotide
augaaugacagcauuagug

SEQ ID NO: 3235535 - RNA, 19 nt, Artificial Sequence
  Description of Artificial Sequence: Synthetic oligonucleotide
uuuucaguuguuacuuccc

SEQ ID NO: 3235536 - RNA, 19 nt, Artificial Sequence
  Description of Artificial Sequence: Synthetic oligonucleotide
aguuuugaaauuaauuucu

SEQ ID NO: 3235537 - RNA, 19 nt, Artificial Sequence
  Description of Artificial Sequence: Synthetic oligonucleotide
ucaugaaugacagcauuag

SEQ ID NO: 3235538 - RNA, 19 nt, Artificial Sequence
  Description of Artificial Sequence: Synthetic oligonucleotide
ucccugggaacauucaagg

SEQ ID NO: 3235539 - RNA, 19 nt, Artificial Sequence
  Description of Artificial Sequence: Synthetic oligonucleotide
uuuuaguuuugaaauuaau

SEQ ID NO: 3235540 - RNA, 19 nt, Artificial Sequence
  Description of Artificial Sequence: Synthetic oligonucleotide
aaggggaugauauuaccua

SEQ ID NO: 3235541 - RNA, 19 nt, Artificial Sequence
  Description of Artificial Sequence: Synthetic oligonucleotide
uuggcugccuccuaaggcc

SEQ ID NO: 3235542 - RNA, 19 nt, Artificial Sequence
  Description of Artificial Sequence: Synthetic oligonucleotide
uuaccuauucucugcaccu

SEQ ID NO: 3235543 - RNA, 19 nt, Artificial Sequence
  Description of Artificial Sequence: Synthetic oligonucleotide
gacagcauuaguguagggc

SEQ ID NO: 3235544 - RNA, 19 nt, Artificial Sequence
  Description of Artificial Sequence: Synthetic oligonucleotide
uucccugggaacauucaag

SEQ ID NO: 3235545 - RNA, 19 nt, Artificial Sequence
  Description of Artificial Sequence: Synthetic oligonucleotide
uucaaggggaugauauuac

SEQ ID NO: 3235546 - RNA, 19 nt, Artificial Sequence
  Description of Artificial Sequence: Synthetic oligonucleotide
uuuugaaauuaauuucuuu

SEQ ID NO: 3235547 - RNA, 19 nt, Artificial Sequence
  Description of Artificial Sequence: Synthetic oligonucleotide
agggcauggacucucuguc

SEQ ID NO: 3235548 - RNA, 19 nt, Artificial Sequence
  Description of Artificial Sequence: Synthetic oligonucleotide
uuucaguuguuacuucccu

SEQ ID NO: 3235549 - RNA, 19 nt, Artificial Sequence
  Description of Artificial Sequence: Synthetic oligonucleotide
uguuacuucccugggaaca

SEQ ID NO: 3235550 - RNA, 19 nt, Artificial Sequence
  Description of Artificial Sequence: Synthetic oligonucleotide
ucaaggggaugauauuacc

SEQ ID NO: 3235551 - RNA, 19 nt, Artificial Sequence
  Description of Artificial Sequence: Synthetic oligonucleotide
aaucacucugucaaucuca

SEQ ID NO: 3235552 - RNA, 19 nt, Artificial Sequence
  Description of Artificial Sequence: Synthetic oligonucleotide
aggccaaucacucugucaa

SEQ ID NO: 3235553 - RNA, 19 nt, Artificial Sequence
  Description of Artificial Sequence: Synthetic oligonucleotide
uggacucucugucagcugu

SEQ ID NO: 3235554 - RNA, 19 nt, Artificial Sequence
  Description of Artificial Sequence: Synthetic oligonucleotide
auauuaccuauucucugca

SEQ ID NO: 3235555 - RNA, 19 nt, Artificial Sequence
  Description of Artificial Sequence: Synthetic oligonucleotide
ucucugcaccucaugaaug

SEQ ID NO: 3235556 - RNA, 19 nt, Artificial Sequence
  Description of Artificial Sequence: Synthetic oligonucleotide
uucaguuguuacuucccug

SEQ ID NO: 3235557 - RNA, 19 nt, Artificial Sequence
  Description of Artificial Sequence: Synthetic oligonucleotide
uaguguagggcauggacuc

SEQ ID NO: 3235558 - RNA, 19 nt, Artificial Sequence
  Description of Artificial Sequence: Synthetic oligonucleotide
aaggccaaucacucuguca

SEQ ID NO: 3235559 - RNA, 19 nt, Artificial Sequence
  Description of Artificial Sequence: Synthetic oligonucleotide
ccugggaacauucaagggg

SEQ ID NO: 3235560 - RNA, 19 nt, Artificial Sequence
  Description of Artificial Sequence: Synthetic oligonucleotide
augauauuaccuauucucu

SEQ ID NO: 3235561 - RNA, 19 nt, Artificial Sequence
  Description of Artificial Sequence: Synthetic oligonucleotide
uucucugcaccucaugaau

SEQ ID NO: 3235562 - RNA, 19 nt, Artificial Sequence
  Description of Artificial Sequence: Synthetic oligonucleotide
guuguuacuucccugggaa

SEQ ID NO: 3235563 - RNA, 19 nt, Artificial Sequence
  Description of Artificial Sequence: Synthetic oligonucleotide
cuuggcugccuccuaaggc

SEQ ID NO: 3235564 - RNA, 19 nt, Artificial Sequence
  Description of Artificial Sequence: Synthetic oligonucleotide
ucaaucucagccuguacuu

SEQ ID NO: 3235565 - RNA, 19 nt, Artificial Sequence
  Description of Artificial Sequence: Synthetic oligonucleotide
augacagcauuaguguagg

SEQ ID NO: 3235566 - RNA, 19 nt, Artificial Sequence
  Description of Artificial Sequence: Synthetic oligonucleotide
aaucucagccuguacuuuu

SEQ ID NO: 3235567 - RNA, 19 nt, Artificial Sequence
  Description of Artificial Sequence: Synthetic oligonucleotide
ucucugucagcugugcuug

SEQ ID NO: 3235568 - RNA, 19 nt, Artificial Sequence
  Description of Artificial Sequence: Synthetic oligonucleotide
acauucaaggggaugauau

SEQ ID NO: 3235569 - RNA, 19 nt, Artificial Sequence
  Description of Artificial Sequence: Synthetic oligonucleotide
cugggaacauucaagggga

SEQ ID NO: 3235570 - RNA, 19 nt, Artificial Sequence
  Description of Artificial Sequence: Synthetic oligonucleotide
acucugucaaucucagccu

SEQ ID NO: 3235571 - RNA, 19 nt, Artificial Sequence
  Description of Artificial Sequence: Synthetic oligonucleotide
ugucagcugugcuuggcug

SEQ ID NO: 3235572 - RNA, 19 nt, Artificial Sequence
  Description of Artificial Sequence: Synthetic oligonucleotide
aguuguuacuucccuggga

SEQ ID NO: 3235573 - RNA, 19 nt, Artificial Sequence
  Description of Artificial Sequence: Synthetic oligonucleotide
uauuaccuauucucugcac

SEQ ID NO: 3235574 - RNA, 19 nt, Artificial Sequence
  Description of Artificial Sequence: Synthetic oligonucleotide
caccucaugaaugacagca

SEQ ID NO: 3235575 - RNA, 19 nt, Artificial Sequence
  Description of Artificial Sequence: Synthetic oligonucleotide
uagggcauggacucucugu

SEQ ID NO: 3235576 - RNA, 19 nt, Artificial Sequence
  Description of Artificial Sequence: Synthetic oligonucleotide
auucaaggggaugauauua

SEQ ID NO: 3235577 - RNA, 19 nt, Artificial Sequence
  Description of Artificial Sequence: Synthetic oligonucleotide
cuccuaaggccaaucacuc

SEQ ID NO: 3235578 - RNA, 19 nt, Artificial Sequence
  Description of Artificial Sequence: Synthetic oligonucleotide
ucugucaaucucagccugu

SEQ ID NO: 3235579 - RNA, 19 nt, Artificial Sequence
  Description of Artificial Sequence: Synthetic oligonucleotide
ggaacauucaaggggauga

SEQ ID NO: 3235580 - RNA, 19 nt, Artificial Sequence
  Description of Artificial Sequence: Synthetic oligonucleotide
gaaugacagcauuagugua

SEQ ID NO: 3235581 - RNA, 19 nt, Artificial Sequence
  Description of Artificial Sequence: Synthetic oligonucleotide
gucaaucucagccuguacu

SEQ ID NO: 3235582 - RNA, 19 nt, Artificial Sequence
  Description of Artificial Sequence: Synthetic oligonucleotide
auucucugcaccucaugaa

SEQ ID NO: 3235583 - RNA, 19 nt, Artificial Sequence
  Description of Artificial Sequence: Synthetic oligonucleotide
accuauucucugcaccuca

SEQ ID NO: 3235584 - RNA, 19 nt, Artificial Sequence
  Description of Artificial Sequence: Synthetic oligonucleotide
uacuucccugggaacauuc

SEQ ID NO: 3235585 - RNA, 19 nt, Artificial Sequence
  Description of Artificial Sequence: Synthetic oligonucleotide
aggggaugauauuaccuau

SEQ ID NO: 3235586 - RNA, 19 nt, Artificial Sequence
  Description of Artificial Sequence: Synthetic oligonucleotide
ccuaaggccaaucacucug

SEQ ID NO: 3235587 - RNA, 19 nt, Artificial Sequence
  Description of Artificial Sequence: Synthetic oligonucleotide
cucugucaaucucagccug

SEQ ID NO: 3235588 - RNA, 19 nt, Artificial Sequence
  Description of Artificial Sequence: Synthetic oligonucleotide
ugucaaucucagccuguac

SEQ ID NO: 3235589 - RNA, 19 nt, Artificial Sequence
  Description of Artificial Sequence: Synthetic oligonucleotide
caguuguuacuucccuggg

SEQ ID NO: 3235590 - RNA, 19 nt, Artificial Sequence
  Description of Artificial Sequence: Synthetic oligonucleotide
caaucacucugucaaucuc

SEQ ID NO: 3235591 - RNA, 19 nt, Artificial Sequence
  Description of Artificial Sequence: Synthetic oligonucleotide
ugacagcauuaguguaggg

SEQ ID NO: 3235592 - RNA, 19 nt, Artificial Sequence
  Description of Artificial Sequence: Synthetic oligonucleotide
gucagcugugcuuggcugc

SEQ ID NO: 3235593 - RNA, 19 nt, Artificial Sequence
  Description of Artificial Sequence: Synthetic oligonucleotide
aucacucugucaaucucag

SEQ ID NO: 3235594 - RNA, 19 nt, Artificial Sequence
  Description of Artificial Sequence: Synthetic oligonucleotide
gggaugauauuaccuauuc

SEQ ID NO: 3235595 - RNA, 19 nt, Artificial Sequence
  Description of Artificial Sequence: Synthetic oligonucleotide
ugccuccuaaggccaauca

SEQ ID NO: 3235596 - RNA, 19 nt, Artificial Sequence
  Description of Artificial Sequence: Synthetic oligonucleotide
ggcauggacucucugucag

SEQ ID NO: 3235597 - RNA, 19 nt, Artificial Sequence
  Description of Artificial Sequence: Synthetic oligonucleotide
uuguuacuucccugggaac

SEQ ID NO: 3235598 - RNA, 19 nt, Artificial Sequence
  Description of Artificial Sequence: Synthetic oligonucleotide
ugcuuggcugccuccuaag

SEQ ID NO: 3235599 - RNA, 19 nt, Artificial Sequence
  Description of Artificial Sequence: Synthetic oligonucleotide
cuauucucugcaccucaug

SEQ ID NO: 3235600 - RNA, 19 nt, Artificial Sequence
  Description of Artificial Sequence: Synthetic oligonucleotide
uguagggcauggacucucu

SEQ ID NO: 3235601 - RNA, 19 nt, Artificial Sequence
  Description of Artificial Sequence: Synthetic oligonucleotide
cucaugaaugacagcauua

SEQ ID NO: 3235602 - RNA, 19 nt, Artificial Sequence
  Description of Artificial Sequence: Synthetic oligonucleotide
agcugugcuuggcugccuc

SEQ ID NO: 3235603 - RNA, 19 nt, Artificial Sequence
  Description of Artificial Sequence: Synthetic oligonucleotide
aacauucaaggggaugaua

SEQ ID NO: 3235604 - RNA, 19 nt, Artificial Sequence
  Description of Artificial Sequence: Synthetic oligonucleotide
uccuaaggccaaucacucu

SEQ ID NO: 3235605 - RNA, 19 nt, Artificial Sequence
  Description of Artificial Sequence: Synthetic oligonucleotide
ucagcugugcuuggcugcc

SEQ ID NO: 3235606 - RNA, 19 nt, Artificial Sequence
  Description of Artificial Sequence: Synthetic oligonucleotide
cucugcaccucaugaauga

SEQ ID NO: 3235607 - RNA, 19 nt, Artificial Sequence
  Description of Artificial Sequence: Synthetic oligonucleotide
agcauuaguguagggcaug

SEQ ID NO: 3235608 - RNA, 19 nt, Artificial Sequence
  Description of Artificial Sequence: Synthetic oligonucleotide
uaaggccaaucacucuguc

SEQ ID NO: 3235609 - RNA, 19 nt, Artificial Sequence
  Description of Artificial Sequence: Synthetic oligonucleotide
ucugucagcugugcuuggc

SEQ ID NO: 3235610 - RNA, 19 nt, Artificial Sequence
  Description of Artificial Sequence: Synthetic oligonucleotide
caaggggaugauauuaccu

SEQ ID NO: 3235611 - RNA, 19 nt, Artificial Sequence
  Description of Artificial Sequence: Synthetic oligonucleotide
ucacucugucaaucucagc

SEQ ID NO: 3235612 - RNA, 19 nt, Artificial Sequence
  Description of Artificial Sequence: Synthetic oligonucleotide
uggcugccuccuaaggcca

SEQ ID NO: 3235613 - RNA, 19 nt, Artificial Sequence
  Description of Artificial Sequence: Synthetic oligonucleotide
cugcaccucaugaaugaca

SEQ ID NO: 3235614 - RNA, 19 nt, Artificial Sequence
  Description of Artificial Sequence: Synthetic oligonucleotide
ucugcaccucaugaaugac

SEQ ID NO: 3235615 - RNA, 19 nt, Artificial Sequence
  Description of Artificial Sequence: Synthetic oligonucleotide
acucucugucagcugugcu

SEQ ID NO: 3235616 - RNA, 19 nt, Artificial Sequence
  Description of Artificial Sequence: Synthetic oligonucleotide
gacucucugucagcugugc

SEQ ID NO: 3235617 - RNA, 19 nt, Artificial Sequence
  Description of Artificial Sequence: Synthetic oligonucleotide
aaaaucacuuuccagagcc

SEQ ID NO: 3235618 - RNA, 19 nt, Artificial Sequence
  Description of Artificial Sequence: Synthetic oligonucleotide
aaaacuuccacccuguaag

SEQ ID NO: 3235619 - RNA, 19 nt, Artificial Sequence
  Description of Artificial Sequence: Synthetic oligonucleotide
aacugaagucgucaaagcc

SEQ ID NO: 3235620 - RNA, 19 nt, Artificial Sequence
  Description of Artificial Sequence: Synthetic oligonucleotide
aaagguacauaucuuugac

SEQ ID NO: 3235621 - RNA, 19 nt, Artificial Sequence
  Description of Artificial Sequence: Synthetic oligonucleotide
aaacugaugaauuuccuug

SEQ ID NO: 3235622 - RNA, 19 nt, Artificial Sequence
  Description of Artificial Sequence: Synthetic oligonucleotide
ucuaguuauggccagagcu

SEQ ID NO: 3235623 - RNA, 19 nt, Artificial Sequence
  Description of Artificial Sequence: Synthetic oligonucleotide
aacaaugauaggcugagga

SEQ ID NO: 3235624 - RNA, 19 nt, Artificial Sequence
  Description of Artificial Sequence: Synthetic oligonucleotide
ugucuaugcaaacugauga

SEQ ID NO: 3235625 - RNA, 19 nt, Artificial Sequence
  Description of Artificial Sequence: Synthetic oligonucleotide
uuauacagacaucuagugg

SEQ ID NO: 3235626 - RNA, 19 nt, Artificial Sequence
  Description of Artificial Sequence: Synthetic oligonucleotide
cuuuuggagauucugaccc

SEQ ID NO: 3235627 - RNA, 19 nt, Artificial Sequence
  Description of Artificial Sequence: Synthetic oligonucleotide
aauuaggucuauccagugg

SEQ ID NO: 3235628 - RNA, 19 nt, Artificial Sequence
  Description of Artificial Sequence: Synthetic oligonucleotide
uuuauacagacaucuagug

SEQ ID NO: 3235629 - RNA, 19 nt, Artificial Sequence
  Description of Artificial Sequence: Synthetic oligonucleotide
agguacauaucuuugacug

SEQ ID NO: 3235630 - RNA, 19 nt, Artificial Sequence
  Description of Artificial Sequence: Synthetic oligonucleotide
uccucugucuuccaaaucc

SEQ ID NO: 3235631 - RNA, 19 nt, Artificial Sequence
  Description of Artificial Sequence: Synthetic oligonucleotide
aaaagguacauaucuuuga

SEQ ID NO: 3235632 - RNA, 19 nt, Artificial Sequence
  Description of Artificial Sequence: Synthetic oligonucleotide
guaguaguggcacuggacg

SEQ ID NO: 3235633 - RNA, 19 nt, Artificial Sequence
  Description of Artificial Sequence: Synthetic oligonucleotide
acaagugcgauccugggag

SEQ ID NO: 3235634 - RNA, 19 nt, Artificial Sequence
  Description of Artificial Sequence: Synthetic oligonucleotide
acagcacacagacaggggc

SEQ ID NO: 3235635 - RNA, 19 nt, Artificial Sequence
  Description of Artificial Sequence: Synthetic oligonucleotide
gaagauucuccccuucucg

SEQ ID NO: 3235636 - RNA, 19 nt, Artificial Sequence
  Description of Artificial Sequence: Synthetic oligonucleotide
aauccgaaccaugccaucc

SEQ ID NO: 3235637 - RNA, 19 nt, Artificial Sequence
  Description of Artificial Sequence: Synthetic oligonucleotide
gaagugacgaucaucguag

SEQ ID NO: 3235638 - RNA, 19 nt, Artificial Sequence
  Description of Artificial Sequence: Synthetic oligonucleotide
caaagcaacacugacgucc

SEQ ID NO: 3235639 - RNA, 19 nt, Artificial Sequence
  Description of Artificial Sequence: Synthetic oligonucleotide
uuugacugugacuugagaa

SEQ ID NO: 3235640 - RNA, 19 nt, Artificial Sequence
  Description of Artificial Sequence: Synthetic oligonucleotide
uuucuccuacccaucaacg

SEQ ID NO: 3235641 - RNA, 19 nt, Artificial Sequence
  Description of Artificial Sequence: Synthetic oligonucleotide
aucaggaucuuaucagagc

SEQ ID NO: 3235642 - RNA, 19 nt, Artificial Sequence
  Description of Artificial Sequence: Synthetic oligonucleotide
uguccauugacauuccaca

SEQ ID NO: 3235643 - RNA, 19 nt, Artificial Sequence
  Description of Artificial Sequence: Synthetic oligonucleotide
ugacagaaaguacaauagc

SEQ ID NO: 3235644 - RNA, 19 nt, Artificial Sequence
  Description of Artificial Sequence: Synthetic oligonucleotide
auaucuuugacugugacuu

SEQ ID NO: 3235645 - RNA, 19 nt, Artificial Sequence
  Description of Artificial Sequence: Synthetic oligonucleotide
auuccacagggacaaaugg

SEQ ID NO: 3235646 - RNA, 19 nt, Artificial Sequence
  Description of Artificial Sequence: Synthetic oligonucleotide
cucgguagggacaaugugg

SEQ ID NO: 3235647 - RNA, 19 nt, Artificial Sequence
  Description of Artificial Sequence: Synthetic oligonucleotide
cuuaucagagccauaguuc

SEQ ID NO: 3235648 - RNA, 19 nt, Artificial Sequence
  Description of Artificial Sequence: Synthetic oligonucleotide
cuaucagccacaucaaaac

SEQ ID NO: 3235649 - RNA, 19 nt, Artificial Sequence
  Description of Artificial Sequence: Synthetic oligonucleotide
ucuuaucagagccauaguu

SEQ ID NO: 3235650 - RNA, 19 nt, Artificial Sequence
  Description of Artificial Sequence: Synthetic oligonucleotide
acaugugacagccugggug

SEQ ID NO: 3235651 - RNA, 19 nt, Artificial Sequence
  Description of Artificial Sequence: Synthetic oligonucleotide
ucuaaaucgcccacggaga

SEQ ID NO: 3235652 - RNA, 19 nt, Artificial Sequence
  Description of Artificial Sequence: Synthetic oligonucleotide
uugagaaggucucagcgcu

SEQ ID NO: 3235653 - RNA, 19 nt, Artificial Sequence
  Description of Artificial Sequence: Synthetic oligonucleotide
aaacuuccacccuguaagg

SEQ ID NO: 3235654 - RNA, 19 nt, Artificial Sequence
  Description of Artificial Sequence: Synthetic oligonucleotide
aucaucguagggcauggac

SEQ ID NO: 3235655 - RNA, 19 nt, Artificial Sequence
  Description of Artificial Sequence: Synthetic oligonucleotide
aaugcaggugccuccagca

SEQ ID NO: 3235656 - RNA, 19 nt, Artificial Sequence
  Description of Artificial Sequence: Synthetic oligonucleotide
ucaucguagggcauggaca

SEQ ID NO: 3235657 - RNA, 19 nt, Artificial Sequence
  Description of Artificial Sequence: Synthetic oligonucleotide
aagucgucaaagccccagc

SEQ ID NO: 3235658 - RNA, 19 nt, Artificial Sequence
  Description of Artificial Sequence: Synthetic oligonucleotide
uucagcaugaaugucuccc

SEQ ID NO: 3235659 - RNA, 19 nt, Artificial Sequence
  Description of Artificial Sequence: Synthetic oligonucleotide
gucaucaggaucuuaucag

SEQ ID NO: 3235660 - RNA, 19 nt, Artificial Sequence
  Description of Artificial Sequence: Synthetic oligonucleotide
gaauccuuuauacagacau

SEQ ID NO: 3235661 - RNA, 19 nt, Artificial Sequence
  Description of Artificial Sequence: Synthetic oligonucleotide
ugaugaugcagacccuggg

SEQ ID NO: 3235662 - RNA, 19 nt, Artificial Sequence
  Description of Artificial Sequence: Synthetic oligonucleotide
ucgucaaagccccagcuga

SEQ ID NO: 3235663 - RNA, 19 nt, Artificial Sequence
  Description of Artificial Sequence: Synthetic oligonucleotide
ucgguagggacaauguggc

SEQ ID NO: 3235664 - RNA, 19 nt, Artificial Sequence
  Description of Artificial Sequence: Synthetic oligonucleotide
uuucgggcgaccuuugacc

SEQ ID NO: 3235665 - RNA, 19 nt, Artificial Sequence
  Description of Artificial Sequence: Synthetic oligonucleotide
gaaggcgcaagccuuucgg

SEQ ID NO: 3235666 - RNA, 19 nt, Artificial Sequence
  Description of Artificial Sequence: Synthetic oligonucleotide
cuaguuauggccagagcug

SEQ ID NO: 3235667 - RNA, 19 nt, Artificial Sequence
  Description of Artificial Sequence: Synthetic oligonucleotide
ucuccuacccaucaacgga

SEQ ID NO: 3235668 - RNA, 19 nt, Artificial Sequence
  Description of Artificial Sequence: Synthetic oligonucleotide
agggcauggacacacagca

SEQ ID NO: 3235669 - RNA, 19 nt, Artificial Sequence
  Description of Artificial Sequence: Synthetic oligonucleotide
uugacauuccacagggaca

SEQ ID NO: 3235670 - RNA, 19 nt, Artificial Sequence
  Description of Artificial Sequence: Synthetic oligonucleotide
agagccauaguuccccagg

SEQ ID NO: 3235671 - RNA, 19 nt, Artificial Sequence
  Description of Artificial Sequence: Synthetic oligonucleotide
uauacagcagcauguuaug

SEQ ID NO: 3235672 - RNA, 19 nt, Artificial Sequence
  Description of Artificial Sequence: Synthetic oligonucleotide
accacagagacgcucgggg

SEQ ID NO: 3235673 - RNA, 19 nt, Artificial Sequence
  Description of Artificial Sequence: Synthetic oligonucleotide
uaugguuccuucugggccc

SEQ ID NO: 3235674 - RNA, 19 nt, Artificial Sequence
  Description of Artificial Sequence: Synthetic oligonucleotide
acuuccacccuguaaggag

SEQ ID NO: 3235675 - RNA, 19 nt, Artificial Sequence
  Description of Artificial Sequence: Synthetic oligonucleotide
uaguaguggcacuggacgg

SEQ ID NO: 3235676 - RNA, 19 nt, Artificial Sequence
  Description of Artificial Sequence: Synthetic oligonucleotide
ugaagccugaugaugcaga

SEQ ID NO: 3235677 - RNA, 19 nt, Artificial Sequence
  Description of Artificial Sequence: Synthetic oligonucleotide
ucaucaggaucuuaucaga

SEQ ID NO: 3235678 - RNA, 19 nt, Artificial Sequence
  Description of Artificial Sequence: Synthetic oligonucleotide
acagacaucuaguggacca

SEQ ID NO: 3235679 - RNA, 19 nt, Artificial Sequence
  Description of Artificial Sequence: Synthetic oligonucleotide
aaauccgaaccaugccauc

SEQ ID NO: 3235680 - RNA, 19 nt, Artificial Sequence
  Description of Artificial Sequence: Synthetic oligonucleotide
uuguccauugacauuccac

SEQ ID NO: 3235681 - RNA, 19 nt, Artificial Sequence
  Description of Artificial Sequence: Synthetic oligonucleotide
uguaguaguggcacuggac

SEQ ID NO: 3235682 - RNA, 19 nt, Artificial Sequence
  Description of Artificial Sequence: Synthetic oligonucleotide
cuuuaaugcaggugccucc

SEQ ID NO: 3235683 - RNA, 19 nt, Artificial Sequence
  Description of Artificial Sequence: Synthetic oligonucleotide
cauguuaugguuccuucug

SEQ ID NO: 3235684 - RNA, 19 nt, Artificial Sequence
  Description of Artificial Sequence: Synthetic oligonucleotide
cuugacagaaaguacaaua

SEQ ID NO: 3235685 - RNA, 19 nt, Artificial Sequence
  Description of Artificial Sequence: Synthetic oligonucleotide
ucaggugucagcucccuga

SEQ ID NO: 3235686 - RNA, 19 nt, Artificial Sequence
  Description of Artificial Sequence: Synthetic oligonucleotide
ggaauagugaguguaguag

SEQ ID NO: 3235687 - RNA, 19 nt, Artificial Sequence
  Description of Artificial Sequence: Synthetic oligonucleotide
ggaacauucuaucagccac

SEQ ID NO: 3235688 - RNA, 19 nt, Artificial Sequence
  Description of Artificial Sequence: Synthetic oligonucleotide
uauccagugguggagguug

SEQ ID NO: 3235689 - RNA, 19 nt, Artificial Sequence
  Description of Artificial Sequence: Synthetic oligonucleotide
aauccuuuauacagacauc

SEQ ID NO: 3235690 - RNA, 19 nt, Artificial Sequence
  Description of Artificial Sequence: Synthetic oligonucleotide
agguuguccaucaugaugu

SEQ ID NO: 3235691 - RNA, 19 nt, Artificial Sequence
  Description of Artificial Sequence: Synthetic oligonucleotide
uaucagccacaucaaaacu

SEQ ID NO: 3235692 - RNA, 19 nt, Artificial Sequence
  Description of Artificial Sequence: Synthetic oligonucleotide
agugacgaucaucguaggg

SEQ ID NO: 3235693 - RNA, 19 nt, Artificial Sequence
  Description of Artificial Sequence: Synthetic oligonucleotide
uccagcacaggagacaaug

SEQ ID NO: 3235694 - RNA, 19 nt, Artificial Sequence
  Description of Artificial Sequence: Synthetic oligonucleotide
caucguagggcauggacac

SEQ ID NO: 3235695 - RNA, 19 nt, Artificial Sequence
  Description of Artificial Sequence: Synthetic oligonucleotide
cagaauccuuuauacagac

SEQ ID NO: 3235696 - RNA, 19 nt, Artificial Sequence
  Description of Artificial Sequence: Synthetic oligonucleotide
cuggguauagagccuaggc

SEQ ID NO: 3235697 - RNA, 19 nt, Artificial Sequence
  Description of Artificial Sequence: Synthetic oligonucleotide
ucccgaaacaucacugaug

SEQ ID NO: 3235698 - RNA, 19 nt, Artificial Sequence
  Description of Artificial Sequence: Synthetic oligonucleotide
caucagagauuccuugagg

SEQ ID NO: 3235699 - RNA, 19 nt, Artificial Sequence
  Description of Artificial Sequence: Synthetic oligonucleotide
cuugaggacuguagggagg

SEQ ID NO: 3235700 - RNA, 19 nt, Artificial Sequence
  Description of Artificial Sequence: Synthetic oligonucleotide
aagugcgauccugggagcc

SEQ ID NO: 3235701 - RNA, 19 nt, Artificial Sequence
  Description of Artificial Sequence: Synthetic oligonucleotide
aaaucgcccacggagagaa

SEQ ID NO: 3235702 - RNA, 19 nt, Artificial Sequence
  Description of Artificial Sequence: Synthetic oligonucleotide
cuuagaggcucaguggagg

SEQ ID NO: 3235703 - RNA, 19 nt, Artificial Sequence
  Description of Artificial Sequence: Synthetic oligonucleotide
aggcgcaagccuuucgggc

SEQ ID NO: 3235704 - RNA, 19 nt, Artificial Sequence
  Description of Artificial Sequence: Synthetic oligonucleotide
agaagugacgaucaucgua

SEQ ID NO: 3235705 - RNA, 19 nt, Artificial Sequence
  Description of Artificial Sequence: Synthetic oligonucleotide
cccgaaacaucacugaugg

SEQ ID NO: 3235706 - RNA, 19 nt, Artificial Sequence
  Description of Artificial Sequence: Synthetic oligonucleotide
gauguccacacccuccaug

SEQ ID NO: 3235707 - RNA, 19 nt, Artificial Sequence
  Description of Artificial Sequence: Synthetic oligonucleotide
ugacauuccacagggacaa

SEQ ID NO: 3235708 - RNA, 19 nt, Artificial Sequence
  Description of Artificial Sequence: Synthetic oligonucleotide
guucucgaaugucaucagg

SEQ ID NO: 3235709 - RNA, 19 nt, Artificial Sequence
  Description of Artificial Sequence: Synthetic oligonucleotide
aagugacgaucaucguagg

SEQ ID NO: 3235710 - RNA, 19 nt, Artificial Sequence
  Description of Artificial Sequence: Synthetic oligonucleotide
uggaacauucuaucagcca

SEQ ID NO: 3235711 - RNA, 19 nt, Artificial Sequence
  Description of Artificial Sequence: Synthetic oligonucleotide
uuuaaugcaggugccucca

SEQ ID NO: 3235712 - RNA, 19 nt, Artificial Sequence
  Description of Artificial Sequence: Synthetic oligonucleotide
ucucgguagggacaaugug

SEQ ID NO: 3235713 - RNA, 19 nt, Artificial Sequence
  Description of Artificial Sequence: Synthetic oligonucleotide
ugugguaaugcuggccagg

SEQ ID NO: 3235714 - RNA, 19 nt, Artificial Sequence
  Description of Artificial Sequence: Synthetic oligonucleotide
uacaagugcgauccuggga

SEQ ID NO: 3235715 - RNA, 19 nt, Artificial Sequence
  Description of Artificial Sequence: Synthetic oligonucleotide
agguucucgaaugucauca

SEQ ID NO: 3235716 - RNA, 19 nt, Artificial Sequence
  Description of Artificial Sequence: Synthetic oligonucleotide
agcuccagaagugacgauc

SEQ ID NO: 3235717 - RNA, 19 nt, Artificial Sequence
  Description of Artificial Sequence: Synthetic oligonucleotide
aagauggacacacagcacc

SEQ ID NO: 3235718 - RNA, 19 nt, Artificial Sequence
  Description of Artificial Sequence: Synthetic oligonucleotide
uauuuguagcccaagaagg

SEQ ID NO: 3235719 - RNA, 19 nt, Artificial Sequence
  Description of Artificial Sequence: Synthetic oligonucleotide
aauguagaggucuggagcg

SEQ ID NO: 3235720 - RNA, 19 nt, Artificial Sequence
  Description of Artificial Sequence: Synthetic oligonucleotide
aauacuugagcuuggugac

SEQ ID NO: 3235721 - RNA, 19 nt, Artificial Sequence
  Description of Artificial Sequence: Synthetic oligonucleotide
aucaugaacacaaagaugg

SEQ ID NO: 3235722 - RNA, 19 nt, Artificial Sequence
  Description of Artificial Sequence: Synthetic oligonucleotide
aacacaaagauggacacac

SEQ ID NO: 3235723 - RNA, 19 nt, Artificial Sequence
  Description of Artificial Sequence: Synthetic oligonucleotide
acagugaccagguagagac

SEQ ID NO: 3235724 - RNA, 19 nt, Artificial Sequence
  Description of Artificial Sequence: Synthetic oligonucleotide
uaauacuugagcuugguga

SEQ ID NO: 3235725 - RNA, 19 nt, Artificial Sequence
  Description of Artificial Sequence: Synthetic oligonucleotide
uguagguagggaaagacca

SEQ ID NO: 3235726 - RNA, 19 nt, Artificial Sequence
  Description of Artificial Sequence: Synthetic oligonucleotide
auauuuguagcccaagaag

SEQ ID NO: 3235727 - RNA, 19 nt, Artificial Sequence
  Description of Artificial Sequence: Synthetic oligonucleotide
aaagagcagacccacgagg

SEQ ID NO: 3235728 - RNA, 19 nt, Artificial Sequence
  Description of Artificial Sequence: Synthetic oligonucleotide
cuuuccaaagagcagaccc

SEQ ID NO: 3235729 - RNA, 19 nt, Artificial Sequence
  Description of Artificial Sequence: Synthetic oligonucleotide
uauuguaccucccaguccu

SEQ ID NO: 3235730 - RNA, 19 nt, Artificial Sequence
  Description of Artificial Sequence: Synthetic oligonucleotide
aaucuuuccaaagagcaga

SEQ ID NO: 3235731 - RNA, 19 nt, Artificial Sequence
  Description of Artificial Sequence: Synthetic oligonucleotide
guugacagugaccagguag

SEQ ID NO: 3235732 - RNA, 19 nt, Artificial Sequence
  Description of Artificial Sequence: Synthetic oligonucleotide
guagggaaagaccagcagg

SEQ ID NO: 3235733 - RNA, 19 nt, Artificial Sequence
  Description of Artificial Sequence: Synthetic oligonucleotide
aaacugguggggaucagcc

SEQ ID NO: 3235734 - RNA, 19 nt, Artificial Sequence
  Description of Artificial Sequence: Synthetic oligonucleotide
uugagggccacuuacgcag

SEQ ID NO: 3235735 - RNA, 19 nt, Artificial Sequence
  Description of Artificial Sequence: Synthetic oligonucleotide
uagggaaagaccagcaggc

SEQ ID NO: 3235736 - RNA, 19 nt, Artificial Sequence
  Description of Artificial Sequence: Synthetic oligonucleotide
aucccgacauauuuguagc

SEQ ID NO: 3235737 - RNA, 19 nt, Artificial Sequence
  Description of Artificial Sequence: Synthetic oligonucleotide
aaaacugguggggaucagc

SEQ ID NO: 3235738 - RNA, 19 nt, Artificial Sequence
  Description of Artificial Sequence: Synthetic oligonucleotide
ugaugaaagccauggcugg

SEQ ID NO: 3235739 - RNA, 19 nt, Artificial Sequence
  Description of Artificial Sequence: Synthetic oligonucleotide
auggcuggaauguagaggu

SEQ ID NO: 3235740 - RNA, 19 nt, Artificial Sequence
  Description of Artificial Sequence: Synthetic oligonucleotide
gaccccaccaaucaucccg

SEQ ID NO: 3235741 - RNA, 19 nt, Artificial Sequence
  Description of Artificial Sequence: Synthetic oligonucleotide
uccagggucagccaggcca

SEQ ID NO: 3235742 - RNA, 19 nt, Artificial Sequence
  Description of Artificial Sequence: Synthetic oligonucleotide
gauguaggugaugaaagcc

SEQ ID NO: 3235743 - RNA, 19 nt, Artificial Sequence
  Description of Artificial Sequence: Synthetic oligonucleotide
ugaacacaaagauggacac

SEQ ID NO: 3235744 - RNA, 19 nt, Artificial Sequence
  Description of Artificial Sequence: Synthetic oligonucleotide
gagcguugaugucaaagcg

SEQ ID NO: 3235745 - RNA, 19 nt, Artificial Sequence
  Description of Artificial Sequence: Synthetic oligonucleotide
caaagauggacacacagca

SEQ ID NO: 3235746 - RNA, 19 nt, Artificial Sequence
  Description of Artificial Sequence: Synthetic oligonucleotide
acaaagauggacacacagc

SEQ ID NO: 3235747 - RNA, 19 nt, Artificial Sequence
  Description of Artificial Sequence: Synthetic oligonucleotide
auugccauguuggacauag

SEQ ID NO: 3235748 - RNA, 19 nt, Artificial Sequence
  Description of Artificial Sequence: Synthetic oligonucleotide
accagguagagacugagca

SEQ ID NO: 3235749 - RNA, 19 nt, Artificial Sequence
  Description of Artificial Sequence: Synthetic oligonucleotide
cauagggucggccaggaag

SEQ ID NO: 3235750 - RNA, 19 nt, Artificial Sequence
  Description of Artificial Sequence: Synthetic oligonucleotide
cacaaagauggacacacag

SEQ ID NO: 3235751 - RNA, 19 nt, Artificial Sequence
  Description of Artificial Sequence: Synthetic oligonucleotide
ugaacuugugucaucgaaa

SEQ ID NO: 3235752 - RNA, 19 nt, Artificial Sequence
  Description of Artificial Sequence: Synthetic oligonucleotide
uuuccaaagagcagaccca

SEQ ID NO: 3235753 - RNA, 19 nt, Artificial Sequence
  Description of Artificial Sequence: Synthetic oligonucleotide
ucuaccagcuccuugccgu

SEQ ID NO: 3235754 - RNA, 19 nt, Artificial Sequence
  Description of Artificial Sequence: Synthetic oligonucleotide
cauguuggacauagggucg

SEQ ID NO: 3235755 - RNA, 19 nt, Artificial Sequence
  Description of Artificial Sequence: Synthetic oligonucleotide
guagagacugagcaggaug

SEQ ID NO: 3235756 - RNA, 19 nt, Artificial Sequence
  Description of Artificial Sequence: Synthetic oligonucleotide
agccaaucuuuccaaagag

SEQ ID NO: 3235757 - RNA, 19 nt, Artificial Sequence
  Description of Artificial Sequence: Synthetic oligonucleotide
ggacccuccgcuuugaggg

SEQ ID NO: 3235758 - RNA, 19 nt, Artificial Sequence
  Description of Artificial Sequence: Synthetic oligonucleotide
aaagauggacacacagcac

SEQ ID NO: 3235759 - RNA, 19 nt, Artificial Sequence
  Description of Artificial Sequence: Synthetic oligonucleotide
gaugaagcggucaauguuc

SEQ ID NO: 3235760 - RNA, 19 nt, Artificial Sequence
  Description of Artificial Sequence: Synthetic oligonucleotide
gaagcggucaauguucuug

SEQ ID NO: 3235761 - RNA, 19 nt, Artificial Sequence
  Description of Artificial Sequence: Synthetic oligonucleotide
ucaaugguggugaggucag

SEQ ID NO: 3235762 - RNA, 19 nt, Artificial Sequence
  Description of Artificial Sequence: Synthetic oligonucleotide
uuguagcccaagaaggcca

SEQ ID NO: 3235763 - RNA, 19 nt, Artificial Sequence
  Description of Artificial Sequence: Synthetic oligonucleotide
acauauuuguagcccaaga

SEQ ID NO: 3235764 - RNA, 19 nt, Artificial Sequence
  Description of Artificial Sequence: Synthetic oligonucleotide
aggaggucuggggagaacc

SEQ ID NO: 3235765 - RNA, 19 nt, Artificial Sequence
  Description of Artificial Sequence: Synthetic oligonucleotide
uggggaucagccaugccug

SEQ ID NO: 3235766 - RNA, 19 nt, Artificial Sequence
  Description of Artificial Sequence: Synthetic oligonucleotide
gaacuugugucaucgaaaa

SEQ ID NO: 3235767 - RNA, 19 nt, Artificial Sequence
  Description of Artificial Sequence: Synthetic oligonucleotide
acagcaccagccaagcacc

SEQ ID NO: 3235768 - RNA, 19 nt, Artificial Sequence
  Description of Artificial Sequence: Synthetic oligonucleotide
gugaugaaagccauggcug

SEQ ID NO: 3235769 - RNA, 19 nt, Artificial Sequence
  Description of Artificial Sequence: Synthetic oligonucleotide
guaguagccaaucuuucca

SEQ ID NO: 3235770 - RNA, 19 nt, Artificial Sequence
  Description of Artificial Sequence: Synthetic oligonucleotide
caaucuuuccaaagagcag

SEQ ID NO: 3235771 - RNA, 19 nt, Artificial Sequence
  Description of Artificial Sequence: Synthetic oligonucleotide
cuugagcuuggugacaggg

SEQ ID NO: 3235772 - RNA, 19 nt, Artificial Sequence
  Description of Artificial Sequence: Synthetic oligonucleotide
cacagcaccagccaagcac

SEQ ID NO: 3235773 - RNA, 19 nt, Artificial Sequence
  Description of Artificial Sequence: Synthetic oligonucleotide
aggauguaggugaugaaag

SEQ ID NO: 3235774 - RNA, 19 nt, Artificial Sequence
  Description of Artificial Sequence: Synthetic oligonucleotide
uuggacauagggucggcca

SEQ ID NO: 3235775 - RNA, 19 nt, Artificial Sequence
  Description of Artificial Sequence: Synthetic oligonucleotide
uggagcguugaugucaaag

SEQ ID NO: 3235776 - RNA, 19 nt, Artificial Sequence
  Description of Artificial Sequence: Synthetic oligonucleotide
ccaagcaccacguaguagc

SEQ ID NO: 3235777 - RNA, 19 nt, Artificial Sequence
  Description of Artificial Sequence: Synthetic oligonucleotide
aagcggucaauguucuugu

SEQ ID NO: 3235778 - RNA, 19 nt, Artificial Sequence
  Description of Artificial Sequence: Synthetic oligonucleotide
aacaacuuccagggucagc

SEQ ID NO: 3235779 - RNA, 19 nt, Artificial Sequence
  Description of Artificial Sequence: Synthetic oligonucleotide
aaggccggccaccaggaug

SEQ ID NO: 3235780 - RNA, 19 nt, Artificial Sequence
  Description of Artificial Sequence: Synthetic oligonucleotide
uuugagggccacuuacgca

SEQ ID NO: 3235781 - RNA, 19 nt, Artificial Sequence
  Description of Artificial Sequence: Synthetic oligonucleotide
cuuggugacagggaugaag

SEQ ID NO: 3235782 - RNA, 19 nt, Artificial Sequence
  Description of Artificial Sequence: Synthetic oligonucleotide
ugggguauccugcugguau

SEQ ID NO: 3235783 - RNA, 19 nt, Artificial Sequence
  Description of Artificial Sequence: Synthetic oligonucleotide
auagggucggccaggaagg

SEQ ID NO: 3235784 - RNA, 19 nt, Artificial Sequence
  Description of Artificial Sequence: Synthetic oligonucleotide
gaggucaguguugacagug

SEQ ID NO: 3235785 - RNA, 19 nt, Artificial Sequence
  Description of Artificial Sequence: Synthetic oligonucleotide
caugaacacaaagauggac

SEQ ID NO: 3235786 - RNA, 19 nt, Artificial Sequence
  Description of Artificial Sequence: Synthetic oligonucleotide
uccaaagagcagacccacg

SEQ ID NO: 3235787 - RNA, 19 nt, Artificial Sequence
  Description of Artificial Sequence: Synthetic oligonucleotide
ucaugaacacaaagaugga

SEQ ID NO: 3235788 - RNA, 19 nt, Artificial Sequence
  Description of Artificial Sequence: Synthetic oligonucleotide
guaauacuugagcuuggug

SEQ ID NO: 3235789 - RNA, 19 nt, Artificial Sequence
  Description of Artificial Sequence: Synthetic oligonucleotide
agcguugaugucaaagcgg

SEQ ID NO: 3235790 - RNA, 19 nt, Artificial Sequence
  Description of Artificial Sequence: Synthetic oligonucleotide
ggagcguugaugucaaagc

SEQ ID NO: 3235791 - RNA, 19 nt, Artificial Sequence
  Description of Artificial Sequence: Synthetic oligonucleotide
aacccaggccaccauguga

SEQ ID NO: 3235792 - RNA, 19 nt, Artificial Sequence
  Description of Artificial Sequence: Synthetic oligonucleotide
agugaccagguagagacug

SEQ ID NO: 3235793 - RNA, 19 nt, Artificial Sequence
  Description of Artificial Sequence: Synthetic oligonucleotide
acguacacgguguccacag

SEQ ID NO: 3235794 - RNA, 19 nt, Artificial Sequence
  Description of Artificial Sequence: Synthetic oligonucleotide
ugugaggaggaaggggagg

SEQ ID NO: 3235795 - RNA, 19 nt, Artificial Sequence
  Description of Artificial Sequence: Synthetic oligonucleotide
aagagcagacccacgagga

SEQ ID NO: 3235796 - RNA, 19 nt, Artificial Sequence
  Description of Artificial Sequence: Synthetic oligonucleotide
cauauuuguagcccaagaa

SEQ ID NO: 3235797 - RNA, 19 nt, Artificial Sequence
  Description of Artificial Sequence: Synthetic oligonucleotide
agagcagacccacgaggac

SEQ ID NO: 3235798 - RNA, 19 nt, Artificial Sequence
  Description of Artificial Sequence: Synthetic oligonucleotide
cagcaaaguaauacuugag

SEQ ID NO: 3235799 - RNA, 19 nt, Artificial Sequence
  Description of Artificial Sequence: Synthetic oligonucleotide
uagguagggaaagaccagc

SEQ ID NO: 3235800 - RNA, 19 nt, Artificial Sequence
  Description of Artificial Sequence: Synthetic oligonucleotide
cugguauuguaccucccag

SEQ ID NO: 3235801 - RNA, 19 nt, Artificial Sequence
  Description of Artificial Sequence: Synthetic oligonucleotide
ugguauuguaccucccagu

SEQ ID NO: 3235802 - RNA, 19 nt, Artificial Sequence
  Description of Artificial Sequence: Synthetic oligonucleotide
guauuguaccucccagucc

SEQ ID NO: 3235803 - RNA, 19 nt, Artificial Sequence
  Description of Artificial Sequence: Synthetic oligonucleotide
aggaccccaccaaucaucc

SEQ ID NO: 3235804 - RNA, 19 nt, Artificial Sequence
  Description of Artificial Sequence: Synthetic oligonucleotide
ccauguuggacauaggguc

SEQ ID NO: 3235805 - RNA, 19 nt, Artificial Sequence
  Description of Artificial Sequence: Synthetic oligonucleotide
gacauauuuguagcccaag

SEQ ID NO: 3235806 - RNA, 19 nt, Artificial Sequence
  Description of Artificial Sequence: Synthetic oligonucleotide
ugacggcuggccuccauag

SEQ ID NO: 3235807 - RNA, 19 nt, Artificial Sequence
  Description of Artificial Sequence: Synthetic oligonucleotide
acugguggggaucagccau

SEQ ID NO: 3235808 - RNA, 19 nt, Artificial Sequence
  Description of Artificial Sequence: Synthetic oligonucleotide
agccaugccuggcugggac

SEQ ID NO: 3235809 - RNA, 19 nt, Artificial Sequence
  Description of Artificial Sequence: Synthetic oligonucleotide
ucgugugaggaggaagggg

SEQ ID NO: 3235810 - RNA, 19 nt, Artificial Sequence
  Description of Artificial Sequence: Synthetic oligonucleotide
caagaaggccaccagguca

SEQ ID NO: 3235811 - RNA, 19 nt, Artificial Sequence
  Description of Artificial Sequence: Synthetic oligonucleotide
gguauuguaccucccaguc

SEQ ID NO: 3235812 - RNA, 19 nt, Artificial Sequence
  Description of Artificial Sequence: Synthetic oligonucleotide
ggaauguagaggucuggag

SEQ ID NO: 3235813 - RNA, 19 nt, Artificial Sequence
  Description of Artificial Sequence: Synthetic oligonucleotide
ccaaucuuuccaaagagca

SEQ ID NO: 3235814 - RNA, 19 nt, Artificial Sequence
  Description of Artificial Sequence: Synthetic oligonucleotide
ucuggagcguugaugucaa

SEQ ID NO: 3235815 - RNA, 19 nt, Artificial Sequence
  Description of Artificial Sequence: Synthetic oligonucleotide
aucuuuccaaagagcagac

SEQ ID NO: 3235816 - RNA, 19 nt, Artificial Sequence
  Description of Artificial Sequence: Synthetic oligonucleotide
auguaggugaugaaagcca

SEQ ID NO: 3235817 - RNA, 19 nt, Artificial Sequence
  Description of Artificial Sequence: Synthetic oligonucleotide
aguuaaaccagccuuugcc

SEQ ID NO: 3235818 - RNA, 19 nt, Artificial Sequence
  Description of Artificial Sequence: Synthetic oligonucleotide
auaaugaaaauaucuuggc

SEQ ID NO: 3235819 - RNA, 19 nt, Artificial Sequence
  Description of Artificial Sequence: Synthetic oligonucleotide
caauucagcaccaagacgc

SEQ ID NO: 3235820 - RNA, 19 nt, Artificial Sequence
  Description of Artificial Sequence: Synthetic oligonucleotide
uccauagugauuaugugag

SEQ ID NO: 3235821 - RNA, 19 nt, Artificial Sequence
  Description of Artificial Sequence: Synthetic oligonucleotide
aaauaucuuggccacgaac

SEQ ID NO: 3235822 - RNA, 19 nt, Artificial Sequence
  Description of Artificial Sequence: Synthetic oligonucleotide
aagaaucaagcugaugucc

SEQ ID NO: 3235823 - RNA, 19 nt, Artificial Sequence
  Description of Artificial Sequence: Synthetic oligonucleotide
uaaugaaaauaucuuggcc

SEQ ID NO: 3235824 - RNA, 19 nt, Artificial Sequence
  Description of Artificial Sequence: Synthetic oligonucleotide
augaaaauaucuuggccac

SEQ ID NO: 3235825 - RNA, 19 nt, Artificial Sequence
  Description of Artificial Sequence: Synthetic oligonucleotide
auaaucaguaacuccauca

SEQ ID NO: 3235826 - RNA, 19 nt, Artificial Sequence
  Description of Artificial Sequence: Synthetic oligonucleotide
aauaucuuggccacgaaca

SEQ ID NO: 3235827 - RNA, 19 nt, Artificial Sequence
  Description of Artificial Sequence: Synthetic oligonucleotide
ucuguaauuuggaauuucc

SEQ ID NO: 3235828 - RNA, 19 nt, Artificial Sequence
  Description of Artificial Sequence: Synthetic oligonucleotide
aacagauuuucccaauuca

SEQ ID NO: 3235829 - RNA, 19 nt, Artificial Sequence
  Description of Artificial Sequence: Synthetic oligonucleotide
auuucuguaauuuggaauu

SEQ ID NO: 3235830 - RNA, 19 nt, Artificial Sequence
  Description of Artificial Sequence: Synthetic oligonucleotide
ugauuaugugaguuaaacc

SEQ ID NO: 3235831 - RNA, 19 nt, Artificial Sequence
  Description of Artificial Sequence: Synthetic oligonucleotide
gaagagguaagccauggac

SEQ ID NO: 3235832 - RNA, 19 nt, Artificial Sequence
  Description of Artificial Sequence: Synthetic oligonucleotide
gaaaggugaggcucuaagg

SEQ ID NO: 3235833 - RNA, 19 nt, Artificial Sequence
  Description of Artificial Sequence: Synthetic oligonucleotide
uacacaacagauuuuccca

SEQ ID NO: 3235834 - RNA, 19 nt, Artificial Sequence
  Description of Artificial Sequence: Synthetic oligonucleotide
uccggaucgccucagaaag

SEQ ID NO: 3235835 - RNA, 19 nt, Artificial Sequence
  Description of Artificial Sequence: Synthetic oligonucleotide
aaugacugcauuucuguaa

SEQ ID NO: 3235836 - RNA, 19 nt, Artificial Sequence
  Description of Artificial Sequence: Synthetic oligonucleotide
agagguaagccauggacuc

SEQ ID NO: 3235837 - RNA, 19 nt, Artificial Sequence
  Description of Artificial Sequence: Synthetic oligonucleotide
ugaagauccauagugauua

SEQ ID NO: 3235838 - RNA, 19 nt, Artificial Sequence
  Description of Artificial Sequence: Synthetic oligonucleotide
aauuuccuccuggauauac

SEQ ID NO: 3235839 - RNA, 19 nt, Artificial Sequence
  Description of Artificial Sequence: Synthetic oligonucleotide
uuaugugaguuaaaccagc

SEQ ID NO: 3235840 - RNA, 19 nt, Artificial Sequence
  Description of Artificial Sequence: Synthetic oligonucleotide
caucaggagacuuagcuac

SEQ ID NO: 3235841 - RNA, 19 nt, Artificial Sequence
  Description of Artificial Sequence: Synthetic oligonucleotide
uagucaucgacugugaugu

SEQ ID NO: 3235842 - RNA, 19 nt, Artificial Sequence
  Description of Artificial Sequence: Synthetic oligonucleotide
auaggccauaaucaguaac

SEQ ID NO: 3235843 - RNA, 19 nt, Artificial Sequence
  Description of Artificial Sequence: Synthetic oligonucleotide
gaugacaccgaugauauuc

SEQ ID NO: 3235844 - RNA, 19 nt, Artificial Sequence
  Description of Artificial Sequence: Synthetic oligonucleotide
ugauacacugcuguguagg

SEQ ID NO: 3235845 - RNA, 19 nt, Artificial Sequence
  Description of Artificial Sequence: Synthetic oligonucleotide
ucuaagguuguccacugga

SEQ ID NO: 3235846 - RNA, 19 nt, Artificial Sequence
  Description of Artificial Sequence: Synthetic oligonucleotide
uaggccauaaucaguaacu

SEQ ID NO: 3235847 - RNA, 19 nt, Artificial Sequence
  Description of Artificial Sequence: Synthetic oligonucleotide
uaaucaguaacuccaucac

SEQ ID NO: 3235848 - RNA, 19 nt, Artificial Sequence
  Description of Artificial Sequence: Synthetic oligonucleotide
gacuuagcuacaaugacug

SEQ ID NO: 3235849 - RNA, 19 nt, Artificial Sequence
  Description of Artificial Sequence: Synthetic oligonucleotide
ucaucgacugugauguucc

SEQ ID NO: 3235850 - RNA, 19 nt, Artificial Sequence
  Description of Artificial Sequence: Synthetic oligonucleotide
uccacuggaaagcugaaaa

SEQ ID NO: 3235851 - RNA, 19 nt, Artificial Sequence
  Description of Artificial Sequence: Synthetic oligonucleotide
uuagucaucgacugugaug

SEQ ID NO: 3235852 - RNA, 19 nt, Artificial Sequence
  Description of Artificial Sequence: Synthetic oligonucleotide
uuaaaccagccuuugccag

SEQ ID NO: 3235853 - RNA, 19 nt, Artificial Sequence
  Description of Artificial Sequence: Synthetic oligonucleotide
ucgaccgucguccaugucc

SEQ ID NO: 3235854 - RNA, 19 nt, Artificial Sequence
  Description of Artificial Sequence: Synthetic oligonucleotide
cuuguagagacuuccuagc

SEQ ID NO: 3235855 - RNA, 19 nt, Artificial Sequence
  Description of Artificial Sequence: Synthetic oligonucleotide
uaugugaguuaaaccagcc

SEQ ID NO: 3235856 - RNA, 19 nt, Artificial Sequence
  Description of Artificial Sequence: Synthetic oligonucleotide
aggagacuuagcuacaaug

SEQ ID NO: 3235857 - RNA, 19 nt, Artificial Sequence
  Description of Artificial Sequence: Synthetic oligonucleotide
uguagagacuuccuagcug

SEQ ID NO: 3235858 - RNA, 19 nt, Artificial Sequence
  Description of Artificial Sequence: Synthetic oligonucleotide
aucaguaacuccaucacag

SEQ ID NO: 3235859 - RNA, 19 nt, Artificial Sequence
  Description of Artificial Sequence: Synthetic oligonucleotide
gacauugcaguuucuggag

SEQ ID NO: 3235860 - RNA, 19 nt, Artificial Sequence
  Description of Artificial Sequence: Synthetic oligonucleotide
gagccgagcacgcagacag

SEQ ID NO: 3235861 - RNA, 19 nt, Artificial Sequence
  Description of Artificial Sequence: Synthetic oligonucleotide
cagauuuucccaauucagc

SEQ ID NO: 3235862 - RNA, 19 nt, Artificial Sequence
  Description of Artificial Sequence: Synthetic oligonucleotide
gaugcgcuuggccagcucg

SEQ ID NO: 3235863 - RNA, 19 nt, Artificial Sequence
  Description of Artificial Sequence: Synthetic oligonucleotide
aaagccuuguauuuccuuu

SEQ ID NO: 3235864 - RNA, 19 nt, Artificial Sequence
  Description of Artificial Sequence: Synthetic oligonucleotide
acaaugacugcauuucugu

SEQ ID NO: 3235865 - RNA, 19 nt, Artificial Sequence
  Description of Artificial Sequence: Synthetic oligonucleotide
ugcauuucuguaauuugga

SEQ ID NO: 3235866 - RNA, 19 nt, Artificial Sequence
  Description of Artificial Sequence: Synthetic oligonucleotide
ucuguauaaugaaaauauc

SEQ ID NO: 3235867 - RNA, 19 nt, Artificial Sequence
  Description of Artificial Sequence: Synthetic oligonucleotide
uaauuuggaauuuccuccu

SEQ ID NO: 3235868 - RNA, 19 nt, Artificial Sequence
  Description of Artificial Sequence: Synthetic oligonucleotide
agacuuccuagcugcagcc

SEQ ID NO: 3235869 - RNA, 19 nt, Artificial Sequence
  Description of Artificial Sequence: Synthetic oligonucleotide
uuagcuacaaugacugcau

SEQ ID NO: 3235870 - RNA, 19 nt, Artificial Sequence
  Description of Artificial Sequence: Synthetic oligonucleotide
uuuccuccuggauauacug

SEQ ID NO: 3235871 - RNA, 19 nt, Artificial Sequence
  Description of Artificial Sequence: Synthetic oligonucleotide
aucacagcuguauucacgu

SEQ ID NO: 3235872 - RNA, 19 nt, Artificial Sequence
  Description of Artificial Sequence: Synthetic oligonucleotide
aucuuggccacgaacagac

SEQ ID NO: 3235873 - RNA, 19 nt, Artificial Sequence
  Description of Artificial Sequence: Synthetic oligonucleotide
acugcauuucuguaauuug

SEQ ID NO: 3235874 - RNA, 19 nt, Artificial Sequence
  Description of Artificial Sequence: Synthetic oligonucleotide
cagucuucagugcauaggc

SEQ ID NO: 3235875 - RNA, 19 nt, Artificial Sequence
  Description of Artificial Sequence: Synthetic oligonucleotide
acgauggagccucucuucc

SEQ ID NO: 3235876 - RNA, 19 nt, Artificial Sequence
  Description of Artificial Sequence: Synthetic oligonucleotide
aagacucgguagccggugc

SEQ ID NO: 3235877 - RNA, 19 nt, Artificial Sequence
  Description of Artificial Sequence: Synthetic oligonucleotide
ucgacugugauguuccgga

SEQ ID NO: 3235878 - RNA, 19 nt, Artificial Sequence
  Description of Artificial Sequence: Synthetic oligonucleotide
gacaguguuugucaccacc

SEQ ID NO: 3235879 - RNA, 19 nt, Artificial Sequence
  Description of Artificial Sequence: Synthetic oligonucleotide
uccauguccagcucugugc

SEQ ID NO: 3235880 - RNA, 19 nt, Artificial Sequence
  Description of Artificial Sequence: Synthetic oligonucleotide
auuccaggcugauacacug

SEQ ID NO: 3235881 - RNA, 19 nt, Artificial Sequence
  Description of Artificial Sequence: Synthetic oligonucleotide
aguuugcacacgauggagc

SEQ ID NO: 3235882 - RNA, 19 nt, Artificial Sequence
  Description of Artificial Sequence: Synthetic oligonucleotide
aagagguaagccauggacu

SEQ ID NO: 3235883 - RNA, 19 nt, Artificial Sequence
  Description of Artificial Sequence: Synthetic oligonucleotide
gagacuuagcuacaaugac

SEQ ID NO: 3235884 - RNA, 19 nt, Artificial Sequence
  Description of Artificial Sequence: Synthetic oligonucleotide
ucuccugguacacaacaga

SEQ ID NO: 3235885 - RNA, 19 nt, Artificial Sequence
  Description of Artificial Sequence: Synthetic oligonucleotide
agauccauagugauuaugu

SEQ ID NO: 3235886 - RNA, 19 nt, Artificial Sequence
  Description of Artificial Sequence: Synthetic oligonucleotide
uggugaagauccauaguga

SEQ ID NO: 3235887 - RNA, 19 nt, Artificial Sequence
  Description of Artificial Sequence: Synthetic oligonucleotide
caagcugauguccacaguc

SEQ ID NO: 3235888 - RNA, 19 nt, Artificial Sequence
  Description of Artificial Sequence: Synthetic oligonucleotide
guuugcacacgauggagcc

SEQ ID NO: 3235889 - RNA, 19 nt, Artificial Sequence
  Description of Artificial Sequence: Synthetic oligonucleotide
gugauuaugugaguuaaac

SEQ ID NO: 3235890 - RNA, 19 nt, Artificial Sequence
  Description of Artificial Sequence: Synthetic oligonucleotide
agcuccaaguuagucaucg

SEQ ID NO: 3235891 - RNA, 19 nt, Artificial Sequence
  Description of Artificial Sequence: Synthetic oligonucleotide
agcaggaaaggugaggcuc

SEQ ID NO: 3235892 - RNA, 19 nt, Artificial Sequence
  Description of Artificial Sequence: Synthetic oligonucleotide
acagauuuucccaauucag

SEQ ID NO: 3235893 - RNA, 19 nt, Artificial Sequence
  Description of Artificial Sequence: Synthetic oligonucleotide
uggauauacugaagcagga

SEQ ID NO: 3235894 - RNA, 19 nt, Artificial Sequence
  Description of Artificial Sequence: Synthetic oligonucleotide
ugugcacugcgcuucuccg

SEQ ID NO: 3235895 - RNA, 19 nt, Artificial Sequence
  Description of Artificial Sequence: Synthetic oligonucleotide
agguuguccacuggaaagc

SEQ ID NO: 3235896 - RNA, 19 nt, Artificial Sequence
  Description of Artificial Sequence: Synthetic oligonucleotide
acucuuguuucuccauugg

SEQ ID NO: 3235897 - RNA, 19 nt, Artificial Sequence
  Description of Artificial Sequence: Synthetic oligonucleotide
uccauuggucuccugguac

SEQ ID NO: 3235898 - RNA, 19 nt, Artificial Sequence
  Description of Artificial Sequence: Synthetic oligonucleotide
auuucaacucuuguuucuc

SEQ ID NO: 3235899 - RNA, 19 nt, Artificial Sequence
  Description of Artificial Sequence: Synthetic oligonucleotide
acuuagcuacaaugacugc

SEQ ID NO: 3235900 - RNA, 19 nt, Artificial Sequence
  Description of Artificial Sequence: Synthetic oligonucleotide
cagugcauaggccauaauc

SEQ ID NO: 3235901 - RNA, 19 nt, Artificial Sequence
  Description of Artificial Sequence: Synthetic oligonucleotide
uuugccagcauggacgcca

SEQ ID NO: 3235902 - RNA, 19 nt, Artificial Sequence
  Description of Artificial Sequence: Synthetic oligonucleotide
uuguagagacuuccuagcu

SEQ ID NO: 3235903 - RNA, 19 nt, Artificial Sequence
  Description of Artificial Sequence: Synthetic oligonucleotide
ugucuguauaaugaaaaua

SEQ ID NO: 3235904 - RNA, 19 nt, Artificial Sequence
  Description of Artificial Sequence: Synthetic oligonucleotide
cuguauucacgucucuggg

SEQ ID NO: 3235905 - RNA, 19 nt, Artificial Sequence
  Description of Artificial Sequence: Synthetic oligonucleotide
gcuguauucacgucucugg

SEQ ID NO: 3235906 - RNA, 19 nt, Artificial Sequence
  Description of Artificial Sequence: Synthetic oligonucleotide
uaagccauggacucgccau

SEQ ID NO: 3235907 - RNA, 19 nt, Artificial Sequence
  Description of Artificial Sequence: Synthetic oligonucleotide
guuaaaccagccuuugcca

SEQ ID NO: 3235908 - RNA, 19 nt, Artificial Sequence
  Description of Artificial Sequence: Synthetic oligonucleotide
ucaguaacuccaucacagc

SEQ ID NO: 3235909 - RNA, 19 nt, Artificial Sequence
  Description of Artificial Sequence: Synthetic oligonucleotide
gaucgccucagaaagaauc

SEQ ID NO: 3235910 - RNA, 19 nt, Artificial Sequence
  Description of Artificial Sequence: Synthetic oligonucleotide
uguauucacgucucugggu

SEQ ID NO: 3235911 - RNA, 19 nt, Artificial Sequence
  Description of Artificial Sequence: Synthetic oligonucleotide
ugguacacaacagauuuuc

SEQ ID NO: 3235912 - RNA, 19 nt, Artificial Sequence
  Description of Artificial Sequence: Synthetic oligonucleotide
uuugcuugcuguaggggaa

SEQ ID NO: 3235913 - RNA, 19 nt, Artificial Sequence
  Description of Artificial Sequence: Synthetic oligonucleotide
uaaaccagccuuugccagc

SEQ ID NO: 3235914 - RNA, 19 nt, Artificial Sequence
  Description of Artificial Sequence: Synthetic oligonucleotide
uccggaagagguaagccau

SEQ ID NO: 3235915 - RNA, 19 nt, Artificial Sequence
  Description of Artificial Sequence: Synthetic oligonucleotide
gguauugucuguauaauga

SEQ ID NO: 3235916 - RNA, 19 nt, Artificial Sequence
  Description of Artificial Sequence: Synthetic oligonucleotide
cuccaaguuagucaucgac

SEQ ID NO: 3235917 - RNA, 19 nt, Artificial Sequence
  Description of Artificial Sequence: Synthetic oligonucleotide
aggaaaauaccguugaagc

SEQ ID NO: 3235918 - RNA, 19 nt, Artificial Sequence
  Description of Artificial Sequence: Synthetic oligonucleotide
aaugcagcuaaguaggcgg

SEQ ID NO: 3235919 - RNA, 19 nt, Artificial Sequence
  Description of Artificial Sequence: Synthetic oligonucleotide
acuuguaacacuuuuaucu

SEQ ID NO: 3235920 - RNA, 19 nt, Artificial Sequence
  Description of Artificial Sequence: Synthetic oligonucleotide
ugagucuucagcuagauau

SEQ ID NO: 3235921 - RNA, 19 nt, Artificial Sequence
  Description of Artificial Sequence: Synthetic oligonucleotide
ucuccacuagguaagaagg

SEQ ID NO: 3235922 - RNA, 19 nt, Artificial Sequence
  Description of Artificial Sequence: Synthetic oligonucleotide
aacacuuuuaucugggcug

SEQ ID NO: 3235923 - RNA, 19 nt, Artificial Sequence
  Description of Artificial Sequence: Synthetic oligonucleotide
aagcaaugcagcuaaguag

SEQ ID NO: 3235924 - RNA, 19 nt, Artificial Sequence
  Description of Artificial Sequence: Synthetic oligonucleotide
aaaguaggcagcaguaucc

SEQ ID NO: 3235925 - RNA, 19 nt, Artificial Sequence
  Description of Artificial Sequence: Synthetic oligonucleotide
uguaacacuuuuaucuggg

SEQ ID NO: 3235926 - RNA, 19 nt, Artificial Sequence
  Description of Artificial Sequence: Synthetic oligonucleotide
uuaaugacuggcuucagca

SEQ ID NO: 3235927 - RNA, 19 nt, Artificial Sequence
  Description of Artificial Sequence: Synthetic oligonucleotide
uagauauucuuccaggcca

SEQ ID NO: 3235928 - RNA, 19 nt, Artificial Sequence
  Description of Artificial Sequence: Synthetic oligonucleotide
gaagcaaugucagaugugg

SEQ ID NO: 3235929 - RNA, 19 nt, Artificial Sequence
  Description of Artificial Sequence: Synthetic oligonucleotide
accacaagcccacagcugc

SEQ ID NO: 3235930 - RNA, 19 nt, Artificial Sequence
  Description of Artificial Sequence: Synthetic oligonucleotide
aauggugcugucccaaguc

SEQ ID NO: 3235931 - RNA, 19 nt, Artificial Sequence
  Description of Artificial Sequence: Synthetic oligonucleotide
aaggucacugaccacuccg

SEQ ID NO: 3235932 - RNA, 19 nt, Artificial Sequence
  Description of Artificial Sequence: Synthetic oligonucleotide
uucagcuagauauucuucc

SEQ ID NO: 3235933 - RNA, 19 nt, Artificial Sequence
  Description of Artificial Sequence: Synthetic oligonucleotide
agaguuaaugacuggcuuc

SEQ ID NO: 3235934 - RNA, 19 nt, Artificial Sequence
  Description of Artificial Sequence: Synthetic oligonucleotide
agcaaugucagaugugggg

SEQ ID NO: 3235935 - RNA, 19 nt, Artificial Sequence
  Description of Artificial Sequence: Synthetic oligonucleotide
ucuagggccaccacaagcc

SEQ ID NO: 3235936 - RNA, 19 nt, Artificial Sequence
  Description of Artificial Sequence: Synthetic oligonucleotide
augaucuucaucucuccac

SEQ ID NO: 3235937 - RNA, 19 nt, Artificial Sequence
  Description of Artificial Sequence: Synthetic oligonucleotide
aaugacuggcuucagcacu

SEQ ID NO: 3235938 - RNA, 19 nt, Artificial Sequence
  Description of Artificial Sequence: Synthetic oligonucleotide
ucuucaucucuccacuagg

SEQ ID NO: 3235939 - RNA, 19 nt, Artificial Sequence
  Description of Artificial Sequence: Synthetic oligonucleotide
aagacgguggcuaaaguag

SEQ ID NO: 3235940 - RNA, 19 nt, Artificial Sequence
  Description of Artificial Sequence: Synthetic oligonucleotide
uaaguaggcggcuuccugg

SEQ ID NO: 3235941 - RNA, 19 nt, Artificial Sequence
  Description of Artificial Sequence: Synthetic oligonucleotide
uauccagaagcaaugcagc

SEQ ID NO: 3235942 - RNA, 19 nt, Artificial Sequence
  Description of Artificial Sequence: Synthetic oligonucleotide
uuguaacacuuuuaucugg

SEQ ID NO: 3235943 - RNA, 19 nt, Artificial Sequence
  Description of Artificial Sequence: Synthetic oligonucleotide
acauuccagaguuaaugac

SEQ ID NO: 3235944 - RNA, 19 nt, Artificial Sequence
  Description of Artificial Sequence: Synthetic oligonucleotide
agcuagauauucuuccagg

SEQ ID NO: 3235945 - RNA, 19 nt, Artificial Sequence
  Description of Artificial Sequence: Synthetic oligonucleotide
agcaaugcagcuaaguagg

SEQ ID NO: 3235946 - RNA, 19 nt, Artificial Sequence
  Description of Artificial Sequence: Synthetic oligonucleotide
uugaagcaaugucagaugu

SEQ ID NO: 3235947 - RNA, 19 nt, Artificial Sequence
  Description of Artificial Sequence: Synthetic oligonucleotide
auaccguugaagcaauguc

SEQ ID NO: 3235948 - RNA, 19 nt, Artificial Sequence
  Description of Artificial Sequence: Synthetic oligonucleotide
aagaaggucacugaccacu

SEQ ID NO: 3235949 - RNA, 19 nt, Artificial Sequence
  Description of Artificial Sequence: Synthetic oligonucleotide
uaccguugaagcaauguca

SEQ ID NO: 3235950 - RNA, 19 nt, Artificial Sequence
  Description of Artificial Sequence: Synthetic oligonucleotide
agguaagaaggucacugac

SEQ ID NO: 3235951 - RNA, 19 nt, Artificial Sequence
  Description of Artificial Sequence: Synthetic oligonucleotide
uaacacuuuuaucugggcu

SEQ ID NO: 3235952 - RNA, 19 nt, Artificial Sequence
  Description of Artificial Sequence: Synthetic oligonucleotide
cuuguaacacuuuuaucug

SEQ ID NO: 3235953 - RNA, 19 nt, Artificial Sequence
  Description of Artificial Sequence: Synthetic oligonucleotide
uuagaagccugguaggcca

SEQ ID NO: 3235954 - RNA, 19 nt, Artificial Sequence
  Description of Artificial Sequence: Synthetic oligonucleotide
guaagaaggucacugacca

SEQ ID NO: 3235955 - RNA, 19 nt, Artificial Sequence
  Description of Artificial Sequence: Synthetic oligonucleotide
ugcaggaaaauaccguuga

SEQ ID NO: 3235956 - RNA, 19 nt, Artificial Sequence
  Description of Artificial Sequence: Synthetic oligonucleotide
uaaaguaggcagcaguauc

SEQ ID NO: 3235957 - RNA, 19 nt, Artificial Sequence
  Description of Artificial Sequence: Synthetic oligonucleotide
cuagauauucuuccaggcc

SEQ ID NO: 3235958 - RNA, 19 nt, Artificial Sequence
  Description of Artificial Sequence: Synthetic oligonucleotide
gaaaauaccguugaagcaa

SEQ ID NO: 3235959 - RNA, 19 nt, Artificial Sequence
  Description of Artificial Sequence: Synthetic oligonucleotide
cugggcugggcuuagaagc

SEQ ID NO: 3235960 - RNA, 19 nt, Artificial Sequence
  Description of Artificial Sequence: Synthetic oligonucleotide
ucuggcugcagccagcaca

SEQ ID NO: 3235961 - RNA, 19 nt, Artificial Sequence
  Description of Artificial Sequence: Synthetic oligonucleotide
aauaccguugaagcaaugu

SEQ ID NO: 3235962 - RNA, 19 nt, Artificial Sequence
  Description of Artificial Sequence: Synthetic oligonucleotide
ugaucuucaucucuccacu

SEQ ID NO: 3235963 - RNA, 19 nt, Artificial Sequence
  Description of Artificial Sequence: Synthetic oligonucleotide
aagucuagggcaucuggcu

SEQ ID NO: 3235964 - RNA, 19 nt, Artificial Sequence
  Description of Artificial Sequence: Synthetic oligonucleotide
ucaucucuccacuagguaa

SEQ ID NO: 3235965 - RNA, 19 nt, Artificial Sequence
  Description of Artificial Sequence: Synthetic oligonucleotide
guauccagaagcaaugcag

SEQ ID NO: 3235966 - RNA, 19 nt, Artificial Sequence
  Description of Artificial Sequence: Synthetic oligonucleotide
ugccauuggcuccaagacg

SEQ ID NO: 3235967 - RNA, 19 nt, Artificial Sequence
  Description of Artificial Sequence: Synthetic oligonucleotide
cuagguaagaaggucacug

SEQ ID NO: 3235968 - RNA, 19 nt, Artificial Sequence
  Description of Artificial Sequence: Synthetic oligonucleotide
caugggaugaucuucaucu

SEQ ID NO: 3235969 - RNA, 19 nt, Artificial Sequence
  Description of Artificial Sequence: Synthetic oligonucleotide
cacagugcaggaaaauacc

SEQ ID NO: 3235970 - RNA, 19 nt, Artificial Sequence
  Description of Artificial Sequence: Synthetic oligonucleotide
uccagaguuaaugacuggc

SEQ ID NO: 3235971 - RNA, 19 nt, Artificial Sequence
  Description of Artificial Sequence: Synthetic oligonucleotide
ggcagcaguauccagaagc

SEQ ID NO: 3235972 - RNA, 19 nt, Artificial Sequence
  Description of Artificial Sequence: Synthetic oligonucleotide
ucagcuugccccaacucca

SEQ ID NO: 3235973 - RNA, 19 nt, Artificial Sequence
  Description of Artificial Sequence: Synthetic oligonucleotide
agggcaucuggcugcagcc

SEQ ID NO: 3235974 - RNA, 19 nt, Artificial Sequence
  Description of Artificial Sequence: Synthetic oligonucleotide
cucuccacuagguaagaag

SEQ ID NO: 3235975 - RNA, 19 nt, Artificial Sequence
  Description of Artificial Sequence: Synthetic oligonucleotide
uuuugggucucuagggcca

SEQ ID NO: 3235976 - RNA, 19 nt, Artificial Sequence
  Description of Artificial Sequence: Synthetic oligonucleotide
uuccaggccaucuagcagu

SEQ ID NO: 3235977 - RNA, 19 nt, Artificial Sequence
  Description of Artificial Sequence: Synthetic oligonucleotide
ucacugaccacuccguccu

SEQ ID NO: 3235978 - RNA, 19 nt, Artificial Sequence
  Description of Artificial Sequence: Synthetic oligonucleotide
acuuuuaucugggcugggc

SEQ ID NO: 3235979 - RNA, 19 nt, Artificial Sequence
  Description of Artificial Sequence: Synthetic oligonucleotide
aucuucaucucuccacuag

SEQ ID NO: 3235980 - RNA, 19 nt, Artificial Sequence
  Description of Artificial Sequence: Synthetic oligonucleotide
uucagcacuuguaacacuu

SEQ ID NO: 3235981 - RNA, 19 nt, Artificial Sequence
  Description of Artificial Sequence: Synthetic oligonucleotide
ugaagcaaugucagaugug

SEQ ID NO: 3235982 - RNA, 19 nt, Artificial Sequence
  Description of Artificial Sequence: Synthetic oligonucleotide
ucuuccaggccaucuagca

SEQ ID NO: 3235983 - RNA, 19 nt, Artificial Sequence
  Description of Artificial Sequence: Synthetic oligonucleotide
guuaaugacuggcuucagc

SEQ ID NO: 3235984 - RNA, 19 nt, Artificial Sequence
  Description of Artificial Sequence: Synthetic oligonucleotide
guugaagcaaugucagaug

SEQ ID NO: 3235985 - RNA, 19 nt, Artificial Sequence
  Description of Artificial Sequence: Synthetic oligonucleotide
auucuuccaggccaucuag

SEQ ID NO: 3235986 - RNA, 19 nt, Artificial Sequence
  Description of Artificial Sequence: Synthetic oligonucleotide
ucagcuagauauucuucca

SEQ ID NO: 3235987 - RNA, 19 nt, Artificial Sequence
  Description of Artificial Sequence: Synthetic oligonucleotide
ugcugucccaagucuaggg

SEQ ID NO: 3235988 - RNA, 19 nt, Artificial Sequence
  Description of Artificial Sequence: Synthetic oligonucleotide
cagauguggggcaucauug

SEQ ID NO: 3235989 - RNA, 19 nt, Artificial Sequence
  Description of Artificial Sequence: Synthetic oligonucleotide
caagucuagggcaucuggc

SEQ ID NO: 3235990 - RNA, 19 nt, Artificial Sequence
  Description of Artificial Sequence: Synthetic oligonucleotide
caggaaaauaccguugaag

SEQ ID NO: 3235991 - RNA, 19 nt, Artificial Sequence
  Description of Artificial Sequence: Synthetic oligonucleotide
gaagcaaugcagcuaagua

SEQ ID NO: 3235992 - RNA, 19 nt, Artificial Sequence
  Description of Artificial Sequence: Synthetic oligonucleotide
caucucuccacuagguaag

SEQ ID NO: 3235993 - RNA, 19 nt, Artificial Sequence
  Description of Artificial Sequence: Synthetic oligonucleotide
cucagcuugccccaacucc

SEQ ID NO: 3235994 - RNA, 19 nt, Artificial Sequence
  Description of Artificial Sequence: Synthetic oligonucleotide
ucuucagcuagauauucuu

SEQ ID NO: 3235995 - RNA, 19 nt, Artificial Sequence
  Description of Artificial Sequence: Synthetic oligonucleotide
ugggaugaucuucaucucu

SEQ ID NO: 3235996 - RNA, 19 nt, Artificial Sequence
  Description of Artificial Sequence: Synthetic oligonucleotide
aucauugucuucuucuuuu

SEQ ID NO: 3235997 - RNA, 19 nt, Artificial Sequence
  Description of Artificial Sequence: Synthetic oligonucleotide
caggcaauggugcuguccc

SEQ ID NO: 3235998 - RNA, 19 nt, Artificial Sequence
  Description of Artificial Sequence: Synthetic oligonucleotide
auuggcuccaagacggugg

SEQ ID NO: 3235999 - RNA, 19 nt, Artificial Sequence
  Description of Artificial Sequence: Synthetic oligonucleotide
aguauccagaagcaaugca

SEQ ID NO: 3236000 - RNA, 19 nt, Artificial Sequence
  Description of Artificial Sequence: Synthetic oligonucleotide
acagugcaggaaaauaccg

SEQ ID NO: 3236001 - RNA, 19 nt, Artificial Sequence
  Description of Artificial Sequence: Synthetic oligonucleotide
auuccagaguuaaugacug

SEQ ID NO: 3236002 - RNA, 19 nt, Artificial Sequence
  Description of Artificial Sequence: Synthetic oligonucleotide
agugcaggaaaauaccguu

SEQ ID NO: 3236003 - RNA, 19 nt, Artificial Sequence
  Description of Artificial Sequence: Synthetic oligonucleotide
uagguaagaaggucacuga

SEQ ID NO: 3236004 - RNA, 19 nt, Artificial Sequence
  Description of Artificial Sequence: Synthetic oligonucleotide
ucugggcugggcuuagaag

SEQ ID NO: 3236005 - RNA, 19 nt, Artificial Sequence
  Description of Artificial Sequence: Synthetic oligonucleotide
gaccacuccguccuggggc

SEQ ID NO: 3236006 - RNA, 19 nt, Artificial Sequence
  Description of Artificial Sequence: Synthetic oligonucleotide
gggcuuagaagccugguag

SEQ ID NO: 3236007 - RNA, 19 nt, Artificial Sequence
  Description of Artificial Sequence: Synthetic oligonucleotide
agucuucagcuagauauuc

SEQ ID NO: 3236008 - RNA, 19 nt, Artificial Sequence
  Description of Artificial Sequence: Synthetic oligonucleotide
uagggcaucuggcugcagc

SEQ ID NO: 3236009 - RNA, 19 nt, Artificial Sequence
  Description of Artificial Sequence: Synthetic oligonucleotide
uggggcaucauugucuucu

SEQ ID NO: 3236010 - RNA, 19 nt, Artificial Sequence
  Description of Artificial Sequence: Synthetic oligonucleotide
acacuuuuaucugggcugg

SEQ ID NO: 3236011 - RNA, 19 nt, Artificial Sequence
  Description of Artificial Sequence: Synthetic oligonucleotide
ucagauguggggcaucauu

SEQ ID NO: 3236012 - RNA, 19 nt, Artificial Sequence
  Description of Artificial Sequence: Synthetic oligonucleotide
uaaugacuggcuucagcac

SEQ ID NO: 3236013 - RNA, 19 nt, Artificial Sequence
  Description of Artificial Sequence: Synthetic oligonucleotide
ugccccaacuccaggcugg

SEQ ID NO: 3236014 - RNA, 19 nt, Artificial Sequence
  Description of Artificial Sequence: Synthetic oligonucleotide
cucuagggccaccacaagc

SEQ ID NO: 3236015 - RNA, 19 nt, Artificial Sequence
  Description of Artificial Sequence: Synthetic oligonucleotide
cuuccuggaccccugaguc

SEQ ID NO: 3236016 - RNA, 19 nt, Artificial Sequence
  Description of Artificial Sequence: Synthetic oligonucleotide
uauucuuccaggccaucua

SEQ ID NO: 3236017 - RNA, 19 nt, Artificial Sequence
  Description of Artificial Sequence: Synthetic oligonucleotide
aaauauacuauauacaugg

SEQ ID NO: 3236018 - RNA, 19 nt, Artificial Sequence
  Description of Artificial Sequence: Synthetic oligonucleotide
uucaaaauauacuauauac

SEQ ID NO: 3236019 - RNA, 19 nt, Artificial Sequence
  Description of Artificial Sequence: Synthetic oligonucleotide
aauaauaauuucccguuuc

SEQ ID NO: 3236020 - RNA, 19 nt, Artificial Sequence
  Description of Artificial Sequence: Synthetic oligonucleotide
caucauaaaauaaauaaag

SEQ ID NO: 3236021 - RNA, 19 nt, Artificial Sequence
  Description of Artificial Sequence: Synthetic oligonucleotide
auaauuucccguuucagac

SEQ ID NO: 3236022 - RNA, 19 nt, Artificial Sequence
  Description of Artificial Sequence: Synthetic oligonucleotide
uccaucauaaaauaaauaa

SEQ ID NO: 3236023 - RNA, 19 nt, Artificial Sequence
  Description of Artificial Sequence: Synthetic oligonucleotide
ucuacuucaaaauauacua

SEQ ID NO: 3236024 - RNA, 19 nt, Artificial Sequence
  Description of Artificial Sequence: Synthetic oligonucleotide
ucauaaaauaaauaaagua

SEQ ID NO: 3236025 - RNA, 19 nt, Artificial Sequence
  Description of Artificial Sequence: Synthetic oligonucleotide
ucaaaauauacuauauaca

SEQ ID NO: 3236026 - RNA, 19 nt, Artificial Sequence
  Description of Artificial Sequence: Synthetic oligonucleotide
gaucauuuuguucaggaag

SEQ ID NO: 3236027 - RNA, 19 nt, Artificial Sequence
  Description of Artificial Sequence: Synthetic oligonucleotide
cauaaaauaaauaaaguaa

SEQ ID NO: 3236028 - RNA, 19 nt, Artificial Sequence
  Description of Artificial Sequence: Synthetic oligonucleotide
auauacuauauacaugggg

SEQ ID NO: 3236029 - RNA, 19 nt, Artificial Sequence
  Description of Artificial Sequence: Synthetic oligonucleotide
aaaauaauaauuucccguu

SEQ ID NO: 3236030 - RNA, 19 nt, Artificial Sequence
  Description of Artificial Sequence: Synthetic oligonucleotide
aauaauuucccguuucaga

SEQ ID NO: 3236031 - RNA, 19 nt, Artificial Sequence
  Description of Artificial Sequence: Synthetic oligonucleotide
aauuucccguuucagacuc

SEQ ID NO: 3236032 - RNA, 19 nt, Artificial Sequence
  Description of Artificial Sequence: Synthetic oligonucleotide
auuuuguucaggaaguacc

SEQ ID NO: 3236033 - RNA, 19 nt, Artificial Sequence
  Description of Artificial Sequence: Synthetic oligonucleotide
uuuauuucuacuucaaaau

SEQ ID NO: 3236034 - RNA, 19 nt, Artificial Sequence
  Description of Artificial Sequence: Synthetic oligonucleotide
uucagacucaucuuuaacc

SEQ ID NO: 3236035 - RNA, 19 nt, Artificial Sequence
  Description of Artificial Sequence: Synthetic oligonucleotide
ugucuugaggacaugcugg

SEQ ID NO: 3236036 - RNA, 19 nt, Artificial Sequence
  Description of Artificial Sequence: Synthetic oligonucleotide
ucaucuuuaacccggcugc

SEQ ID NO: 3236037 - RNA, 19 nt, Artificial Sequence
  Description of Artificial Sequence: Synthetic oligonucleotide
uaaaauaaauaaaguaaaa

SEQ ID NO: 3236038 - RNA, 19 nt, Artificial Sequence
  Description of Artificial Sequence: Synthetic oligonucleotide
uauuucuacuucaaaauau

SEQ ID NO: 3236039 - RNA, 19 nt, Artificial Sequence
  Description of Artificial Sequence: Synthetic oligonucleotide
ucagacucaucuuuaaccc

SEQ ID NO: 3236040 - RNA, 19 nt, Artificial Sequence
  Description of Artificial Sequence: Synthetic oligonucleotide
uguucaggaaguaccagag

SEQ ID NO: 3236041 - RNA, 19 nt, Artificial Sequence
  Description of Artificial Sequence: Synthetic oligonucleotide
uugccgaucauuuuguuca

SEQ ID NO: 3236042 - RNA, 19 nt, Artificial Sequence
  Description of Artificial Sequence: Synthetic oligonucleotide
aguaccagagaacuggaag

SEQ ID NO: 3236043 - RNA, 19 nt, Artificial Sequence
  Description of Artificial Sequence: Synthetic oligonucleotide
auacacugaagccaccagc

SEQ ID NO: 3236044 - RNA, 19 nt, Artificial Sequence
  Description of Artificial Sequence: Synthetic oligonucleotide
ucuaaaagucccuggagug

SEQ ID NO: 3236045 - RNA, 19 nt, Artificial Sequence
  Description of Artificial Sequence: Synthetic oligonucleotide
cugauuggcagcaaagucc

SEQ ID NO: 3236046 - RNA, 19 nt, Artificial Sequence
  Description of Artificial Sequence: Synthetic oligonucleotide
aaggaugugccgcuccacc

SEQ ID NO: 3236047 - RNA, 19 nt, Artificial Sequence
  Description of Artificial Sequence: Synthetic oligonucleotide
uucaggaaguaccagagaa

SEQ ID NO: 3236048 - RNA, 19 nt, Artificial Sequence
  Description of Artificial Sequence: Synthetic oligonucleotide
uucuacuucaaaauauacu

SEQ ID NO: 3236049 - RNA, 19 nt, Artificial Sequence
  Description of Artificial Sequence: Synthetic oligonucleotide
aaaauauacuauauacaug

SEQ ID NO: 3236050 - RNA, 19 nt, Artificial Sequence
  Description of Artificial Sequence: Synthetic oligonucleotide
auaaaauaaauaaaguaaa

SEQ ID NO: 3236051 - RNA, 19 nt, Artificial Sequence
  Description of Artificial Sequence: Synthetic oligonucleotide
aacuggaaggaugugccgc

SEQ ID NO: 3236052 - RNA, 19 nt, Artificial Sequence
  Description of Artificial Sequence: Synthetic oligonucleotide
uucggggauacacugaagc

SEQ ID NO: 3236053 - RNA, 19 nt, Artificial Sequence
  Description of Artificial Sequence: Synthetic oligonucleotide
aaguccugcagccgggacc

SEQ ID NO: 3236054 - RNA, 19 nt, Artificial Sequence
  Description of Artificial Sequence: Synthetic oligonucleotide
guaccagagaacuggaagg

SEQ ID NO: 3236055 - RNA, 19 nt, Artificial Sequence
  Description of Artificial Sequence: Synthetic oligonucleotide
agaacuggaaggaugugcc

SEQ ID NO: 3236056 - RNA, 19 nt, Artificial Sequence
  Description of Artificial Sequence: Synthetic oligonucleotide
uuuuguucaggaaguacca

SEQ ID NO: 3236057 - RNA, 19 nt, Artificial Sequence
  Description of Artificial Sequence: Synthetic oligonucleotide
ucccguuucagacucaucu

SEQ ID NO: 3236058 - RNA, 19 nt, Artificial Sequence
  Description of Artificial Sequence: Synthetic oligonucleotide
uuauuucuacuucaaaaua

SEQ ID NO: 3236059 - RNA, 19 nt, Artificial Sequence
  Description of Artificial Sequence: Synthetic oligonucleotide
cucagagucuaaaaguccc

SEQ ID NO: 3236060 - RNA, 19 nt, Artificial Sequence
  Description of Artificial Sequence: Synthetic oligonucleotide
uuucuacuucaaaauauac

SEQ ID NO: 3236061 - RNA, 19 nt, Artificial Sequence
  Description of Artificial Sequence: Synthetic oligonucleotide
auuggcagcaaaguccugc

SEQ ID NO: 3236062 - RNA, 19 nt, Artificial Sequence
  Description of Artificial Sequence: Synthetic oligonucleotide
uacacugaagccaccagca

SEQ ID NO: 3236063 - RNA, 19 nt, Artificial Sequence
  Description of Artificial Sequence: Synthetic oligonucleotide
ucuuuaacccggcugcugc

SEQ ID NO: 3236064 - RNA, 19 nt, Artificial Sequence
  Description of Artificial Sequence: Synthetic oligonucleotide
ucuacaggugacuuuguca

SEQ ID NO: 3236065 - RNA, 19 nt, Artificial Sequence
  Description of Artificial Sequence: Synthetic oligonucleotide
gacgguuccagucaucuug

SEQ ID NO: 3236066 - RNA, 19 nt, Artificial Sequence
  Description of Artificial Sequence: Synthetic oligonucleotide
gugacuuugucauugcccc

SEQ ID NO: 3236067 - RNA, 19 nt, Artificial Sequence
  Description of Artificial Sequence: Synthetic oligonucleotide
aauauacuauauacauggg

SEQ ID NO: 3236068 - RNA, 19 nt, Artificial Sequence
  Description of Artificial Sequence: Synthetic oligonucleotide
ugaggugacuccaucauaa

SEQ ID NO: 3236069 - RNA, 19 nt, Artificial Sequence
  Description of Artificial Sequence: Synthetic oligonucleotide
ugauuggcagcaaaguccu

SEQ ID NO: 3236070 - RNA, 19 nt, Artificial Sequence
  Description of Artificial Sequence: Synthetic oligonucleotide
agcaaaguccugcagccgg

SEQ ID NO: 3236071 - RNA, 19 nt, Artificial Sequence
  Description of Artificial Sequence: Synthetic oligonucleotide
agagucuaaaagucccugg

SEQ ID NO: 3236072 - RNA, 19 nt, Artificial Sequence
  Description of Artificial Sequence: Synthetic oligonucleotide
uacuucaaaauauacuaua

SEQ ID NO: 3236073 - RNA, 19 nt, Artificial Sequence
  Description of Artificial Sequence: Synthetic oligonucleotide
auaauaauuucccguuuca

SEQ ID NO: 3236074 - RNA, 19 nt, Artificial Sequence
  Description of Artificial Sequence: Synthetic oligonucleotide
cuugaggacaugcuggggc

SEQ ID NO: 3236075 - RNA, 19 nt, Artificial Sequence
  Description of Artificial Sequence: Synthetic oligonucleotide
aaauaauaauuucccguuu

SEQ ID NO: 3236076 - RNA, 19 nt, Artificial Sequence
  Description of Artificial Sequence: Synthetic oligonucleotide
caaaauauacuauauacau

SEQ ID NO: 3236077 - RNA, 19 nt, Artificial Sequence
  Description of Artificial Sequence: Synthetic oligonucleotide
ggaaguaccagagaacugg

SEQ ID NO: 3236078 - RNA, 19 nt, Artificial Sequence
  Description of Artificial Sequence: Synthetic oligonucleotide
uaauaauuucccguuucag

SEQ ID NO: 3236079 - RNA, 19 nt, Artificial Sequence
  Description of Artificial Sequence: Synthetic oligonucleotide
aucauaaaauaaauaaagu

SEQ ID NO: 3236080 - RNA, 19 nt, Artificial Sequence
  Description of Artificial Sequence: Synthetic oligonucleotide
auucccgccacgcccaggc

SEQ ID NO: 3236081 - RNA, 19 nt, Artificial Sequence
  Description of Artificial Sequence: Synthetic oligonucleotide
agucuaaaagucccuggag

SEQ ID NO: 3236082 - RNA, 19 nt, Artificial Sequence
  Description of Artificial Sequence: Synthetic oligonucleotide
uuguucaggaaguaccaga

SEQ ID NO: 3236083 - RNA, 19 nt, Artificial Sequence
  Description of Artificial Sequence: Synthetic oligonucleotide
acucagagucuaaaagucc

SEQ ID NO: 3236084 - RNA, 19 nt, Artificial Sequence
  Description of Artificial Sequence: Synthetic oligonucleotide
gacaugcuggggcugauug

SEQ ID NO: 3236085 - RNA, 19 nt, Artificial Sequence
  Description of Artificial Sequence: Synthetic oligonucleotide
aacguuccucuacagguga

SEQ ID NO: 3236086 - RNA, 19 nt, Artificial Sequence
  Description of Artificial Sequence: Synthetic oligonucleotide
uuucagacucaucuuuaac

SEQ ID NO: 3236087 - RNA, 19 nt, Artificial Sequence
  Description of Artificial Sequence: Synthetic oligonucleotide
aaaguccugcagccgggac

SEQ ID NO: 3236088 - RNA, 19 nt, Artificial Sequence
  Description of Artificial Sequence: Synthetic oligonucleotide
gauacacugaagccaccag

SEQ ID NO: 3236089 - RNA, 19 nt, Artificial Sequence
  Description of Artificial Sequence: Synthetic oligonucleotide
ucaggaaguaccagagaac

SEQ ID NO: 3236090 - RNA, 19 nt, Artificial Sequence
  Description of Artificial Sequence: Synthetic oligonucleotide
aggaacguuccucuacagg

SEQ ID NO: 3236091 - RNA, 19 nt, Artificial Sequence
  Description of Artificial Sequence: Synthetic oligonucleotide
accguugccgaucauuuug

SEQ ID NO: 3236092 - RNA, 19 nt, Artificial Sequence
  Description of Artificial Sequence: Synthetic oligonucleotide
gagaacuggaaggaugugc

SEQ ID NO: 3236093 - RNA, 19 nt, Artificial Sequence
  Description of Artificial Sequence: Synthetic oligonucleotide
uccucuacaggugacuuug

SEQ ID NO: 3236094 - RNA, 19 nt, Artificial Sequence
  Description of Artificial Sequence: Synthetic oligonucleotide
agacucaucuuuaacccgg

SEQ ID NO: 3236095 - RNA, 19 nt, Artificial Sequence
  Description of Artificial Sequence: Synthetic oligonucleotide
gaggcuuccggccagccug

SEQ ID NO: 3236096 - RNA, 19 nt, Artificial Sequence
  Description of Artificial Sequence: Synthetic oligonucleotide
cucaucuuuaacccggcug

SEQ ID NO: 3236097 - RNA, 19 nt, Artificial Sequence
  Description of Artificial Sequence: Synthetic oligonucleotide
aguccugcagccgggaccc

SEQ ID NO: 3236098 - RNA, 19 nt, Artificial Sequence
  Description of Artificial Sequence: Synthetic oligonucleotide
aggugacuuugucauugcc

SEQ ID NO: 3236099 - RNA, 19 nt, Artificial Sequence
  Description of Artificial Sequence: Synthetic oligonucleotide
aucauuuuguucaggaagu

SEQ ID NO: 3236100 - RNA, 19 nt, Artificial Sequence
  Description of Artificial Sequence: Synthetic oligonucleotide
gacucagagucuaaaaguc

SEQ ID NO: 3236101 - RNA, 19 nt, Artificial Sequence
  Description of Artificial Sequence: Synthetic oligonucleotide
gacuccaucauaaaauaaa

SEQ ID NO: 3236102 - RNA, 19 nt, Artificial Sequence
  Description of Artificial Sequence: Synthetic oligonucleotide
gagucuaaaagucccugga

SEQ ID NO: 3236103 - RNA, 19 nt, Artificial Sequence
  Description of Artificial Sequence: Synthetic oligonucleotide
ucggggauacacugaagcc

SEQ ID NO: 3236104 - RNA, 19 nt, Artificial Sequence
  Description of Artificial Sequence: Synthetic oligonucleotide
uaauuucccguuucagacu

SEQ ID NO: 3236105 - RNA, 19 nt, Artificial Sequence
  Description of Artificial Sequence: Synthetic oligonucleotide
gucuugaggacaugcuggg

SEQ ID NO: 3236106 - RNA, 19 nt, Artificial Sequence
  Description of Artificial Sequence: Synthetic oligonucleotide
gaacuggaaggaugugccg

SEQ ID NO: 3236107 - RNA, 19 nt, Artificial Sequence
  Description of Artificial Sequence: Synthetic oligonucleotide
cagacucaucuuuaacccg

SEQ ID NO: 3236108 - RNA, 19 nt, Artificial Sequence
  Description of Artificial Sequence: Synthetic oligonucleotide
acaggugacuuugucauug

SEQ ID NO: 3236109 - RNA, 19 nt, Artificial Sequence
  Description of Artificial Sequence: Synthetic oligonucleotide
uuuguucaggaaguaccag

SEQ ID NO: 3236110 - RNA, 19 nt, Artificial Sequence
  Description of Artificial Sequence: Synthetic oligonucleotide
uuaacccggcugcugcagg

SEQ ID NO: 3236111 - RNA, 19 nt, Artificial Sequence
  Description of Artificial Sequence: Synthetic oligonucleotide
ucagagucuaaaagucccu

SEQ ID NO: 3236112 - RNA, 19 nt, Artificial Sequence
  Description of Artificial Sequence: Synthetic oligonucleotide
gggacucagagucuaaaag

SEQ ID NO: 3236113 - RNA, 19 nt, Artificial Sequence
  Description of Artificial Sequence: Synthetic oligonucleotide
guuccagucaucuugcugu

SEQ ID NO: 3236114 - RNA, 19 nt, Artificial Sequence
  Description of Artificial Sequence: Synthetic oligonucleotide
aauggggagagucggccau

SEQ ID NO: 3236115 - RNA, 19 nt, Artificial Sequence
  Description of Artificial Sequence: Synthetic oligonucleotide
gaggcuuucggggauacac

SEQ ID NO: 3236116 - RNA, 19 nt, Artificial Sequence
  Description of Artificial Sequence: Synthetic oligonucleotide
aggaugugccgcuccaccg

SEQ ID NO: 3236117 - RNA, 19 nt, Artificial Sequence
  Description of Artificial Sequence: Synthetic oligonucleotide
aagagaauccuccagcucc

SEQ ID NO: 3236118 - RNA, 19 nt, Artificial Sequence
  Description of Artificial Sequence: Synthetic oligonucleotide
uaaaucaagaaccagcuuc

SEQ ID NO: 3236119 - RNA, 19 nt, Artificial Sequence
  Description of Artificial Sequence: Synthetic oligonucleotide
ugugauguaaaucaagaac

SEQ ID NO: 3236120 - RNA, 19 nt, Artificial Sequence
  Description of Artificial Sequence: Synthetic oligonucleotide
aaagaccaggcuuaaagag

SEQ ID NO: 3236121 - RNA, 19 nt, Artificial Sequence
  Description of Artificial Sequence: Synthetic oligonucleotide
uuaaagagaauccuccagc

SEQ ID NO: 3236122 - RNA, 19 nt, Artificial Sequence
  Description of Artificial Sequence: Synthetic oligonucleotide
uguaaaucaagaaccagcu

SEQ ID NO: 3236123 - RNA, 19 nt, Artificial Sequence
  Description of Artificial Sequence: Synthetic oligonucleotide
ucaagaaccagcuucggcc

SEQ ID NO: 3236124 - RNA, 19 nt, Artificial Sequence
  Description of Artificial Sequence: Synthetic oligonucleotide
ucagccaaacuaaagacca

SEQ ID NO: 3236125 - RNA, 19 nt, Artificial Sequence
  Description of Artificial Sequence: Synthetic oligonucleotide
aauagaagcagcccuguga

SEQ ID NO: 3236126 - RNA, 19 nt, Artificial Sequence
  Description of Artificial Sequence: Synthetic oligonucleotide
cuaaagaccaggcuuaaag

SEQ ID NO: 3236127 - RNA, 19 nt, Artificial Sequence
  Description of Artificial Sequence: Synthetic oligonucleotide
auguaaaucaagaaccagc

SEQ ID NO: 3236128 - RNA, 19 nt, Artificial Sequence
  Description of Artificial Sequence: Synthetic oligonucleotide
gugauguaaaucaagaacc

SEQ ID NO: 3236129 - RNA, 19 nt, Artificial Sequence
  Description of Artificial Sequence: Synthetic oligonucleotide
aaaucaagaaccagcuucg

SEQ ID NO: 3236130 - RNA, 19 nt, Artificial Sequence
  Description of Artificial Sequence: Synthetic oligonucleotide
agagucagcaguuccggcc

SEQ ID NO: 3236131 - RNA, 19 nt, Artificial Sequence
  Description of Artificial Sequence: Synthetic oligonucleotide
gucaugaugaggcugcugg

SEQ ID NO: 3236132 - RNA, 19 nt, Artificial Sequence
  Description of Artificial Sequence: Synthetic oligonucleotide
aagaccacaguguccagag

SEQ ID NO: 3236133 - RNA, 19 nt, Artificial Sequence
  Description of Artificial Sequence: Synthetic oligonucleotide
auagaagcagcccugugag

SEQ ID NO: 3236134 - RNA, 19 nt, Artificial Sequence
  Description of Artificial Sequence: Synthetic oligonucleotide
aaagagaauccuccagcuc

SEQ ID NO: 3236135 - RNA, 19 nt, Artificial Sequence
  Description of Artificial Sequence: Synthetic oligonucleotide
ugcugggucaugaugaggc

SEQ ID NO: 3236136 - RNA, 19 nt, Artificial Sequence
  Description of Artificial Sequence: Synthetic oligonucleotide
uucagccaaacuaaagacc

SEQ ID NO: 3236137 - RNA, 19 nt, Artificial Sequence
  Description of Artificial Sequence: Synthetic oligonucleotide
ugauguaaaucaagaacca

SEQ ID NO: 3236138 - RNA, 19 nt, Artificial Sequence
  Description of Artificial Sequence: Synthetic oligonucleotide
aacagccagcccuuaauag

SEQ ID NO: 3236139 - RNA, 19 nt, Artificial Sequence
  Description of Artificial Sequence: Synthetic oligonucleotide
aucaagaaccagcuucggc

SEQ ID NO: 3236140 - RNA, 19 nt, Artificial Sequence
  Description of Artificial Sequence: Synthetic oligonucleotide
uaaagaccaggcuuaaaga

SEQ ID NO: 3236141 - RNA, 19 nt, Artificial Sequence
  Description of Artificial Sequence: Synthetic oligonucleotide
gaauccuccagcuccgggg

SEQ ID NO: 3236142 - RNA, 19 nt, Artificial Sequence
  Description of Artificial Sequence: Synthetic oligonucleotide
cuuaaagagaauccuccag

SEQ ID NO: 3236143 - RNA, 19 nt, Artificial Sequence
  Description of Artificial Sequence: Synthetic oligonucleotide
cuuaauagaagcagcccug

SEQ ID NO: 3236144 - RNA, 19 nt, Artificial Sequence
  Description of Artificial Sequence: Synthetic oligonucleotide
cagaguuccgugcaggucg

SEQ ID NO: 3236145 - RNA, 19 nt, Artificial Sequence
  Description of Artificial Sequence: Synthetic oligonucleotide
uaaagagaauccuccagcu

SEQ ID NO: 3236146 - RNA, 19 nt, Artificial Sequence
  Description of Artificial Sequence: Synthetic oligonucleotide
agcccugugagguggaccc

SEQ ID NO: 3236147 - RNA, 19 nt, Artificial Sequence
  Description of Artificial Sequence: Synthetic oligonucleotide
agcaggaccaguccagccc

SEQ ID NO: 3236148 - RNA, 19 nt, Artificial Sequence
  Description of Artificial Sequence: Synthetic oligonucleotide
uacugugauguaaaucaag

SEQ ID NO: 3236149 - RNA, 19 nt, Artificial Sequence
  Description of Artificial Sequence: Synthetic oligonucleotide
cuucagccaaacuaaagac

SEQ ID NO: 3236150 - RNA, 19 nt, Artificial Sequence
  Description of Artificial Sequence: Synthetic oligonucleotide
aagagucagcaguuccggc

SEQ ID NO: 3236151 - RNA, 19 nt, Artificial Sequence
  Description of Artificial Sequence: Synthetic oligonucleotide
aguguccagaguuccgugc

SEQ ID NO: 3236152 - RNA, 19 nt, Artificial Sequence
  Description of Artificial Sequence: Synthetic oligonucleotide
accagcuucggccuucagc

SEQ ID NO: 3236153 - RNA, 19 nt, Artificial Sequence
  Description of Artificial Sequence: Synthetic oligonucleotide
gauguaaaucaagaaccag

SEQ ID NO: 3236154 - RNA, 19 nt, Artificial Sequence
  Description of Artificial Sequence: Synthetic oligonucleotide
ucggccuucagccaaacua

SEQ ID NO: 3236155 - RNA, 19 nt, Artificial Sequence
  Description of Artificial Sequence: Synthetic oligonucleotide
augaugaggcugcuggagg

SEQ ID NO: 3236156 - RNA, 19 nt, Artificial Sequence
  Description of Artificial Sequence: Synthetic oligonucleotide
ugggucaugaugaggcugc

SEQ ID NO: 3236157 - RNA, 19 nt, Artificial Sequence
  Description of Artificial Sequence: Synthetic oligonucleotide
ccuacugugauguaaauca

SEQ ID NO: 3236158 - RNA, 19 nt, Artificial Sequence
  Description of Artificial Sequence: Synthetic oligonucleotide
accaggcuuaaagagaauc

SEQ ID NO: 3236159 - RNA, 19 nt, Artificial Sequence
  Description of Artificial Sequence: Synthetic oligonucleotide
ugcuggagguaacagccag

SEQ ID NO: 3236160 - RNA, 19 nt, Artificial Sequence
  Description of Artificial Sequence: Synthetic oligonucleotide
acugugauguaaaucaaga

SEQ ID NO: 3236161 - RNA, 19 nt, Artificial Sequence
  Description of Artificial Sequence: Synthetic oligonucleotide
agccaaacuaaagaccagg

SEQ ID NO: 3236162 - RNA, 19 nt, Artificial Sequence
  Description of Artificial Sequence: Synthetic oligonucleotide
agcaguuccggccaaggcu

SEQ ID NO: 3236163 - RNA, 19 nt, Artificial Sequence
  Description of Artificial Sequence: Synthetic oligonucleotide
aaacuaaagaccaggcuua

SEQ ID NO: 3236164 - RNA, 19 nt, Artificial Sequence
  Description of Artificial Sequence: Synthetic oligonucleotide
caguccagccccucgaagg

SEQ ID NO: 3236165 - RNA, 19 nt, Artificial Sequence
  Description of Artificial Sequence: Synthetic oligonucleotide
aagaccaggcuuaaagaga

SEQ ID NO: 3236166 - RNA, 19 nt, Artificial Sequence
  Description of Artificial Sequence: Synthetic oligonucleotide
aaucaagaaccagcuucgg

SEQ ID NO: 3236167 - RNA, 19 nt, Artificial Sequence
  Description of Artificial Sequence: Synthetic oligonucleotide
aauccuccagcuccggggu

SEQ ID NO: 3236168 - RNA, 19 nt, Artificial Sequence
  Description of Artificial Sequence: Synthetic oligonucleotide
agguggacccggcaagacc

SEQ ID NO: 3236169 - RNA, 19 nt, Artificial Sequence
  Description of Artificial Sequence: Synthetic oligonucleotide
agaagcagcccugugaggu

SEQ ID NO: 3236170 - RNA, 19 nt, Artificial Sequence
  Description of Artificial Sequence: Synthetic oligonucleotide
acagccagcccuuaauaga

SEQ ID NO: 3236171 - RNA, 19 nt, Artificial Sequence
  Description of Artificial Sequence: Synthetic oligonucleotide
uaauagaagcagcccugug

SEQ ID NO: 3236172 - RNA, 19 nt, Artificial Sequence
  Description of Artificial Sequence: Synthetic oligonucleotide
ugugagguggacccggcaa

SEQ ID NO: 3236173 - RNA, 19 nt, Artificial Sequence
  Description of Artificial Sequence: Synthetic oligonucleotide
ccagcuucggccuucagcc

SEQ ID NO: 3236174 - RNA, 19 nt, Artificial Sequence
  Description of Artificial Sequence: Synthetic oligonucleotide
agcccuuaauagaagcagc

SEQ ID NO: 3236175 - RNA, 19 nt, Artificial Sequence
  Description of Artificial Sequence: Synthetic oligonucleotide
aguccagccccucgaaggg

SEQ ID NO: 3236176 - RNA, 19 nt, Artificial Sequence
  Description of Artificial Sequence: Synthetic oligonucleotide
uuaauagaagcagcccugu

SEQ ID NO: 3236177 - RNA, 19 nt, Artificial Sequence
  Description of Artificial Sequence: Synthetic oligonucleotide
aagggcccuacugugaugu

SEQ ID NO: 3236178 - RNA, 19 nt, Artificial Sequence
  Description of Artificial Sequence: Synthetic oligonucleotide
caggucggggccaagaguc

SEQ ID NO: 3236179 - RNA, 19 nt, Artificial Sequence
  Description of Artificial Sequence: Synthetic oligonucleotide
ugaugaggcugcuggaggu

SEQ ID NO: 3236180 - RNA, 19 nt, Artificial Sequence
  Description of Artificial Sequence: Synthetic oligonucleotide
cuggagguaacagccagcc

SEQ ID NO: 3236181 - RNA, 19 nt, Artificial Sequence
  Description of Artificial Sequence: Synthetic oligonucleotide
uccggggucacccucccca

SEQ ID NO: 3236182 - RNA, 19 nt, Artificial Sequence
  Description of Artificial Sequence: Synthetic oligonucleotide
agaauccuccagcuccggg

SEQ ID NO: 3236183 - RNA, 19 nt, Artificial Sequence
  Description of Artificial Sequence: Synthetic oligonucleotide
caagagucagcaguuccgg

SEQ ID NO: 3236184 - RNA, 19 nt, Artificial Sequence
  Description of Artificial Sequence: Synthetic oligonucleotide
ggcuuaaagagaauccucc

SEQ ID NO: 3236185 - RNA, 19 nt, Artificial Sequence
  Description of Artificial Sequence: Synthetic oligonucleotide
ugcaggucggggccaagag

SEQ ID NO: 3236186 - RNA, 19 nt, Artificial Sequence
  Description of Artificial Sequence: Synthetic oligonucleotide
caaacuaaagaccaggcuu

SEQ ID NO: 3236187 - RNA, 19 nt, Artificial Sequence
  Description of Artificial Sequence: Synthetic oligonucleotide
aagcagcccugugaggugg

SEQ ID NO: 3236188 - RNA, 19 nt, Artificial Sequence
  Description of Artificial Sequence: Synthetic oligonucleotide
uaacagccagcccuuaaua

SEQ ID NO: 3236189 - RNA, 19 nt, Artificial Sequence
  Description of Artificial Sequence: Synthetic oligonucleotide
ucagcaguuccggccaagg

SEQ ID NO: 3236190 - RNA, 19 nt, Artificial Sequence
  Description of Artificial Sequence: Synthetic oligonucleotide
aggcuuaaagagaauccuc

SEQ ID NO: 3236191 - RNA, 19 nt, Artificial Sequence
  Description of Artificial Sequence: Synthetic oligonucleotide
caugaugaggcugcuggag

SEQ ID NO: 3236192 - RNA, 19 nt, Artificial Sequence
  Description of Artificial Sequence: Synthetic oligonucleotide
uguccagaguuccgugcag

SEQ ID NO: 3236193 - RNA, 19 nt, Artificial Sequence
  Description of Artificial Sequence: Synthetic oligonucleotide
uagaagcagcccugugagg

SEQ ID NO: 3236194 - RNA, 19 nt, Artificial Sequence
  Description of Artificial Sequence: Synthetic oligonucleotide
ccaggcuuaaagagaaucc

SEQ ID NO: 3236195 - RNA, 19 nt, Artificial Sequence
  Description of Artificial Sequence: Synthetic oligonucleotide
cagcccuuaauagaagcag

SEQ ID NO: 3236196 - RNA, 19 nt, Artificial Sequence
  Description of Artificial Sequence: Synthetic oligonucleotide
uuccgugcaggucggggcc

SEQ ID NO: 3236197 - RNA, 19 nt, Artificial Sequence
  Description of Artificial Sequence: Synthetic oligonucleotide
ucaugaugaggcugcugga

SEQ ID NO: 3236198 - RNA, 19 nt, Artificial Sequence
  Description of Artificial Sequence: Synthetic oligonucleotide
cucgaagggcccuacugug

SEQ ID NO: 3236199 - RNA, 19 nt, Artificial Sequence
  Description of Artificial Sequence: Synthetic oligonucleotide
uccagccccucgaagggcc

SEQ ID NO: 3236200 - RNA, 19 nt, Artificial Sequence
  Description of Artificial Sequence: Synthetic oligonucleotide
gcugcuggagguaacagcc

SEQ ID NO: 3236201 - RNA, 19 nt, Artificial Sequence
  Description of Artificial Sequence: Synthetic oligonucleotide
agagaauccuccagcuccg

SEQ ID NO: 3236202 - RNA, 19 nt, Artificial Sequence
  Description of Artificial Sequence: Synthetic oligonucleotide
ccaagagucagcaguuccg

SEQ ID NO: 3236203 - RNA, 19 nt, Artificial Sequence
  Description of Artificial Sequence: Synthetic oligonucleotide
ucgaagggcccuacuguga

SEQ ID NO: 3236204 - RNA, 19 nt, Artificial Sequence
  Description of Artificial Sequence: Synthetic oligonucleotide
cacaguguccagaguuccg

SEQ ID NO: 3236205 - RNA, 19 nt, Artificial Sequence
  Description of Artificial Sequence: Synthetic oligonucleotide
ggagguaacagccagcccu

SEQ ID NO: 3236206 - RNA, 19 nt, Artificial Sequence
  Description of Artificial Sequence: Synthetic oligonucleotide
gagucagcaguuccggcca

SEQ ID NO: 3236207 - RNA, 19 nt, Artificial Sequence
  Description of Artificial Sequence: Synthetic oligonucleotide
gugagguggacccggcaag

SEQ ID NO: 3236208 - RNA, 19 nt, Artificial Sequence
  Description of Artificial Sequence: Synthetic oligonucleotide
guuccgugcaggucggggc

SEQ ID NO: 3236209 - RNA, 19 nt, Artificial Sequence
  Description of Artificial Sequence: Synthetic oligonucleotide
ucccugcugggucaugaug

SEQ ID NO: 3236210 - RNA, 19 nt, Artificial Sequence
  Description of Artificial Sequence: Synthetic oligonucleotide
agaccaggcuuaaagagaa

SEQ ID NO: 3236211 - RNA, 19 nt, Artificial Sequence
  Description of Artificial Sequence: Synthetic oligonucleotide
uccagaguuccgugcaggu

SEQ ID NO: 3236212 - RNA, 19 nt, Artificial Sequence
  Description of Artificial Sequence: Synthetic oligonucleotide
gaagcagcccugugaggug

SEQ ID NO: 3236213 - RNA, 19 nt, Artificial Sequence
  Description of Artificial Sequence: Synthetic oligonucleotide
uccagcuccggggucaccc

SEQ ID NO: 3236214 - RNA, 19 nt, Artificial Sequence
  Description of Artificial Sequence: Synthetic oligonucleotide
aguuccgugcaggucgggg

SEQ ID NO: 3236215 - RNA, 19 nt, Artificial Sequence
  Description of Artificial Sequence: Synthetic oligonucleotide
accacaguguccagaguuc

SEQ ID NO: 3236216 - RNA, 19 nt, Artificial Sequence
  Description of Artificial Sequence: Synthetic oligonucleotide
cugugauguaaaucaagaa

SEQ ID NO: 3236217 - RNA, 19 nt, Artificial Sequence
  Description of Artificial Sequence: Synthetic oligonucleotide
aauagcuucuugcugauac

SEQ ID NO: 3236218 - RNA, 19 nt, Artificial Sequence
  Description of Artificial Sequence: Synthetic oligonucleotide
caauaaaugacucaacugg

SEQ ID NO: 3236219 - RNA, 19 nt, Artificial Sequence
  Description of Artificial Sequence: Synthetic oligonucleotide
ucuucugagugcaagaugg

SEQ ID NO: 3236220 - RNA, 19 nt, Artificial Sequence
  Description of Artificial Sequence: Synthetic oligonucleotide
uuaaacuaucuucugagug

SEQ ID NO: 3236221 - RNA, 19 nt, Artificial Sequence
  Description of Artificial Sequence: Synthetic oligonucleotide
auugccauuuuccuuaaac

SEQ ID NO: 3236222 - RNA, 19 nt, Artificial Sequence
  Description of Artificial Sequence: Synthetic oligonucleotide
uucaauaaaugacucaacu

SEQ ID NO: 3236223 - RNA, 19 nt, Artificial Sequence
  Description of Artificial Sequence: Synthetic oligonucleotide
uguguuguuauuauugcca

SEQ ID NO: 3236224 - RNA, 19 nt, Artificial Sequence
  Description of Artificial Sequence: Synthetic oligonucleotide
uuuccuuaaacuaucuucu

SEQ ID NO: 3236225 - RNA, 19 nt, Artificial Sequence
  Description of Artificial Sequence: Synthetic oligonucleotide
uuuuccuuaaacuaucuuc

SEQ ID NO: 3236226 - RNA, 19 nt, Artificial Sequence
  Description of Artificial Sequence: Synthetic oligonucleotide
uaaaugacucaacuggucc

SEQ ID NO: 3236227 - RNA, 19 nt, Artificial Sequence
  Description of Artificial Sequence: Synthetic oligonucleotide
ucaacauucuucugaauag

SEQ ID NO: 3236228 - RNA, 19 nt, Artificial Sequence
  Description of Artificial Sequence: Synthetic oligonucleotide
uaaacuaucuucugagugc

SEQ ID NO: 3236229 - RNA, 19 nt, Artificial Sequence
  Description of Artificial Sequence: Synthetic oligonucleotide
ucaauaaaugacucaacug

SEQ ID NO: 3236230 - RNA, 19 nt, Artificial Sequence
  Description of Artificial Sequence: Synthetic oligonucleotide
agcugcuugacccagcagc

SEQ ID NO: 3236231 - RNA, 19 nt, Artificial Sequence
  Description of Artificial Sequence: Synthetic oligonucleotide
guuauuauugccauuuucc

SEQ ID NO: 3236232 - RNA, 19 nt, Artificial Sequence
  Description of Artificial Sequence: Synthetic oligonucleotide
ugcuacuucaauaaaugac

SEQ ID NO: 3236233 - RNA, 19 nt, Artificial Sequence
  Description of Artificial Sequence: Synthetic oligonucleotide
uucaacauucuucugaaua

SEQ ID NO: 3236234 - RNA, 19 nt, Artificial Sequence
  Description of Artificial Sequence: Synthetic oligonucleotide
uuuuguagcugcuacuuca

SEQ ID NO: 3236235 - RNA, 19 nt, Artificial Sequence
  Description of Artificial Sequence: Synthetic oligonucleotide
gauguguuguuauuauugc

SEQ ID NO: 3236236 - RNA, 19 nt, Artificial Sequence
  Description of Artificial Sequence: Synthetic oligonucleotide
auguguuguuauuauugcc

SEQ ID NO: 3236237 - RNA, 19 nt, Artificial Sequence
  Description of Artificial Sequence: Synthetic oligonucleotide
auuauugccauuuuccuua

SEQ ID NO: 3236238 - RNA, 19 nt, Artificial Sequence
  Description of Artificial Sequence: Synthetic oligonucleotide
uucuugcugauacugaaga

SEQ ID NO: 3236239 - RNA, 19 nt, Artificial Sequence
  Description of Artificial Sequence: Synthetic oligonucleotide
uuauuauugccauuuuccu

SEQ ID NO: 3236240 - RNA, 19 nt, Artificial Sequence
  Description of Artificial Sequence: Synthetic oligonucleotide
uugcugauacugaagaugu

SEQ ID NO: 3236241 - RNA, 19 nt, Artificial Sequence
  Description of Artificial Sequence: Synthetic oligonucleotide
guuucgagcugcuugaccc

SEQ ID NO: 3236242 - RNA, 19 nt, Artificial Sequence
  Description of Artificial Sequence: Synthetic oligonucleotide
ucugaauagcuucuugcug

SEQ ID NO: 3236243 - RNA, 19 nt, Artificial Sequence
  Description of Artificial Sequence: Synthetic oligonucleotide
cuucugaauagcuucuugc

SEQ ID NO: 3236244 - RNA, 19 nt, Artificial Sequence
  Description of Artificial Sequence: Synthetic oligonucleotide
cauucuucugaauagcuuc

SEQ ID NO: 3236245 - RNA, 19 nt, Artificial Sequence
  Description of Artificial Sequence: Synthetic oligonucleotide
aaaugacucaacugguccu

SEQ ID NO: 3236246 - RNA, 19 nt, Artificial Sequence
  Description of Artificial Sequence: Synthetic oligonucleotide
aauaaaugacucaacuggu

SEQ ID NO: 3236247 - RNA, 19 nt, Artificial Sequence
  Description of Artificial Sequence: Synthetic oligonucleotide
uguuauuauugccauuuuc

SEQ ID NO: 3236248 - RNA, 19 nt, Artificial Sequence
  Description of Artificial Sequence: Synthetic oligonucleotide
ugcuugacccagcagcucg

SEQ ID NO: 3236249 - RNA, 19 nt, Artificial Sequence
  Description of Artificial Sequence: Synthetic oligonucleotide
ugacuguucaacauucuuc

SEQ ID NO: 3236250 - RNA, 19 nt, Artificial Sequence
  Description of Artificial Sequence: Synthetic oligonucleotide
uccuuaaacuaucuucuga

SEQ ID NO: 3236251 - RNA, 19 nt, Artificial Sequence
  Description of Artificial Sequence: Synthetic oligonucleotide
agauguguuguuauuauug

SEQ ID NO: 3236252 - RNA, 19 nt, Artificial Sequence
  Description of Artificial Sequence: Synthetic oligonucleotide
uucugaauagcuucuugcu

SEQ ID NO: 3236253 - RNA, 19 nt, Artificial Sequence
  Description of Artificial Sequence: Synthetic oligonucleotide
uguucaacauucuucugaa

SEQ ID NO: 3236254 - RNA, 19 nt, Artificial Sequence
  Description of Artificial Sequence: Synthetic oligonucleotide
ugauacugaagauguguug

SEQ ID NO: 3236255 - RNA, 19 nt, Artificial Sequence
  Description of Artificial Sequence: Synthetic oligonucleotide
acuucaauaaaugacucaa

SEQ ID NO: 3236256 - RNA, 19 nt, Artificial Sequence
  Description of Artificial Sequence: Synthetic oligonucleotide
uugccauuuuccuuaaacu

SEQ ID NO: 3236257 - RNA, 19 nt, Artificial Sequence
  Description of Artificial Sequence: Synthetic oligonucleotide
auggcauccuccuguagac

SEQ ID NO: 3236258 - RNA, 19 nt, Artificial Sequence
  Description of Artificial Sequence: Synthetic oligonucleotide
ucuucugaauagcuucuug

SEQ ID NO: 3236259 - RNA, 19 nt, Artificial Sequence
  Description of Artificial Sequence: Synthetic oligonucleotide
ucugagugcaagauggcau

SEQ ID NO: 3236260 - RNA, 19 nt, Artificial Sequence
  Description of Artificial Sequence: Synthetic oligonucleotide
cuguagaccauguuucgag

SEQ ID NO: 3236261 - RNA, 19 nt, Artificial Sequence
  Description of Artificial Sequence: Synthetic oligonucleotide
aaacuaucuucugagugca

SEQ ID NO: 3236262 - RNA, 19 nt, Artificial Sequence
  Description of Artificial Sequence: Synthetic oligonucleotide
acucaacugguccugcagg

SEQ ID NO: 3236263 - RNA, 19 nt, Artificial Sequence
  Description of Artificial Sequence: Synthetic oligonucleotide
cuugcugauacugaagaug

SEQ ID NO: 3236264 - RNA, 19 nt, Artificial Sequence
  Description of Artificial Sequence: Synthetic oligonucleotide
ugccauuuuccuuaaacua

SEQ ID NO: 3236265 - RNA, 19 nt, Artificial Sequence
  Description of Artificial Sequence: Synthetic oligonucleotide
uacuucaauaaaugacuca

SEQ ID NO: 3236266 - RNA, 19 nt, Artificial Sequence
  Description of Artificial Sequence: Synthetic oligonucleotide
cugaauagcuucuugcuga

SEQ ID NO: 3236267 - RNA, 19 nt, Artificial Sequence
  Description of Artificial Sequence: Synthetic oligonucleotide
auaaaugacucaacugguc

SEQ ID NO: 3236268 - RNA, 19 nt, Artificial Sequence
  Description of Artificial Sequence: Synthetic oligonucleotide
agugcaagauggcauccuc

SEQ ID NO: 3236269 - RNA, 19 nt, Artificial Sequence
  Description of Artificial Sequence: Synthetic oligonucleotide
gauggcauccuccuguaga

SEQ ID NO: 3236270 - RNA, 19 nt, Artificial Sequence
  Description of Artificial Sequence: Synthetic oligonucleotide
aaugacucaacugguccug

SEQ ID NO: 3236271 - RNA, 19 nt, Artificial Sequence
  Description of Artificial Sequence: Synthetic oligonucleotide
uguagaccauguuucgagc

SEQ ID NO: 3236272 - RNA, 19 nt, Artificial Sequence
  Description of Artificial Sequence: Synthetic oligonucleotide
uguagcugcuacuucaaua

SEQ ID NO: 3236273 - RNA, 19 nt, Artificial Sequence
  Description of Artificial Sequence: Synthetic oligonucleotide
ccuuaaacuaucuucugag

SEQ ID NO: 3236274 - RNA, 19 nt, Artificial Sequence
  Description of Artificial Sequence: Synthetic oligonucleotide
aacauucuucugaauagcu

SEQ ID NO: 3236275 - RNA, 19 nt, Artificial Sequence
  Description of Artificial Sequence: Synthetic oligonucleotide
uccuguagaccauguuucg

SEQ ID NO: 3236276 - RNA, 19 nt, Artificial Sequence
  Description of Artificial Sequence: Synthetic oligonucleotide
uauuauugccauuuuccuu

SEQ ID NO: 3236277 - RNA, 19 nt, Artificial Sequence
  Description of Artificial Sequence: Synthetic oligonucleotide
guagcugcuacuucaauaa

SEQ ID NO: 3236278 - RNA, 19 nt, Artificial Sequence
  Description of Artificial Sequence: Synthetic oligonucleotide
acuaucuucugagugcaag

SEQ ID NO: 3236279 - RNA, 19 nt, Artificial Sequence
  Description of Artificial Sequence: Synthetic oligonucleotide
cuacuucaauaaaugacuc

SEQ ID NO: 3236280 - RNA, 19 nt, Artificial Sequence
  Description of Artificial Sequence: Synthetic oligonucleotide
ugcaagauggcauccuccu

SEQ ID NO: 3236281 - RNA, 19 nt, Artificial Sequence
  Description of Artificial Sequence: Synthetic oligonucleotide
agaccauguuucgagcugc

SEQ ID NO: 3236282 - RNA, 19 nt, Artificial Sequence
  Description of Artificial Sequence: Synthetic oligonucleotide
uagaccauguuucgagcug

SEQ ID NO: 3236283 - RNA, 19 nt, Artificial Sequence
  Description of Artificial Sequence: Synthetic oligonucleotide
cuucaauaaaugacucaac

SEQ ID NO: 3236284 - RNA, 19 nt, Artificial Sequence
  Description of Artificial Sequence: Synthetic oligonucleotide
ugaagauguguuguuauua

SEQ ID NO: 3236285 - RNA, 19 nt, Artificial Sequence
  Description of Artificial Sequence: Synthetic oligonucleotide
acugaagauguguuguuau

SEQ ID NO: 3236286 - RNA, 19 nt, Artificial Sequence
  Description of Artificial Sequence: Synthetic oligonucleotide
cuccuguagaccauguuuc

SEQ ID NO: 3236287 - RNA, 19 nt, Artificial Sequence
  Description of Artificial Sequence: Synthetic oligonucleotide
gacuguucaacauucuucu

SEQ ID NO: 3236288 - RNA, 19 nt, Artificial Sequence
  Description of Artificial Sequence: Synthetic oligonucleotide
uguuucgagcugcuugacc

SEQ ID NO: 3236289 - RNA, 19 nt, Artificial Sequence
  Description of Artificial Sequence: Synthetic oligonucleotide
gauacugaagauguguugu

SEQ ID NO: 3236290 - RNA, 19 nt, Artificial Sequence
  Description of Artificial Sequence: Synthetic oligonucleotide
gacucaacugguccugcag

SEQ ID NO: 3236291 - RNA, 19 nt, Artificial Sequence
  Description of Artificial Sequence: Synthetic oligonucleotide
aagauguguuguuauuauu

SEQ ID NO: 3236292 - RNA, 19 nt, Artificial Sequence
  Description of Artificial Sequence: Synthetic oligonucleotide
uuuguagcugcuacuucaa

SEQ ID NO: 3236293 - RNA, 19 nt, Artificial Sequence
  Description of Artificial Sequence: Synthetic oligonucleotide
cuucuugcugauacugaag

SEQ ID NO: 3236294 - RNA, 19 nt, Artificial Sequence
  Description of Artificial Sequence: Synthetic oligonucleotide
uuccuuaaacuaucuucug

SEQ ID NO: 3236295 - RNA, 19 nt, Artificial Sequence
  Description of Artificial Sequence: Synthetic oligonucleotide
cuguucaacauucuucuga

SEQ ID NO: 3236296 - RNA, 19 nt, Artificial Sequence
  Description of Artificial Sequence: Synthetic oligonucleotide
aucuucugagugcaagaug

SEQ ID NO: 3236297 - RNA, 19 nt, Artificial Sequence
  Description of Artificial Sequence: Synthetic oligonucleotide
uagcuucuugcugauacug

SEQ ID NO: 3236298 - RNA, 19 nt, Artificial Sequence
  Description of Artificial Sequence: Synthetic oligonucleotide
ucaggugacuguucaacau

SEQ ID NO: 3236299 - RNA, 19 nt, Artificial Sequence
  Description of Artificial Sequence: Synthetic oligonucleotide
caacauucuucugaauagc

SEQ ID NO: 3236300 - RNA, 19 nt, Artificial Sequence
  Description of Artificial Sequence: Synthetic oligonucleotide
aggugacuguucaacauuc

SEQ ID NO: 3236301 - RNA, 19 nt, Artificial Sequence
  Description of Artificial Sequence: Synthetic oligonucleotide
cauguuucgagcugcuuga

SEQ ID NO: 3236302 - RNA, 19 nt, Artificial Sequence
  Description of Artificial Sequence: Synthetic oligonucleotide
uucugagugcaagauggca

SEQ ID NO: 3236303 - RNA, 19 nt, Artificial Sequence
  Description of Artificial Sequence: Synthetic oligonucleotide
cugagugcaagauggcauc

SEQ ID NO: 3236304 - RNA, 19 nt, Artificial Sequence
  Description of Artificial Sequence: Synthetic oligonucleotide
auuuuccuuaaacuaucuu

SEQ ID NO: 3236305 - RNA, 19 nt, Artificial Sequence
  Description of Artificial Sequence: Synthetic oligonucleotide
uaucuucugagugcaagau

SEQ ID NO: 3236306 - RNA, 19 nt, Artificial Sequence
  Description of Artificial Sequence: Synthetic oligonucleotide
gcugcuacuucaauaaaug

SEQ ID NO: 3236307 - RNA, 19 nt, Artificial Sequence
  Description of Artificial Sequence: Synthetic oligonucleotide
auagcuucuugcugauacu

SEQ ID NO: 3236308 - RNA, 19 nt, Artificial Sequence
  Description of Artificial Sequence: Synthetic oligonucleotide
gaagauguguuguuauuau

SEQ ID NO: 3236309 - RNA, 19 nt, Artificial Sequence
  Description of Artificial Sequence: Synthetic oligonucleotide
ucuugcugauacugaagau

SEQ ID NO: 3236310 - RNA, 19 nt, Artificial Sequence
  Description of Artificial Sequence: Synthetic oligonucleotide
cuaucuucugagugcaaga

SEQ ID NO: 3236311 - RNA, 19 nt, Artificial Sequence
  Description of Artificial Sequence: Synthetic oligonucleotide
ugaauagcuucuugcugau

SEQ ID NO: 3236312 - RNA, 19 nt, Artificial Sequence
  Description of Artificial Sequence: Synthetic oligonucleotide
cuucugagugcaagauggc

SEQ ID NO: 3236313 - RNA, 19 nt, Artificial Sequence
  Description of Artificial Sequence: Synthetic oligonucleotide
acuguucaacauucuucug

SEQ ID NO: 3236314 - RNA, 19 nt, Artificial Sequence
  Description of Artificial Sequence: Synthetic oligonucleotide
guuguuauuauugccauuu

SEQ ID NO: 3236315 - RNA, 19 nt, Artificial Sequence
  Description of Artificial Sequence: Synthetic oligonucleotide
ugagugcaagauggcaucc

SEQ ID NO: 3236316 - RNA, 19 nt, Artificial Sequence
  Description of Artificial Sequence: Synthetic oligonucleotide
augacucaacugguccugc

SEQ ID NO: 3236317 - RNA, 19 nt, Artificial Sequence
  Description of Artificial Sequence: Synthetic oligonucleotide
aaugauggaaaacagagag

SEQ ID NO: 3236318 - RNA, 19 nt, Artificial Sequence
  Description of Artificial Sequence: Synthetic oligonucleotide
aguaugaaaagccagaaag

SEQ ID NO: 3236319 - RNA, 19 nt, Artificial Sequence
  Description of Artificial Sequence: Synthetic oligonucleotide
ugaaaagccagaaagguag

SEQ ID NO: 3236320 - RNA, 19 nt, Artificial Sequence
  Description of Artificial Sequence: Synthetic oligonucleotide
aaaaugauggaaaacagag

SEQ ID NO: 3236321 - RNA, 19 nt, Artificial Sequence
  Description of Artificial Sequence: Synthetic oligonucleotide
agaaaugaagacuucaggg

SEQ ID NO: 3236322 - RNA, 19 nt, Artificial Sequence
  Description of Artificial Sequence: Synthetic oligonucleotide
ucuacuggaaacaugagug

SEQ ID NO: 3236323 - RNA, 19 nt, Artificial Sequence
  Description of Artificial Sequence: Synthetic oligonucleotide
aauaauguagccucauaag

SEQ ID NO: 3236324 - RNA, 19 nt, Artificial Sequence
  Description of Artificial Sequence: Synthetic oligonucleotide
auggaaaacagagagaagc

SEQ ID NO: 3236325 - RNA, 19 nt, Artificial Sequence
  Description of Artificial Sequence: Synthetic oligonucleotide
uuuucuacuggaaacauga

SEQ ID NO: 3236326 - RNA, 19 nt, Artificial Sequence
  Description of Artificial Sequence: Synthetic oligonucleotide
aagccagaaagguagacac

SEQ ID NO: 3236327 - RNA, 19 nt, Artificial Sequence
  Description of Artificial Sequence: Synthetic oligonucleotide
aaauaauguagccucauaa

SEQ ID NO: 3236328 - RNA, 19 nt, Artificial Sequence
  Description of Artificial Sequence: Synthetic oligonucleotide
aaaaucauggagccacugg

SEQ ID NO: 3236329 - RNA, 19 nt, Artificial Sequence
  Description of Artificial Sequence: Synthetic oligonucleotide
aacagagagaagcuauucg

SEQ ID NO: 3236330 - RNA, 19 nt, Artificial Sequence
  Description of Artificial Sequence: Synthetic oligonucleotide
aauguagccucauaagaug

SEQ ID NO: 3236331 - RNA, 19 nt, Artificial Sequence
  Description of Artificial Sequence: Synthetic oligonucleotide
aguaucagaauguucuggg

SEQ ID NO: 3236332 - RNA, 19 nt, Artificial Sequence
  Description of Artificial Sequence: Synthetic oligonucleotide
aaaucauggagccacugga

SEQ ID NO: 3236333 - RNA, 19 nt, Artificial Sequence
  Description of Artificial Sequence: Synthetic oligonucleotide
aaagguagacacaaguauc

SEQ ID NO: 3236334 - RNA, 19 nt, Artificial Sequence
  Description of Artificial Sequence: Synthetic oligonucleotide
accaauuaugauuauauaa

SEQ ID NO: 3236335 - RNA, 19 nt, Artificial Sequence
  Description of Artificial Sequence: Synthetic oligonucleotide
agacacaaguaucagaaug

SEQ ID NO: 3236336 - RNA, 19 nt, Artificial Sequence
  Description of Artificial Sequence: Synthetic oligonucleotide
auaauguagccucauaaga

SEQ ID NO: 3236337 - RNA, 19 nt, Artificial Sequence
  Description of Artificial Sequence: Synthetic oligonucleotide
uaucagaauguucugggug

SEQ ID NO: 3236338 - RNA, 19 nt, Artificial Sequence
  Description of Artificial Sequence: Synthetic oligonucleotide
auugguguucaccagccac

SEQ ID NO: 3236339 - RNA, 19 nt, Artificial Sequence
  Description of Artificial Sequence: Synthetic oligonucleotide
acaaguaucagaauguucu

SEQ ID NO: 3236340 - RNA, 19 nt, Artificial Sequence
  Description of Artificial Sequence: Synthetic oligonucleotide
ugauggaaaacagagagaa

SEQ ID NO: 3236341 - RNA, 19 nt, Artificial Sequence
  Description of Artificial Sequence: Synthetic oligonucleotide
gagauuuucuacuggaaac

SEQ ID NO: 3236342 - RNA, 19 nt, Artificial Sequence
  Description of Artificial Sequence: Synthetic oligonucleotide
gagagaagcuauucgauug

SEQ ID NO: 3236343 - RNA, 19 nt, Artificial Sequence
  Description of Artificial Sequence: Synthetic oligonucleotide
uaugaaaagccagaaaggu

SEQ ID NO: 3236344 - RNA, 19 nt, Artificial Sequence
  Description of Artificial Sequence: Synthetic oligonucleotide
aucauggagccacuggacc

SEQ ID NO: 3236345 - RNA, 19 nt, Artificial Sequence
  Description of Artificial Sequence: Synthetic oligonucleotide
aagagcacagaaaugaaga

SEQ ID NO: 3236346 - RNA, 19 nt, Artificial Sequence
  Description of Artificial Sequence: Synthetic oligonucleotide
aaguaucagaauguucugg

SEQ ID NO: 3236347 - RNA, 19 nt, Artificial Sequence
  Description of Artificial Sequence: Synthetic oligonucleotide
uaauguagccucauaagau

SEQ ID NO: 3236348 - RNA, 19 nt, Artificial Sequence
  Description of Artificial Sequence: Synthetic oligonucleotide
ugacucuggauucaggaga

SEQ ID NO: 3236349 - RNA, 19 nt, Artificial Sequence
  Description of Artificial Sequence: Synthetic oligonucleotide
gauguguugaacccucugc

SEQ ID NO: 3236350 - RNA, 19 nt, Artificial Sequence
  Description of Artificial Sequence: Synthetic oligonucleotide
cauaagauggaggagggag

SEQ ID NO: 3236351 - RNA, 19 nt, Artificial Sequence
  Description of Artificial Sequence: Synthetic oligonucleotide
agagcacagaaaugaagac

SEQ ID NO: 3236352 - RNA, 19 nt, Artificial Sequence
  Description of Artificial Sequence: Synthetic oligonucleotide
ucaccagccaccaauuaug

SEQ ID NO: 3236353 - RNA, 19 nt, Artificial Sequence
  Description of Artificial Sequence: Synthetic oligonucleotide
aaacagagagaagcuauuc

SEQ ID NO: 3236354 - RNA, 19 nt, Artificial Sequence
  Description of Artificial Sequence: Synthetic oligonucleotide
ucaggagauuuucuacugg

SEQ ID NO: 3236355 - RNA, 19 nt, Artificial Sequence
  Description of Artificial Sequence: Synthetic oligonucleotide
gauucaggagauuuucuac

SEQ ID NO: 3236356 - RNA, 19 nt, Artificial Sequence
  Description of Artificial Sequence: Synthetic oligonucleotide
guaugaaaagccagaaagg

SEQ ID NO: 3236357 - RNA, 19 nt, Artificial Sequence
  Description of Artificial Sequence: Synthetic oligonucleotide
uucuacuggaaacaugagu

SEQ ID NO: 3236358 - RNA, 19 nt, Artificial Sequence
  Description of Artificial Sequence: Synthetic oligonucleotide
acagagagaagcuauucga

SEQ ID NO: 3236359 - RNA, 19 nt, Artificial Sequence
  Description of Artificial Sequence: Synthetic oligonucleotide
aaaagccagaaagguagac

SEQ ID NO: 3236360 - RNA, 19 nt, Artificial Sequence
  Description of Artificial Sequence: Synthetic oligonucleotide
cagaaaugaagacuucagg

SEQ ID NO: 3236361 - RNA, 19 nt, Artificial Sequence
  Description of Artificial Sequence: Synthetic oligonucleotide
agagaagcuauucgauugg

SEQ ID NO: 3236362 - RNA, 19 nt, Artificial Sequence
  Description of Artificial Sequence: Synthetic oligonucleotide
auucgauugguguucacca

SEQ ID NO: 3236363 - RNA, 19 nt, Artificial Sequence
  Description of Artificial Sequence: Synthetic oligonucleotide
acaccaagagcacagaaau

SEQ ID NO: 3236364 - RNA, 19 nt, Artificial Sequence
  Description of Artificial Sequence: Synthetic oligonucleotide
ucugcuugugucuguacag

SEQ ID NO: 3236365 - RNA, 19 nt, Artificial Sequence
  Description of Artificial Sequence: Synthetic oligonucleotide
uggaaaacagagagaagcu

SEQ ID NO: 3236366 - RNA, 19 nt, Artificial Sequence
  Description of Artificial Sequence: Synthetic oligonucleotide
accaagagcacagaaauga

SEQ ID NO: 3236367 - RNA, 19 nt, Artificial Sequence
  Description of Artificial Sequence: Synthetic oligonucleotide
cucauaagauggaggaggg

SEQ ID NO: 3236368 - RNA, 19 nt, Artificial Sequence
  Description of Artificial Sequence: Synthetic oligonucleotide
agaauguucugggugacuc

SEQ ID NO: 3236369 - RNA, 19 nt, Artificial Sequence
  Description of Artificial Sequence: Synthetic oligonucleotide
auucaggagauuuucuacu

SEQ ID NO: 3236370 - RNA, 19 nt, Artificial Sequence
  Description of Artificial Sequence: Synthetic oligonucleotide
aucagaauguucuggguga

SEQ ID NO: 3236371 - RNA, 19 nt, Artificial Sequence
  Description of Artificial Sequence: Synthetic oligonucleotide
aaucauggagccacuggac

SEQ ID NO: 3236372 - RNA, 19 nt, Artificial Sequence
  Description of Artificial Sequence: Synthetic oligonucleotide
uauucgauugguguucacc

SEQ ID NO: 3236373 - RNA, 19 nt, Artificial Sequence
  Description of Artificial Sequence: Synthetic oligonucleotide
gaaacaugagugcugcuga

SEQ ID NO: 3236374 - RNA, 19 nt, Artificial Sequence
  Description of Artificial Sequence: Synthetic oligonucleotide
aagguagacacaaguauca

SEQ ID NO: 3236375 - RNA, 19 nt, Artificial Sequence
  Description of Artificial Sequence: Synthetic oligonucleotide
aaaauaauguagccucaua

SEQ ID NO: 3236376 - RNA, 19 nt, Artificial Sequence
  Description of Artificial Sequence: Synthetic oligonucleotide
uucaggagauuuucuacug

SEQ ID NO: 3236377 - RNA, 19 nt, Artificial Sequence
  Description of Artificial Sequence: Synthetic oligonucleotide
caagagcacagaaaugaag

SEQ ID NO: 3236378 - RNA, 19 nt, Artificial Sequence
  Description of Artificial Sequence: Synthetic oligonucleotide
gaagcuauucgauuggugu

SEQ ID NO: 3236379 - RNA, 19 nt, Artificial Sequence
  Description of Artificial Sequence: Synthetic oligonucleotide
uagccucauaagauggagg

SEQ ID NO: 3236380 - RNA, 19 nt, Artificial Sequence
  Description of Artificial Sequence: Synthetic oligonucleotide
acaugagugcugcugaugu

SEQ ID NO: 3236381 - RNA, 19 nt, Artificial Sequence
  Description of Artificial Sequence: Synthetic oligonucleotide
aauguucugggugacucug

SEQ ID NO: 3236382 - RNA, 19 nt, Artificial Sequence
  Description of Artificial Sequence: Synthetic oligonucleotide
aggagggaguaugaaaagc

SEQ ID NO: 3236383 - RNA, 19 nt, Artificial Sequence
  Description of Artificial Sequence: Synthetic oligonucleotide
aaagccagaaagguagaca

SEQ ID NO: 3236384 - RNA, 19 nt, Artificial Sequence
  Description of Artificial Sequence: Synthetic oligonucleotide
ucgauugguguucaccagc

SEQ ID NO: 3236385 - RNA, 19 nt, Artificial Sequence
  Description of Artificial Sequence: Synthetic oligonucleotide
agccucauaagauggagga

SEQ ID NO: 3236386 - RNA, 19 nt, Artificial Sequence
  Description of Artificial Sequence: Synthetic oligonucleotide
acuggaccacaccaagagc

SEQ ID NO: 3236387 - RNA, 19 nt, Artificial Sequence
  Description of Artificial Sequence: Synthetic oligonucleotide
uugguguucaccagccacc

SEQ ID NO: 3236388 - RNA, 19 nt, Artificial Sequence
  Description of Artificial Sequence: Synthetic oligonucleotide
guagacacaaguaucagaa

SEQ ID NO: 3236389 - RNA, 19 nt, Artificial Sequence
  Description of Artificial Sequence: Synthetic oligonucleotide
uucugggugacucuggauu

SEQ ID NO: 3236390 - RNA, 19 nt, Artificial Sequence
  Description of Artificial Sequence: Synthetic oligonucleotide
aaaugauggaaaacagaga

SEQ ID NO: 3236391 - RNA, 19 nt, Artificial Sequence
  Description of Artificial Sequence: Synthetic oligonucleotide
gaaagguagacacaaguau

SEQ ID NO: 3236392 - RNA, 19 nt, Artificial Sequence
  Description of Artificial Sequence: Synthetic oligonucleotide
caauuaugauuauauaaaa

SEQ ID NO: 3236393 - RNA, 19 nt, Artificial Sequence
  Description of Artificial Sequence: Synthetic oligonucleotide
auguguugaacccucugcu

SEQ ID NO: 3236394 - RNA, 19 nt, Artificial Sequence
  Description of Artificial Sequence: Synthetic oligonucleotide
cuacuggaaacaugagugc

SEQ ID NO: 3236395 - RNA, 19 nt, Artificial Sequence
  Description of Artificial Sequence: Synthetic oligonucleotide
uuucuacuggaaacaugag

SEQ ID NO: 3236396 - RNA, 19 nt, Artificial Sequence
  Description of Artificial Sequence: Synthetic oligonucleotide
acagaaaugaagacuucag

SEQ ID NO: 3236397 - RNA, 19 nt, Artificial Sequence
  Description of Artificial Sequence: Synthetic oligonucleotide
agauuuucuacuggaaaca

SEQ ID NO: 3236398 - RNA, 19 nt, Artificial Sequence
  Description of Artificial Sequence: Synthetic oligonucleotide
ucauggagccacuggacca

SEQ ID NO: 3236399 - RNA, 19 nt, Artificial Sequence
  Description of Artificial Sequence: Synthetic oligonucleotide
cuggaccacaccaagagca

SEQ ID NO: 3236400 - RNA, 19 nt, Artificial Sequence
  Description of Artificial Sequence: Synthetic oligonucleotide
uucaccagccaccaauuau

SEQ ID NO: 3236401 - RNA, 19 nt, Artificial Sequence
  Description of Artificial Sequence: Synthetic oligonucleotide
cacuggaccacaccaagag

SEQ ID NO: 3236402 - RNA, 19 nt, Artificial Sequence
  Description of Artificial Sequence: Synthetic oligonucleotide
guguugaacccucugcuug

SEQ ID NO: 3236403 - RNA, 19 nt, Artificial Sequence
  Description of Artificial Sequence: Synthetic oligonucleotide
auguagccucauaagaugg

SEQ ID NO: 3236404 - RNA, 19 nt, Artificial Sequence
  Description of Artificial Sequence: Synthetic oligonucleotide
ugauguguugaacccucug

SEQ ID NO: 3236405 - RNA, 19 nt, Artificial Sequence
  Description of Artificial Sequence: Synthetic oligonucleotide
gcugcugauguguugaacc

SEQ ID NO: 3236406 - RNA, 19 nt, Artificial Sequence
  Description of Artificial Sequence: Synthetic oligonucleotide
agcuauucgauugguguuc

SEQ ID NO: 3236407 - RNA, 19 nt, Artificial Sequence
  Description of Artificial Sequence: Synthetic oligonucleotide
aagcuauucgauugguguu

SEQ ID NO: 3236408 - RNA, 19 nt, Artificial Sequence
  Description of Artificial Sequence: Synthetic oligonucleotide
uguagccucauaagaugga

SEQ ID NO: 3236409 - RNA, 19 nt, Artificial Sequence
  Description of Artificial Sequence: Synthetic oligonucleotide
gaggagggaguaugaaaag

SEQ ID NO: 3236410 - RNA, 19 nt, Artificial Sequence
  Description of Artificial Sequence: Synthetic oligonucleotide
uucgauugguguucaccag

SEQ ID NO: 3236411 - RNA, 19 nt, Artificial Sequence
  Description of Artificial Sequence: Synthetic oligonucleotide
agcacagaaaugaagacuu

SEQ ID NO: 3236412 - RNA, 19 nt, Artificial Sequence
  Description of Artificial Sequence: Synthetic oligonucleotide
uguucugggugacucugga

SEQ ID NO: 3236413 - RNA, 19 nt, Artificial Sequence
  Description of Artificial Sequence: Synthetic oligonucleotide
cuggaaacaugagugcugc

SEQ ID NO: 3236414 - RNA, 19 nt, Artificial Sequence
  Description of Artificial Sequence: Synthetic oligonucleotide
uguugaacccucugcuugu

SEQ ID NO: 3236415 - RNA, 19 nt, Artificial Sequence
  Description of Artificial Sequence: Synthetic oligonucleotide
uggauucaggagauuuucu

SEQ ID NO: 3236416 - RNA, 19 nt, Artificial Sequence
  Description of Artificial Sequence: Synthetic oligonucleotide
ccaauuaugauuauauaaa

SEQ ID NO: 3236417 - RNA, 19 nt, Artificial Sequence
  Description of Artificial Sequence: Synthetic oligonucleotide
aaaggauaaacucucuggc

SEQ ID NO: 3236418 - RNA, 19 nt, Artificial Sequence
  Description of Artificial Sequence: Synthetic oligonucleotide
aaaaggauaaacucucugg

SEQ ID NO: 3236419 - RNA, 19 nt, Artificial Sequence
  Description of Artificial Sequence: Synthetic oligonucleotide
uuucuuauuaagaagagcu

SEQ ID NO: 3236420 - RNA, 19 nt, Artificial Sequence
  Description of Artificial Sequence: Synthetic oligonucleotide
aaagagauucugcagauag

SEQ ID NO: 3236421 - RNA, 19 nt, Artificial Sequence
  Description of Artificial Sequence: Synthetic oligonucleotide
aaugcaucaaugcuggagg

SEQ ID NO: 3236422 - RNA, 19 nt, Artificial Sequence
  Description of Artificial Sequence: Synthetic oligonucleotide
uagguuaugacucagugcc

SEQ ID NO: 3236423 - RNA, 19 nt, Artificial Sequence
  Description of Artificial Sequence: Synthetic oligonucleotide
aguaucaagaaagagauuc

SEQ ID NO: 3236424 - RNA, 19 nt, Artificial Sequence
  Description of Artificial Sequence: Synthetic oligonucleotide
aguaaaugcaaguagcaac

SEQ ID NO: 3236425 - RNA, 19 nt, Artificial Sequence
  Description of Artificial Sequence: Synthetic oligonucleotide
acugauuggagcuugugcc

SEQ ID NO: 3236426 - RNA, 19 nt, Artificial Sequence
  Description of Artificial Sequence: Synthetic oligonucleotide
uucauuagcuuucuggugg

SEQ ID NO: 3236427 - RNA, 19 nt, Artificial Sequence
  Description of Artificial Sequence: Synthetic oligonucleotide
acugaggaaauguucaucc

SEQ ID NO: 3236428 - RNA, 19 nt, Artificial Sequence
  Description of Artificial Sequence: Synthetic oligonucleotide
uguuucauuagcuuucugg

SEQ ID NO: 3236429 - RNA, 19 nt, Artificial Sequence
  Description of Artificial Sequence: Synthetic oligonucleotide
aauccggggccuuagauac

SEQ ID NO: 3236430 - RNA, 19 nt, Artificial Sequence
  Description of Artificial Sequence: Synthetic oligonucleotide
uguaguaaaugcaaguagc

SEQ ID NO: 3236431 - RNA, 19 nt, Artificial Sequence
  Description of Artificial Sequence: Synthetic oligonucleotide
aaugcaaguagcaacuggc

SEQ ID NO: 3236432 - RNA, 19 nt, Artificial Sequence
  Description of Artificial Sequence: Synthetic oligonucleotide
uuaaagaaugcaucaaugc

SEQ ID NO: 3236433 - RNA, 19 nt, Artificial Sequence
  Description of Artificial Sequence: Synthetic oligonucleotide
auuaagaagagcuauugca

SEQ ID NO: 3236434 - RNA, 19 nt, Artificial Sequence
  Description of Artificial Sequence: Synthetic oligonucleotide
aauagguuaugacucagug

SEQ ID NO: 3236435 - RNA, 19 nt, Artificial Sequence
  Description of Artificial Sequence: Synthetic oligonucleotide
aaucauucccaguaauccg

SEQ ID NO: 3236436 - RNA, 19 nt, Artificial Sequence
  Description of Artificial Sequence: Synthetic oligonucleotide
aagaaagagauucugcaga

SEQ ID NO: 3236437 - RNA, 19 nt, Artificial Sequence
  Description of Artificial Sequence: Synthetic oligonucleotide
aaagagaucuuucuuauua

SEQ ID NO: 3236438 - RNA, 19 nt, Artificial Sequence
  Description of Artificial Sequence: Synthetic oligonucleotide
ugcugcaguaucaagaaag

SEQ ID NO: 3236439 - RNA, 19 nt, Artificial Sequence
  Description of Artificial Sequence: Synthetic oligonucleotide
ugcaguaucaagaaagaga

SEQ ID NO: 3236440 - RNA, 19 nt, Artificial Sequence
  Description of Artificial Sequence: Synthetic oligonucleotide
aaaugcaaguagcaacugg

SEQ ID NO: 3236441 - RNA, 19 nt, Artificial Sequence
  Description of Artificial Sequence: Synthetic oligonucleotide
uaaagaaugcaucaaugcu

SEQ ID NO: 3236442 - RNA, 19 nt, Artificial Sequence
  Description of Artificial Sequence: Synthetic oligonucleotide
gaaauguucauccagccca

SEQ ID NO: 3236443 - RNA, 19 nt, Artificial Sequence
  Description of Artificial Sequence: Synthetic oligonucleotide
aggauaaacucucuggcac

SEQ ID NO: 3236444 - RNA, 19 nt, Artificial Sequence
  Description of Artificial Sequence: Synthetic oligonucleotide
ucaagaaagagauucugca

SEQ ID NO: 3236445 - RNA, 19 nt, Artificial Sequence
  Description of Artificial Sequence: Synthetic oligonucleotide
aaagaaugcaucaaugcug

SEQ ID NO: 3236446 - RNA, 19 nt, Artificial Sequence
  Description of Artificial Sequence: Synthetic oligonucleotide
aaagcaagaacagaaguga

SEQ ID NO: 3236447 - RNA, 19 nt, Artificial Sequence
  Description of Artificial Sequence: Synthetic oligonucleotide
auagguuaugacucagugc

SEQ ID NO: 3236448 - RNA, 19 nt, Artificial Sequence
  Description of Artificial Sequence: Synthetic oligonucleotide
gauggaauguuucauuagc

SEQ ID NO: 3236449 - RNA, 19 nt, Artificial Sequence
  Description of Artificial Sequence: Synthetic oligonucleotide
ucaggaauagguuaugacu

SEQ ID NO: 3236450 - RNA, 19 nt, Artificial Sequence
  Description of Artificial Sequence: Synthetic oligonucleotide
aagaaugcaucaaugcugg

SEQ ID NO: 3236451 - RNA, 19 nt, Artificial Sequence
  Description of Artificial Sequence: Synthetic oligonucleotide
agauucugcagauaguaag

SEQ ID NO: 3236452 - RNA, 19 nt, Artificial Sequence
  Description of Artificial Sequence: Synthetic oligonucleotide
cuuagauacauaugguccc

SEQ ID NO: 3236453 - RNA, 19 nt, Artificial Sequence
  Description of Artificial Sequence: Synthetic oligonucleotide
agugaucacugauuggagc

SEQ ID NO: 3236454 - RNA, 19 nt, Artificial Sequence
  Description of Artificial Sequence: Synthetic oligonucleotide
ugaggaaaaggauaaacuc

SEQ ID NO: 3236455 - RNA, 19 nt, Artificial Sequence
  Description of Artificial Sequence: Synthetic oligonucleotide
uuuucaaagagaucuuucu

SEQ ID NO: 3236456 - RNA, 19 nt, Artificial Sequence
  Description of Artificial Sequence: Synthetic oligonucleotide
gaucuuucuuauuaagaag

SEQ ID NO: 3236457 - RNA, 19 nt, Artificial Sequence
  Description of Artificial Sequence: Synthetic oligonucleotide
uauuaagaagagcuauugc

SEQ ID NO: 3236458 - RNA, 19 nt, Artificial Sequence
  Description of Artificial Sequence: Synthetic oligonucleotide
gauguucuggcucaggaug

SEQ ID NO: 3236459 - RNA, 19 nt, Artificial Sequence
  Description of Artificial Sequence: Synthetic oligonucleotide
uuaagaagagcuauugcau

SEQ ID NO: 3236460 - RNA, 19 nt, Artificial Sequence
  Description of Artificial Sequence: Synthetic oligonucleotide
uuauuaagaagagcuauug

SEQ ID NO: 3236461 - RNA, 19 nt, Artificial Sequence
  Description of Artificial Sequence: Synthetic oligonucleotide
ucuuucuuauuaagaagag

SEQ ID NO: 3236462 - RNA, 19 nt, Artificial Sequence
  Description of Artificial Sequence: Synthetic oligonucleotide
guuuguaugacauucucuc

SEQ ID NO: 3236463 - RNA, 19 nt, Artificial Sequence
  Description of Artificial Sequence: Synthetic oligonucleotide
aggaaauguucauccagcc

SEQ ID NO: 3236464 - RNA, 19 nt, Artificial Sequence
  Description of Artificial Sequence: Synthetic oligonucleotide
ucuuucuguaguaaaugca

SEQ ID NO: 3236465 - RNA, 19 nt, Artificial Sequence
  Description of Artificial Sequence: Synthetic oligonucleotide
aaugcuggaggccaagcca

SEQ ID NO: 3236466 - RNA, 19 nt, Artificial Sequence
  Description of Artificial Sequence: Synthetic oligonucleotide
uauugcaucauuugcugca

SEQ ID NO: 3236467 - RNA, 19 nt, Artificial Sequence
  Description of Artificial Sequence: Synthetic oligonucleotide
gaaaaggauaaacucucug

SEQ ID NO: 3236468 - RNA, 19 nt, Artificial Sequence
  Description of Artificial Sequence: Synthetic oligonucleotide
uuguaugacauucucuccu

SEQ ID NO: 3236469 - RNA, 19 nt, Artificial Sequence
  Description of Artificial Sequence: Synthetic oligonucleotide
caaagcaagaacagaagug

SEQ ID NO: 3236470 - RNA, 19 nt, Artificial Sequence
  Description of Artificial Sequence: Synthetic oligonucleotide
uguucauccagcccaaagu

SEQ ID NO: 3236471 - RNA, 19 nt, Artificial Sequence
  Description of Artificial Sequence: Synthetic oligonucleotide
uuucuguaguaaaugcaag

SEQ ID NO: 3236472 - RNA, 19 nt, Artificial Sequence
  Description of Artificial Sequence: Synthetic oligonucleotide
uuguuacucaggaauaggu

SEQ ID NO: 3236473 - RNA, 19 nt, Artificial Sequence
  Description of Artificial Sequence: Synthetic oligonucleotide
aucaagaaagagauucugc

SEQ ID NO: 3236474 - RNA, 19 nt, Artificial Sequence
  Description of Artificial Sequence: Synthetic oligonucleotide
aaggauaaacucucuggca

SEQ ID NO: 3236475 - RNA, 19 nt, Artificial Sequence
  Description of Artificial Sequence: Synthetic oligonucleotide
uucaaagagaucuuucuua

SEQ ID NO: 3236476 - RNA, 19 nt, Artificial Sequence
  Description of Artificial Sequence: Synthetic oligonucleotide
agauacauauggucccacc

SEQ ID NO: 3236477 - RNA, 19 nt, Artificial Sequence
  Description of Artificial Sequence: Synthetic oligonucleotide
gucucuguaugguagaagc

SEQ ID NO: 3236478 - RNA, 19 nt, Artificial Sequence
  Description of Artificial Sequence: Synthetic oligonucleotide
ugacucagugcccaaagca

SEQ ID NO: 3236479 - RNA, 19 nt, Artificial Sequence
  Description of Artificial Sequence: Synthetic oligonucleotide
aagaacagaagugaucacu

SEQ ID NO: 3236480 - RNA, 19 nt, Artificial Sequence
  Description of Artificial Sequence: Synthetic oligonucleotide
caaucauucccaguaaucc

SEQ ID NO: 3236481 - RNA, 19 nt, Artificial Sequence
  Description of Artificial Sequence: Synthetic oligonucleotide
uaugacucagugcccaaag

SEQ ID NO: 3236482 - RNA, 19 nt, Artificial Sequence
  Description of Artificial Sequence: Synthetic oligonucleotide
caggaauagguuaugacuc

SEQ ID NO: 3236483 - RNA, 19 nt, Artificial Sequence
  Description of Artificial Sequence: Synthetic oligonucleotide
agagcuauugcaucauuug

SEQ ID NO: 3236484 - RNA, 19 nt, Artificial Sequence
  Description of Artificial Sequence: Synthetic oligonucleotide
agagaucuuucuuauuaag

SEQ ID NO: 3236485 - RNA, 19 nt, Artificial Sequence
  Description of Artificial Sequence: Synthetic oligonucleotide
uuuguuacucaggaauagg

SEQ ID NO: 3236486 - RNA, 19 nt, Artificial Sequence
  Description of Artificial Sequence: Synthetic oligonucleotide
agguuuguuacucaggaau

SEQ ID NO: 3236487 - RNA, 19 nt, Artificial Sequence
  Description of Artificial Sequence: Synthetic oligonucleotide
uguagagauggaauguuuc

SEQ ID NO: 3236488 - RNA, 19 nt, Artificial Sequence
  Description of Artificial Sequence: Synthetic oligonucleotide
aacagaagugaucacugau

SEQ ID NO: 3236489 - RNA, 19 nt, Artificial Sequence
  Description of Artificial Sequence: Synthetic oligonucleotide
ucuuauuaagaagagcuau

SEQ ID NO: 3236490 - RNA, 19 nt, Artificial Sequence
  Description of Artificial Sequence: Synthetic oligonucleotide
gaagugaucacugauugga

SEQ ID NO: 3236491 - RNA, 19 nt, Artificial Sequence
  Description of Artificial Sequence: Synthetic oligonucleotide
aggaaaaggauaaacucuc

SEQ ID NO: 3236492 - RNA, 19 nt, Artificial Sequence
  Description of Artificial Sequence: Synthetic oligonucleotide
gaugaggaaaaggauaaac

SEQ ID NO: 3236493 - RNA, 19 nt, Artificial Sequence
  Description of Artificial Sequence: Synthetic oligonucleotide
uguuuguaugacauucucu

SEQ ID NO: 3236494 - RNA, 19 nt, Artificial Sequence
  Description of Artificial Sequence: Synthetic oligonucleotide
gggccuuagauacauaugg

SEQ ID NO: 3236495 - RNA, 19 nt, Artificial Sequence
  Description of Artificial Sequence: Synthetic oligonucleotide
aguaacugaggaaauguuc

SEQ ID NO: 3236496 - RNA, 19 nt, Artificial Sequence
  Description of Artificial Sequence: Synthetic oligonucleotide
gacaagguuuguuacucag

SEQ ID NO: 3236497 - RNA, 19 nt, Artificial Sequence
  Description of Artificial Sequence: Synthetic oligonucleotide
ugcaaguagcaacuggccc

SEQ ID NO: 3236498 - RNA, 19 nt, Artificial Sequence
  Description of Artificial Sequence: Synthetic oligonucleotide
uaguaagucuuucuguagu

SEQ ID NO: 3236499 - RNA, 19 nt, Artificial Sequence
  Description of Artificial Sequence: Synthetic oligonucleotide
uuuguaugacauucucucc

SEQ ID NO: 3236500 - RNA, 19 nt, Artificial Sequence
  Description of Artificial Sequence: Synthetic oligonucleotide
agauaguaagucuuucugu

SEQ ID NO: 3236501 - RNA, 19 nt, Artificial Sequence
  Description of Artificial Sequence: Synthetic oligonucleotide
ucuggcacuccacagacaa

SEQ ID NO: 3236502 - RNA, 19 nt, Artificial Sequence
  Description of Artificial Sequence: Synthetic oligonucleotide
auaguaagucuuucuguag

SEQ ID NO: 3236503 - RNA, 19 nt, Artificial Sequence
  Description of Artificial Sequence: Synthetic oligonucleotide
gaaugcaucaaugcuggag

SEQ ID NO: 3236504 - RNA, 19 nt, Artificial Sequence
  Description of Artificial Sequence: Synthetic oligonucleotide
ucugcagauaguaagucuu

SEQ ID NO: 3236505 - RNA, 19 nt, Artificial Sequence
  Description of Artificial Sequence: Synthetic oligonucleotide
uuugcugcaguaucaagaa

SEQ ID NO: 3236506 - RNA, 19 nt, Artificial Sequence
  Description of Artificial Sequence: Synthetic oligonucleotide
ucaaagagaucuuucuuau

SEQ ID NO: 3236507 - RNA, 19 nt, Artificial Sequence
  Description of Artificial Sequence: Synthetic oligonucleotide
cuguaguaaaugcaaguag

SEQ ID NO: 3236508 - RNA, 19 nt, Artificial Sequence
  Description of Artificial Sequence: Synthetic oligonucleotide
uggcacuccacagacaagg

SEQ ID NO: 3236509 - RNA, 19 nt, Artificial Sequence
  Description of Artificial Sequence: Synthetic oligonucleotide
cucauucccaaucauuccc

SEQ ID NO: 3236510 - RNA, 19 nt, Artificial Sequence
  Description of Artificial Sequence: Synthetic oligonucleotide
uucuguaguaaaugcaagu

SEQ ID NO: 3236511 - RNA, 19 nt, Artificial Sequence
  Description of Artificial Sequence: Synthetic oligonucleotide
uucccaaucauucccagua

SEQ ID NO: 3236512 - RNA, 19 nt, Artificial Sequence
  Description of Artificial Sequence: Synthetic oligonucleotide
cucaggaugaggaaaagga

SEQ ID NO: 3236513 - RNA, 19 nt, Artificial Sequence
  Description of Artificial Sequence: Synthetic oligonucleotide
ccuuagauacauauggucc

SEQ ID NO: 3236514 - RNA, 19 nt, Artificial Sequence
  Description of Artificial Sequence: Synthetic oligonucleotide
aagccaugucucuguaugg

SEQ ID NO: 3236515 - RNA, 19 nt, Artificial Sequence
  Description of Artificial Sequence: Synthetic oligonucleotide
aacugaggaaauguucauc

SEQ ID NO: 3236516 - RNA, 19 nt, Artificial Sequence
  Description of Artificial Sequence: Synthetic oligonucleotide
uaucaagaaagagauucug

SEQ ID NO: 3236517 - RNA, 19 nt, Artificial Sequence
  Description of Artificial Sequence: Synthetic oligonucleotide
uuguuuuggggccacaggg

SEQ ID NO: 3236518 - RNA, 19 nt, Artificial Sequence
  Description of Artificial Sequence: Synthetic oligonucleotide
cucaggaacaacugggugg

SEQ ID NO: 3236519 - RNA, 19 nt, Artificial Sequence
  Description of Artificial Sequence: Synthetic oligonucleotide
aggcuguuucaccugaugc

SEQ ID NO: 3236520 - RNA, 19 nt, Artificial Sequence
  Description of Artificial Sequence: Synthetic oligonucleotide
uggcucaggaacaacuggg

SEQ ID NO: 3236521 - RNA, 19 nt, Artificial Sequence
  Description of Artificial Sequence: Synthetic oligonucleotide
uuucaccugaugcuguugc

SEQ ID NO: 3236522 - RNA, 19 nt, Artificial Sequence
  Description of Artificial Sequence: Synthetic oligonucleotide
gaaccuugggguugcaggg

SEQ ID NO: 3236523 - RNA, 19 nt, Artificial Sequence
  Description of Artificial Sequence: Synthetic oligonucleotide
aacaacuggguggcaaggc

SEQ ID NO: 3236524 - RNA, 19 nt, Artificial Sequence
  Description of Artificial Sequence: Synthetic oligonucleotide
augcuguugcagcugaggg

SEQ ID NO: 3236525 - RNA, 19 nt, Artificial Sequence
  Description of Artificial Sequence: Synthetic oligonucleotide
gguggcaaggcucaggugc

SEQ ID NO: 3236526 - RNA, 19 nt, Artificial Sequence
  Description of Artificial Sequence: Synthetic oligonucleotide
ugcuguugcagcugagggg

SEQ ID NO: 3236527 - RNA, 19 nt, Artificial Sequence
  Description of Artificial Sequence: Synthetic oligonucleotide
ucaggaacaacuggguggc

SEQ ID NO: 3236528 - RNA, 19 nt, Artificial Sequence
  Description of Artificial Sequence: Synthetic oligonucleotide
auggcucaggaacaacugg

SEQ ID NO: 3236529 - RNA, 19 nt, Artificial Sequence
  Description of Artificial Sequence: Synthetic oligonucleotide
ggaaccuugggguugcagg

SEQ ID NO: 3236530 - RNA, 19 nt, Artificial Sequence
  Description of Artificial Sequence: Synthetic oligonucleotide
gaugcuguugcagcugagg

SEQ ID NO: 3236531 - RNA, 19 nt, Artificial Sequence
  Description of Artificial Sequence: Synthetic oligonucleotide
agugcagggcugcuucugc

SEQ ID NO: 3236532 - RNA, 19 nt, Artificial Sequence
  Description of Artificial Sequence: Synthetic oligonucleotide
cuuguuuuggggccacagg

SEQ ID NO: 3236533 - RNA, 19 nt, Artificial Sequence
  Description of Artificial Sequence: Synthetic oligonucleotide
aaggcuguuucaccugaug

SEQ ID NO: 3236534 - RNA, 19 nt, Artificial Sequence
  Description of Artificial Sequence: Synthetic oligonucleotide
uguuuuggggccacagggu

SEQ ID NO: 3236535 - RNA, 19 nt, Artificial Sequence
  Description of Artificial Sequence: Synthetic oligonucleotide
gguggcagggcucaggugc

SEQ ID NO: 3236536 - RNA, 19 nt, Artificial Sequence
  Description of Artificial Sequence: Synthetic oligonucleotide
accuuaggcuggcagggcg

SEQ ID NO: 3236537 - RNA, 19 nt, Artificial Sequence
  Description of Artificial Sequence: Synthetic oligonucleotide
uggguggcaaggcucaggu

SEQ ID NO: 3236538 - RNA, 19 nt, Artificial Sequence
  Description of Artificial Sequence: Synthetic oligonucleotide
agggauccuuguuuugggg

SEQ ID NO: 3236539 - RNA, 19 nt, Artificial Sequence
  Description of Artificial Sequence: Synthetic oligonucleotide
cauggcucaggaacaacug

SEQ ID NO: 3236540 - RNA, 19 nt, Artificial Sequence
  Description of Artificial Sequence: Synthetic oligonucleotide
uuuggggccacaggguucc

SEQ ID NO: 3236541 - RNA, 19 nt, Artificial Sequence
  Description of Artificial Sequence: Synthetic oligonucleotide
ucaccugaugcuguugcag

SEQ ID NO: 3236542 - RNA, 19 nt, Artificial Sequence
  Description of Artificial Sequence: Synthetic oligonucleotide
cuugggguugcagggaucc

SEQ ID NO: 3236543 - RNA, 19 nt, Artificial Sequence
  Description of Artificial Sequence: Synthetic oligonucleotide
aggcuggcagggcucaggc

SEQ ID NO: 3236544 - RNA, 19 nt, Artificial Sequence
  Description of Artificial Sequence: Synthetic oligonucleotide
aaggcucaggugcccuugg

SEQ ID NO: 3236545 - RNA, 19 nt, Artificial Sequence
  Description of Artificial Sequence: Synthetic oligonucleotide
gaacaacuggguggcaagg

SEQ ID NO: 3236546 - RNA, 19 nt, Artificial Sequence
  Description of Artificial Sequence: Synthetic oligonucleotide
ugcagugcagggcugcuuc

SEQ ID NO: 3236547 - RNA, 19 nt, Artificial Sequence
  Description of Artificial Sequence: Synthetic oligonucleotide
acaacuggguggcaaggcu

SEQ ID NO: 3236548 - RNA, 19 nt, Artificial Sequence
  Description of Artificial Sequence: Synthetic oligonucleotide
ucaggugcccuuggggugg

SEQ ID NO: 3236549 - RNA, 19 nt, Artificial Sequence
  Description of Artificial Sequence: Synthetic oligonucleotide
uggcaaggcuguuucaccu

SEQ ID NO: 3236550 - RNA, 19 nt, Artificial Sequence
  Description of Artificial Sequence: Synthetic oligonucleotide
uggguggcagggcucaggc

SEQ ID NO: 3236551 - RNA, 19 nt, Artificial Sequence
  Description of Artificial Sequence: Synthetic oligonucleotide
caccugaugcuguugcagc

SEQ ID NO: 3236552 - RNA, 19 nt, Artificial Sequence
  Description of Artificial Sequence: Synthetic oligonucleotide
cagggauccuuguuuuggg

SEQ ID NO: 3236553 - RNA, 19 nt, Artificial Sequence
  Description of Artificial Sequence: Synthetic oligonucleotide
cuggcaaggcuguuucacc

SEQ ID NO: 3236554 - RNA, 19 nt, Artificial Sequence
  Description of Artificial Sequence: Synthetic oligonucleotide
ggauccuuguuuuggggcc

SEQ ID NO: 3236555 - RNA, 19 nt, Artificial Sequence
  Description of Artificial Sequence: Synthetic oligonucleotide
uggcaccuuaggcuggcag

SEQ ID NO: 3236556 - RNA, 19 nt, Artificial Sequence
  Description of Artificial Sequence: Synthetic oligonucleotide
cuggcagggcucaggaacc

SEQ ID NO: 3236557 - RNA, 19 nt, Artificial Sequence
  Description of Artificial Sequence: Synthetic oligonucleotide
gguggcagggcucaggcac

SEQ ID NO: 3236558 - RNA, 19 nt, Artificial Sequence
  Description of Artificial Sequence: Synthetic oligonucleotide
ggaacaacuggguggcaag

SEQ ID NO: 3236559 - RNA, 19 nt, Artificial Sequence
  Description of Artificial Sequence: Synthetic oligonucleotide
uuuuggggccacaggguuc

SEQ ID NO: 3236560 - RNA, 19 nt, Artificial Sequence
  Description of Artificial Sequence: Synthetic oligonucleotide
ggcaccuuaggcuggcagg

SEQ ID NO: 3236561 - RNA, 19 nt, Artificial Sequence
  Description of Artificial Sequence: Synthetic oligonucleotide
ucugcuggugggaacucau

SEQ ID NO: 3236562 - RNA, 19 nt, Artificial Sequence
  Description of Artificial Sequence: Synthetic oligonucleotide
ucaggugccuggguggcag

SEQ ID NO: 3236563 - RNA, 19 nt, Artificial Sequence
  Description of Artificial Sequence: Synthetic oligonucleotide
gggcucaggaaccuugggg

SEQ ID NO: 3236564 - RNA, 19 nt, Artificial Sequence
  Description of Artificial Sequence: Synthetic oligonucleotide
gggauccuuguuuuggggc

SEQ ID NO: 3236565 - RNA, 19 nt, Artificial Sequence
  Description of Artificial Sequence: Synthetic oligonucleotide
agggcucuggcaccuuagg

SEQ ID NO: 3236566 - RNA, 19 nt, Artificial Sequence
  Description of Artificial Sequence: Synthetic oligonucleotide
uucaccugaugcuguugca

SEQ ID NO: 3236567 - RNA, 19 nt, Artificial Sequence
  Description of Artificial Sequence: Synthetic oligonucleotide
aacuggguggcaaggcuca

SEQ ID NO: 3236568 - RNA, 19 nt, Artificial Sequence
  Description of Artificial Sequence: Synthetic oligonucleotide
ugcagggcugcuucugcug

SEQ ID NO: 3236569 - RNA, 19 nt, Artificial Sequence
  Description of Artificial Sequence: Synthetic oligonucleotide
ucaggaaccuugggguugc

SEQ ID NO: 3236570 - RNA, 19 nt, Artificial Sequence
  Description of Artificial Sequence: Synthetic oligonucleotide
gcuggcagggcucaggaac

SEQ ID NO: 3236571 - RNA, 19 nt, Artificial Sequence
  Description of Artificial Sequence: Synthetic oligonucleotide
caacuggguggcaaggcuc

SEQ ID NO: 3236572 - RNA, 19 nt, Artificial Sequence
  Description of Artificial Sequence: Synthetic oligonucleotide
accuuaggcuggcagggcu

SEQ ID NO: 3236573 - RNA, 19 nt, Artificial Sequence
  Description of Artificial Sequence: Synthetic oligonucleotide
uggcuggcaaggcuguuuc

SEQ ID NO: 3236574 - RNA, 19 nt, Artificial Sequence
  Description of Artificial Sequence: Synthetic oligonucleotide
accugaugcuguugcagcu

SEQ ID NO: 3236575 - RNA, 19 nt, Artificial Sequence
  Description of Artificial Sequence: Synthetic oligonucleotide
ugaugcuguugcagcugag

SEQ ID NO: 3236576 - RNA, 19 nt, Artificial Sequence
  Description of Artificial Sequence: Synthetic oligonucleotide
cagggcucaggaaccuugg

SEQ ID NO: 3236577 - RNA, 19 nt, Artificial Sequence
  Description of Artificial Sequence: Synthetic oligonucleotide
aggcaccuuaggcuggcag

SEQ ID NO: 3236578 - RNA, 19 nt, Artificial Sequence
  Description of Artificial Sequence: Synthetic oligonucleotide
uaggcuggcagggcucugg

SEQ ID NO: 3236579 - RNA, 19 nt, Artificial Sequence
  Description of Artificial Sequence: Synthetic oligonucleotide
aggcuggcagggcucuggc

SEQ ID NO: 3236580 - RNA, 19 nt, Artificial Sequence
  Description of Artificial Sequence: Synthetic oligonucleotide
ugcagggauccuuguuuug

SEQ ID NO: 3236581 - RNA, 19 nt, Artificial Sequence
  Description of Artificial Sequence: Synthetic oligonucleotide
gcuggcagggcucaggcac

SEQ ID NO: 3236582 - RNA, 19 nt, Artificial Sequence
  Description of Artificial Sequence: Synthetic oligonucleotide
ugcccuugggguggcaggg

SEQ ID NO: 3236583 - RNA, 19 nt, Artificial Sequence
  Description of Artificial Sequence: Synthetic oligonucleotide
gcagggauccuuguuuugg

SEQ ID NO: 3236584 - RNA, 19 nt, Artificial Sequence
  Description of Artificial Sequence: Synthetic oligonucleotide
cucaggcaccuuaggcugg

SEQ ID NO: 3236585 - RNA, 19 nt, Artificial Sequence
  Description of Artificial Sequence: Synthetic oligonucleotide
gcucaggcaccuuaggcug

SEQ ID NO: 3236586 - RNA, 19 nt, Artificial Sequence
  Description of Artificial Sequence: Synthetic oligonucleotide
agggcucaggaaccuuggg

SEQ ID NO: 3236587 - RNA, 19 nt, Artificial Sequence
  Description of Artificial Sequence: Synthetic oligonucleotide
agggcucaggcaccuuagg

SEQ ID NO: 3236588 - RNA, 19 nt, Artificial Sequence
  Description of Artificial Sequence: Synthetic oligonucleotide
cucaggugcccuuggggug

SEQ ID NO: 3236589 - RNA, 19 nt, Artificial Sequence
  Description of Artificial Sequence: Synthetic oligonucleotide
uguuucaccugaugcuguu

SEQ ID NO: 3236590 - RNA, 19 nt, Artificial Sequence
  Description of Artificial Sequence: Synthetic oligonucleotide
uugcagggauccuuguuuu

SEQ ID NO: 3236591 - RNA, 19 nt, Artificial Sequence
  Description of Artificial Sequence: Synthetic oligonucleotide
uggggugguggcuggcaag

SEQ ID NO: 3236592 - RNA, 19 nt, Artificial Sequence
  Description of Artificial Sequence: Synthetic oligonucleotide
ggggccacaggguuccugg

SEQ ID NO: 3236593 - RNA, 19 nt, Artificial Sequence
  Description of Artificial Sequence: Synthetic oligonucleotide
gcucuggcaccuuaggcug

SEQ ID NO: 3236594 - RNA, 19 nt, Artificial Sequence
  Description of Artificial Sequence: Synthetic oligonucleotide
gcuguuucaccugaugcug

SEQ ID NO: 3236595 - RNA, 19 nt, Artificial Sequence
  Description of Artificial Sequence: Synthetic oligonucleotide
cucaggaaccuugggguug

SEQ ID NO: 3236596 - RNA, 19 nt, Artificial Sequence
  Description of Artificial Sequence: Synthetic oligonucleotide
uaggcuggcagggcucagg

SEQ ID NO: 3236597 - RNA, 19 nt, Artificial Sequence
  Description of Artificial Sequence: Synthetic oligonucleotide
ggcucaggugcccuugggg

SEQ ID NO: 3236598 - RNA, 19 nt, Artificial Sequence
  Description of Artificial Sequence: Synthetic oligonucleotide
ggcucaggugccugggugg

SEQ ID NO: 3236599 - RNA, 19 nt, Artificial Sequence
  Description of Artificial Sequence: Synthetic oligonucleotide
gcuggcagggcucuggcac

SEQ ID NO: 3236600 - RNA, 19 nt, Artificial Sequence
  Description of Artificial Sequence: Synthetic oligonucleotide
gugguggcuggcaaggcug

SEQ ID NO: 3236601 - RNA, 19 nt, Artificial Sequence
  Description of Artificial Sequence: Synthetic oligonucleotide
cuggcagggcgucuggcac

SEQ ID NO: 3236602 - RNA, 19 nt, Artificial Sequence
  Description of Artificial Sequence: Synthetic oligonucleotide
cacaggguuccuggggugg

SEQ ID NO: 3236603 - RNA, 19 nt, Artificial Sequence
  Description of Artificial Sequence: Synthetic oligonucleotide
cagggcucaggcaccuuag

SEQ ID NO: 3236604 - RNA, 19 nt, Artificial Sequence
  Description of Artificial Sequence: Synthetic oligonucleotide
guugcagggauccuuguuu

SEQ ID NO: 3236605 - RNA, 19 nt, Artificial Sequence
  Description of Artificial Sequence: Synthetic oligonucleotide
gugcccuugggguggcagg

SEQ ID NO: 3236606 - RNA, 19 nt, Artificial Sequence
  Description of Artificial Sequence: Synthetic oligonucleotide
cucuggcaccuuaggcugg

SEQ ID NO: 3236607 - RNA, 19 nt, Artificial Sequence
  Description of Artificial Sequence: Synthetic oligonucleotide
aaccuugggguugcaggga

SEQ ID NO: 3236608 - RNA, 19 nt, Artificial Sequence
  Description of Artificial Sequence: Synthetic oligonucleotide
ggcgucuggcaccuuaggc

SEQ ID NO: 3236609 - RNA, 19 nt, Artificial Sequence
  Description of Artificial Sequence: Synthetic oligonucleotide
aggguuccugggguggugg

SEQ ID NO: 3236610 - RNA, 19 nt, Artificial Sequence
  Description of Artificial Sequence: Synthetic oligonucleotide
cuggcagggcucuggcacc

SEQ ID NO: 3236611 - RNA, 19 nt, Artificial Sequence
  Description of Artificial Sequence: Synthetic oligonucleotide
ggcugcuucugcugguggg

SEQ ID NO: 3236612 - RNA, 19 nt, Artificial Sequence
  Description of Artificial Sequence: Synthetic oligonucleotide
uuccuggggugguggcugg

SEQ ID NO: 3236613 - RNA, 19 nt, Artificial Sequence
  Description of Artificial Sequence: Synthetic oligonucleotide
aggaacaacuggguggcaa

SEQ ID NO: 3236614 - RNA, 19 nt, Artificial Sequence
  Description of Artificial Sequence: Synthetic oligonucleotide
ucuggcaccuuaggcuggc

SEQ ID NO: 3236615 - RNA, 19 nt, Artificial Sequence
  Description of Artificial Sequence: Synthetic oligonucleotide
gcagggcugcuucugcugg

SEQ ID NO: 3236616 - RNA, 19 nt, Artificial Sequence
  Description of Artificial Sequence: Synthetic oligonucleotide
guuccuggggugguggcug

SEQ ID NO: 3236617 - RNA, 19 nt, Artificial Sequence
  Description of Artificial Sequence: Synthetic oligonucleotide
agugcugggaauuaaaggc

SEQ ID NO: 3236618 - RNA, 19 nt, Artificial Sequence
  Description of Artificial Sequence: Synthetic oligonucleotide
uuuacaaauaguaugagua

SEQ ID NO: 3236619 - RNA, 19 nt, Artificial Sequence
  Description of Artificial Sequence: Synthetic oligonucleotide
aauaguaugaguauuuuau

SEQ ID NO: 3236620 - RNA, 19 nt, Artificial Sequence
  Description of Artificial Sequence: Synthetic oligonucleotide
uaugaguauuuuauuauug

SEQ ID NO: 3236621 - RNA, 19 nt, Artificial Sequence
  Description of Artificial Sequence: Synthetic oligonucleotide
augaguauuuuauuauugg

SEQ ID NO: 3236622 - RNA, 19 nt, Artificial Sequence
  Description of Artificial Sequence: Synthetic oligonucleotide
aauuaaaggcuugugccac

SEQ ID NO: 3236623 - RNA, 19 nt, Artificial Sequence
  Description of Artificial Sequence: Synthetic oligonucleotide
uggccucaaacucagaggg

SEQ ID NO: 3236624 - RNA, 19 nt, Artificial Sequence
  Description of Artificial Sequence: Synthetic oligonucleotide
aaaggcuugugccaccgac

SEQ ID NO: 3236625 - RNA, 19 nt, Artificial Sequence
  Description of Artificial Sequence: Synthetic oligonucleotide
aguauuuuauuauugguuu

SEQ ID NO: 3236626 - RNA, 19 nt, Artificial Sequence
  Description of Artificial Sequence: Synthetic oligonucleotide
ggaauuaaaggcuugugcc

SEQ ID NO: 3236627 - RNA, 19 nt, Artificial Sequence
  Description of Artificial Sequence: Synthetic oligonucleotide
uuuuacaaauaguaugagu

SEQ ID NO: 3236628 - RNA, 19 nt, Artificial Sequence
  Description of Artificial Sequence: Synthetic oligonucleotide
ugcucuguagaccaggcug

SEQ ID NO: 3236629 - RNA, 19 nt, Artificial Sequence
  Description of Artificial Sequence: Synthetic oligonucleotide
ugaguauuuuauuauuggu

SEQ ID NO: 3236630 - RNA, 19 nt, Artificial Sequence
  Description of Artificial Sequence: Synthetic oligonucleotide
aguaugaguauuuuauuau

SEQ ID NO: 3236631 - RNA, 19 nt, Artificial Sequence
  Description of Artificial Sequence: Synthetic oligonucleotide
gagugcugggaauuaaagg

SEQ ID NO: 3236632 - RNA, 19 nt, Artificial Sequence
  Description of Artificial Sequence: Synthetic oligonucleotide
aaauaguaugaguauuuua

SEQ ID NO: 3236633 - RNA, 19 nt, Artificial Sequence
  Description of Artificial Sequence: Synthetic oligonucleotide
uaguaugaguauuuuauua

SEQ ID NO: 3236634 - RNA, 19 nt, Artificial Sequence
  Description of Artificial Sequence: Synthetic oligonucleotide
auuaaaggcuugugccacc

SEQ ID NO: 3236635 - RNA, 19 nt, Artificial Sequence
  Description of Artificial Sequence: Synthetic oligonucleotide
gaauuaaaggcuugugcca

SEQ ID NO: 3236636 - RNA, 19 nt, Artificial Sequence
  Description of Artificial Sequence: Synthetic oligonucleotide
uuacaaauaguaugaguau

SEQ ID NO: 3236637 - RNA, 19 nt, Artificial Sequence
  Description of Artificial Sequence: Synthetic oligonucleotide
aaacucagagggaucugcc

SEQ ID NO: 3236638 - RNA, 19 nt, Artificial Sequence
  Description of Artificial Sequence: Synthetic oligonucleotide
agagggaucugccugccuc

SEQ ID NO: 3236639 - RNA, 19 nt, Artificial Sequence
  Description of Artificial Sequence: Synthetic oligonucleotide
aggcuugugccaccgacgc

SEQ ID NO: 3236640 - RNA, 19 nt, Artificial Sequence
  Description of Artificial Sequence: Synthetic oligonucleotide
gaacuugcucuguagacca

SEQ ID NO: 3236641 - RNA, 19 nt, Artificial Sequence
  Description of Artificial Sequence: Synthetic oligonucleotide
uuaaaggcuugugccaccg

SEQ ID NO: 3236642 - RNA, 19 nt, Artificial Sequence
  Description of Artificial Sequence: Synthetic oligonucleotide
aggguuucucuguguagcc

SEQ ID NO: 3236643 - RNA, 19 nt, Artificial Sequence
  Description of Artificial Sequence: Synthetic oligonucleotide
gggaauuaaaggcuugugc

SEQ ID NO: 3236644 - RNA, 19 nt, Artificial Sequence
  Description of Artificial Sequence: Synthetic oligonucleotide
uuugaggcaggguuucucu

SEQ ID NO: 3236645 - RNA, 19 nt, Artificial Sequence
  Description of Artificial Sequence: Synthetic oligonucleotide
uggaacuugcucuguagac

SEQ ID NO: 3236646 - RNA, 19 nt, Artificial Sequence
  Description of Artificial Sequence: Synthetic oligonucleotide
cucuguguagcccuggcug

SEQ ID NO: 3236647 - RNA, 19 nt, Artificial Sequence
  Description of Artificial Sequence: Synthetic oligonucleotide
cuggccucaaacucagagg

SEQ ID NO: 3236648 - RNA, 19 nt, Artificial Sequence
  Description of Artificial Sequence: Synthetic oligonucleotide
acucagagggaucugccug

SEQ ID NO: 3236649 - RNA, 19 nt, Artificial Sequence
  Description of Artificial Sequence: Synthetic oligonucleotide
aacucagagggaucugccu

SEQ ID NO: 3236650 - RNA, 19 nt, Artificial Sequence
  Description of Artificial Sequence: Synthetic oligonucleotide
auaguaugaguauuuuauu

SEQ ID NO: 3236651 - RNA, 19 nt, Artificial Sequence
  Description of Artificial Sequence: Synthetic oligonucleotide
uacaaauaguaugaguauu

SEQ ID NO: 3236652 - RNA, 19 nt, Artificial Sequence
  Description of Artificial Sequence: Synthetic oligonucleotide
uguccuggaacuugcucug

SEQ ID NO: 3236653 - RNA, 19 nt, Artificial Sequence
  Description of Artificial Sequence: Synthetic oligonucleotide
cuugcucuguagaccaggc

SEQ ID NO: 3236654 - RNA, 19 nt, Artificial Sequence
  Description of Artificial Sequence: Synthetic oligonucleotide
aaggcuugugccaccgacg

SEQ ID NO: 3236655 - RNA, 19 nt, Artificial Sequence
  Description of Artificial Sequence: Synthetic oligonucleotide
caaacucagagggaucugc

SEQ ID NO: 3236656 - RNA, 19 nt, Artificial Sequence
  Description of Artificial Sequence: Synthetic oligonucleotide
cucagagggaucugccugc

SEQ ID NO: 3236657 - RNA, 19 nt, Artificial Sequence
  Description of Artificial Sequence: Synthetic oligonucleotide
acaaauaguaugaguauuu

SEQ ID NO: 3236658 - RNA, 19 nt, Artificial Sequence
  Description of Artificial Sequence: Synthetic oligonucleotide
ucuguguagcccuggcugu

SEQ ID NO: 3236659 - RNA, 19 nt, Artificial Sequence
  Description of Artificial Sequence: Synthetic oligonucleotide
caggguuucucuguguagc

SEQ ID NO: 3236660 - RNA, 19 nt, Artificial Sequence
  Description of Artificial Sequence: Synthetic oligonucleotide
ugaggcaggguuucucugu

SEQ ID NO: 3236661 - RNA, 19 nt, Artificial Sequence
  Description of Artificial Sequence: Synthetic oligonucleotide
acuugcucuguagaccagg

SEQ ID NO: 3236662 - RNA, 19 nt, Artificial Sequence
  Description of Artificial Sequence: Synthetic oligonucleotide
ugggaauuaaaggcuugug

SEQ ID NO: 3236663 - RNA, 19 nt, Artificial Sequence
  Description of Artificial Sequence: Synthetic oligonucleotide
uucucuguguagcccuggc

SEQ ID NO: 3236664 - RNA, 19 nt, Artificial Sequence
  Description of Artificial Sequence: Synthetic oligonucleotide
gcuggccucaaacucagag

SEQ ID NO: 3236665 - RNA, 19 nt, Artificial Sequence
  Description of Artificial Sequence: Synthetic oligonucleotide
uugaggcaggguuucucug

SEQ ID NO: 3236666 - RNA, 19 nt, Artificial Sequence
  Description of Artificial Sequence: Synthetic oligonucleotide
ucucuguguagcccuggcu

SEQ ID NO: 3236667 - RNA, 19 nt, Artificial Sequence
  Description of Artificial Sequence: Synthetic oligonucleotide
gaguauuuuauuauugguu

SEQ ID NO: 3236668 - RNA, 19 nt, Artificial Sequence
  Description of Artificial Sequence: Synthetic oligonucleotide
ugcugggaauuaaaggcuu

SEQ ID NO: 3236669 - RNA, 19 nt, Artificial Sequence
  Description of Artificial Sequence: Synthetic oligonucleotide
ggaacuugcucuguagacc

SEQ ID NO: 3236670 - RNA, 19 nt, Artificial Sequence
  Description of Artificial Sequence: Synthetic oligonucleotide
gaccaggcuggccucaaac

SEQ ID NO: 3236671 - RNA, 19 nt, Artificial Sequence
  Description of Artificial Sequence: Synthetic oligonucleotide
uuucucuguguagcccugg

SEQ ID NO: 3236672 - RNA, 19 nt, Artificial Sequence
  Description of Artificial Sequence: Synthetic oligonucleotide
gaggcaggguuucucugug

SEQ ID NO: 3236673 - RNA, 19 nt, Artificial Sequence
  Description of Artificial Sequence: Synthetic oligonucleotide
uggcuguccuggaacuugc

SEQ ID NO: 3236674 - RNA, 19 nt, Artificial Sequence
  Description of Artificial Sequence: Synthetic oligonucleotide
guagcccuggcuguccugg

SEQ ID NO: 3236675 - RNA, 19 nt, Artificial Sequence
  Description of Artificial Sequence: Synthetic oligonucleotide
accaggcuggccucaaacu

SEQ ID NO: 3236676 - RNA, 19 nt, Artificial Sequence
  Description of Artificial Sequence: Synthetic oligonucleotide
uuuugaggcaggguuucuc

SEQ ID NO: 3236677 - RNA, 19 nt, Artificial Sequence
  Description of Artificial Sequence: Synthetic oligonucleotide
ucaaacucagagggaucug

SEQ ID NO: 3236678 - RNA, 19 nt, Artificial Sequence
  Description of Artificial Sequence: Synthetic oligonucleotide
gcuugugccaccgacgccc

SEQ ID NO: 3236679 - RNA, 19 nt, Artificial Sequence
  Description of Artificial Sequence: Synthetic oligonucleotide
uguagaccaggcuggccuc

SEQ ID NO: 3236680 - RNA, 19 nt, Artificial Sequence
  Description of Artificial Sequence: Synthetic oligonucleotide
uugcucuguagaccaggcu

SEQ ID NO: 3236681 - RNA, 19 nt, Artificial Sequence
  Description of Artificial Sequence: Synthetic oligonucleotide
ugugccaccgacgcccggc

SEQ ID NO: 3236682 - RNA, 19 nt, Artificial Sequence
  Description of Artificial Sequence: Synthetic oligonucleotide
guaugaguauuuuauuauu

SEQ ID NO: 3236683 - RNA, 19 nt, Artificial Sequence
  Description of Artificial Sequence: Synthetic oligonucleotide
ggaucugccugccucugcc

SEQ ID NO: 3236684 - RNA, 19 nt, Artificial Sequence
  Description of Artificial Sequence: Synthetic oligonucleotide
gaucugccugccucugccc

SEQ ID NO: 3236685 - RNA, 19 nt, Artificial Sequence
  Description of Artificial Sequence: Synthetic oligonucleotide
uguguagcccuggcugucc

SEQ ID NO: 3236686 - RNA, 19 nt, Artificial Sequence
  Description of Artificial Sequence: Synthetic oligonucleotide
uaaaggcuugugccaccga

SEQ ID NO: 3236687 - RNA, 19 nt, Artificial Sequence
  Description of Artificial Sequence: Synthetic oligonucleotide
ucuguagaccaggcuggcc

SEQ ID NO: 3236688 - RNA, 19 nt, Artificial Sequence
  Description of Artificial Sequence: Synthetic oligonucleotide
cuggaacuugcucuguaga

SEQ ID NO: 3236689 - RNA, 19 nt, Artificial Sequence
  Description of Artificial Sequence: Synthetic oligonucleotide
cuguccuggaacuugcucu

SEQ ID NO: 3236690 - RNA, 19 nt, Artificial Sequence
  Description of Artificial Sequence: Synthetic oligonucleotide
gcucuguagaccaggcugg

SEQ ID NO: 3236691 - RNA, 19 nt, Artificial Sequence
  Description of Artificial Sequence: Synthetic oligonucleotide
cuugugccaccgacgcccg

SEQ ID NO: 3236692 - RNA, 19 nt, Artificial Sequence
  Description of Artificial Sequence: Synthetic oligonucleotide
aucugccugccucugcccu

SEQ ID NO: 3236693 - RNA, 19 nt, Artificial Sequence
  Description of Artificial Sequence: Synthetic oligonucleotide
uccuggaacuugcucugua

SEQ ID NO: 3236694 - RNA, 19 nt, Artificial Sequence
  Description of Artificial Sequence: Synthetic oligonucleotide
caggcuggccucaaacuca

SEQ ID NO: 3236695 - RNA, 19 nt, Artificial Sequence
  Description of Artificial Sequence: Synthetic oligonucleotide
cuggcuguccuggaacuug

SEQ ID NO: 3236696 - RNA, 19 nt, Artificial Sequence
  Description of Artificial Sequence: Synthetic oligonucleotide
ucagagggaucugccugcc

SEQ ID NO: 3236697 - RNA, 19 nt, Artificial Sequence
  Description of Artificial Sequence: Synthetic oligonucleotide
guauuuuauuauugguuuu

SEQ ID NO: 3236698 - RNA, 19 nt, Artificial Sequence
  Description of Artificial Sequence: Synthetic oligonucleotide
cuguagaccaggcuggccu

SEQ ID NO: 3236699 - RNA, 19 nt, Artificial Sequence
  Description of Artificial Sequence: Synthetic oligonucleotide
aacuugcucuguagaccag

SEQ ID NO: 3236700 - RNA, 19 nt, Artificial Sequence
  Description of Artificial Sequence: Synthetic oligonucleotide
ccuggaacuugcucuguag

SEQ ID NO: 3236701 - RNA, 19 nt, Artificial Sequence
  Description of Artificial Sequence: Synthetic oligonucleotide
uguagcccuggcuguccug

SEQ ID NO: 3236702 - RNA, 19 nt, Artificial Sequence
  Description of Artificial Sequence: Synthetic oligonucleotide
cucaaacucagagggaucu

SEQ ID NO: 3236703 - RNA, 19 nt, Artificial Sequence
  Description of Artificial Sequence: Synthetic oligonucleotide
ucugcccucccgagugcug

SEQ ID NO: 3236704 - RNA, 19 nt, Artificial Sequence
  Description of Artificial Sequence: Synthetic oligonucleotide
gcaggguuucucuguguag

SEQ ID NO: 3236705 - RNA, 19 nt, Artificial Sequence
  Description of Artificial Sequence: Synthetic oligonucleotide
cgagugcugggaauuaaag

SEQ ID NO: 3236706 - RNA, 19 nt, Artificial Sequence
  Description of Artificial Sequence: Synthetic oligonucleotide
cugcccucccgagugcugg

SEQ ID NO: 3236707 - RNA, 19 nt, Artificial Sequence
  Description of Artificial Sequence: Synthetic oligonucleotide
guuucucuguguagcccug

SEQ ID NO: 3236708 - RNA, 19 nt, Artificial Sequence
  Description of Artificial Sequence: Synthetic oligonucleotide
gguuucucuguguagcccu

SEQ ID NO: 3236709 - RNA, 19 nt, Artificial Sequence
  Description of Artificial Sequence: Synthetic oligonucleotide
cucuguagaccaggcuggc

SEQ ID NO: 3236710 - RNA, 19 nt, Artificial Sequence
  Description of Artificial Sequence: Synthetic oligonucleotide
ugcccucccgagugcuggg

SEQ ID NO: 3236711 - RNA, 19 nt, Artificial Sequence
  Description of Artificial Sequence: Synthetic oligonucleotide
ucugccugccucugcccuc

SEQ ID NO: 3236712 - RNA, 19 nt, Artificial Sequence
  Description of Artificial Sequence: Synthetic oligonucleotide
gccucugcccucccgagug

SEQ ID NO: 3236713 - RNA, 19 nt, Artificial Sequence
  Description of Artificial Sequence: Synthetic oligonucleotide
aggcuggccucaaacucag

SEQ ID NO: 3236714 - RNA, 19 nt, Artificial Sequence
  Description of Artificial Sequence: Synthetic oligonucleotide
uugugccaccgacgcccgg

SEQ ID NO: 3236715 - RNA, 19 nt, Artificial Sequence
  Description of Artificial Sequence: Synthetic oligonucleotide
ugccucugcccucccgagu

SEQ ID NO: 3236716 - RNA, 19 nt, Artificial Sequence
  Description of Artificial Sequence: Synthetic oligonucleotide
ccaggcuggccucaaacuc

SEQ ID NO: 3236717 - RNA, 19 nt, Artificial Sequence
  Description of Artificial Sequence: Synthetic oligonucleotide
aauggaaguagccccaagc

SEQ ID NO: 3236718 - RNA, 19 nt, Artificial Sequence
  Description of Artificial Sequence: Synthetic oligonucleotide
auggaaguagccccaagcc

SEQ ID NO: 3236719 - RNA, 19 nt, Artificial Sequence
  Description of Artificial Sequence: Synthetic oligonucleotide
aacaggcgcgcccagucgc

SEQ ID NO: 3236720 - RNA, 19 nt, Artificial Sequence
  Description of Artificial Sequence: Synthetic oligonucleotide
acuugcuccccgcacaggc

SEQ ID NO: 3236721 - RNA, 19 nt, Artificial Sequence
  Description of Artificial Sequence: Synthetic oligonucleotide
ucuagcuccagcucucgcc

SEQ ID NO: 3236722 - RNA, 19 nt, Artificial Sequence
  Description of Artificial Sequence: Synthetic oligonucleotide
accgcucuucuccagcucc

SEQ ID NO: 3236723 - RNA, 19 nt, Artificial Sequence
  Description of Artificial Sequence: Synthetic oligonucleotide
ucaggugucgccacagcgc

SEQ ID NO: 3236724 - RNA, 19 nt, Artificial Sequence
  Description of Artificial Sequence: Synthetic oligonucleotide
aaauggaaguagccccaag

SEQ ID NO: 3236725 - RNA, 19 nt, Artificial Sequence
  Description of Artificial Sequence: Synthetic oligonucleotide
uggaaguagccccaagccu

SEQ ID NO: 3236726 - RNA, 19 nt, Artificial Sequence
  Description of Artificial Sequence: Synthetic oligonucleotide
cuagcuccagcucucgccg

SEQ ID NO: 3236727 - RNA, 19 nt, Artificial Sequence
  Description of Artificial Sequence: Synthetic oligonucleotide
cucaggugucgccacagcg

SEQ ID NO: 3236728 - RNA, 19 nt, Artificial Sequence
  Description of Artificial Sequence: Synthetic oligonucleotide
ucuucuccagcucccgcag

SEQ ID NO: 3236729 - RNA, 19 nt, Artificial Sequence
  Description of Artificial Sequence: Synthetic oligonucleotide
gccaaauggaaguagcccc

SEQ ID NO: 3236730 - RNA, 19 nt, Artificial Sequence
  Description of Artificial Sequence: Synthetic oligonucleotide
uugcuccccgcacaggcgg

SEQ ID NO: 3236731 - RNA, 19 nt, Artificial Sequence
  Description of Artificial Sequence: Synthetic oligonucleotide
agcaccgcucuucuccagc

SEQ ID NO: 3236732 - RNA, 19 nt, Artificial Sequence
  Description of Artificial Sequence: Synthetic oligonucleotide
ugcgccugcgcucuagcgc

SEQ ID NO: 3236733 - RNA, 19 nt, Artificial Sequence
  Description of Artificial Sequence: Synthetic oligonucleotide
gaaguagccccaagccucg

SEQ ID NO: 3236734 - RNA, 19 nt, Artificial Sequence
  Description of Artificial Sequence: Synthetic oligonucleotide
uccagcucccgcaggugcg

SEQ ID NO: 3236735 - RNA, 19 nt, Artificial Sequence
  Description of Artificial Sequence: Synthetic oligonucleotide
ugccgcagagcccugcgcc

SEQ ID NO: 3236736 - RNA, 19 nt, Artificial Sequence
  Description of Artificial Sequence: Synthetic oligonucleotide
aggucuggaagcccgggug

SEQ ID NO: 3236737 - RNA, 19 nt, Artificial Sequence
  Description of Artificial Sequence: Synthetic oligonucleotide
uucuccagcucccgcaggu

SEQ ID NO: 3236738 - RNA, 19 nt, Artificial Sequence
  Description of Artificial Sequence: Synthetic oligonucleotide
guagccccaagccucggag

SEQ ID NO: 3236739 - RNA, 19 nt, Artificial Sequence
  Description of Artificial Sequence: Synthetic oligonucleotide
caucugcuccaacaggcgc

SEQ ID NO: 3236740 - RNA, 19 nt, Artificial Sequence
  Description of Artificial Sequence: Synthetic oligonucleotide
ugcuccaacaggcgcgccc

SEQ ID NO: 3236741 - RNA, 19 nt, Artificial Sequence
  Description of Artificial Sequence: Synthetic oligonucleotide
ugcgcucuagcgcacguuc

SEQ ID NO: 3236742 - RNA, 19 nt, Artificial Sequence
  Description of Artificial Sequence: Synthetic oligonucleotide
aucugcuccaacaggcgcg

SEQ ID NO: 3236743 - RNA, 19 nt, Artificial Sequence
  Description of Artificial Sequence: Synthetic oligonucleotide
caggugucgccacagcgcc

SEQ ID NO: 3236744 - RNA, 19 nt, Artificial Sequence
  Description of Artificial Sequence: Synthetic oligonucleotide
agcuccagcucucgccggc

SEQ ID NO: 3236745 - RNA, 19 nt, Artificial Sequence
  Description of Artificial Sequence: Synthetic oligonucleotide
ucgccggcuaccccgcacg

SEQ ID NO: 3236746 - RNA, 19 nt, Artificial Sequence
  Description of Artificial Sequence: Synthetic oligonucleotide
uccaggucuggaagcccgg

SEQ ID NO: 3236747 - RNA, 19 nt, Artificial Sequence
  Description of Artificial Sequence: Synthetic oligonucleotide
ucggcagccgcgguggccg

SEQ ID NO: 3236748 - RNA, 19 nt, Artificial Sequence
  Description of Artificial Sequence: Synthetic oligonucleotide
cuugcuccccgcacaggcg

SEQ ID NO: 3236749 - RNA, 19 nt, Artificial Sequence
  Description of Artificial Sequence: Synthetic oligonucleotide
guggccgcccacuugcucc

SEQ ID NO: 3236750 - RNA, 19 nt, Artificial Sequence
  Description of Artificial Sequence: Synthetic oligonucleotide
ucuagcgcacguuccgccu

SEQ ID NO: 3236751 - RNA, 19 nt, Artificial Sequence
  Description of Artificial Sequence: Synthetic oligonucleotide
cccaucugcuccaacaggc

SEQ ID NO: 3236752 - RNA, 19 nt, Artificial Sequence
  Description of Artificial Sequence: Synthetic oligonucleotide
cucuagcgcacguuccgcc

SEQ ID NO: 3236753 - RNA, 19 nt, Artificial Sequence
  Description of Artificial Sequence: Synthetic oligonucleotide
cucgcgccgcucuagcucc

SEQ ID NO: 3236754 - RNA, 19 nt, Artificial Sequence
  Description of Artificial Sequence: Synthetic oligonucleotide
gguguccgggccuagccgg

SEQ ID NO: 3236755 - RNA, 19 nt, Artificial Sequence
  Description of Artificial Sequence: Synthetic oligonucleotide
aagggcugccucgcgccgc

SEQ ID NO: 3236756 - RNA, 19 nt, Artificial Sequence
  Description of Artificial Sequence: Synthetic oligonucleotide
ggaaguagccccaagccuc

SEQ ID NO: 3236757 - RNA, 19 nt, Artificial Sequence
  Description of Artificial Sequence: Synthetic oligonucleotide
gaagggcugccucgcgccg

SEQ ID NO: 3236758 - RNA, 19 nt, Artificial Sequence
  Description of Artificial Sequence: Synthetic oligonucleotide
cugccgaagggcugccucg

SEQ ID NO: 3236759 - RNA, 19 nt, Artificial Sequence
  Description of Artificial Sequence: Synthetic oligonucleotide
cuagccggggccaaaugga

SEQ ID NO: 3236760 - RNA, 19 nt, Artificial Sequence
  Description of Artificial Sequence: Synthetic oligonucleotide
ggucuggaagcccgggugg

SEQ ID NO: 3236761 - RNA, 19 nt, Artificial Sequence
  Description of Artificial Sequence: Synthetic oligonucleotide
guccaggucuggaagcccg

SEQ ID NO: 3236762 - RNA, 19 nt, Artificial Sequence
  Description of Artificial Sequence: Synthetic oligonucleotide
ggugguggagggcagggug

SEQ ID NO: 3236763 - RNA, 19 nt, Artificial Sequence
  Description of Artificial Sequence: Synthetic oligonucleotide
uggagggcagggugcggcg

SEQ ID NO: 3236764 - RNA, 19 nt, Artificial Sequence
  Description of Artificial Sequence: Synthetic oligonucleotide
ucugcuccaacaggcgcgc

SEQ ID NO: 3236765 - RNA, 19 nt, Artificial Sequence
  Description of Artificial Sequence: Synthetic oligonucleotide
ugguggagggcagggugcg

SEQ ID NO: 3236766 - RNA, 19 nt, Artificial Sequence
  Description of Artificial Sequence: Synthetic oligonucleotide
uggcccaggugcccgucgg

SEQ ID NO: 3236767 - RNA, 19 nt, Artificial Sequence
  Description of Artificial Sequence: Synthetic oligonucleotide
cuccagcucccgcaggugc

SEQ ID NO: 3236768 - RNA, 19 nt, Artificial Sequence
  Description of Artificial Sequence: Synthetic oligonucleotide
ggccaaauggaaguagccc

SEQ ID NO: 3236769 - RNA, 19 nt, Artificial Sequence
  Description of Artificial Sequence: Synthetic oligonucleotide
gagggcagggugcggcggg

SEQ ID NO: 3236770 - RNA, 19 nt, Artificial Sequence
  Description of Artificial Sequence: Synthetic oligonucleotide
ccuagccggggccaaaugg

SEQ ID NO: 3236771 - RNA, 19 nt, Artificial Sequence
  Description of Artificial Sequence: Synthetic oligonucleotide
agcgcccgcguccaggucu

SEQ ID NO: 3236772 - RNA, 19 nt, Artificial Sequence
  Description of Artificial Sequence: Synthetic oligonucleotide
accccgcacggccagcgcg

SEQ ID NO: 3236773 - RNA, 19 nt, Artificial Sequence
  Description of Artificial Sequence: Synthetic oligonucleotide
agcucucgccggcuacccc

SEQ ID NO: 3236774 - RNA, 19 nt, Artificial Sequence
  Description of Artificial Sequence: Synthetic oligonucleotide
uuccgccugccgaagggcu

SEQ ID NO: 3236775 - RNA, 19 nt, Artificial Sequence
  Description of Artificial Sequence: Synthetic oligonucleotide
caacaggcgcgcccagucg

SEQ ID NO: 3236776 - RNA, 19 nt, Artificial Sequence
  Description of Artificial Sequence: Synthetic oligonucleotide
agagcccugcgccugcgcu

SEQ ID NO: 3236777 - RNA, 19 nt, Artificial Sequence
  Description of Artificial Sequence: Synthetic oligonucleotide
acggccagcgcgcccaucu

SEQ ID NO: 3236778 - RNA, 19 nt, Artificial Sequence
  Description of Artificial Sequence: Synthetic oligonucleotide
gcucucgccggcuaccccg

SEQ ID NO: 3236779 - RNA, 19 nt, Artificial Sequence
  Description of Artificial Sequence: Synthetic oligonucleotide
agucgcccucggcagccgc

SEQ ID NO: 3236780 - RNA, 19 nt, Artificial Sequence
  Description of Artificial Sequence: Synthetic oligonucleotide
cuggaagcccggguggccg

SEQ ID NO: 3236781 - RNA, 19 nt, Artificial Sequence
  Description of Artificial Sequence: Synthetic oligonucleotide
cucuucuccagcucccgca

SEQ ID NO: 3236782 - RNA, 19 nt, Artificial Sequence
  Description of Artificial Sequence: Synthetic oligonucleotide
ggugucgccacagcgcccg

SEQ ID NO: 3236783 - RNA, 19 nt, Artificial Sequence
  Description of Artificial Sequence: Synthetic oligonucleotide
ccgagcaccgcucuucucc

SEQ ID NO: 3236784 - RNA, 19 nt, Artificial Sequence
  Description of Artificial Sequence: Synthetic oligonucleotide
uagccggggccaaauggaa

SEQ ID NO: 3236785 - RNA, 19 nt, Artificial Sequence
  Description of Artificial Sequence: Synthetic oligonucleotide
uccagcucucgccggcuac

SEQ ID NO: 3236786 - RNA, 19 nt, Artificial Sequence
  Description of Artificial Sequence: Synthetic oligonucleotide
ugcccgucggguguccggg

SEQ ID NO: 3236787 - RNA, 19 nt, Artificial Sequence
  Description of Artificial Sequence: Synthetic oligonucleotide
uagcgcacguuccgccugc

SEQ ID NO: 3236788 - RNA, 19 nt, Artificial Sequence
  Description of Artificial Sequence: Synthetic oligonucleotide
uagcuccagcucucgccgg

SEQ ID NO: 3236789 - RNA, 19 nt, Artificial Sequence
  Description of Artificial Sequence: Synthetic oligonucleotide
agcucccgcaggugcgcgc

SEQ ID NO: 3236790 - RNA, 19 nt, Artificial Sequence
  Description of Artificial Sequence: Synthetic oligonucleotide
aguagccccaagccucgga

SEQ ID NO: 3236791 - RNA, 19 nt, Artificial Sequence
  Description of Artificial Sequence: Synthetic oligonucleotide
cagcgcgcccaucugcucc

SEQ ID NO: 3236792 - RNA, 19 nt, Artificial Sequence
  Description of Artificial Sequence: Synthetic oligonucleotide
ucuggaagcccggguggcc

SEQ ID NO: 3236793 - RNA, 19 nt, Artificial Sequence
  Description of Artificial Sequence: Synthetic oligonucleotide
uccgccugccgaagggcug

SEQ ID NO: 3236794 - RNA, 19 nt, Artificial Sequence
  Description of Artificial Sequence: Synthetic oligonucleotide
cuagcgcacguuccgccug

SEQ ID NO: 3236795 - RNA, 19 nt, Artificial Sequence
  Description of Artificial Sequence: Synthetic oligonucleotide
acguuccgccugccgaagg

SEQ ID NO: 3236796 - RNA, 19 nt, Artificial Sequence
  Description of Artificial Sequence: Synthetic oligonucleotide
cuucuccagcucccgcagg

SEQ ID NO: 3236797 - RNA, 19 nt, Artificial Sequence
  Description of Artificial Sequence: Synthetic oligonucleotide
cucuagcuccagcucucgc

SEQ ID NO: 3236798 - RNA, 19 nt, Artificial Sequence
  Description of Artificial Sequence: Synthetic oligonucleotide
cugcgccugcgcucuagcg

SEQ ID NO: 3236799 - RNA, 19 nt, Artificial Sequence
  Description of Artificial Sequence: Synthetic oligonucleotide
acaggcggcagguggccca

SEQ ID NO: 3236800 - RNA, 19 nt, Artificial Sequence
  Description of Artificial Sequence: Synthetic oligonucleotide
aaguagccccaagccucgg

SEQ ID NO: 3236801 - RNA, 19 nt, Artificial Sequence
  Description of Artificial Sequence: Synthetic oligonucleotide
agccccaagccucggagua

SEQ ID NO: 3236802 - RNA, 19 nt, Artificial Sequence
  Description of Artificial Sequence: Synthetic oligonucleotide
ccaucugcuccaacaggcg

SEQ ID NO: 3236803 - RNA, 19 nt, Artificial Sequence
  Description of Artificial Sequence: Synthetic oligonucleotide
acagcgcccgcguccaggu

SEQ ID NO: 3236804 - RNA, 19 nt, Artificial Sequence
  Description of Artificial Sequence: Synthetic oligonucleotide
aggugcgcgccgcucaggu

SEQ ID NO: 3236805 - RNA, 19 nt, Artificial Sequence
  Description of Artificial Sequence: Synthetic oligonucleotide
uccgggccuagccggggcc

SEQ ID NO: 3236806 - RNA, 19 nt, Artificial Sequence
  Description of Artificial Sequence: Synthetic oligonucleotide
uagccccaagccucggagu

SEQ ID NO: 3236807 - RNA, 19 nt, Artificial Sequence
  Description of Artificial Sequence: Synthetic oligonucleotide
uccccgcacaggcggcagg

SEQ ID NO: 3236808 - RNA, 19 nt, Artificial Sequence
  Description of Artificial Sequence: Synthetic oligonucleotide
ugucgccacagcgcccgcg

SEQ ID NO: 3236809 - RNA, 19 nt, Artificial Sequence
  Description of Artificial Sequence: Synthetic oligonucleotide
gugguggagggcagggugc

SEQ ID NO: 3236810 - RNA, 19 nt, Artificial Sequence
  Description of Artificial Sequence: Synthetic oligonucleotide
ggggccaaauggaaguagc

SEQ ID NO: 3236811 - RNA, 19 nt, Artificial Sequence
  Description of Artificial Sequence: Synthetic oligonucleotide
ugccucgcgccgcucuagc

SEQ ID NO: 3236812 - RNA, 19 nt, Artificial Sequence
  Description of Artificial Sequence: Synthetic oligonucleotide
acaggcgcgcccagucgcc

SEQ ID NO: 3236813 - RNA, 19 nt, Artificial Sequence
  Description of Artificial Sequence: Synthetic oligonucleotide
guggagggcagggugcggc

SEQ ID NO: 3236814 - RNA, 19 nt, Artificial Sequence
  Description of Artificial Sequence: Synthetic oligonucleotide
uggaagcccggguggccgc

SEQ ID NO: 3236815 - RNA, 19 nt, Artificial Sequence
  Description of Artificial Sequence: Synthetic oligonucleotide
gcccaucugcuccaacagg

SEQ ID NO: 3236816 - RNA, 19 nt, Artificial Sequence
  Description of Artificial Sequence: Synthetic oligonucleotide
ggguguccgggccuagccg

SEQ ID NO: 3236817 - RNA, 19 nt, Artificial Sequence
  Description of Artificial Sequence: Synthetic oligonucleotide
aaguuuguuagcuugcagc

SEQ ID NO: 3236818 - RNA, 19 nt, Artificial Sequence
  Description of Artificial Sequence: Synthetic oligonucleotide
ugaaacuuaaacaaguggc

SEQ ID NO: 3236819 - RNA, 19 nt, Artificial Sequence
  Description of Artificial Sequence: Synthetic oligonucleotide
aaggguaauacaaagaaac

SEQ ID NO: 3236820 - RNA, 19 nt, Artificial Sequence
  Description of Artificial Sequence: Synthetic oligonucleotide
aaguagauauaacagauug

SEQ ID NO: 3236821 - RNA, 19 nt, Artificial Sequence
  Description of Artificial Sequence: Synthetic oligonucleotide
aacuuaaacaaguggcucc

SEQ ID NO: 3236822 - RNA, 19 nt, Artificial Sequence
  Description of Artificial Sequence: Synthetic oligonucleotide
uuucaaaauaccuuacugg

SEQ ID NO: 3236823 - RNA, 19 nt, Artificial Sequence
  Description of Artificial Sequence: Synthetic oligonucleotide
agagaugagagacaaagac

SEQ ID NO: 3236824 - RNA, 19 nt, Artificial Sequence
  Description of Artificial Sequence: Synthetic oligonucleotide
auuguaagaaauuagauuu

SEQ ID NO: 3236825 - RNA, 19 nt, Artificial Sequence
  Description of Artificial Sequence: Synthetic oligonucleotide
aaugcuacacaguuguuuc

SEQ ID NO: 3236826 - RNA, 19 nt, Artificial Sequence
  Description of Artificial Sequence: Synthetic oligonucleotide
aggauuuuaaaauucuugg

SEQ ID NO: 3236827 - RNA, 19 nt, Artificial Sequence
  Description of Artificial Sequence: Synthetic oligonucleotide
auuucauuaaauacaagcc

SEQ ID NO: 3236828 - RNA, 19 nt, Artificial Sequence
  Description of Artificial Sequence: Synthetic oligonucleotide
aucuaaaggagccacgugc

SEQ ID NO: 3236829 - RNA, 19 nt, Artificial Sequence
  Description of Artificial Sequence: Synthetic oligonucleotide
augaugaaugcacugaaac

SEQ ID NO: 3236830 - RNA, 19 nt, Artificial Sequence
  Description of Artificial Sequence: Synthetic oligonucleotide
aggaauauaaaauauguaa

SEQ ID NO: 3236831 - RNA, 19 nt, Artificial Sequence
  Description of Artificial Sequence: Synthetic oligonucleotide
cauauaagagcaaagucag

SEQ ID NO: 3236832 - RNA, 19 nt, Artificial Sequence
  Description of Artificial Sequence: Synthetic oligonucleotide
uuaaguagauauaacagau

SEQ ID NO: 3236833 - RNA, 19 nt, Artificial Sequence
  Description of Artificial Sequence: Synthetic oligonucleotide
uuucuaagaguucauagcu

SEQ ID NO: 3236834 - RNA, 19 nt, Artificial Sequence
  Description of Artificial Sequence: Synthetic oligonucleotide
cagacuguuaucaagcugg

SEQ ID NO: 3236835 - RNA, 19 nt, Artificial Sequence
  Description of Artificial Sequence: Synthetic oligonucleotide
uuuauaucaacuucugugu

SEQ ID NO: 3236836 - RNA, 19 nt, Artificial Sequence
  Description of Artificial Sequence: Synthetic oligonucleotide
uuuaauaucguuauccauu

SEQ ID NO: 3236837 - RNA, 19 nt, Artificial Sequence
  Description of Artificial Sequence: Synthetic oligonucleotide
uauaagagcaaagucaggc

SEQ ID NO: 3236838 - RNA, 19 nt, Artificial Sequence
  Description of Artificial Sequence: Synthetic oligonucleotide
acuaucaguagcuagcaag

SEQ ID NO: 3236839 - RNA, 19 nt, Artificial Sequence
  Description of Artificial Sequence: Synthetic oligonucleotide
ugaguguucugucagacug

SEQ ID NO: 3236840 - RNA, 19 nt, Artificial Sequence
  Description of Artificial Sequence: Synthetic oligonucleotide
uuuuguuugugcacgauga

SEQ ID NO: 3236841 - RNA, 19 nt, Artificial Sequence
  Description of Artificial Sequence: Synthetic oligonucleotide
acaauuuaggaauauaaaa

SEQ ID NO: 3236842 - RNA, 19 nt, Artificial Sequence
  Description of Artificial Sequence: Synthetic oligonucleotide
aacauuaccaguacuauca

SEQ ID NO: 3236843 - RNA, 19 nt, Artificial Sequence
  Description of Artificial Sequence: Synthetic oligonucleotide
guuguaaacaguuuguuuc

SEQ ID NO: 3236844 - RNA, 19 nt, Artificial Sequence
  Description of Artificial Sequence: Synthetic oligonucleotide
uuuagguaagccauucugc

SEQ ID NO: 3236845 - RNA, 19 nt, Artificial Sequence
  Description of Artificial Sequence: Synthetic oligonucleotide
agaguucauagcuuaaagg

SEQ ID NO: 3236846 - RNA, 19 nt, Artificial Sequence
  Description of Artificial Sequence: Synthetic oligonucleotide
aagaguucauagcuuaaag

SEQ ID NO: 3236847 - RNA, 19 nt, Artificial Sequence
  Description of Artificial Sequence: Synthetic oligonucleotide
aguacuaucaguagcuagc

SEQ ID NO: 3236848 - RNA, 19 nt, Artificial Sequence
  Description of Artificial Sequence: Synthetic oligonucleotide
gaguucauagcuuaaagga

SEQ ID NO: 3236849 - RNA, 19 nt, Artificial Sequence
  Description of Artificial Sequence: Synthetic oligonucleotide
cuuacuacuagcugaaaug

SEQ ID NO: 3236850 - RNA, 19 nt, Artificial Sequence
  Description of Artificial Sequence: Synthetic oligonucleotide
ugcaaugcuacacaguugu

SEQ ID NO: 3236851 - RNA, 19 nt, Artificial Sequence
  Description of Artificial Sequence: Synthetic oligonucleotide
uacuucaccauuuucguug

SEQ ID NO: 3236852 - RNA, 19 nt, Artificial Sequence
  Description of Artificial Sequence: Synthetic oligonucleotide
guagagaugagagacaaag

SEQ ID NO: 3236853 - RNA, 19 nt, Artificial Sequence
  Description of Artificial Sequence: Synthetic oligonucleotide
uagauuuucaacuuucaaa

SEQ ID NO: 3236854 - RNA, 19 nt, Artificial Sequence
  Description of Artificial Sequence: Synthetic oligonucleotide
ugaaaugggcuuuucaaca

SEQ ID NO: 3236855 - RNA, 19 nt, Artificial Sequence
  Description of Artificial Sequence: Synthetic oligonucleotide
ucuauuuauuucauuaaau

SEQ ID NO: 3236856 - RNA, 19 nt, Artificial Sequence
  Description of Artificial Sequence: Synthetic oligonucleotide
ugcacgaugacucugcgcu

SEQ ID NO: 3236857 - RNA, 19 nt, Artificial Sequence
  Description of Artificial Sequence: Synthetic oligonucleotide
ugucagacuguuaucaagc

SEQ ID NO: 3236858 - RNA, 19 nt, Artificial Sequence
  Description of Artificial Sequence: Synthetic oligonucleotide
aaacuuaaacaaguggcuc

SEQ ID NO: 3236859 - RNA, 19 nt, Artificial Sequence
  Description of Artificial Sequence: Synthetic oligonucleotide
ucuccauuaguuccagucg

SEQ ID NO: 3236860 - RNA, 19 nt, Artificial Sequence
  Description of Artificial Sequence: Synthetic oligonucleotide
aaauaagcucuccgacucc

SEQ ID NO: 3236861 - RNA, 19 nt, Artificial Sequence
  Description of Artificial Sequence: Synthetic oligonucleotide
uaucguuauccauugagug

SEQ ID NO: 3236862 - RNA, 19 nt, Artificial Sequence
  Description of Artificial Sequence: Synthetic oligonucleotide
ucuauaggcuaaauaagcu

SEQ ID NO: 3236863 - RNA, 19 nt, Artificial Sequence
  Description of Artificial Sequence: Synthetic oligonucleotide
agcacaucaugauccaugc

SEQ ID NO: 3236864 - RNA, 19 nt, Artificial Sequence
  Description of Artificial Sequence: Synthetic oligonucleotide
cuaucaguagcuagcaagg

SEQ ID NO: 3236865 - RNA, 19 nt, Artificial Sequence
  Description of Artificial Sequence: Synthetic oligonucleotide
aaggauuuuaaaauucuug

SEQ ID NO: 3236866 - RNA, 19 nt, Artificial Sequence
  Description of Artificial Sequence: Synthetic oligonucleotide
aacucacgagcauauuugg

SEQ ID NO: 3236867 - RNA, 19 nt, Artificial Sequence
  Description of Artificial Sequence: Synthetic oligonucleotide
acuacuagcugaaaugggc

SEQ ID NO: 3236868 - RNA, 19 nt, Artificial Sequence
  Description of Artificial Sequence: Synthetic oligonucleotide
cugaaacuuaaacaagugg

SEQ ID NO: 3236869 - RNA, 19 nt, Artificial Sequence
  Description of Artificial Sequence: Synthetic oligonucleotide
uaaauccccaaacucacga

SEQ ID NO: 3236870 - RNA, 19 nt, Artificial Sequence
  Description of Artificial Sequence: Synthetic oligonucleotide
uguucugaaucccuaaggu

SEQ ID NO: 3236871 - RNA, 19 nt, Artificial Sequence
  Description of Artificial Sequence: Synthetic oligonucleotide
uuuuaacugguccauucug

SEQ ID NO: 3236872 - RNA, 19 nt, Artificial Sequence
  Description of Artificial Sequence: Synthetic oligonucleotide
uuuaacugguccauucuga

SEQ ID NO: 3236873 - RNA, 19 nt, Artificial Sequence
  Description of Artificial Sequence: Synthetic oligonucleotide
ugacuuucaaggucggccg

SEQ ID NO: 3236874 - RNA, 19 nt, Artificial Sequence
  Description of Artificial Sequence: Synthetic oligonucleotide
uauaucaacuucuguguug

SEQ ID NO: 3236875 - RNA, 19 nt, Artificial Sequence
  Description of Artificial Sequence: Synthetic oligonucleotide
aaauacaagccugaaauuu

SEQ ID NO: 3236876 - RNA, 19 nt, Artificial Sequence
  Description of Artificial Sequence: Synthetic oligonucleotide
ucaguagcuagcaaggguc

SEQ ID NO: 3236877 - RNA, 19 nt, Artificial Sequence
  Description of Artificial Sequence: Synthetic oligonucleotide
aauccaaaggguaauacaa

SEQ ID NO: 3236878 - RNA, 19 nt, Artificial Sequence
  Description of Artificial Sequence: Synthetic oligonucleotide
uuagguaagccauucugca

SEQ ID NO: 3236879 - RNA, 19 nt, Artificial Sequence
  Description of Artificial Sequence: Synthetic oligonucleotide
aaaauauguaaauccccaa

SEQ ID NO: 3236880 - RNA, 19 nt, Artificial Sequence
  Description of Artificial Sequence: Synthetic oligonucleotide
acauccucccuguucacgc

SEQ ID NO: 3236881 - RNA, 19 nt, Artificial Sequence
  Description of Artificial Sequence: Synthetic oligonucleotide
cugaguaugagcuccgccc

SEQ ID NO: 3236882 - RNA, 19 nt, Artificial Sequence
  Description of Artificial Sequence: Synthetic oligonucleotide
auuucugcugacuuucaag

SEQ ID NO: 3236883 - RNA, 19 nt, Artificial Sequence
  Description of Artificial Sequence: Synthetic oligonucleotide
augauggcgguuugggugc

SEQ ID NO: 3236884 - RNA, 19 nt, Artificial Sequence
  Description of Artificial Sequence: Synthetic oligonucleotide
cucucuauaggcuaaauaa

SEQ ID NO: 3236885 - RNA, 19 nt, Artificial Sequence
  Description of Artificial Sequence: Synthetic oligonucleotide
uuuuccaacguggauguag

SEQ ID NO: 3236886 - RNA, 19 nt, Artificial Sequence
  Description of Artificial Sequence: Synthetic oligonucleotide
ucguguuuccauaauccag

SEQ ID NO: 3236887 - RNA, 19 nt, Artificial Sequence
  Description of Artificial Sequence: Synthetic oligonucleotide
cuaaguucagcccauaaga

SEQ ID NO: 3236888 - RNA, 19 nt, Artificial Sequence
  Description of Artificial Sequence: Synthetic oligonucleotide
uauaacagauuguaagaaa

SEQ ID NO: 3236889 - RNA, 19 nt, Artificial Sequence
  Description of Artificial Sequence: Synthetic oligonucleotide
uucauuguuuccuggccgg

SEQ ID NO: 3236890 - RNA, 19 nt, Artificial Sequence
  Description of Artificial Sequence: Synthetic oligonucleotide
cuuacuggagcuuugacaa

SEQ ID NO: 3236891 - RNA, 19 nt, Artificial Sequence
  Description of Artificial Sequence: Synthetic oligonucleotide
uguggggacaucauaggca

SEQ ID NO: 3236892 - RNA, 19 nt, Artificial Sequence
  Description of Artificial Sequence: Synthetic oligonucleotide
cuuucuuacuacuagcuga

SEQ ID NO: 3236893 - RNA, 19 nt, Artificial Sequence
  Description of Artificial Sequence: Synthetic oligonucleotide
gaauauaaaauauguaaau

SEQ ID NO: 3236894 - RNA, 19 nt, Artificial Sequence
  Description of Artificial Sequence: Synthetic oligonucleotide
caaacauccacaaggugac

SEQ ID NO: 3236895 - RNA, 19 nt, Artificial Sequence
  Description of Artificial Sequence: Synthetic oligonucleotide
aaacucacgagcauauuug

SEQ ID NO: 3236896 - RNA, 19 nt, Artificial Sequence
  Description of Artificial Sequence: Synthetic oligonucleotide
ugacauauaagagcaaagu

SEQ ID NO: 3236897 - RNA, 19 nt, Artificial Sequence
  Description of Artificial Sequence: Synthetic oligonucleotide
gguaauacaaagaaacagc

SEQ ID NO: 3236898 - RNA, 19 nt, Artificial Sequence
  Description of Artificial Sequence: Synthetic oligonucleotide
uacuacuagcugaaauggg

SEQ ID NO: 3236899 - RNA, 19 nt, Artificial Sequence
  Description of Artificial Sequence: Synthetic oligonucleotide
uaaacaaguggcuccaaaa

SEQ ID NO: 3236900 - RNA, 19 nt, Artificial Sequence
  Description of Artificial Sequence: Synthetic oligonucleotide
acugaguaugagcuccgcc

SEQ ID NO: 3236901 - RNA, 19 nt, Artificial Sequence
  Description of Artificial Sequence: Synthetic oligonucleotide
aacagauuguaagaaauua

SEQ ID NO: 3236902 - RNA, 19 nt, Artificial Sequence
  Description of Artificial Sequence: Synthetic oligonucleotide
cuaaggugguuguaaacag

SEQ ID NO: 3236903 - RNA, 19 nt, Artificial Sequence
  Description of Artificial Sequence: Synthetic oligonucleotide
acaagccugaaauuuuaag

SEQ ID NO: 3236904 - RNA, 19 nt, Artificial Sequence
  Description of Artificial Sequence: Synthetic oligonucleotide
uuaguuccagucgaguuag

SEQ ID NO: 3236905 - RNA, 19 nt, Artificial Sequence
  Description of Artificial Sequence: Synthetic oligonucleotide
agccugaaauuuuaaguag

SEQ ID NO: 3236906 - RNA, 19 nt, Artificial Sequence
  Description of Artificial Sequence: Synthetic oligonucleotide
aaauccccaaacucacgag

SEQ ID NO: 3236907 - RNA, 19 nt, Artificial Sequence
  Description of Artificial Sequence: Synthetic oligonucleotide
cuucauuguuuccuggccg

SEQ ID NO: 3236908 - RNA, 19 nt, Artificial Sequence
  Description of Artificial Sequence: Synthetic oligonucleotide
uuuugaagcuggaugcacu

SEQ ID NO: 3236909 - RNA, 19 nt, Artificial Sequence
  Description of Artificial Sequence: Synthetic oligonucleotide
aacguggauguagagauga

SEQ ID NO: 3236910 - RNA, 19 nt, Artificial Sequence
  Description of Artificial Sequence: Synthetic oligonucleotide
uuucuuacuacuagcugaa

SEQ ID NO: 3236911 - RNA, 19 nt, Artificial Sequence
  Description of Artificial Sequence: Synthetic oligonucleotide
ugaguaucacaguuuauau

SEQ ID NO: 3236912 - RNA, 19 nt, Artificial Sequence
  Description of Artificial Sequence: Synthetic oligonucleotide
cugcugacuuucaaggucg

SEQ ID NO: 3236913 - RNA, 19 nt, Artificial Sequence
  Description of Artificial Sequence: Synthetic oligonucleotide
ucugcugacuuucaagguc

SEQ ID NO: 3236914 - RNA, 19 nt, Artificial Sequence
  Description of Artificial Sequence: Synthetic oligonucleotide
auagcuuaaaggaauguga

SEQ ID NO: 3236915 - RNA, 19 nt, Artificial Sequence
  Description of Artificial Sequence: Synthetic oligonucleotide
uguaagaaauuagauuuuc

SEQ ID NO: 3236916 - RNA, 19 nt, Artificial Sequence
  Description of Artificial Sequence: Synthetic oligonucleotide
caaaggguaauacaaagaa

SEQ ID NO: 3236917 - RNA, 19 nt, Artificial Sequence
  Description of Artificial Sequence: Synthetic oligonucleotide
gauaaagucacauagcuac

SEQ ID NO: 3236918 - RNA, 19 nt, Artificial Sequence
  Description of Artificial Sequence: Synthetic oligonucleotide
uuguauaucauccuuuugg

SEQ ID NO: 3236919 - RNA, 19 nt, Artificial Sequence
  Description of Artificial Sequence: Synthetic oligonucleotide
aauacugacagaugaacuc

SEQ ID NO: 3236920 - RNA, 19 nt, Artificial Sequence
  Description of Artificial Sequence: Synthetic oligonucleotide
uuaguuaaggucuugaaca

SEQ ID NO: 3236921 - RNA, 19 nt, Artificial Sequence
  Description of Artificial Sequence: Synthetic oligonucleotide
ucuuuuguaaaacagcuug

SEQ ID NO: 3236922 - RNA, 19 nt, Artificial Sequence
  Description of Artificial Sequence: Synthetic oligonucleotide
acuggaagcaagcaaagcc

SEQ ID NO: 3236923 - RNA, 19 nt, Artificial Sequence
  Description of Artificial Sequence: Synthetic oligonucleotide
uuugcuaucuucuuucagg

SEQ ID NO: 3236924 - RNA, 19 nt, Artificial Sequence
  Description of Artificial Sequence: Synthetic oligonucleotide
uuguaaaacagcuuggacc

SEQ ID NO: 3236925 - RNA, 19 nt, Artificial Sequence
  Description of Artificial Sequence: Synthetic oligonucleotide
aaaugcuucacucaucucu

SEQ ID NO: 3236926 - RNA, 19 nt, Artificial Sequence
  Description of Artificial Sequence: Synthetic oligonucleotide
acacaaugcaacuauagag

SEQ ID NO: 3236927 - RNA, 19 nt, Artificial Sequence
  Description of Artificial Sequence: Synthetic oligonucleotide
gagaucugaguuuucaugg

SEQ ID NO: 3236928 - RNA, 19 nt, Artificial Sequence
  Description of Artificial Sequence: Synthetic oligonucleotide
aguauggcaucucaugugc

SEQ ID NO: 3236929 - RNA, 19 nt, Artificial Sequence
  Description of Artificial Sequence: Synthetic oligonucleotide
uuuccuugcacugagaagc

SEQ ID NO: 3236930 - RNA, 19 nt, Artificial Sequence
  Description of Artificial Sequence: Synthetic oligonucleotide
uuccauuuguccaauagug

SEQ ID NO: 3236931 - RNA, 19 nt, Artificial Sequence
  Description of Artificial Sequence: Synthetic oligonucleotide
uuugcugguuucuucaacg

SEQ ID NO: 3236932 - RNA, 19 nt, Artificial Sequence
  Description of Artificial Sequence: Synthetic oligonucleotide
ugcuuugucgccaucacag

SEQ ID NO: 3236933 - RNA, 19 nt, Artificial Sequence
  Description of Artificial Sequence: Synthetic oligonucleotide
aaggauaugccuuuucaca

SEQ ID NO: 3236934 - RNA, 19 nt, Artificial Sequence
  Description of Artificial Sequence: Synthetic oligonucleotide
aauuucacuauguggucag

SEQ ID NO: 3236935 - RNA, 19 nt, Artificial Sequence
  Description of Artificial Sequence: Synthetic oligonucleotide
uuaagagucucguucaaug

SEQ ID NO: 3236936 - RNA, 19 nt, Artificial Sequence
  Description of Artificial Sequence: Synthetic oligonucleotide
aaagcucgcagauguaagg

SEQ ID NO: 3236937 - RNA, 19 nt, Artificial Sequence
  Description of Artificial Sequence: Synthetic oligonucleotide
cacaaugcaacuauagagc

SEQ ID NO: 3236938 - RNA, 19 nt, Artificial Sequence
  Description of Artificial Sequence: Synthetic oligonucleotide
aagggguauguucuucucc

SEQ ID NO: 3236939 - RNA, 19 nt, Artificial Sequence
  Description of Artificial Sequence: Synthetic oligonucleotide
aauuacuggcuuuaucugu

SEQ ID NO: 3236940 - RNA, 19 nt, Artificial Sequence
  Description of Artificial Sequence: Synthetic oligonucleotide
uguuaucuggcaaaggggu

SEQ ID NO: 3236941 - RNA, 19 nt, Artificial Sequence
  Description of Artificial Sequence: Synthetic oligonucleotide
accgaugaaaacuggcugc

SEQ ID NO: 3236942 - RNA, 19 nt, Artificial Sequence
  Description of Artificial Sequence: Synthetic oligonucleotide
ugauacuuggguuuccucc

SEQ ID NO: 3236943 - RNA, 19 nt, Artificial Sequence
  Description of Artificial Sequence: Synthetic oligonucleotide
ugcaacauugcuauuugug

SEQ ID NO: 3236944 - RNA, 19 nt, Artificial Sequence
  Description of Artificial Sequence: Synthetic oligonucleotide
uccauuuguccaauagugg

SEQ ID NO: 3236945 - RNA, 19 nt, Artificial Sequence
  Description of Artificial Sequence: Synthetic oligonucleotide
auugcugugcuuaaucacc

SEQ ID NO: 3236946 - RNA, 19 nt, Artificial Sequence
  Description of Artificial Sequence: Synthetic oligonucleotide
aagcaagcaaagccuuucc

SEQ ID NO: 3236947 - RNA, 19 nt, Artificial Sequence
  Description of Artificial Sequence: Synthetic oligonucleotide
uacguuugcacacaaugca

SEQ ID NO: 3236948 - RNA, 19 nt, Artificial Sequence
  Description of Artificial Sequence: Synthetic oligonucleotide
uccugcuuaguuaaggucu

SEQ ID NO: 3236949 - RNA, 19 nt, Artificial Sequence
  Description of Artificial Sequence: Synthetic oligonucleotide
auuuuaagagucucguuca

SEQ ID NO: 3236950 - RNA, 19 nt, Artificial Sequence
  Description of Artificial Sequence: Synthetic oligonucleotide
guuauuucugguacuaagg

SEQ ID NO: 3236951 - RNA, 19 nt, Artificial Sequence
  Description of Artificial Sequence: Synthetic oligonucleotide
caucucuacgcauucagcc

SEQ ID NO: 3236952 - RNA, 19 nt, Artificial Sequence
  Description of Artificial Sequence: Synthetic oligonucleotide
ugggauaguuucuaaaacu

SEQ ID NO: 3236953 - RNA, 19 nt, Artificial Sequence
  Description of Artificial Sequence: Synthetic oligonucleotide
agagaucugaguuuucaug

SEQ ID NO: 3236954 - RNA, 19 nt, Artificial Sequence
  Description of Artificial Sequence: Synthetic oligonucleotide
uguaaguuucaauuuugcu

SEQ ID NO: 3236955 - RNA, 19 nt, Artificial Sequence
  Description of Artificial Sequence: Synthetic oligonucleotide
uaaggcuucaacgugagau

SEQ ID NO: 3236956 - RNA, 19 nt, Artificial Sequence
  Description of Artificial Sequence: Synthetic oligonucleotide
caacuauagagcaucugcc

SEQ ID NO: 3236957 - RNA, 19 nt, Artificial Sequence
  Description of Artificial Sequence: Synthetic oligonucleotide
ugacagaugaacuccuuca

SEQ ID NO: 3236958 - RNA, 19 nt, Artificial Sequence
  Description of Artificial Sequence: Synthetic oligonucleotide
aagcucgcagauguaaggc

SEQ ID NO: 3236959 - RNA, 19 nt, Artificial Sequence
  Description of Artificial Sequence: Synthetic oligonucleotide
ucucguucaaugugaaugc

SEQ ID NO: 3236960 - RNA, 19 nt, Artificial Sequence
  Description of Artificial Sequence: Synthetic oligonucleotide
ucacacuggaguuugggca

SEQ ID NO: 3236961 - RNA, 19 nt, Artificial Sequence
  Description of Artificial Sequence: Synthetic oligonucleotide
acaaugcaacuauagagca

SEQ ID NO: 3236962 - RNA, 19 nt, Artificial Sequence
  Description of Artificial Sequence: Synthetic oligonucleotide
uuuaucuguccucagguuu

SEQ ID NO: 3236963 - RNA, 19 nt, Artificial Sequence
  Description of Artificial Sequence: Synthetic oligonucleotide
ucccucuuuuguaaaacag

SEQ ID NO: 3236964 - RNA, 19 nt, Artificial Sequence
  Description of Artificial Sequence: Synthetic oligonucleotide
aguucaccaauguuauuuc

SEQ ID NO: 3236965 - RNA, 19 nt, Artificial Sequence
  Description of Artificial Sequence: Synthetic oligonucleotide
ucguguuucuguaaguuuc

SEQ ID NO: 3236966 - RNA, 19 nt, Artificial Sequence
  Description of Artificial Sequence: Synthetic oligonucleotide
aguuccgcuggguaucugc

SEQ ID NO: 3236967 - RNA, 19 nt, Artificial Sequence
  Description of Artificial Sequence: Synthetic oligonucleotide
cuguuaucuggcaaagggg

SEQ ID NO: 3236968 - RNA, 19 nt, Artificial Sequence
  Description of Artificial Sequence: Synthetic oligonucleotide
uugcugugcuuaaucaccg

SEQ ID NO: 3236969 - RNA, 19 nt, Artificial Sequence
  Description of Artificial Sequence: Synthetic oligonucleotide
uuguccaauagugggauag

SEQ ID NO: 3236970 - RNA, 19 nt, Artificial Sequence
  Description of Artificial Sequence: Synthetic oligonucleotide
gcaacauugcuauuugugg

SEQ ID NO: 3236971 - RNA, 19 nt, Artificial Sequence
  Description of Artificial Sequence: Synthetic oligonucleotide
aaggcuucaacgugagaug

SEQ ID NO: 3236972 - RNA, 19 nt, Artificial Sequence
  Description of Artificial Sequence: Synthetic oligonucleotide
aaauuucacuaugugguca

SEQ ID NO: 3236973 - RNA, 19 nt, Artificial Sequence
  Description of Artificial Sequence: Synthetic oligonucleotide
cuuuaccucugcacgaucc

SEQ ID NO: 3236974 - RNA, 19 nt, Artificial Sequence
  Description of Artificial Sequence: Synthetic oligonucleotide
uuuguauaucauccuuuug

SEQ ID NO: 3236975 - RNA, 19 nt, Artificial Sequence
  Description of Artificial Sequence: Synthetic oligonucleotide
uucuucuucuucuucuuca

SEQ ID NO: 3236976 - RNA, 19 nt, Artificial Sequence
  Description of Artificial Sequence: Synthetic oligonucleotide
ugccuuuucacaauggcuu

SEQ ID NO: 3236977 - RNA, 19 nt, Artificial Sequence
  Description of Artificial Sequence: Synthetic oligonucleotide
gauuugggaaugaacuucc

SEQ ID NO: 3236978 - RNA, 19 nt, Artificial Sequence
  Description of Artificial Sequence: Synthetic oligonucleotide
uguaaggcuucaacgugag

SEQ ID NO: 3236979 - RNA, 19 nt, Artificial Sequence
  Description of Artificial Sequence: Synthetic oligonucleotide
uuucuguaaguuuccuugc

SEQ ID NO: 3236980 - RNA, 19 nt, Artificial Sequence
  Description of Artificial Sequence: Synthetic oligonucleotide
gcaacuauagagcaucugc

SEQ ID NO: 3236981 - RNA, 19 nt, Artificial Sequence
  Description of Artificial Sequence: Synthetic oligonucleotide
agggcagcaaauguauugc

SEQ ID NO: 3236982 - RNA, 19 nt, Artificial Sequence
  Description of Artificial Sequence: Synthetic oligonucleotide
uucuucuucuucuucuucu

SEQ ID NO: 3236983 - RNA, 19 nt, Artificial Sequence
  Description of Artificial Sequence: Synthetic oligonucleotide
cuggauaaagucacauagc

SEQ ID NO: 3236984 - RNA, 19 nt, Artificial Sequence
  Description of Artificial Sequence: Synthetic oligonucleotide
uauugcugugcuuaaucac

SEQ ID NO: 3236985 - RNA, 19 nt, Artificial Sequence
  Description of Artificial Sequence: Synthetic oligonucleotide
agcaauuacuggcuuuauc

SEQ ID NO: 3236986 - RNA, 19 nt, Artificial Sequence
  Description of Artificial Sequence: Synthetic oligonucleotide
ucugguacuaaggauucug

SEQ ID NO: 3236987 - RNA, 19 nt, Artificial Sequence
  Description of Artificial Sequence: Synthetic oligonucleotide
uuaucuggcaaaggggugc

SEQ ID NO: 3236988 - RNA, 19 nt, Artificial Sequence
  Description of Artificial Sequence: Synthetic oligonucleotide
uuucugguacuaaggauuc

SEQ ID NO: 3236989 - RNA, 19 nt, Artificial Sequence
  Description of Artificial Sequence: Synthetic oligonucleotide
uggauuuuaagagucucgu

SEQ ID NO: 3236990 - RNA, 19 nt, Artificial Sequence
  Description of Artificial Sequence: Synthetic oligonucleotide
uccaguaugccagaucuca

SEQ ID NO: 3236991 - RNA, 19 nt, Artificial Sequence
  Description of Artificial Sequence: Synthetic oligonucleotide
aagccuuauccggaggugg

SEQ ID NO: 3236992 - RNA, 19 nt, Artificial Sequence
  Description of Artificial Sequence: Synthetic oligonucleotide
uaagagucucguucaaugu

SEQ ID NO: 3236993 - RNA, 19 nt, Artificial Sequence
  Description of Artificial Sequence: Synthetic oligonucleotide
gaacauuuagcaugccuuc

SEQ ID NO: 3236994 - RNA, 19 nt, Artificial Sequence
  Description of Artificial Sequence: Synthetic oligonucleotide
ugggaaugaacuuccauuu

SEQ ID NO: 3236995 - RNA, 19 nt, Artificial Sequence
  Description of Artificial Sequence: Synthetic oligonucleotide
ccauuuguccaauaguggg

SEQ ID NO: 3236996 - RNA, 19 nt, Artificial Sequence
  Description of Artificial Sequence: Synthetic oligonucleotide
gcuacguuugcacacaaug

SEQ ID NO: 3236997 - RNA, 19 nt, Artificial Sequence
  Description of Artificial Sequence: Synthetic oligonucleotide
aagucacauagcuacguuu

SEQ ID NO: 3236998 - RNA, 19 nt, Artificial Sequence
  Description of Artificial Sequence: Synthetic oligonucleotide
acuggcuuuaucuguccuc

SEQ ID NO: 3236999 - RNA, 19 nt, Artificial Sequence
  Description of Artificial Sequence: Synthetic oligonucleotide
caauuacuggcuuuaucug

SEQ ID NO: 3237000 - RNA, 19 nt, Artificial Sequence
  Description of Artificial Sequence: Synthetic oligonucleotide
aucaccgaugaaaacuggc

SEQ ID NO: 3237001 - RNA, 19 nt, Artificial Sequence
  Description of Artificial Sequence: Synthetic oligonucleotide
agcgcuggaaaguucacca

SEQ ID NO: 3237002 - RNA, 19 nt, Artificial Sequence
  Description of Artificial Sequence: Synthetic oligonucleotide
cugguacuaaggauucugg

SEQ ID NO: 3237003 - RNA, 19 nt, Artificial Sequence
  Description of Artificial Sequence: Synthetic oligonucleotide
ucaucucuacgcauucagc

SEQ ID NO: 3237004 - RNA, 19 nt, Artificial Sequence
  Description of Artificial Sequence: Synthetic oligonucleotide
caaggauaugccuuuucac

SEQ ID NO: 3237005 - RNA, 19 nt, Artificial Sequence
  Description of Artificial Sequence: Synthetic oligonucleotide
cacgagugaacauuuagca

SEQ ID NO: 3237006 - RNA, 19 nt, Artificial Sequence
  Description of Artificial Sequence: Synthetic oligonucleotide
cugucuuccgaaucagugc

SEQ ID NO: 3237007 - RNA, 19 nt, Artificial Sequence
  Description of Artificial Sequence: Synthetic oligonucleotide
cuuaaucaccgaugaaaac

SEQ ID NO: 3237008 - RNA, 19 nt, Artificial Sequence
  Description of Artificial Sequence: Synthetic oligonucleotide
aggauaugccuuuucacaa

SEQ ID NO: 3237009 - RNA, 19 nt, Artificial Sequence
  Description of Artificial Sequence: Synthetic oligonucleotide
uuuccaauuuucacuguua

SEQ ID NO: 3237010 - RNA, 19 nt, Artificial Sequence
  Description of Artificial Sequence: Synthetic oligonucleotide
accgcuggggcuucugacc

SEQ ID NO: 3237011 - RNA, 19 nt, Artificial Sequence
  Description of Artificial Sequence: Synthetic oligonucleotide
aauagugggauaguuucua

SEQ ID NO: 3237012 - RNA, 19 nt, Artificial Sequence
  Description of Artificial Sequence: Synthetic oligonucleotide
ucguucaaugugaaugccu

SEQ ID NO: 3237013 - RNA, 19 nt, Artificial Sequence
  Description of Artificial Sequence: Synthetic oligonucleotide
aaugaccgagggcaccgag

SEQ ID NO: 3237014 - RNA, 19 nt, Artificial Sequence
  Description of Artificial Sequence: Synthetic oligonucleotide
uuuugcugguuucuucaac

SEQ ID NO: 3237015 - RNA, 19 nt, Artificial Sequence
  Description of Artificial Sequence: Synthetic oligonucleotide
uuucacuguuaucuggcaa

SEQ ID NO: 3237016 - RNA, 19 nt, Artificial Sequence
  Description of Artificial Sequence: Synthetic oligonucleotide
uuuaccucugcacgaucca

SEQ ID NO: 3237017 - RNA, 19 nt, Artificial Sequence
  Description of Artificial Sequence: Synthetic oligonucleotide
ucuacuuucaugaugaggu

SEQ ID NO: 3237018 - RNA, 19 nt, Artificial Sequence
  Description of Artificial Sequence: Synthetic oligonucleotide
uuaucaaugguuuucaagc

SEQ ID NO: 3237019 - RNA, 19 nt, Artificial Sequence
  Description of Artificial Sequence: Synthetic oligonucleotide
cuuacuaugaaaauaaauc

SEQ ID NO: 3237020 - RNA, 19 nt, Artificial Sequence
  Description of Artificial Sequence: Synthetic oligonucleotide
uaaaucuuucucaagcugg

SEQ ID NO: 3237021 - RNA, 19 nt, Artificial Sequence
  Description of Artificial Sequence: Synthetic oligonucleotide
augaaaauaaaucuuucuc

SEQ ID NO: 3237022 - RNA, 19 nt, Artificial Sequence
  Description of Artificial Sequence: Synthetic oligonucleotide
aaguucaucauguucuagg

SEQ ID NO: 3237023 - RNA, 19 nt, Artificial Sequence
  Description of Artificial Sequence: Synthetic oligonucleotide
uuacuaugaaaauaaaucu

SEQ ID NO: 3237024 - RNA, 19 nt, Artificial Sequence
  Description of Artificial Sequence: Synthetic oligonucleotide
aagcaucugacagauaucc

SEQ ID NO: 3237025 - RNA, 19 nt, Artificial Sequence
  Description of Artificial Sequence: Synthetic oligonucleotide
uucaucauguucuagggag

SEQ ID NO: 3237026 - RNA, 19 nt, Artificial Sequence
  Description of Artificial Sequence: Synthetic oligonucleotide
aauaaaucuuucucaagcu

SEQ ID NO: 3237027 - RNA, 19 nt, Artificial Sequence
  Description of Artificial Sequence: Synthetic oligonucleotide
ucugacaauuccaugacgc

SEQ ID NO: 3237028 - RNA, 19 nt, Artificial Sequence
  Description of Artificial Sequence: Synthetic oligonucleotide
uuuaucaaugguuuucaag

SEQ ID NO: 3237029 - RNA, 19 nt, Artificial Sequence
  Description of Artificial Sequence: Synthetic oligonucleotide
uuuguuugagcucauccag

SEQ ID NO: 3237030 - RNA, 19 nt, Artificial Sequence
  Description of Artificial Sequence: Synthetic oligonucleotide
uuuaaagguagaguaaucc

SEQ ID NO: 3237031 - RNA, 19 nt, Artificial Sequence
  Description of Artificial Sequence: Synthetic oligonucleotide
aacguguccagacugcacg

SEQ ID NO: 3237032 - RNA, 19 nt, Artificial Sequence
  Description of Artificial Sequence: Synthetic oligonucleotide
ucgaaguucaucauguucu

SEQ ID NO: 3237033 - RNA, 19 nt, Artificial Sequence
  Description of Artificial Sequence: Synthetic oligonucleotide
uaaagguagaguaauccca

SEQ ID NO: 3237034 - RNA, 19 nt, Artificial Sequence
  Description of Artificial Sequence: Synthetic oligonucleotide
uuaaagguagaguaauccc

SEQ ID NO: 3237035 - RNA, 19 nt, Artificial Sequence
  Description of Artificial Sequence: Synthetic oligonucleotide
agauucaauauacuucuuc

SEQ ID NO: 3237036 - RNA, 19 nt, Artificial Sequence
  Description of Artificial Sequence: Synthetic oligonucleotide
aguagaggcauauucuggg

SEQ ID NO: 3237037 - RNA, 19 nt, Artificial Sequence
  Description of Artificial Sequence: Synthetic oligonucleotide
caagcuuuccauaacacac

SEQ ID NO: 3237038 - RNA, 19 nt, Artificial Sequence
  Description of Artificial Sequence: Synthetic oligonucleotide
gauucccauaaccaguugg

SEQ ID NO: 3237039 - RNA, 19 nt, Artificial Sequence
  Description of Artificial Sequence: Synthetic oligonucleotide
cauguuaucgaucuguuuc

SEQ ID NO: 3237040 - RNA, 19 nt, Artificial Sequence
  Description of Artificial Sequence: Synthetic oligonucleotide
uauaucgaggccuugauuu

SEQ ID NO: 3237041 - RNA, 19 nt, Artificial Sequence
  Description of Artificial Sequence: Synthetic oligonucleotide
ucugcaucaguacucagca

SEQ ID NO: 3237042 - RNA, 19 nt, Artificial Sequence
  Description of Artificial Sequence: Synthetic oligonucleotide
aaucccaugguuccaaaca

SEQ ID NO: 3237043 - RNA, 19 nt, Artificial Sequence
  Description of Artificial Sequence: Synthetic oligonucleotide
aucuuuaauuccuugugag

SEQ ID NO: 3237044 - RNA, 19 nt, Artificial Sequence
  Description of Artificial Sequence: Synthetic oligonucleotide
acaagcaucugacagauau

SEQ ID NO: 3237045 - RNA, 19 nt, Artificial Sequence
  Description of Artificial Sequence: Synthetic oligonucleotide
aguucaucauguucuaggg

SEQ ID NO: 3237046 - RNA, 19 nt, Artificial Sequence
  Description of Artificial Sequence: Synthetic oligonucleotide
ucuuacucaucuuuaauuc

SEQ ID NO: 3237047 - RNA, 19 nt, Artificial Sequence
  Description of Artificial Sequence: Synthetic oligonucleotide
uuuuguuugagcucaucca

SEQ ID NO: 3237048 - RNA, 19 nt, Artificial Sequence
  Description of Artificial Sequence: Synthetic oligonucleotide
aggugcaucaucuuugcuc

SEQ ID NO: 3237049 - RNA, 19 nt, Artificial Sequence
  Description of Artificial Sequence: Synthetic oligonucleotide
uuucaagcuuuccauaaca

SEQ ID NO: 3237050 - RNA, 19 nt, Artificial Sequence
  Description of Artificial Sequence: Synthetic oligonucleotide
aaugguuuucaagcuuucc

SEQ ID NO: 3237051 - RNA, 19 nt, Artificial Sequence
  Description of Artificial Sequence: Synthetic oligonucleotide
ucuaccguggauacaagca

SEQ ID NO: 3237052 - RNA, 19 nt, Artificial Sequence
  Description of Artificial Sequence: Synthetic oligonucleotide
uuacucaucuuuaauuccu

SEQ ID NO: 3237053 - RNA, 19 nt, Artificial Sequence
  Description of Artificial Sequence: Synthetic oligonucleotide
auaaccaguugguugguuc

SEQ ID NO: 3237054 - RNA, 19 nt, Artificial Sequence
  Description of Artificial Sequence: Synthetic oligonucleotide
ucaucuuugcucuuacuca

SEQ ID NO: 3237055 - RNA, 19 nt, Artificial Sequence
  Description of Artificial Sequence: Synthetic oligonucleotide
auaaaucuuucucaagcug

SEQ ID NO: 3237056 - RNA, 19 nt, Artificial Sequence
  Description of Artificial Sequence: Synthetic oligonucleotide
uuccaugacgcccaucggg

SEQ ID NO: 3237057 - RNA, 19 nt, Artificial Sequence
  Description of Artificial Sequence: Synthetic oligonucleotide
uucaugaggugcaucaucu

SEQ ID NO: 3237058 - RNA, 19 nt, Artificial Sequence
  Description of Artificial Sequence: Synthetic oligonucleotide
ugucuuucagguuaacgug

SEQ ID NO: 3237059 - RNA, 19 nt, Artificial Sequence
  Description of Artificial Sequence: Synthetic oligonucleotide
uagaguaaucccaugguuc

SEQ ID NO: 3237060 - RNA, 19 nt, Artificial Sequence
  Description of Artificial Sequence: Synthetic oligonucleotide
acuucucuagaagugauuc

SEQ ID NO: 3237061 - RNA, 19 nt, Artificial Sequence
  Description of Artificial Sequence: Synthetic oligonucleotide
aggaccgaaaucaacauuc

SEQ ID NO: 3237062 - RNA, 19 nt, Artificial Sequence
  Description of Artificial Sequence: Synthetic oligonucleotide
uacuaugaaaauaaaucuu

SEQ ID NO: 3237063 - RNA, 19 nt, Artificial Sequence
  Description of Artificial Sequence: Synthetic oligonucleotide
gaggucaccaucuaccgug

SEQ ID NO: 3237064 - RNA, 19 nt, Artificial Sequence
  Description of Artificial Sequence: Synthetic oligonucleotide
agucuaaggaccgaaauca

SEQ ID NO: 3237065 - RNA, 19 nt, Artificial Sequence
  Description of Artificial Sequence: Synthetic oligonucleotide
ucacaguagaggcauauuc

SEQ ID NO: 3237066 - RNA, 19 nt, Artificial Sequence
  Description of Artificial Sequence: Synthetic oligonucleotide
uccaugacgcccaucgggg

SEQ ID NO: 3237067 - RNA, 19 nt, Artificial Sequence
  Description of Artificial Sequence: Synthetic oligonucleotide
uugaauaucucucgaaguu

SEQ ID NO: 3237068 - RNA, 19 nt, Artificial Sequence
  Description of Artificial Sequence: Synthetic oligonucleotide
agucgcaagauaaacuggc

SEQ ID NO: 3237069 - RNA, 19 nt, Artificial Sequence
  Description of Artificial Sequence: Synthetic oligonucleotide
caugaugagguccuccugg

SEQ ID NO: 3237070 - RNA, 19 nt, Artificial Sequence
  Description of Artificial Sequence: Synthetic oligonucleotide
uguucaucggauucguuga

SEQ ID NO: 3237071 - RNA, 19 nt, Artificial Sequence
  Description of Artificial Sequence: Synthetic oligonucleotide
gaucuuacuaugaaaauaa

SEQ ID NO: 3237072 - RNA, 19 nt, Artificial Sequence
  Description of Artificial Sequence: Synthetic oligonucleotide
uguuucuggauucccauaa

SEQ ID NO: 3237073 - RNA, 19 nt, Artificial Sequence
  Description of Artificial Sequence: Synthetic oligonucleotide
uaguucaugaggugcauca

SEQ ID NO: 3237074 - RNA, 19 nt, Artificial Sequence
  Description of Artificial Sequence: Synthetic oligonucleotide
cuugccuuucauguuaucg

SEQ ID NO: 3237075 - RNA, 19 nt, Artificial Sequence
  Description of Artificial Sequence: Synthetic oligonucleotide
aucuaccguggauacaagc

SEQ ID NO: 3237076 - RNA, 19 nt, Artificial Sequence
  Description of Artificial Sequence: Synthetic oligonucleotide
ggauacaagcaucugacag

SEQ ID NO: 3237077 - RNA, 19 nt, Artificial Sequence
  Description of Artificial Sequence: Synthetic oligonucleotide
agauaaacuggcucucuag

SEQ ID NO: 3237078 - RNA, 19 nt, Artificial Sequence
  Description of Artificial Sequence: Synthetic oligonucleotide
agugcugacagcuucugca

SEQ ID NO: 3237079 - RNA, 19 nt, Artificial Sequence
  Description of Artificial Sequence: Synthetic oligonucleotide
cuaaggaccgaaaucaaca

SEQ ID NO: 3237080 - RNA, 19 nt, Artificial Sequence
  Description of Artificial Sequence: Synthetic oligonucleotide
ucaagcuuuccauaacaca

SEQ ID NO: 3237081 - RNA, 19 nt, Artificial Sequence
  Description of Artificial Sequence: Synthetic oligonucleotide
gauucaauauacuucuucu

SEQ ID NO: 3237082 - RNA, 19 nt, Artificial Sequence
  Description of Artificial Sequence: Synthetic oligonucleotide
auuaucucccagcgagugc

SEQ ID NO: 3237083 - RNA, 19 nt, Artificial Sequence
  Description of Artificial Sequence: Synthetic oligonucleotide
aagcuggccagucuaagga

SEQ ID NO: 3237084 - RNA, 19 nt, Artificial Sequence
  Description of Artificial Sequence: Synthetic oligonucleotide
ucucacuucucuagaagug

SEQ ID NO: 3237085 - RNA, 19 nt, Artificial Sequence
  Description of Artificial Sequence: Synthetic oligonucleotide
ucucuccagaucuuccucg

SEQ ID NO: 3237086 - RNA, 19 nt, Artificial Sequence
  Description of Artificial Sequence: Synthetic oligonucleotide
uguaacucaauggucaguc

SEQ ID NO: 3237087 - RNA, 19 nt, Artificial Sequence
  Description of Artificial Sequence: Synthetic oligonucleotide
uucucacuucucuagaagu

SEQ ID NO: 3237088 - RNA, 19 nt, Artificial Sequence
  Description of Artificial Sequence: Synthetic oligonucleotide
aaccgcuucacuucuuucu

SEQ ID NO: 3237089 - RNA, 19 nt, Artificial Sequence
  Description of Artificial Sequence: Synthetic oligonucleotide
agcuuuccauaacacacgg

SEQ ID NO: 3237090 - RNA, 19 nt, Artificial Sequence
  Description of Artificial Sequence: Synthetic oligonucleotide
ucccauaaccaguugguug

SEQ ID NO: 3237091 - RNA, 19 nt, Artificial Sequence
  Description of Artificial Sequence: Synthetic oligonucleotide
ucgggguguaacucaaugg

SEQ ID NO: 3237092 - RNA, 19 nt, Artificial Sequence
  Description of Artificial Sequence: Synthetic oligonucleotide
uccacaggaggguagaggu

SEQ ID NO: 3237093 - RNA, 19 nt, Artificial Sequence
  Description of Artificial Sequence: Synthetic oligonucleotide
ugauuuucugucuccuuug

SEQ ID NO: 3237094 - RNA, 19 nt, Artificial Sequence
  Description of Artificial Sequence: Synthetic oligonucleotide
aucgggagauucaauauac

SEQ ID NO: 3237095 - RNA, 19 nt, Artificial Sequence
  Description of Artificial Sequence: Synthetic oligonucleotide
cuguucaucggauucguug

SEQ ID NO: 3237096 - RNA, 19 nt, Artificial Sequence
  Description of Artificial Sequence: Synthetic oligonucleotide
uaucaaugguuuucaagcu

SEQ ID NO: 3237097 - RNA, 19 nt, Artificial Sequence
  Description of Artificial Sequence: Synthetic oligonucleotide
auucucacuucucuagaag

SEQ ID NO: 3237098 - RNA, 19 nt, Artificial Sequence
  Description of Artificial Sequence: Synthetic oligonucleotide
aaccuucucuuucugacau

SEQ ID NO: 3237099 - RNA, 19 nt, Artificial Sequence
  Description of Artificial Sequence: Synthetic oligonucleotide
augaugagguccuccuggc

SEQ ID NO: 3237100 - RNA, 19 nt, Artificial Sequence
  Description of Artificial Sequence: Synthetic oligonucleotide
uugccuuucauguuaucga

SEQ ID NO: 3237101 - RNA, 19 nt, Artificial Sequence
  Description of Artificial Sequence: Synthetic oligonucleotide
cacgucuucuucaucuucg

SEQ ID NO: 3237102 - RNA, 19 nt, Artificial Sequence
  Description of Artificial Sequence: Synthetic oligonucleotide
guuaucgaucuguuucugg

SEQ ID NO: 3237103 - RNA, 19 nt, Artificial Sequence
  Description of Artificial Sequence: Synthetic oligonucleotide
accgaaaucaacauucuca

SEQ ID NO: 3237104 - RNA, 19 nt, Artificial Sequence
  Description of Artificial Sequence: Synthetic oligonucleotide
uugagcucauccagaacag

SEQ ID NO: 3237105 - RNA, 19 nt, Artificial Sequence
  Description of Artificial Sequence: Synthetic oligonucleotide
uucagguuaacguguccag

SEQ ID NO: 3237106 - RNA, 19 nt, Artificial Sequence
  Description of Artificial Sequence: Synthetic oligonucleotide
ucaucggauucguugagcu

SEQ ID NO: 3237107 - RNA, 19 nt, Artificial Sequence
  Description of Artificial Sequence: Synthetic oligonucleotide
gaggccuugauuuucuguc

SEQ ID NO: 3237108 - RNA, 19 nt, Artificial Sequence
  Description of Artificial Sequence: Synthetic oligonucleotide
ggucauugaauaucucucg

SEQ ID NO: 3237109 - RNA, 19 nt, Artificial Sequence
  Description of Artificial Sequence: Synthetic oligonucleotide
aauggucagucugucuuuc

SEQ ID NO: 3237110 - RNA, 19 nt, Artificial Sequence
  Description of Artificial Sequence: Synthetic oligonucleotide
uacuuucaugaugaggucc

SEQ ID NO: 3237111 - RNA, 19 nt, Artificial Sequence
  Description of Artificial Sequence: Synthetic oligonucleotide
aacuuugcggccaagggaa

SEQ ID NO: 3237112 - RNA, 19 nt, Artificial Sequence
  Description of Artificial Sequence: Synthetic oligonucleotide
aucggauucguugagcuug

SEQ ID NO: 3237113 - RNA, 19 nt, Artificial Sequence
  Description of Artificial Sequence: Synthetic oligonucleotide
uggucagucugucuuucag

SEQ ID NO: 3237114 - RNA, 19 nt, Artificial Sequence
  Description of Artificial Sequence: Synthetic oligonucleotide
caguagaggcauauucugg

SEQ ID NO: 3237115 - RNA, 19 nt, Artificial Sequence
  Description of Artificial Sequence: Synthetic oligonucleotide
uuuggggaucugcaggggc

SEQ ID NO: 3237116 - RNA, 19 nt, Artificial Sequence
  Description of Artificial Sequence: Synthetic oligonucleotide
uugagcuugucuugcagcu

SEQ ID NO: 3237117 - RNA, 19 nt, Artificial Sequence
  Description of Artificial Sequence: Synthetic oligonucleotide
aaaauaugguauuaaaugc

SEQ ID NO: 3237118 - RNA, 19 nt, Artificial Sequence
  Description of Artificial Sequence: Synthetic oligonucleotide
ugaaaauaggaaaauaugg

SEQ ID NO: 3237119 - RNA, 19 nt, Artificial Sequence
  Description of Artificial Sequence: Synthetic oligonucleotide
gaaagaaccaaacagacag

SEQ ID NO: 3237120 - RNA, 19 nt, Artificial Sequence
  Description of Artificial Sequence: Synthetic oligonucleotide
gaaaauaugguauuaaaug

SEQ ID NO: 3237121 - RNA, 19 nt, Artificial Sequence
  Description of Artificial Sequence: Synthetic oligonucleotide
aaaacaaucauucaacaga

SEQ ID NO: 3237122 - RNA, 19 nt, Artificial Sequence
  Description of Artificial Sequence: Synthetic oligonucleotide
aaaugcaaauuacauauag

SEQ ID NO: 3237123 - RNA, 19 nt, Artificial Sequence
  Description of Artificial Sequence: Synthetic oligonucleotide
uuuauaacauccgagaaag

SEQ ID NO: 3237124 - RNA, 19 nt, Artificial Sequence
  Description of Artificial Sequence: Synthetic oligonucleotide
aauuaaagcugucauaaca

SEQ ID NO: 3237125 - RNA, 19 nt, Artificial Sequence
  Description of Artificial Sequence: Synthetic oligonucleotide
aagaccucugaucagggcc

SEQ ID NO: 3237126 - RNA, 19 nt, Artificial Sequence
  Description of Artificial Sequence: Synthetic oligonucleotide
aaaucaaugcuucaacaag

SEQ ID NO: 3237127 - RNA, 19 nt, Artificial Sequence
  Description of Artificial Sequence: Synthetic oligonucleotide
aauuacauauagcagaaaa

SEQ ID NO: 3237128 - RNA, 19 nt, Artificial Sequence
  Description of Artificial Sequence: Synthetic oligonucleotide
uuugaaaauaggaaaauau

SEQ ID NO: 3237129 - RNA, 19 nt, Artificial Sequence
  Description of Artificial Sequence: Synthetic oligonucleotide
uuacugauggcuuagaaac

SEQ ID NO: 3237130 - RNA, 19 nt, Artificial Sequence
  Description of Artificial Sequence: Synthetic oligonucleotide
gauaucacuauguagacca

SEQ ID NO: 3237131 - RNA, 19 nt, Artificial Sequence
  Description of Artificial Sequence: Synthetic oligonucleotide
uuuacagaacuccacagcc

SEQ ID NO: 3237132 - RNA, 19 nt, Artificial Sequence
  Description of Artificial Sequence: Synthetic oligonucleotide
ucauucaacagaaaguagc

SEQ ID NO: 3237133 - RNA, 19 nt, Artificial Sequence
  Description of Artificial Sequence: Synthetic oligonucleotide
acugaccucauuuacagac

SEQ ID NO: 3237134 - RNA, 19 nt, Artificial Sequence
  Description of Artificial Sequence: Synthetic oligonucleotide
acaaucauucaacagaaag

SEQ ID NO: 3237135 - RNA, 19 nt, Artificial Sequence
  Description of Artificial Sequence: Synthetic oligonucleotide
uaagacauugcacagaaaa

SEQ ID NO: 3237136 - RNA, 19 nt, Artificial Sequence
  Description of Artificial Sequence: Synthetic oligonucleotide
aaucaaugcuucaacaagc

SEQ ID NO: 3237137 - RNA, 19 nt, Artificial Sequence
  Description of Artificial Sequence: Synthetic oligonucleotide
uugaaaauaggaaaauaug

SEQ ID NO: 3237138 - RNA, 19 nt, Artificial Sequence
  Description of Artificial Sequence: Synthetic oligonucleotide
uuuacagacagcaaaucug

SEQ ID NO: 3237139 - RNA, 19 nt, Artificial Sequence
  Description of Artificial Sequence: Synthetic oligonucleotide
uuacagacagcaaaucugg

SEQ ID NO: 3237140 - RNA, 19 nt, Artificial Sequence
  Description of Artificial Sequence: Synthetic oligonucleotide
uaacauccgagaaagaacc

SEQ ID NO: 3237141 - RNA, 19 nt, Artificial Sequence
  Description of Artificial Sequence: Synthetic oligonucleotide
aguauuugaaaauaggaaa

SEQ ID NO: 3237142 - RNA, 19 nt, Artificial Sequence
  Description of Artificial Sequence: Synthetic oligonucleotide
augcaaauuacauauagca

SEQ ID NO: 3237143 - RNA, 19 nt, Artificial Sequence
  Description of Artificial Sequence: Synthetic oligonucleotide
uauuaaaugcaaauuacau

SEQ ID NO: 3237144 - RNA, 19 nt, Artificial Sequence
  Description of Artificial Sequence: Synthetic oligonucleotide
aaagguauagggaagggag

SEQ ID NO: 3237145 - RNA, 19 nt, Artificial Sequence
  Description of Artificial Sequence: Synthetic oligonucleotide
aaugcaaauuacauauagc

SEQ ID NO: 3237146 - RNA, 19 nt, Artificial Sequence
  Description of Artificial Sequence: Synthetic oligonucleotide
agcauuaagacauugcaca

SEQ ID NO: 3237147 - RNA, 19 nt, Artificial Sequence
  Description of Artificial Sequence: Synthetic oligonucleotide
ugcaguauuugaaaauagg

SEQ ID NO: 3237148 - RNA, 19 nt, Artificial Sequence
  Description of Artificial Sequence: Synthetic oligonucleotide
aaaaucaaugcuucaacaa

SEQ ID NO: 3237149 - RNA, 19 nt, Artificial Sequence
  Description of Artificial Sequence: Synthetic oligonucleotide
ugcaaauuacauauagcag

SEQ ID NO: 3237150 - RNA, 19 nt, Artificial Sequence
  Description of Artificial Sequence: Synthetic oligonucleotide
aaauuaaagcugucauaac

SEQ ID NO: 3237151 - RNA, 19 nt, Artificial Sequence
  Description of Artificial Sequence: Synthetic oligonucleotide
uuaaagcugucauaacacg

SEQ ID NO: 3237152 - RNA, 19 nt, Artificial Sequence
  Description of Artificial Sequence: Synthetic oligonucleotide
agacuggcaaaaucaaugc

SEQ ID NO: 3237153 - RNA, 19 nt, Artificial Sequence
  Description of Artificial Sequence: Synthetic oligonucleotide
auuaaagcugucauaacac

SEQ ID NO: 3237154 - RNA, 19 nt, Artificial Sequence
  Description of Artificial Sequence: Synthetic oligonucleotide
uuuacuguaggucuccaac

SEQ ID NO: 3237155 - RNA, 19 nt, Artificial Sequence
  Description of Artificial Sequence: Synthetic oligonucleotide
aacaugacaucucuguaca

SEQ ID NO: 3237156 - RNA, 19 nt, Artificial Sequence
  Description of Artificial Sequence: Synthetic oligonucleotide
aaaaugcaguauuugaaaa

SEQ ID NO: 3237157 - RNA, 19 nt, Artificial Sequence
  Description of Artificial Sequence: Synthetic oligonucleotide
ucuuuuacagaacuccaca

SEQ ID NO: 3237158 - RNA, 19 nt, Artificial Sequence
  Description of Artificial Sequence: Synthetic oligonucleotide
aaaauugucagcaaaggua

SEQ ID NO: 3237159 - RNA, 19 nt, Artificial Sequence
  Description of Artificial Sequence: Synthetic oligonucleotide
cagaaaguagcauuaagac

SEQ ID NO: 3237160 - RNA, 19 nt, Artificial Sequence
  Description of Artificial Sequence: Synthetic oligonucleotide
ucagcaaagguauagggaa

SEQ ID NO: 3237161 - RNA, 19 nt, Artificial Sequence
  Description of Artificial Sequence: Synthetic oligonucleotide
uuuuacagaacuccacagc

SEQ ID NO: 3237162 - RNA, 19 nt, Artificial Sequence
  Description of Artificial Sequence: Synthetic oligonucleotide
uaaagcugucauaacacgc

SEQ ID NO: 3237163 - RNA, 19 nt, Artificial Sequence
  Description of Artificial Sequence: Synthetic oligonucleotide
aaucuggauaccauccugc

SEQ ID NO: 3237164 - RNA, 19 nt, Artificial Sequence
  Description of Artificial Sequence: Synthetic oligonucleotide
ugguauuaaaugcaaauua

SEQ ID NO: 3237165 - RNA, 19 nt, Artificial Sequence
  Description of Artificial Sequence: Synthetic oligonucleotide
aaacagacaggauaucacu

SEQ ID NO: 3237166 - RNA, 19 nt, Artificial Sequence
  Description of Artificial Sequence: Synthetic oligonucleotide
gaaacggcgagucccagcg

SEQ ID NO: 3237167 - RNA, 19 nt, Artificial Sequence
  Description of Artificial Sequence: Synthetic oligonucleotide
uaugguauuaaaugcaaau

SEQ ID NO: 3237168 - RNA, 19 nt, Artificial Sequence
  Description of Artificial Sequence: Synthetic oligonucleotide
aaauaggaaaauaugguau

SEQ ID NO: 3237169 - RNA, 19 nt, Artificial Sequence
  Description of Artificial Sequence: Synthetic oligonucleotide
uccaguagugaaauuacug

SEQ ID NO: 3237170 - RNA, 19 nt, Artificial Sequence
  Description of Artificial Sequence: Synthetic oligonucleotide
aauaggaaaauaugguauu

SEQ ID NO: 3237171 - RNA, 19 nt, Artificial Sequence
  Description of Artificial Sequence: Synthetic oligonucleotide
agugaaauuacugauggcu

SEQ ID NO: 3237172 - RNA, 19 nt, Artificial Sequence
  Description of Artificial Sequence: Synthetic oligonucleotide
uguacaaagaccucugauc

SEQ ID NO: 3237173 - RNA, 19 nt, Artificial Sequence
  Description of Artificial Sequence: Synthetic oligonucleotide
aaauaugguauuaaaugca

SEQ ID NO: 3237174 - RNA, 19 nt, Artificial Sequence
  Description of Artificial Sequence: Synthetic oligonucleotide
auaccauccugccugcucc

SEQ ID NO: 3237175 - RNA, 19 nt, Artificial Sequence
  Description of Artificial Sequence: Synthetic oligonucleotide
ugucagcaaagguauaggg

SEQ ID NO: 3237176 - RNA, 19 nt, Artificial Sequence
  Description of Artificial Sequence: Synthetic oligonucleotide
aaaaugcaaauuaaagcug

SEQ ID NO: 3237177 - RNA, 19 nt, Artificial Sequence
  Description of Artificial Sequence: Synthetic oligonucleotide
uauaacauccgagaaagaa

SEQ ID NO: 3237178 - RNA, 19 nt, Artificial Sequence
  Description of Artificial Sequence: Synthetic oligonucleotide
ugucauaacacgcuucacu

SEQ ID NO: 3237179 - RNA, 19 nt, Artificial Sequence
  Description of Artificial Sequence: Synthetic oligonucleotide
acaaaguuuacuguagguc

SEQ ID NO: 3237180 - RNA, 19 nt, Artificial Sequence
  Description of Artificial Sequence: Synthetic oligonucleotide
aaagaccucugaucagggc

SEQ ID NO: 3237181 - RNA, 19 nt, Artificial Sequence
  Description of Artificial Sequence: Synthetic oligonucleotide
auuuacagacagcaaaucu

SEQ ID NO: 3237182 - RNA, 19 nt, Artificial Sequence
  Description of Artificial Sequence: Synthetic oligonucleotide
ugauggcuuagaaacggcg

SEQ ID NO: 3237183 - RNA, 19 nt, Artificial Sequence
  Description of Artificial Sequence: Synthetic oligonucleotide
aaaucuggauaccauccug

SEQ ID NO: 3237184 - RNA, 19 nt, Artificial Sequence
  Description of Artificial Sequence: Synthetic oligonucleotide
uuacacagccacuagaaaa

SEQ ID NO: 3237185 - RNA, 19 nt, Artificial Sequence
  Description of Artificial Sequence: Synthetic oligonucleotide
ugcaaauuaaagcugucau

SEQ ID NO: 3237186 - RNA, 19 nt, Artificial Sequence
  Description of Artificial Sequence: Synthetic oligonucleotide
gaaaguagcauuaagacau

SEQ ID NO: 3237187 - RNA, 19 nt, Artificial Sequence
  Description of Artificial Sequence: Synthetic oligonucleotide
agaaaguagcauuaagaca

SEQ ID NO: 3237188 - RNA, 19 nt, Artificial Sequence
  Description of Artificial Sequence: Synthetic oligonucleotide
caggauaucacuauguaga

SEQ ID NO: 3237189 - RNA, 19 nt, Artificial Sequence
  Description of Artificial Sequence: Synthetic oligonucleotide
auaacauccgagaaagaac

SEQ ID NO: 3237190 - RNA, 19 nt, Artificial Sequence
  Description of Artificial Sequence: Synthetic oligonucleotide
auuaagacauugcacagaa

SEQ ID NO: 3237191 - RNA, 19 nt, Artificial Sequence
  Description of Artificial Sequence: Synthetic oligonucleotide
agcgacacaaaguuuacug

SEQ ID NO: 3237192 - RNA, 19 nt, Artificial Sequence
  Description of Artificial Sequence: Synthetic oligonucleotide
uaggucuccaacaugacau

SEQ ID NO: 3237193 - RNA, 19 nt, Artificial Sequence
  Description of Artificial Sequence: Synthetic oligonucleotide
agacagcaaaucuggauac

SEQ ID NO: 3237194 - RNA, 19 nt, Artificial Sequence
  Description of Artificial Sequence: Synthetic oligonucleotide
cuuagaaacggcgaguccc

SEQ ID NO: 3237195 - RNA, 19 nt, Artificial Sequence
  Description of Artificial Sequence: Synthetic oligonucleotide
ucaacagaaaguagcauua

SEQ ID NO: 3237196 - RNA, 19 nt, Artificial Sequence
  Description of Artificial Sequence: Synthetic oligonucleotide
aaauugucagcaaagguau

SEQ ID NO: 3237197 - RNA, 19 nt, Artificial Sequence
  Description of Artificial Sequence: Synthetic oligonucleotide
agcaaaucuggauaccauc

SEQ ID NO: 3237198 - RNA, 19 nt, Artificial Sequence
  Description of Artificial Sequence: Synthetic oligonucleotide
agacugaccucauuuacag

SEQ ID NO: 3237199 - RNA, 19 nt, Artificial Sequence
  Description of Artificial Sequence: Synthetic oligonucleotide
uuugccuugcuccaguagu

SEQ ID NO: 3237200 - RNA, 19 nt, Artificial Sequence
  Description of Artificial Sequence: Synthetic oligonucleotide
agcuuuauaacauccgaga

SEQ ID NO: 3237201 - RNA, 19 nt, Artificial Sequence
  Description of Artificial Sequence: Synthetic oligonucleotide
ucuuacacagccacuagaa

SEQ ID NO: 3237202 - RNA, 19 nt, Artificial Sequence
  Description of Artificial Sequence: Synthetic oligonucleotide
cagacuggcaaaaucaaug

SEQ ID NO: 3237203 - RNA, 19 nt, Artificial Sequence
  Description of Artificial Sequence: Synthetic oligonucleotide
acaggauaucacuauguag

SEQ ID NO: 3237204 - RNA, 19 nt, Artificial Sequence
  Description of Artificial Sequence: Synthetic oligonucleotide
augacaucucuguacaaag

SEQ ID NO: 3237205 - RNA, 19 nt, Artificial Sequence
  Description of Artificial Sequence: Synthetic oligonucleotide
aacggcgagucccagcgac

SEQ ID NO: 3237206 - RNA, 19 nt, Artificial Sequence
  Description of Artificial Sequence: Synthetic oligonucleotide
gacaucucuguacaaagac

SEQ ID NO: 3237207 - RNA, 19 nt, Artificial Sequence
  Description of Artificial Sequence: Synthetic oligonucleotide
uccaacaugacaucucugu

SEQ ID NO: 3237208 - RNA, 19 nt, Artificial Sequence
  Description of Artificial Sequence: Synthetic oligonucleotide
aguagcauuaagacauugc

SEQ ID NO: 3237209 - RNA, 19 nt, Artificial Sequence
  Description of Artificial Sequence: Synthetic oligonucleotide
aggauaucacuauguagac

SEQ ID NO: 3237210 - RNA, 19 nt, Artificial Sequence
  Description of Artificial Sequence: Synthetic oligonucleotide
ucauuuacagacagcaaau

SEQ ID NO: 3237211 - RNA, 19 nt, Artificial Sequence
  Description of Artificial Sequence: Synthetic oligonucleotide
aaguuuacuguaggucucc

SEQ ID NO: 3237212 - RNA, 19 nt, Artificial Sequence
  Description of Artificial Sequence: Synthetic oligonucleotide
cuuuuacagaacuccacag

SEQ ID NO: 3237213 - RNA, 19 nt, Artificial Sequence
  Description of Artificial Sequence: Synthetic oligonucleotide
agacauugcacagaaaaug

SEQ ID NO: 3237214 - RNA, 19 nt, Artificial Sequence
  Description of Artificial Sequence: Synthetic oligonucleotide
guagcauuaagacauugca

SEQ ID NO: 3237215 - RNA, 19 nt, Artificial Sequence
  Description of Artificial Sequence: Synthetic oligonucleotide
guacaaagaccucugauca

SEQ ID NO: 3237216 - RNA, 19 nt, Artificial Sequence
  Description of Artificial Sequence: Synthetic oligonucleotide
ugaccucauuuacagacag

SEQ ID NO: 3237217 - RNA, 19 nt, Artificial Sequence
  Description of Artificial Sequence: Synthetic oligonucleotide
aauauuucaaaacaugucc

SEQ ID NO: 3237218 - RNA, 19 nt, Artificial Sequence
  Description of Artificial Sequence: Synthetic oligonucleotide
  modified_base (15)..(15): a, c, u, g, unknown or other
uaaaguaaaguaaanaaag

SEQ ID NO: 3237219 - RNA, 19 nt, Artificial Sequence
  Description of Artificial Sequence: Synthetic oligonucleotide
aauuaaauauuucaaaaca

SEQ ID NO: 3237220 - RNA, 19 nt, Artificial Sequence
  Description of Artificial Sequence: Synthetic oligonucleotide
uuuaaaagagacuucaaug

SEQ ID NO: 3237221 - RNA, 19 nt, Artificial Sequence
  Description of Artificial Sequence: Synthetic oligonucleotide
uuagucacugcuaucaucg

SEQ ID NO: 3237222 - RNA, 19 nt, Artificial Sequence
  Description of Artificial Sequence: Synthetic oligonucleotide
aaaacauguccuuagucac

SEQ ID NO: 3237223 - RNA, 19 nt, Artificial Sequence
  Description of Artificial Sequence: Synthetic oligonucleotide
aacaaagccacauuuucgg

SEQ ID NO: 3237224 - RNA, 19 nt, Artificial Sequence
  Description of Artificial Sequence: Synthetic oligonucleotide
uuaaauauuucaaaacaug

SEQ ID NO: 3237225 - RNA, 19 nt, Artificial Sequence
  Description of Artificial Sequence: Synthetic oligonucleotide
  modified_base (7)..(7): a, c, u, g, unknown or other
aguaaanaaaguuacaauu

SEQ ID NO: 3237226 - RNA, 19 nt, Artificial Sequence
  Description of Artificial Sequence: Synthetic oligonucleotide
aagagucugaucuagucgg

SEQ ID NO: 3237227 - RNA, 19 nt, Artificial Sequence
  Description of Artificial Sequence: Synthetic oligonucleotide
uuaaaagagacuucaauga

SEQ ID NO: 3237228 - RNA, 19 nt, Artificial Sequence
  Description of Artificial Sequence: Synthetic oligonucleotide
uaaauauuucaaaacaugu

SEQ ID NO: 3237229 - RNA, 19 nt, Artificial Sequence
  Description of Artificial Sequence: Synthetic oligonucleotide
aagaaaucucuuuucagag

SEQ ID NO: 3237230 - RNA, 19 nt, Artificial Sequence
  Description of Artificial Sequence: Synthetic oligonucleotide
  modified_base (17)..(17): a, c, u, g, unknown or other
aguaaaguaaaguaaanaa

SEQ ID NO: 3237231 - RNA, 19 nt, Artificial Sequence
  Description of Artificial Sequence: Synthetic oligonucleotide
acuuuuggagaguaaaucg

SEQ ID NO: 3237232 - RNA, 19 nt, Artificial Sequence
  Description of Artificial Sequence: Synthetic oligonucleotide
agauacgucauuuaaaaga

SEQ ID NO: 3237233 - RNA, 19 nt, Artificial Sequence
  Description of Artificial Sequence: Synthetic oligonucleotide
guuacaauuaaauauuuca

SEQ ID NO: 3237234 - RNA, 19 nt, Artificial Sequence
  Description of Artificial Sequence: Synthetic oligonucleotide
gacacacuuauuuaugugg

SEQ ID NO: 3237235 - RNA, 19 nt, Artificial Sequence
  Description of Artificial Sequence: Synthetic oligonucleotide
  modified_base (3)..(3): a, c, u, g, unknown or other
aanaaaguuacaauuaaau

SEQ ID NO: 3237236 - RNA, 19 nt, Artificial Sequence
  Description of Artificial Sequence: Synthetic oligonucleotide
  modified_base (2)..(2): a, c, u, g, unknown or other
anaaaguuacaauuaaaua

SEQ ID NO: 3237237 - RNA, 19 nt, Artificial Sequence
  Description of Artificial Sequence: Synthetic oligonucleotide
agcgcauacacacaguggc

SEQ ID NO: 3237238 - RNA, 19 nt, Artificial Sequence
  Description of Artificial Sequence: Synthetic oligonucleotide
aaauauuucaaaacauguc

SEQ ID NO: 3237239 - RNA, 19 nt, Artificial Sequence
  Description of Artificial Sequence: Synthetic oligonucleotide
aucaucaucagauacguca

SEQ ID NO: 3237240 - RNA, 19 nt, Artificial Sequence
  Description of Artificial Sequence: Synthetic oligonucleotide
  modified_base (9)..(9): a, c, u, g, unknown or other
aaaguaaanaaaguuacaa

SEQ ID NO: 3237241 - RNA, 19 nt, Artificial Sequence
  Description of Artificial Sequence: Synthetic oligonucleotide
uaagagucugaucuagucg

SEQ ID NO: 3237242 - RNA, 19 nt, Artificial Sequence
  Description of Artificial Sequence: Synthetic oligonucleotide
  modified_base (5)..(5): a, c, u, g, unknown or other
uaaanaaaguuacaauuaa

SEQ ID NO: 3237243 - RNA, 19 nt, Artificial Sequence
  Description of Artificial Sequence: Synthetic oligonucleotide
  modified_base (10)..(10): a, c, u, g, unknown or other
uaaaguaaanaaaguuaca

SEQ ID NO: 3237244 - RNA, 19 nt, Artificial Sequence
  Description of Artificial Sequence: Synthetic oligonucleotide
  modified_base (14)..(14): a, c, u, g, unknown or other
aaaguaaaguaaanaaagu

SEQ ID NO: 3237245 - RNA, 19 nt, Artificial Sequence
  Description of Artificial Sequence: Synthetic oligonucleotide
acaauuaaauauuucaaaa

SEQ ID NO: 3237246 - RNA, 19 nt, Artificial Sequence
  Description of Artificial Sequence: Synthetic oligonucleotide
caauuaaauauuucaaaac

SEQ ID NO: 3237247 - RNA, 19 nt, Artificial Sequence
  Description of Artificial Sequence: Synthetic oligonucleotide
gagucaggaacccagacag

SEQ ID NO: 3237248 - RNA, 19 nt, Artificial Sequence
  Description of Artificial Sequence: Synthetic oligonucleotide
uacgucauuuaaaagagac

SEQ ID NO: 3237249 - RNA, 19 nt, Artificial Sequence
  Description of Artificial Sequence: Synthetic oligonucleotide
gauacgucauuuaaaagag

SEQ ID NO: 3237250 - RNA, 19 nt, Artificial Sequence
  Description of Artificial Sequence: Synthetic oligonucleotide
acaacaaagccacauuuuc

SEQ ID NO: 3237251 - RNA, 19 nt, Artificial Sequence
  Description of Artificial Sequence: Synthetic oligonucleotide
agagacuucaaugacuggc

SEQ ID NO: 3237252 - RNA, 19 nt, Artificial Sequence
  Description of Artificial Sequence: Synthetic oligonucleotide
uuacaauuaaauauuucaa

SEQ ID NO: 3237253 - RNA, 19 nt, Artificial Sequence
  Description of Artificial Sequence: Synthetic oligonucleotide
aagaagaaaucucuuuuca

SEQ ID NO: 3237254 - RNA, 19 nt, Artificial Sequence
  Description of Artificial Sequence: Synthetic oligonucleotide
aaagccacauuuucggcag

SEQ ID NO: 3237255 - RNA, 19 nt, Artificial Sequence
  Description of Artificial Sequence: Synthetic oligonucleotide
  modified_base (11)..(11): a, c, u, g, unknown or other
guaaaguaaanaaaguuac

SEQ ID NO: 3237256 - RNA, 19 nt, Artificial Sequence
  Description of Artificial Sequence: Synthetic oligonucleotide
aaaucggugacacacuuau

SEQ ID NO: 3237257 - RNA, 19 nt, Artificial Sequence
  Description of Artificial Sequence: Synthetic oligonucleotide
  modified_base (8)..(8): a, c, u, g, unknown or other
aaguaaanaaaguuacaau

SEQ ID NO: 3237258 - RNA, 19 nt, Artificial Sequence
  Description of Artificial Sequence: Synthetic oligonucleotide
cuuuuggagaguaaaucgg

SEQ ID NO: 3237259 - RNA, 19 nt, Artificial Sequence
  Description of Artificial Sequence: Synthetic oligonucleotide
acugcuaucaucgucauca

SEQ ID NO: 3237260 - RNA, 19 nt, Artificial Sequence
  Description of Artificial Sequence: Synthetic oligonucleotide
ucauuuaaaagagacuuca

SEQ ID NO: 3237261 - RNA, 19 nt, Artificial Sequence
  Description of Artificial Sequence: Synthetic oligonucleotide
gaaaucucuuuucagagca

SEQ ID NO: 3237262 - RNA, 19 nt, Artificial Sequence
  Description of Artificial Sequence: Synthetic oligonucleotide
agaaaucucuuuucagagc

SEQ ID NO: 3237263 - RNA, 19 nt, Artificial Sequence
  Description of Artificial Sequence: Synthetic oligonucleotide
uggaaagcaggucauagca

SEQ ID NO: 3237264 - RNA, 19 nt, Artificial Sequence
  Description of Artificial Sequence: Synthetic oligonucleotide
ucagauacgucauuuaaaa

SEQ ID NO: 3237265 - RNA, 19 nt, Artificial Sequence
  Description of Artificial Sequence: Synthetic oligonucleotide
uacaauuaaauauuucaaa

SEQ ID NO: 3237266 - RNA, 19 nt, Artificial Sequence
  Description of Artificial Sequence: Synthetic oligonucleotide
uuucaaaacauguccuuag

SEQ ID NO: 3237267 - RNA, 19 nt, Artificial Sequence
  Description of Artificial Sequence: Synthetic oligonucleotide
ucugacagcgcauacacac

SEQ ID NO: 3237268 - RNA, 19 nt, Artificial Sequence
  Description of Artificial Sequence: Synthetic oligonucleotide
aaagagacuucaaugacug

SEQ ID NO: 3237269 - RNA, 19 nt, Artificial Sequence
  Description of Artificial Sequence: Synthetic oligonucleotide
acauuuucggcaguggugc

SEQ ID NO: 3237270 - RNA, 19 nt, Artificial Sequence
  Description of Artificial Sequence: Synthetic oligonucleotide
gaacuuugccuucugacag

SEQ ID NO: 3237271 - RNA, 19 nt, Artificial Sequence
  Description of Artificial Sequence: Synthetic oligonucleotide
uagcagaagucacauaucc

SEQ ID NO: 3237272 - RNA, 19 nt, Artificial Sequence
  Description of Artificial Sequence: Synthetic oligonucleotide
gaagaaaucucuuuucaga

SEQ ID NO: 3237273 - RNA, 19 nt, Artificial Sequence
  Description of Artificial Sequence: Synthetic oligonucleotide
aaaguuacaauuaaauauu

SEQ ID NO: 3237274 - RNA, 19 nt, Artificial Sequence
  Description of Artificial Sequence: Synthetic oligonucleotide
uaaaagagacuucaaugac

SEQ ID NO: 3237275 - RNA, 19 nt, Artificial Sequence
  Description of Artificial Sequence: Synthetic oligonucleotide
uuaacuggcgugaacuuug

SEQ ID NO: 3237276 - RNA, 19 nt, Artificial Sequence
  Description of Artificial Sequence: Synthetic oligonucleotide
gaagacauguccccagugg

SEQ ID NO: 3237277 - RNA, 19 nt, Artificial Sequence
  Description of Artificial Sequence: Synthetic oligonucleotide
aaacaacaaagccacauuu

SEQ ID NO: 3237278 - RNA, 19 nt, Artificial Sequence
  Description of Artificial Sequence: Synthetic oligonucleotide
auuuaaaagagacuucaau

SEQ ID NO: 3237279 - RNA, 19 nt, Artificial Sequence
  Description of Artificial Sequence: Synthetic oligonucleotide
aaucucuuuucagagcagg

SEQ ID NO: 3237280 - RNA, 19 nt, Artificial Sequence
  Description of Artificial Sequence: Synthetic oligonucleotide
uugggaagaagaaaucucu

SEQ ID NO: 3237281 - RNA, 19 nt, Artificial Sequence
  Description of Artificial Sequence: Synthetic oligonucleotide
aacuuugccuucugacagc

SEQ ID NO: 3237282 - RNA, 19 nt, Artificial Sequence
  Description of Artificial Sequence: Synthetic oligonucleotide
ugaucuagucggcugaccc

SEQ ID NO: 3237283 - RNA, 19 nt, Artificial Sequence
  Description of Artificial Sequence: Synthetic oligonucleotide
agaagaaaucucuuuucag

SEQ ID NO: 3237284 - RNA, 19 nt, Artificial Sequence
  Description of Artificial Sequence: Synthetic oligonucleotide
  modified_base (13)..(13): a, c, u, g, unknown or other
aaguaaaguaaanaaaguu

SEQ ID NO: 3237285 - RNA, 19 nt, Artificial Sequence
  Description of Artificial Sequence: Synthetic oligonucleotide
gaguaaaucggugacacac

SEQ ID NO: 3237286 - RNA, 19 nt, Artificial Sequence
  Description of Artificial Sequence: Synthetic oligonucleotide
  modified_base (16)..(16): a, c, u, g, unknown or other
guaaaguaaaguaaanaaa

SEQ ID NO: 3237287 - RNA, 19 nt, Artificial Sequence
  Description of Artificial Sequence: Synthetic oligonucleotide
uucaaugacuggcuguaag

SEQ ID NO: 3237288 - RNA, 19 nt, Artificial Sequence
  Description of Artificial Sequence: Synthetic oligonucleotide
ugaacuuugccuucugaca

SEQ ID NO: 3237289 - RNA, 19 nt, Artificial Sequence
  Description of Artificial Sequence: Synthetic oligonucleotide
gaccacaaacaacaaagcc

SEQ ID NO: 3237290 - RNA, 19 nt, Artificial Sequence
  Description of Artificial Sequence: Synthetic oligonucleotide
  modified_base (12)..(12): a, c, u, g, unknown or other
aguaaaguaaanaaaguua

SEQ ID NO: 3237291 - RNA, 19 nt, Artificial Sequence
  Description of Artificial Sequence: Synthetic oligonucleotide
uuuuggagaguaaaucggu

SEQ ID NO: 3237292 - RNA, 19 nt, Artificial Sequence
  Description of Artificial Sequence: Synthetic oligonucleotide
  modified_base (18)..(18): a, c, u, g, unknown or other
aaguaaaguaaaguaaana

SEQ ID NO: 3237293 - RNA, 19 nt, Artificial Sequence
  Description of Artificial Sequence: Synthetic oligonucleotide
caaaacauguccuuaguca

SEQ ID NO: 3237294 - RNA, 19 nt, Artificial Sequence
  Description of Artificial Sequence: Synthetic oligonucleotide
agaagucacauauccgcac

SEQ ID NO: 3237295 - RNA, 19 nt, Artificial Sequence
  Description of Artificial Sequence: Synthetic oligonucleotide
caacaaagccacauuuucg

SEQ ID NO: 3237296 - RNA, 19 nt, Artificial Sequence
  Description of Artificial Sequence: Synthetic oligonucleotide
aacccagacagcagcaugc

SEQ ID NO: 3237297 - RNA, 19 nt, Artificial Sequence
  Description of Artificial Sequence: Synthetic oligonucleotide
aaaagagacuucaaugacu

SEQ ID NO: 3237298 - RNA, 19 nt, Artificial Sequence
  Description of Artificial Sequence: Synthetic oligonucleotide
uuuggagaguaaaucggug

SEQ ID NO: 3237299 - RNA, 19 nt, Artificial Sequence
  Description of Artificial Sequence: Synthetic oligonucleotide
  modified_base (4)..(4): a, c, u, g, unknown or other
aaanaaaguuacaauuaaa

SEQ ID NO: 3237300 - RNA, 19 nt, Artificial Sequence
  Description of Artificial Sequence: Synthetic oligonucleotide
gaagaagaaaucucuuuuc

SEQ ID NO: 3237301 - RNA, 19 nt, Artificial Sequence
  Description of Artificial Sequence: Synthetic oligonucleotide
acacuuauuuaugugguuc

SEQ ID NO: 3237302 - RNA, 19 nt, Artificial Sequence
  Description of Artificial Sequence: Synthetic oligonucleotide
aaugacuggcuguaagagu

SEQ ID NO: 3237303 - RNA, 19 nt, Artificial Sequence
  Description of Artificial Sequence: Synthetic oligonucleotide
ucaaaacauguccuuaguc

SEQ ID NO: 3237304 - RNA, 19 nt, Artificial Sequence
  Description of Artificial Sequence: Synthetic oligonucleotide
acaaagccacauuuucggc

SEQ ID NO: 3237305 - RNA, 19 nt, Artificial Sequence
  Description of Artificial Sequence: Synthetic oligonucleotide
aagacauguccccagugga

SEQ ID NO: 3237306 - RNA, 19 nt, Artificial Sequence
  Description of Artificial Sequence: Synthetic oligonucleotide
ucuuuucagagcagggacc

SEQ ID NO: 3237307 - RNA, 19 nt, Artificial Sequence
  Description of Artificial Sequence: Synthetic oligonucleotide
aggcuuagaagacugguug

SEQ ID NO: 3237308 - RNA, 19 nt, Artificial Sequence
  Description of Artificial Sequence: Synthetic oligonucleotide
ugacagcgcauacacacag

SEQ ID NO: 3237309 - RNA, 19 nt, Artificial Sequence
  Description of Artificial Sequence: Synthetic oligonucleotide
auuaaauauuucaaaacau

SEQ ID NO: 3237310 - RNA, 19 nt, Artificial Sequence
  Description of Artificial Sequence: Synthetic oligonucleotide
augacuggcuguaagaguc

SEQ ID NO: 3237311 - RNA, 19 nt, Artificial Sequence
  Description of Artificial Sequence: Synthetic oligonucleotide
gaaagcaggucauagcaga

SEQ ID NO: 3237312 - RNA, 19 nt, Artificial Sequence
  Description of Artificial Sequence: Synthetic oligonucleotide
uagaagacugguugggaag

SEQ ID NO: 3237313 - RNA, 19 nt, Artificial Sequence
  Description of Artificial Sequence: Synthetic oligonucleotide
ucaaugacuggcuguaaga

SEQ ID NO: 3237314 - RNA, 19 nt, Artificial Sequence
  Description of Artificial Sequence: Synthetic oligonucleotide
uccgcacaggcuuagaaga

SEQ ID NO: 3237315 - RNA, 19 nt, Artificial Sequence
  Description of Artificial Sequence: Synthetic oligonucleotide
uuggagaguaaaucgguga

SEQ ID NO: 3237316 - RNA, 19 nt, Artificial Sequence
  Description of Artificial Sequence: Synthetic oligonucleotide
aucaucaucaucagauacg

SEQ ID NO: 3237317 - RNA, 19 nt, Artificial Sequence
  Description of Artificial Sequence: Synthetic oligonucleotide
aaguuuauaauuucugccc

SEQ ID NO: 3237318 - RNA, 19 nt, Artificial Sequence
  Description of Artificial Sequence: Synthetic oligonucleotide
aguuaaaacaaucagaagu

SEQ ID NO: 3237319 - RNA, 19 nt, Artificial Sequence
  Description of Artificial Sequence: Synthetic oligonucleotide
auaaauguaggauuagugg

SEQ ID NO: 3237320 - RNA, 19 nt, Artificial Sequence
  Description of Artificial Sequence: Synthetic oligonucleotide
auaucagugaaucucauuc

SEQ ID NO: 3237321 - RNA, 19 nt, Artificial Sequence
  Description of Artificial Sequence: Synthetic oligonucleotide
uugaguuaaauuaagagaa

SEQ ID NO: 3237322 - RNA, 19 nt, Artificial Sequence
  Description of Artificial Sequence: Synthetic oligonucleotide
uguucaaaugauaacaccc

SEQ ID NO: 3237323 - RNA, 19 nt, Artificial Sequence
  Description of Artificial Sequence: Synthetic oligonucleotide
uuaagagaaaauauuaccu

SEQ ID NO: 3237324 - RNA, 19 nt, Artificial Sequence
  Description of Artificial Sequence: Synthetic oligonucleotide
aaaaugaaaggauggguuc

SEQ ID NO: 3237325 - RNA, 19 nt, Artificial Sequence
  Description of Artificial Sequence: Synthetic oligonucleotide
uuuuaccugacaaagguag

SEQ ID NO: 3237326 - RNA, 19 nt, Artificial Sequence
  Description of Artificial Sequence: Synthetic oligonucleotide
aucauuaguaaauguaccc

SEQ ID NO: 3237327 - RNA, 19 nt, Artificial Sequence
  Description of Artificial Sequence: Synthetic oligonucleotide
uccggaauacaaaugaugg

SEQ ID NO: 3237328 - RNA, 19 nt, Artificial Sequence
  Description of Artificial Sequence: Synthetic oligonucleotide
gagauuacaguauaaauac

SEQ ID NO: 3237329 - RNA, 19 nt, Artificial Sequence
  Description of Artificial Sequence: Synthetic oligonucleotide
ucaacucacauaaacacag

SEQ ID NO: 3237330 - RNA, 19 nt, Artificial Sequence
  Description of Artificial Sequence: Synthetic oligonucleotide
uuuuauucuagcaaacuga

SEQ ID NO: 3237331 - RNA, 19 nt, Artificial Sequence
  Description of Artificial Sequence: Synthetic oligonucleotide
aaauguacccaauauuuug

SEQ ID NO: 3237332 - RNA, 19 nt, Artificial Sequence
  Description of Artificial Sequence: Synthetic oligonucleotide
ugaauuccuaacuauacag

SEQ ID NO: 3237333 - RNA, 19 nt, Artificial Sequence
  Description of Artificial Sequence: Synthetic oligonucleotide
ugcaucaccauaaugaaga

SEQ ID NO: 3237334 - RNA, 19 nt, Artificial Sequence
  Description of Artificial Sequence: Synthetic oligonucleotide
cuuaauauaguaagucugg

SEQ ID NO: 3237335 - RNA, 19 nt, Artificial Sequence
  Description of Artificial Sequence: Synthetic oligonucleotide
acaauuauaucagugaauc

SEQ ID NO: 3237336 - RNA, 19 nt, Artificial Sequence
  Description of Artificial Sequence: Synthetic oligonucleotide
auugaguuaaauuaagaga

SEQ ID NO: 3237337 - RNA, 19 nt, Artificial Sequence
  Description of Artificial Sequence: Synthetic oligonucleotide
uaaguuuauaauuucugcc

SEQ ID NO: 3237338 - RNA, 19 nt, Artificial Sequence
  Description of Artificial Sequence: Synthetic oligonucleotide
uuaacugucucuuugcuca

SEQ ID NO: 3237339 - RNA, 19 nt, Artificial Sequence
  Description of Artificial Sequence: Synthetic oligonucleotide
auagcuuaauaguuaaaac

SEQ ID NO: 3237340 - RNA, 19 nt, Artificial Sequence
  Description of Artificial Sequence: Synthetic oligonucleotide
gguauuauucaauagaaug

SEQ ID NO: 3237341 - RNA, 19 nt, Artificial Sequence
  Description of Artificial Sequence: Synthetic oligonucleotide
uaaauguaggauuagugga

SEQ ID NO: 3237342 - RNA, 19 nt, Artificial Sequence
  Description of Artificial Sequence: Synthetic oligonucleotide
uagcuuaauaguuaaaaca

SEQ ID NO: 3237343 - RNA, 19 nt, Artificial Sequence
  Description of Artificial Sequence: Synthetic oligonucleotide
auuccuugcauauaaaugu

SEQ ID NO: 3237344 - RNA, 19 nt, Artificial Sequence
  Description of Artificial Sequence: Synthetic oligonucleotide
uacauguuuaccaaaacaa

SEQ ID NO: 3237345 - RNA, 19 nt, Artificial Sequence
  Description of Artificial Sequence: Synthetic oligonucleotide
uauaaaugugauuauacau

SEQ ID NO: 3237346 - RNA, 19 nt, Artificial Sequence
  Description of Artificial Sequence: Synthetic oligonucleotide
uaagacacagauaacuuca

SEQ ID NO: 3237347 - RNA, 19 nt, Artificial Sequence
  Description of Artificial Sequence: Synthetic oligonucleotide
ucaaacucuguaaauaacu

SEQ ID NO: 3237348 - RNA, 19 nt, Artificial Sequence
  Description of Artificial Sequence: Synthetic oligonucleotide
uauuaggaaagccagguaa

SEQ ID NO: 3237349 - RNA, 19 nt, Artificial Sequence
  Description of Artificial Sequence: Synthetic oligonucleotide
uuuacaacuccagugauug

SEQ ID NO: 3237350 - RNA, 19 nt, Artificial Sequence
  Description of Artificial Sequence: Synthetic oligonucleotide
cuuauuaagcugaagauga

SEQ ID NO: 3237351 - RNA, 19 nt, Artificial Sequence
  Description of Artificial Sequence: Synthetic oligonucleotide
ugugauaugugaaaacaga

SEQ ID NO: 3237352 - RNA, 19 nt, Artificial Sequence
  Description of Artificial Sequence: Synthetic oligonucleotide
uauaaauacauggaaguga

SEQ ID NO: 3237353 - RNA, 19 nt, Artificial Sequence
  Description of Artificial Sequence: Synthetic oligonucleotide
ugccauuucgguaagacac

SEQ ID NO: 3237354 - RNA, 19 nt, Artificial Sequence
  Description of Artificial Sequence: Synthetic oligonucleotide
uucuauuuguuuaaugaga

SEQ ID NO: 3237355 - RNA, 19 nt, Artificial Sequence
  Description of Artificial Sequence: Synthetic oligonucleotide
auaauguuuaucuggguug

SEQ ID NO: 3237356 - RNA, 19 nt, Artificial Sequence
  Description of Artificial Sequence: Synthetic oligonucleotide
aagguggccaaaaugacac

SEQ ID NO: 3237357 - RNA, 19 nt, Artificial Sequence
  Description of Artificial Sequence: Synthetic oligonucleotide
uauaucugaauuuauuuau

SEQ ID NO: 3237358 - RNA, 19 nt, Artificial Sequence
  Description of Artificial Sequence: Synthetic oligonucleotide
aaauuagugucuuggccag

SEQ ID NO: 3237359 - RNA, 19 nt, Artificial Sequence
  Description of Artificial Sequence: Synthetic oligonucleotide
ugaagauuagcauuuuaca

SEQ ID NO: 3237360 - RNA, 19 nt, Artificial Sequence
  Description of Artificial Sequence: Synthetic oligonucleotide
aauucaugaauccuagaaa

SEQ ID NO: 3237361 - RNA, 19 nt, Artificial Sequence
  Description of Artificial Sequence: Synthetic oligonucleotide
uacaaaugaugguucaagg

SEQ ID NO: 3237362 - RNA, 19 nt, Artificial Sequence
  Description of Artificial Sequence: Synthetic oligonucleotide
aaugaagaaguuaaacuug

SEQ ID NO: 3237363 - RNA, 19 nt, Artificial Sequence
  Description of Artificial Sequence: Synthetic oligonucleotide
ugaacuccuauucuaacca

SEQ ID NO: 3237364 - RNA, 19 nt, Artificial Sequence
  Description of Artificial Sequence: Synthetic oligonucleotide
uuugaaacagcaauggcuu

SEQ ID NO: 3237365 - RNA, 19 nt, Artificial Sequence
  Description of Artificial Sequence: Synthetic oligonucleotide
uuucauauagaaauuuaau

SEQ ID NO: 3237366 - RNA, 19 nt, Artificial Sequence
  Description of Artificial Sequence: Synthetic oligonucleotide
uuauauaauugacugcagu

SEQ ID NO: 3237367 - RNA, 19 nt, Artificial Sequence
  Description of Artificial Sequence: Synthetic oligonucleotide
aaguagagaaaauaguauu

SEQ ID NO: 3237368 - RNA, 19 nt, Artificial Sequence
  Description of Artificial Sequence: Synthetic oligonucleotide
uugguauuauucaauagaa

SEQ ID NO: 3237369 - RNA, 19 nt, Artificial Sequence
  Description of Artificial Sequence: Synthetic oligonucleotide
uagaaggaagaccagaaaa

SEQ ID NO: 3237370 - RNA, 19 nt, Artificial Sequence
  Description of Artificial Sequence: Synthetic oligonucleotide
uaacaggaaaaccaauuug

SEQ ID NO: 3237371 - RNA, 19 nt, Artificial Sequence
  Description of Artificial Sequence: Synthetic oligonucleotide
gaaaacagaggcuuccuug

SEQ ID NO: 3237372 - RNA, 19 nt, Artificial Sequence
  Description of Artificial Sequence: Synthetic oligonucleotide
cuaaccaugaaauuuauua

SEQ ID NO: 3237373 - RNA, 19 nt, Artificial Sequence
  Description of Artificial Sequence: Synthetic oligonucleotide
ucaaauguccggaauacaa

SEQ ID NO: 3237374 - RNA, 19 nt, Artificial Sequence
  Description of Artificial Sequence: Synthetic oligonucleotide
aaaacagaggcuuccuuga

SEQ ID NO: 3237375 - RNA, 19 nt, Artificial Sequence
  Description of Artificial Sequence: Synthetic oligonucleotide
aagugaaacaccaauuuca

SEQ ID NO: 3237376 - RNA, 19 nt, Artificial Sequence
  Description of Artificial Sequence: Synthetic oligonucleotide
uucaguaacgagaucuuug

SEQ ID NO: 3237377 - RNA, 19 nt, Artificial Sequence
  Description of Artificial Sequence: Synthetic oligonucleotide
uuaccuuuugcucugaauu

SEQ ID NO: 3237378 - RNA, 19 nt, Artificial Sequence
  Description of Artificial Sequence: Synthetic oligonucleotide
aagguaaguguuaagaggu

SEQ ID NO: 3237379 - RNA, 19 nt, Artificial Sequence
  Description of Artificial Sequence: Synthetic oligonucleotide
uacguuuugacguuuugug

SEQ ID NO: 3237380 - RNA, 19 nt, Artificial Sequence
  Description of Artificial Sequence: Synthetic oligonucleotide
ugucugugagcauacacag

SEQ ID NO: 3237381 - RNA, 19 nt, Artificial Sequence
  Description of Artificial Sequence: Synthetic oligonucleotide
aaguguguguguuugugug

SEQ ID NO: 3237382 - RNA, 19 nt, Artificial Sequence
  Description of Artificial Sequence: Synthetic oligonucleotide
cugaagauuagcauuuuac

SEQ ID NO: 3237383 - RNA, 19 nt, Artificial Sequence
  Description of Artificial Sequence: Synthetic oligonucleotide
uauaugugcucgaaugacc

SEQ ID NO: 3237384 - RNA, 19 nt, Artificial Sequence
  Description of Artificial Sequence: Synthetic oligonucleotide
accauaaugaagagggugc

SEQ ID NO: 3237385 - RNA, 19 nt, Artificial Sequence
  Description of Artificial Sequence: Synthetic oligonucleotide
ugugaauguacaauguuua

SEQ ID NO: 3237386 - RNA, 19 nt, Artificial Sequence
  Description of Artificial Sequence: Synthetic oligonucleotide
aaacuaguuacucuuuaau

SEQ ID NO: 3237387 - RNA, 19 nt, Artificial Sequence
  Description of Artificial Sequence: Synthetic oligonucleotide
ugacguauggauuuggguc

SEQ ID NO: 3237388 - RNA, 19 nt, Artificial Sequence
  Description of Artificial Sequence: Synthetic oligonucleotide
ucaauuauugggcaacgaa

SEQ ID NO: 3237389 - RNA, 19 nt, Artificial Sequence
  Description of Artificial Sequence: Synthetic oligonucleotide
aagguuuccuugcuguauc

SEQ ID NO: 3237390 - RNA, 19 nt, Artificial Sequence
  Description of Artificial Sequence: Synthetic oligonucleotide
ugggcaacgaacauuaaau

SEQ ID NO: 3237391 - RNA, 19 nt, Artificial Sequence
  Description of Artificial Sequence: Synthetic oligonucleotide
uaaauuucuuucauguaau

SEQ ID NO: 3237392 - RNA, 19 nt, Artificial Sequence
  Description of Artificial Sequence: Synthetic oligonucleotide
uaauugacugcagugguag

SEQ ID NO: 3237393 - RNA, 19 nt, Artificial Sequence
  Description of Artificial Sequence: Synthetic oligonucleotide
uacacaagcauuucauuga

SEQ ID NO: 3237394 - RNA, 19 nt, Artificial Sequence
  Description of Artificial Sequence: Synthetic oligonucleotide
agcacugucaagaacaaag

SEQ ID NO: 3237395 - RNA, 19 nt, Artificial Sequence
  Description of Artificial Sequence: Synthetic oligonucleotide
uaaaucaaauagcuuaaua

SEQ ID NO: 3237396 - RNA, 19 nt, Artificial Sequence
  Description of Artificial Sequence: Synthetic oligonucleotide
aguucucucugccucaagg

SEQ ID NO: 3237397 - RNA, 19 nt, Artificial Sequence
  Description of Artificial Sequence: Synthetic oligonucleotide
uuacgugaaauuuugguuu

SEQ ID NO: 3237398 - RNA, 19 nt, Artificial Sequence
  Description of Artificial Sequence: Synthetic oligonucleotide
ugaaaggauggguucauca

SEQ ID NO: 3237399 - RNA, 19 nt, Artificial Sequence
  Description of Artificial Sequence: Synthetic oligonucleotide
uguguguguacacauauuu

SEQ ID NO: 3237400 - RNA, 19 nt, Artificial Sequence
  Description of Artificial Sequence: Synthetic oligonucleotide
cauuccuugcauauaaaug

SEQ ID NO: 3237401 - RNA, 19 nt, Artificial Sequence
  Description of Artificial Sequence: Synthetic oligonucleotide
ugcucgaaugaccaaagga

SEQ ID NO: 3237402 - RNA, 19 nt, Artificial Sequence
  Description of Artificial Sequence: Synthetic oligonucleotide
aagguaguuauaaauguga

SEQ ID NO: 3237403 - RNA, 19 nt, Artificial Sequence
  Description of Artificial Sequence: Synthetic oligonucleotide
auauaugugcucgaaugac

SEQ ID NO: 3237404 - RNA, 19 nt, Artificial Sequence
  Description of Artificial Sequence: Synthetic oligonucleotide
aaaacuaguuacucuuuaa

SEQ ID NO: 3237405 - RNA, 19 nt, Artificial Sequence
  Description of Artificial Sequence: Synthetic oligonucleotide
agugcaaagaugcuacucu

SEQ ID NO: 3237406 - RNA, 19 nt, Artificial Sequence
  Description of Artificial Sequence: Synthetic oligonucleotide
cuuauugugaaguuccuga

SEQ ID NO: 3237407 - RNA, 19 nt, Artificial Sequence
  Description of Artificial Sequence: Synthetic oligonucleotide
auaacuguuuaauucaauu

SEQ ID NO: 3237408 - RNA, 19 nt, Artificial Sequence
  Description of Artificial Sequence: Synthetic oligonucleotide
uacaucucuauuaccauuc

SEQ ID NO: 3237409 - RNA, 19 nt, Artificial Sequence
  Description of Artificial Sequence: Synthetic oligonucleotide
caugcuuuaacaacucaac

SEQ ID NO: 3237410 - RNA, 19 nt, Artificial Sequence
  Description of Artificial Sequence: Synthetic oligonucleotide
auacaagacaguuuacaca

SEQ ID NO: 3237411 - RNA, 19 nt, Artificial Sequence
  Description of Artificial Sequence: Synthetic oligonucleotide
uuugcuucuuccaaagcuc

SEQ ID NO: 3237412 - RNA, 19 nt, Artificial Sequence
  Description of Artificial Sequence: Synthetic oligonucleotide
aaaugaugguucaaggugu

SEQ ID NO: 3237413 - RNA, 19 nt, Artificial Sequence
  Description of Artificial Sequence: Synthetic oligonucleotide
aaugcagacaagguggcca

SEQ ID NO: 3237414 - RNA, 19 nt, Artificial Sequence
  Description of Artificial Sequence: Synthetic oligonucleotide
gacuacauaaauauaaugu

SEQ ID NO: 3237415 - RNA, 19 nt, Artificial Sequence
  Description of Artificial Sequence: Synthetic oligonucleotide
ucauuaguaaauguaccca

SEQ ID NO: 3237416 - RNA, 19 nt, Artificial Sequence
  Description of Artificial Sequence: Synthetic oligonucleotide
gccaaugaagcauauaaag

SEQ ID NO: 3237417 - RNA, 19 nt, Artificial Sequence
  Description of Artificial Sequence: Synthetic oligonucleotide
aaaggcauauuccagaagg

SEQ ID NO: 3237418 - RNA, 19 nt, Artificial Sequence
  Description of Artificial Sequence: Synthetic oligonucleotide
aaucuuaauuucuagauga

SEQ ID NO: 3237419 - RNA, 19 nt, Artificial Sequence
  Description of Artificial Sequence: Synthetic oligonucleotide
  modified_base (13)..(13): a, c, u, g, unknown or other
aaugacauguuunugggcc

SEQ ID NO: 3237420 - RNA, 19 nt, Artificial Sequence
  Description of Artificial Sequence: Synthetic oligonucleotide
aaacauuguagauucaauc

SEQ ID NO: 3237421 - RNA, 19 nt, Artificial Sequence
  Description of Artificial Sequence: Synthetic oligonucleotide
  modified_base (16)..(16): a, c, u, g, unknown or other
augaaugacauguuunugg

SEQ ID NO: 3237422 - RNA, 19 nt, Artificial Sequence
  Description of Artificial Sequence: Synthetic oligonucleotide
aacugugggagcucgaucc

SEQ ID NO: 3237423 - RNA, 19 nt, Artificial Sequence
  Description of Artificial Sequence: Synthetic oligonucleotide
gaugcaucauaauugaucc

SEQ ID NO: 3237424 - RNA, 19 nt, Artificial Sequence
  Description of Artificial Sequence: Synthetic oligonucleotide
aaaauauuuuaaccagugg

SEQ ID NO: 3237425 - RNA, 19 nt, Artificial Sequence
  Description of Artificial Sequence: Synthetic oligonucleotide
agaacaauccuguacuacc

SEQ ID NO: 3237426 - RNA, 19 nt, Artificial Sequence
  Description of Artificial Sequence: Synthetic oligonucleotide
aacauuguagauucaaucu

SEQ ID NO: 3237427 - RNA, 19 nt, Artificial Sequence
  Description of Artificial Sequence: Synthetic oligonucleotide
gucaaugguauucugaugg

SEQ ID NO: 3237428 - RNA, 19 nt, Artificial Sequence
  Description of Artificial Sequence: Synthetic oligonucleotide
ucuuaaguuuucaaaagug

SEQ ID NO: 3237429 - RNA, 19 nt, Artificial Sequence
  Description of Artificial Sequence: Synthetic oligonucleotide
agagguauggugcaugagc

SEQ ID NO: 3237430 - RNA, 19 nt, Artificial Sequence
  Description of Artificial Sequence: Synthetic oligonucleotide
aauugauccagaaggacac

SEQ ID NO: 3237431 - RNA, 19 nt, Artificial Sequence
  Description of Artificial Sequence: Synthetic oligonucleotide
uuggaagugaaaaugaguc

SEQ ID NO: 3237432 - RNA, 19 nt, Artificial Sequence
  Description of Artificial Sequence: Synthetic oligonucleotide
uucaaugucauccguagug

SEQ ID NO: 3237433 - RNA, 19 nt, Artificial Sequence
  Description of Artificial Sequence: Synthetic oligonucleotide
agaaauaaaggcugugagg

SEQ ID NO: 3237434 - RNA, 19 nt, Artificial Sequence
  Description of Artificial Sequence: Synthetic oligonucleotide
aaguuuucaaaagugaaca

SEQ ID NO: 3237435 - RNA, 19 nt, Artificial Sequence
  Description of Artificial Sequence: Synthetic oligonucleotide
aacucaaugagagucgagg

SEQ ID NO: 3237436 - RNA, 19 nt, Artificial Sequence
  Description of Artificial Sequence: Synthetic oligonucleotide
ugagucaugaaugacaugu

SEQ ID NO: 3237437 - RNA, 19 nt, Artificial Sequence
  Description of Artificial Sequence: Synthetic oligonucleotide
uuaaaaguccaaauacuga

SEQ ID NO: 3237438 - RNA, 19 nt, Artificial Sequence
  Description of Artificial Sequence: Synthetic oligonucleotide
acuagaacaauccuguacu

SEQ ID NO: 3237439 - RNA, 19 nt, Artificial Sequence
  Description of Artificial Sequence: Synthetic oligonucleotide
uuucaaugcaguagaagag

SEQ ID NO: 3237440 - RNA, 19 nt, Artificial Sequence
  Description of Artificial Sequence: Synthetic oligonucleotide
gaaauaaaggcugugagga

SEQ ID NO: 3237441 - RNA, 19 nt, Artificial Sequence
  Description of Artificial Sequence: Synthetic oligonucleotide
uaauugauccagaaggaca

SEQ ID NO: 3237442 - RNA, 19 nt, Artificial Sequence
  Description of Artificial Sequence: Synthetic oligonucleotide
uucaaaagugaacaguaga

SEQ ID NO: 3237443 - RNA, 19 nt, Artificial Sequence
  Description of Artificial Sequence: Synthetic oligonucleotide
ugaagaaugaaguaaccaa

SEQ ID NO: 3237444 - RNA, 19 nt, Artificial Sequence
  Description of Artificial Sequence: Synthetic oligonucleotide
uccuagucagucuaggagg

SEQ ID NO: 3237445 - RNA, 19 nt, Artificial Sequence
  Description of Artificial Sequence: Synthetic oligonucleotide
uaugagacaugucaguaca

SEQ ID NO: 3237446 - RNA, 19 nt, Artificial Sequence
  Description of Artificial Sequence: Synthetic oligonucleotide
aagacaacauuccuggaga

SEQ ID NO: 3237447 - RNA, 19 nt, Artificial Sequence
  Description of Artificial Sequence: Synthetic oligonucleotide
aggaaaauguaauugacaa

SEQ ID NO: 3237448 - RNA, 19 nt, Artificial Sequence
  Description of Artificial Sequence: Synthetic oligonucleotide
uugacaaaggcauauucca

SEQ ID NO: 3237449 - RNA, 19 nt, Artificial Sequence
  Description of Artificial Sequence: Synthetic oligonucleotide
gaagacaacauuccuggag

SEQ ID NO: 3237450 - RNA, 19 nt, Artificial Sequence
  Description of Artificial Sequence: Synthetic oligonucleotide
uguacuaccuugaacacau

SEQ ID NO: 3237451 - RNA, 19 nt, Artificial Sequence
  Description of Artificial Sequence: Synthetic oligonucleotide
aaguaggaaaauguaauug

SEQ ID NO: 3237452 - RNA, 19 nt, Artificial Sequence
  Description of Artificial Sequence: Synthetic oligonucleotide
uaaguucacacugacauga

SEQ ID NO: 3237453 - RNA, 19 nt, Artificial Sequence
  Description of Artificial Sequence: Synthetic oligonucleotide
cuuucaaugcaguagaaga

SEQ ID NO: 3237454 - RNA, 19 nt, Artificial Sequence
  Description of Artificial Sequence: Synthetic oligonucleotide
uucaaugcaguagaagagg

SEQ ID NO: 3237455 - RNA, 19 nt, Artificial Sequence
  Description of Artificial Sequence: Synthetic oligonucleotide
uucuuaaguuuucaaaagu

SEQ ID NO: 3237456 - RNA, 19 nt, Artificial Sequence
  Description of Artificial Sequence: Synthetic oligonucleotide
ugacaugaaagccagcagu

SEQ ID NO: 3237457 - RNA, 19 nt, Artificial Sequence
  Description of Artificial Sequence: Synthetic oligonucleotide
aguaaaauucaaugucauc

SEQ ID NO: 3237458 - RNA, 19 nt, Artificial Sequence
  Description of Artificial Sequence: Synthetic oligonucleotide
uaaccaauguuucucuuca

SEQ ID NO: 3237459 - RNA, 19 nt, Artificial Sequence
  Description of Artificial Sequence: Synthetic oligonucleotide
aaaugagucaugaaugaca

SEQ ID NO: 3237460 - RNA, 19 nt, Artificial Sequence
  Description of Artificial Sequence: Synthetic oligonucleotide
gaugacagaaaguaggaaa

SEQ ID NO: 3237461 - RNA, 19 nt, Artificial Sequence
  Description of Artificial Sequence: Synthetic oligonucleotide
uaggaaaauguaauugaca

SEQ ID NO: 3237462 - RNA, 19 nt, Artificial Sequence
  Description of Artificial Sequence: Synthetic oligonucleotide
aaggaaccaaaagagacug

SEQ ID NO: 3237463 - RNA, 19 nt, Artificial Sequence
  Description of Artificial Sequence: Synthetic oligonucleotide
aacggucauggguuguugc

SEQ ID NO: 3237464 - RNA, 19 nt, Artificial Sequence
  Description of Artificial Sequence: Synthetic oligonucleotide
agcucgauccuuuccacgc

SEQ ID NO: 3237465 - RNA, 19 nt, Artificial Sequence
  Description of Artificial Sequence: Synthetic oligonucleotide
ucugaugguaaguucacac

SEQ ID NO: 3237466 - RNA, 19 nt, Artificial Sequence
  Description of Artificial Sequence: Synthetic oligonucleotide
uccuacuagaacaauccug

SEQ ID NO: 3237467 - RNA, 19 nt, Artificial Sequence
  Description of Artificial Sequence: Synthetic oligonucleotide
aaggcugugaggauguuuc

SEQ ID NO: 3237468 - RNA, 19 nt, Artificial Sequence
  Description of Artificial Sequence: Synthetic oligonucleotide
uacuagaacaauccuguac

SEQ ID NO: 3237469 - RNA, 19 nt, Artificial Sequence
  Description of Artificial Sequence: Synthetic oligonucleotide
auaauugauccagaaggac

SEQ ID NO: 3237470 - RNA, 19 nt, Artificial Sequence
  Description of Artificial Sequence: Synthetic oligonucleotide
uauuccuacuagaacaauc

SEQ ID NO: 3237471 - RNA, 19 nt, Artificial Sequence
  Description of Artificial Sequence: Synthetic oligonucleotide
caaccgaaaacucaaugag

SEQ ID NO: 3237472 - RNA, 19 nt, Artificial Sequence
  Description of Artificial Sequence: Synthetic oligonucleotide
gacgaagcagcccaucagg

SEQ ID NO: 3237473 - RNA, 19 nt, Artificial Sequence
  Description of Artificial Sequence: Synthetic oligonucleotide
  modified_base (7)..(7): a, c, u, g, unknown or other
auguuunugggccaucccu

SEQ ID NO: 3237474 - RNA, 19 nt, Artificial Sequence
  Description of Artificial Sequence: Synthetic oligonucleotide
  modified_base (14)..(14): a, c, u, g, unknown or other
gaaugacauguuunugggc

SEQ ID NO: 3237475 - RNA, 19 nt, Artificial Sequence
  Description of Artificial Sequence: Synthetic oligonucleotide
aauacugaugaggcugugg

SEQ ID NO: 3237476 - RNA, 19 nt, Artificial Sequence
  Description of Artificial Sequence: Synthetic oligonucleotide
aagaaugaaguaaccaaug

SEQ ID NO: 3237477 - RNA, 19 nt, Artificial Sequence
  Description of Artificial Sequence: Synthetic oligonucleotide
gugaacaguagaaacauug

SEQ ID NO: 3237478 - RNA, 19 nt, Artificial Sequence
  Description of Artificial Sequence: Synthetic oligonucleotide
gaagcagcccaucagguac

SEQ ID NO: 3237479 - RNA, 19 nt, Artificial Sequence
  Description of Artificial Sequence: Synthetic oligonucleotide
ugaacaguagaaacauugu

SEQ ID NO: 3237480 - RNA, 19 nt, Artificial Sequence
  Description of Artificial Sequence: Synthetic oligonucleotide
cagaaauaaaggcugugag

SEQ ID NO: 3237481 - RNA, 19 nt, Artificial Sequence
  Description of Artificial Sequence: Synthetic oligonucleotide
ugacuuggaagugaaaaug

SEQ ID NO: 3237482 - RNA, 19 nt, Artificial Sequence
  Description of Artificial Sequence: Synthetic oligonucleotide
acgccaguaaaauucaaug

SEQ ID NO: 3237483 - RNA, 19 nt, Artificial Sequence
  Description of Artificial Sequence: Synthetic oligonucleotide
ucuaggaggaguugggugu

SEQ ID NO: 3237484 - RNA, 19 nt, Artificial Sequence
  Description of Artificial Sequence: Synthetic oligonucleotide
ugacaaaggcauauuccag

SEQ ID NO: 3237485 - RNA, 19 nt, Artificial Sequence
  Description of Artificial Sequence: Synthetic oligonucleotide
auccuagucagucuaggag

SEQ ID NO: 3237486 - RNA, 19 nt, Artificial Sequence
  Description of Artificial Sequence: Synthetic oligonucleotide
uguccugggaaauuuacuc

SEQ ID NO: 3237487 - RNA, 19 nt, Artificial Sequence
  Description of Artificial Sequence: Synthetic oligonucleotide
cuugucauguuucuacgag

SEQ ID NO: 3237488 - RNA, 19 nt, Artificial Sequence
  Description of Artificial Sequence: Synthetic oligonucleotide
ucaaugcaguagaagaggu

SEQ ID NO: 3237489 - RNA, 19 nt, Artificial Sequence
  Description of Artificial Sequence: Synthetic oligonucleotide
cuaccuugaacacaucuac

SEQ ID NO: 3237490 - RNA, 19 nt, Artificial Sequence
  Description of Artificial Sequence: Synthetic oligonucleotide
uuagucauucaggaaaaca

SEQ ID NO: 3237491 - RNA, 19 nt, Artificial Sequence
  Description of Artificial Sequence: Synthetic oligonucleotide
ugggaaauuuacuccacca

SEQ ID NO: 3237492 - RNA, 19 nt, Artificial Sequence
  Description of Artificial Sequence: Synthetic oligonucleotide
aagugaaaaugagucauga

SEQ ID NO: 3237493 - RNA, 19 nt, Artificial Sequence
  Description of Artificial Sequence: Synthetic oligonucleotide
acagaaaguaggaaaaugu

SEQ ID NO: 3237494 - RNA, 19 nt, Artificial Sequence
  Description of Artificial Sequence: Synthetic oligonucleotide
agugguucagucuaugaaa

SEQ ID NO: 3237495 - RNA, 19 nt, Artificial Sequence
  Description of Artificial Sequence: Synthetic oligonucleotide
  modified_base (9)..(9): a, c, u, g, unknown or other
acauguuunugggccaucc

SEQ ID NO: 3237496 - RNA, 19 nt, Artificial Sequence
  Description of Artificial Sequence: Synthetic oligonucleotide
ucuuaauuucuagaugaca

SEQ ID NO: 3237497 - RNA, 19 nt, Artificial Sequence
  Description of Artificial Sequence: Synthetic oligonucleotide
aagugaacaguagaaacau

SEQ ID NO: 3237498 - RNA, 19 nt, Artificial Sequence
  Description of Artificial Sequence: Synthetic oligonucleotide
uuaugagacaugucaguac

SEQ ID NO: 3237499 - RNA, 19 nt, Artificial Sequence
  Description of Artificial Sequence: Synthetic oligonucleotide
ucgugguguguacuggucg

SEQ ID NO: 3237500 - RNA, 19 nt, Artificial Sequence
  Description of Artificial Sequence: Synthetic oligonucleotide
caguagaagagguaaucag

SEQ ID NO: 3237501 - RNA, 19 nt, Artificial Sequence
  Description of Artificial Sequence: Synthetic oligonucleotide
aaguccaaauacugaugag

SEQ ID NO: 3237502 - RNA, 19 nt, Artificial Sequence
  Description of Artificial Sequence: Synthetic oligonucleotide
  modified_base (3)..(3): a, c, u, g, unknown or other
uunugggccaucccuagaa

SEQ ID NO: 3237503 - RNA, 19 nt, Artificial Sequence
  Description of Artificial Sequence: Synthetic oligonucleotide
gaggauaggcaccuguggc

SEQ ID NO: 3237504 - RNA, 19 nt, Artificial Sequence
  Description of Artificial Sequence: Synthetic oligonucleotide
gacaaaggcauauuccaga

SEQ ID NO: 3237505 - RNA, 19 nt, Artificial Sequence
  Description of Artificial Sequence: Synthetic oligonucleotide
aggaggguuagucauucag

SEQ ID NO: 3237506 - RNA, 19 nt, Artificial Sequence
  Description of Artificial Sequence: Synthetic oligonucleotide
agcuuuaaaaguccaaaua

SEQ ID NO: 3237507 - RNA, 19 nt, Artificial Sequence
  Description of Artificial Sequence: Synthetic oligonucleotide
uugucauguuucuacgagc

SEQ ID NO: 3237508 - RNA, 19 nt, Artificial Sequence
  Description of Artificial Sequence: Synthetic oligonucleotide
uccugggaaauuuacucca

SEQ ID NO: 3237509 - RNA, 19 nt, Artificial Sequence
  Description of Artificial Sequence: Synthetic oligonucleotide
uagauucaaucuuaauuuc

SEQ ID NO: 3237510 - RNA, 19 nt, Artificial Sequence
  Description of Artificial Sequence: Synthetic oligonucleotide
gagguauggugcaugagcc

SEQ ID NO: 3237511 - RNA, 19 nt, Artificial Sequence
  Description of Artificial Sequence: Synthetic oligonucleotide
gucauggugagcacggugg

SEQ ID NO: 3237512 - RNA, 19 nt, Artificial Sequence
  Description of Artificial Sequence: Synthetic oligonucleotide
cauauacgucugaagaaug

SEQ ID NO: 3237513 - RNA, 19 nt, Artificial Sequence
  Description of Artificial Sequence: Synthetic oligonucleotide
agacaacauuccuggagac

SEQ ID NO: 3237514 - RNA, 19 nt, Artificial Sequence
  Description of Artificial Sequence: Synthetic oligonucleotide
ugaucccaagggcaacucg

SEQ ID NO: 3237515 - RNA, 19 nt, Artificial Sequence
  Description of Artificial Sequence: Synthetic oligonucleotide
cuacgagcuuuaaaagucc

SEQ ID NO: 3237516 - RNA, 19 nt, Artificial Sequence
  Description of Artificial Sequence: Synthetic oligonucleotide
uguguacuggucguguucc

SEQ ID NO: 3237517 - RNA, 19 nt, Artificial Sequence
  Description of Artificial Sequence: Synthetic oligonucleotide
aagaauuuaggauuacacc

SEQ ID NO: 3237518 - RNA, 19 nt, Artificial Sequence
  Description of Artificial Sequence: Synthetic oligonucleotide
gauaaguucaccaugaaag

SEQ ID NO: 3237519 - RNA, 19 nt, Artificial Sequence
  Description of Artificial Sequence: Synthetic oligonucleotide
uacaccuacaguuauaggg

SEQ ID NO: 3237520 - RNA, 19 nt, Artificial Sequence
  Description of Artificial Sequence: Synthetic oligonucleotide
agaaugaaacuucacaucg

SEQ ID NO: 3237521 - RNA, 19 nt, Artificial Sequence
  Description of Artificial Sequence: Synthetic oligonucleotide
aaagggauguaacuaacac

SEQ ID NO: 3237522 - RNA, 19 nt, Artificial Sequence
  Description of Artificial Sequence: Synthetic oligonucleotide
accacaaagccacagaagc

SEQ ID NO: 3237523 - RNA, 19 nt, Artificial Sequence
  Description of Artificial Sequence: Synthetic oligonucleotide
guaacuaacacaccaaggg

SEQ ID NO: 3237524 - RNA, 19 nt, Artificial Sequence
  Description of Artificial Sequence: Synthetic oligonucleotide
uuuaggauuacaccuacag

SEQ ID NO: 3237525 - RNA, 19 nt, Artificial Sequence
  Description of Artificial Sequence: Synthetic oligonucleotide
aauaaauugauaaguucac

SEQ ID NO: 3237526 - RNA, 19 nt, Artificial Sequence
  Description of Artificial Sequence: Synthetic oligonucleotide
uaaauugauaaguucacca

SEQ ID NO: 3237527 - RNA, 19 nt, Artificial Sequence
  Description of Artificial Sequence: Synthetic oligonucleotide
ugauccaauaaauugauaa

SEQ ID NO: 3237528 - RNA, 19 nt, Artificial Sequence
  Description of Artificial Sequence: Synthetic oligonucleotide
aagagaaugaaacuucaca

SEQ ID NO: 3237529 - RNA, 19 nt, Artificial Sequence
  Description of Artificial Sequence: Synthetic oligonucleotide
uaagaauuuaggauuacac

SEQ ID NO: 3237530 - RNA, 19 nt, Artificial Sequence
  Description of Artificial Sequence: Synthetic oligonucleotide
auaaguucaccaugaaagc

SEQ ID NO: 3237531 - RNA, 19 nt, Artificial Sequence
  Description of Artificial Sequence: Synthetic oligonucleotide
aauugauaaguucaccaug

SEQ ID NO: 3237532 - RNA, 19 nt, Artificial Sequence
  Description of Artificial Sequence: Synthetic oligonucleotide
aaagcagaaacugaccagg

SEQ ID NO: 3237533 - RNA, 19 nt, Artificial Sequence
  Description of Artificial Sequence: Synthetic oligonucleotide
gauguauaagcccagccag

SEQ ID NO: 3237534 - RNA, 19 nt, Artificial Sequence
  Description of Artificial Sequence: Synthetic oligonucleotide
uguaacuaacacaccaagg

SEQ ID NO: 3237535 - RNA, 19 nt, Artificial Sequence
  Description of Artificial Sequence: Synthetic oligonucleotide
agggauguaacuaacacac

SEQ ID NO: 3237536 - RNA, 19 nt, Artificial Sequence
  Description of Artificial Sequence: Synthetic oligonucleotide
aguuauagggaucagcgug

SEQ ID NO: 3237537 - RNA, 19 nt, Artificial Sequence
  Description of Artificial Sequence: Synthetic oligonucleotide
gauccaauaaauugauaag

SEQ ID NO: 3237538 - RNA, 19 nt, Artificial Sequence
  Description of Artificial Sequence: Synthetic oligonucleotide
uguagagaaagguugguga

SEQ ID NO: 3237539 - RNA, 19 nt, Artificial Sequence
  Description of Artificial Sequence: Synthetic oligonucleotide
caauaaauugauaaguuca

SEQ ID NO: 3237540 - RNA, 19 nt, Artificial Sequence
  Description of Artificial Sequence: Synthetic oligonucleotide
uguccgaacauguuguagg

SEQ ID NO: 3237541 - RNA, 19 nt, Artificial Sequence
  Description of Artificial Sequence: Synthetic oligonucleotide
uauaagcccagccagguga

SEQ ID NO: 3237542 - RNA, 19 nt, Artificial Sequence
  Description of Artificial Sequence: Synthetic oligonucleotide
gaaauguccgaacauguug

SEQ ID NO: 3237543 - RNA, 19 nt, Artificial Sequence
  Description of Artificial Sequence: Synthetic oligonucleotide
uaggauuacaccuacaguu

SEQ ID NO: 3237544 - RNA, 19 nt, Artificial Sequence
  Description of Artificial Sequence: Synthetic oligonucleotide
uggauccuuaaacagaaug

SEQ ID NO: 3237545 - RNA, 19 nt, Artificial Sequence
  Description of Artificial Sequence: Synthetic oligonucleotide
gauggagaagcucuucugg

SEQ ID NO: 3237546 - RNA, 19 nt, Artificial Sequence
  Description of Artificial Sequence: Synthetic oligonucleotide
aaauugauaaguucaccau

SEQ ID NO: 3237547 - RNA, 19 nt, Artificial Sequence
  Description of Artificial Sequence: Synthetic oligonucleotide
ucguaauaagaauuuagga

SEQ ID NO: 3237548 - RNA, 19 nt, Artificial Sequence
  Description of Artificial Sequence: Synthetic oligonucleotide
acaguuauagggaucagcg

SEQ ID NO: 3237549 - RNA, 19 nt, Artificial Sequence
  Description of Artificial Sequence: Synthetic oligonucleotide
uaccagaaggucuggaugg

SEQ ID NO: 3237550 - RNA, 19 nt, Artificial Sequence
  Description of Artificial Sequence: Synthetic oligonucleotide
uggauggcuaugaucaccg

SEQ ID NO: 3237551 - RNA, 19 nt, Artificial Sequence
  Description of Artificial Sequence: Synthetic oligonucleotide
aacuucacaucguaauaag

SEQ ID NO: 3237552 - RNA, 19 nt, Artificial Sequence
  Description of Artificial Sequence: Synthetic oligonucleotide
cuugauaaagggauguaac

SEQ ID NO: 3237553 - RNA, 19 nt, Artificial Sequence
  Description of Artificial Sequence: Synthetic oligonucleotide
uaugguguuguucuguaga

SEQ ID NO: 3237554 - RNA, 19 nt, Artificial Sequence
  Description of Artificial Sequence: Synthetic oligonucleotide
uaacuaacacaccaagggc

SEQ ID NO: 3237555 - RNA, 19 nt, Artificial Sequence
  Description of Artificial Sequence: Synthetic oligonucleotide
ucacuuguaguucaugcug

SEQ ID NO: 3237556 - RNA, 19 nt, Artificial Sequence
  Description of Artificial Sequence: Synthetic oligonucleotide
aagcaaagcagaaacugac

SEQ ID NO: 3237557 - RNA, 19 nt, Artificial Sequence
  Description of Artificial Sequence: Synthetic oligonucleotide
agaaagguuggugaagacc

SEQ ID NO: 3237558 - RNA, 19 nt, Artificial Sequence
  Description of Artificial Sequence: Synthetic oligonucleotide
aagauguccauuucuggca

SEQ ID NO: 3237559 - RNA, 19 nt, Artificial Sequence
  Description of Artificial Sequence: Synthetic oligonucleotide
uccuuaaacagaauguauc

SEQ ID NO: 3237560 - RNA, 19 nt, Artificial Sequence
  Description of Artificial Sequence: Synthetic oligonucleotide
aacuugaaauguccgaaca

SEQ ID NO: 3237561 - RNA, 19 nt, Artificial Sequence
  Description of Artificial Sequence: Synthetic oligonucleotide
caucguaauaagaauuuag

SEQ ID NO: 3237562 - RNA, 19 nt, Artificial Sequence
  Description of Artificial Sequence: Synthetic oligonucleotide
ugaugcagaacuugaaaug

SEQ ID NO: 3237563 - RNA, 19 nt, Artificial Sequence
  Description of Artificial Sequence: Synthetic oligonucleotide
uaaguucaccaugaaagcg

SEQ ID NO: 3237564 - RNA, 19 nt, Artificial Sequence
  Description of Artificial Sequence: Synthetic oligonucleotide
ugcagaacuugaaaugucc

SEQ ID NO: 3237565 - RNA, 19 nt, Artificial Sequence
  Description of Artificial Sequence: Synthetic oligonucleotide
auaagcaaagcagaaacug

SEQ ID NO: 3237566 - RNA, 19 nt, Artificial Sequence
  Description of Artificial Sequence: Synthetic oligonucleotide
aauaagaauuuaggauuac

SEQ ID NO: 3237567 - RNA, 19 nt, Artificial Sequence
  Description of Artificial Sequence: Synthetic oligonucleotide
uguuguaggugacugguga

SEQ ID NO: 3237568 - RNA, 19 nt, Artificial Sequence
  Description of Artificial Sequence: Synthetic oligonucleotide
ugauaggugccuauggugu

SEQ ID NO: 3237569 - RNA, 19 nt, Artificial Sequence
  Description of Artificial Sequence: Synthetic oligonucleotide
aucagcgugagcuguauuc

SEQ ID NO: 3237570 - RNA, 19 nt, Artificial Sequence
  Description of Artificial Sequence: Synthetic oligonucleotide
aagggauguaacuaacaca

SEQ ID NO: 3237571 - RNA, 19 nt, Artificial Sequence
  Description of Artificial Sequence: Synthetic oligonucleotide
uguauucggauggagaagc

SEQ ID NO: 3237572 - RNA, 19 nt, Artificial Sequence
  Description of Artificial Sequence: Synthetic oligonucleotide
ugcauaagaugccaagccc

SEQ ID NO: 3237573 - RNA, 19 nt, Artificial Sequence
  Description of Artificial Sequence: Synthetic oligonucleotide
uucccaaugauccaauaaa

SEQ ID NO: 3237574 - RNA, 19 nt, Artificial Sequence
  Description of Artificial Sequence: Synthetic oligonucleotide
auuacaccuacaguuauag

SEQ ID NO: 3237575 - RNA, 19 nt, Artificial Sequence
  Description of Artificial Sequence: Synthetic oligonucleotide
gauaaagggauguaacuaa

SEQ ID NO: 3237576 - RNA, 19 nt, Artificial Sequence
  Description of Artificial Sequence: Synthetic oligonucleotide
gaaagguuggugaagacca

SEQ ID NO: 3237577 - RNA, 19 nt, Artificial Sequence
  Description of Artificial Sequence: Synthetic oligonucleotide
uguaguucaugcugcuugg

SEQ ID NO: 3237578 - RNA, 19 nt, Artificial Sequence
  Description of Artificial Sequence: Synthetic oligonucleotide
cucaaagaagggcacagcc

SEQ ID NO: 3237579 - RNA, 19 nt, Artificial Sequence
  Description of Artificial Sequence: Synthetic oligonucleotide
auguaacuaacacaccaag

SEQ ID NO: 3237580 - RNA, 19 nt, Artificial Sequence
  Description of Artificial Sequence: Synthetic oligonucleotide
aacauguuguaggugacug

SEQ ID NO: 3237581 - RNA, 19 nt, Artificial Sequence
  Description of Artificial Sequence: Synthetic oligonucleotide
aacuaacacaccaagggca

SEQ ID NO: 3237582 - RNA, 19 nt, Artificial Sequence
  Description of Artificial Sequence: Synthetic oligonucleotide
agauguauaagcccagcca

SEQ ID NO: 3237583 - RNA, 19 nt, Artificial Sequence
  Description of Artificial Sequence: Synthetic oligonucleotide
uccaauaaauugauaaguu

SEQ ID NO: 3237584 - RNA, 19 nt, Artificial Sequence
  Description of Artificial Sequence: Synthetic oligonucleotide
uccaagagaaugaaacuuc

SEQ ID NO: 3237585 - RNA, 19 nt, Artificial Sequence
  Description of Artificial Sequence: Synthetic oligonucleotide
cucuucugguaccagaagg

SEQ ID NO: 3237586 - RNA, 19 nt, Artificial Sequence
  Description of Artificial Sequence: Synthetic oligonucleotide
agccugguaguacagcagc

SEQ ID NO: 3237587 - RNA, 19 nt, Artificial Sequence
  Description of Artificial Sequence: Synthetic oligonucleotide
uuaggauuacaccuacagu

SEQ ID NO: 3237588 - RNA, 19 nt, Artificial Sequence
  Description of Artificial Sequence: Synthetic oligonucleotide
ugauaaguucaccaugaaa

SEQ ID NO: 3237589 - RNA, 19 nt, Artificial Sequence
  Description of Artificial Sequence: Synthetic oligonucleotide
acccacacuugauaaaggg

SEQ ID NO: 3237590 - RNA, 19 nt, Artificial Sequence
  Description of Artificial Sequence: Synthetic oligonucleotide
guuaacugacaguggaucc

SEQ ID NO: 3237591 - RNA, 19 nt, Artificial Sequence
  Description of Artificial Sequence: Synthetic oligonucleotide
ucacaucguaauaagaauu

SEQ ID NO: 3237592 - RNA, 19 nt, Artificial Sequence
  Description of Artificial Sequence: Synthetic oligonucleotide
ccaaugauccaauaaauug

SEQ ID NO: 3237593 - RNA, 19 nt, Artificial Sequence
  Description of Artificial Sequence: Synthetic oligonucleotide
accaugaaagcgaugacuc

SEQ ID NO: 3237594 - RNA, 19 nt, Artificial Sequence
  Description of Artificial Sequence: Synthetic oligonucleotide
auccaauaaauugauaagu

SEQ ID NO: 3237595 - RNA, 19 nt, Artificial Sequence
  Description of Artificial Sequence: Synthetic oligonucleotide
gauggcuaugaucaccggc

SEQ ID NO: 3237596 - RNA, 19 nt, Artificial Sequence
  Description of Artificial Sequence: Synthetic oligonucleotide
auggcuaugaucaccggcg

SEQ ID NO: 3237597 - RNA, 19 nt, Artificial Sequence
  Description of Artificial Sequence: Synthetic oligonucleotide
aaacuucacaucguaauaa

SEQ ID NO: 3237598 - RNA, 19 nt, Artificial Sequence
  Description of Artificial Sequence: Synthetic oligonucleotide
aaugauccaauaaauugau

SEQ ID NO: 3237599 - RNA, 19 nt, Artificial Sequence
  Description of Artificial Sequence: Synthetic oligonucleotide
agagcggcagacuuuuggg

SEQ ID NO: 3237600 - RNA, 19 nt, Artificial Sequence
  Description of Artificial Sequence: Synthetic oligonucleotide
guauccuccgcacagggug

SEQ ID NO: 3237601 - RNA, 19 nt, Artificial Sequence
  Description of Artificial Sequence: Synthetic oligonucleotide
gaacagugugcauaagaug

SEQ ID NO: 3237602 - RNA, 19 nt, Artificial Sequence
  Description of Artificial Sequence: Synthetic oligonucleotide
gagagcggcagacuuuugg

SEQ ID NO: 3237603 - RNA, 19 nt, Artificial Sequence
  Description of Artificial Sequence: Synthetic oligonucleotide
auugauaaguucaccauga

SEQ ID NO: 3237604 - RNA, 19 nt, Artificial Sequence
  Description of Artificial Sequence: Synthetic oligonucleotide
gugaagaccacaaagccac

SEQ ID NO: 3237605 - RNA, 19 nt, Artificial Sequence
  Description of Artificial Sequence: Synthetic oligonucleotide
ugugcauaagaugccaagc

SEQ ID NO: 3237606 - RNA, 19 nt, Artificial Sequence
  Description of Artificial Sequence: Synthetic oligonucleotide
agcaguaccauaagcaaag

SEQ ID NO: 3237607 - RNA, 19 nt, Artificial Sequence
  Description of Artificial Sequence: Synthetic oligonucleotide
ugauaaagggauguaacua

SEQ ID NO: 3237608 - RNA, 19 nt, Artificial Sequence
  Description of Artificial Sequence: Synthetic oligonucleotide
aaguucaccaugaaagcga

SEQ ID NO: 3237609 - RNA, 19 nt, Artificial Sequence
  Description of Artificial Sequence: Synthetic oligonucleotide
cagaaacugaccaggggcc

SEQ ID NO: 3237610 - RNA, 19 nt, Artificial Sequence
  Description of Artificial Sequence: Synthetic oligonucleotide
gaaagcgaugacuccagac

SEQ ID NO: 3237611 - RNA, 19 nt, Artificial Sequence
  Description of Artificial Sequence: Synthetic oligonucleotide
ccuuaaacagaauguaucc

SEQ ID NO: 3237612 - RNA, 19 nt, Artificial Sequence
  Description of Artificial Sequence: Synthetic oligonucleotide
uucacuuguaguucaugcu

SEQ ID NO: 3237613 - RNA, 19 nt, Artificial Sequence
  Description of Artificial Sequence: Synthetic oligonucleotide
gacagcaguaccauaagca

SEQ ID NO: 3237614 - RNA, 19 nt, Artificial Sequence
  Description of Artificial Sequence: Synthetic oligonucleotide
acaccauuccaagagaaug

SEQ ID NO: 3237615 - RNA, 19 nt, Artificial Sequence
  Description of Artificial Sequence: Synthetic oligonucleotide
acagaauguauccuccgca

SEQ ID NO: 3237616 - RNA, 19 nt, Artificial Sequence
  Description of Artificial Sequence: Synthetic oligonucleotide
ucagcgugagcuguauucg

SEQ ID NO: 3237617 - RNA, 19 nt, Artificial Sequence
  Description of Artificial Sequence: Synthetic oligonucleotide
aauagaaacagcuccaugc

SEQ ID NO: 3237618 - RNA, 19 nt, Artificial Sequence
  Description of Artificial Sequence: Synthetic oligonucleotide
uuaaaauucuguaaaaugg

SEQ ID NO: 3237619 - RNA, 19 nt, Artificial Sequence
  Description of Artificial Sequence: Synthetic oligonucleotide
aaaguuuccauucuuaucu

SEQ ID NO: 3237620 - RNA, 19 nt, Artificial Sequence
  Description of Artificial Sequence: Synthetic oligonucleotide
aauuuaaugucacagguca

SEQ ID NO: 3237621 - RNA, 19 nt, Artificial Sequence
  Description of Artificial Sequence: Synthetic oligonucleotide
aagggcaugaaguagucac

SEQ ID NO: 3237622 - RNA, 19 nt, Artificial Sequence
  Description of Artificial Sequence: Synthetic oligonucleotide
uccauucuuaucuagaaag

SEQ ID NO: 3237623 - RNA, 19 nt, Artificial Sequence
  Description of Artificial Sequence: Synthetic oligonucleotide
aagcaaauccauuuagcac

SEQ ID NO: 3237624 - RNA, 19 nt, Artificial Sequence
  Description of Artificial Sequence: Synthetic oligonucleotide
cuuaaaauucuguaaaaug

SEQ ID NO: 3237625 - RNA, 19 nt, Artificial Sequence
  Description of Artificial Sequence: Synthetic oligonucleotide
ugaauuuaaugucacaggu

SEQ ID NO: 3237626 - RNA, 19 nt, Artificial Sequence
  Description of Artificial Sequence: Synthetic oligonucleotide
aaauucuguaaaauggugg

SEQ ID NO: 3237627 - RNA, 19 nt, Artificial Sequence
  Description of Artificial Sequence: Synthetic oligonucleotide
aauucuguaaaaugguggu

SEQ ID NO: 3237628 - RNA, 19 nt, Artificial Sequence
  Description of Artificial Sequence: Synthetic oligonucleotide
aaugaagcagagcuggaag

SEQ ID NO: 3237629 - RNA, 19 nt, Artificial Sequence
  Description of Artificial Sequence: Synthetic oligonucleotide
agagauuucagcuuaaaau

SEQ ID NO: 3237630 - RNA, 19 nt, Artificial Sequence
  Description of Artificial Sequence: Synthetic oligonucleotide
auguuauuacuguuguucc

SEQ ID NO: 3237631 - RNA, 19 nt, Artificial Sequence
  Description of Artificial Sequence: Synthetic oligonucleotide
aaauccauuuagcacuggg

SEQ ID NO: 3237632 - RNA, 19 nt, Artificial Sequence
  Description of Artificial Sequence: Synthetic oligonucleotide
uaaaauucuguaaaauggu

SEQ ID NO: 3237633 - RNA, 19 nt, Artificial Sequence
  Description of Artificial Sequence: Synthetic oligonucleotide
agcaaauccauuuagcacu

SEQ ID NO: 3237634 - RNA, 19 nt, Artificial Sequence
  Description of Artificial Sequence: Synthetic oligonucleotide
uucuuaucuagaaaguggc

SEQ ID NO: 3237635 - RNA, 19 nt, Artificial Sequence
  Description of Artificial Sequence: Synthetic oligonucleotide
augacagugauguuauuac

SEQ ID NO: 3237636 - RNA, 19 nt, Artificial Sequence
  Description of Artificial Sequence: Synthetic oligonucleotide
ugucaugcaguacugauga

SEQ ID NO: 3237637 - RNA, 19 nt, Artificial Sequence
  Description of Artificial Sequence: Synthetic oligonucleotide
uguaucuauguccuuuggg

SEQ ID NO: 3237638 - RNA, 19 nt, Artificial Sequence
  Description of Artificial Sequence: Synthetic oligonucleotide
uuuccuguugaaaagggca

SEQ ID NO: 3237639 - RNA, 19 nt, Artificial Sequence
  Description of Artificial Sequence: Synthetic oligonucleotide
ugaaccagagauuucagcu

SEQ ID NO: 3237640 - RNA, 19 nt, Artificial Sequence
  Description of Artificial Sequence: Synthetic oligonucleotide
aaugucacaggucacugca

SEQ ID NO: 3237641 - RNA, 19 nt, Artificial Sequence
  Description of Artificial Sequence: Synthetic oligonucleotide
auuacuguuguucccgugg

SEQ ID NO: 3237642 - RNA, 19 nt, Artificial Sequence
  Description of Artificial Sequence: Synthetic oligonucleotide
uguugaaaagggcaugaag

SEQ ID NO: 3237643 - RNA, 19 nt, Artificial Sequence
  Description of Artificial Sequence: Synthetic oligonucleotide
auagaaacagcuccaugcg

SEQ ID NO: 3237644 - RNA, 19 nt, Artificial Sequence
  Description of Artificial Sequence: Synthetic oligonucleotide
uguaaaaugguggucagga

SEQ ID NO: 3237645 - RNA, 19 nt, Artificial Sequence
  Description of Artificial Sequence: Synthetic oligonucleotide
uuucuuaaaguuuccauuc

SEQ ID NO: 3237646 - RNA, 19 nt, Artificial Sequence
  Description of Artificial Sequence: Synthetic oligonucleotide
gauguuauuacuguuguuc

SEQ ID NO: 3237647 - RNA, 19 nt, Artificial Sequence
  Description of Artificial Sequence: Synthetic oligonucleotide
caggaauagaaacagcucc

SEQ ID NO: 3237648 - RNA, 19 nt, Artificial Sequence
  Description of Artificial Sequence: Synthetic oligonucleotide
ucuguuuuccuguugaaaa

SEQ ID NO: 3237649 - RNA, 19 nt, Artificial Sequence
  Description of Artificial Sequence: Synthetic oligonucleotide
uuaucuagaaaguggccag

SEQ ID NO: 3237650 - RNA, 19 nt, Artificial Sequence
  Description of Artificial Sequence: Synthetic oligonucleotide
cugaauuuaaugucacagg

SEQ ID NO: 3237651 - RNA, 19 nt, Artificial Sequence
  Description of Artificial Sequence: Synthetic oligonucleotide
ucaaauaccucuggguugg

SEQ ID NO: 3237652 - RNA, 19 nt, Artificial Sequence
  Description of Artificial Sequence: Synthetic oligonucleotide
aauaccucuggguugggga

SEQ ID NO: 3237653 - RNA, 19 nt, Artificial Sequence
  Description of Artificial Sequence: Synthetic oligonucleotide
gaagcaaauccauuuagca

SEQ ID NO: 3237654 - RNA, 19 nt, Artificial Sequence
  Description of Artificial Sequence: Synthetic oligonucleotide
uaaaaugguggucaggaau

SEQ ID NO: 3237655 - RNA, 19 nt, Artificial Sequence
  Description of Artificial Sequence: Synthetic oligonucleotide
ucacuuuucuuaaaguuuc

SEQ ID NO: 3237656 - RNA, 19 nt, Artificial Sequence
  Description of Artificial Sequence: Synthetic oligonucleotide
auucuuaucuagaaagugg

SEQ ID NO: 3237657 - RNA, 19 nt, Artificial Sequence
  Description of Artificial Sequence: Synthetic oligonucleotide
uuuucuuaaaguuuccauu

SEQ ID NO: 3237658 - RNA, 19 nt, Artificial Sequence
  Description of Artificial Sequence: Synthetic oligonucleotide
guuauuacuguuguucccg

SEQ ID NO: 3237659 - RNA, 19 nt, Artificial Sequence
  Description of Artificial Sequence: Synthetic oligonucleotide
agucccugaauuuaauguc

SEQ ID NO: 3237660 - RNA, 19 nt, Artificial Sequence
  Description of Artificial Sequence: Synthetic oligonucleotide
aaaauucuguaaaauggug

SEQ ID NO: 3237661 - RNA, 19 nt, Artificial Sequence
  Description of Artificial Sequence: Synthetic oligonucleotide
uguuuuccuguugaaaagg

SEQ ID NO: 3237662 - RNA, 19 nt, Artificial Sequence
  Description of Artificial Sequence: Synthetic oligonucleotide
ugggguuguaucuaugucc

SEQ ID NO: 3237663 - RNA, 19 nt, Artificial Sequence
  Description of Artificial Sequence: Synthetic oligonucleotide
aauccauuuagcacugggg

SEQ ID NO: 3237664 - RNA, 19 nt, Artificial Sequence
  Description of Artificial Sequence: Synthetic oligonucleotide
caugcaguacugaugacag

SEQ ID NO: 3237665 - RNA, 19 nt, Artificial Sequence
  Description of Artificial Sequence: Synthetic oligonucleotide
ucagcuuaaaauucuguaa

SEQ ID NO: 3237666 - RNA, 19 nt, Artificial Sequence
  Description of Artificial Sequence: Synthetic oligonucleotide
uagaaaguggccaggguca

SEQ ID NO: 3237667 - RNA, 19 nt, Artificial Sequence
  Description of Artificial Sequence: Synthetic oligonucleotide
uucuguaaaauggugguca

SEQ ID NO: 3237668 - RNA, 19 nt, Artificial Sequence
  Description of Artificial Sequence: Synthetic oligonucleotide
guagucacuuuucuuaaag

SEQ ID NO: 3237669 - RNA, 19 nt, Artificial Sequence
  Description of Artificial Sequence: Synthetic oligonucleotide
gagaagcaaauccauuuag

SEQ ID NO: 3237670 - RNA, 19 nt, Artificial Sequence
  Description of Artificial Sequence: Synthetic oligonucleotide
aggaaugaagcagagcugg

SEQ ID NO: 3237671 - RNA, 19 nt, Artificial Sequence
  Description of Artificial Sequence: Synthetic oligonucleotide
gaaguagucacuuuucuua

SEQ ID NO: 3237672 - RNA, 19 nt, Artificial Sequence
  Description of Artificial Sequence: Synthetic oligonucleotide
ugcaguacugaugacagug

SEQ ID NO: 3237673 - RNA, 19 nt, Artificial Sequence
  Description of Artificial Sequence: Synthetic oligonucleotide
aguggccagggucaaauac

SEQ ID NO: 3237674 - RNA, 19 nt, Artificial Sequence
  Description of Artificial Sequence: Synthetic oligonucleotide
agaagcaaauccauuuagc

SEQ ID NO: 3237675 - RNA, 19 nt, Artificial Sequence
  Description of Artificial Sequence: Synthetic oligonucleotide
augaagcagagcuggaagg

SEQ ID NO: 3237676 - RNA, 19 nt, Artificial Sequence
  Description of Artificial Sequence: Synthetic oligonucleotide
uagucccugaauuuaaugu

SEQ ID NO: 3237677 - RNA, 19 nt, Artificial Sequence
  Description of Artificial Sequence: Synthetic oligonucleotide
guggcagagaagcaaaucc

SEQ ID NO: 3237678 - RNA, 19 nt, Artificial Sequence
  Description of Artificial Sequence: Synthetic oligonucleotide
uuaaaguuuccauucuuau

SEQ ID NO: 3237679 - RNA, 19 nt, Artificial Sequence
  Description of Artificial Sequence: Synthetic oligonucleotide
auaucuguuuuccuguuga

SEQ ID NO: 3237680 - RNA, 19 nt, Artificial Sequence
  Description of Artificial Sequence: Synthetic oligonucleotide
uaucuauguccuuugggug

SEQ ID NO: 3237681 - RNA, 19 nt, Artificial Sequence
  Description of Artificial Sequence: Synthetic oligonucleotide
ugaaaagggcaugaaguag

SEQ ID NO: 3237682 - RNA, 19 nt, Artificial Sequence
  Description of Artificial Sequence: Synthetic oligonucleotide
uuacuguuguucccguggg

SEQ ID NO: 3237683 - RNA, 19 nt, Artificial Sequence
  Description of Artificial Sequence: Synthetic oligonucleotide
uuuuccuguugaaaagggc

SEQ ID NO: 3237684 - RNA, 19 nt, Artificial Sequence
  Description of Artificial Sequence: Synthetic oligonucleotide
auccauuuagcacuggggu

SEQ ID NO: 3237685 - RNA, 19 nt, Artificial Sequence
  Description of Artificial Sequence: Synthetic oligonucleotide
guggggaugaaguaguccc

SEQ ID NO: 3237686 - RNA, 19 nt, Artificial Sequence
  Description of Artificial Sequence: Synthetic oligonucleotide
uuuaaugucacaggucacu

SEQ ID NO: 3237687 - RNA, 19 nt, Artificial Sequence
  Description of Artificial Sequence: Synthetic oligonucleotide
ucuuaucuagaaaguggcc

SEQ ID NO: 3237688 - RNA, 19 nt, Artificial Sequence
  Description of Artificial Sequence: Synthetic oligonucleotide
uguuauuacuguuguuccc

SEQ ID NO: 3237689 - RNA, 19 nt, Artificial Sequence
  Description of Artificial Sequence: Synthetic oligonucleotide
gacagugauguuauuacug

SEQ ID NO: 3237690 - RNA, 19 nt, Artificial Sequence
  Description of Artificial Sequence: Synthetic oligonucleotide
agauuucagcuuaaaauuc

SEQ ID NO: 3237691 - RNA, 19 nt, Artificial Sequence
  Description of Artificial Sequence: Synthetic oligonucleotide
uggucaggaauagaaacag

SEQ ID NO: 3237692 - RNA, 19 nt, Artificial Sequence
  Description of Artificial Sequence: Synthetic oligonucleotide
uucagcuuaaaauucugua

SEQ ID NO: 3237693 - RNA, 19 nt, Artificial Sequence
  Description of Artificial Sequence: Synthetic oligonucleotide
uuuccauucuuaucuagaa

SEQ ID NO: 3237694 - RNA, 19 nt, Artificial Sequence
  Description of Artificial Sequence: Synthetic oligonucleotide
uaaaguuuccauucuuauc

SEQ ID NO: 3237695 - RNA, 19 nt, Artificial Sequence
  Description of Artificial Sequence: Synthetic oligonucleotide
auuccuugcugucaugcag

SEQ ID NO: 3237696 - RNA, 19 nt, Artificial Sequence
  Description of Artificial Sequence: Synthetic oligonucleotide
cuagaaaguggccaggguc

SEQ ID NO: 3237697 - RNA, 19 nt, Artificial Sequence
  Description of Artificial Sequence: Synthetic oligonucleotide
acagugauguuauuacugu

SEQ ID NO: 3237698 - RNA, 19 nt, Artificial Sequence
  Description of Artificial Sequence: Synthetic oligonucleotide
ucaggaauagaaacagcuc

SEQ ID NO: 3237699 - RNA, 19 nt, Artificial Sequence
  Description of Artificial Sequence: Synthetic oligonucleotide
ucuguaaaaugguggucag

SEQ ID NO: 3237700 - RNA, 19 nt, Artificial Sequence
  Description of Artificial Sequence: Synthetic oligonucleotide
uuucagcuuaaaauucugu

SEQ ID NO: 3237701 - RNA, 19 nt, Artificial Sequence
  Description of Artificial Sequence: Synthetic oligonucleotide
uuguaucuauguccuuugg

SEQ ID NO: 3237702 - RNA, 19 nt, Artificial Sequence
  Description of Artificial Sequence: Synthetic oligonucleotide
agucacuuuucuuaaaguu

SEQ ID NO: 3237703 - RNA, 19 nt, Artificial Sequence
  Description of Artificial Sequence: Synthetic oligonucleotide
agugauguuauuacuguug

SEQ ID NO: 3237704 - RNA, 19 nt, Artificial Sequence
  Description of Artificial Sequence: Synthetic oligonucleotide
uugaaaagggcaugaagua

SEQ ID NO: 3237705 - RNA, 19 nt, Artificial Sequence
  Description of Artificial Sequence: Synthetic oligonucleotide
uucuuaaaguuuccauucu

SEQ ID NO: 3237706 - RNA, 19 nt, Artificial Sequence
  Description of Artificial Sequence: Synthetic oligonucleotide
gagauuucagcuuaaaauu

SEQ ID NO: 3237707 - RNA, 19 nt, Artificial Sequence
  Description of Artificial Sequence: Synthetic oligonucleotide
aaguagucacuuuucuuaa

SEQ ID NO: 3237708 - RNA, 19 nt, Artificial Sequence
  Description of Artificial Sequence: Synthetic oligonucleotide
ucaugcaguacugaugaca

SEQ ID NO: 3237709 - RNA, 19 nt, Artificial Sequence
  Description of Artificial Sequence: Synthetic oligonucleotide
uguccuuugggugaaccag

SEQ ID NO: 3237710 - RNA, 19 nt, Artificial Sequence
  Description of Artificial Sequence: Synthetic oligonucleotide
gaauagaaacagcuccaug

SEQ ID NO: 3237711 - RNA, 19 nt, Artificial Sequence
  Description of Artificial Sequence: Synthetic oligonucleotide
ugucacaggucacugcaug

SEQ ID NO: 3237712 - RNA, 19 nt, Artificial Sequence
  Description of Artificial Sequence: Synthetic oligonucleotide
uggcagagaagcaaaucca

SEQ ID NO: 3237713 - RNA, 19 nt, Artificial Sequence
  Description of Artificial Sequence: Synthetic oligonucleotide
augaaguagucccugaauu

SEQ ID NO: 3237714 - RNA, 19 nt, Artificial Sequence
  Description of Artificial Sequence: Synthetic oligonucleotide
agagcuggaaggcgggugg

SEQ ID NO: 3237715 - RNA, 19 nt, Artificial Sequence
  Description of Artificial Sequence: Synthetic oligonucleotide
gaauuccuugcugucaugc

SEQ ID NO: 3237716 - RNA, 19 nt, Artificial Sequence
  Description of Artificial Sequence: Synthetic oligonucleotide
uuaaugucacaggucacug

SEQ ID NO: 3237717 - RNA, 19 nt, Artificial Sequence
  Description of Artificial Sequence: Synthetic oligonucleotide
cacaugauaaacaucaucg

SEQ ID NO: 3237718 - RNA, 19 nt, Artificial Sequence
  Description of Artificial Sequence: Synthetic oligonucleotide
aacauuuugaggaaguagc

SEQ ID NO: 3237719 - RNA, 19 nt, Artificial Sequence
  Description of Artificial Sequence: Synthetic oligonucleotide
acugacaucugacauaugc

SEQ ID NO: 3237720 - RNA, 19 nt, Artificial Sequence
  Description of Artificial Sequence: Synthetic oligonucleotide
auaucagggagccaaaugc

SEQ ID NO: 3237721 - RNA, 19 nt, Artificial Sequence
  Description of Artificial Sequence: Synthetic oligonucleotide
aaaaugcggaaaucaagcc

SEQ ID NO: 3237722 - RNA, 19 nt, Artificial Sequence
  Description of Artificial Sequence: Synthetic oligonucleotide
uugaaaauugcgauagugg

SEQ ID NO: 3237723 - RNA, 19 nt, Artificial Sequence
  Description of Artificial Sequence: Synthetic oligonucleotide
aacaccagcauguugagca

SEQ ID NO: 3237724 - RNA, 19 nt, Artificial Sequence
  Description of Artificial Sequence: Synthetic oligonucleotide
gauuuugugaucucggaag

SEQ ID NO: 3237725 - RNA, 19 nt, Artificial Sequence
  Description of Artificial Sequence: Synthetic oligonucleotide
ucaaccgcagauaucaggg

SEQ ID NO: 3237726 - RNA, 19 nt, Artificial Sequence
  Description of Artificial Sequence: Synthetic oligonucleotide
ugaaaauugcgauaguggc

SEQ ID NO: 3237727 - RNA, 19 nt, Artificial Sequence
  Description of Artificial Sequence: Synthetic oligonucleotide
agcacaaugacaauggugg

SEQ ID NO: 3237728 - RNA, 19 nt, Artificial Sequence
  Description of Artificial Sequence: Synthetic oligonucleotide
gaugguaaagagcacaaug

SEQ ID NO: 3237729 - RNA, 19 nt, Artificial Sequence
  Description of Artificial Sequence: Synthetic oligonucleotide
cucaauguccacaaggcgg

SEQ ID NO: 3237730 - RNA, 19 nt, Artificial Sequence
  Description of Artificial Sequence: Synthetic oligonucleotide
gaaaaugcggaaaucaagc

SEQ ID NO: 3237731 - RNA, 19 nt, Artificial Sequence
  Description of Artificial Sequence: Synthetic oligonucleotide
gacaauggagacugcaucg

SEQ ID NO: 3237732 - RNA, 19 nt, Artificial Sequence
  Description of Artificial Sequence: Synthetic oligonucleotide
agguacuuggcaucuagcc

SEQ ID NO: 3237733 - RNA, 19 nt, Artificial Sequence
  Description of Artificial Sequence: Synthetic oligonucleotide
aaugcggaaaucaagccag

SEQ ID NO: 3237734 - RNA, 19 nt, Artificial Sequence
  Description of Artificial Sequence: Synthetic oligonucleotide
aaguucagcagguaggaca

SEQ ID NO: 3237735 - RNA, 19 nt, Artificial Sequence
  Description of Artificial Sequence: Synthetic oligonucleotide
aaaugcggaaaucaagcca

SEQ ID NO: 3237736 - RNA, 19 nt, Artificial Sequence
  Description of Artificial Sequence: Synthetic oligonucleotide
uccacaaggcggaugaggg

SEQ ID NO: 3237737 - RNA, 19 nt, Artificial Sequence
  Description of Artificial Sequence: Synthetic oligonucleotide
uaugcuuucuuguuagacc

SEQ ID NO: 3237738 - RNA, 19 nt, Artificial Sequence
  Description of Artificial Sequence: Synthetic oligonucleotide
uaggacagagggaaaaugc

SEQ ID NO: 3237739 - RNA, 19 nt, Artificial Sequence
  Description of Artificial Sequence: Synthetic oligonucleotide
uagaccuucagccguauug

SEQ ID NO: 3237740 - RNA, 19 nt, Artificial Sequence
  Description of Artificial Sequence: Synthetic oligonucleotide
aagaaguucagcagguagg

SEQ ID NO: 3237741 - RNA, 19 nt, Artificial Sequence
  Description of Artificial Sequence: Synthetic oligonucleotide
guuaggacaauggagacug

SEQ ID NO: 3237742 - RNA, 19 nt, Artificial Sequence
  Description of Artificial Sequence: Synthetic oligonucleotide
acauaugcuuucuuguuag

SEQ ID NO: 3237743 - RNA, 19 nt, Artificial Sequence
  Description of Artificial Sequence: Synthetic oligonucleotide
agcaagaugguaaagagca

SEQ ID NO: 3237744 - RNA, 19 nt, Artificial Sequence
  Description of Artificial Sequence: Synthetic oligonucleotide
ugcgauaguggcuacuggg

SEQ ID NO: 3237745 - RNA, 19 nt, Artificial Sequence
  Description of Artificial Sequence: Synthetic oligonucleotide
ugcagugcauugaaaauug

SEQ ID NO: 3237746 - RNA, 19 nt, Artificial Sequence
  Description of Artificial Sequence: Synthetic oligonucleotide
augauaaacaucaucguug

SEQ ID NO: 3237747 - RNA, 19 nt, Artificial Sequence
  Description of Artificial Sequence: Synthetic oligonucleotide
gacugcaucguugagaaug

SEQ ID NO: 3237748 - RNA, 19 nt, Artificial Sequence
  Description of Artificial Sequence: Synthetic oligonucleotide
uauugguuaggacaaugga

SEQ ID NO: 3237749 - RNA, 19 nt, Artificial Sequence
  Description of Artificial Sequence: Synthetic oligonucleotide
agauagauguucugacucg

SEQ ID NO: 3237750 - RNA, 19 nt, Artificial Sequence
  Description of Artificial Sequence: Synthetic oligonucleotide
acguuugccacccacugac

SEQ ID NO: 3237751 - RNA, 19 nt, Artificial Sequence
  Description of Artificial Sequence: Synthetic oligonucleotide
uugaggaaguagccgaggg

SEQ ID NO: 3237752 - RNA, 19 nt, Artificial Sequence
  Description of Artificial Sequence: Synthetic oligonucleotide
auugaaaauugcgauagug

SEQ ID NO: 3237753 - RNA, 19 nt, Artificial Sequence
  Description of Artificial Sequence: Synthetic oligonucleotide
cuuguuagaccuucagccg

SEQ ID NO: 3237754 - RNA, 19 nt, Artificial Sequence
  Description of Artificial Sequence: Synthetic oligonucleotide
aaaauugcgauaguggcua

SEQ ID NO: 3237755 - RNA, 19 nt, Artificial Sequence
  Description of Artificial Sequence: Synthetic oligonucleotide
aaccgcagauaucagggag

SEQ ID NO: 3237756 - RNA, 19 nt, Artificial Sequence
  Description of Artificial Sequence: Synthetic oligonucleotide
uucuuguuagaccuucagc

SEQ ID NO: 3237757 - RNA, 19 nt, Artificial Sequence
  Description of Artificial Sequence: Synthetic oligonucleotide
uuucuuguuagaccuucag

SEQ ID NO: 3237758 - RNA, 19 nt, Artificial Sequence
  Description of Artificial Sequence: Synthetic oligonucleotide
acaucugacauaugcuuuc

SEQ ID NO: 3237759 - RNA, 19 nt, Artificial Sequence
  Description of Artificial Sequence: Synthetic oligonucleotide
guaaagagcacaaugacaa

SEQ ID NO: 3237760 - RNA, 19 nt, Artificial Sequence
  Description of Artificial Sequence: Synthetic oligonucleotide
ugaucucggaagaaguuca

SEQ ID NO: 3237761 - RNA, 19 nt, Artificial Sequence
  Description of Artificial Sequence: Synthetic oligonucleotide
ucaauguccacaaggcgga

SEQ ID NO: 3237762 - RNA, 19 nt, Artificial Sequence
  Description of Artificial Sequence: Synthetic oligonucleotide
aggggcaugguacugccgc

SEQ ID NO: 3237763 - RNA, 19 nt, Artificial Sequence
  Description of Artificial Sequence: Synthetic oligonucleotide
uugacguccuucuugcucc

SEQ ID NO: 3237764 - RNA, 19 nt, Artificial Sequence
  Description of Artificial Sequence: Synthetic oligonucleotide
agcgaagaacauuuugagg

SEQ ID NO: 3237765 - RNA, 19 nt, Artificial Sequence
  Description of Artificial Sequence: Synthetic oligonucleotide
uuugugaucucggaagaag

SEQ ID NO: 3237766 - RNA, 19 nt, Artificial Sequence
  Description of Artificial Sequence: Synthetic oligonucleotide
gagcgaagaacauuuugag

SEQ ID NO: 3237767 - RNA, 19 nt, Artificial Sequence
  Description of Artificial Sequence: Synthetic oligonucleotide
auugguuaggacaauggag

SEQ ID NO: 3237768 - RNA, 19 nt, Artificial Sequence
  Description of Artificial Sequence: Synthetic oligonucleotide
uucucagucuugcugaggu

SEQ ID NO: 3237769 - RNA, 19 nt, Artificial Sequence
  Description of Artificial Sequence: Synthetic oligonucleotide
gaacauuuugaggaaguag

SEQ ID NO: 3237770 - RNA, 19 nt, Artificial Sequence
  Description of Artificial Sequence: Synthetic oligonucleotide
aagcucagugcauagggga

SEQ ID NO: 3237771 - RNA, 19 nt, Artificial Sequence
  Description of Artificial Sequence: Synthetic oligonucleotide
gauaucagggagccaaaug

SEQ ID NO: 3237772 - RNA, 19 nt, Artificial Sequence
  Description of Artificial Sequence: Synthetic oligonucleotide
augcuuucuuguuagaccu

SEQ ID NO: 3237773 - RNA, 19 nt, Artificial Sequence
  Description of Artificial Sequence: Synthetic oligonucleotide
acauuuugaggaaguagcc

SEQ ID NO: 3237774 - RNA, 19 nt, Artificial Sequence
  Description of Artificial Sequence: Synthetic oligonucleotide
gauggcauugcccaucuuc

SEQ ID NO: 3237775 - RNA, 19 nt, Artificial Sequence
  Description of Artificial Sequence: Synthetic oligonucleotide
uuuugaggaaguagccgag

SEQ ID NO: 3237776 - RNA, 19 nt, Artificial Sequence
  Description of Artificial Sequence: Synthetic oligonucleotide
agugcauaggggauggccc

SEQ ID NO: 3237777 - RNA, 19 nt, Artificial Sequence
  Description of Artificial Sequence: Synthetic oligonucleotide
agccguauugguuaggaca

SEQ ID NO: 3237778 - RNA, 19 nt, Artificial Sequence
  Description of Artificial Sequence: Synthetic oligonucleotide
caugaagccuuugaggucc

SEQ ID NO: 3237779 - RNA, 19 nt, Artificial Sequence
  Description of Artificial Sequence: Synthetic oligonucleotide
gaggaaguagccgagggcc

SEQ ID NO: 3237780 - RNA, 19 nt, Artificial Sequence
  Description of Artificial Sequence: Synthetic oligonucleotide
uagauguucugacucgaug

SEQ ID NO: 3237781 - RNA, 19 nt, Artificial Sequence
  Description of Artificial Sequence: Synthetic oligonucleotide
guacuuggcaucuagccac

SEQ ID NO: 3237782 - RNA, 19 nt, Artificial Sequence
  Description of Artificial Sequence: Synthetic oligonucleotide
ugugagaacguuugccacc

SEQ ID NO: 3237783 - RNA, 19 nt, Artificial Sequence
  Description of Artificial Sequence: Synthetic oligonucleotide
gcgaagaacauuuugagga

SEQ ID NO: 3237784 - RNA, 19 nt, Artificial Sequence
  Description of Artificial Sequence: Synthetic oligonucleotide
ugauuuugugaucucggaa

SEQ ID NO: 3237785 - RNA, 19 nt, Artificial Sequence
  Description of Artificial Sequence: Synthetic oligonucleotide
uaucagggagccaaaugca

SEQ ID NO: 3237786 - RNA, 19 nt, Artificial Sequence
  Description of Artificial Sequence: Synthetic oligonucleotide
gacucgauggcauugccca

SEQ ID NO: 3237787 - RNA, 19 nt, Artificial Sequence
  Description of Artificial Sequence: Synthetic oligonucleotide
uuguuagaccuucagccgu

SEQ ID NO: 3237788 - RNA, 19 nt, Artificial Sequence
  Description of Artificial Sequence: Synthetic oligonucleotide
cucagauagauguucugac

SEQ ID NO: 3237789 - RNA, 19 nt, Artificial Sequence
  Description of Artificial Sequence: Synthetic oligonucleotide
uugugaucucggaagaagu

SEQ ID NO: 3237790 - RNA, 19 nt, Artificial Sequence
  Description of Artificial Sequence: Synthetic oligonucleotide
aucuucucagucuugcuga

SEQ ID NO: 3237791 - RNA, 19 nt, Artificial Sequence
  Description of Artificial Sequence: Synthetic oligonucleotide
aauggagacugcaucguug

SEQ ID NO: 3237792 - RNA, 19 nt, Artificial Sequence
  Description of Artificial Sequence: Synthetic oligonucleotide
auuuugugaucucggaaga

SEQ ID NO: 3237793 - RNA, 19 nt, Artificial Sequence
  Description of Artificial Sequence: Synthetic oligonucleotide
cagcauguugagcacaggg

SEQ ID NO: 3237794 - RNA, 19 nt, Artificial Sequence
  Description of Artificial Sequence: Synthetic oligonucleotide
ugccgcagagcgaagaaca

SEQ ID NO: 3237795 - RNA, 19 nt, Artificial Sequence
  Description of Artificial Sequence: Synthetic oligonucleotide
acaugauaaacaucaucgu

SEQ ID NO: 3237796 - RNA, 19 nt, Artificial Sequence
  Description of Artificial Sequence: Synthetic oligonucleotide
gagaaugcuuucuccaaac

SEQ ID NO: 3237797 - RNA, 19 nt, Artificial Sequence
  Description of Artificial Sequence: Synthetic oligonucleotide
aaauugcgauaguggcuac

SEQ ID NO: 3237798 - RNA, 19 nt, Artificial Sequence
  Description of Artificial Sequence: Synthetic oligonucleotide
gaagaacauuuugaggaag

SEQ ID NO: 3237799 - RNA, 19 nt, Artificial Sequence
  Description of Artificial Sequence: Synthetic oligonucleotide
gucaaccgcagauaucagg

SEQ ID NO: 3237800 - RNA, 19 nt, Artificial Sequence
  Description of Artificial Sequence: Synthetic oligonucleotide
gagacugcaucguugagaa

SEQ ID NO: 3237801 - RNA, 19 nt, Artificial Sequence
  Description of Artificial Sequence: Synthetic oligonucleotide
aaacaccagcauguugagc

SEQ ID NO: 3237802 - RNA, 19 nt, Artificial Sequence
  Description of Artificial Sequence: Synthetic oligonucleotide
ucagcagguaggacagagg

SEQ ID NO: 3237803 - RNA, 19 nt, Artificial Sequence
  Description of Artificial Sequence: Synthetic oligonucleotide
gauaguggcuacuggguca

SEQ ID NO: 3237804 - RNA, 19 nt, Artificial Sequence
  Description of Artificial Sequence: Synthetic oligonucleotide
gcauugaaaauugcgauag

SEQ ID NO: 3237805 - RNA, 19 nt, Artificial Sequence
  Description of Artificial Sequence: Synthetic oligonucleotide
gguacugccgcccagcagc

SEQ ID NO: 3237806 - RNA, 19 nt, Artificial Sequence
  Description of Artificial Sequence: Synthetic oligonucleotide
gaacguuugccacccacug

SEQ ID NO: 3237807 - RNA, 19 nt, Artificial Sequence
  Description of Artificial Sequence: Synthetic oligonucleotide
ugugaagaagggguucagg

SEQ ID NO: 3237808 - RNA, 19 nt, Artificial Sequence
  Description of Artificial Sequence: Synthetic oligonucleotide
acaugaagccuuugagguc

SEQ ID NO: 3237809 - RNA, 19 nt, Artificial Sequence
  Description of Artificial Sequence: Synthetic oligonucleotide
ugagaaugcuuucuccaaa

SEQ ID NO: 3237810 - RNA, 19 nt, Artificial Sequence
  Description of Artificial Sequence: Synthetic oligonucleotide
aaugacaauggugguggug

SEQ ID NO: 3237811 - RNA, 19 nt, Artificial Sequence
  Description of Artificial Sequence: Synthetic oligonucleotide
auguccacaaggcggauga

SEQ ID NO: 3237812 - RNA, 19 nt, Artificial Sequence
  Description of Artificial Sequence: Synthetic oligonucleotide
uucagcagguaggacagag

SEQ ID NO: 3237813 - RNA, 19 nt, Artificial Sequence
  Description of Artificial Sequence: Synthetic oligonucleotide
uguagugggccucguauuc

SEQ ID NO: 3237814 - RNA, 19 nt, Artificial Sequence
  Description of Artificial Sequence: Synthetic oligonucleotide
agagcgaagaacauuuuga

SEQ ID NO: 3237815 - RNA, 19 nt, Artificial Sequence
  Description of Artificial Sequence: Synthetic oligonucleotide
acguccuucuugcuccugc

SEQ ID NO: 3237816 - RNA, 19 nt, Artificial Sequence
  Description of Artificial Sequence: Synthetic oligonucleotide
agaccuucagccguauugg

SEQ ID NO: 3237817 - RNA, 19 nt, Artificial Sequence
  Description of Artificial Sequence: Synthetic oligonucleotide
auucggggcaacuucaugc

SEQ ID NO: 3237818 - RNA, 19 nt, Artificial Sequence
  Description of Artificial Sequence: Synthetic oligonucleotide
uguuacauuacagugaggu

SEQ ID NO: 3237819 - RNA, 19 nt, Artificial Sequence
  Description of Artificial Sequence: Synthetic oligonucleotide
caaaggaugagaaggaagc

SEQ ID NO: 3237820 - RNA, 19 nt, Artificial Sequence
  Description of Artificial Sequence: Synthetic oligonucleotide
gaaggcacaguccucaccg

SEQ ID NO: 3237821 - RNA, 19 nt, Artificial Sequence
  Description of Artificial Sequence: Synthetic oligonucleotide
ucaaaggaugagaaggaag

SEQ ID NO: 3237822 - RNA, 19 nt, Artificial Sequence
  Description of Artificial Sequence: Synthetic oligonucleotide
uuugccagugacaugguug

SEQ ID NO: 3237823 - RNA, 19 nt, Artificial Sequence
  Description of Artificial Sequence: Synthetic oligonucleotide
gugucaaaggaugagaagg

SEQ ID NO: 3237824 - RNA, 19 nt, Artificial Sequence
  Description of Artificial Sequence: Synthetic oligonucleotide
uacauuacagugagguccg

SEQ ID NO: 3237825 - RNA, 19 nt, Artificial Sequence
  Description of Artificial Sequence: Synthetic oligonucleotide
aaaggaugagaaggaagcc

SEQ ID NO: 3237826 - RNA, 19 nt, Artificial Sequence
  Description of Artificial Sequence: Synthetic oligonucleotide
cauguuacauuacagugag

SEQ ID NO: 3237827 - RNA, 19 nt, Artificial Sequence
  Description of Artificial Sequence: Synthetic oligonucleotide
ugaagcucccgcaaaggcg

SEQ ID NO: 3237828 - RNA, 19 nt, Artificial Sequence
  Description of Artificial Sequence: Synthetic oligonucleotide
gucaugaugggccacuacg

SEQ ID NO: 3237829 - RNA, 19 nt, Artificial Sequence
  Description of Artificial Sequence: Synthetic oligonucleotide
ggcaacuucaugcugaugc

SEQ ID NO: 3237830 - RNA, 19 nt, Artificial Sequence
  Description of Artificial Sequence: Synthetic oligonucleotide
cucuaggucaugaugggcc

SEQ ID NO: 3237831 - RNA, 19 nt, Artificial Sequence
  Description of Artificial Sequence: Synthetic oligonucleotide
aaggaagcccuggaggacc

SEQ ID NO: 3237832 - RNA, 19 nt, Artificial Sequence
  Description of Artificial Sequence: Synthetic oligonucleotide
aacaccagggcugcaaagg

SEQ ID NO: 3237833 - RNA, 19 nt, Artificial Sequence
  Description of Artificial Sequence: Synthetic oligonucleotide
gauuccucgugacagcugc

SEQ ID NO: 3237834 - RNA, 19 nt, Artificial Sequence
  Description of Artificial Sequence: Synthetic oligonucleotide
ugucaaaggaugagaagga

SEQ ID NO: 3237835 - RNA, 19 nt, Artificial Sequence
  Description of Artificial Sequence: Synthetic oligonucleotide
auuacagugagguccguga

SEQ ID NO: 3237836 - RNA, 19 nt, Artificial Sequence
  Description of Artificial Sequence: Synthetic oligonucleotide
ugcacuuggucucgcaccg

SEQ ID NO: 3237837 - RNA, 19 nt, Artificial Sequence
  Description of Artificial Sequence: Synthetic oligonucleotide
uuuggguagcuucugucug
